United States Patent Application Publication US 2018/0305689 A1 - sequence listing, part 60

SEQ ID NO: 873616 - RNA, 19 nt, Artificial Sequence
  Description of Artificial Sequence: Synthetic oligonucleotide
  Sense strand starting at position 3679 of SEQ ID NO: 588562
ugagauagcuuccuuuguu

SEQ ID NO: 873617 - RNA, 19 nt, Artificial Sequence
  Description of Artificial Sequence: Synthetic oligonucleotide
  Antisense strand to SEQ ID NO: 873616
aacaaaggaagcuaucuca

SEQ ID NO: 873618 - RNA, 19 nt, Artificial Sequence
  Description of Artificial Sequence: Synthetic oligonucleotide
  Sense strand starting at position 3680 of SEQ ID NO: 588562
gagauagcuuccuuuguug

SEQ ID NO: 873619 - RNA, 19 nt, Artificial Sequence
  Description of Artificial Sequence: Synthetic oligonucleotide
  Antisense strand to SEQ ID NO: 873618
caacaaaggaagcuaucuc

SEQ ID NO: 873620 - RNA, 19 nt, Artificial Sequence
  Description of Artificial Sequence: Synthetic oligonucleotide
  Sense strand starting at position 3692 of SEQ ID NO: 588562
uuuguugccaagugagaag

SEQ ID NO: 873621 - RNA, 19 nt, Artificial Sequence
  Description of Artificial Sequence: Synthetic oligonucleotide
  Antisense strand to SEQ ID NO: 873620
cuucucacuuggcaacaaa

SEQ ID NO: 873622 - RNA, 19 nt, Artificial Sequence
  Description of Artificial Sequence: Synthetic oligonucleotide
  Sense strand starting at position 3875 of SEQ ID NO: 588562
cagguauuugcuugugcuu

SEQ ID NO: 873623 - RNA, 19 nt, Artificial Sequence
  Description of Artificial Sequence: Synthetic oligonucleotide
  Antisense strand to SEQ ID NO: 873622
aagcacaagcaaauaccug

SEQ ID NO: 873624 - RNA, 19 nt, Artificial Sequence
  Description of Artificial Sequence: Synthetic oligonucleotide
  Sense strand starting at position 3890 of SEQ ID NO: 588562
gcuugguuucgggagagga

SEQ ID NO: 873625 - RNA, 19 nt, Artificial Sequence
  Description of Artificial Sequence: Synthetic oligonucleotide
  Antisense strand to SEQ ID NO: 873624
uccucucccgaaaccaagc

SEQ ID NO: 873626 - RNA, 19 nt, Artificial Sequence
  Description of Artificial Sequence: Synthetic oligonucleotide
  Sense strand starting at position 3923 of SEQ ID NO: 588562
guagcaacccucugggauu

SEQ ID NO: 873627 - RNA, 19 nt, Artificial Sequence
  Description of Artificial Sequence: Synthetic oligonucleotide
  Antisense strand to SEQ ID NO: 873626
aaucccagaggguugcuac

SEQ ID NO: 873628 - RNA, 19 nt, Artificial Sequence
  Description of Artificial Sequence: Synthetic oligonucleotide
  Sense strand starting at position 3965 of SEQ ID NO: 588562
guggugagccgagagugau

SEQ ID NO: 873629 - RNA, 19 nt, Artificial Sequence
  Description of Artificial Sequence: Synthetic oligonucleotide
  Antisense strand to SEQ ID NO: 873628
aucacucucggcucaccac

SEQ ID NO: 873630 - RNA, 19 nt, Artificial Sequence
  Description of Artificial Sequence: Synthetic oligonucleotide
  Sense strand starting at position 57 of SEQ ID NO: 588563
agcgucuuucuagugaguu

SEQ ID NO: 873631 - RNA, 19 nt, Artificial Sequence
  Description of Artificial Sequence: Synthetic oligonucleotide
  Antisense strand to SEQ ID NO: 873630
aacucacuagaaagacgcu

SEQ ID NO: 873632 - RNA, 19 nt, Artificial Sequence
  Description of Artificial Sequence: Synthetic oligonucleotide
  Sense strand starting at position 162 of SEQ ID NO: 588563
ugcgucuuucuagugaguu

SEQ ID NO: 873633 - RNA, 19 nt, Artificial Sequence
  Description of Artificial Sequence: Synthetic oligonucleotide
  Antisense strand to SEQ ID NO: 873632
aacucacuagaaagacgca

SEQ ID NO: 873634 - RNA, 19 nt, Artificial Sequence
  Description of Artificial Sequence: Synthetic oligonucleotide
  Sense strand starting at position 197 of SEQ ID NO: 588563
ugcgucuuucuauugaguu

SEQ ID NO: 873635 - RNA, 19 nt, Artificial Sequence
  Description of Artificial Sequence: Synthetic oligonucleotide
  Antisense strand to SEQ ID NO: 873634
aacucaauagaaagacgca

SEQ ID NO: 873636 - RNA, 19 nt, Artificial Sequence
  Description of Artificial Sequence: Synthetic oligonucleotide
  Sense strand starting at position 256 of SEQ ID NO: 588563
ggguaagggucagugucuu

SEQ ID NO: 873637 - RNA, 19 nt, Artificial Sequence
  Description of Artificial Sequence: Synthetic oligonucleotide
  Antisense strand to SEQ ID NO: 873636
aagacacugacccuuaccc

SEQ ID NO: 873638 - RNA, 19 nt, Artificial Sequence
  Description of Artificial Sequence: Synthetic oligonucleotide
  Sense strand starting at position 260 of SEQ ID NO: 588563
aagggucagugucuuucua

SEQ ID NO: 873639 - RNA, 19 nt, Artificial Sequence
  Description of Artificial Sequence: Synthetic oligonucleotide
  Antisense strand to SEQ ID NO: 873638
uagaaagacacugacccuu

SEQ ID NO: 873640 - RNA, 19 nt, Artificial Sequence
  Description of Artificial Sequence: Synthetic oligonucleotide
  Sense strand starting at position 267 of SEQ ID NO: 588563
agugucuuucuagcgaguu

SEQ ID NO: 873641 - RNA, 19 nt, Artificial Sequence
  Description of Artificial Sequence: Synthetic oligonucleotide
  Antisense strand to SEQ ID NO: 873640
aacucgcuagaaagacacu

SEQ ID NO: 873642 - RNA, 19 nt, Artificial Sequence
  Description of Artificial Sequence: Synthetic oligonucleotide
  Sense strand starting at position 388 of SEQ ID NO: 588563
uagugaauuccaugaggug

SEQ ID NO: 873643 - RNA, 19 nt, Artificial Sequence
  Description of Artificial Sequence: Synthetic oligonucleotide
  Antisense strand to SEQ ID NO: 873642
caccucauggaauucacua

SEQ ID NO: 873644 - RNA, 19 nt, Artificial Sequence
  Description of Artificial Sequence: Synthetic oligonucleotide
  Sense strand starting at position 471 of SEQ ID NO: 588563
uuguucuuuguugacuaaa

SEQ ID NO: 873645 - RNA, 19 nt, Artificial Sequence
  Description of Artificial Sequence: Synthetic oligonucleotide
  Antisense strand to SEQ ID NO: 873644
uuuagucaacaaagaacaa

SEQ ID NO: 873646 - RNA, 19 nt, Artificial Sequence
  Description of Artificial Sequence: Synthetic oligonucleotide
  Sense strand starting at position 473 of SEQ ID NO: 588563
guucuuuguugacuaaaca

SEQ ID NO: 873647 - RNA, 19 nt, Artificial Sequence
  Description of Artificial Sequence: Synthetic oligonucleotide
  Antisense strand to SEQ ID NO: 873646
uguuuagucaacaaagaac

SEQ ID NO: 873648 - RNA, 19 nt, Artificial Sequence
  Description of Artificial Sequence: Synthetic oligonucleotide
  Sense strand starting at position 565 of SEQ ID NO: 588563
uagugaggccuuggcauua

SEQ ID NO: 873649 - RNA, 19 nt, Artificial Sequence
  Description of Artificial Sequence: Synthetic oligonucleotide
  Antisense strand to SEQ ID NO: 873648
uaaugccaaggccucacua

SEQ ID NO: 873650 - RNA, 19 nt, Artificial Sequence
  Description of Artificial Sequence: Synthetic oligonucleotide
  Sense strand starting at position 588 of SEQ ID NO: 588563
uuuccuguucuagggaaac

SEQ ID NO: 873651 - RNA, 19 nt, Artificial Sequence
  Description of Artificial Sequence: Synthetic oligonucleotide
  Antisense strand to SEQ ID NO: 873650
guuucccuagaacaggaaa

SEQ ID NO: 873652 - RNA, 19 nt, Artificial Sequence
  Description of Artificial Sequence: Synthetic oligonucleotide
  Sense strand starting at position 633 of SEQ ID NO: 588563
caaggcuguucuuugagga

SEQ ID NO: 873653 - RNA, 19 nt, Artificial Sequence
  Description of Artificial Sequence: Synthetic oligonucleotide
  Antisense strand to SEQ ID NO: 873652
uccucaaagaacagccuug

SEQ ID NO: 873654 - RNA, 19 nt, Artificial Sequence
  Description of Artificial Sequence: Synthetic oligonucleotide
  Sense strand starting at position 638 of SEQ ID NO: 588563
cuguucuuugaggacucua

SEQ ID NO: 873655 - RNA, 19 nt, Artificial Sequence
  Description of Artificial Sequence: Synthetic oligonucleotide
  Antisense strand to SEQ ID NO: 873654
uagaguccucaaagaacag

SEQ ID NO: 873656 - RNA, 19 nt, Artificial Sequence
  Description of Artificial Sequence: Synthetic oligonucleotide
  Sense strand starting at position 659 of SEQ ID NO: 588563
agacucugccaaugaauca

SEQ ID NO: 873657 - RNA, 19 nt, Artificial Sequence
  Description of Artificial Sequence: Synthetic oligonucleotide
  Antisense strand to SEQ ID NO: 873656
ugauucauuggcagagucu

SEQ ID NO: 873658 - RNA, 19 nt, Artificial Sequence
  Description of Artificial Sequence: Synthetic oligonucleotide
  Sense strand starting at position 769 of SEQ ID NO: 588563
aagagaccucugcggugaa

SEQ ID NO: 873659 - RNA, 19 nt, Artificial Sequence
  Description of Artificial Sequence: Synthetic oligonucleotide
  Antisense strand to SEQ ID NO: 873658
uucaccgcagaggucucuu

SEQ ID NO: 873660 - RNA, 19 nt, Artificial Sequence
  Description of Artificial Sequence: Synthetic oligonucleotide
  Sense strand starting at position 772 of SEQ ID NO: 588563
agaccucugcggugaauac

SEQ ID NO: 873661 - RNA, 19 nt, Artificial Sequence
  Description of Artificial Sequence: Synthetic oligonucleotide
  Antisense strand to SEQ ID NO: 873660
guauucaccgcagaggucu

SEQ ID NO: 873662 - RNA, 19 nt, Artificial Sequence
  Description of Artificial Sequence: Synthetic oligonucleotide
  Sense strand starting at position 773 of SEQ ID NO: 588563
gaccucugcggugaauaca

SEQ ID NO: 873663 - RNA, 19 nt, Artificial Sequence
  Description of Artificial Sequence: Synthetic oligonucleotide
  Antisense strand to SEQ ID NO: 873662
uguauucaccgcagagguc

SEQ ID NO: 873664 - RNA, 19 nt, Artificial Sequence
  Description of Artificial Sequence: Synthetic oligonucleotide
  Sense strand starting at position 813 of SEQ ID NO: 588563
uuaccacccucguuauuau

SEQ ID NO: 873665 - RNA, 19 nt, Artificial Sequence
  Description of Artificial Sequence: Synthetic oligonucleotide
  Antisense strand to SEQ ID NO: 873664
auaauaacgagggugguaa

SEQ ID NO: 873666 - RNA, 19 nt, Artificial Sequence
  Description of Artificial Sequence: Synthetic oligonucleotide
  Sense strand starting at position 820 of SEQ ID NO: 588563
ccucguuauuauuccauuu

SEQ ID NO: 873667 - RNA, 19 nt, Artificial Sequence
  Description of Artificial Sequence: Synthetic oligonucleotide
  Antisense strand to SEQ ID NO: 873666
aaauggaauaauaacgagg

SEQ ID NO: 873668 - RNA, 19 nt, Artificial Sequence
  Description of Artificial Sequence: Synthetic oligonucleotide
  Sense strand starting at position 1142 of SEQ ID NO: 588563
gggagucucugucucagaa

SEQ ID NO: 873669 - RNA, 19 nt, Artificial Sequence
  Description of Artificial Sequence: Synthetic oligonucleotide
  Antisense strand to SEQ ID NO: 873668
uucugagacagagacuccc

SEQ ID NO: 873670 - RNA, 19 nt, Artificial Sequence
  Description of Artificial Sequence: Synthetic oligonucleotide
  Sense strand starting at position 1186 of SEQ ID NO: 588563
ugaagaaguagaugcuuau

SEQ ID NO: 873671 - RNA, 19 nt, Artificial Sequence
  Description of Artificial Sequence: Synthetic oligonucleotide
  Antisense strand to SEQ ID NO: 873670
auaagcaucuacuucuuca

SEQ ID NO: 873672 - RNA, 19 nt, Artificial Sequence
  Description of Artificial Sequence: Synthetic oligonucleotide
  Sense strand starting at position 1189 of SEQ ID NO: 588563
agaaguagaugcuuauuaa

SEQ ID NO: 873673 - RNA, 19 nt, Artificial Sequence
  Description of Artificial Sequence: Synthetic oligonucleotide
  Antisense strand to SEQ ID NO: 873672
uuaauaagcaucuacuucu

SEQ ID NO: 873674 - RNA, 19 nt, Artificial Sequence
  Description of Artificial Sequence: Synthetic oligonucleotide
  Sense strand starting at position 1262 of SEQ ID NO: 588563
aguccugaccuaugggauu

SEQ ID NO: 873675 - RNA, 19 nt, Artificial Sequence
  Description of Artificial Sequence: Synthetic oligonucleotide
  Antisense strand to SEQ ID NO: 873674
aaucccauaggucaggacu

SEQ ID NO: 873676 - RNA, 19 nt, Artificial Sequence
  Description of Artificial Sequence: Synthetic oligonucleotide
  Sense strand starting at position 1288 of SEQ ID NO: 588563
cugcuuggugcucacauaa

SEQ ID NO: 873677 - RNA, 19 nt, Artificial Sequence
  Description of Artificial Sequence: Synthetic oligonucleotide
  Antisense strand to SEQ ID NO: 873676
uuaugugagcaccaagcag

SEQ ID NO: 873678 - RNA, 19 nt, Artificial Sequence
  Description of Artificial Sequence: Synthetic oligonucleotide
  Sense strand starting at position 1322 of SEQ ID NO: 588563
guacacuguccugaacuca

SEQ ID NO: 873679 - RNA, 19 nt, Artificial Sequence
  Description of Artificial Sequence: Synthetic oligonucleotide
  Antisense strand to SEQ ID NO: 873678
ugaguucaggacaguguac

SEQ ID NO: 873680 - RNA, 19 nt, Artificial Sequence
  Description of Artificial Sequence: Synthetic oligonucleotide
  Sense strand starting at position 1371 of SEQ ID NO: 588563
ugcacagugucuguaaaua

SEQ ID NO: 873681 - RNA, 19 nt, Artificial Sequence
  Description of Artificial Sequence: Synthetic oligonucleotide
  Antisense strand to SEQ ID NO: 873680
uauuuacagacacugugca

SEQ ID NO: 873682 - RNA, 19 nt, Artificial Sequence
  Description of Artificial Sequence: Synthetic oligonucleotide
  Sense strand starting at position 1396 of SEQ ID NO: 588563
cuggauaagggauggcaau

SEQ ID NO: 873683 - RNA, 19 nt, Artificial Sequence
  Description of Artificial Sequence: Synthetic oligonucleotide
  Antisense strand to SEQ ID NO: 873682
auugccaucccuuauccag

SEQ ID NO: 873684 - RNA, 19 nt, Artificial Sequence
  Description of Artificial Sequence: Synthetic oligonucleotide
  Sense strand starting at position 1424 of SEQ ID NO: 588563
ggcaaucacccagggaagu

SEQ ID NO: 873685 - RNA, 19 nt, Artificial Sequence
  Description of Artificial Sequence: Synthetic oligonucleotide
  Antisense strand to SEQ ID NO: 873684
acuucccugggugauugcc

SEQ ID NO: 873686 - RNA, 19 nt, Artificial Sequence
  Description of Artificial Sequence: Synthetic oligonucleotide
  Sense strand starting at position 1653 of SEQ ID NO: 588563
augagcgcucaauaaaugu

SEQ ID NO: 873687 - RNA, 19 nt, Artificial Sequence
  Description of Artificial Sequence: Synthetic oligonucleotide
  Antisense strand to SEQ ID NO: 873686
acauuuauugagcgcucau

SEQ ID NO: 873688 - RNA, 19 nt, Artificial Sequence
  Description of Artificial Sequence: Synthetic oligonucleotide
  Sense strand starting at position 2827 of SEQ ID NO: 588563
uggcuuguccgcgcgauuu

SEQ ID NO: 873689 - RNA, 19 nt, Artificial Sequence
  Description of Artificial Sequence: Synthetic oligonucleotide
  Antisense strand to SEQ ID NO: 873688
aaaucgcgcggacaagcca

SEQ ID NO: 873690 - RNA, 19 nt, Artificial Sequence
  Description of Artificial Sequence: Synthetic oligonucleotide
  Sense strand starting at position 3341 of SEQ ID NO: 588563
gugcuguuucgagaagagg

SEQ ID NO: 873691 - RNA, 19 nt, Artificial Sequence
  Description of Artificial Sequence: Synthetic oligonucleotide
  Antisense strand to SEQ ID NO: 873690
ccucuucucgaaacagcac

SEQ ID NO: 873692 - RNA, 19 nt, Artificial Sequence
  Description of Artificial Sequence: Synthetic oligonucleotide
  Sense strand starting at position 3675 of SEQ ID NO: 588563
aggaaggucgugugugaaa

SEQ ID NO: 873693 - RNA, 19 nt, Artificial Sequence
  Description of Artificial Sequence: Synthetic oligonucleotide
  Antisense strand to SEQ ID NO: 873692
uuucacacacgaccuuccu

SEQ ID NO: 873694 - RNA, 19 nt, Artificial Sequence
  Description of Artificial Sequence: Synthetic oligonucleotide
  Sense strand starting at position 3697 of SEQ ID NO: 588563
cgaaccuggugccuuuaaa

SEQ ID NO: 873695 - RNA, 19 nt, Artificial Sequence
  Description of Artificial Sequence: Synthetic oligonucleotide
  Antisense strand to SEQ ID NO: 873694
uuuaaaggcaccagguucg

SEQ ID NO: 873696 - RNA, 19 nt, Artificial Sequence
  Description of Artificial Sequence: Synthetic oligonucleotide
  Sense strand starting at position 3717 of SEQ ID NO: 588563
uguaauuagcuccaugugu

SEQ ID NO: 873697 - RNA, 19 nt, Artificial Sequence
  Description of Artificial Sequence: Synthetic oligonucleotide
  Antisense strand to SEQ ID NO: 873696
acacauggagcuaauuaca

SEQ ID NO: 873698 - RNA, 19 nt, Artificial Sequence
  Description of Artificial Sequence: Synthetic oligonucleotide
  Sense strand starting at position 3785 of SEQ ID NO: 588563
ugaaguuaggacuggcuua

SEQ ID NO: 873699 - RNA, 19 nt, Artificial Sequence
  Description of Artificial Sequence: Synthetic oligonucleotide
  Antisense strand to SEQ ID NO: 873698
uaagccaguccuaacuuca

SEQ ID NO: 873700 - RNA, 19 nt, Artificial Sequence
  Description of Artificial Sequence: Synthetic oligonucleotide
  Sense strand starting at position 3826 of SEQ ID NO: 588563
uguauuuccucgucaggaa

SEQ ID NO: 873701 - RNA, 19 nt, Artificial Sequence
  Description of Artificial Sequence: Synthetic oligonucleotide
  Antisense strand to SEQ ID NO: 873700
uuccugacgaggaaauaca

SEQ ID NO: 873702 - RNA, 19 nt, Artificial Sequence
  Description of Artificial Sequence: Synthetic oligonucleotide
  Sense strand starting at position 3884 of SEQ ID NO: 588563
ugaagauccagugagcguu

SEQ ID NO: 873703 - RNA, 19 nt, Artificial Sequence
  Description of Artificial Sequence: Synthetic oligonucleotide
  Antisense strand to SEQ ID NO: 873702
aacgcucacuggaucuuca

SEQ ID NO: 873704 - RNA, 19 nt, Artificial Sequence
  Description of Artificial Sequence: Synthetic oligonucleotide
  Sense strand starting at position 3896 of SEQ ID NO: 588563
gagcguuuccagcuguguu

SEQ ID NO: 873705 - RNA, 19 nt, Artificial Sequence
  Description of Artificial Sequence: Synthetic oligonucleotide
  Antisense strand to SEQ ID NO: 873704
aacacagcuggaaacgcuc

SEQ ID NO: 873706 - RNA, 19 nt, Artificial Sequence
  Description of Artificial Sequence: Synthetic oligonucleotide
  Sense strand starting at position 3906 of SEQ ID NO: 588563
agcuguguuguagauguaa

SEQ ID NO: 873707 - RNA, 19 nt, Artificial Sequence
  Description of Artificial Sequence: Synthetic oligonucleotide
  Antisense strand to SEQ ID NO: 873706
uuacaucuacaacacagcu

SEQ ID NO: 873708 - RNA, 19 nt, Artificial Sequence
  Description of Artificial Sequence: Synthetic oligonucleotide
  Sense strand starting at position 3908 of SEQ ID NO: 588563
cuguguuguagauguaaac

SEQ ID NO: 873709 - RNA, 19 nt, Artificial Sequence
  Description of Artificial Sequence: Synthetic oligonucleotide
  Antisense strand to SEQ ID NO: 873708
guuuacaucuacaacacag

SEQ ID NO: 873710 - RNA, 19 nt, Artificial Sequence
  Description of Artificial Sequence: Synthetic oligonucleotide
  Sense strand starting at position 154 of SEQ ID NO: 588564
agugucuuagucuaaauac

SEQ ID NO: 873711 - RNA, 19 nt, Artificial Sequence
  Description of Artificial Sequence: Synthetic oligonucleotide
  Antisense strand to SEQ ID NO: 873710
guauuuagacuaagacacu

SEQ ID NO: 873712 - RNA, 19 nt, Artificial Sequence
  Description of Artificial Sequence: Synthetic oligonucleotide
  Sense strand starting at position 169 of SEQ ID NO: 588564
auacuuccagaaugaguau

SEQ ID NO: 873713 - RNA, 19 nt, Artificial Sequence
  Description of Artificial Sequence: Synthetic oligonucleotide
  Antisense strand to SEQ ID NO: 873712
auacucauucuggaaguau

SEQ ID NO: 873714 - RNA, 19 nt, Artificial Sequence
  Description of Artificial Sequence: Synthetic oligonucleotide
  Sense strand starting at position 176 of SEQ ID NO: 588564
cagaaugaguauuccuaga

SEQ ID NO: 873715 - RNA, 19 nt, Artificial Sequence
  Description of Artificial Sequence: Synthetic oligonucleotide
  Antisense strand to SEQ ID NO: 873714
ucuaggaauacucauucug

SEQ ID NO: 873716 - RNA, 19 nt, Artificial Sequence
  Description of Artificial Sequence: Synthetic oligonucleotide
  Sense strand starting at position 178 of SEQ ID NO: 588564
gaaugaguauuccuagacc

SEQ ID NO: 873717 - RNA, 19 nt, Artificial Sequence
  Description of Artificial Sequence: Synthetic oligonucleotide
  Antisense strand to SEQ ID NO: 873716
ggucuaggaauacucauuc

SEQ ID NO: 873718 - RNA, 19 nt, Artificial Sequence
  Description of Artificial Sequence: Synthetic oligonucleotide
  Sense strand starting at position 181 of SEQ ID NO: 588564
ugaguauuccuagaccuug

SEQ ID NO: 873719 - RNA, 19 nt, Artificial Sequence
  Description of Artificial Sequence: Synthetic oligonucleotide
  Antisense strand to SEQ ID NO: 873718
caaggucuaggaauacuca

SEQ ID NO: 873720 - RNA, 19 nt, Artificial Sequence
  Description of Artificial Sequence: Synthetic oligonucleotide
  Sense strand starting at position 186 of SEQ ID NO: 588564
auuccuagaccuuguacuu

SEQ ID NO: 873721 - RNA, 19 nt, Artificial Sequence
  Description of Artificial Sequence: Synthetic oligonucleotide
  Antisense strand to SEQ ID NO: 873720
aaguacaaggucuaggaau

SEQ ID NO: 873722 - RNA, 19 nt, Artificial Sequence
  Description of Artificial Sequence: Synthetic oligonucleotide
  Sense strand starting at position 285 of SEQ ID NO: 588564
gggagaugguccuuagcag

SEQ ID NO: 873723 - RNA, 19 nt, Artificial Sequence
  Description of Artificial Sequence: Synthetic oligonucleotide
  Antisense strand to SEQ ID NO: 873722
cugcuaaggaccaucuccc

SEQ ID NO: 873724 - RNA, 19 nt, Artificial Sequence
  Description of Artificial Sequence: Synthetic oligonucleotide
  Sense strand starting at position 286 of SEQ ID NO: 588564
ggagaugguccuuagcaga

SEQ ID NO: 873725 - RNA, 19 nt, Artificial Sequence
  Description of Artificial Sequence: Synthetic oligonucleotide
  Antisense strand to SEQ ID NO: 873724
ucugcuaaggaccaucucc

SEQ ID NO: 873726 - RNA, 19 nt, Artificial Sequence
  Description of Artificial Sequence: Synthetic oligonucleotide
  Sense strand starting at position 375 of SEQ ID NO: 588564
ggacgaguaggccauuguu

SEQ ID NO: 873727 - RNA, 19 nt, Artificial Sequence
  Description of Artificial Sequence: Synthetic oligonucleotide
  Antisense strand to SEQ ID NO: 873726
aacaauggccuacucgucc

SEQ ID NO: 873728 - RNA, 19 nt, Artificial Sequence
  Description of Artificial Sequence: Synthetic oligonucleotide
  Sense strand starting at position 408 of SEQ ID NO: 588564
uggagaaucugcucgacag

SEQ ID NO: 873729 - RNA, 19 nt, Artificial Sequence
  Description of Artificial Sequence: Synthetic oligonucleotide
  Antisense strand to SEQ ID NO: 873728
cugucgagcagauucucca

SEQ ID NO: 873730 - RNA, 19 nt, Artificial Sequence
  Description of Artificial Sequence: Synthetic oligonucleotide
  Sense strand starting at position 631 of SEQ ID NO: 588564
cuuagaugggugcaauaac

SEQ ID NO: 873731 - RNA, 19 nt, Artificial Sequence
  Description of Artificial Sequence: Synthetic oligonucleotide
  Antisense strand to SEQ ID NO: 873730
guuauugcacccaucuaag

SEQ ID NO: 873732 - RNA, 19 nt, Artificial Sequence
  Description of Artificial Sequence: Synthetic oligonucleotide
  Sense strand starting at position 720 of SEQ ID NO: 588564
ucgcguuguccgaaaguac

SEQ ID NO: 873733 - RNA, 19 nt, Artificial Sequence
  Description of Artificial Sequence: Synthetic oligonucleotide
  Antisense strand to SEQ ID NO: 873732
guacuuucggacaacgcga

SEQ ID NO: 873734 - RNA, 19 nt, Artificial Sequence
  Description of Artificial Sequence: Synthetic oligonucleotide
  Sense strand starting at position 721 of SEQ ID NO: 588564
cgcguuguccgaaaguaca

SEQ ID NO: 873735 - RNA, 19 nt, Artificial Sequence
  Description of Artificial Sequence: Synthetic oligonucleotide
  Antisense strand to SEQ ID NO: 873734
uguacuuucggacaacgcg

SEQ ID NO: 873736 - RNA, 19 nt, Artificial Sequence
  Description of Artificial Sequence: Synthetic oligonucleotide
  Sense strand starting at position 787 of SEQ ID NO: 588564
caaaguccgcgguaaacaa

SEQ ID NO: 873737 - RNA, 19 nt, Artificial Sequence
  Description of Artificial Sequence: Synthetic oligonucleotide
  Antisense strand to SEQ ID NO: 873736
uuguuuaccgcggacuuug

SEQ ID NO: 873738 - RNA, 19 nt, Artificial Sequence
  Description of Artificial Sequence: Synthetic oligonucleotide
  Sense strand starting at position 2055 of SEQ ID NO: 588564
acccuucuaccguauauca

SEQ ID NO: 873739 - RNA, 19 nt, Artificial Sequence
  Description of Artificial Sequence: Synthetic oligonucleotide
  Antisense strand to SEQ ID NO: 873738
ugauauacgguagaagggu

SEQ ID NO: 873740 - RNA, 19 nt, Artificial Sequence
  Description of Artificial Sequence: Synthetic oligonucleotide
  Sense strand starting at position 2057 of SEQ ID NO: 588564
ccuucuaccguauaucaca

SEQ ID NO: 873741 - RNA, 19 nt, Artificial Sequence
  Description of Artificial Sequence: Synthetic oligonucleotide
  Antisense strand to SEQ ID NO: 873740
ugugauauacgguagaagg

SEQ ID NO: 873742 - RNA, 19 nt, Artificial Sequence
  Description of Artificial Sequence: Synthetic oligonucleotide
  Sense strand starting at position 2139 of SEQ ID NO: 588564
uuuaguuaggaauaccagu

SEQ ID NO: 873743 - RNA, 19 nt, Artificial Sequence
  Description of Artificial Sequence: Synthetic oligonucleotide
  Antisense strand to SEQ ID NO: 873742
acugguauuccuaacuaaa

SEQ ID NO: 873744 - RNA, 19 nt, Artificial Sequence
  Description of Artificial Sequence: Synthetic oligonucleotide
  Sense strand starting at position 2236 of SEQ ID NO: 588564
uggugucuucguuucccau

SEQ ID NO: 873745 - RNA, 19 nt, Artificial Sequence
  Description of Artificial Sequence: Synthetic oligonucleotide
  Antisense strand to SEQ ID NO: 873744
augggaaacgaagacacca

SEQ ID NO: 873746 - RNA, 19 nt, Artificial Sequence
  Description of Artificial Sequence: Synthetic oligonucleotide
  Sense strand starting at position 2457 of SEQ ID NO: 588564
cugagauagcagugaaauu

SEQ ID NO: 873747 - RNA, 19 nt, Artificial Sequence
  Description of Artificial Sequence: Synthetic oligonucleotide
  Antisense strand to SEQ ID NO: 873746
aauuucacugcuaucucag

SEQ ID NO: 873748 - RNA, 19 nt, Artificial Sequence
  Description of Artificial Sequence: Synthetic oligonucleotide
  Sense strand starting at position 2627 of SEQ ID NO: 588564
uguauaguugaacaauugu

SEQ ID NO: 873749 - RNA, 19 nt, Artificial Sequence
  Description of Artificial Sequence: Synthetic oligonucleotide
  Antisense strand to SEQ ID NO: 873748
acaauuguucaacuauaca

SEQ ID NO: 873750 - RNA, 19 nt, Artificial Sequence
  Description of Artificial Sequence: Synthetic oligonucleotide
  Sense strand starting at position 2698 of SEQ ID NO: 588564
ccaaguaaguuauuaugag

SEQ ID NO: 873751 - RNA, 19 nt, Artificial Sequence
  Description of Artificial Sequence: Synthetic oligonucleotide
  Antisense strand to SEQ ID NO: 873750
cucauaauaacuuacuugg

SEQ ID NO: 873752 - RNA, 19 nt, Artificial Sequence
  Description of Artificial Sequence: Synthetic oligonucleotide
  Sense strand starting at position 2730 of SEQ ID NO: 588564
agaucugaaucagcauuga

SEQ ID NO: 873753 - RNA, 19 nt, Artificial Sequence
  Description of Artificial Sequence: Synthetic oligonucleotide
  Antisense strand to SEQ ID NO: 873752
ucaaugcugauucagaucu

SEQ ID NO: 873754 - RNA, 19 nt, Artificial Sequence
  Description of Artificial Sequence: Synthetic oligonucleotide
  Sense strand starting at position 2734 of SEQ ID NO: 588564
cugaaucagcauugaguuu

SEQ ID NO: 873755 - RNA, 19 nt, Artificial Sequence
  Description of Artificial Sequence: Synthetic oligonucleotide
  Antisense strand to SEQ ID NO: 873754
aaacucaaugcugauucag

SEQ ID NO: 873756 - RNA, 19 nt, Artificial Sequence
  Description of Artificial Sequence: Synthetic oligonucleotide
  Sense strand starting at position 2763 of SEQ ID NO: 588564
uguuuaaguagaggauacu

SEQ ID NO: 873757 - RNA, 19 nt, Artificial Sequence
  Description of Artificial Sequence: Synthetic oligonucleotide
  Antisense strand to SEQ ID NO: 873756
aguauccucuacuuaaaca

SEQ ID NO: 873758 - RNA, 19 nt, Artificial Sequence
  Description of Artificial Sequence: Synthetic oligonucleotide
  Sense strand starting at position 2862 of SEQ ID NO: 588564
aaguauuuguguuccuggu

SEQ ID NO: 873759 - RNA, 19 nt, Artificial Sequence
  Description of Artificial Sequence: Synthetic oligonucleotide
  Antisense strand to SEQ ID NO: 873758
accaggaacacaaauacuu

SEQ ID NO: 873760 - RNA, 19 nt, Artificial Sequence
  Description of Artificial Sequence: Synthetic oligonucleotide
  Sense strand starting at position 2864 of SEQ ID NO: 588564
guauuuguguuccugguca

SEQ ID NO: 873761 - RNA, 19 nt, Artificial Sequence
  Description of Artificial Sequence: Synthetic oligonucleotide
  Antisense strand to SEQ ID NO: 873760
ugaccaggaacacaaauac

SEQ ID NO: 873762 - RNA, 19 nt, Artificial Sequence
  Description of Artificial Sequence: Synthetic oligonucleotide
  Sense strand starting at position 2866 of SEQ ID NO: 588564
auuuguguuccuggucacu

SEQ ID NO: 873763 - RNA, 19 nt, Artificial Sequence
  Description of Artificial Sequence: Synthetic oligonucleotide
  Antisense strand to SEQ ID NO: 873762
agugaccaggaacacaaau

SEQ ID NO: 873764 - RNA, 19 nt, Artificial Sequence
  Description of Artificial Sequence: Synthetic oligonucleotide
  Sense strand starting at position 2927 of SEQ ID NO: 588564
guaggaacauagguauaua

SEQ ID NO: 873765 - RNA, 19 nt, Artificial Sequence
  Description of Artificial Sequence: Synthetic oligonucleotide
  Antisense strand to SEQ ID NO: 873764
uauauaccuauguuccuac

SEQ ID NO: 873766 - RNA, 19 nt, Artificial Sequence
  Description of Artificial Sequence: Synthetic oligonucleotide
  Sense strand starting at position 3206 of SEQ ID NO: 588564
cuacaugcuugguccuaaa

SEQ ID NO: 873767 - RNA, 19 nt, Artificial Sequence
  Description of Artificial Sequence: Synthetic oligonucleotide
  Antisense strand to SEQ ID NO: 873766
uuuaggaccaagcauguag

SEQ ID NO: 873768 - RNA, 19 nt, Artificial Sequence
  Description of Artificial Sequence: Synthetic oligonucleotide
  Sense strand starting at position 3238 of SEQ ID NO: 588564
aagcucguugcauaagaau

SEQ ID NO: 873769 - RNA, 19 nt, Artificial Sequence
  Description of Artificial Sequence: Synthetic oligonucleotide
  Antisense strand to SEQ ID NO: 873768
auucuuaugcaacgagcuu

SEQ ID NO: 873770 - RNA, 19 nt, Artificial Sequence
  Description of Artificial Sequence: Synthetic oligonucleotide
  Sense strand starting at position 3262 of SEQ ID NO: 588564
uguggcauguaauuaugaa

SEQ ID NO: 873771 - RNA, 19 nt, Artificial Sequence
  Description of Artificial Sequence: Synthetic oligonucleotide
  Antisense strand to SEQ ID NO: 873770
uucauaauuacaugccaca

SEQ ID NO: 873772 - RNA, 19 nt, Artificial Sequence
  Description of Artificial Sequence: Synthetic oligonucleotide
  Sense strand starting at position 3263 of SEQ ID NO: 588564
guggcauguaauuaugaaa

SEQ ID NO: 873773 - RNA, 19 nt, Artificial Sequence
  Description of Artificial Sequence: Synthetic oligonucleotide
  Antisense strand to SEQ ID NO: 873772
uuucauaauuacaugccac

SEQ ID NO: 873774 - RNA, 19 nt, Artificial Sequence
  Description of Artificial Sequence: Synthetic oligonucleotide
  Sense strand starting at position 3270 of SEQ ID NO: 588564
guaauuaugaaaggcuugu

SEQ ID NO: 873775 - RNA, 19 nt, Artificial Sequence
  Description of Artificial Sequence: Synthetic oligonucleotide
  Antisense strand to SEQ ID NO: 873774
acaagccuuucauaauuac

SEQ ID NO: 873776 - RNA, 19 nt, Artificial Sequence
  Description of Artificial Sequence: Synthetic oligonucleotide
  Sense strand starting at position 3348 of SEQ ID NO: 588564
cuaagugcaguuuauagau

SEQ ID NO: 873777 - RNA, 19 nt, Artificial Sequence
  Description of Artificial Sequence: Synthetic oligonucleotide
  Antisense strand to SEQ ID NO: 873776
aucuauaaacugcacuuag

SEQ ID NO: 873778 - RNA, 19 nt, Artificial Sequence
  Description of Artificial Sequence: Synthetic oligonucleotide
  Sense strand starting at position 3377 of SEQ ID NO: 588564
gcuagaaauuggucaguaa

SEQ ID NO: 873779 - RNA, 19 nt, Artificial Sequence
  Description of Artificial Sequence: Synthetic oligonucleotide
  Antisense strand to SEQ ID NO: 873778
uuacugaccaauuucuagc

SEQ ID NO: 873780 - RNA, 19 nt, Artificial Sequence
  Description of Artificial Sequence: Synthetic oligonucleotide
  Sense strand starting at position 3554 of SEQ ID NO: 588564
gagaaacuccucugagagu

SEQ ID NO: 873781 - RNA, 19 nt, Artificial Sequence
  Description of Artificial Sequence: Synthetic oligonucleotide
  Antisense strand to SEQ ID NO: 873780
acucucagaggaguuucuc

SEQ ID NO: 873782 - RNA, 19 nt, Artificial Sequence
  Description of Artificial Sequence: Synthetic oligonucleotide
  Sense strand starting at position 3575 of SEQ ID NO: 588564
aagugugauguauaugcaa

SEQ ID NO: 873783 - RNA, 19 nt, Artificial Sequence
  Description of Artificial Sequence: Synthetic oligonucleotide
  Antisense strand to SEQ ID NO: 873782
uugcauauacaucacacuu

SEQ ID NO: 873784 - RNA, 19 nt, Artificial Sequence
  Description of Artificial Sequence: Synthetic oligonucleotide
  Sense strand starting at position 3640 of SEQ ID NO: 588564
gaaagcuuaguaugucaag

SEQ ID NO: 873785 - RNA, 19 nt, Artificial Sequence
  Description of Artificial Sequence: Synthetic oligonucleotide
  Antisense strand to SEQ ID NO: 873784
cuugacauacuaagcuuuc

SEQ ID NO: 873786 - RNA, 19 nt, Artificial Sequence
  Description of Artificial Sequence: Synthetic oligonucleotide
  Sense strand starting at position 3674 of SEQ ID NO: 588564
cgguuaaaugccuauugac

SEQ ID NO: 873787 - RNA, 19 nt, Artificial Sequence
  Description of Artificial Sequence: Synthetic oligonucleotide
  Antisense strand to SEQ ID NO: 873786
gucaauaggcauuuaaccg

SEQ ID NO: 873788 - RNA, 19 nt, Artificial Sequence
  Description of Artificial Sequence: Synthetic oligonucleotide
  Sense strand starting at position 3814 of SEQ ID NO: 588564
ugugguuuaaucugaggac

SEQ ID NO: 873789 - RNA, 19 nt, Artificial Sequence
  Description of Artificial Sequence: Synthetic oligonucleotide
  Antisense strand to SEQ ID NO: 873788
guccucagauuaaaccaca

SEQ ID NO: 873790 - RNA, 19 nt, Artificial Sequence
  Description of Artificial Sequence: Synthetic oligonucleotide
  Sense strand starting at position 73 of SEQ ID NO: 588565
ccaaauagucugugggcau

SEQ ID NO: 873791 - RNA, 19 nt, Artificial Sequence
  Description of Artificial Sequence: Synthetic oligonucleotide
  Antisense strand to SEQ ID NO: 873790
augcccacagacuauuugg

SEQ ID NO: 873792 - RNA, 19 nt, Artificial Sequence
  Description of Artificial Sequence: Synthetic oligonucleotide
  Sense strand starting at position 265 of SEQ ID NO: 588565
aguauagaguaguaagaca

SEQ ID NO: 873793 - RNA, 19 nt, Artificial Sequence
  Description of Artificial Sequence: Synthetic oligonucleotide
  Antisense strand to SEQ ID NO: 873792
ugucuuacuacucuauacu

SEQ ID NO: 873794 - RNA, 19 nt, Artificial Sequence
  Description of Artificial Sequence: Synthetic oligonucleotide
  Sense strand starting at position 311 of SEQ ID NO: 588565
ggcauuuggcaguguacau

SEQ ID NO: 873795 - RNA, 19 nt, Artificial Sequence
  Description of Artificial Sequence: Synthetic oligonucleotide
  Antisense strand to SEQ ID NO: 873794
auguacacugccaaaugcc

SEQ ID NO: 873796 - RNA, 19 nt, Artificial Sequence
  Description of Artificial Sequence: Synthetic oligonucleotide
  Sense strand starting at position 415 of SEQ ID NO: 588565
cgugaugucuuagcacuga

SEQ ID NO: 873797 - RNA, 19 nt, Artificial Sequence
  Description of Artificial Sequence: Synthetic oligonucleotide
  Antisense strand to SEQ ID NO: 873796
ucagugcuaagacaucacg

SEQ ID NO: 873798 - RNA, 19 nt, Artificial Sequence
  Description of Artificial Sequence: Synthetic oligonucleotide
  Sense strand starting at position 432 of SEQ ID NO: 588565
gacgucccaucacagaauu

SEQ ID NO: 873799 - RNA, 19 nt, Artificial Sequence
  Description of Artificial Sequence: Synthetic oligonucleotide
  Antisense strand to SEQ ID NO: 873798
aauucugugaugggacguc

SEQ ID NO: 873800 - RNA, 19 nt, Artificial Sequence
  Description of Artificial Sequence: Synthetic oligonucleotide
  Sense strand starting at position 477 of SEQ ID NO: 588565
gagaacuagucccaugcaa

SEQ ID NO: 873801 - RNA, 19 nt, Artificial Sequence
  Description of Artificial Sequence: Synthetic oligonucleotide
  Antisense strand to SEQ ID NO: 873800
uugcaugggacuaguucuc

SEQ ID NO: 873802 - RNA, 19 nt, Artificial Sequence
  Description of Artificial Sequence: Synthetic oligonucleotide
  Sense strand starting at position 511 of SEQ ID NO: 588565
agacaugucuccugaggac

SEQ ID NO: 873803 - RNA, 19 nt, Artificial Sequence
  Description of Artificial Sequence: Synthetic oligonucleotide
  Antisense strand to SEQ ID NO: 873802
guccucaggagacaugucu

SEQ ID NO: 873804 - RNA, 19 nt, Artificial Sequence
  Description of Artificial Sequence: Synthetic oligonucleotide
  Sense strand starting at position 588 of SEQ ID NO: 588565
ggagaacaaucauuagcug

SEQ ID NO: 873805 - RNA, 19 nt, Artificial Sequence
  Description of Artificial Sequence: Synthetic oligonucleotide
  Antisense strand to SEQ ID NO: 873804
cagcuaaugauuguucucc

SEQ ID NO: 873806 - RNA, 19 nt, Artificial Sequence
  Description of Artificial Sequence: Synthetic oligonucleotide
  Sense strand starting at position 589 of SEQ ID NO: 588565
gagaacaaucauuagcugu

SEQ ID NO: 873807 - RNA, 19 nt, Artificial Sequence
  Description of Artificial Sequence: Synthetic oligonucleotide
  Antisense strand to SEQ ID NO: 873806
acagcuaaugauuguucuc

SEQ ID NO: 873808 - RNA, 19 nt, Artificial Sequence
  Description of Artificial Sequence: Synthetic oligonucleotide
  Sense strand starting at position 774 of SEQ ID NO: 588565
uuucuugccgcggagaauu

SEQ ID NO: 873809 - RNA, 19 nt, Artificial Sequence
  Description of Artificial Sequence: Synthetic oligonucleotide
  Antisense strand to SEQ ID NO: 873808
aauucuccgcggcaagaaa

SEQ ID NO: 873810 - RNA, 19 nt, Artificial Sequence
  Description of Artificial Sequence: Synthetic oligonucleotide
  Sense strand starting at position 803 of SEQ ID NO: 588565
uaacauuacccauguggga

SEQ ID NO: 873811 - RNA, 19 nt, Artificial Sequence
  Description of Artificial Sequence: Synthetic oligonucleotide
  Antisense strand to SEQ ID NO: 873810
ucccacauggguaauguua

SEQ ID NO: 873812 - RNA, 19 nt, Artificial Sequence
  Description of Artificial Sequence: Synthetic oligonucleotide
  Sense strand starting at position 1012 of SEQ ID NO: 588565
gcgaguuucaguucgagcu

SEQ ID NO: 873813 - RNA, 19 nt, Artificial Sequence
  Description of Artificial Sequence: Synthetic oligonucleotide
  Antisense strand to SEQ ID NO: 873812
agcucgaacugaaacucgc

SEQ ID NO: 873814 - RNA, 19 nt, Artificial Sequence
  Description of Artificial Sequence: Synthetic oligonucleotide
  Sense strand starting at position 1070 of SEQ ID NO: 588565
gggacuaccuggugaaagu

SEQ ID NO: 873815 - RNA, 19 nt, Artificial Sequence
  Description of Artificial Sequence: Synthetic oligonucleotide
  Antisense strand to SEQ ID NO: 873814
acuuucaccagguaguccc

SEQ ID NO: 873816 - RNA, 19 nt, Artificial Sequence
  Description of Artificial Sequence: Synthetic oligonucleotide
  Sense strand starting at position 2015 of SEQ ID NO: 588565
uggaauaagcuuuauaucu

SEQ ID NO: 873817 - RNA, 19 nt, Artificial Sequence
  Description of Artificial Sequence: Synthetic oligonucleotide
  Antisense strand to SEQ ID NO: 873816
agauauaaagcuuauucca

SEQ ID NO: 873818 - RNA, 19 nt, Artificial Sequence
  Description of Artificial Sequence: Synthetic oligonucleotide
  Sense strand starting at position 2037 of SEQ ID NO: 588565
gaguuucagcguuuacggu

SEQ ID NO: 873819 - RNA, 19 nt, Artificial Sequence
  Description of Artificial Sequence: Synthetic oligonucleotide
  Antisense strand to SEQ ID NO: 873818
accguaaacgcugaaacuc

SEQ ID NO: 873820 - RNA, 19 nt, Artificial Sequence
  Description of Artificial Sequence: Synthetic oligonucleotide
  Sense strand starting at position 2044 of SEQ ID NO: 588565
agcguuuacgguccagcaa

SEQ ID NO: 873821 - RNA, 19 nt, Artificial Sequence
  Description of Artificial Sequence: Synthetic oligonucleotide
  Antisense strand to SEQ ID NO: 873820
uugcuggaccguaaacgcu

SEQ ID NO: 873822 - RNA, 19 nt, Artificial Sequence
  Description of Artificial Sequence: Synthetic oligonucleotide
  Sense strand starting at position 2045 of SEQ ID NO: 588565
gcguuuacgguccagcaau

SEQ ID NO: 873823 - RNA, 19 nt, Artificial Sequence
  Description of Artificial Sequence: Synthetic oligonucleotide
  Antisense strand to SEQ ID NO: 873822
auugcuggaccguaaacgc

SEQ ID NO: 873824 - RNA, 19 nt, Artificial Sequence
  Description of Artificial Sequence: Synthetic oligonucleotide
  Sense strand starting at position 2154 of SEQ ID NO: 588565
gggcauuccuucucuccaa

SEQ ID NO: 873825 - RNA, 19 nt, Artificial Sequence
  Description of Artificial Sequence: Synthetic oligonucleotide
  Antisense strand to SEQ ID NO: 873824
uuggagagaaggaaugccc

SEQ ID NO: 873826 - RNA, 19 nt, Artificial Sequence
  Description of Artificial Sequence: Synthetic oligonucleotide
  Sense strand starting at position 2168 of SEQ ID NO: 588565
uccaaagagccaugauaga

SEQ ID NO: 873827 - RNA, 19 nt, Artificial Sequence
  Description of Artificial Sequence: Synthetic oligonucleotide
  Antisense strand to SEQ ID NO: 873826
ucuaucauggcucuuugga

SEQ ID NO: 873828 - RNA, 19 nt, Artificial Sequence
  Description of Artificial Sequence: Synthetic oligonucleotide
  Sense strand starting at position 2185 of SEQ ID NO: 588565
gauugauuaaugggaggcu

SEQ ID NO: 873829 - RNA, 19 nt, Artificial Sequence
  Description of Artificial Sequence: Synthetic oligonucleotide
  Antisense strand to SEQ ID NO: 873828
agccucccauuaaucaauc

SEQ ID NO: 873830 - RNA, 19 nt, Artificial Sequence
  Description of Artificial Sequence: Synthetic oligonucleotide
  Sense strand starting at position 2188 of SEQ ID NO: 588565
ugauuaaugggaggcuuua

SEQ ID NO: 873831 - RNA, 19 nt, Artificial Sequence
  Description of Artificial Sequence: Synthetic oligonucleotide
  Antisense strand to SEQ ID NO: 873830
uaaagccucccauuaauca

SEQ ID NO: 873832 - RNA, 19 nt, Artificial Sequence
  Description of Artificial Sequence: Synthetic oligonucleotide
  Sense strand starting at position 2230 of SEQ ID NO: 588565
gggaguuacuucugaggaa

SEQ ID NO: 873833 - RNA, 19 nt, Artificial Sequence
  Description of Artificial Sequence: Synthetic oligonucleotide
  Antisense strand to SEQ ID NO: 873832
uuccucagaaguaacuccc

SEQ ID NO: 873834 - RNA, 19 nt, Artificial Sequence
  Description of Artificial Sequence: Synthetic oligonucleotide
  Sense strand starting at position 2231 of SEQ ID NO: 588565
ggaguuacuucugaggaag

SEQ ID NO: 873835 - RNA, 19 nt, Artificial Sequence
  Description of Artificial Sequence: Synthetic oligonucleotide
  Antisense strand to SEQ ID NO: 873834
cuuccucagaaguaacucc

SEQ ID NO: 873836 - RNA, 19 nt, Artificial Sequence
  Description of Artificial Sequence: Synthetic oligonucleotide
  Sense strand starting at position 2242 of SEQ ID NO: 588565
ugaggaagcuguuugcuuu

SEQ ID NO: 873837 - RNA, 19 nt, Artificial Sequence
  Description of Artificial Sequence: Synthetic oligonucleotide
  Antisense strand to SEQ ID NO: 873836
aaagcaaacagcuuccuca

SEQ ID NO: 873838 - RNA, 19 nt, Artificial Sequence
  Description of Artificial Sequence: Synthetic oligonucleotide
  Sense strand starting at position 2266 of SEQ ID NO: 588565
cuaagugggucuccaacaa

SEQ ID NO: 873839 - RNA, 19 nt, Artificial Sequence
  Description of Artificial Sequence: Synthetic oligonucleotide
  Antisense strand to SEQ ID NO: 873838
uuguuggagacccacuuag

SEQ ID NO: 873840 - RNA, 19 nt, Artificial Sequence
  Description of Artificial Sequence: Synthetic oligonucleotide
  Sense strand starting at position 2270 of SEQ ID NO: 588565
gugggucuccaacaauauu

SEQ ID NO: 873841 - RNA, 19 nt, Artificial Sequence
  Description of Artificial Sequence: Synthetic oligonucleotide
  Antisense strand to SEQ ID NO: 873840
aauauuguuggagacccac

SEQ ID NO: 873842 - RNA, 19 nt, Artificial Sequence
  Description of Artificial Sequence: Synthetic oligonucleotide
  Sense strand starting at position 2478 of SEQ ID NO: 588565
ggcugcacgucccuaauaa

SEQ ID NO: 873843 - RNA, 19 nt, Artificial Sequence
  Description of Artificial Sequence: Synthetic oligonucleotide
  Antisense strand to SEQ ID NO: 873842
uuauuagggacgugcagcc

SEQ ID NO: 873844 - RNA, 19 nt, Artificial Sequence
  Description of Artificial Sequence: Synthetic oligonucleotide
  Sense strand starting at position 2522 of SEQ ID NO: 588565
gcggguuuggaacaauacu

SEQ ID NO: 873845 - RNA, 19 nt, Artificial Sequence
  Description of Artificial Sequence: Synthetic oligonucleotide
  Antisense strand to SEQ ID NO: 873844
aguauuguuccaaacccgc

SEQ ID NO: 873846 - RNA, 19 nt, Artificial Sequence
  Description of Artificial Sequence: Synthetic oligonucleotide
  Sense strand starting at position 2925 of SEQ ID NO: 588565
gcugcauauuucuugccaa

SEQ ID NO: 873847 - RNA, 19 nt, Artificial Sequence
  Description of Artificial Sequence: Synthetic oligonucleotide
  Antisense strand to SEQ ID NO: 873846
uuggcaagaaauaugcagc

SEQ ID NO: 873848 - RNA, 19 nt, Artificial Sequence
  Description of Artificial Sequence: Synthetic oligonucleotide
  Sense strand starting at position 2957 of SEQ ID NO: 588565
cugugucuuccucaucuca

SEQ ID NO: 873849 - RNA, 19 nt, Artificial Sequence
  Description of Artificial Sequence: Synthetic oligonucleotide
  Antisense strand to SEQ ID NO: 873848
ugagaugaggaagacacag

SEQ ID NO: 873850 - RNA, 19 nt, Artificial Sequence
  Description of Artificial Sequence: Synthetic oligonucleotide
  Sense strand starting at position 2959 of SEQ ID NO: 588565
gugucuuccucaucucagu

SEQ ID NO: 873851 - RNA, 19 nt, Artificial Sequence
  Description of Artificial Sequence: Synthetic oligonucleotide
  Antisense strand to SEQ ID NO: 873850
acugagaugaggaagacac

SEQ ID NO: 873852 - RNA, 19 nt, Artificial Sequence
  Description of Artificial Sequence: Synthetic oligonucleotide
  Sense strand starting at position 2994 of SEQ ID NO: 588565
uccaguuguucaggagaga

SEQ ID NO: 873853 - RNA, 19 nt, Artificial Sequence
  Description of Artificial Sequence: Synthetic oligonucleotide
  Antisense strand to SEQ ID NO: 873852
ucucuccugaacaacugga

SEQ ID NO: 873854 - RNA, 19 nt, Artificial Sequence
  Description of Artificial Sequence: Synthetic oligonucleotide
  Sense strand starting at position 3043 of SEQ ID NO: 588565
ccugucagacauugccaau

SEQ ID NO: 873855 - RNA, 19 nt, Artificial Sequence
  Description of Artificial Sequence: Synthetic oligonucleotide
  Antisense strand to SEQ ID NO: 873854
auuggcaaugucugacagg

SEQ ID NO: 873856 - RNA, 19 nt, Artificial Sequence
  Description of Artificial Sequence: Synthetic oligonucleotide
  Sense strand starting at position 3046 of SEQ ID NO: 588565
gucagacauugccaauuuc

SEQ ID NO: 873857 - RNA, 19 nt, Artificial Sequence
  Description of Artificial Sequence: Synthetic oligonucleotide
  Antisense strand to SEQ ID NO: 873856
gaaauuggcaaugucugac

SEQ ID NO: 873858 - RNA, 19 nt, Artificial Sequence
  Description of Artificial Sequence: Synthetic oligonucleotide
  Sense strand starting at position 3061 of SEQ ID NO: 588565
uuucuaucagcucaggauu

SEQ ID NO: 873859 - RNA, 19 nt, Artificial Sequence
  Description of Artificial Sequence: Synthetic oligonucleotide
  Antisense strand to SEQ ID NO: 873858
aauccugagcugauagaaa

SEQ ID NO: 873860 - RNA, 19 nt, Artificial Sequence
  Description of Artificial Sequence: Synthetic oligonucleotide
  Sense strand starting at position 3262 of SEQ ID NO: 588565
cagaaauugggccauguca

SEQ ID NO: 873861 - RNA, 19 nt, Artificial Sequence
  Description of Artificial Sequence: Synthetic oligonucleotide
  Antisense strand to SEQ ID NO: 873860
ugacauggcccaauuucug

SEQ ID NO: 873862 - RNA, 19 nt, Artificial Sequence
  Description of Artificial Sequence: Synthetic oligonucleotide
  Sense strand starting at position 3264 of SEQ ID NO: 588565
gaaauugggccaugucacu

SEQ ID NO: 873863 - RNA, 19 nt, Artificial Sequence
  Description of Artificial Sequence: Synthetic oligonucleotide
  Antisense strand to SEQ ID NO: 873862
agugacauggcccaauuuc

SEQ ID NO: 873864 - RNA, 19 nt, Artificial Sequence
  Description of Artificial Sequence: Synthetic oligonucleotide
  Sense strand starting at position 3277 of SEQ ID NO: 588565
gucacuccuuagcucaaga

SEQ ID NO: 873865 - RNA, 19 nt, Artificial Sequence
  Description of Artificial Sequence: Synthetic oligonucleotide
  Antisense strand to SEQ ID NO: 873864
ucuugagcuaaggagugac

SEQ ID NO: 873866 - RNA, 19 nt, Artificial Sequence
  Description of Artificial Sequence: Synthetic oligonucleotide
  Sense strand starting at position 3304 of SEQ ID NO: 588565
guucccaagucauuuagua

SEQ ID NO: 873867 - RNA, 19 nt, Artificial Sequence
  Description of Artificial Sequence: Synthetic oligonucleotide
  Antisense strand to SEQ ID NO: 873866
uacuaaaugacuugggaac

SEQ ID NO: 873868 - RNA, 19 nt, Artificial Sequence
  Description of Artificial Sequence: Synthetic oligonucleotide
  Sense strand starting at position 3798 of SEQ ID NO: 588565
gcuguucuuucugcucaaa

SEQ ID NO: 873869 - RNA, 19 nt, Artificial Sequence
  Description of Artificial Sequence: Synthetic oligonucleotide
  Antisense strand to SEQ ID NO: 873868
uuugagcagaaagaacagc

SEQ ID NO: 873870 - RNA, 19 nt, Artificial Sequence
  Description of Artificial Sequence: Synthetic oligonucleotide
  Sense strand starting at position 1075 of SEQ ID NO: 588566
cgugguaaccugggagagu

SEQ ID NO: 873871 - RNA, 19 nt, Artificial Sequence
  Description of Artificial Sequence: Synthetic oligonucleotide
  Antisense strand to SEQ ID NO: 873870
acucucccagguuaccacg

SEQ ID NO: 873872 - RNA, 19 nt, Artificial Sequence
  Description of Artificial Sequence: Synthetic oligonucleotide
  Sense strand starting at position 1991 of SEQ ID NO: 588566
ugggaaguuccgugcgguu

SEQ ID NO: 873873 - RNA, 19 nt, Artificial Sequence
  Description of Artificial Sequence: Synthetic oligonucleotide
  Antisense strand to SEQ ID NO: 873872
aaccgcacggaacuuccca

SEQ ID NO: 873874 - RNA, 19 nt, Artificial Sequence
  Description of Artificial Sequence: Synthetic oligonucleotide
  Sense strand starting at position 1992 of SEQ ID NO: 588566
gggaaguuccgugcgguua

SEQ ID NO: 873875 - RNA, 19 nt, Artificial Sequence
  Description of Artificial Sequence: Synthetic oligonucleotide
  Antisense strand to SEQ ID NO: 873874
uaaccgcacggaacuuccc

SEQ ID NO: 873876 - RNA, 19 nt, Artificial Sequence
  Description of Artificial Sequence: Synthetic oligonucleotide
  Sense strand starting at position 1993 of SEQ ID NO: 588566
ggaaguuccgugcgguuau

SEQ ID NO: 873877 - RNA, 19 nt, Artificial Sequence
  Description of Artificial Sequence: Synthetic oligonucleotide
  Antisense strand to SEQ ID NO: 873876
auaaccgcacggaacuucc

SEQ ID NO: 873878 - RNA, 19 nt, Artificial Sequence
  Description of Artificial Sequence: Synthetic oligonucleotide
  Sense strand starting at position 2032 of SEQ ID NO: 588566
cgcugacucugcuguuaag

SEQ ID NO: 873879 - RNA, 19 nt, Artificial Sequence
  Description of Artificial Sequence: Synthetic oligonucleotide
  Antisense strand to SEQ ID NO: 873878
cuuaacagcagagucagcg

SEQ ID NO: 873880 - RNA, 19 nt, Artificial Sequence
  Description of Artificial Sequence: Synthetic oligonucleotide
  Sense strand starting at position 2092 of SEQ ID NO: 588566
ccaagcaugggccgugaaa

SEQ ID NO: 873881 - RNA, 19 nt, Artificial Sequence
  Description of Artificial Sequence: Synthetic oligonucleotide
  Antisense strand to SEQ ID NO: 873880
uuucacggcccaugcuugg

SEQ ID NO: 873882 - RNA, 19 nt, Artificial Sequence
  Description of Artificial Sequence: Synthetic oligonucleotide
  Sense strand starting at position 2094 of SEQ ID NO: 588566
aagcaugggccgugaaagu

SEQ ID NO: 873883 - RNA, 19 nt, Artificial Sequence
  Description of Artificial Sequence: Synthetic oligonucleotide
  Antisense strand to SEQ ID NO: 873882
acuuucacggcccaugcuu

SEQ ID NO: 873884 - RNA, 19 nt, Artificial Sequence
  Description of Artificial Sequence: Synthetic oligonucleotide
  Sense strand starting at position 2307 of SEQ ID NO: 588566
cacugugccucuggcaaua

SEQ ID NO: 873885 - RNA, 19 nt, Artificial Sequence
  Description of Artificial Sequence: Synthetic oligonucleotide
  Antisense strand to SEQ ID NO: 873884
uauugccagaggcacagug

SEQ ID NO: 873886 - RNA, 19 nt, Artificial Sequence
  Description of Artificial Sequence: Synthetic oligonucleotide
  Sense strand starting at position 2420 of SEQ ID NO: 588566
ggaaccugccuuuaaguca

SEQ ID NO: 873887 - RNA, 19 nt, Artificial Sequence
  Description of Artificial Sequence: Synthetic oligonucleotide
  Antisense strand to SEQ ID NO: 873886
ugacuuaaaggcagguucc

SEQ ID NO: 873888 - RNA, 19 nt, Artificial Sequence
  Description of Artificial Sequence: Synthetic oligonucleotide
  Sense strand starting at position 2445 of SEQ ID NO: 588566
ggaggaucacgccgucauu

SEQ ID NO: 873889 - RNA, 19 nt, Artificial Sequence
  Description of Artificial Sequence: Synthetic oligonucleotide
  Antisense strand to SEQ ID NO: 873888
aaugacggcgugauccucc

SEQ ID NO: 873890 - RNA, 19 nt, Artificial Sequence
  Description of Artificial Sequence: Synthetic oligonucleotide
  Sense strand starting at position 2448 of SEQ ID NO: 588566
ggaucacgccgucauucau

SEQ ID NO: 873891 - RNA, 19 nt, Artificial Sequence
  Description of Artificial Sequence: Synthetic oligonucleotide
  Antisense strand to SEQ ID NO: 873890
augaaugacggcgugaucc

SEQ ID NO: 873892 - RNA, 19 nt, Artificial Sequence
  Description of Artificial Sequence: Synthetic oligonucleotide
  Sense strand starting at position 2485 of SEQ ID NO: 588566
ugcuguccggugccagaua

SEQ ID NO: 873893 - RNA, 19 nt, Artificial Sequence
  Description of Artificial Sequence: Synthetic oligonucleotide
  Antisense strand to SEQ ID NO: 873892
uaucuggcaccggacagca

SEQ ID NO: 873894 - RNA, 19 nt, Artificial Sequence
  Description of Artificial Sequence: Synthetic oligonucleotide
  Sense strand starting at position 2519 of SEQ ID NO: 588566
cccagaaacuucgguuucu

SEQ ID NO: 873895 - RNA, 19 nt, Artificial Sequence
  Description of Artificial Sequence: Synthetic oligonucleotide
  Antisense strand to SEQ ID NO: 873894
agaaaccgaaguuucuggg

SEQ ID NO: 873896 - RNA, 19 nt, Artificial Sequence
  Description of Artificial Sequence: Synthetic oligonucleotide
  Sense strand starting at position 2528 of SEQ ID NO: 588566
uucgguuucucauggagca

SEQ ID NO: 873897 - RNA, 19 nt, Artificial Sequence
  Description of Artificial Sequence: Synthetic oligonucleotide
  Antisense strand to SEQ ID NO: 873896
ugcuccaugagaaaccgaa

SEQ ID NO: 873898 - RNA, 19 nt, Artificial Sequence
  Description of Artificial Sequence: Synthetic oligonucleotide
  Sense strand starting at position 2530 of SEQ ID NO: 588566
cgguuucucauggagcaga

SEQ ID NO: 873899 - RNA, 19 nt, Artificial Sequence
  Description of Artificial Sequence: Synthetic oligonucleotide
  Antisense strand to SEQ ID NO: 873898
ucugcuccaugagaaaccg

SEQ ID NO: 873900 - RNA, 19 nt, Artificial Sequence
  Description of Artificial Sequence: Synthetic oligonucleotide
  Sense strand starting at position 2607 of SEQ ID NO: 588566
cccuguuugugauuuccca

SEQ ID NO: 873901 - RNA, 19 nt, Artificial Sequence
  Description of Artificial Sequence: Synthetic oligonucleotide
  Antisense strand to SEQ ID NO: 873900
ugggaaaucacaaacaggg

SEQ ID NO: 873902 - RNA, 19 nt, Artificial Sequence
  Description of Artificial Sequence: Synthetic oligonucleotide
  Sense strand starting at position 2611 of SEQ ID NO: 588566
guuugugauuucccauggu

SEQ ID NO: 873903 - RNA, 19 nt, Artificial Sequence
  Description of Artificial Sequence: Synthetic oligonucleotide
  Antisense strand to SEQ ID NO: 873902
accaugggaaaucacaaac

SEQ ID NO: 873904 - RNA, 19 nt, Artificial Sequence
  Description of Artificial Sequence: Synthetic oligonucleotide
  Sense strand starting at position 2614 of SEQ ID NO: 588566
ugugauuucccauggugug

SEQ ID NO: 873905 - RNA, 19 nt, Artificial Sequence
  Description of Artificial Sequence: Synthetic oligonucleotide
  Antisense strand to SEQ ID NO: 873904
cacaccaugggaaaucaca

SEQ ID NO: 873906 - RNA, 19 nt, Artificial Sequence
  Description of Artificial Sequence: Synthetic oligonucleotide
  Sense strand starting at position 2615 of SEQ ID NO: 588566
gugauuucccaugguguga

SEQ ID NO: 873907 - RNA, 19 nt, Artificial Sequence
  Description of Artificial Sequence: Synthetic oligonucleotide
  Antisense strand to SEQ ID NO: 873906
ucacaccaugggaaaucac

SEQ ID NO: 873908 - RNA, 19 nt, Artificial Sequence
  Description of Artificial Sequence: Synthetic oligonucleotide
  Sense strand starting at position 2626 of SEQ ID NO: 588566
uggugugaccucggagcuu

SEQ ID NO: 873909 - RNA, 19 nt, Artificial Sequence
  Description of Artificial Sequence: Synthetic oligonucleotide
  Antisense strand to SEQ ID NO: 873908
aagcuccgaggucacacca

SEQ ID NO: 873910 - RNA, 19 nt, Artificial Sequence
  Description of Artificial Sequence: Synthetic oligonucleotide
  Sense strand starting at position 2718 of SEQ ID NO: 588566
ggaccagugagcugacaaa

SEQ ID NO: 873911 - RNA, 19 nt, Artificial Sequence
  Description of Artificial Sequence: Synthetic oligonucleotide
  Antisense strand to SEQ ID NO: 873910
uuugucagcucacuggucc

SEQ ID NO: 873912 - RNA, 19 nt, Artificial Sequence
  Description of Artificial Sequence: Synthetic oligonucleotide
  Sense strand starting at position 3603 of SEQ ID NO: 588566
ggaccauaggccuggagaa

SEQ ID NO: 873913 - RNA, 19 nt, Artificial Sequence
  Description of Artificial Sequence: Synthetic oligonucleotide
  Antisense strand to SEQ ID NO: 873912
uucuccaggccuauggucc

SEQ ID NO: 873914 - RNA, 19 nt, Artificial Sequence
  Description of Artificial Sequence: Synthetic oligonucleotide
  Sense strand starting at position 169 of SEQ ID NO: 588567
gauaccugauagucacuga

SEQ ID NO: 873915 - RNA, 19 nt, Artificial Sequence
  Description of Artificial Sequence: Synthetic oligonucleotide
  Antisense strand to SEQ ID NO: 873914
ucagugacuaucagguauc

SEQ ID NO: 873916 - RNA, 19 nt, Artificial Sequence
  Description of Artificial Sequence: Synthetic oligonucleotide
  Sense strand starting at position 172 of SEQ ID NO: 588567
accugauagucacugaaau

SEQ ID NO: 873917 - RNA, 19 nt, Artificial Sequence
  Description of Artificial Sequence: Synthetic oligonucleotide
  Antisense strand to SEQ ID NO: 873916
auuucagugacuaucaggu

SEQ ID NO: 873918 - RNA, 19 nt, Artificial Sequence
  Description of Artificial Sequence: Synthetic oligonucleotide
  Sense strand starting at position 173 of SEQ ID NO: 588567
ccugauagucacugaaaug

SEQ ID NO: 873919 - RNA, 19 nt, Artificial Sequence
  Description of Artificial Sequence: Synthetic oligonucleotide
  Antisense strand to SEQ ID NO: 873918
cauuucagugacuaucagg

SEQ ID NO: 873920 - RNA, 19 nt, Artificial Sequence
  Description of Artificial Sequence: Synthetic oligonucleotide
  Sense strand starting at position 195 of SEQ ID NO: 588567
ucaacaaugucccaaggga

SEQ ID NO: 873921 - RNA, 19 nt, Artificial Sequence
  Description of Artificial Sequence: Synthetic oligonucleotide
  Antisense strand to SEQ ID NO: 873920
ucccuugggacauuguuga

SEQ ID NO: 873922 - RNA, 19 nt, Artificial Sequence
  Description of Artificial Sequence: Synthetic oligonucleotide
  Sense strand starting at position 239 of SEQ ID NO: 588567
caguuuguguccuugucca

SEQ ID NO: 873923 - RNA, 19 nt, Artificial Sequence
  Description of Artificial Sequence: Synthetic oligonucleotide
  Antisense strand to SEQ ID NO: 873922
uggacaaggacacaaacug

SEQ ID NO: 873924 - RNA, 19 nt, Artificial Sequence
  Description of Artificial Sequence: Synthetic oligonucleotide
  Sense strand starting at position 244 of SEQ ID NO: 588567
uguguccuuguccauaaca

SEQ ID NO: 873925 - RNA, 19 nt, Artificial Sequence
  Description of Artificial Sequence: Synthetic oligonucleotide
  Antisense strand to SEQ ID NO: 873924
uguuauggacaaggacaca

SEQ ID NO: 873926 - RNA, 19 nt, Artificial Sequence
  Description of Artificial Sequence: Synthetic oligonucleotide
  Sense strand starting at position 246 of SEQ ID NO: 588567
uguccuuguccauaacaca

SEQ ID NO: 873927 - RNA, 19 nt, Artificial Sequence
  Description of Artificial Sequence: Synthetic oligonucleotide
  Antisense strand to SEQ ID NO: 873926
uguguuauggacaaggaca

SEQ ID NO: 873928 - RNA, 19 nt, Artificial Sequence
  Description of Artificial Sequence: Synthetic oligonucleotide
  Sense strand starting at position 326 of SEQ ID NO: 588567
gcaggagcccuuuagcuuu

SEQ ID NO: 873929 - RNA, 19 nt, Artificial Sequence
  Description of Artificial Sequence: Synthetic oligonucleotide
  Antisense strand to SEQ ID NO: 873928
aaagcuaaagggcuccugc

SEQ ID NO: 873930 - RNA, 19 nt, Artificial Sequence
  Description of Artificial Sequence: Synthetic oligonucleotide
  Sense strand starting at position 337 of SEQ ID NO: 588567
uuagcuuugcuccaaagag

SEQ ID NO: 873931 - RNA, 19 nt, Artificial Sequence
  Description of Artificial Sequence: Synthetic oligonucleotide
  Antisense strand to SEQ ID NO: 873930
cucuuuggagcaaagcuaa

SEQ ID NO: 873932 - RNA, 19 nt, Artificial Sequence
  Description of Artificial Sequence: Synthetic oligonucleotide
  Sense strand starting at position 352 of SEQ ID NO: 588567
agagaagcaucuuagacca

SEQ ID NO: 873933 - RNA, 19 nt, Artificial Sequence
  Description of Artificial Sequence: Synthetic oligonucleotide
  Antisense strand to SEQ ID NO: 873932
uggucuaagaugcuucucu

SEQ ID NO: 873934 - RNA, 19 nt, Artificial Sequence
  Description of Artificial Sequence: Synthetic oligonucleotide
  Sense strand starting at position 432 of SEQ ID NO: 588567
uaaugagugcuacgaaauu

SEQ ID NO: 873935 - RNA, 19 nt, Artificial Sequence
  Description of Artificial Sequence: Synthetic oligonucleotide
  Antisense strand to SEQ ID NO: 873934
aauuucguagcacucauua

SEQ ID NO: 873936 - RNA, 19 nt, Artificial Sequence
  Description of Artificial Sequence: Synthetic oligonucleotide
  Sense strand starting at position 442 of SEQ ID NO: 588567
uacgaaauuugugugguua

SEQ ID NO: 873937 - RNA, 19 nt, Artificial Sequence
  Description of Artificial Sequence: Synthetic oligonucleotide
  Antisense strand to SEQ ID NO: 873936
uaaccacacaaauuucgua

SEQ ID NO: 873938 - RNA, 19 nt, Artificial Sequence
  Description of Artificial Sequence: Synthetic oligonucleotide
  Sense strand starting at position 443 of SEQ ID NO: 588567
acgaaauuugugugguuau

SEQ ID NO: 873939 - RNA, 19 nt, Artificial Sequence
  Description of Artificial Sequence: Synthetic oligonucleotide
  Antisense strand to SEQ ID NO: 873938
auaaccacacaaauuucgu

SEQ ID NO: 873940 - RNA, 19 nt, Artificial Sequence
  Description of Artificial Sequence: Synthetic oligonucleotide
  Sense strand starting at position 454 of SEQ ID NO: 588567
gugguuauuuaggcugagu

SEQ ID NO: 873941 - RNA, 19 nt, Artificial Sequence
  Description of Artificial Sequence: Synthetic oligonucleotide
  Antisense strand to SEQ ID NO: 873940
acucagccuaaauaaccac

SEQ ID NO: 873942 - RNA, 19 nt, Artificial Sequence
  Description of Artificial Sequence: Synthetic oligonucleotide
  Sense strand starting at position 456 of SEQ ID NO: 588567
gguuauuuaggcugagugu

SEQ ID NO: 873943 - RNA, 19 nt, Artificial Sequence
  Description of Artificial Sequence: Synthetic oligonucleotide
  Antisense strand to SEQ ID NO: 873942
acacucagccuaaauaacc

SEQ ID NO: 873944 - RNA, 19 nt, Artificial Sequence
  Description of Artificial Sequence: Synthetic oligonucleotide
  Sense strand starting at position 457 of SEQ ID NO: 588567
guuauuuaggcugaguguu

SEQ ID NO: 873945 - RNA, 19 nt, Artificial Sequence
  Description of Artificial Sequence: Synthetic oligonucleotide
  Antisense strand to SEQ ID NO: 873944
aacacucagccuaaauaac

SEQ ID NO: 873946 - RNA, 19 nt, Artificial Sequence
  Description of Artificial Sequence: Synthetic oligonucleotide
  Sense strand starting at position 505 of SEQ ID NO: 588567
ggaggcuggacauaucagu

SEQ ID NO: 873947 - RNA, 19 nt, Artificial Sequence
  Description of Artificial Sequence: Synthetic oligonucleotide
  Antisense strand to SEQ ID NO: 873946
acugauauguccagccucc

SEQ ID NO: 873948 - RNA, 19 nt, Artificial Sequence
  Description of Artificial Sequence: Synthetic oligonucleotide
  Sense strand starting at position 510 of SEQ ID NO: 588567
cuggacauaucaguacuua

SEQ ID NO: 873949 - RNA, 19 nt, Artificial Sequence
  Description of Artificial Sequence: Synthetic oligonucleotide
  Antisense strand to SEQ ID NO: 873948
uaaguacugauauguccag

SEQ ID NO: 873950 - RNA, 19 nt, Artificial Sequence
  Description of Artificial Sequence: Synthetic oligonucleotide
  Sense strand starting at position 650 of SEQ ID NO: 588567
gccuccuggagcuguuuaa

SEQ ID NO: 873951 - RNA, 19 nt, Artificial Sequence
  Description of Artificial Sequence: Synthetic oligonucleotide
  Antisense strand to SEQ ID NO: 873950
uuaaacagcuccaggaggc

SEQ ID NO: 873952 - RNA, 19 nt, Artificial Sequence
  Description of Artificial Sequence: Synthetic oligonucleotide
  Sense strand starting at position 654 of SEQ ID NO: 588567
ccuggagcuguuuaaggua

SEQ ID NO: 873953 - RNA, 19 nt, Artificial Sequence
  Description of Artificial Sequence: Synthetic oligonucleotide
  Antisense strand to SEQ ID NO: 873952
uaccuuaaacagcuccagg

SEQ ID NO: 873954 - RNA, 19 nt, Artificial Sequence
  Description of Artificial Sequence: Synthetic oligonucleotide
  Sense strand starting at position 659 of SEQ ID NO: 588567
agcuguuuaagguagaaug

SEQ ID NO: 873955 - RNA, 19 nt, Artificial Sequence
  Description of Artificial Sequence: Synthetic oligonucleotide
  Antisense strand to SEQ ID NO: 873954
cauucuaccuuaaacagcu

SEQ ID NO: 873956 - RNA, 19 nt, Artificial Sequence
  Description of Artificial Sequence: Synthetic oligonucleotide
  Sense strand starting at position 669 of SEQ ID NO: 588567
gguagaaugcaagauugcu

SEQ ID NO: 873957 - RNA, 19 nt, Artificial Sequence
  Description of Artificial Sequence: Synthetic oligonucleotide
  Antisense strand to SEQ ID NO: 873956
agcaaucuugcauucuacc

SEQ ID NO: 873958 - RNA, 19 nt, Artificial Sequence
  Description of Artificial Sequence: Synthetic oligonucleotide
  Sense strand starting at position 885 of SEQ ID NO: 588567
cugaauauaucacacggaa

SEQ ID NO: 873959 - RNA, 19 nt, Artificial Sequence
  Description of Artificial Sequence: Synthetic oligonucleotide
  Antisense strand to SEQ ID NO: 873958
uuccgugugauauauucag

SEQ ID NO: 873960 - RNA, 19 nt, Artificial Sequence
  Description of Artificial Sequence: Synthetic oligonucleotide
  Sense strand starting at position 916 of SEQ ID NO: 588567
cacaaacugugaggacaau

SEQ ID NO: 873961 - RNA, 19 nt, Artificial Sequence
  Description of Artificial Sequence: Synthetic oligonucleotide
  Antisense strand to SEQ ID NO: 873960
auuguccucacaguuugug

SEQ ID NO: 873962 - RNA, 19 nt, Artificial Sequence
  Description of Artificial Sequence: Synthetic oligonucleotide
  Sense strand starting at position 935 of SEQ ID NO: 588567
aaggaauucuucuggaaga

SEQ ID NO: 873963 - RNA, 19 nt, Artificial Sequence
  Description of Artificial Sequence: Synthetic oligonucleotide
  Antisense strand to SEQ ID NO: 873962
ucuuccagaagaauuccuu

SEQ ID NO: 873964 - RNA, 19 nt, Artificial Sequence
  Description of Artificial Sequence: Synthetic oligonucleotide
  Sense strand starting at position 936 of SEQ ID NO: 588567
aggaauucuucuggaagau

SEQ ID NO: 873965 - RNA, 19 nt, Artificial Sequence
  Description of Artificial Sequence: Synthetic oligonucleotide
  Antisense strand to SEQ ID NO: 873964
aucuuccagaagaauuccu

SEQ ID NO: 873966 - RNA, 19 nt, Artificial Sequence
  Description of Artificial Sequence: Synthetic oligonucleotide
  Sense strand starting at position 1083 of SEQ ID NO: 588567
gggagaaguucccucucag

SEQ ID NO: 873967 - RNA, 19 nt, Artificial Sequence
  Description of Artificial Sequence: Synthetic oligonucleotide
  Antisense strand to SEQ ID NO: 873966
cugagagggaacuucuccc

SEQ ID NO: 873968 - RNA, 19 nt, Artificial Sequence
  Description of Artificial Sequence: Synthetic oligonucleotide
  Sense strand starting at position 1111 of SEQ ID NO: 588567
ggaacauugcugggacaau

SEQ ID NO: 873969 - RNA, 19 nt, Artificial Sequence
  Description of Artificial Sequence: Synthetic oligonucleotide
  Antisense strand to SEQ ID NO: 873968
auugucccagcaauguucc

SEQ ID NO: 873970 - RNA, 19 nt, Artificial Sequence
  Description of Artificial Sequence: Synthetic oligonucleotide
  Sense strand starting at position 1112 of SEQ ID NO: 588567
gaacauugcugggacaaua

SEQ ID NO: 873971 - RNA, 19 nt, Artificial Sequence
  Description of Artificial Sequence: Synthetic oligonucleotide
  Antisense strand to SEQ ID NO: 873970
uauugucccagcaauguuc

SEQ ID NO: 873972 - RNA, 19 nt, Artificial Sequence
  Description of Artificial Sequence: Synthetic oligonucleotide
  Sense strand starting at position 1140 of SEQ ID NO: 588567
ucguuaauacaguggugca

SEQ ID NO: 873973 - RNA, 19 nt, Artificial Sequence
  Description of Artificial Sequence: Synthetic oligonucleotide
  Antisense strand to SEQ ID NO: 873972
ugcaccacuguauuaacga

SEQ ID NO: 873974 - RNA, 19 nt, Artificial Sequence
  Description of Artificial Sequence: Synthetic oligonucleotide
  Sense strand starting at position 1274 of SEQ ID NO: 588567
guccgcaugugguuaucaa

SEQ ID NO: 873975 - RNA, 19 nt, Artificial Sequence
  Description of Artificial Sequence: Synthetic oligonucleotide
  Antisense strand to SEQ ID NO: 873974
uugauaaccacaugcggac

SEQ ID NO: 873976 - RNA, 19 nt, Artificial Sequence
  Description of Artificial Sequence: Synthetic oligonucleotide
  Sense strand starting at position 1275 of SEQ ID NO: 588567
uccgcaugugguuaucaau

SEQ ID NO: 873977 - RNA, 19 nt, Artificial Sequence
  Description of Artificial Sequence: Synthetic oligonucleotide
  Antisense strand to SEQ ID NO: 873976
auugauaaccacaugcgga

SEQ ID NO: 873978 - RNA, 19 nt, Artificial Sequence
  Description of Artificial Sequence: Synthetic oligonucleotide
  Sense strand starting at position 2333 of SEQ ID NO: 588567
cgccauguuggcagagagu

SEQ ID NO: 873979 - RNA, 19 nt, Artificial Sequence
  Description of Artificial Sequence: Synthetic oligonucleotide
  Antisense strand to SEQ ID NO: 873978
acucucugccaacauggcg

SEQ ID NO: 873980 - RNA, 19 nt, Artificial Sequence
  Description of Artificial Sequence: Synthetic oligonucleotide
  Sense strand starting at position 2714 of SEQ ID NO: 588567
ccucgaacucgguaaccuu

SEQ ID NO: 873981 - RNA, 19 nt, Artificial Sequence
  Description of Artificial Sequence: Synthetic oligonucleotide
  Antisense strand to SEQ ID NO: 873980
aagguuaccgaguucgagg

SEQ ID NO: 873982 - RNA, 19 nt, Artificial Sequence
  Description of Artificial Sequence: Synthetic oligonucleotide
  Sense strand starting at position 2741 of SEQ ID NO: 588567
gcuugagaugacugcgcuu

SEQ ID NO: 873983 - RNA, 19 nt, Artificial Sequence
  Description of Artificial Sequence: Synthetic oligonucleotide
  Antisense strand to SEQ ID NO: 873982
aagcgcagucaucucaagc

SEQ ID NO: 873984 - RNA, 19 nt, Artificial Sequence
  Description of Artificial Sequence: Synthetic oligonucleotide
  Sense strand starting at position 2940 of SEQ ID NO: 588567
guggcauuucugcgugucu

SEQ ID NO: 873985 - RNA, 19 nt, Artificial Sequence
  Description of Artificial Sequence: Synthetic oligonucleotide
  Antisense strand to SEQ ID NO: 873984
agacacgcagaaaugccac

SEQ ID NO: 873986 - RNA, 19 nt, Artificial Sequence
  Description of Artificial Sequence: Synthetic oligonucleotide
  Sense strand starting at position 3094 of SEQ ID NO: 588567
aaugaagucguuuauguca

SEQ ID NO: 873987 - RNA, 19 nt, Artificial Sequence
  Description of Artificial Sequence: Synthetic oligonucleotide
  Antisense strand to SEQ ID NO: 873986
ugacauaaacgacuucauu

SEQ ID NO: 873988 - RNA, 19 nt, Artificial Sequence
  Description of Artificial Sequence: Synthetic oligonucleotide
  Sense strand starting at position 3258 of SEQ ID NO: 588567
gcgcgguggcuucuguaau

SEQ ID NO: 873989 - RNA, 19 nt, Artificial Sequence
  Description of Artificial Sequence: Synthetic oligonucleotide
  Antisense strand to SEQ ID NO: 873988
auuacagaagccaccgcgc

SEQ ID NO: 873990 - RNA, 19 nt, Artificial Sequence
  Description of Artificial Sequence: Synthetic oligonucleotide
  Sense strand starting at position 3702 of SEQ ID NO: 588567
aaaugaguccaguguggug

SEQ ID NO: 873991 - RNA, 19 nt, Artificial Sequence
  Description of Artificial Sequence: Synthetic oligonucleotide
  Antisense strand to SEQ ID NO: 873990
caccacacuggacucauuu

SEQ ID NO: 873992 - RNA, 19 nt, Artificial Sequence
  Description of Artificial Sequence: Synthetic oligonucleotide
  Sense strand starting at position 3941 of SEQ ID NO: 588567
uugcaauuauguguuauuc

SEQ ID NO: 873993 - RNA, 19 nt, Artificial Sequence
  Description of Artificial Sequence: Synthetic oligonucleotide
  Antisense strand to SEQ ID NO: 873992
gaauaacacauaauugcaa

SEQ ID NO: 873994 - RNA, 19 nt, Artificial Sequence
  Description of Artificial Sequence: Synthetic oligonucleotide
  Sense strand starting at position 50 of SEQ ID NO: 588568
ccuaccagcuguguaauuu

SEQ ID NO: 873995 - RNA, 19 nt, Artificial Sequence
  Description of Artificial Sequence: Synthetic oligonucleotide
  Antisense strand to SEQ ID NO: 873994
aaauuacacagcugguagg

SEQ ID NO: 873996 - RNA, 19 nt, Artificial Sequence
  Description of Artificial Sequence: Synthetic oligonucleotide
  Sense strand starting at position 54 of SEQ ID NO: 588568
ccagcuguguaauuuauua

SEQ ID NO: 873997 - RNA, 19 nt, Artificial Sequence
  Description of Artificial Sequence: Synthetic oligonucleotide
  Antisense strand to SEQ ID NO: 873996
uaauaaauuacacagcugg

SEQ ID NO: 873998 - RNA, 19 nt, Artificial Sequence
  Description of Artificial Sequence: Synthetic oligonucleotide
  Sense strand starting at position 74 of SEQ ID NO: 588568
gggucuuccuaaucuguaa

SEQ ID NO: 873999 - RNA, 19 nt, Artificial Sequence
  Description of Artificial Sequence: Synthetic oligonucleotide
  Antisense strand to SEQ ID NO: 873998
uuacagauuaggaagaccc

SEQ ID NO: 874000 - RNA, 19 nt, Artificial Sequence
  Description of Artificial Sequence: Synthetic oligonucleotide
  Sense strand starting at position 149 of SEQ ID NO: 588568
aguuuaguuuaccucaaau

SEQ ID NO: 874001 - RNA, 19 nt, Artificial Sequence
  Description of Artificial Sequence: Synthetic oligonucleotide
  Antisense strand to SEQ ID NO: 874000
auuugagguaaacuaaacu

SEQ ID NO: 874002 - RNA, 19 nt, Artificial Sequence
  Description of Artificial Sequence: Synthetic oligonucleotide
  Sense strand starting at position 262 of SEQ ID NO: 588568
uacuuaucacgguguuaga

SEQ ID NO: 874003 - RNA, 19 nt, Artificial Sequence
  Description of Artificial Sequence: Synthetic oligonucleotide
  Antisense strand to SEQ ID NO: 874002
ucuaacaccgugauaagua

SEQ ID NO: 874004 - RNA, 19 nt, Artificial Sequence
  Description of Artificial Sequence: Synthetic oligonucleotide
  Sense strand starting at position 446 of SEQ ID NO: 588568
cuuauagaauucuagagga

SEQ ID NO: 874005 - RNA, 19 nt, Artificial Sequence
  Description of Artificial Sequence: Synthetic oligonucleotide
  Antisense strand to SEQ ID NO: 874004
uccucuagaauucuauaag

SEQ ID NO: 874006 - RNA, 19 nt, Artificial Sequence
  Description of Artificial Sequence: Synthetic oligonucleotide
  Sense strand starting at position 488 of SEQ ID NO: 588568
uccugaauugguuggguga

SEQ ID NO: 874007 - RNA, 19 nt, Artificial Sequence
  Description of Artificial Sequence: Synthetic oligonucleotide
  Antisense strand to SEQ ID NO: 874006
ucacccaaccaauucagga

SEQ ID NO: 874008 - RNA, 19 nt, Artificial Sequence
  Description of Artificial Sequence: Synthetic oligonucleotide
  Sense strand starting at position 983 of SEQ ID NO: 588568
cucuccugcuugucagaga

SEQ ID NO: 874009 - RNA, 19 nt, Artificial Sequence
  Description of Artificial Sequence: Synthetic oligonucleotide
  Antisense strand to SEQ ID NO: 874008
ucucugacaagcaggagag

SEQ ID NO: 874010 - RNA, 19 nt, Artificial Sequence
  Description of Artificial Sequence: Synthetic oligonucleotide
  Sense strand starting at position 988 of SEQ ID NO: 588568
cugcuugucagagaaugag

SEQ ID NO: 874011 - RNA, 19 nt, Artificial Sequence
  Description of Artificial Sequence: Synthetic oligonucleotide
  Antisense strand to SEQ ID NO: 874010
cucauucucugacaagcag

SEQ ID NO: 874012 - RNA, 19 nt, Artificial Sequence
  Description of Artificial Sequence: Synthetic oligonucleotide
  Sense strand starting at position 1128 of SEQ ID NO: 588568
gggcuuccaaagugacuuu

SEQ ID NO: 874013 - RNA, 19 nt, Artificial Sequence
  Description of Artificial Sequence: Synthetic oligonucleotide
  Antisense strand to SEQ ID NO: 874012
aaagucacuuuggaagccc

SEQ ID NO: 874014 - RNA, 19 nt, Artificial Sequence
  Description of Artificial Sequence: Synthetic oligonucleotide
  Sense strand starting at position 1214 of SEQ ID NO: 588568
ucuuguuuacgcuacaauc

SEQ ID NO: 874015 - RNA, 19 nt, Artificial Sequence
  Description of Artificial Sequence: Synthetic oligonucleotide
  Antisense strand to SEQ ID NO: 874014
gauuguagcguaaacaaga

SEQ ID NO: 874016 - RNA, 19 nt, Artificial Sequence
  Description of Artificial Sequence: Synthetic oligonucleotide
  Sense strand starting at position 2190 of SEQ ID NO: 588568
uugccuugagcaggaauca

SEQ ID NO: 874017 - RNA, 19 nt, Artificial Sequence
  Description of Artificial Sequence: Synthetic oligonucleotide
  Antisense strand to SEQ ID NO: 874016
ugauuccugcucaaggcaa

SEQ ID NO: 874018 - RNA, 19 nt, Artificial Sequence
  Description of Artificial Sequence: Synthetic oligonucleotide
  Sense strand starting at position 2214 of SEQ ID NO: 588568
aggcuucuccaucgaaucu

SEQ ID NO: 874019 - RNA, 19 nt, Artificial Sequence
  Description of Artificial Sequence: Synthetic oligonucleotide
  Antisense strand to SEQ ID NO: 874018
agauucgauggagaagccu

SEQ ID NO: 874020 - RNA, 19 nt, Artificial Sequence
  Description of Artificial Sequence: Synthetic oligonucleotide
  Sense strand starting at position 2264 of SEQ ID NO: 588568
uuaguucguccagaaauga

SEQ ID NO: 874021 - RNA, 19 nt, Artificial Sequence
  Description of Artificial Sequence: Synthetic oligonucleotide
  Antisense strand to SEQ ID NO: 874020
ucauuucuggacgaacuaa

SEQ ID NO: 874022 - RNA, 19 nt, Artificial Sequence
  Description of Artificial Sequence: Synthetic oligonucleotide
  Sense strand starting at position 2293 of SEQ ID NO: 588568
agcucagccucucugagaa

SEQ ID NO: 874023 - RNA, 19 nt, Artificial Sequence
  Description of Artificial Sequence: Synthetic oligonucleotide
  Antisense strand to SEQ ID NO: 874022
uucucagagaggcugagcu

SEQ ID NO: 874024 - RNA, 19 nt, Artificial Sequence
  Description of Artificial Sequence: Synthetic oligonucleotide
  Sense strand starting at position 2360 of SEQ ID NO: 588568
augugacacuucucucuga

SEQ ID NO: 874025 - RNA, 19 nt, Artificial Sequence
  Description of Artificial Sequence: Synthetic oligonucleotide
  Antisense strand to SEQ ID NO: 874024
ucagagagaagugucacau

SEQ ID NO: 874026 - RNA, 19 nt, Artificial Sequence
  Description of Artificial Sequence: Synthetic oligonucleotide
  Sense strand starting at position 2420 of SEQ ID NO: 588568
aguauauugcugugggaau

SEQ ID NO: 874027 - RNA, 19 nt, Artificial Sequence
  Description of Artificial Sequence: Synthetic oligonucleotide
  Antisense strand to SEQ ID NO: 874026
auucccacagcaauauacu

SEQ ID NO: 874028 - RNA, 19 nt, Artificial Sequence
  Description of Artificial Sequence: Synthetic oligonucleotide
  Sense strand starting at position 2497 of SEQ ID NO: 588568
agucaauguuaguuauuuc

SEQ ID NO: 874029 - RNA, 19 nt, Artificial Sequence
  Description of Artificial Sequence: Synthetic oligonucleotide
  Antisense strand to SEQ ID NO: 874028
gaaauaacuaacauugacu

SEQ ID NO: 874030 - RNA, 19 nt, Artificial Sequence
  Description of Artificial Sequence: Synthetic oligonucleotide
  Sense strand starting at position 2530 of SEQ ID NO: 588568
cuguaauauggaggugaca

SEQ ID NO: 874031 - RNA, 19 nt, Artificial Sequence
  Description of Artificial Sequence: Synthetic oligonucleotide
  Antisense strand to SEQ ID NO: 874030
ugucaccuccauauuacag

SEQ ID NO: 874032 - RNA, 19 nt, Artificial Sequence
  Description of Artificial Sequence: Synthetic oligonucleotide
  Sense strand starting at position 2532 of SEQ ID NO: 588568
guaauauggaggugacaau

SEQ ID NO: 874033 - RNA, 19 nt, Artificial Sequence
  Description of Artificial Sequence: Synthetic oligonucleotide
  Antisense strand to SEQ ID NO: 874032
auugucaccuccauauuac

SEQ ID NO: 874034 - RNA, 19 nt, Artificial Sequence
  Description of Artificial Sequence: Synthetic oligonucleotide
  Sense strand starting at position 2663 of SEQ ID NO: 588568
uagagaaagccacgaugaa

SEQ ID NO: 874035 - RNA, 19 nt, Artificial Sequence
  Description of Artificial Sequence: Synthetic oligonucleotide
  Antisense strand to SEQ ID NO: 874034
uucaucguggcuuucucua

SEQ ID NO: 874036 - RNA, 19 nt, Artificial Sequence
  Description of Artificial Sequence: Synthetic oligonucleotide
  Sense strand starting at position 2717 of SEQ ID NO: 588568
guucucccaccugaaagau

SEQ ID NO: 874037 - RNA, 19 nt, Artificial Sequence
  Description of Artificial Sequence: Synthetic oligonucleotide
  Antisense strand to SEQ ID NO: 874036
aucuuucaggugggagaac

SEQ ID NO: 874038 - RNA, 19 nt, Artificial Sequence
  Description of Artificial Sequence: Synthetic oligonucleotide
  Sense strand starting at position 3176 of SEQ ID NO: 588568
ggucauccaucacuuaaug

SEQ ID NO: 874039 - RNA, 19 nt, Artificial Sequence
  Description of Artificial Sequence: Synthetic oligonucleotide
  Antisense strand to SEQ ID NO: 874038
cauuaagugauggaugacc

SEQ ID NO: 874040 - RNA, 19 nt, Artificial Sequence
  Description of Artificial Sequence: Synthetic oligonucleotide
  Sense strand starting at position 3254 of SEQ ID NO: 588568
guacuuacacaaugucaga

SEQ ID NO: 874041 - RNA, 19 nt, Artificial Sequence
  Description of Artificial Sequence: Synthetic oligonucleotide
  Antisense strand to SEQ ID NO: 874040
ucugacauuguguaaguac

SEQ ID NO: 874042 - RNA, 19 nt, Artificial Sequence
  Description of Artificial Sequence: Synthetic oligonucleotide
  Sense strand starting at position 3462 of SEQ ID NO: 588568
gcacucugucauugaccaa

SEQ ID NO: 874043 - RNA, 19 nt, Artificial Sequence
  Description of Artificial Sequence: Synthetic oligonucleotide
  Antisense strand to SEQ ID NO: 874042
uuggucaaugacagagugc

SEQ ID NO: 874044 - RNA, 19 nt, Artificial Sequence
  Description of Artificial Sequence: Synthetic oligonucleotide
  Sense strand starting at position 3494 of SEQ ID NO: 588568
cacgcaugaccauauguga

SEQ ID NO: 874045 - RNA, 19 nt, Artificial Sequence
  Description of Artificial Sequence: Synthetic oligonucleotide
  Antisense strand to SEQ ID NO: 874044
ucacauauggucaugcgug

SEQ ID NO: 874046 - RNA, 19 nt, Artificial Sequence
  Description of Artificial Sequence: Synthetic oligonucleotide
  Sense strand starting at position 3501 of SEQ ID NO: 588568
gaccauaugugauugaucu

SEQ ID NO: 874047 - RNA, 19 nt, Artificial Sequence
  Description of Artificial Sequence: Synthetic oligonucleotide
  Antisense strand to SEQ ID NO: 874046
agaucaaucacauaugguc

SEQ ID NO: 874048 - RNA, 19 nt, Artificial Sequence
  Description of Artificial Sequence: Synthetic oligonucleotide
  Sense strand starting at position 3502 of SEQ ID NO: 588568
accauaugugauugaucuc

SEQ ID NO: 874049 - RNA, 19 nt, Artificial Sequence
  Description of Artificial Sequence: Synthetic oligonucleotide
  Antisense strand to SEQ ID NO: 874048
gagaucaaucacauauggu

SEQ ID NO: 874050 - RNA, 19 nt, Artificial Sequence
  Description of Artificial Sequence: Synthetic oligonucleotide
  Sense strand starting at position 3505 of SEQ ID NO: 588568
auaugugauugaucucuua

SEQ ID NO: 874051 - RNA, 19 nt, Artificial Sequence
  Description of Artificial Sequence: Synthetic oligonucleotide
  Antisense strand to SEQ ID NO: 874050
uaagagaucaaucacauau

SEQ ID NO: 874052 - RNA, 19 nt, Artificial Sequence
  Description of Artificial Sequence: Synthetic oligonucleotide
  Sense strand starting at position 3508 of SEQ ID NO: 588568
ugugauugaucucuuacua

SEQ ID NO: 874053 - RNA, 19 nt, Artificial Sequence
  Description of Artificial Sequence: Synthetic oligonucleotide
  Antisense strand to SEQ ID NO: 874052
uaguaagagaucaaucaca

SEQ ID NO: 874054 - RNA, 19 nt, Artificial Sequence
  Description of Artificial Sequence: Synthetic oligonucleotide
  Sense strand starting at position 3542 of SEQ ID NO: 588568
uguaauugguaucuuacca

SEQ ID NO: 874055 - RNA, 19 nt, Artificial Sequence
  Description of Artificial Sequence: Synthetic oligonucleotide
  Antisense strand to SEQ ID NO: 874054
ugguaagauaccaauuaca

SEQ ID NO: 874056 - RNA, 19 nt, Artificial Sequence
  Description of Artificial Sequence: Synthetic oligonucleotide
  Sense strand starting at position 3546 of SEQ ID NO: 588568
auugguaucuuaccacaua

SEQ ID NO: 874057 - RNA, 19 nt, Artificial Sequence
  Description of Artificial Sequence: Synthetic oligonucleotide
  Antisense strand to SEQ ID NO: 874056
uaugugguaagauaccaau

SEQ ID NO: 874058 - RNA, 19 nt, Artificial Sequence
  Description of Artificial Sequence: Synthetic oligonucleotide
  Sense strand starting at position 3549 of SEQ ID NO: 588568
gguaucuuaccacauaucu

SEQ ID NO: 874059 - RNA, 19 nt, Artificial Sequence
  Description of Artificial Sequence: Synthetic oligonucleotide
  Antisense strand to SEQ ID NO: 874058
agauaugugguaagauacc

SEQ ID NO: 874060 - RNA, 19 nt, Artificial Sequence
  Description of Artificial Sequence: Synthetic oligonucleotide
  Sense strand starting at position 3630 of SEQ ID NO: 588568
ccaucagggaccugucaga

SEQ ID NO: 874061 - RNA, 19 nt, Artificial Sequence
  Description of Artificial Sequence: Synthetic oligonucleotide
  Antisense strand to SEQ ID NO: 874060
ucugacaggucccugaugg

SEQ ID NO: 874062 - RNA, 19 nt, Artificial Sequence
  Description of Artificial Sequence: Synthetic oligonucleotide
  Sense strand starting at position 3671 of SEQ ID NO: 588568
ugugaacaaguuuggauau

SEQ ID NO: 874063 - RNA, 19 nt, Artificial Sequence
  Description of Artificial Sequence: Synthetic oligonucleotide
  Antisense strand to SEQ ID NO: 874062
auauccaaacuuguucaca

SEQ ID NO: 874064 - RNA, 19 nt, Artificial Sequence
  Description of Artificial Sequence: Synthetic oligonucleotide
  Sense strand starting at position 3673 of SEQ ID NO: 588568
ugaacaaguuuggauauuu

SEQ ID NO: 874065 - RNA, 19 nt, Artificial Sequence
  Description of Artificial Sequence: Synthetic oligonucleotide
  Antisense strand to SEQ ID NO: 874064
aaauauccaaacuuguuca

SEQ ID NO: 874066 - RNA, 19 nt, Artificial Sequence
  Description of Artificial Sequence: Synthetic oligonucleotide
  Sense strand starting at position 3696 of SEQ ID NO: 588568
uucugaggucaccagguua

SEQ ID NO: 874067 - RNA, 19 nt, Artificial Sequence
  Description of Artificial Sequence: Synthetic oligonucleotide
  Antisense strand to SEQ ID NO: 874066
uaaccuggugaccucagaa

SEQ ID NO: 874068 - RNA, 19 nt, Artificial Sequence
  Description of Artificial Sequence: Synthetic oligonucleotide
  Sense strand starting at position 3711 of SEQ ID NO: 588568
guuaucuguuccuuccuaa

SEQ ID NO: 874069 - RNA, 19 nt, Artificial Sequence
  Description of Artificial Sequence: Synthetic oligonucleotide
  Antisense strand to SEQ ID NO: 874068
uuaggaaggaacagauaac

SEQ ID NO: 874070 - RNA, 19 nt, Artificial Sequence
  Description of Artificial Sequence: Synthetic oligonucleotide
  Sense strand starting at position 3762 of SEQ ID NO: 588568
cgaguuccaaucugaagca

SEQ ID NO: 874071 - RNA, 19 nt, Artificial Sequence
  Description of Artificial Sequence: Synthetic oligonucleotide
  Antisense strand to SEQ ID NO: 874070
ugcuucagauuggaacucg

SEQ ID NO: 874072 - RNA, 19 nt, Artificial Sequence
  Description of Artificial Sequence: Synthetic oligonucleotide
  Sense strand starting at position 3864 of SEQ ID NO: 588568
uuccuagcacuuugagaga

SEQ ID NO: 874073 - RNA, 19 nt, Artificial Sequence
  Description of Artificial Sequence: Synthetic oligonucleotide
  Antisense strand to SEQ ID NO: 874072
ucucucaaagugcuaggaa

SEQ ID NO: 874074 - RNA, 19 nt, Artificial Sequence
  Description of Artificial Sequence: Synthetic oligonucleotide
  Sense strand starting at position 229 of SEQ ID NO: 588569
gccauuauuugguuugcuu

SEQ ID NO: 874075 - RNA, 19 nt, Artificial Sequence
  Description of Artificial Sequence: Synthetic oligonucleotide
  Antisense strand to SEQ ID NO: 874074
aagcaaaccaaauaauggc

SEQ ID NO: 874076 - RNA, 19 nt, Artificial Sequence
  Description of Artificial Sequence: Synthetic oligonucleotide
  Sense strand starting at position 238 of SEQ ID NO: 588569
ugguuugcuuaucuacuga

SEQ ID NO: 874077 - RNA, 19 nt, Artificial Sequence
  Description of Artificial Sequence: Synthetic oligonucleotide
  Antisense strand to SEQ ID NO: 874076
ucaguagauaagcaaacca

SEQ ID NO: 874078 - RNA, 19 nt, Artificial Sequence
  Description of Artificial Sequence: Synthetic oligonucleotide
  Sense strand starting at position 275 of SEQ ID NO: 588569
ggugcuuccugccuagaac

SEQ ID NO: 874079 - RNA, 19 nt, Artificial Sequence
  Description of Artificial Sequence: Synthetic oligonucleotide
  Antisense strand to SEQ ID NO: 874078
guucuaggcaggaagcacc

SEQ ID NO: 874080 - RNA, 19 nt, Artificial Sequence
  Description of Artificial Sequence: Synthetic oligonucleotide
  Sense strand starting at position 276 of SEQ ID NO: 588569
gugcuuccugccuagaaca

SEQ ID NO: 874081 - RNA, 19 nt, Artificial Sequence
  Description of Artificial Sequence: Synthetic oligonucleotide
  Antisense strand to SEQ ID NO: 874080
uguucuaggcaggaagcac

SEQ ID NO: 874082 - RNA, 19 nt, Artificial Sequence
  Description of Artificial Sequence: Synthetic oligonucleotide
  Sense strand starting at position 393 of SEQ ID NO: 588569
cuugaugaucucggugaag

SEQ ID NO: 874083 - RNA, 19 nt, Artificial Sequence
  Description of Artificial Sequence: Synthetic oligonucleotide
  Antisense strand to SEQ ID NO: 874082
cuucaccgagaucaucaag

SEQ ID NO: 874084 - RNA, 19 nt, Artificial Sequence
  Description of Artificial Sequence: Synthetic oligonucleotide
  Sense strand starting at position 395 of SEQ ID NO: 588569
ugaugaucucggugaaguu

SEQ ID NO: 874085 - RNA, 19 nt, Artificial Sequence
  Description of Artificial Sequence: Synthetic oligonucleotide
  Antisense strand to SEQ ID NO: 874084
aacuucaccgagaucauca

SEQ ID NO: 874086 - RNA, 19 nt, Artificial Sequence
  Description of Artificial Sequence: Synthetic oligonucleotide
  Sense strand starting at position 396 of SEQ ID NO: 588569
gaugaucucggugaaguug

SEQ ID NO: 874087 - RNA, 19 nt, Artificial Sequence
  Description of Artificial Sequence: Synthetic oligonucleotide
  Antisense strand to SEQ ID NO: 874086
caacuucaccgagaucauc

SEQ ID NO: 874088 - RNA, 19 nt, Artificial Sequence
  Description of Artificial Sequence: Synthetic oligonucleotide
  Sense strand starting at position 404 of SEQ ID NO: 588569
cggugaaguuguccaugau

SEQ ID NO: 874089 - RNA, 19 nt, Artificial Sequence
  Description of Artificial Sequence: Synthetic oligonucleotide
  Antisense strand to SEQ ID NO: 874088
aucauggacaacuucaccg

SEQ ID NO: 874090 - RNA, 19 nt, Artificial Sequence
  Description of Artificial Sequence: Synthetic oligonucleotide
  Sense strand starting at position 405 of SEQ ID NO: 588569
ggugaaguuguccaugaug

SEQ ID NO: 874091 - RNA, 19 nt, Artificial Sequence
  Description of Artificial Sequence: Synthetic oligonucleotide
  Antisense strand to SEQ ID NO: 874090
caucauggacaacuucacc

SEQ ID NO: 874092 - RNA, 19 nt, Artificial Sequence
  Description of Artificial Sequence: Synthetic oligonucleotide
  Sense strand starting at position 407 of SEQ ID NO: 588569
ugaaguuguccaugaugga

SEQ ID NO: 874093 - RNA, 19 nt, Artificial Sequence
  Description of Artificial Sequence: Synthetic oligonucleotide
  Antisense strand to SEQ ID NO: 874092
uccaucauggacaacuuca

SEQ ID NO: 874094 - RNA, 19 nt, Artificial Sequence
  Description of Artificial Sequence: Synthetic oligonucleotide
  Sense strand starting at position 408 of SEQ ID NO: 588569
gaaguuguccaugauggac

SEQ ID NO: 874095 - RNA, 19 nt, Artificial Sequence
  Description of Artificial Sequence: Synthetic oligonucleotide
  Antisense strand to SEQ ID NO: 874094
guccaucauggacaacuuc

SEQ ID NO: 874096 - RNA, 19 nt, Artificial Sequence
  Description of Artificial Sequence: Synthetic oligonucleotide
  Sense strand starting at position 634 of SEQ ID NO: 588569
gggauucccuuucugccaa

SEQ ID NO: 874097 - RNA, 19 nt, Artificial Sequence
  Description of Artificial Sequence: Synthetic oligonucleotide
  Antisense strand to SEQ ID NO: 874096
uuggcagaaagggaauccc

SEQ ID NO: 874098 - RNA, 19 nt, Artificial Sequence
  Description of Artificial Sequence: Synthetic oligonucleotide
  Sense strand starting at position 917 of SEQ ID NO: 588569
uccgaagaguccuuccaau

SEQ ID NO: 874099 - RNA, 19 nt, Artificial Sequence
  Description of Artificial Sequence: Synthetic oligonucleotide
  Antisense strand to SEQ ID NO: 874098
auuggaaggacucuucgga

SEQ ID NO: 874100 - RNA, 19 nt, Artificial Sequence
  Description of Artificial Sequence: Synthetic oligonucleotide
  Sense strand starting at position 1649 of SEQ ID NO: 588569
auaagucacacgcaggaaa

SEQ ID NO: 874101 - RNA, 19 nt, Artificial Sequence
  Description of Artificial Sequence: Synthetic oligonucleotide
  Antisense strand to SEQ ID NO: 874100
uuuccugcgugugacuuau

SEQ ID NO: 874102 - RNA, 19 nt, Artificial Sequence
  Description of Artificial Sequence: Synthetic oligonucleotide
  Sense strand starting at position 1972 of SEQ ID NO: 588569
gaaugcuguugcuuuaaau

SEQ ID NO: 874103 - RNA, 19 nt, Artificial Sequence
  Description of Artificial Sequence: Synthetic oligonucleotide
  Antisense strand to SEQ ID NO: 874102
auuuaaagcaacagcauuc

SEQ ID NO: 874104 - RNA, 19 nt, Artificial Sequence
  Description of Artificial Sequence: Synthetic oligonucleotide
  Sense strand starting at position 2089 of SEQ ID NO: 588569
uggugagugagcuguaguu

SEQ ID NO: 874105 - RNA, 19 nt, Artificial Sequence
  Description of Artificial Sequence: Synthetic oligonucleotide
  Antisense strand to SEQ ID NO: 874104
aacuacagcucacucacca

SEQ ID NO: 874106 - RNA, 19 nt, Artificial Sequence
  Description of Artificial Sequence: Synthetic oligonucleotide
  Sense strand starting at position 2101 of SEQ ID NO: 588569
uguaguuccguggcacuau

SEQ ID NO: 874107 - RNA, 19 nt, Artificial Sequence
  Description of Artificial Sequence: Synthetic oligonucleotide
  Antisense strand to SEQ ID NO: 874106
auagugccacggaacuaca

SEQ ID NO: 874108 - RNA, 19 nt, Artificial Sequence
  Description of Artificial Sequence: Synthetic oligonucleotide
  Sense strand starting at position 2577 of SEQ ID NO: 588569
caugcuugugcggcugaau

SEQ ID NO: 874109 - RNA, 19 nt, Artificial Sequence
  Description of Artificial Sequence: Synthetic oligonucleotide
  Antisense strand to SEQ ID NO: 874108
auucagccgcacaagcaug

SEQ ID NO: 874110 - RNA, 19 nt, Artificial Sequence
  Description of Artificial Sequence: Synthetic oligonucleotide
  Sense strand starting at position 2734 of SEQ ID NO: 588569
ggcgguuuaacugacguuu

SEQ ID NO: 874111 - RNA, 19 nt, Artificial Sequence
  Description of Artificial Sequence: Synthetic oligonucleotide
  Antisense strand to SEQ ID NO: 874110
aaacgucaguuaaaccgcc

SEQ ID NO: 874112 - RNA, 19 nt, Artificial Sequence
  Description of Artificial Sequence: Synthetic oligonucleotide
  Sense strand starting at position 2879 of SEQ ID NO: 588569
uggcauugguaaguaacaa

SEQ ID NO: 874113 - RNA, 19 nt, Artificial Sequence
  Description of Artificial Sequence: Synthetic oligonucleotide
  Antisense strand to SEQ ID NO: 874112
uuguuacuuaccaaugcca

SEQ ID NO: 874114 - RNA, 19 nt, Artificial Sequence
  Description of Artificial Sequence: Synthetic oligonucleotide
  Sense strand starting at position 2880 of SEQ ID NO: 588569
ggcauugguaaguaacaaa

SEQ ID NO: 874115 - RNA, 19 nt, Artificial Sequence
  Description of Artificial Sequence: Synthetic oligonucleotide
  Antisense strand to SEQ ID NO: 874114
uuuguuacuuaccaaugcc

SEQ ID NO: 874116 - RNA, 19 nt, Artificial Sequence
  Description of Artificial Sequence: Synthetic oligonucleotide
  Sense strand starting at position 2948 of SEQ ID NO: 588569
gguuguguuguaucuugua

SEQ ID NO: 874117 - RNA, 19 nt, Artificial Sequence
  Description of Artificial Sequence: Synthetic oligonucleotide
  Antisense strand to SEQ ID NO: 874116
uacaagauacaacacaacc

SEQ ID NO: 874118 - RNA, 19 nt, Artificial Sequence
  Description of Artificial Sequence: Synthetic oligonucleotide
  Sense strand starting at position 2985 of SEQ ID NO: 588569
guggucgcaguccuuaauu

SEQ ID NO: 874119 - RNA, 19 nt, Artificial Sequence
  Description of Artificial Sequence: Synthetic oligonucleotide
  Antisense strand to SEQ ID NO: 874118
aauuaaggacugcgaccac

SEQ ID NO: 874120 - RNA, 19 nt, Artificial Sequence
  Description of Artificial Sequence: Synthetic oligonucleotide
  Sense strand starting at position 3001 of SEQ ID NO: 588569
auuugugucucuuagagac

SEQ ID NO: 874121 - RNA, 19 nt, Artificial Sequence
  Description of Artificial Sequence: Synthetic oligonucleotide
  Antisense strand to SEQ ID NO: 874120
gucucuaagagacacaaau

SEQ ID NO: 874122 - RNA, 19 nt, Artificial Sequence
  Description of Artificial Sequence: Synthetic oligonucleotide
  Sense strand starting at position 3053 of SEQ ID NO: 588569
ggaguugcugagcgagcau

SEQ ID NO: 874123 - RNA, 19 nt, Artificial Sequence
  Description of Artificial Sequence: Synthetic oligonucleotide
  Antisense strand to SEQ ID NO: 874122
augcucgcucagcaacucc

SEQ ID NO: 874124 - RNA, 19 nt, Artificial Sequence
  Description of Artificial Sequence: Synthetic oligonucleotide
  Sense strand starting at position 3084 of SEQ ID NO: 588569
gguaguggccuugaauuca

SEQ ID NO: 874125 - RNA, 19 nt, Artificial Sequence
  Description of Artificial Sequence: Synthetic oligonucleotide
  Antisense strand to SEQ ID NO: 874124
ugaauucaaggccacuacc

SEQ ID NO: 874126 - RNA, 19 nt, Artificial Sequence
  Description of Artificial Sequence: Synthetic oligonucleotide
  Sense strand starting at position 3183 of SEQ ID NO: 588569
cuuggcuucuuguuagaug

SEQ ID NO: 874127 - RNA, 19 nt, Artificial Sequence
  Description of Artificial Sequence: Synthetic oligonucleotide
  Antisense strand to SEQ ID NO: 874126
caucuaacaagaagccaag

SEQ ID NO: 874128 - RNA, 19 nt, Artificial Sequence
  Description of Artificial Sequence: Synthetic oligonucleotide
  Sense strand starting at position 3188 of SEQ ID NO: 588569
cuucuuguuagaugaggaa

SEQ ID NO: 874129 - RNA, 19 nt, Artificial Sequence
  Description of Artificial Sequence: Synthetic oligonucleotide
  Antisense strand to SEQ ID NO: 874128
uuccucaucuaacaagaag

SEQ ID NO: 874130 - RNA, 19 nt, Artificial Sequence
  Description of Artificial Sequence: Synthetic oligonucleotide
  Sense strand starting at position 3227 of SEQ ID NO: 588569
ucagguguuugugugcaga

SEQ ID NO: 874131 - RNA, 19 nt, Artificial Sequence
  Description of Artificial Sequence: Synthetic oligonucleotide
  Antisense strand to SEQ ID NO: 874130
ucugcacacaaacaccuga

SEQ ID NO: 874132 - RNA, 19 nt, Artificial Sequence
  Description of Artificial Sequence: Synthetic oligonucleotide
  Sense strand starting at position 3229 of SEQ ID NO: 588569
agguguuugugugcagaug

SEQ ID NO: 874133 - RNA, 19 nt, Artificial Sequence
  Description of Artificial Sequence: Synthetic oligonucleotide
  Antisense strand to SEQ ID NO: 874132
caucugcacacaaacaccu

SEQ ID NO: 874134 - RNA, 19 nt, Artificial Sequence
  Description of Artificial Sequence: Synthetic oligonucleotide
  Sense strand starting at position 3230 of SEQ ID NO: 588569
gguguuugugugcagauga

SEQ ID NO: 874135 - RNA, 19 nt, Artificial Sequence
  Description of Artificial Sequence: Synthetic oligonucleotide
  Antisense strand to SEQ ID NO: 874134
ucaucugcacacaaacacc

SEQ ID NO: 874136 - RNA, 19 nt, Artificial Sequence
  Description of Artificial Sequence: Synthetic oligonucleotide
  Sense strand starting at position 3235 of SEQ ID NO: 588569
uugugugcagaugauguaa

SEQ ID NO: 874137 - RNA, 19 nt, Artificial Sequence
  Description of Artificial Sequence: Synthetic oligonucleotide
  Antisense strand to SEQ ID NO: 874136
uuacaucaucugcacacaa

SEQ ID NO: 874138 - RNA, 19 nt, Artificial Sequence
  Description of Artificial Sequence: Synthetic oligonucleotide
  Sense strand starting at position 3340 of SEQ ID NO: 588569
acaugaacuugacauggaa

SEQ ID NO: 874139 - RNA, 19 nt, Artificial Sequence
  Description of Artificial Sequence: Synthetic oligonucleotide
  Antisense strand to SEQ ID NO: 874138
uuccaugucaaguucaugu

SEQ ID NO: 874140 - RNA, 19 nt, Artificial Sequence
  Description of Artificial Sequence: Synthetic oligonucleotide
  Sense strand starting at position 3549 of SEQ ID NO: 588569
gguucuguggcguggaaag

SEQ ID NO: 874141 - RNA, 19 nt, Artificial Sequence
  Description of Artificial Sequence: Synthetic oligonucleotide
  Antisense strand to SEQ ID NO: 874140
cuuuccacgccacagaacc

SEQ ID NO: 874142 - RNA, 19 nt, Artificial Sequence
  Description of Artificial Sequence: Synthetic oligonucleotide
  Sense strand starting at position 3618 of SEQ ID NO: 588569
gucuuaggcuucuugaacu

SEQ ID NO: 874143 - RNA, 19 nt, Artificial Sequence
  Description of Artificial Sequence: Synthetic oligonucleotide
  Antisense strand to SEQ ID NO: 874142
aguucaagaagccuaagac

SEQ ID NO: 874144 - RNA, 19 nt, Artificial Sequence
  Description of Artificial Sequence: Synthetic oligonucleotide
  Sense strand starting at position 3636 of SEQ ID NO: 588569
ugcaguugucauuaaauua

SEQ ID NO: 874145 - RNA, 19 nt, Artificial Sequence
  Description of Artificial Sequence: Synthetic oligonucleotide
  Antisense strand to SEQ ID NO: 874144
uaauuuaaugacaacugca

SEQ ID NO: 874146 - RNA, 19 nt, Artificial Sequence
  Description of Artificial Sequence: Synthetic oligonucleotide
  Sense strand starting at position 3675 of SEQ ID NO: 588569
aguccagcauuuguuauua

SEQ ID NO: 874147 - RNA, 19 nt, Artificial Sequence
  Description of Artificial Sequence: Synthetic oligonucleotide
  Antisense strand to SEQ ID NO: 874146
uaauaacaaaugcuggacu

SEQ ID NO: 874148 - RNA, 19 nt, Artificial Sequence
  Description of Artificial Sequence: Synthetic oligonucleotide
  Sense strand starting at position 3691 of SEQ ID NO: 588569
uuaaguguuaagugacaag

SEQ ID NO: 874149 - RNA, 19 nt, Artificial Sequence
  Description of Artificial Sequence: Synthetic oligonucleotide
  Antisense strand to SEQ ID NO: 874148
cuugucacuuaacacuuaa

SEQ ID NO: 874150 - RNA, 19 nt, Artificial Sequence
  Description of Artificial Sequence: Synthetic oligonucleotide
  Sense strand starting at position 3730 of SEQ ID NO: 588569
gccuaaacugaagaguguu

SEQ ID NO: 874151 - RNA, 19 nt, Artificial Sequence
  Description of Artificial Sequence: Synthetic oligonucleotide
  Antisense strand to SEQ ID NO: 874150
aacacucuucaguuuaggc

SEQ ID NO: 874152 - RNA, 19 nt, Artificial Sequence
  Description of Artificial Sequence: Synthetic oligonucleotide
  Sense strand starting at position 3934 of SEQ ID NO: 588569
ggcuguugcagugauguaa

SEQ ID NO: 874153 - RNA, 19 nt, Artificial Sequence
  Description of Artificial Sequence: Synthetic oligonucleotide
  Antisense strand to SEQ ID NO: 874152
uuacaucacugcaacagcc

SEQ ID NO: 874154 - RNA, 19 nt, Artificial Sequence
  Description of Artificial Sequence: Synthetic oligonucleotide
  Sense strand starting at position 5 of SEQ ID NO: 588570
aggagacuuucuggaauuu

SEQ ID NO: 874155 - RNA, 19 nt, Artificial Sequence
  Description of Artificial Sequence: Synthetic oligonucleotide
  Antisense strand to SEQ ID NO: 874154
aaauuccagaaagucuccu

SEQ ID NO: 874156 - RNA, 19 nt, Artificial Sequence
  Description of Artificial Sequence: Synthetic oligonucleotide
  Sense strand starting at position 40 of SEQ ID NO: 588570
acugccucucacuaagagu

SEQ ID NO: 874157 - RNA, 19 nt, Artificial Sequence
  Description of Artificial Sequence: Synthetic oligonucleotide
  Antisense strand to SEQ ID NO: 874156
acucuuagugagaggcagu

SEQ ID NO: 874158 - RNA, 19 nt, Artificial Sequence
  Description of Artificial Sequence: Synthetic oligonucleotide
  Sense strand starting at position 77 of SEQ ID NO: 588570
aucauuacacuuggcagaa

SEQ ID NO: 874159 - RNA, 19 nt, Artificial Sequence
  Description of Artificial Sequence: Synthetic oligonucleotide
  Antisense strand to SEQ ID NO: 874158
uucugccaaguguaaugau

SEQ ID NO: 874160 - RNA, 19 nt, Artificial Sequence
  Description of Artificial Sequence: Synthetic oligonucleotide
  Sense strand starting at position 78 of SEQ ID NO: 588570
ucauuacacuuggcagaac

SEQ ID NO: 874161 - RNA, 19 nt, Artificial Sequence
  Description of Artificial Sequence: Synthetic oligonucleotide
  Antisense strand to SEQ ID NO: 874160
guucugccaaguguaauga

SEQ ID NO: 874162 - RNA, 19 nt, Artificial Sequence
  Description of Artificial Sequence: Synthetic oligonucleotide
  Sense strand starting at position 139 of SEQ ID NO: 588570
gggauagauuuguacauga

SEQ ID NO: 874163 - RNA, 19 nt, Artificial Sequence
  Description of Artificial Sequence: Synthetic oligonucleotide
  Antisense strand to SEQ ID NO: 874162
ucauguacaaaucuauccc

SEQ ID NO: 874164 - RNA, 19 nt, Artificial Sequence
  Description of Artificial Sequence: Synthetic oligonucleotide
  Sense strand starting at position 422 of SEQ ID NO: 588570
ggcacuacuguacaaagau

SEQ ID NO: 874165 - RNA, 19 nt, Artificial Sequence
  Description of Artificial Sequence: Synthetic oligonucleotide
  Antisense strand to SEQ ID NO: 874164
aucuuuguacaguagugcc

SEQ ID NO: 874166 - RNA, 19 nt, Artificial Sequence
  Description of Artificial Sequence: Synthetic oligonucleotide
  Sense strand starting at position 454 of SEQ ID NO: 588570
aggauaaugucagcacucu

SEQ ID NO: 874167 - RNA, 19 nt, Artificial Sequence
  Description of Artificial Sequence: Synthetic oligonucleotide
  Antisense strand to SEQ ID NO: 874166
agagugcugacauuauccu

SEQ ID NO: 874168 - RNA, 19 nt, Artificial Sequence
  Description of Artificial Sequence: Synthetic oligonucleotide
  Sense strand starting at position 455 of SEQ ID NO: 588570
ggauaaugucagcacucuu

SEQ ID NO: 874169 - RNA, 19 nt, Artificial Sequence
  Description of Artificial Sequence: Synthetic oligonucleotide
  Antisense strand to SEQ ID NO: 874168
aagagugcugacauuaucc

SEQ ID NO: 874170 - RNA, 19 nt, Artificial Sequence
  Description of Artificial Sequence: Synthetic oligonucleotide
  Sense strand starting at position 498 of SEQ ID NO: 588570
ggguuauaauauccugaac

SEQ ID NO: 874171 - RNA, 19 nt, Artificial Sequence
  Description of Artificial Sequence: Synthetic oligonucleotide
  Antisense strand to SEQ ID NO: 874170
guucaggauauuauaaccc

SEQ ID NO: 874172 - RNA, 19 nt, Artificial Sequence
  Description of Artificial Sequence: Synthetic oligonucleotide
  Sense strand starting at position 664 of SEQ ID NO: 588570
ggcugugugauuuacggca

SEQ ID NO: 874173 - RNA, 19 nt, Artificial Sequence
  Description of Artificial Sequence: Synthetic oligonucleotide
  Antisense strand to SEQ ID NO: 874172
ugccguaaaucacacagcc

SEQ ID NO: 874174 - RNA, 19 nt, Artificial Sequence
  Description of Artificial Sequence: Synthetic oligonucleotide
  Sense strand starting at position 894 of SEQ ID NO: 588570
auucuaaccuuccugggaa

SEQ ID NO: 874175 - RNA, 19 nt, Artificial Sequence
  Description of Artificial Sequence: Synthetic oligonucleotide
  Antisense strand to SEQ ID NO: 874174
uucccaggaagguuagaau

SEQ ID NO: 874176 - RNA, 19 nt, Artificial Sequence
  Description of Artificial Sequence: Synthetic oligonucleotide
  Sense strand starting at position 1160 of SEQ ID NO: 588570
gucucuacugcggaaggaa

SEQ ID NO: 874177 - RNA, 19 nt, Artificial Sequence
  Description of Artificial Sequence: Synthetic oligonucleotide
  Antisense strand to SEQ ID NO: 874176
uuccuuccgcaguagagac

SEQ ID NO: 874178 - RNA, 19 nt, Artificial Sequence
  Description of Artificial Sequence: Synthetic oligonucleotide
  Sense strand starting at position 1590 of SEQ ID NO: 588570
uuaagaugucccugaggga

SEQ ID NO: 874179 - RNA, 19 nt, Artificial Sequence
  Description of Artificial Sequence: Synthetic oligonucleotide
  Antisense strand to SEQ ID NO: 874178
ucccucagggacaucuuaa

SEQ ID NO: 874180 - RNA, 19 nt, Artificial Sequence
  Description of Artificial Sequence: Synthetic oligonucleotide
  Sense strand starting at position 1786 of SEQ ID NO: 588570
ccuggaagugcgcaauaaa

SEQ ID NO: 874181 - RNA, 19 nt, Artificial Sequence
  Description of Artificial Sequence: Synthetic oligonucleotide
  Antisense strand to SEQ ID NO: 874180
uuuauugcgcacuuccagg

SEQ ID NO: 874182 - RNA, 19 nt, Artificial Sequence
  Description of Artificial Sequence: Synthetic oligonucleotide
  Sense strand starting at position 2019 of SEQ ID NO: 588570
gaugacguaucuccgaaga

SEQ ID NO: 874183 - RNA, 19 nt, Artificial Sequence
  Description of Artificial Sequence: Synthetic oligonucleotide
  Antisense strand to SEQ ID NO: 874182
ucuucggagauacgucauc

SEQ ID NO: 874184 - RNA, 19 nt, Artificial Sequence
  Description of Artificial Sequence: Synthetic oligonucleotide
  Sense strand starting at position 2030 of SEQ ID NO: 588570
uccgaagaccucugggaaa

SEQ ID NO: 874185 - RNA, 19 nt, Artificial Sequence
  Description of Artificial Sequence: Synthetic oligonucleotide
  Antisense strand to SEQ ID NO: 874184
uuucccagaggucuucgga

SEQ ID NO: 874186 - RNA, 19 nt, Artificial Sequence
  Description of Artificial Sequence: Synthetic oligonucleotide
  Sense strand starting at position 2171 of SEQ ID NO: 588570
uugcuuaauggugacaaag

SEQ ID NO: 874187 - RNA, 19 nt, Artificial Sequence
  Description of Artificial Sequence: Synthetic oligonucleotide
  Antisense strand to SEQ ID NO: 874186
cuuugucaccauuaagcaa

SEQ ID NO: 874188 - RNA, 19 nt, Artificial Sequence
  Description of Artificial Sequence: Synthetic oligonucleotide
  Sense strand starting at position 2249 of SEQ ID NO: 588570
aauugcucagagcaauagu

SEQ ID NO: 874189 - RNA, 19 nt, Artificial Sequence
  Description of Artificial Sequence: Synthetic oligonucleotide
  Antisense strand to SEQ ID NO: 874188
acuauugcucugagcaauu

SEQ ID NO: 874190 - RNA, 19 nt, Artificial Sequence
  Description of Artificial Sequence: Synthetic oligonucleotide
  Sense strand starting at position 2332 of SEQ ID NO: 588570
gaaggaaaguuucuucuuu

SEQ ID NO: 874191 - RNA, 19 nt, Artificial Sequence
  Description of Artificial Sequence: Synthetic oligonucleotide
  Antisense strand to SEQ ID NO: 874190
aaagaagaaacuuuccuuc

SEQ ID NO: 874192 - RNA, 19 nt, Artificial Sequence
  Description of Artificial Sequence: Synthetic oligonucleotide
  Sense strand starting at position 2436 of SEQ ID NO: 588570
auagaaaucgauggaugcu

SEQ ID NO: 874193 - RNA, 19 nt, Artificial Sequence
  Description of Artificial Sequence: Synthetic oligonucleotide
  Antisense strand to SEQ ID NO: 874192
agcauccaucgauuucuau

SEQ ID NO: 874194 - RNA, 19 nt, Artificial Sequence
  Description of Artificial Sequence: Synthetic oligonucleotide
  Sense strand starting at position 2439 of SEQ ID NO: 588570
gaaaucgauggaugcuaaa

SEQ ID NO: 874195 - RNA, 19 nt, Artificial Sequence
  Description of Artificial Sequence: Synthetic oligonucleotide
  Antisense strand to SEQ ID NO: 874194
uuuagcauccaucgauuuc

SEQ ID NO: 874196 - RNA, 19 nt, Artificial Sequence
  Description of Artificial Sequence: Synthetic oligonucleotide
  Sense strand starting at position 2704 of SEQ ID NO: 588570
gugauacuggcauacaaug

SEQ ID NO: 874197 - RNA, 19 nt, Artificial Sequence
  Description of Artificial Sequence: Synthetic oligonucleotide
  Antisense strand to SEQ ID NO: 874196
cauuguaugccaguaucac

SEQ ID NO: 874198 - RNA, 19 nt, Artificial Sequence
  Description of Artificial Sequence: Synthetic oligonucleotide
  Sense strand starting at position 2756 of SEQ ID NO: 588570
acauaugcuaccuggagga

SEQ ID NO: 874199 - RNA, 19 nt, Artificial Sequence
  Description of Artificial Sequence: Synthetic oligonucleotide
  Antisense strand to SEQ ID NO: 874198
uccuccagguagcauaugu

SEQ ID NO: 874200 - RNA, 19 nt, Artificial Sequence
  Description of Artificial Sequence: Synthetic oligonucleotide
  Sense strand starting at position 2840 of SEQ ID NO: 588570
acuuauaugagguguuuag

SEQ ID NO: 874201 - RNA, 19 nt, Artificial Sequence
  Description of Artificial Sequence: Synthetic oligonucleotide
  Antisense strand to SEQ ID NO: 874200
cuaaacaccucauauaagu

SEQ ID NO: 874202 - RNA, 19 nt, Artificial Sequence
  Description of Artificial Sequence: Synthetic oligonucleotide
  Sense strand starting at position 2844 of SEQ ID NO: 588570
auaugagguguuuagggua

SEQ ID NO: 874203 - RNA, 19 nt, Artificial Sequence
  Description of Artificial Sequence: Synthetic oligonucleotide
  Antisense strand to SEQ ID NO: 874202
uacccuaaacaccucauau

SEQ ID NO: 874204 - RNA, 19 nt, Artificial Sequence
  Description of Artificial Sequence: Synthetic oligonucleotide
  Sense strand starting at position 2849 of SEQ ID NO: 588570
agguguuuaggguagucaa

SEQ ID NO: 874205 - RNA, 19 nt, Artificial Sequence
  Description of Artificial Sequence: Synthetic oligonucleotide
  Antisense strand to SEQ ID NO: 874204
uugacuacccuaaacaccu

SEQ ID NO: 874206 - RNA, 19 nt, Artificial Sequence
  Description of Artificial Sequence: Synthetic oligonucleotide
  Sense strand starting at position 2937 of SEQ ID NO: 588570
uagcauagagguuguggaa

SEQ ID NO: 874207 - RNA, 19 nt, Artificial Sequence
  Description of Artificial Sequence: Synthetic oligonucleotide
  Antisense strand to SEQ ID NO: 874206
uuccacaaccucuaugcua

SEQ ID NO: 874208 - RNA, 19 nt, Artificial Sequence
  Description of Artificial Sequence: Synthetic oligonucleotide
  Sense strand starting at position 2958 of SEQ ID NO: 588570
aagagaagguuugggauuu

SEQ ID NO: 874209 - RNA, 19 nt, Artificial Sequence
  Description of Artificial Sequence: Synthetic oligonucleotide
  Antisense strand to SEQ ID NO: 874208
aaaucccaaaccuucucuu

SEQ ID NO: 874210 - RNA, 19 nt, Artificial Sequence
  Description of Artificial Sequence: Synthetic oligonucleotide
  Sense strand starting at position 2959 of SEQ ID NO: 588570
agagaagguuugggauuua

SEQ ID NO: 874211 - RNA, 19 nt, Artificial Sequence
  Description of Artificial Sequence: Synthetic oligonucleotide
  Antisense strand to SEQ ID NO: 874210
uaaaucccaaaccuucucu

SEQ ID NO: 874212 - RNA, 19 nt, Artificial Sequence
  Description of Artificial Sequence: Synthetic oligonucleotide
  Sense strand starting at position 3106 of SEQ ID NO: 588570
ucauguucuuuccuuagag

SEQ ID NO: 874213 - RNA, 19 nt, Artificial Sequence
  Description of Artificial Sequence: Synthetic oligonucleotide
  Antisense strand to SEQ ID NO: 874212
cucuaaggaaagaacauga

SEQ ID NO: 874214 - RNA, 19 nt, Artificial Sequence
  Description of Artificial Sequence: Synthetic oligonucleotide
  Sense strand starting at position 3108 of SEQ ID NO: 588570
auguucuuuccuuagagga

SEQ ID NO: 874215 - RNA, 19 nt, Artificial Sequence
  Description of Artificial Sequence: Synthetic oligonucleotide
  Antisense strand to SEQ ID NO: 874214
uccucuaaggaaagaacau

SEQ ID NO: 874216 - RNA, 19 nt, Artificial Sequence
  Description of Artificial Sequence: Synthetic oligonucleotide
  Sense strand starting at position 3169 of SEQ ID NO: 588570
ggcagaucaugauugugac

SEQ ID NO: 874217 - RNA, 19 nt, Artificial Sequence
  Description of Artificial Sequence: Synthetic oligonucleotide
  Antisense strand to SEQ ID NO: 874216
gucacaaucaugaucugcc

SEQ ID NO: 874218 - RNA, 19 nt, Artificial Sequence
  Description of Artificial Sequence: Synthetic oligonucleotide
  Sense strand starting at position 3218 of SEQ ID NO: 588570
aagaguccuccuugguuaa

SEQ ID NO: 874219 - RNA, 19 nt, Artificial Sequence
  Description of Artificial Sequence: Synthetic oligonucleotide
  Antisense strand to SEQ ID NO: 874218
uuaaccaaggaggacucuu

SEQ ID NO: 874220 - RNA, 19 nt, Artificial Sequence
  Description of Artificial Sequence: Synthetic oligonucleotide
  Sense strand starting at position 3307 of SEQ ID NO: 588570
ggccauauuuaagucugua

SEQ ID NO: 874221 - RNA, 19 nt, Artificial Sequence
  Description of Artificial Sequence: Synthetic oligonucleotide
  Antisense strand to SEQ ID NO: 874220
uacagacuuaaauauggcc

SEQ ID NO: 874222 - RNA, 19 nt, Artificial Sequence
  Description of Artificial Sequence: Synthetic oligonucleotide
  Sense strand starting at position 3315 of SEQ ID NO: 588570
uuaagucuguacuuaaaga

SEQ ID NO: 874223 - RNA, 19 nt, Artificial Sequence
  Description of Artificial Sequence: Synthetic oligonucleotide
  Antisense strand to SEQ ID NO: 874222
ucuuuaaguacagacuuaa

SEQ ID NO: 874224 - RNA, 19 nt, Artificial Sequence
  Description of Artificial Sequence: Synthetic oligonucleotide
  Sense strand starting at position 3365 of SEQ ID NO: 588570
gguggugauggccauacaa

SEQ ID NO: 874225 - RNA, 19 nt, Artificial Sequence
  Description of Artificial Sequence: Synthetic oligonucleotide
  Antisense strand to SEQ ID NO: 874224
uuguauggccaucaccacc

SEQ ID NO: 874226 - RNA, 19 nt, Artificial Sequence
  Description of Artificial Sequence: Synthetic oligonucleotide
  Sense strand starting at position 3367 of SEQ ID NO: 588570
uggugauggccauacaaca

SEQ ID NO: 874227 - RNA, 19 nt, Artificial Sequence
  Description of Artificial Sequence: Synthetic oligonucleotide
  Antisense strand to SEQ ID NO: 874226
uguuguauggccaucacca

SEQ ID NO: 874228 - RNA, 19 nt, Artificial Sequence
  Description of Artificial Sequence: Synthetic oligonucleotide
  Sense strand starting at position 3375 of SEQ ID NO: 588570
gccauacaacaaugugauu

SEQ ID NO: 874229 - RNA, 19 nt, Artificial Sequence
  Description of Artificial Sequence: Synthetic oligonucleotide
  Antisense strand to SEQ ID NO: 874228
aaucacauuguuguauggc

SEQ ID NO: 874230 - RNA, 19 nt, Artificial Sequence
  Description of Artificial Sequence: Synthetic oligonucleotide
  Sense strand starting at position 3605 of SEQ ID NO: 588570
ugugcaccuccugauacaa

SEQ ID NO: 874231 - RNA, 19 nt, Artificial Sequence
  Description of Artificial Sequence: Synthetic oligonucleotide
  Antisense strand to SEQ ID NO: 874230
uuguaucaggaggugcaca

SEQ ID NO: 874232 - RNA, 19 nt, Artificial Sequence
  Description of Artificial Sequence: Synthetic oligonucleotide
  Sense strand starting at position 3754 of SEQ ID NO: 588570
caagaaauaucugugucag

SEQ ID NO: 874233 - RNA, 19 nt, Artificial Sequence
  Description of Artificial Sequence: Synthetic oligonucleotide
  Antisense strand to SEQ ID NO: 874232
cugacacagauauuucuug

SEQ ID NO: 874234 - RNA, 19 nt, Artificial Sequence
  Description of Artificial Sequence: Synthetic oligonucleotide
  Sense strand starting at position 46 of SEQ ID NO: 588571
gcuaaugcauuccuugaag

SEQ ID NO: 874235 - RNA, 19 nt, Artificial Sequence
  Description of Artificial Sequence: Synthetic oligonucleotide
  Antisense strand to SEQ ID NO: 874234
cuucaaggaaugcauuagc

SEQ ID NO: 874236 - RNA, 19 nt, Artificial Sequence
  Description of Artificial Sequence: Synthetic oligonucleotide
  Sense strand starting at position 155 of SEQ ID NO: 588571
gguucauaaccauguggga

SEQ ID NO: 874237 - RNA, 19 nt, Artificial Sequence
  Description of Artificial Sequence: Synthetic oligonucleotide
  Antisense strand to SEQ ID NO: 874236
ucccacaugguuaugaacc

SEQ ID NO: 874238 - RNA, 19 nt, Artificial Sequence
  Description of Artificial Sequence: Synthetic oligonucleotide
  Sense strand starting at position 198 of SEQ ID NO: 588571
guccaaaguccauaccuga

SEQ ID NO: 874239 - RNA, 19 nt, Artificial Sequence
  Description of Artificial Sequence: Synthetic oligonucleotide
  Antisense strand to SEQ ID NO: 874238
ucagguauggacuuuggac

SEQ ID NO: 874240 - RNA, 19 nt, Artificial Sequence
  Description of Artificial Sequence: Synthetic oligonucleotide
  Sense strand starting at position 374 of SEQ ID NO: 588571
aggcccacuuaagauuuaa

SEQ ID NO: 874241 - RNA, 19 nt, Artificial Sequence
  Description of Artificial Sequence: Synthetic oligonucleotide
  Antisense strand to SEQ ID NO: 874240
uuaaaucuuaagugggccu

SEQ ID NO: 874242 - RNA, 19 nt, Artificial Sequence
  Description of Artificial Sequence: Synthetic oligonucleotide
  Sense strand starting at position 402 of SEQ ID NO: 588571
gaauacgaguugucuuuaa

SEQ ID NO: 874243 - RNA, 19 nt, Artificial Sequence
  Description of Artificial Sequence: Synthetic oligonucleotide
  Antisense strand to SEQ ID NO: 874242
uuaaagacaacucguauuc

SEQ ID NO: 874244 - RNA, 19 nt, Artificial Sequence
  Description of Artificial Sequence: Synthetic oligonucleotide
  Sense strand starting at position 406 of SEQ ID NO: 588571
acgaguugucuuuaacuuu

SEQ ID NO: 874245 - RNA, 19 nt, Artificial Sequence
  Description of Artificial Sequence: Synthetic oligonucleotide
  Antisense strand to SEQ ID NO: 874244
aaaguuaaagacaacucgu

SEQ ID NO: 874246 - RNA, 19 nt, Artificial Sequence
  Description of Artificial Sequence: Synthetic oligonucleotide
  Sense strand starting at position 414 of SEQ ID NO: 588571
ucuuuaacuuugcuugaag

SEQ ID NO: 874247 - RNA, 19 nt, Artificial Sequence
  Description of Artificial Sequence: Synthetic oligonucleotide
  Antisense strand to SEQ ID NO: 874246
cuucaagcaaaguuaaaga

SEQ ID NO: 874248 - RNA, 19 nt, Artificial Sequence
  Description of Artificial Sequence: Synthetic oligonucleotide
  Sense strand starting at position 415 of SEQ ID NO: 588571
cuuuaacuuugcuugaaga

SEQ ID NO: 874249 - RNA, 19 nt, Artificial Sequence
  Description of Artificial Sequence: Synthetic oligonucleotide
  Antisense strand to SEQ ID NO: 874248
ucuucaagcaaaguuaaag

SEQ ID NO: 874250 - RNA, 19 nt, Artificial Sequence
  Description of Artificial Sequence: Synthetic oligonucleotide
  Sense strand starting at position 416 of SEQ ID NO: 588571
uuuaacuuugcuugaagac

SEQ ID NO: 874251 - RNA, 19 nt, Artificial Sequence
  Description of Artificial Sequence: Synthetic oligonucleotide
  Antisense strand to SEQ ID NO: 874250
gucuucaagcaaaguuaaa

SEQ ID NO: 874252 - RNA, 19 nt, Artificial Sequence
  Description of Artificial Sequence: Synthetic oligonucleotide
  Sense strand starting at position 417 of SEQ ID NO: 588571
uuaacuuugcuugaagacu

SEQ ID NO: 874253 - RNA, 19 nt, Artificial Sequence
  Description of Artificial Sequence: Synthetic oligonucleotide
  Antisense strand to SEQ ID NO: 874252
agucuucaagcaaaguuaa

SEQ ID NO: 874254 - RNA, 19 nt, Artificial Sequence
  Description of Artificial Sequence: Synthetic oligonucleotide
  Sense strand starting at position 500 of SEQ ID NO: 588571
guugaacauccuggcuuaa

SEQ ID NO: 874255 - RNA, 19 nt, Artificial Sequence
  Description of Artificial Sequence: Synthetic oligonucleotide
  Antisense strand to SEQ ID NO: 874254
uuaagccaggauguucaac

SEQ ID NO: 874256 - RNA, 19 nt, Artificial Sequence
  Description of Artificial Sequence: Synthetic oligonucleotide
  Sense strand starting at position 531 of SEQ ID NO: 588571
aggcauccuugcuuaaaug

SEQ ID NO: 874257 - RNA, 19 nt, Artificial Sequence
  Description of Artificial Sequence: Synthetic oligonucleotide
  Antisense strand to SEQ ID NO: 874256
cauuuaagcaaggaugccu

SEQ ID NO: 874258 - RNA, 19 nt, Artificial Sequence
  Description of Artificial Sequence: Synthetic oligonucleotide
  Sense strand starting at position 559 of SEQ ID NO: 588571
gccaaacauguugaccuua

SEQ ID NO: 874259 - RNA, 19 nt, Artificial Sequence
  Description of Artificial Sequence: Synthetic oligonucleotide
  Antisense strand to SEQ ID NO: 874258
uaaggucaacauguuuggc

SEQ ID NO: 874260 - RNA, 19 nt, Artificial Sequence
  Description of Artificial Sequence: Synthetic oligonucleotide
  Sense strand starting at position 733 of SEQ ID NO: 588571
ccucaagugguccauacua

SEQ ID NO: 874261 - RNA, 19 nt, Artificial Sequence
  Description of Artificial Sequence: Synthetic oligonucleotide
  Antisense strand to SEQ ID NO: 874260
uaguauggaccacuugagg

SEQ ID NO: 874262 - RNA, 19 nt, Artificial Sequence
  Description of Artificial Sequence: Synthetic oligonucleotide
  Sense strand starting at position 735 of SEQ ID NO: 588571
ucaagugguccauacuacu

SEQ ID NO: 874263 - RNA, 19 nt, Artificial Sequence
  Description of Artificial Sequence: Synthetic oligonucleotide
  Antisense strand to SEQ ID NO: 874262
aguaguauggaccacuuga

SEQ ID NO: 874264 - RNA, 19 nt, Artificial Sequence
  Description of Artificial Sequence: Synthetic oligonucleotide
  Sense strand starting at position 744 of SEQ ID NO: 588571
ccauacuacuguuuguaaa

SEQ ID NO: 874265 - RNA, 19 nt, Artificial Sequence
  Description of Artificial Sequence: Synthetic oligonucleotide
  Antisense strand to SEQ ID NO: 874264
uuuacaaacaguaguaugg

SEQ ID NO: 874266 - RNA, 19 nt, Artificial Sequence
  Description of Artificial Sequence: Synthetic oligonucleotide
  Sense strand starting at position 746 of SEQ ID NO: 588571
auacuacuguuuguaaaca

SEQ ID NO: 874267 - RNA, 19 nt, Artificial Sequence
  Description of Artificial Sequence: Synthetic oligonucleotide
  Antisense strand to SEQ ID NO: 874266
uguuuacaaacaguaguau

SEQ ID NO: 874268 - RNA, 19 nt, Artificial Sequence
  Description of Artificial Sequence: Synthetic oligonucleotide
  Sense strand starting at position 848 of SEQ ID NO: 588571
ggagcuuugggaggaauuc

SEQ ID NO: 874269 - RNA, 19 nt, Artificial Sequence
  Description of Artificial Sequence: Synthetic oligonucleotide
  Antisense strand to SEQ ID NO: 874268
gaauuccucccaaagcucc

SEQ ID NO: 874270 - RNA, 19 nt, Artificial Sequence
  Description of Artificial Sequence: Synthetic oligonucleotide
  Sense strand starting at position 1457 of SEQ ID NO: 588571
ccugagagguggucgaagu

SEQ ID NO: 874271 - RNA, 19 nt, Artificial Sequence
  Description of Artificial Sequence: Synthetic oligonucleotide
  Antisense strand to SEQ ID NO: 874270
acuucgaccaccucucagg

SEQ ID NO: 874272 - RNA, 19 nt, Artificial Sequence
  Description of Artificial Sequence: Synthetic oligonucleotide
  Sense strand starting at position 2652 of SEQ ID NO: 588571
gguguugugccagacugga

SEQ ID NO: 874273 - RNA, 19 nt, Artificial Sequence
  Description of Artificial Sequence: Synthetic oligonucleotide
  Antisense strand to SEQ ID NO: 874272
uccagucuggcacaacacc

SEQ ID NO: 874274 - RNA, 19 nt, Artificial Sequence
  Description of Artificial Sequence: Synthetic oligonucleotide
  Sense strand starting at position 2906 of SEQ ID NO: 588571
uguugugagaauuaaguca

SEQ ID NO: 874275 - RNA, 19 nt, Artificial Sequence
  Description of Artificial Sequence: Synthetic oligonucleotide
  Antisense strand to SEQ ID NO: 874274
ugacuuaauucucacaaca

SEQ ID NO: 874276 - RNA, 19 nt, Artificial Sequence
  Description of Artificial Sequence: Synthetic oligonucleotide
  Sense strand starting at position 2914 of SEQ ID NO: 588571
gaauuaagucauggacgua

SEQ ID NO: 874277 - RNA, 19 nt, Artificial Sequence
  Description of Artificial Sequence: Synthetic oligonucleotide
  Antisense strand to SEQ ID NO: 874276
uacguccaugacuuaauuc

SEQ ID NO: 874278 - RNA, 19 nt, Artificial Sequence
  Description of Artificial Sequence: Synthetic oligonucleotide
  Sense strand starting at position 2917 of SEQ ID NO: 588571
uuaagucauggacguaaag

SEQ ID NO: 874279 - RNA, 19 nt, Artificial Sequence
  Description of Artificial Sequence: Synthetic oligonucleotide
  Antisense strand to SEQ ID NO: 874278
cuuuacguccaugacuuaa

SEQ ID NO: 874280 - RNA, 19 nt, Artificial Sequence
  Description of Artificial Sequence: Synthetic oligonucleotide
  Sense strand starting at position 2960 of SEQ ID NO: 588571
uguuguaacccucauuaau

SEQ ID NO: 874281 - RNA, 19 nt, Artificial Sequence
  Description of Artificial Sequence: Synthetic oligonucleotide
  Antisense strand to SEQ ID NO: 874280
auuaaugaggguuacaaca

SEQ ID NO: 874282 - RNA, 19 nt, Artificial Sequence
  Description of Artificial Sequence: Synthetic oligonucleotide
  Sense strand starting at position 3005 of SEQ ID NO: 588571
gggcaagcccaggauuaga

SEQ ID NO: 874283 - RNA, 19 nt, Artificial Sequence
  Description of Artificial Sequence: Synthetic oligonucleotide
  Antisense strand to SEQ ID NO: 874282
ucuaauccugggcuugccc

SEQ ID NO: 874284 - RNA, 19 nt, Artificial Sequence
  Description of Artificial Sequence: Synthetic oligonucleotide
  Sense strand starting at position 3101 of SEQ ID NO: 588571
cgagcuugacccuggauga

SEQ ID NO: 874285 - RNA, 19 nt, Artificial Sequence
  Description of Artificial Sequence: Synthetic oligonucleotide
  Antisense strand to SEQ ID NO: 874284
ucauccagggucaagcucg

SEQ ID NO: 874286 - RNA, 19 nt, Artificial Sequence
  Description of Artificial Sequence: Synthetic oligonucleotide
  Sense strand starting at position 3325 of SEQ ID NO: 588571
augguuucccauuagucau

SEQ ID NO: 874287 - RNA, 19 nt, Artificial Sequence
  Description of Artificial Sequence: Synthetic oligonucleotide
  Antisense strand to SEQ ID NO: 874286
augacuaaugggaaaccau

SEQ ID NO: 874288 - RNA, 19 nt, Artificial Sequence
  Description of Artificial Sequence: Synthetic oligonucleotide
  Sense strand starting at position 3359 of SEQ ID NO: 588571
ccagcaggaugagauuuau

SEQ ID NO: 874289 - RNA, 19 nt, Artificial Sequence
  Description of Artificial Sequence: Synthetic oligonucleotide
  Antisense strand to SEQ ID NO: 874288
auaaaucucauccugcugg

SEQ ID NO: 874290 - RNA, 19 nt, Artificial Sequence
  Description of Artificial Sequence: Synthetic oligonucleotide
  Sense strand starting at position 3378 of SEQ ID NO: 588571
gugugaacccguguauguu

SEQ ID NO: 874291 - RNA, 19 nt, Artificial Sequence
  Description of Artificial Sequence: Synthetic oligonucleotide
  Antisense strand to SEQ ID NO: 874290
aacauacacggguucacac

SEQ ID NO: 874292 - RNA, 19 nt, Artificial Sequence
  Description of Artificial Sequence: Synthetic oligonucleotide
  Sense strand starting at position 3457 of SEQ ID NO: 588571
gcauaaacauguuugugag

SEQ ID NO: 874293 - RNA, 19 nt, Artificial Sequence
  Description of Artificial Sequence: Synthetic oligonucleotide
  Antisense strand to SEQ ID NO: 874292
cucacaaacauguuuaugc

SEQ ID NO: 874294 - RNA, 19 nt, Artificial Sequence
  Description of Artificial Sequence: Synthetic oligonucleotide
  Sense strand starting at position 3458 of SEQ ID NO: 588571
cauaaacauguuugugagu

SEQ ID NO: 874295 - RNA, 19 nt, Artificial Sequence
  Description of Artificial Sequence: Synthetic oligonucleotide
  Antisense strand to SEQ ID NO: 874294
acucacaaacauguuuaug

SEQ ID NO: 874296 - RNA, 19 nt, Artificial Sequence
  Description of Artificial Sequence: Synthetic oligonucleotide
  Sense strand starting at position 3516 of SEQ ID NO: 588571
gaguaugggagcuaguauc

SEQ ID NO: 874297 - RNA, 19 nt, Artificial Sequence
  Description of Artificial Sequence: Synthetic oligonucleotide
  Antisense strand to SEQ ID NO: 874296
gauacuagcucccauacuc

SEQ ID NO: 874298 - RNA, 19 nt, Artificial Sequence
  Description of Artificial Sequence: Synthetic oligonucleotide
  Sense strand starting at position 3552 of SEQ ID NO: 588571
ucuuaauaaucugugcaug

SEQ ID NO: 874299 - RNA, 19 nt, Artificial Sequence
  Description of Artificial Sequence: Synthetic oligonucleotide
  Antisense strand to SEQ ID NO: 874298
caugcacagauuauuaaga

SEQ ID NO: 874300 - RNA, 19 nt, Artificial Sequence
  Description of Artificial Sequence: Synthetic oligonucleotide
  Sense strand starting at position 3627 of SEQ ID NO: 588571
gggugugucuugauagguc

SEQ ID NO: 874301 - RNA, 19 nt, Artificial Sequence
  Description of Artificial Sequence: Synthetic oligonucleotide
  Antisense strand to SEQ ID NO: 874300
gaccuaucaagacacaccc

SEQ ID NO: 874302 - RNA, 19 nt, Artificial Sequence
  Description of Artificial Sequence: Synthetic oligonucleotide
  Sense strand starting at position 3634 of SEQ ID NO: 588571
ucuugauaggucuauguau

SEQ ID NO: 874303 - RNA, 19 nt, Artificial Sequence
  Description of Artificial Sequence: Synthetic oligonucleotide
  Antisense strand to SEQ ID NO: 874302
auacauagaccuaucaaga

SEQ ID NO: 874304 - RNA, 19 nt, Artificial Sequence
  Description of Artificial Sequence: Synthetic oligonucleotide
  Sense strand starting at position 3636 of SEQ ID NO: 588571
uugauaggucuauguauau

SEQ ID NO: 874305 - RNA, 19 nt, Artificial Sequence
  Description of Artificial Sequence: Synthetic oligonucleotide
  Antisense strand to SEQ ID NO: 874304
auauacauagaccuaucaa

SEQ ID NO: 874306 - RNA, 19 nt, Artificial Sequence
  Description of Artificial Sequence: Synthetic oligonucleotide
  Sense strand starting at position 3671 of SEQ ID NO: 588571
gggagaaugugaguguucu

SEQ ID NO: 874307 - RNA, 19 nt, Artificial Sequence
  Description of Artificial Sequence: Synthetic oligonucleotide
  Antisense strand to SEQ ID NO: 874306
agaacacucacauucuccc

SEQ ID NO: 874308 - RNA, 19 nt, Artificial Sequence
  Description of Artificial Sequence: Synthetic oligonucleotide
  Sense strand starting at position 3849 of SEQ ID NO: 588571
ggauuugagugggaauuaa

SEQ ID NO: 874309 - RNA, 19 nt, Artificial Sequence
  Description of Artificial Sequence: Synthetic oligonucleotide
  Antisense strand to SEQ ID NO: 874308
uuaauucccacucaaaucc

SEQ ID NO: 874310 - RNA, 19 nt, Artificial Sequence
  Description of Artificial Sequence: Synthetic oligonucleotide
  Sense strand starting at position 3859 of SEQ ID NO: 588571
gggaauuaaucucucccuu

SEQ ID NO: 874311 - RNA, 19 nt, Artificial Sequence
  Description of Artificial Sequence: Synthetic oligonucleotide
  Antisense strand to SEQ ID NO: 874310
aagggagagauuaauuccc

SEQ ID NO: 874312 - RNA, 19 nt, Artificial Sequence
  Description of Artificial Sequence: Synthetic oligonucleotide
  Sense strand starting at position 3909 of SEQ ID NO: 588571
ugauuacagcccugaucua

SEQ ID NO: 874313 - RNA, 19 nt, Artificial Sequence
  Description of Artificial Sequence: Synthetic oligonucleotide
  Antisense strand to SEQ ID NO: 874312
uagaucagggcuguaauca

SEQ ID NO: 874314 - RNA, 19 nt, Artificial Sequence
  Description of Artificial Sequence: Synthetic oligonucleotide
  Sense strand starting at position 19 of SEQ ID NO: 588572
gucuuuaacuucucagaag

SEQ ID NO: 874315 - RNA, 19 nt, Artificial Sequence
  Description of Artificial Sequence: Synthetic oligonucleotide
  Antisense strand to SEQ ID NO: 874314
cuucugagaaguuaaagac

SEQ ID NO: 874316 - RNA, 19 nt, Artificial Sequence
  Description of Artificial Sequence: Synthetic oligonucleotide
  Sense strand starting at position 56 of SEQ ID NO: 588572
ugagaagacguuuaugguu

SEQ ID NO: 874317 - RNA, 19 nt, Artificial Sequence
  Description of Artificial Sequence: Synthetic oligonucleotide
  Antisense strand to SEQ ID NO: 874316
aaccauaaacgucuucuca

SEQ ID NO: 874318 - RNA, 19 nt, Artificial Sequence
  Description of Artificial Sequence: Synthetic oligonucleotide
  Sense strand starting at position 61 of SEQ ID NO: 588572
agacguuuaugguuaaauu

SEQ ID NO: 874319 - RNA, 19 nt, Artificial Sequence
  Description of Artificial Sequence: Synthetic oligonucleotide
  Antisense strand to SEQ ID NO: 874318
aauuuaaccauaaacgucu

SEQ ID NO: 874320 - RNA, 19 nt, Artificial Sequence
  Description of Artificial Sequence: Synthetic oligonucleotide
  Sense strand starting at position 114 of SEQ ID NO: 588572
acaauauuauuugggcuau

SEQ ID NO: 874321 - RNA, 19 nt, Artificial Sequence
  Description of Artificial Sequence: Synthetic oligonucleotide
  Antisense strand to SEQ ID NO: 874320
auagcccaaauaauauugu

SEQ ID NO: 874322 - RNA, 19 nt, Artificial Sequence
  Description of Artificial Sequence: Synthetic oligonucleotide
  Sense strand starting at position 137 of SEQ ID NO: 588572
uuacuugccgcauaaauac

SEQ ID NO: 874323 - RNA, 19 nt, Artificial Sequence
  Description of Artificial Sequence: Synthetic oligonucleotide
  Antisense strand to SEQ ID NO: 874322
guauuuaugcggcaaguaa

SEQ ID NO: 874324 - RNA, 19 nt, Artificial Sequence
  Description of Artificial Sequence: Synthetic oligonucleotide
  Sense strand starting at position 166 of SEQ ID NO: 588572
ucuacagagcuuggaaaga

SEQ ID NO: 874325 - RNA, 19 nt, Artificial Sequence
  Description of Artificial Sequence: Synthetic oligonucleotide
  Antisense strand to SEQ ID NO: 874324
ucuuuccaagcucuguaga

SEQ ID NO: 874326 - RNA, 19 nt, Artificial Sequence
  Description of Artificial Sequence: Synthetic oligonucleotide
  Sense strand starting at position 246 of SEQ ID NO: 588572
ucuguuuauuugcuugaga

SEQ ID NO: 874327 - RNA, 19 nt, Artificial Sequence
  Description of Artificial Sequence: Synthetic oligonucleotide
  Antisense strand to SEQ ID NO: 874326
ucucaagcaaauaaacaga

SEQ ID NO: 874328 - RNA, 19 nt, Artificial Sequence
  Description of Artificial Sequence: Synthetic oligonucleotide
  Sense strand starting at position 247 of SEQ ID NO: 588572
cuguuuauuugcuugagac

SEQ ID NO: 874329 - RNA, 19 nt, Artificial Sequence
  Description of Artificial Sequence: Synthetic oligonucleotide
  Antisense strand to SEQ ID NO: 874328
gucucaagcaaauaaacag

SEQ ID NO: 874330 - RNA, 19 nt, Artificial Sequence
  Description of Artificial Sequence: Synthetic oligonucleotide
  Sense strand starting at position 554 of SEQ ID NO: 588572
ccgggcucagaaugguuua

SEQ ID NO: 874331 - RNA, 19 nt, Artificial Sequence
  Description of Artificial Sequence: Synthetic oligonucleotide
  Antisense strand to SEQ ID NO: 874330
uaaaccauucugagcccgg

SEQ ID NO: 874332 - RNA, 19 nt, Artificial Sequence
  Description of Artificial Sequence: Synthetic oligonucleotide
  Sense strand starting at position 555 of SEQ ID NO: 588572
cgggcucagaaugguuuau

SEQ ID NO: 874333 - RNA, 19 nt, Artificial Sequence
  Description of Artificial Sequence: Synthetic oligonucleotide
  Antisense strand to SEQ ID NO: 874332
auaaaccauucugagcccg

SEQ ID NO: 874334 - RNA, 19 nt, Artificial Sequence
  Description of Artificial Sequence: Synthetic oligonucleotide
  Sense strand starting at position 557 of SEQ ID NO: 588572
ggcucagaaugguuuauaa

SEQ ID NO: 874335 - RNA, 19 nt, Artificial Sequence
  Description of Artificial Sequence: Synthetic oligonucleotide
  Antisense strand to SEQ ID NO: 874334
uuauaaaccauucugagcc

SEQ ID NO: 874336 - RNA, 19 nt, Artificial Sequence
  Description of Artificial Sequence: Synthetic oligonucleotide
  Sense strand starting at position 569 of SEQ ID NO: 588572
uuuauaauguggccuguaa

SEQ ID NO: 874337 - RNA, 19 nt, Artificial Sequence
  Description of Artificial Sequence: Synthetic oligonucleotide
  Antisense strand to SEQ ID NO: 874336
uuacaggccacauuauaaa

SEQ ID NO: 874338 - RNA, 19 nt, Artificial Sequence
  Description of Artificial Sequence: Synthetic oligonucleotide
  Sense strand starting at position 571 of SEQ ID NO: 588572
uauaauguggccuguaaca

SEQ ID NO: 874339 - RNA, 19 nt, Artificial Sequence
  Description of Artificial Sequence: Synthetic oligonucleotide
  Antisense strand to SEQ ID NO: 874338
uguuacaggccacauuaua

SEQ ID NO: 874340 - RNA, 19 nt, Artificial Sequence
  Description of Artificial Sequence: Synthetic oligonucleotide
  Sense strand starting at position 573 of SEQ ID NO: 588572
uaauguggccuguaacaca

SEQ ID NO: 874341 - RNA, 19 nt, Artificial Sequence
  Description of Artificial Sequence: Synthetic oligonucleotide
  Antisense strand to SEQ ID NO: 874340
uguguuacaggccacauua

SEQ ID NO: 874342 - RNA, 19 nt, Artificial Sequence
  Description of Artificial Sequence: Synthetic oligonucleotide
  Sense strand starting at position 646 of SEQ ID NO: 588572
ugaggcacucauugggauu

SEQ ID NO: 874343 - RNA, 19 nt, Artificial Sequence
  Description of Artificial Sequence: Synthetic oligonucleotide
  Antisense strand to SEQ ID NO: 874342
aaucccaaugagugccuca

SEQ ID NO: 874344 - RNA, 19 nt, Artificial Sequence
  Description of Artificial Sequence: Synthetic oligonucleotide
  Sense strand starting at position 657 of SEQ ID NO: 588572
uugggauugaucugcccau

SEQ ID NO: 874345 - RNA, 19 nt, Artificial Sequence
  Description of Artificial Sequence: Synthetic oligonucleotide
  Antisense strand to SEQ ID NO: 874344
augggcagaucaaucccaa

SEQ ID NO: 874346 - RNA, 19 nt, Artificial Sequence
  Description of Artificial Sequence: Synthetic oligonucleotide
  Sense strand starting at position 661 of SEQ ID NO: 588572
gauugaucugcccaucuag

SEQ ID NO: 874347 - RNA, 19 nt, Artificial Sequence
  Description of Artificial Sequence: Synthetic oligonucleotide
  Antisense strand to SEQ ID NO: 874346
cuagaugggcagaucaauc

SEQ ID NO: 874348 - RNA, 19 nt, Artificial Sequence
  Description of Artificial Sequence: Synthetic oligonucleotide
  Sense strand starting at position 676 of SEQ ID NO: 588572
cuaguugguccacaguagu

SEQ ID NO: 874349 - RNA, 19 nt, Artificial Sequence
  Description of Artificial Sequence: Synthetic oligonucleotide
  Antisense strand to SEQ ID NO: 874348
acuacuguggaccaacuag

SEQ ID NO: 874350 - RNA, 19 nt, Artificial Sequence
  Description of Artificial Sequence: Synthetic oligonucleotide
  Sense strand starting at position 940 of SEQ ID NO: 588572
gcagccuucccugagucua

SEQ ID NO: 874351 - RNA, 19 nt, Artificial Sequence
  Description of Artificial Sequence: Synthetic oligonucleotide
  Antisense strand to SEQ ID NO: 874350
uagacucagggaaggcugc

SEQ ID NO: 874352 - RNA, 19 nt, Artificial Sequence
  Description of Artificial Sequence: Synthetic oligonucleotide
  Sense strand starting at position 988 of SEQ ID NO: 588572
gguuucuuggugggagcaa

SEQ ID NO: 874353 - RNA, 19 nt, Artificial Sequence
  Description of Artificial Sequence: Synthetic oligonucleotide
  Antisense strand to SEQ ID NO: 874352
uugcucccaccaagaaacc

SEQ ID NO: 874354 - RNA, 19 nt, Artificial Sequence
  Description of Artificial Sequence: Synthetic oligonucleotide
  Sense strand starting at position 1025 of SEQ ID NO: 588572
ugauacagcauucggugaa

SEQ ID NO: 874355 - RNA, 19 nt, Artificial Sequence
  Description of Artificial Sequence: Synthetic oligonucleotide
  Antisense strand to SEQ ID NO: 874354
uucaccgaaugcuguauca

SEQ ID NO: 874356 - RNA, 19 nt, Artificial Sequence
  Description of Artificial Sequence: Synthetic oligonucleotide
  Sense strand starting at position 1472 of SEQ ID NO: 588572
ccaguaaacugaguuguac

SEQ ID NO: 874357 - RNA, 19 nt, Artificial Sequence
  Description of Artificial Sequence: Synthetic oligonucleotide
  Antisense strand to SEQ ID NO: 874356
guacaacucaguuuacugg

SEQ ID NO: 874358 - RNA, 19 nt, Artificial Sequence
  Description of Artificial Sequence: Synthetic oligonucleotide
  Sense strand starting at position 1566 of SEQ ID NO: 588572
ggaauucacgucuaucgca

SEQ ID NO: 874359 - RNA, 19 nt, Artificial Sequence
  Description of Artificial Sequence: Synthetic oligonucleotide
  Antisense strand to SEQ ID NO: 874358
ugcgauagacgugaauucc

SEQ ID NO: 874360 - RNA, 19 nt, Artificial Sequence
  Description of Artificial Sequence: Synthetic oligonucleotide
  Sense strand starting at position 1634 of SEQ ID NO: 588572
uuaaguagacacggucauu

SEQ ID NO: 874361 - RNA, 19 nt, Artificial Sequence
  Description of Artificial Sequence: Synthetic oligonucleotide
  Antisense strand to SEQ ID NO: 874360
aaugaccgugucuacuuaa

SEQ ID NO: 874362 - RNA, 19 nt, Artificial Sequence
  Description of Artificial Sequence: Synthetic oligonucleotide
  Sense strand starting at position 2241 of SEQ ID NO: 588572
augccaagucuccacagaa

SEQ ID NO: 874363 - RNA, 19 nt, Artificial Sequence
  Description of Artificial Sequence: Synthetic oligonucleotide
  Antisense strand to SEQ ID NO: 874362
uucuguggagacuuggcau

SEQ ID NO: 874364 - RNA, 19 nt, Artificial Sequence
  Description of Artificial Sequence: Synthetic oligonucleotide
  Sense strand starting at position 2390 of SEQ ID NO: 588572
auguguugccacgaggaau

SEQ ID NO: 874365 - RNA, 19 nt, Artificial Sequence
  Description of Artificial Sequence: Synthetic oligonucleotide
  Antisense strand to SEQ ID NO: 874364
auuccucguggcaacacau

SEQ ID NO: 874366 - RNA, 19 nt, Artificial Sequence
  Description of Artificial Sequence: Synthetic oligonucleotide
  Sense strand starting at position 2453 of SEQ ID NO: 588572
ggcuaaauuauuugugggu

SEQ ID NO: 874367 - RNA, 19 nt, Artificial Sequence
  Description of Artificial Sequence: Synthetic oligonucleotide
  Antisense strand to SEQ ID NO: 874366
acccacaaauaauuuagcc

SEQ ID NO: 874368 - RNA, 19 nt, Artificial Sequence
  Description of Artificial Sequence: Synthetic oligonucleotide
  Sense strand starting at position 2456 of SEQ ID NO: 588572
uaaauuauuuguggguaga

SEQ ID NO: 874369 - RNA, 19 nt, Artificial Sequence
  Description of Artificial Sequence: Synthetic oligonucleotide
  Antisense strand to SEQ ID NO: 874368
ucuacccacaaauaauuua

SEQ ID NO: 874370 - RNA, 19 nt, Artificial Sequence
  Description of Artificial Sequence: Synthetic oligonucleotide
  Sense strand starting at position 2652 of SEQ ID NO: 588572
ccaguaaucccuggaacca

SEQ ID NO: 874371 - RNA, 19 nt, Artificial Sequence
  Description of Artificial Sequence: Synthetic oligonucleotide
  Antisense strand to SEQ ID NO: 874370
ugguuccagggauuacugg

SEQ ID NO: 874372 - RNA, 19 nt, Artificial Sequence
  Description of Artificial Sequence: Synthetic oligonucleotide
  Sense strand starting at position 2749 of SEQ ID NO: 588572
auugcagucaaguauggaa

SEQ ID NO: 874373 - RNA, 19 nt, Artificial Sequence
  Description of Artificial Sequence: Synthetic oligonucleotide
  Antisense strand to SEQ ID NO: 874372
uuccauacuugacugcaau

SEQ ID NO: 874374 - RNA, 19 nt, Artificial Sequence
  Description of Artificial Sequence: Synthetic oligonucleotide
  Sense strand starting at position 2863 of SEQ ID NO: 588572
gacugagacucgcuacuug

SEQ ID NO: 874375 - RNA, 19 nt, Artificial Sequence
  Description of Artificial Sequence: Synthetic oligonucleotide
  Antisense strand to SEQ ID NO: 874374
caaguagcgagucucaguc

SEQ ID NO: 874376 - RNA, 19 nt, Artificial Sequence
  Description of Artificial Sequence: Synthetic oligonucleotide
  Sense strand starting at position 2887 of SEQ ID NO: 588572
agguuacagucucuuuaca

SEQ ID NO: 874377 - RNA, 19 nt, Artificial Sequence
  Description of Artificial Sequence: Synthetic oligonucleotide
  Antisense strand to SEQ ID NO: 874376
uguaaagagacuguaaccu

SEQ ID NO: 874378 - RNA, 19 nt, Artificial Sequence
  Description of Artificial Sequence: Synthetic oligonucleotide
  Sense strand starting at position 2889 of SEQ ID NO: 588572
guuacagucucuuuacaca

SEQ ID NO: 874379 - RNA, 19 nt, Artificial Sequence
  Description of Artificial Sequence: Synthetic oligonucleotide
  Antisense strand to SEQ ID NO: 874378
uguguaaagagacuguaac

SEQ ID NO: 874380 - RNA, 19 nt, Artificial Sequence
  Description of Artificial Sequence: Synthetic oligonucleotide
  Sense strand starting at position 2909 of SEQ ID NO: 588572
uuacaauuguaguugucua

SEQ ID NO: 874381 - RNA, 19 nt, Artificial Sequence
  Description of Artificial Sequence: Synthetic oligonucleotide
  Antisense strand to SEQ ID NO: 874380
uagacaacuacaauuguaa

SEQ ID NO: 874382 - RNA, 19 nt, Artificial Sequence
  Description of Artificial Sequence: Synthetic oligonucleotide
  Sense strand starting at position 2914 of SEQ ID NO: 588572
auuguaguugucuacaauu

SEQ ID NO: 874383 - RNA, 19 nt, Artificial Sequence
  Description of Artificial Sequence: Synthetic oligonucleotide
  Antisense strand to SEQ ID NO: 874382
aauuguagacaacuacaau

SEQ ID NO: 874384 - RNA, 19 nt, Artificial Sequence
  Description of Artificial Sequence: Synthetic oligonucleotide
  Sense strand starting at position 3386 of SEQ ID NO: 588572
auaaauuguuagucugaac

SEQ ID NO: 874385 - RNA, 19 nt, Artificial Sequence
  Description of Artificial Sequence: Synthetic oligonucleotide
  Antisense strand to SEQ ID NO: 874384
guucagacuaacaauuuau

SEQ ID NO: 874386 - RNA, 19 nt, Artificial Sequence
  Description of Artificial Sequence: Synthetic oligonucleotide
  Sense strand starting at position 3444 of SEQ ID NO: 588572
uuaacauggucaucugaau

SEQ ID NO: 874387 - RNA, 19 nt, Artificial Sequence
  Description of Artificial Sequence: Synthetic oligonucleotide
  Antisense strand to SEQ ID NO: 874386
auucagaugaccauguuaa

SEQ ID NO: 874388 - RNA, 19 nt, Artificial Sequence
  Description of Artificial Sequence: Synthetic oligonucleotide
  Sense strand starting at position 3506 of SEQ ID NO: 588572
ccaugcugcugauugauca

SEQ ID NO: 874389 - RNA, 19 nt, Artificial Sequence
  Description of Artificial Sequence: Synthetic oligonucleotide
  Antisense strand to SEQ ID NO: 874388
ugaucaaucagcagcaugg

SEQ ID NO: 874390 - RNA, 19 nt, Artificial Sequence
  Description of Artificial Sequence: Synthetic oligonucleotide
  Sense strand starting at position 3934 of SEQ ID NO: 588572
caguuacuuccacgaguga

SEQ ID NO: 874391 - RNA, 19 nt, Artificial Sequence
  Description of Artificial Sequence: Synthetic oligonucleotide
  Antisense strand to SEQ ID NO: 874390
ucacucguggaaguaacug

SEQ ID NO: 874392 - RNA, 19 nt, Artificial Sequence
  Description of Artificial Sequence: Synthetic oligonucleotide
  Sense strand starting at position 3935 of SEQ ID NO: 588572
aguuacuuccacgagugaa

SEQ ID NO: 874393 - RNA, 19 nt, Artificial Sequence
  Description of Artificial Sequence: Synthetic oligonucleotide
  Antisense strand to SEQ ID NO: 874392
uucacucguggaaguaacu

SEQ ID NO: 874394 - RNA, 19 nt, Artificial Sequence
  Description of Artificial Sequence: Synthetic oligonucleotide
  Sense strand starting at position 30 of SEQ ID NO: 588573
ccaggcucacgcuauagaa

SEQ ID NO: 874395 - RNA, 19 nt, Artificial Sequence
  Description of Artificial Sequence: Synthetic oligonucleotide
  Antisense strand to SEQ ID NO: 874394
uucuauagcgugagccugg

SEQ ID NO: 874396 - RNA, 19 nt, Artificial Sequence
  Description of Artificial Sequence: Synthetic oligonucleotide
  Sense strand starting at position 44 of SEQ ID NO: 588573
uagaaccuguccucuggaa

SEQ ID NO: 874397 - RNA, 19 nt, Artificial Sequence
  Description of Artificial Sequence: Synthetic oligonucleotide
  Antisense strand to SEQ ID NO: 874396
uuccagaggacagguucua

SEQ ID NO: 874398 - RNA, 19 nt, Artificial Sequence
  Description of Artificial Sequence: Synthetic oligonucleotide
  Sense strand starting at position 326 of SEQ ID NO: 588573
agcccuuuccugugaugag

SEQ ID NO: 874399 - RNA, 19 nt, Artificial Sequence
  Description of Artificial Sequence: Synthetic oligonucleotide
  Antisense strand to SEQ ID NO: 874398
cucaucacaggaaagggcu

SEQ ID NO: 874400 - RNA, 19 nt, Artificial Sequence
  Description of Artificial Sequence: Synthetic oligonucleotide
  Sense strand starting at position 382 of SEQ ID NO: 588573
gggaacaugucugggaugu

SEQ ID NO: 874401 - RNA, 19 nt, Artificial Sequence
  Description of Artificial Sequence: Synthetic oligonucleotide
  Antisense strand to SEQ ID NO: 874400
acaucccagacauguuccc

SEQ ID NO: 874402 - RNA, 19 nt, Artificial Sequence
  Description of Artificial Sequence: Synthetic oligonucleotide
  Sense strand starting at position 383 of SEQ ID NO: 588573
ggaacaugucugggauguu

SEQ ID NO: 874403 - RNA, 19 nt, Artificial Sequence
  Description of Artificial Sequence: Synthetic oligonucleotide
  Antisense strand to SEQ ID NO: 874402
aacaucccagacauguucc

SEQ ID NO: 874404 - RNA, 19 nt, Artificial Sequence
  Description of Artificial Sequence: Synthetic oligonucleotide
  Sense strand starting at position 384 of SEQ ID NO: 588573
gaacaugucugggauguua

SEQ ID NO: 874405 - RNA, 19 nt, Artificial Sequence
  Description of Artificial Sequence: Synthetic oligonucleotide
  Antisense strand to SEQ ID NO: 874404
uaacaucccagacauguuc

SEQ ID NO: 874406 - RNA, 19 nt, Artificial Sequence
  Description of Artificial Sequence: Synthetic oligonucleotide
  Sense strand starting at position 386 of SEQ ID NO: 588573
acaugucugggauguuaca

SEQ ID NO: 874407 - RNA, 19 nt, Artificial Sequence
  Description of Artificial Sequence: Synthetic oligonucleotide
  Antisense strand to SEQ ID NO: 874406
uguaacaucccagacaugu

SEQ ID NO: 874408 - RNA, 19 nt, Artificial Sequence
  Description of Artificial Sequence: Synthetic oligonucleotide
  Sense strand starting at position 798 of SEQ ID NO: 588573
gcaucauaaaugcguggaa

SEQ ID NO: 874409 - RNA, 19 nt, Artificial Sequence
  Description of Artificial Sequence: Synthetic oligonucleotide
  Antisense strand to SEQ ID NO: 874408
uuccacgcauuuaugaugc

SEQ ID NO: 874410 - RNA, 19 nt, Artificial Sequence
  Description of Artificial Sequence: Synthetic oligonucleotide
  Sense strand starting at position 799 of SEQ ID NO: 588573
caucauaaaugcguggaaa

SEQ ID NO: 874411 - RNA, 19 nt, Artificial Sequence
  Description of Artificial Sequence: Synthetic oligonucleotide
  Antisense strand to SEQ ID NO: 874410
uuuccacgcauuuaugaug

SEQ ID NO: 874412 - RNA, 19 nt, Artificial Sequence
  Description of Artificial Sequence: Synthetic oligonucleotide
  Sense strand starting at position 800 of SEQ ID NO: 588573
aucauaaaugcguggaaau

SEQ ID NO: 874413 - RNA, 19 nt, Artificial Sequence
  Description of Artificial Sequence: Synthetic oligonucleotide
  Antisense strand to SEQ ID NO: 874412
auuuccacgcauuuaugau

SEQ ID NO: 874414 - RNA, 19 nt, Artificial Sequence
  Description of Artificial Sequence: Synthetic oligonucleotide
  Sense strand starting at position 801 of SEQ ID NO: 588573
ucauaaaugcguggaaaug

SEQ ID NO: 874415 - RNA, 19 nt, Artificial Sequence
  Description of Artificial Sequence: Synthetic oligonucleotide
  Antisense strand to SEQ ID NO: 874414
cauuuccacgcauuuauga

SEQ ID NO: 874416 - RNA, 19 nt, Artificial Sequence
  Description of Artificial Sequence: Synthetic oligonucleotide
  Sense strand starting at position 810 of SEQ ID NO: 588573
cguggaaaugcgucgcugu

SEQ ID NO: 874417 - RNA, 19 nt, Artificial Sequence
  Description of Artificial Sequence: Synthetic oligonucleotide
  Antisense strand to SEQ ID NO: 874416
acagcgacgcauuuccacg

SEQ ID NO: 874418 - RNA, 19 nt, Artificial Sequence
  Description of Artificial Sequence: Synthetic oligonucleotide
  Sense strand starting at position 812 of SEQ ID NO: 588573
uggaaaugcgucgcuguga

SEQ ID NO: 874419 - RNA, 19 nt, Artificial Sequence
  Description of Artificial Sequence: Synthetic oligonucleotide
  Antisense strand to SEQ ID NO: 874418
ucacagcgacgcauuucca

SEQ ID NO: 874420 - RNA, 19 nt, Artificial Sequence
  Description of Artificial Sequence: Synthetic oligonucleotide
  Sense strand starting at position 823 of SEQ ID NO: 588573
cgcugugacugggaacaaa

SEQ ID NO: 874421 - RNA, 19 nt, Artificial Sequence
  Description of Artificial Sequence: Synthetic oligonucleotide
  Antisense strand to SEQ ID NO: 874420
uuuguucccagucacagcg

SEQ ID NO: 874422 - RNA, 19 nt, Artificial Sequence
  Description of Artificial Sequence: Synthetic oligonucleotide
  Sense strand starting at position 1570 of SEQ ID NO: 588573
gaugcuuaucgcuggaaga

SEQ ID NO: 874423 - RNA, 19 nt, Artificial Sequence
  Description of Artificial Sequence: Synthetic oligonucleotide
  Antisense strand to SEQ ID NO: 874422
ucuuccagcgauaagcauc

SEQ ID NO: 874424 - RNA, 19 nt, Artificial Sequence
  Description of Artificial Sequence: Synthetic oligonucleotide
  Sense strand starting at position 1571 of SEQ ID NO: 588573
augcuuaucgcuggaagag

SEQ ID NO: 874425 - RNA, 19 nt, Artificial Sequence
  Description of Artificial Sequence: Synthetic oligonucleotide
  Antisense strand to SEQ ID NO: 874424
cucuuccagcgauaagcau

SEQ ID NO: 874426 - RNA, 19 nt, Artificial Sequence
  Description of Artificial Sequence: Synthetic oligonucleotide
  Sense strand starting at position 1619 of SEQ ID NO: 588573
cguggcaaaugcuugauga

SEQ ID NO: 874427 - RNA, 19 nt, Artificial Sequence
  Description of Artificial Sequence: Synthetic oligonucleotide
  Antisense strand to SEQ ID NO: 874426
ucaucaagcauuugccacg

SEQ ID NO: 874428 - RNA, 19 nt, Artificial Sequence
  Description of Artificial Sequence: Synthetic oligonucleotide
  Sense strand starting at position 1620 of SEQ ID NO: 588573
guggcaaaugcuugaugac

SEQ ID NO: 874429 - RNA, 19 nt, Artificial Sequence
  Description of Artificial Sequence: Synthetic oligonucleotide
  Antisense strand to SEQ ID NO: 874428
gucaucaagcauuugccac

SEQ ID NO: 874430 - RNA, 19 nt, Artificial Sequence
  Description of Artificial Sequence: Synthetic oligonucleotide
  Sense strand starting at position 1621 of SEQ ID NO: 588573
uggcaaaugcuugaugacu

SEQ ID NO: 874431 - RNA, 19 nt, Artificial Sequence
  Description of Artificial Sequence: Synthetic oligonucleotide
  Antisense strand to SEQ ID NO: 874430
agucaucaagcauuugcca

SEQ ID NO: 874432 - RNA, 19 nt, Artificial Sequence
  Description of Artificial Sequence: Synthetic oligonucleotide
  Sense strand starting at position 1623 of SEQ ID NO: 588573
gcaaaugcuugaugacuua

SEQ ID NO: 874433 - RNA, 19 nt, Artificial Sequence
  Description of Artificial Sequence: Synthetic oligonucleotide
  Antisense strand to SEQ ID NO: 874432
uaagucaucaagcauuugc

SEQ ID NO: 874434 - RNA, 19 nt, Artificial Sequence
  Description of Artificial Sequence: Synthetic oligonucleotide
  Sense strand starting at position 1680 of SEQ ID NO: 588573
aggugcuacuuccacuuaa

SEQ ID NO: 874435 - RNA, 19 nt, Artificial Sequence
  Description of Artificial Sequence: Synthetic oligonucleotide
  Antisense strand to SEQ ID NO: 874434
uuaaguggaaguagcaccu

SEQ ID NO: 874436 - RNA, 19 nt, Artificial Sequence
  Description of Artificial Sequence: Synthetic oligonucleotide
  Sense strand starting at position 1716 of SEQ ID NO: 588573
gccuaagucauguguccag

SEQ ID NO: 874437 - RNA, 19 nt, Artificial Sequence
  Description of Artificial Sequence: Synthetic oligonucleotide
  Antisense strand to SEQ ID NO: 874436
cuggacacaugacuuaggc

SEQ ID NO: 874438 - RNA, 19 nt, Artificial Sequence
  Description of Artificial Sequence: Synthetic oligonucleotide
  Sense strand starting at position 1950 of SEQ ID NO: 588573
ccgugacuggcccagacau

SEQ ID NO: 874439 - RNA, 19 nt, Artificial Sequence
  Description of Artificial Sequence: Synthetic oligonucleotide
  Antisense strand to SEQ ID NO: 874438
augucugggccagucacgg

SEQ ID NO: 874440 - RNA, 19 nt, Artificial Sequence
  Description of Artificial Sequence: Synthetic oligonucleotide
  Sense strand starting at position 45 of SEQ ID NO: 588574
gaggcauugugauccugaa

SEQ ID NO: 874441 - RNA, 19 nt, Artificial Sequence
  Description of Artificial Sequence: Synthetic oligonucleotide
  Antisense strand to SEQ ID NO: 874440
uucaggaucacaaugccuc

SEQ ID NO: 874442 - RNA, 19 nt, Artificial Sequence
  Description of Artificial Sequence: Synthetic oligonucleotide
  Sense strand starting at position 52 of SEQ ID NO: 588574
ugugauccugaacagaugu

SEQ ID NO: 874443 - RNA, 19 nt, Artificial Sequence
  Description of Artificial Sequence: Synthetic oligonucleotide
  Antisense strand to SEQ ID NO: 874442
acaucuguucaggaucaca

SEQ ID NO: 874444 - RNA, 19 nt, Artificial Sequence
  Description of Artificial Sequence: Synthetic oligonucleotide
  Sense strand starting at position 163 of SEQ ID NO: 588574
ccuguuuggccucagagaa

SEQ ID NO: 874445 - RNA, 19 nt, Artificial Sequence
  Description of Artificial Sequence: Synthetic oligonucleotide
  Antisense strand to SEQ ID NO: 874444
uucucugaggccaaacagg

SEQ ID NO: 874446 - RNA, 19 nt, Artificial Sequence
  Description of Artificial Sequence: Synthetic oligonucleotide
  Sense strand starting at position 173 of SEQ ID NO: 588574
cucagagaagcuugacuga

SEQ ID NO: 874447 - RNA, 19 nt, Artificial Sequence
  Description of Artificial Sequence: Synthetic oligonucleotide
  Antisense strand to SEQ ID NO: 874446
ucagucaagcuucucugag

SEQ ID NO: 874448 - RNA, 19 nt, Artificial Sequence
  Description of Artificial Sequence: Synthetic oligonucleotide
  Sense strand starting at position 470 of SEQ ID NO: 588574
ggagcaugugggcaucauu

SEQ ID NO: 874449 - RNA, 19 nt, Artificial Sequence
  Description of Artificial Sequence: Synthetic oligonucleotide
  Antisense strand to SEQ ID NO: 874448
aaugaugcccacaugcucc

SEQ ID NO: 874450 - RNA, 19 nt, Artificial Sequence
  Description of Artificial Sequence: Synthetic oligonucleotide
  Sense strand starting at position 542 of SEQ ID NO: 588574
cucacuaggugaccaauau

SEQ ID NO: 874451 - RNA, 19 nt, Artificial Sequence
  Description of Artificial Sequence: Synthetic oligonucleotide
  Antisense strand to SEQ ID NO: 874450
auauuggucaccuagugag

SEQ ID NO: 874452 - RNA, 19 nt, Artificial Sequence
  Description of Artificial Sequence: Synthetic oligonucleotide
  Sense strand starting at position 841 of SEQ ID NO: 588574
cagggcuguggcuaacaaa

SEQ ID NO: 874453 - RNA, 19 nt, Artificial Sequence
  Description of Artificial Sequence: Synthetic oligonucleotide
  Antisense strand to SEQ ID NO: 874452
uuuguuagccacagcccug

SEQ ID NO: 874454 - RNA, 19 nt, Artificial Sequence
  Description of Artificial Sequence: Synthetic oligonucleotide
  Sense strand starting at position 882 of SEQ ID NO: 588574
aaaguuauuguuggauauc

SEQ ID NO: 874455 - RNA, 19 nt, Artificial Sequence
  Description of Artificial Sequence: Synthetic oligonucleotide
  Antisense strand to SEQ ID NO: 874454
gauauccaacaauaacuuu

SEQ ID NO: 874456 - RNA, 19 nt, Artificial Sequence
  Description of Artificial Sequence: Synthetic oligonucleotide
  Sense strand starting at position 885 of SEQ ID NO: 588574
guuauuguuggauaucaau

SEQ ID NO: 874457 - RNA, 19 nt, Artificial Sequence
  Description of Artificial Sequence: Synthetic oligonucleotide
  Antisense strand to SEQ ID NO: 874456
auugauauccaacaauaac

SEQ ID NO: 874458 - RNA, 19 nt, Artificial Sequence
  Description of Artificial Sequence: Synthetic oligonucleotide
  Sense strand starting at position 1248 of SEQ ID NO: 588574
gccguaauucaaguacgcu

SEQ ID NO: 874459 - RNA, 19 nt, Artificial Sequence
  Description of Artificial Sequence: Synthetic oligonucleotide
  Antisense strand to SEQ ID NO: 874458
agcguacuugaauuacggc

SEQ ID NO: 874460 - RNA, 19 nt, Artificial Sequence
  Description of Artificial Sequence: Synthetic oligonucleotide
  Sense strand starting at position 1437 of SEQ ID NO: 588574
cccuuuccacugggacauu

SEQ ID NO: 874461 - RNA, 19 nt, Artificial Sequence
  Description of Artificial Sequence: Synthetic oligonucleotide
  Antisense strand to SEQ ID NO: 874460
aaugucccaguggaaaggg

SEQ ID NO: 874462 - RNA, 19 nt, Artificial Sequence
  Description of Artificial Sequence: Synthetic oligonucleotide
  Sense strand starting at position 1680 of SEQ ID NO: 588574
gguucuuuaagugacagga

SEQ ID NO: 874463 - RNA, 19 nt, Artificial Sequence
  Description of Artificial Sequence: Synthetic oligonucleotide
  Antisense strand to SEQ ID NO: 874462
uccugucacuuaaagaacc

SEQ ID NO: 874464 - RNA, 19 nt, Artificial Sequence
  Description of Artificial Sequence: Synthetic oligonucleotide
  Sense strand starting at position 1769 of SEQ ID NO: 588574
gguaguguuggaggacuga

SEQ ID NO: 874465 - RNA, 19 nt, Artificial Sequence
  Description of Artificial Sequence: Synthetic oligonucleotide
  Antisense strand to SEQ ID NO: 874464
ucaguccuccaacacuacc

SEQ ID NO: 874466 - RNA, 19 nt, Artificial Sequence
  Description of Artificial Sequence: Synthetic oligonucleotide
  Sense strand starting at position 1773 of SEQ ID NO: 588574
guguuggaggacugagaga

SEQ ID NO: 874467 - RNA, 19 nt, Artificial Sequence
  Description of Artificial Sequence: Synthetic oligonucleotide
  Antisense strand to SEQ ID NO: 874466
ucucucaguccuccaacac

SEQ ID NO: 874468 - RNA, 19 nt, Artificial Sequence
  Description of Artificial Sequence: Synthetic oligonucleotide
  Sense strand starting at position 1836 of SEQ ID NO: 588574
acaaacguugcggagaaau

SEQ ID NO: 874469 - RNA, 19 nt, Artificial Sequence
  Description of Artificial Sequence: Synthetic oligonucleotide
  Antisense strand to SEQ ID NO: 874468
auuucuccgcaacguuugu

SEQ ID NO: 874470 - RNA, 19 nt, Artificial Sequence
  Description of Artificial Sequence: Synthetic oligonucleotide
  Sense strand starting at position 1838 of SEQ ID NO: 588574
aaacguugcggagaaauuc

SEQ ID NO: 874471 - RNA, 19 nt, Artificial Sequence
  Description of Artificial Sequence: Synthetic oligonucleotide
  Antisense strand to SEQ ID NO: 874470
gaauuucuccgcaacguuu

SEQ ID NO: 874472 - RNA, 19 nt, Artificial Sequence
  Description of Artificial Sequence: Synthetic oligonucleotide
  Sense strand starting at position 1846 of SEQ ID NO: 588574
cggagaaauucuguugaug

SEQ ID NO: 874473 - RNA, 19 nt, Artificial Sequence
  Description of Artificial Sequence: Synthetic oligonucleotide
  Antisense strand to SEQ ID NO: 874472
caucaacagaauuucuccg

SEQ ID NO: 874474 - RNA, 19 nt, Artificial Sequence
  Description of Artificial Sequence: Synthetic oligonucleotide
  Sense strand starting at position 1849 of SEQ ID NO: 588574
agaaauucuguugauguca

SEQ ID NO: 874475 - RNA, 19 nt, Artificial Sequence
  Description of Artificial Sequence: Synthetic oligonucleotide
  Antisense strand to SEQ ID NO: 874474
ugacaucaacagaauuucu

SEQ ID NO: 874476 - RNA, 19 nt, Artificial Sequence
  Description of Artificial Sequence: Synthetic oligonucleotide
  Sense strand starting at position 1915 of SEQ ID NO: 588574
cccaaauccuauucuggga

SEQ ID NO: 874477 - RNA, 19 nt, Artificial Sequence
  Description of Artificial Sequence: Synthetic oligonucleotide
  Antisense strand to SEQ ID NO: 874476
ucccagaauaggauuuggg

SEQ ID NO: 874478 - RNA, 19 nt, Artificial Sequence
  Description of Artificial Sequence: Synthetic oligonucleotide
  Sense strand starting at position 1945 of SEQ ID NO: 588574
ugauuauggcgagaaggca

SEQ ID NO: 874479 - RNA, 19 nt, Artificial Sequence
  Description of Artificial Sequence: Synthetic oligonucleotide
  Antisense strand to SEQ ID NO: 874478
ugccuucucgccauaauca

SEQ ID NO: 874480 - RNA, 19 nt, Artificial Sequence
  Description of Artificial Sequence: Synthetic oligonucleotide
  Sense strand starting at position 2123 of SEQ ID NO: 588574
gcuaaauuggcaugaaaga

SEQ ID NO: 874481 - RNA, 19 nt, Artificial Sequence
  Description of Artificial Sequence: Synthetic oligonucleotide
  Antisense strand to SEQ ID NO: 874480
ucuuucaugccaauuuagc

SEQ ID NO: 874482 - RNA, 19 nt, Artificial Sequence
  Description of Artificial Sequence: Synthetic oligonucleotide
  Sense strand starting at position 2245 of SEQ ID NO: 588574
gucccuccuccauaggauu

SEQ ID NO: 874483 - RNA, 19 nt, Artificial Sequence
  Description of Artificial Sequence: Synthetic oligonucleotide
  Antisense strand to SEQ ID NO: 874482
aauccuauggaggagggac

SEQ ID NO: 874484 - RNA, 19 nt, Artificial Sequence
  Description of Artificial Sequence: Synthetic oligonucleotide
  Sense strand starting at position 2256 of SEQ ID NO: 588574
auaggauugccaugucaca

SEQ ID NO: 874485 - RNA, 19 nt, Artificial Sequence
  Description of Artificial Sequence: Synthetic oligonucleotide
  Antisense strand to SEQ ID NO: 874484
ugugacauggcaauccuau

SEQ ID NO: 874486 - RNA, 19 nt, Artificial Sequence
  Description of Artificial Sequence: Synthetic oligonucleotide
  Sense strand starting at position 2281 of SEQ ID NO: 588574
augacaugagccuaguuau

SEQ ID NO: 874487 - RNA, 19 nt, Artificial Sequence
  Description of Artificial Sequence: Synthetic oligonucleotide
  Antisense strand to SEQ ID NO: 874486
auaacuaggcucaugucau

SEQ ID NO: 874488 - RNA, 19 nt, Artificial Sequence
  Description of Artificial Sequence: Synthetic oligonucleotide
  Sense strand starting at position 2284 of SEQ ID NO: 588574
acaugagccuaguuauaau

SEQ ID NO: 874489 - RNA, 19 nt, Artificial Sequence
  Description of Artificial Sequence: Synthetic oligonucleotide
  Antisense strand to SEQ ID NO: 874488
auuauaacuaggcucaugu

SEQ ID NO: 874490 - RNA, 19 nt, Artificial Sequence
  Description of Artificial Sequence: Synthetic oligonucleotide
  Sense strand starting at position 2347 of SEQ ID NO: 588574
ccuaauugaugucuaagua

SEQ ID NO: 874491 - RNA, 19 nt, Artificial Sequence
  Description of Artificial Sequence: Synthetic oligonucleotide
  Antisense strand to SEQ ID NO: 874490
uacuuagacaucaauuagg

SEQ ID NO: 874492 - RNA, 19 nt, Artificial Sequence
  Description of Artificial Sequence: Synthetic oligonucleotide
  Sense strand starting at position 2348 of SEQ ID NO: 588574
cuaauugaugucuaaguag

SEQ ID NO: 874493 - RNA, 19 nt, Artificial Sequence
  Description of Artificial Sequence: Synthetic oligonucleotide
  Antisense strand to SEQ ID NO: 874492
cuacuuagacaucaauuag

SEQ ID NO: 874494 - RNA, 19 nt, Artificial Sequence
  Description of Artificial Sequence: Synthetic oligonucleotide
  Sense strand starting at position 2580 of SEQ ID NO: 588574
ccacauauucuaugggaca

SEQ ID NO: 874495 - RNA, 19 nt, Artificial Sequence
  Description of Artificial Sequence: Synthetic oligonucleotide
  Antisense strand to SEQ ID NO: 874494
ugucccauagaauaugugg

SEQ ID NO: 874496 - RNA, 19 nt, Artificial Sequence
  Description of Artificial Sequence: Synthetic oligonucleotide
  Sense strand starting at position 2844 of SEQ ID NO: 588574
gagagcaucuagucccaga

SEQ ID NO: 874497 - RNA, 19 nt, Artificial Sequence
  Description of Artificial Sequence: Synthetic oligonucleotide
  Antisense strand to SEQ ID NO: 874496
ucugggacuagaugcucuc

SEQ ID NO: 874498 - RNA, 19 nt, Artificial Sequence
  Description of Artificial Sequence: Synthetic oligonucleotide
  Sense strand starting at position 2944 of SEQ ID NO: 588574
guguuaacuguccacugga

SEQ ID NO: 874499 - RNA, 19 nt, Artificial Sequence
  Description of Artificial Sequence: Synthetic oligonucleotide
  Antisense strand to SEQ ID NO: 874498
uccaguggacaguuaacac

SEQ ID NO: 874500 - RNA, 19 nt, Artificial Sequence
  Description of Artificial Sequence: Synthetic oligonucleotide
  Sense strand starting at position 2947 of SEQ ID NO: 588574
uuaacuguccacuggagau

SEQ ID NO: 874501 - RNA, 19 nt, Artificial Sequence
  Description of Artificial Sequence: Synthetic oligonucleotide
  Antisense strand to SEQ ID NO: 874500
aucuccaguggacaguuaa

SEQ ID NO: 874502 - RNA, 19 nt, Artificial Sequence
  Description of Artificial Sequence: Synthetic oligonucleotide
  Sense strand starting at position 2959 of SEQ ID NO: 588574
uggagauaguggguuucca

SEQ ID NO: 874503 - RNA, 19 nt, Artificial Sequence
  Description of Artificial Sequence: Synthetic oligonucleotide
  Antisense strand to SEQ ID NO: 874502
uggaaacccacuaucucca

SEQ ID NO: 874504 - RNA, 19 nt, Artificial Sequence
  Description of Artificial Sequence: Synthetic oligonucleotide
  Sense strand starting at position 2968 of SEQ ID NO: 588574
uggguuuccaucuauguga

SEQ ID NO: 874505 - RNA, 19 nt, Artificial Sequence
  Description of Artificial Sequence: Synthetic oligonucleotide
  Antisense strand to SEQ ID NO: 874504
ucacauagauggaaaccca

SEQ ID NO: 874506 - RNA, 19 nt, Artificial Sequence
  Description of Artificial Sequence: Synthetic oligonucleotide
  Sense strand starting at position 2970 of SEQ ID NO: 588574
gguuuccaucuaugugaaa

SEQ ID NO: 874507 - RNA, 19 nt, Artificial Sequence
  Description of Artificial Sequence: Synthetic oligonucleotide
  Antisense strand to SEQ ID NO: 874506
uuucacauagauggaaacc

SEQ ID NO: 874508 - RNA, 19 nt, Artificial Sequence
  Description of Artificial Sequence: Synthetic oligonucleotide
  Sense strand starting at position 2971 of SEQ ID NO: 588574
guuuccaucuaugugaaag

SEQ ID NO: 874509 - RNA, 19 nt, Artificial Sequence
  Description of Artificial Sequence: Synthetic oligonucleotide
  Antisense strand to SEQ ID NO: 874508
cuuucacauagauggaaac

SEQ ID NO: 874510 - RNA, 19 nt, Artificial Sequence
  Description of Artificial Sequence: Synthetic oligonucleotide
  Sense strand starting at position 3012 of SEQ ID NO: 588574
gcagguagaauaugaccua

SEQ ID NO: 874511 - RNA, 19 nt, Artificial Sequence
  Description of Artificial Sequence: Synthetic oligonucleotide
  Antisense strand to SEQ ID NO: 874510
uaggucauauucuaccugc

SEQ ID NO: 874512 - RNA, 19 nt, Artificial Sequence
  Description of Artificial Sequence: Synthetic oligonucleotide
  Sense strand starting at position 3015 of SEQ ID NO: 588574
gguagaauaugaccuacuu

SEQ ID NO: 874513 - RNA, 19 nt, Artificial Sequence
  Description of Artificial Sequence: Synthetic oligonucleotide
  Antisense strand to SEQ ID NO: 874512
aaguaggucauauucuacc

SEQ ID NO: 874514 - RNA, 19 nt, Artificial Sequence
  Description of Artificial Sequence: Synthetic oligonucleotide
  Sense strand starting at position 3602 of SEQ ID NO: 588574
ugguagucgguugaugaga

SEQ ID NO: 874515 - RNA, 19 nt, Artificial Sequence
  Description of Artificial Sequence: Synthetic oligonucleotide
  Antisense strand to SEQ ID NO: 874514
ucucaucaaccgacuacca

SEQ ID NO: 874516 - RNA, 19 nt, Artificial Sequence
  Description of Artificial Sequence: Synthetic oligonucleotide
  Sense strand starting at position 3707 of SEQ ID NO: 588574
ggugcugucauggacaauu

SEQ ID NO: 874517 - RNA, 19 nt, Artificial Sequence
  Description of Artificial Sequence: Synthetic oligonucleotide
  Antisense strand to SEQ ID NO: 874516
aauuguccaugacagcacc

SEQ ID NO: 874518 - RNA, 19 nt, Artificial Sequence
  Description of Artificial Sequence: Synthetic oligonucleotide
  Sense strand starting at position 3771 of SEQ ID NO: 588574
cggugcaacucauugauuu

SEQ ID NO: 874519 - RNA, 19 nt, Artificial Sequence
  Description of Artificial Sequence: Synthetic oligonucleotide
  Antisense strand to SEQ ID NO: 874518
aaaucaaugaguugcaccg

SEQ ID NO: 874520 - RNA, 19 nt, Artificial Sequence
  Description of Artificial Sequence: Synthetic oligonucleotide
  Sense strand starting at position 415 of SEQ ID NO: 588575
gcuggcuugggaugaauaa

SEQ ID NO: 874521 - RNA, 19 nt, Artificial Sequence
  Description of Artificial Sequence: Synthetic oligonucleotide
  Antisense strand to SEQ ID NO: 874520
uuauucaucccaagccagc

SEQ ID NO: 874522 - RNA, 19 nt, Artificial Sequence
  Description of Artificial Sequence: Synthetic oligonucleotide
  Sense strand starting at position 703 of SEQ ID NO: 588575
agacgacuuucuccacaaa

SEQ ID NO: 874523 - RNA, 19 nt, Artificial Sequence
  Description of Artificial Sequence: Synthetic oligonucleotide
  Antisense strand to SEQ ID NO: 874522
uuuguggagaaagucgucu

SEQ ID NO: 874524 - RNA, 19 nt, Artificial Sequence
  Description of Artificial Sequence: Synthetic oligonucleotide
  Sense strand starting at position 706 of SEQ ID NO: 588575
cgacuuucuccacaaagug

SEQ ID NO: 874525 - RNA, 19 nt, Artificial Sequence
  Description of Artificial Sequence: Synthetic oligonucleotide
  Antisense strand to SEQ ID NO: 874524
cacuuuguggagaaagucg

SEQ ID NO: 874526 - RNA, 19 nt, Artificial Sequence
  Description of Artificial Sequence: Synthetic oligonucleotide
  Sense strand starting at position 716 of SEQ ID NO: 588575
cacaaagugcuguauguua

SEQ ID NO: 874527 - RNA, 19 nt, Artificial Sequence
  Description of Artificial Sequence: Synthetic oligonucleotide
  Antisense strand to SEQ ID NO: 874526
uaacauacagcacuuugug

SEQ ID NO: 874528 - RNA, 19 nt, Artificial Sequence
  Description of Artificial Sequence: Synthetic oligonucleotide
  Sense strand starting at position 862 of SEQ ID NO: 588575
aggagagacagccgugaau

SEQ ID NO: 874529 - RNA, 19 nt, Artificial Sequence
  Description of Artificial Sequence: Synthetic oligonucleotide
  Antisense strand to SEQ ID NO: 874528
auucacggcugucucuccu

SEQ ID NO: 874530 - RNA, 19 nt, Artificial Sequence
  Description of Artificial Sequence: Synthetic oligonucleotide
  Sense strand starting at position 864 of SEQ ID NO: 588575
gagagacagccgugaauaa

SEQ ID NO: 874531 - RNA, 19 nt, Artificial Sequence
  Description of Artificial Sequence: Synthetic oligonucleotide
  Antisense strand to SEQ ID NO: 874530
uuauucacggcugucucuc

SEQ ID NO: 874532 - RNA, 19 nt, Artificial Sequence
  Description of Artificial Sequence: Synthetic oligonucleotide
  Sense strand starting at position 891 of SEQ ID NO: 588575
cgagguuucggcagugaac

SEQ ID NO: 874533 - RNA, 19 nt, Artificial Sequence
  Description of Artificial Sequence: Synthetic oligonucleotide
  Antisense strand to SEQ ID NO: 874532
guucacugccgaaaccucg

SEQ ID NO: 874534 - RNA, 19 nt, Artificial Sequence
  Description of Artificial Sequence: Synthetic oligonucleotide
  Sense strand starting at position 907 of SEQ ID NO: 588575
aacguugcgccugacauuu

SEQ ID NO: 874535 - RNA, 19 nt, Artificial Sequence
  Description of Artificial Sequence: Synthetic oligonucleotide
  Antisense strand to SEQ ID NO: 874534
aaaugucaggcgcaacguu

SEQ ID NO: 874536 - RNA, 19 nt, Artificial Sequence
  Description of Artificial Sequence: Synthetic oligonucleotide
  Sense strand starting at position 1082 of SEQ ID NO: 588575
caggauuguaacggaaugu

SEQ ID NO: 874537 - RNA, 19 nt, Artificial Sequence
  Description of Artificial Sequence: Synthetic oligonucleotide
  Antisense strand to SEQ ID NO: 874536
acauuccguuacaauccug

SEQ ID NO: 874538 - RNA, 19 nt, Artificial Sequence
  Description of Artificial Sequence: Synthetic oligonucleotide
  Sense strand starting at position 1083 of SEQ ID NO: 588575
aggauuguaacggaauguu

SEQ ID NO: 874539 - RNA, 19 nt, Artificial Sequence
  Description of Artificial Sequence: Synthetic oligonucleotide
  Antisense strand to SEQ ID NO: 874538
aacauuccguuacaauccu

SEQ ID NO: 874540 - RNA, 19 nt, Artificial Sequence
  Description of Artificial Sequence: Synthetic oligonucleotide
  Sense strand starting at position 1086 of SEQ ID NO: 588575
auuguaacggaauguuauc

SEQ ID NO: 874541 - RNA, 19 nt, Artificial Sequence
  Description of Artificial Sequence: Synthetic oligonucleotide
  Antisense strand to SEQ ID NO: 874540
gauaacauuccguuacaau

SEQ ID NO: 874542 - RNA, 19 nt, Artificial Sequence
  Description of Artificial Sequence: Synthetic oligonucleotide
  Sense strand starting at position 1447 of SEQ ID NO: 588575
cgucauacacacugaaaca

SEQ ID NO: 874543 - RNA, 19 nt, Artificial Sequence
  Description of Artificial Sequence: Synthetic oligonucleotide
  Antisense strand to SEQ ID NO: 874542
uguuucaguguguaugacg

SEQ ID NO: 874544 - RNA, 19 nt, Artificial Sequence
  Description of Artificial Sequence: Synthetic oligonucleotide
  Sense strand starting at position 1878 of SEQ ID NO: 588575
cugaaauauggcugaguua

SEQ ID NO: 874545 - RNA, 19 nt, Artificial Sequence
  Description of Artificial Sequence: Synthetic oligonucleotide
  Antisense strand to SEQ ID NO: 874544
uaacucagccauauuucag

SEQ ID NO: 874546 - RNA, 19 nt, Artificial Sequence
  Description of Artificial Sequence: Synthetic oligonucleotide
  Sense strand starting at position 1879 of SEQ ID NO: 588575
ugaaauauggcugaguuau

SEQ ID NO: 874547 - RNA, 19 nt, Artificial Sequence
  Description of Artificial Sequence: Synthetic oligonucleotide
  Antisense strand to SEQ ID NO: 874546
auaacucagccauauuuca

SEQ ID NO: 874548 - RNA, 19 nt, Artificial Sequence
  Description of Artificial Sequence: Synthetic oligonucleotide
  Sense strand starting at position 1881 of SEQ ID NO: 588575
aaauauggcugaguuauua

SEQ ID NO: 874549 - RNA, 19 nt, Artificial Sequence
  Description of Artificial Sequence: Synthetic oligonucleotide
  Antisense strand to SEQ ID NO: 874548
uaauaacucagccauauuu

SEQ ID NO: 874550 - RNA, 19 nt, Artificial Sequence
  Description of Artificial Sequence: Synthetic oligonucleotide
  Sense strand starting at position 1964 of SEQ ID NO: 588575
gugagugcgcuucuuguga

SEQ ID NO: 874551 - RNA, 19 nt, Artificial Sequence
  Description of Artificial Sequence: Synthetic oligonucleotide
  Antisense strand to SEQ ID NO: 874550
ucacaagaagcgcacucac

SEQ ID NO: 874552 - RNA, 19 nt, Artificial Sequence
  Description of Artificial Sequence: Synthetic oligonucleotide
  Sense strand starting at position 2433 of SEQ ID NO: 588575
ucgcucgcucgcuuauuaa

SEQ ID NO: 874553 - RNA, 19 nt, Artificial Sequence
  Description of Artificial Sequence: Synthetic oligonucleotide
  Antisense strand to SEQ ID NO: 874552
uuaauaagcgagcgagcga

SEQ ID NO: 874554 - RNA, 19 nt, Artificial Sequence
  Description of Artificial Sequence: Synthetic oligonucleotide
  Sense strand starting at position 2685 of SEQ ID NO: 588575
uggaaagccucgcuuaaag

SEQ ID NO: 874555 - RNA, 19 nt, Artificial Sequence
  Description of Artificial Sequence: Synthetic oligonucleotide
  Antisense strand to SEQ ID NO: 874554
cuuuaagcgaggcuuucca

SEQ ID NO: 874556 - RNA, 19 nt, Artificial Sequence
  Description of Artificial Sequence: Synthetic oligonucleotide
  Sense strand starting at position 2687 of SEQ ID NO: 588575
gaaagccucgcuuaaagua

SEQ ID NO: 874557 - RNA, 19 nt, Artificial Sequence
  Description of Artificial Sequence: Synthetic oligonucleotide
  Antisense strand to SEQ ID NO: 874556
uacuuuaagcgaggcuuuc

SEQ ID NO: 874558 - RNA, 19 nt, Artificial Sequence
  Description of Artificial Sequence: Synthetic oligonucleotide
  Sense strand starting at position 2929 of SEQ ID NO: 588575
uuuacuuuccaccacguau

SEQ ID NO: 874559 - RNA, 19 nt, Artificial Sequence
  Description of Artificial Sequence: Synthetic oligonucleotide
  Antisense strand to SEQ ID NO: 874558
auacgugguggaaaguaaa

SEQ ID NO: 874560 - RNA, 19 nt, Artificial Sequence
  Description of Artificial Sequence: Synthetic oligonucleotide
  Sense strand starting at position 2940 of SEQ ID NO: 588575
ccacguauuucugugguuu

SEQ ID NO: 874561 - RNA, 19 nt, Artificial Sequence
  Description of Artificial Sequence: Synthetic oligonucleotide
  Antisense strand to SEQ ID NO: 874560
aaaccacagaaauacgugg

SEQ ID NO: 874562 - RNA, 19 nt, Artificial Sequence
  Description of Artificial Sequence: Synthetic oligonucleotide
  Sense strand starting at position 3194 of SEQ ID NO: 588575
ggaugcuauuuccuugcaa

SEQ ID NO: 874563 - RNA, 19 nt, Artificial Sequence
  Description of Artificial Sequence: Synthetic oligonucleotide
  Antisense strand to SEQ ID NO: 874562
uugcaaggaaauagcaucc

SEQ ID NO: 874564 - RNA, 19 nt, Artificial Sequence
  Description of Artificial Sequence: Synthetic oligonucleotide
  Sense strand starting at position 3217 of SEQ ID NO: 588575
acgccuuccgcuuugguaa

SEQ ID NO: 874565 - RNA, 19 nt, Artificial Sequence
  Description of Artificial Sequence: Synthetic oligonucleotide
  Antisense strand to SEQ ID NO: 874564
uuaccaaagcggaaggcgu

SEQ ID NO: 874566 - RNA, 19 nt, Artificial Sequence
  Description of Artificial Sequence: Synthetic oligonucleotide
  Sense strand starting at position 3384 of SEQ ID NO: 588575
ggaggauuguccucugagg

SEQ ID NO: 874567 - RNA, 19 nt, Artificial Sequence
  Description of Artificial Sequence: Synthetic oligonucleotide
  Antisense strand to SEQ ID NO: 874566
ccucagaggacaauccucc

SEQ ID NO: 874568 - RNA, 19 nt, Artificial Sequence
  Description of Artificial Sequence: Synthetic oligonucleotide
  Sense strand starting at position 3386 of SEQ ID NO: 588575
aggauuguccucugaggac

SEQ ID NO: 874569 - RNA, 19 nt, Artificial Sequence
  Description of Artificial Sequence: Synthetic oligonucleotide
  Antisense strand to SEQ ID NO: 874568
guccucagaggacaauccu

SEQ ID NO: 874570 - RNA, 19 nt, Artificial Sequence
  Description of Artificial Sequence: Synthetic oligonucleotide
  Sense strand starting at position 3441 of SEQ ID NO: 588575
aguuaauacugacuguaau

SEQ ID NO: 874571 - RNA, 19 nt, Artificial Sequence
  Description of Artificial Sequence: Synthetic oligonucleotide
  Antisense strand to SEQ ID NO: 874570
auuacagucaguauuaacu

SEQ ID NO: 874572 - RNA, 19 nt, Artificial Sequence
  Description of Artificial Sequence: Synthetic oligonucleotide
  Sense strand starting at position 3442 of SEQ ID NO: 588575
guuaauacugacuguaaug

SEQ ID NO: 874573 - RNA, 19 nt, Artificial Sequence
  Description of Artificial Sequence: Synthetic oligonucleotide
  Antisense strand to SEQ ID NO: 874572
cauuacagucaguauuaac

SEQ ID NO: 874574 - RNA, 19 nt, Artificial Sequence
  Description of Artificial Sequence: Synthetic oligonucleotide
  Sense strand starting at position 3463 of SEQ ID NO: 588575
cguaaauuggauuauaauc

SEQ ID NO: 874575 - RNA, 19 nt, Artificial Sequence
  Description of Artificial Sequence: Synthetic oligonucleotide
  Antisense strand to SEQ ID NO: 874574
gauuauaauccaauuuacg

SEQ ID NO: 874576 - RNA, 19 nt, Artificial Sequence
  Description of Artificial Sequence: Synthetic oligonucleotide
  Sense strand starting at position 3472 of SEQ ID NO: 588575
gauuauaaucuuuaggcgu

SEQ ID NO: 874577 - RNA, 19 nt, Artificial Sequence
  Description of Artificial Sequence: Synthetic oligonucleotide
  Antisense strand to SEQ ID NO: 874576
acgccuaaagauuauaauc

SEQ ID NO: 874578 - RNA, 19 nt, Artificial Sequence
  Description of Artificial Sequence: Synthetic oligonucleotide
  Sense strand starting at position 3507 of SEQ ID NO: 588575
guaauccaucucugaguau

SEQ ID NO: 874579 - RNA, 19 nt, Artificial Sequence
  Description of Artificial Sequence: Synthetic oligonucleotide
  Antisense strand to SEQ ID NO: 874578
auacucagagauggauuac

SEQ ID NO: 874580 - RNA, 19 nt, Artificial Sequence
  Description of Artificial Sequence: Synthetic oligonucleotide
  Sense strand starting at position 3519 of SEQ ID NO: 588575
ugaguauuaauccgguuag

SEQ ID NO: 874581 - RNA, 19 nt, Artificial Sequence
  Description of Artificial Sequence: Synthetic oligonucleotide
  Antisense strand to SEQ ID NO: 874580
cuaaccggauuaauacuca

SEQ ID NO: 874582 - RNA, 19 nt, Artificial Sequence
  Description of Artificial Sequence: Synthetic oligonucleotide
  Sense strand starting at position 3523 of SEQ ID NO: 588575
uauuaauccgguuagacuc

SEQ ID NO: 874583 - RNA, 19 nt, Artificial Sequence
  Description of Artificial Sequence: Synthetic oligonucleotide
  Antisense strand to SEQ ID NO: 874582
gagucuaaccggauuaaua

SEQ ID NO: 874584 - RNA, 19 nt, Artificial Sequence
  Description of Artificial Sequence: Synthetic oligonucleotide
  Sense strand starting at position 3533 of SEQ ID NO: 588575
guuagacucccgggugaca

SEQ ID NO: 874585 - RNA, 19 nt, Artificial Sequence
  Description of Artificial Sequence: Synthetic oligonucleotide
  Antisense strand to SEQ ID NO: 874584
ugucacccgggagucuaac

SEQ ID NO: 874586 - RNA, 19 nt, Artificial Sequence
  Description of Artificial Sequence: Synthetic oligonucleotide
  Sense strand starting at position 3589 of SEQ ID NO: 588575
aaauguucucacucgcguu

SEQ ID NO: 874587 - RNA, 19 nt, Artificial Sequence
  Description of Artificial Sequence: Synthetic oligonucleotide
  Antisense strand to SEQ ID NO: 874586
aacgcgagugagaacauuu

SEQ ID NO: 874588 - RNA, 19 nt, Artificial Sequence
  Description of Artificial Sequence: Synthetic oligonucleotide
  Sense strand starting at position 3593 of SEQ ID NO: 588575
guucucacucgcguuguau

SEQ ID NO: 874589 - RNA, 19 nt, Artificial Sequence
  Description of Artificial Sequence: Synthetic oligonucleotide
  Antisense strand to SEQ ID NO: 874588
auacaacgcgagugagaac

SEQ ID NO: 874590 - RNA, 19 nt, Artificial Sequence
  Description of Artificial Sequence: Synthetic oligonucleotide
  Sense strand starting at position 3594 of SEQ ID NO: 588575
uucucacucgcguuguauu

SEQ ID NO: 874591 - RNA, 19 nt, Artificial Sequence
  Description of Artificial Sequence: Synthetic oligonucleotide
  Antisense strand to SEQ ID NO: 874590
aauacaacgcgagugagaa

SEQ ID NO: 874592 - RNA, 19 nt, Artificial Sequence
  Description of Artificial Sequence: Synthetic oligonucleotide
  Sense strand starting at position 3604 of SEQ ID NO: 588575
cguuguauuugaucucagu

SEQ ID NO: 874593 - RNA, 19 nt, Artificial Sequence
  Description of Artificial Sequence: Synthetic oligonucleotide
  Antisense strand to SEQ ID NO: 874592
acugagaucaaauacaacg

SEQ ID NO: 874594 - RNA, 19 nt, Artificial Sequence
  Description of Artificial Sequence: Synthetic oligonucleotide
  Sense strand starting at position 3615 of SEQ ID NO: 588575
aucucaguggccggagaua

SEQ ID NO: 874595 - RNA, 19 nt, Artificial Sequence
  Description of Artificial Sequence: Synthetic oligonucleotide
  Antisense strand to SEQ ID NO: 874594
uaucuccggccacugagau

SEQ ID NO: 874596 - RNA, 19 nt, Artificial Sequence
  Description of Artificial Sequence: Synthetic oligonucleotide
  Sense strand starting at position 3732 of SEQ ID NO: 588575
gacgauugauuugaaagug

SEQ ID NO: 874597 - RNA, 19 nt, Artificial Sequence
  Description of Artificial Sequence: Synthetic oligonucleotide
  Antisense strand to SEQ ID NO: 874596
cacuuucaaaucaaucguc

SEQ ID NO: 874598 - RNA, 19 nt, Artificial Sequence
  Description of Artificial Sequence: Synthetic oligonucleotide
  Sense strand starting at position 3748 of SEQ ID NO: 588575
gugaaagauggaugugacu

SEQ ID NO: 874599 - RNA, 19 nt, Artificial Sequence
  Description of Artificial Sequence: Synthetic oligonucleotide
  Antisense strand to SEQ ID NO: 874598
agucacauccaucuuucac

SEQ ID NO: 874600 - RNA, 19 nt, Artificial Sequence
  Description of Artificial Sequence: Synthetic oligonucleotide
  Sense strand starting at position 147 of SEQ ID NO: 588576
agacgacuuucuccacaaa

SEQ ID NO: 874601 - RNA, 19 nt, Artificial Sequence
  Description of Artificial Sequence: Synthetic oligonucleotide
  Antisense strand to SEQ ID NO: 874600
uuuguggagaaagucgucu

SEQ ID NO: 874602 - RNA, 19 nt, Artificial Sequence
  Description of Artificial Sequence: Synthetic oligonucleotide
  Sense strand starting at position 150 of SEQ ID NO: 588576
cgacuuucuccacaaagug

SEQ ID NO: 874603 - RNA, 19 nt, Artificial Sequence
  Description of Artificial Sequence: Synthetic oligonucleotide
  Antisense strand to SEQ ID NO: 874602
cacuuuguggagaaagucg

SEQ ID NO: 874604 - RNA, 19 nt, Artificial Sequence
  Description of Artificial Sequence: Synthetic oligonucleotide
  Sense strand starting at position 160 of SEQ ID NO: 588576
cacaaagugcuguauguua

SEQ ID NO: 874605 - RNA, 19 nt, Artificial Sequence
  Description of Artificial Sequence: Synthetic oligonucleotide
  Antisense strand to SEQ ID NO: 874604
uaacauacagcacuuugug

SEQ ID NO: 874606 - RNA, 19 nt, Artificial Sequence
  Description of Artificial Sequence: Synthetic oligonucleotide
  Sense strand starting at position 306 of SEQ ID NO: 588576
aggagagacagccgugaau

SEQ ID NO: 874607 - RNA, 19 nt, Artificial Sequence
  Description of Artificial Sequence: Synthetic oligonucleotide
  Antisense strand to SEQ ID NO: 874606
auucacggcugucucuccu

SEQ ID NO: 874608 - RNA, 19 nt, Artificial Sequence
  Description of Artificial Sequence: Synthetic oligonucleotide
  Sense strand starting at position 308 of SEQ ID NO: 588576
gagagacagccgugaauaa

SEQ ID NO: 874609 - RNA, 19 nt, Artificial Sequence
  Description of Artificial Sequence: Synthetic oligonucleotide
  Antisense strand to SEQ ID NO: 874608
uuauucacggcugucucuc

SEQ ID NO: 874610 - RNA, 19 nt, Artificial Sequence
  Description of Artificial Sequence: Synthetic oligonucleotide
  Sense strand starting at position 335 of SEQ ID NO: 588576
cgagguuucggcagugaac

SEQ ID NO: 874611 - RNA, 19 nt, Artificial Sequence
  Description of Artificial Sequence: Synthetic oligonucleotide
  Antisense strand to SEQ ID NO: 874610
guucacugccgaaaccucg

SEQ ID NO: 874612 - RNA, 19 nt, Artificial Sequence
  Description of Artificial Sequence: Synthetic oligonucleotide
  Sense strand starting at position 351 of SEQ ID NO: 588576
aacguugcgccugacauuu

SEQ ID NO: 874613 - RNA, 19 nt, Artificial Sequence
  Description of Artificial Sequence: Synthetic oligonucleotide
  Antisense strand to SEQ ID NO: 874612
aaaugucaggcgcaacguu

SEQ ID NO: 874614 - RNA, 19 nt, Artificial Sequence
  Description of Artificial Sequence: Synthetic oligonucleotide
  Sense strand starting at position 526 of SEQ ID NO: 588576
caggauuguaacggaaugu

SEQ ID NO: 874615 - RNA, 19 nt, Artificial Sequence
  Description of Artificial Sequence: Synthetic oligonucleotide
  Antisense strand to SEQ ID NO: 874614
acauuccguuacaauccug

SEQ ID NO: 874616 - RNA, 19 nt, Artificial Sequence
  Description of Artificial Sequence: Synthetic oligonucleotide
  Sense strand starting at position 527 of SEQ ID NO: 588576
aggauuguaacggaauguu

SEQ ID NO: 874617 - RNA, 19 nt, Artificial Sequence
  Description of Artificial Sequence: Synthetic oligonucleotide
  Antisense strand to SEQ ID NO: 874616
aacauuccguuacaauccu

SEQ ID NO: 874618 - RNA, 19 nt, Artificial Sequence
  Description of Artificial Sequence: Synthetic oligonucleotide
  Sense strand starting at position 530 of SEQ ID NO: 588576
auuguaacggaauguuauc

SEQ ID NO: 874619 - RNA, 19 nt, Artificial Sequence
  Description of Artificial Sequence: Synthetic oligonucleotide
  Antisense strand to SEQ ID NO: 874618
gauaacauuccguuacaau

SEQ ID NO: 874620 - RNA, 19 nt, Artificial Sequence
  Description of Artificial Sequence: Synthetic oligonucleotide
  Sense strand starting at position 891 of SEQ ID NO: 588576
cgucauacacacugaaaca

SEQ ID NO: 874621 - RNA, 19 nt, Artificial Sequence
  Description of Artificial Sequence: Synthetic oligonucleotide
  Antisense strand to SEQ ID NO: 874620
uguuucaguguguaugacg

SEQ ID NO: 874622 - RNA, 19 nt, Artificial Sequence
  Description of Artificial Sequence: Synthetic oligonucleotide
  Sense strand starting at position 1322 of SEQ ID NO: 588576
cugaaauauggcugaguua

SEQ ID NO: 874623 - RNA, 19 nt, Artificial Sequence
  Description of Artificial Sequence: Synthetic oligonucleotide
  Antisense strand to SEQ ID NO: 874622
uaacucagccauauuucag

SEQ ID NO: 874624 - RNA, 19 nt, Artificial Sequence
  Description of Artificial Sequence: Synthetic oligonucleotide
  Sense strand starting at position 1323 of SEQ ID NO: 588576
ugaaauauggcugaguuau

SEQ ID NO: 874625 - RNA, 19 nt, Artificial Sequence
  Description of Artificial Sequence: Synthetic oligonucleotide
  Antisense strand to SEQ ID NO: 874624
auaacucagccauauuuca

SEQ ID NO: 874626 - RNA, 19 nt, Artificial Sequence
  Description of Artificial Sequence: Synthetic oligonucleotide
  Sense strand starting at position 1325 of SEQ ID NO: 588576
aaauauggcugaguuauua

SEQ ID NO: 874627 - RNA, 19 nt, Artificial Sequence
  Description of Artificial Sequence: Synthetic oligonucleotide
  Antisense strand to SEQ ID NO: 874626
uaauaacucagccauauuu

SEQ ID NO: 874628 - RNA, 19 nt, Artificial Sequence
  Description of Artificial Sequence: Synthetic oligonucleotide
  Sense strand starting at position 1408 of SEQ ID NO: 588576
gugagugcgcuucuuguga

SEQ ID NO: 874629 - RNA, 19 nt, Artificial Sequence
  Description of Artificial Sequence: Synthetic oligonucleotide
  Antisense strand to SEQ ID NO: 874628
ucacaagaagcgcacucac

SEQ ID NO: 874630 - RNA, 19 nt, Artificial Sequence
  Description of Artificial Sequence: Synthetic oligonucleotide
  Sense strand starting at position 1877 of SEQ ID NO: 588576
ucgcucgcucgcuuauuaa

SEQ ID NO: 874631 - RNA, 19 nt, Artificial Sequence
  Description of Artificial Sequence: Synthetic oligonucleotide
  Antisense strand to SEQ ID NO: 874630
uuaauaagcgagcgagcga

SEQ ID NO: 874632 - RNA, 19 nt, Artificial Sequence
  Description of Artificial Sequence: Synthetic oligonucleotide
  Sense strand starting at position 2131 of SEQ ID NO: 588576
gaaagccucgcuuaaagua

SEQ ID NO: 874633 - RNA, 19 nt, Artificial Sequence
  Description of Artificial Sequence: Synthetic oligonucleotide
  Antisense strand to SEQ ID NO: 874632
uacuuuaagcgaggcuuuc

SEQ ID NO: 874634 - RNA, 19 nt, Artificial Sequence
  Description of Artificial Sequence: Synthetic oligonucleotide
  Sense strand starting at position 2373 of SEQ ID NO: 588576
uuuacuuuccaccacguau

SEQ ID NO: 874635 - RNA, 19 nt, Artificial Sequence
  Description of Artificial Sequence: Synthetic oligonucleotide
  Antisense strand to SEQ ID NO: 874634
auacgugguggaaaguaaa

SEQ ID NO: 874636 - RNA, 19 nt, Artificial Sequence
  Description of Artificial Sequence: Synthetic oligonucleotide
  Sense strand starting at position 2384 of SEQ ID NO: 588576
ccacguauuucugugguuu

SEQ ID NO: 874637 - RNA, 19 nt, Artificial Sequence
  Description of Artificial Sequence: Synthetic oligonucleotide
  Antisense strand to SEQ ID NO: 874636
aaaccacagaaauacgugg

SEQ ID NO: 874638 - RNA, 19 nt, Artificial Sequence
  Description of Artificial Sequence: Synthetic oligonucleotide
  Sense strand starting at position 2638 of SEQ ID NO: 588576
ggaugcuauuuccuugcaa

SEQ ID NO: 874639 - RNA, 19 nt, Artificial Sequence
  Description of Artificial Sequence: Synthetic oligonucleotide
  Antisense strand to SEQ ID NO: 874638
uugcaaggaaauagcaucc

SEQ ID NO: 874640 - RNA, 19 nt, Artificial Sequence
  Description of Artificial Sequence: Synthetic oligonucleotide
  Sense strand starting at position 2661 of SEQ ID NO: 588576
acgccuuccgcuuugguaa

SEQ ID NO: 874641 - RNA, 19 nt, Artificial Sequence
  Description of Artificial Sequence: Synthetic oligonucleotide
  Antisense strand to SEQ ID NO: 874640
uuaccaaagcggaaggcgu

SEQ ID NO: 874642 - RNA, 19 nt, Artificial Sequence
  Description of Artificial Sequence: Synthetic oligonucleotide
  Sense strand starting at position 2828 of SEQ ID NO: 588576
ggaggauuguccucugagg

SEQ ID NO: 874643 - RNA, 19 nt, Artificial Sequence
  Description of Artificial Sequence: Synthetic oligonucleotide
  Antisense strand to SEQ ID NO: 874642
ccucagaggacaauccucc

SEQ ID NO: 874644 - RNA, 19 nt, Artificial Sequence
  Description of Artificial Sequence: Synthetic oligonucleotide
  Sense strand starting at position 2830 of SEQ ID NO: 588576
aggauuguccucugaggac

SEQ ID NO: 874645 - RNA, 19 nt, Artificial Sequence
  Description of Artificial Sequence: Synthetic oligonucleotide
  Antisense strand to SEQ ID NO: 874644
guccucagaggacaauccu

SEQ ID NO: 874646 - RNA, 19 nt, Artificial Sequence
  Description of Artificial Sequence: Synthetic oligonucleotide
  Sense strand starting at position 2885 of SEQ ID NO: 588576
aguuaauacugacuguaau

SEQ ID NO: 874647 - RNA, 19 nt, Artificial Sequence
  Description of Artificial Sequence: Synthetic oligonucleotide
  Antisense strand to SEQ ID NO: 874646
auuacagucaguauuaacu

SEQ ID NO: 874648 - RNA, 19 nt, Artificial Sequence
  Description of Artificial Sequence: Synthetic oligonucleotide
  Sense strand starting at position 2886 of SEQ ID NO: 588576
guuaauacugacuguaaug

SEQ ID NO: 874649 - RNA, 19 nt, Artificial Sequence
  Description of Artificial Sequence: Synthetic oligonucleotide
  Antisense strand to SEQ ID NO: 874648
cauuacagucaguauuaac

SEQ ID NO: 874650 - RNA, 19 nt, Artificial Sequence
  Description of Artificial Sequence: Synthetic oligonucleotide
  Sense strand starting at position 2907 of SEQ ID NO: 588576
cguaaauuggauuauaauc

SEQ ID NO: 874651 - RNA, 19 nt, Artificial Sequence
  Description of Artificial Sequence: Synthetic oligonucleotide
  Antisense strand to SEQ ID NO: 874650
gauuauaauccaauuuacg

SEQ ID NO: 874652 - RNA, 19 nt, Artificial Sequence
  Description of Artificial Sequence: Synthetic oligonucleotide
  Sense strand starting at position 2916 of SEQ ID NO: 588576
gauuauaaucuuuaggcgu

SEQ ID NO: 874653 - RNA, 19 nt, Artificial Sequence
  Description of Artificial Sequence: Synthetic oligonucleotide
  Antisense strand to SEQ ID NO: 874652
acgccuaaagauuauaauc

SEQ ID NO: 874654 - RNA, 19 nt, Artificial Sequence
  Description of Artificial Sequence: Synthetic oligonucleotide
  Sense strand starting at position 2951 of SEQ ID NO: 588576
guaauccaucucugaguau

SEQ ID NO: 874655 - RNA, 19 nt, Artificial Sequence
  Description of Artificial Sequence: Synthetic oligonucleotide
  Antisense strand to SEQ ID NO: 874654
auacucagagauggauuac

SEQ ID NO: 874656 - RNA, 19 nt, Artificial Sequence
  Description of Artificial Sequence: Synthetic oligonucleotide
  Sense strand starting at position 2967 of SEQ ID NO: 588576
uauuaauccgguuagacuc

SEQ ID NO: 874657 - RNA, 19 nt, Artificial Sequence
  Description of Artificial Sequence: Synthetic oligonucleotide
  Antisense strand to SEQ ID NO: 874656
gagucuaaccggauuaaua

SEQ ID NO: 874658 - RNA, 19 nt, Artificial Sequence
  Description of Artificial Sequence: Synthetic oligonucleotide
  Sense strand starting at position 3033 of SEQ ID NO: 588576
aaauguucucacucgcguu

SEQ ID NO: 874659 - RNA, 19 nt, Artificial Sequence
  Description of Artificial Sequence: Synthetic oligonucleotide
  Antisense strand to SEQ ID NO: 874658
aacgcgagugagaacauuu

SEQ ID NO: 874660 - RNA, 19 nt, Artificial Sequence
  Description of Artificial Sequence: Synthetic oligonucleotide
  Sense strand starting at position 3037 of SEQ ID NO: 588576
guucucacucgcguuguau

SEQ ID NO: 874661 - RNA, 19 nt, Artificial Sequence
  Description of Artificial Sequence: Synthetic oligonucleotide
  Antisense strand to SEQ ID NO: 874660
auacaacgcgagugagaac

SEQ ID NO: 874662 - RNA, 19 nt, Artificial Sequence
  Description of Artificial Sequence: Synthetic oligonucleotide
  Sense strand starting at position 3038 of SEQ ID NO: 588576
uucucacucgcguuguauu

SEQ ID NO: 874663 - RNA, 19 nt, Artificial Sequence
  Description of Artificial Sequence: Synthetic oligonucleotide
  Antisense strand to SEQ ID NO: 874662
aauacaacgcgagugagaa

SEQ ID NO: 874664 - RNA, 19 nt, Artificial Sequence
  Description of Artificial Sequence: Synthetic oligonucleotide
  Sense strand starting at position 3048 of SEQ ID NO: 588576
cguuguauuugaucucagu

SEQ ID NO: 874665 - RNA, 19 nt, Artificial Sequence
  Description of Artificial Sequence: Synthetic oligonucleotide
  Antisense strand to SEQ ID NO: 874664
acugagaucaaauacaacg

SEQ ID NO: 874666 - RNA, 19 nt, Artificial Sequence
  Description of Artificial Sequence: Synthetic oligonucleotide
  Sense strand starting at position 3176 of SEQ ID NO: 588576
gacgauugauuugaaagug

SEQ ID NO: 874667 - RNA, 19 nt, Artificial Sequence
  Description of Artificial Sequence: Synthetic oligonucleotide
  Antisense strand to SEQ ID NO: 874666
cacuuucaaaucaaucguc

SEQ ID NO: 874668 - RNA, 19 nt, Artificial Sequence
  Description of Artificial Sequence: Synthetic oligonucleotide
  Sense strand starting at position 3192 of SEQ ID NO: 588576
gugaaagauggaugugacu

SEQ ID NO: 874669 - RNA, 19 nt, Artificial Sequence
  Description of Artificial Sequence: Synthetic oligonucleotide
  Antisense strand to SEQ ID NO: 874668
agucacauccaucuuucac

SEQ ID NO: 874670 - RNA, 19 nt, Artificial Sequence
  Description of Artificial Sequence: Synthetic oligonucleotide
  Sense strand starting at position 3543 of SEQ ID NO: 588576
uccuguguccucgcuguua

SEQ ID NO: 874671 - RNA, 19 nt, Artificial Sequence
  Description of Artificial Sequence: Synthetic oligonucleotide
  Antisense strand to SEQ ID NO: 874670
uaacagcgaggacacagga

SEQ ID NO: 874672 - RNA, 19 nt, Artificial Sequence
  Description of Artificial Sequence: Synthetic oligonucleotide
  Sense strand starting at position 3706 of SEQ ID NO: 588576
ucaagaaacuucuuuggcu

SEQ ID NO: 874673 - RNA, 19 nt, Artificial Sequence
  Description of Artificial Sequence: Synthetic oligonucleotide
  Antisense strand to SEQ ID NO: 874672
agccaaagaaguuucuuga

SEQ ID NO: 874674 - RNA, 19 nt, Artificial Sequence
  Description of Artificial Sequence: Synthetic oligonucleotide
  Sense strand starting at position 3803 of SEQ ID NO: 588576
aucuaaauccaagggcuua

SEQ ID NO: 874675 - RNA, 19 nt, Artificial Sequence
  Description of Artificial Sequence: Synthetic oligonucleotide
  Antisense strand to SEQ ID NO: 874674
uaagcccuuggauuuagau

SEQ ID NO: 874676 - RNA, 19 nt, Artificial Sequence
  Description of Artificial Sequence: Synthetic oligonucleotide
  Sense strand starting at position 3911 of SEQ ID NO: 588576
uuuauauucgcagagacaa

SEQ ID NO: 874677 - RNA, 19 nt, Artificial Sequence
  Description of Artificial Sequence: Synthetic oligonucleotide
  Antisense strand to SEQ ID NO: 874676
uugucucugcgaauauaaa

SEQ ID NO: 874678 - RNA, 19 nt, Artificial Sequence
  Description of Artificial Sequence: Synthetic oligonucleotide
  Sense strand starting at position 3962 of SEQ ID NO: 588576
ccuauuuauugugcauuau

SEQ ID NO: 874679 - RNA, 19 nt, Artificial Sequence
  Description of Artificial Sequence: Synthetic oligonucleotide
  Antisense strand to SEQ ID NO: 874678
auaaugcacaauaaauagg

SEQ ID NO: 874680 - RNA, 19 nt, Artificial Sequence
  Description of Artificial Sequence: Synthetic oligonucleotide
  Sense strand starting at position 26 of SEQ ID NO: 588577
gaaugaacacaauguguaa

SEQ ID NO: 874681 - RNA, 19 nt, Artificial Sequence
  Description of Artificial Sequence: Synthetic oligonucleotide
  Antisense strand to SEQ ID NO: 874680
uuacacauuguguucauuc

SEQ ID NO: 874682 - RNA, 19 nt, Artificial Sequence
  Description of Artificial Sequence: Synthetic oligonucleotide
  Sense strand starting at position 30 of SEQ ID NO: 588577
gaacacaauguguaagcau

SEQ ID NO: 874683 - RNA, 19 nt, Artificial Sequence
  Description of Artificial Sequence: Synthetic oligonucleotide
  Antisense strand to SEQ ID NO: 874682
augcuuacacauuguguuc

SEQ ID NO: 874684 - RNA, 19 nt, Artificial Sequence
  Description of Artificial Sequence: Synthetic oligonucleotide
  Sense strand starting at position 38 of SEQ ID NO: 588577
uguguaagcaucugacuug

SEQ ID NO: 874685 - RNA, 19 nt, Artificial Sequence
  Description of Artificial Sequence: Synthetic oligonucleotide
  Antisense strand to SEQ ID NO: 874684
caagucagaugcuuacaca

SEQ ID NO: 874686 - RNA, 19 nt, Artificial Sequence
  Description of Artificial Sequence: Synthetic oligonucleotide
  Sense strand starting at position 47 of SEQ ID NO: 588577
aucugacuugugcagggaa

SEQ ID NO: 874687 - RNA, 19 nt, Artificial Sequence
  Description of Artificial Sequence: Synthetic oligonucleotide
  Antisense strand to SEQ ID NO: 874686
uucccugcacaagucagau

SEQ ID NO: 874688 - RNA, 19 nt, Artificial Sequence
  Description of Artificial Sequence: Synthetic oligonucleotide
  Sense strand starting at position 49 of SEQ ID NO: 588577
cugacuugugcagggaaac

SEQ ID NO: 874689 - RNA, 19 nt, Artificial Sequence
  Description of Artificial Sequence: Synthetic oligonucleotide
  Antisense strand to SEQ ID NO: 874688
guuucccugcacaagucag

SEQ ID NO: 874690 - RNA, 19 nt, Artificial Sequence
  Description of Artificial Sequence: Synthetic oligonucleotide
  Sense strand starting at position 50 of SEQ ID NO: 588577
ugacuugugcagggaaaca

SEQ ID NO: 874691 - RNA, 19 nt, Artificial Sequence
  Description of Artificial Sequence: Synthetic oligonucleotide
  Antisense strand to SEQ ID NO: 874690
uguuucccugcacaaguca

SEQ ID NO: 874692 - RNA, 19 nt, Artificial Sequence
  Description of Artificial Sequence: Synthetic oligonucleotide
  Sense strand starting at position 262 of SEQ ID NO: 588577
acguucauuccggagugaa

SEQ ID NO: 874693 - RNA, 19 nt, Artificial Sequence
  Description of Artificial Sequence: Synthetic oligonucleotide
  Antisense strand to SEQ ID NO: 874692
uucacuccggaaugaacgu

SEQ ID NO: 874694 - RNA, 19 nt, Artificial Sequence
  Description of Artificial Sequence: Synthetic oligonucleotide
  Sense strand starting at position 315 of SEQ ID NO: 588577
gcuuccucguuauuugcau

SEQ ID NO: 874695 - RNA, 19 nt, Artificial Sequence
  Description of Artificial Sequence: Synthetic oligonucleotide
  Antisense strand to SEQ ID NO: 874694
augcaaauaacgaggaagc

SEQ ID NO: 874696 - RNA, 19 nt, Artificial Sequence
  Description of Artificial Sequence: Synthetic oligonucleotide
  Sense strand starting at position 462 of SEQ ID NO: 588577
aacgccuuuggcuagagau

SEQ ID NO: 874697 - RNA, 19 nt, Artificial Sequence
  Description of Artificial Sequence: Synthetic oligonucleotide
  Antisense strand to SEQ ID NO: 874696
aucucuagccaaaggcguu

SEQ ID NO: 874698 - RNA, 19 nt, Artificial Sequence
  Description of Artificial Sequence: Synthetic oligonucleotide
  Sense strand starting at position 464 of SEQ ID NO: 588577
cgccuuuggcuagagauug

SEQ ID NO: 874699 - RNA, 19 nt, Artificial Sequence
  Description of Artificial Sequence: Synthetic oligonucleotide
  Antisense strand to SEQ ID NO: 874698
caaucucuagccaaaggcg

SEQ ID NO: 874700 - RNA, 19 nt, Artificial Sequence
  Description of Artificial Sequence: Synthetic oligonucleotide
  Sense strand starting at position 469 of SEQ ID NO: 588577
uuggcuagagauugaaauc

SEQ ID NO: 874701 - RNA, 19 nt, Artificial Sequence
  Description of Artificial Sequence: Synthetic oligonucleotide
  Antisense strand to SEQ ID NO: 874700
gauuucaaucucuagccaa

SEQ ID NO: 874702 - RNA, 19 nt, Artificial Sequence
  Description of Artificial Sequence: Synthetic oligonucleotide
  Sense strand starting at position 586 of SEQ ID NO: 588577
ugggcugagaucugagaaa

SEQ ID NO: 874703 - RNA, 19 nt, Artificial Sequence
  Description of Artificial Sequence: Synthetic oligonucleotide
  Antisense strand to SEQ ID NO: 874702
uuucucagaucucagccca

SEQ ID NO: 874704 - RNA, 19 nt, Artificial Sequence
  Description of Artificial Sequence: Synthetic oligonucleotide
  Sense strand starting at position 1085 of SEQ ID NO: 588577
ugggauuccagauguuuga

SEQ ID NO: 874705 - RNA, 19 nt, Artificial Sequence
  Description of Artificial Sequence: Synthetic oligonucleotide
  Antisense strand to SEQ ID NO: 874704
ucaaacaucuggaauccca

SEQ ID NO: 874706 - RNA, 19 nt, Artificial Sequence
  Description of Artificial Sequence: Synthetic oligonucleotide
  Sense strand starting at position 1089 of SEQ ID NO: 588577
auuccagauguuugacagu

SEQ ID NO: 874707 - RNA, 19 nt, Artificial Sequence
  Description of Artificial Sequence: Synthetic oligonucleotide
  Antisense strand to SEQ ID NO: 874706
acugucaaacaucuggaau

SEQ ID NO: 874708 - RNA, 19 nt, Artificial Sequence
  Description of Artificial Sequence: Synthetic oligonucleotide
  Sense strand starting at position 1118 of SEQ ID NO: 588577
aaaguuaagcgcgauuugu

SEQ ID NO: 874709 - RNA, 19 nt, Artificial Sequence
  Description of Artificial Sequence: Synthetic oligonucleotide
  Antisense strand to SEQ ID NO: 874708
acaaaucgcgcuuaacuuu

SEQ ID NO: 874710 - RNA, 19 nt, Artificial Sequence
  Description of Artificial Sequence: Synthetic oligonucleotide
  Sense strand starting at position 1385 of SEQ ID NO: 588577
ggacgaucuuauugauuua

SEQ ID NO: 874711 - RNA, 19 nt, Artificial Sequence
  Description of Artificial Sequence: Synthetic oligonucleotide
  Antisense strand to SEQ ID NO: 874710
uaaaucaauaagaucgucc

SEQ ID NO: 874712 - RNA, 19 nt, Artificial Sequence
  Description of Artificial Sequence: Synthetic oligonucleotide
  Sense strand starting at position 2042 of SEQ ID NO: 588577
ggaucaucuucccuccgga

SEQ ID NO: 874713 - RNA, 19 nt, Artificial Sequence
  Description of Artificial Sequence: Synthetic oligonucleotide
  Antisense strand to SEQ ID NO: 874712
uccggagggaagaugaucc

SEQ ID NO: 874714 - RNA, 19 nt, Artificial Sequence
  Description of Artificial Sequence: Synthetic oligonucleotide
  Sense strand starting at position 2125 of SEQ ID NO: 588577
cagugaagaaggugucaga

SEQ ID NO: 874715 - RNA, 19 nt, Artificial Sequence
  Description of Artificial Sequence: Synthetic oligonucleotide
  Antisense strand to SEQ ID NO: 874714
ucugacaccuucuucacug

SEQ ID NO: 874716 - RNA, 19 nt, Artificial Sequence
  Description of Artificial Sequence: Synthetic oligonucleotide
  Sense strand starting at position 2151 of SEQ ID NO: 588577
ggaugaucucuggguccac

SEQ ID NO: 874717 - RNA, 19 nt, Artificial Sequence
  Description of Artificial Sequence: Synthetic oligonucleotide
  Antisense strand to SEQ ID NO: 874716
guggacccagagaucaucc

SEQ ID NO: 874718 - RNA, 19 nt, Artificial Sequence
  Description of Artificial Sequence: Synthetic oligonucleotide
  Sense strand starting at position 2152 of SEQ ID NO: 588577
gaugaucucuggguccaca

SEQ ID NO: 874719 - RNA, 19 nt, Artificial Sequence
  Description of Artificial Sequence: Synthetic oligonucleotide
  Antisense strand to SEQ ID NO: 874718
uguggacccagagaucauc

SEQ ID NO: 874720 - RNA, 19 nt, Artificial Sequence
  Description of Artificial Sequence: Synthetic oligonucleotide
  Sense strand starting at position 2245 of SEQ ID NO: 588577
ccaugaacugccugacaca

SEQ ID NO: 874721 - RNA, 19 nt, Artificial Sequence
  Description of Artificial Sequence: Synthetic oligonucleotide
  Antisense strand to SEQ ID NO: 874720
ugugucaggcaguucaugg

SEQ ID NO: 874722 - RNA, 19 nt, Artificial Sequence
  Description of Artificial Sequence: Synthetic oligonucleotide
  Sense strand starting at position 2323 of SEQ ID NO: 588577
gggagucauggaugaaccu

SEQ ID NO: 874723 - RNA, 19 nt, Artificial Sequence
  Description of Artificial Sequence: Synthetic oligonucleotide
  Antisense strand to SEQ ID NO: 874722
agguucauccaugacuccc

SEQ ID NO: 874724 - RNA, 19 nt, Artificial Sequence
  Description of Artificial Sequence: Synthetic oligonucleotide
  Sense strand starting at position 2466 of SEQ ID NO: 588577
gaugguuacggguaaacua

SEQ ID NO: 874725 - RNA, 19 nt, Artificial Sequence
  Description of Artificial Sequence: Synthetic oligonucleotide
  Antisense strand to SEQ ID NO: 874724
uaguuuacccguaaccauc

SEQ ID NO: 874726 - RNA, 19 nt, Artificial Sequence
  Description of Artificial Sequence: Synthetic oligonucleotide
  Sense strand starting at position 2664 of SEQ ID NO: 588577
uucaaagagguguggaaau

SEQ ID NO: 874727 - RNA, 19 nt, Artificial Sequence
  Description of Artificial Sequence: Synthetic oligonucleotide
  Antisense strand to SEQ ID NO: 874726
auuuccacaccucuuugaa

SEQ ID NO: 874728 - RNA, 19 nt, Artificial Sequence
  Description of Artificial Sequence: Synthetic oligonucleotide
  Sense strand starting at position 2840 of SEQ ID NO: 588577
ugauaucaacccuggauua

SEQ ID NO: 874729 - RNA, 19 nt, Artificial Sequence
  Description of Artificial Sequence: Synthetic oligonucleotide
  Antisense strand to SEQ ID NO: 874728
uaauccaggguugauauca

SEQ ID NO: 874730 - RNA, 19 nt, Artificial Sequence
  Description of Artificial Sequence: Synthetic oligonucleotide
  Sense strand starting at position 2863 of SEQ ID NO: 588577
acucuaauucugugucacu

SEQ ID NO: 874731 - RNA, 19 nt, Artificial Sequence
  Description of Artificial Sequence: Synthetic oligonucleotide
  Antisense strand to SEQ ID NO: 874730
agugacacagaauuagagu

SEQ ID NO: 874732 - RNA, 19 nt, Artificial Sequence
  Description of Artificial Sequence: Synthetic oligonucleotide
  Sense strand starting at position 2894 of SEQ ID NO: 588577
aaagauaccgauugugaau

SEQ ID NO: 874733 - RNA, 19 nt, Artificial Sequence
  Description of Artificial Sequence: Synthetic oligonucleotide
  Antisense strand to SEQ ID NO: 874732
auucacaaucgguaucuuu

SEQ ID NO: 874734 - RNA, 19 nt, Artificial Sequence
  Description of Artificial Sequence: Synthetic oligonucleotide
  Sense strand starting at position 3102 of SEQ ID NO: 588577
ggauaauauagguagcugu

SEQ ID NO: 874735 - RNA, 19 nt, Artificial Sequence
  Description of Artificial Sequence: Synthetic oligonucleotide
  Antisense strand to SEQ ID NO: 874734
acagcuaccuauauuaucc

SEQ ID NO: 874736 - RNA, 19 nt, Artificial Sequence
  Description of Artificial Sequence: Synthetic oligonucleotide
  Sense strand starting at position 3194 of SEQ ID NO: 588577
cuaucauuguuuccagcau

SEQ ID NO: 874737 - RNA, 19 nt, Artificial Sequence
  Description of Artificial Sequence: Synthetic oligonucleotide
  Antisense strand to SEQ ID NO: 874736
augcuggaaacaaugauag

SEQ ID NO: 874738 - RNA, 19 nt, Artificial Sequence
  Description of Artificial Sequence: Synthetic oligonucleotide
  Sense strand starting at position 3313 of SEQ ID NO: 588577
auguuaucuccuggaaagu

SEQ ID NO: 874739 - RNA, 19 nt, Artificial Sequence
  Description of Artificial Sequence: Synthetic oligonucleotide
  Antisense strand to SEQ ID NO: 874738
acuuuccaggagauaacau

SEQ ID NO: 874740 - RNA, 19 nt, Artificial Sequence
  Description of Artificial Sequence: Synthetic oligonucleotide
  Sense strand starting at position 3314 of SEQ ID NO: 588577
uguuaucuccuggaaagua

SEQ ID NO: 874741 - RNA, 19 nt, Artificial Sequence
  Description of Artificial Sequence: Synthetic oligonucleotide
  Antisense strand to SEQ ID NO: 874740
uacuuuccaggagauaaca

SEQ ID NO: 874742 - RNA, 19 nt, Artificial Sequence
  Description of Artificial Sequence: Synthetic oligonucleotide
  Sense strand starting at position 3393 of SEQ ID NO: 588577
ugcccaagucaguacagau

SEQ ID NO: 874743 - RNA, 19 nt, Artificial Sequence
  Description of Artificial Sequence: Synthetic oligonucleotide
  Antisense strand to SEQ ID NO: 874742
aucuguacugacuugggca

SEQ ID NO: 874744 - RNA, 19 nt, Artificial Sequence
  Description of Artificial Sequence: Synthetic oligonucleotide
  Sense strand starting at position 3570 of SEQ ID NO: 588577
ggauauuggaaagguguca

SEQ ID NO: 874745 - RNA, 19 nt, Artificial Sequence
  Description of Artificial Sequence: Synthetic oligonucleotide
  Antisense strand to SEQ ID NO: 874744
ugacaccuuuccaauaucc

SEQ ID NO: 874746 - RNA, 19 nt, Artificial Sequence
  Description of Artificial Sequence: Synthetic oligonucleotide
  Sense strand starting at position 3644 of SEQ ID NO: 588577
uuugcauagucauugacaa

SEQ ID NO: 874747 - RNA, 19 nt, Artificial Sequence
  Description of Artificial Sequence: Synthetic oligonucleotide
  Antisense strand to SEQ ID NO: 874746
uugucaaugacuaugcaaa

SEQ ID NO: 874748 - RNA, 19 nt, Artificial Sequence
  Description of Artificial Sequence: Synthetic oligonucleotide
  Sense strand starting at position 3645 of SEQ ID NO: 588577
uugcauagucauugacaaa

SEQ ID NO: 874749 - RNA, 19 nt, Artificial Sequence
  Description of Artificial Sequence: Synthetic oligonucleotide
  Antisense strand to SEQ ID NO: 874748
uuugucaaugacuaugcaa

SEQ ID NO: 874750 - RNA, 19 nt, Artificial Sequence
  Description of Artificial Sequence: Synthetic oligonucleotide
  Sense strand starting at position 3720 of SEQ ID NO: 588577
caaaguaaauuugguaaga

SEQ ID NO: 874751 - RNA, 19 nt, Artificial Sequence
  Description of Artificial Sequence: Synthetic oligonucleotide
  Antisense strand to SEQ ID NO: 874750
ucuuaccaaauuuacuuug

SEQ ID NO: 874752 - RNA, 19 nt, Artificial Sequence
  Description of Artificial Sequence: Synthetic oligonucleotide
  Sense strand starting at position 3725 of SEQ ID NO: 588577
uaaauuugguaagaggcua

SEQ ID NO: 874753 - RNA, 19 nt, Artificial Sequence
  Description of Artificial Sequence: Synthetic oligonucleotide
  Antisense strand to SEQ ID NO: 874752
uagccucuuaccaaauuua

SEQ ID NO: 874754 - RNA, 19 nt, Artificial Sequence
  Description of Artificial Sequence: Synthetic oligonucleotide
  Sense strand starting at position 3835 of SEQ ID NO: 588577
agcagacauccucaagagu

SEQ ID NO: 874755 - RNA, 19 nt, Artificial Sequence
  Description of Artificial Sequence: Synthetic oligonucleotide
  Antisense strand to SEQ ID NO: 874754
acucuugaggaugucugcu

SEQ ID NO: 874756 - RNA, 19 nt, Artificial Sequence
  Description of Artificial Sequence: Synthetic oligonucleotide
  Sense strand starting at position 3860 of SEQ ID NO: 588577
cauccuaagcaaugugagu

SEQ ID NO: 874757 - RNA, 19 nt, Artificial Sequence
  Description of Artificial Sequence: Synthetic oligonucleotide
  Antisense strand to SEQ ID NO: 874756
acucacauugcuuaggaug

SEQ ID NO: 874758 - RNA, 19 nt, Artificial Sequence
  Description of Artificial Sequence: Synthetic oligonucleotide
  Sense strand starting at position 3980 of SEQ ID NO: 588577
uagagaaauugucucaaug

SEQ ID NO: 874759 - RNA, 19 nt, Artificial Sequence
  Description of Artificial Sequence: Synthetic oligonucleotide
  Antisense strand to SEQ ID NO: 874758
cauugagacaauuucucua

SEQ ID NO: 874760 - RNA, 19 nt, Artificial Sequence
  Description of Artificial Sequence: Synthetic oligonucleotide
  Sense strand starting at position 45 of SEQ ID NO: 588578
cccaaauuccuagggccaa

SEQ ID NO: 874761 - RNA, 19 nt, Artificial Sequence
  Description of Artificial Sequence: Synthetic oligonucleotide
  Antisense strand to SEQ ID NO: 874760
uuggcccuaggaauuuggg

SEQ ID NO: 874762 - RNA, 19 nt, Artificial Sequence
  Description of Artificial Sequence: Synthetic oligonucleotide
  Sense strand starting at position 296 of SEQ ID NO: 588578
guaagaaugugguuuggac

SEQ ID NO: 874763 - RNA, 19 nt, Artificial Sequence
  Description of Artificial Sequence: Synthetic oligonucleotide
  Antisense strand to SEQ ID NO: 874762
guccaaaccacauucuuac

SEQ ID NO: 874764 - RNA, 19 nt, Artificial Sequence
  Description of Artificial Sequence: Synthetic oligonucleotide
  Sense strand starting at position 415 of SEQ ID NO: 588578
caaggucagccugaacuau

SEQ ID NO: 874765 - RNA, 19 nt, Artificial Sequence
  Description of Artificial Sequence: Synthetic oligonucleotide
  Antisense strand to SEQ ID NO: 874764
auaguucaggcugaccuug

SEQ ID NO: 874766 - RNA, 19 nt, Artificial Sequence
  Description of Artificial Sequence: Synthetic oligonucleotide
  Sense strand starting at position 426 of SEQ ID NO: 588578
ugaacuaucucacugagua

SEQ ID NO: 874767 - RNA, 19 nt, Artificial Sequence
  Description of Artificial Sequence: Synthetic oligonucleotide
  Antisense strand to SEQ ID NO: 874766
uacucagugagauaguuca

SEQ ID NO: 874768 - RNA, 19 nt, Artificial Sequence
  Description of Artificial Sequence: Synthetic oligonucleotide
  Sense strand starting at position 427 of SEQ ID NO: 588578
gaacuaucucacugaguag

SEQ ID NO: 874769 - RNA, 19 nt, Artificial Sequence
  Description of Artificial Sequence: Synthetic oligonucleotide
  Antisense strand to SEQ ID NO: 874768
cuacucagugagauaguuc

SEQ ID NO: 874770 - RNA, 19 nt, Artificial Sequence
  Description of Artificial Sequence: Synthetic oligonucleotide
  Sense strand starting at position 430 of SEQ ID NO: 588578
cuaucucacugaguaguga

SEQ ID NO: 874771 - RNA, 19 nt, Artificial Sequence
  Description of Artificial Sequence: Synthetic oligonucleotide
  Antisense strand to SEQ ID NO: 874770
ucacuacucagugagauag

SEQ ID NO: 874772 - RNA, 19 nt, Artificial Sequence
  Description of Artificial Sequence: Synthetic oligonucleotide
  Sense strand starting at position 439 of SEQ ID NO: 588578
ugaguagugagagggagua

SEQ ID NO: 874773 - RNA, 19 nt, Artificial Sequence
  Description of Artificial Sequence: Synthetic oligonucleotide
  Antisense strand to SEQ ID NO: 874772
uacucccucucacuacuca

SEQ ID NO: 874774 - RNA, 19 nt, Artificial Sequence
  Description of Artificial Sequence: Synthetic oligonucleotide
  Sense strand starting at position 479 of SEQ ID NO: 588578
uuaccugcugaguaggaua

SEQ ID NO: 874775 - RNA, 19 nt, Artificial Sequence
  Description of Artificial Sequence: Synthetic oligonucleotide
  Antisense strand to SEQ ID NO: 874774
uauccuacucagcagguaa

SEQ ID NO: 874776 - RNA, 19 nt, Artificial Sequence
  Description of Artificial Sequence: Synthetic oligonucleotide
  Sense strand starting at position 523 of SEQ ID NO: 588578
ccuuucuuaccuggaaaga

SEQ ID NO: 874777 - RNA, 19 nt, Artificial Sequence
  Description of Artificial Sequence: Synthetic oligonucleotide
  Antisense strand to SEQ ID NO: 874776
ucuuuccagguaagaaagg

SEQ ID NO: 874778 - RNA, 19 nt, Artificial Sequence
  Description of Artificial Sequence: Synthetic oligonucleotide
  Sense strand starting at position 669 of SEQ ID NO: 588578
cucagaaugcccuggaauu

SEQ ID NO: 874779 - RNA, 19 nt, Artificial Sequence
  Description of Artificial Sequence: Synthetic oligonucleotide
  Antisense strand to SEQ ID NO: 874778
aauuccagggcauucugag

SEQ ID NO: 874780 - RNA, 19 nt, Artificial Sequence
  Description of Artificial Sequence: Synthetic oligonucleotide
  Sense strand starting at position 670 of SEQ ID NO: 588578
ucagaaugcccuggaauuc

SEQ ID NO: 874781 - RNA, 19 nt, Artificial Sequence
  Description of Artificial Sequence: Synthetic oligonucleotide
  Antisense strand to SEQ ID NO: 874780
gaauuccagggcauucuga

SEQ ID NO: 874782 - RNA, 19 nt, Artificial Sequence
  Description of Artificial Sequence: Synthetic oligonucleotide
  Sense strand starting at position 904 of SEQ ID NO: 588578
cgcaguuaucuguuauguc

SEQ ID NO: 874783 - RNA, 19 nt, Artificial Sequence
  Description of Artificial Sequence: Synthetic oligonucleotide
  Antisense strand to SEQ ID NO: 874782
gacauaacagauaacugcg

SEQ ID NO: 874784 - RNA, 19 nt, Artificial Sequence
  Description of Artificial Sequence: Synthetic oligonucleotide
  Sense strand starting at position 1004 of SEQ ID NO: 588578
gccacucaacauuguugaa

SEQ ID NO: 874785 - RNA, 19 nt, Artificial Sequence
  Description of Artificial Sequence: Synthetic oligonucleotide
  Antisense strand to SEQ ID NO: 874784
uucaacaauguugaguggc

SEQ ID NO: 874786 - RNA, 19 nt, Artificial Sequence
  Description of Artificial Sequence: Synthetic oligonucleotide
  Sense strand starting at position 1442 of SEQ ID NO: 588578
uaauaaucccuagaucgug

SEQ ID NO: 874787 - RNA, 19 nt, Artificial Sequence
  Description of Artificial Sequence: Synthetic oligonucleotide
  Antisense strand to SEQ ID NO: 874786
cacgaucuagggauuauua

SEQ ID NO: 874788 - RNA, 19 nt, Artificial Sequence
  Description of Artificial Sequence: Synthetic oligonucleotide
  Sense strand starting at position 1515 of SEQ ID NO: 588578
ccuaaucuucguguuuguu

SEQ ID NO: 874789 - RNA, 19 nt, Artificial Sequence
  Description of Artificial Sequence: Synthetic oligonucleotide
  Antisense strand to SEQ ID NO: 874788
aacaaacacgaagauuagg

SEQ ID NO: 874790 - RNA, 19 nt, Artificial Sequence
  Description of Artificial Sequence: Synthetic oligonucleotide
  Sense strand starting at position 1516 of SEQ ID NO: 588578
cuaaucuucguguuuguuu

SEQ ID NO: 874791 - RNA, 19 nt, Artificial Sequence
  Description of Artificial Sequence: Synthetic oligonucleotide
  Antisense strand to SEQ ID NO: 874790
aaacaaacacgaagauuag

SEQ ID NO: 874792 - RNA, 19 nt, Artificial Sequence
  Description of Artificial Sequence: Synthetic oligonucleotide
  Sense strand starting at position 1571 of SEQ ID NO: 588578
cuuauuuguuuauuggcaa

SEQ ID NO: 874793 - RNA, 19 nt, Artificial Sequence
  Description of Artificial Sequence: Synthetic oligonucleotide
  Antisense strand to SEQ ID NO: 874792
uugccaauaaacaaauaag

SEQ ID NO: 874794 - RNA, 19 nt, Artificial Sequence
  Description of Artificial Sequence: Synthetic oligonucleotide
  Sense strand starting at position 1578 of SEQ ID NO: 588578
guuuauuggcaauacaucu

SEQ ID NO: 874795 - RNA, 19 nt, Artificial Sequence
  Description of Artificial Sequence: Synthetic oligonucleotide
  Antisense strand to SEQ ID NO: 874794
agauguauugccaauaaac

SEQ ID NO: 874796 - RNA, 19 nt, Artificial Sequence
  Description of Artificial Sequence: Synthetic oligonucleotide
  Sense strand starting at position 1615 of SEQ ID NO: 588578
ccauaagagcaaggaucuu

SEQ ID NO: 874797 - RNA, 19 nt, Artificial Sequence
  Description of Artificial Sequence: Synthetic oligonucleotide
  Antisense strand to SEQ ID NO: 874796
aagauccuugcucuuaugg

SEQ ID NO: 874798 - RNA, 19 nt, Artificial Sequence
  Description of Artificial Sequence: Synthetic oligonucleotide
  Sense strand starting at position 1770 of SEQ ID NO: 588578
aaauuacucgggcaaguuu

SEQ ID NO: 874799 - RNA, 19 nt, Artificial Sequence
  Description of Artificial Sequence: Synthetic oligonucleotide
  Antisense strand to SEQ ID NO: 874798
aaacuugcccgaguaauuu

SEQ ID NO: 874800 - RNA, 19 nt, Artificial Sequence
  Description of Artificial Sequence: Synthetic oligonucleotide
  Sense strand starting at position 1856 of SEQ ID NO: 588578
aagguauaguaagugaauc

SEQ ID NO: 874801 - RNA, 19 nt, Artificial Sequence
  Description of Artificial Sequence: Synthetic oligonucleotide
  Antisense strand to SEQ ID NO: 874800
gauucacuuacuauaccuu

SEQ ID NO: 874802 - RNA, 19 nt, Artificial Sequence
  Description of Artificial Sequence: Synthetic oligonucleotide
  Sense strand starting at position 1857 of SEQ ID NO: 588578
agguauaguaagugaauca

SEQ ID NO: 874803 - RNA, 19 nt, Artificial Sequence
  Description of Artificial Sequence: Synthetic oligonucleotide
  Antisense strand to SEQ ID NO: 874802
ugauucacuuacuauaccu

SEQ ID NO: 874804 - RNA, 19 nt, Artificial Sequence
  Description of Artificial Sequence: Synthetic oligonucleotide
  Sense strand starting at position 2531 of SEQ ID NO: 588578
uucuccuuccgugaauaau

SEQ ID NO: 874805 - RNA, 19 nt, Artificial Sequence
  Description of Artificial Sequence: Synthetic oligonucleotide
  Antisense strand to SEQ ID NO: 874804
auuauucacggaaggagaa

SEQ ID NO: 874806 - RNA, 19 nt, Artificial Sequence
  Description of Artificial Sequence: Synthetic oligonucleotide
  Sense strand starting at position 2534 of SEQ ID NO: 588578
uccuuccgugaauaauagu

SEQ ID NO: 874807 - RNA, 19 nt, Artificial Sequence
  Description of Artificial Sequence: Synthetic oligonucleotide
  Antisense strand to SEQ ID NO: 874806
acuauuauucacggaagga

SEQ ID NO: 874808 - RNA, 19 nt, Artificial Sequence
  Description of Artificial Sequence: Synthetic oligonucleotide
  Sense strand starting at position 2619 of SEQ ID NO: 588578
augcgaggugaguauacaa

SEQ ID NO: 874809 - RNA, 19 nt, Artificial Sequence
  Description of Artificial Sequence: Synthetic oligonucleotide
  Antisense strand to SEQ ID NO: 874808
uuguauacucaccucgcau

SEQ ID NO: 874810 - RNA, 19 nt, Artificial Sequence
  Description of Artificial Sequence: Synthetic oligonucleotide
  Sense strand starting at position 2665 of SEQ ID NO: 588578
ggucaucuaccuuaaagug

SEQ ID NO: 874811 - RNA, 19 nt, Artificial Sequence
  Description of Artificial Sequence: Synthetic oligonucleotide
  Antisense strand to SEQ ID NO: 874810
cacuuuaagguagaugacc

SEQ ID NO: 874812 - RNA, 19 nt, Artificial Sequence
  Description of Artificial Sequence: Synthetic oligonucleotide
  Sense strand starting at position 2769 of SEQ ID NO: 588578
uugggaagguguuugguaa

SEQ ID NO: 874813 - RNA, 19 nt, Artificial Sequence
  Description of Artificial Sequence: Synthetic oligonucleotide
  Antisense strand to SEQ ID NO: 874812
uuaccaaacaccuucccaa

SEQ ID NO: 874814 - RNA, 19 nt, Artificial Sequence
  Description of Artificial Sequence: Synthetic oligonucleotide
  Sense strand starting at position 2833 of SEQ ID NO: 588578
guaauuaacguguacacau

SEQ ID NO: 874815 - RNA, 19 nt, Artificial Sequence
  Description of Artificial Sequence: Synthetic oligonucleotide
  Antisense strand to SEQ ID NO: 874814
auguguacacguuaauuac

SEQ ID NO: 874816 - RNA, 19 nt, Artificial Sequence
  Description of Artificial Sequence: Synthetic oligonucleotide
  Sense strand starting at position 2845 of SEQ ID NO: 588578
uacacauaacgcuggaaga

SEQ ID NO: 874817 - RNA, 19 nt, Artificial Sequence
  Description of Artificial Sequence: Synthetic oligonucleotide
  Antisense strand to SEQ ID NO: 874816
ucuuccagcguuaugugua

SEQ ID NO: 874818 - RNA, 19 nt, Artificial Sequence
  Description of Artificial Sequence: Synthetic oligonucleotide
  Sense strand starting at position 3127 of SEQ ID NO: 588578
acacaauugguguguauau

SEQ ID NO: 874819 - RNA, 19 nt, Artificial Sequence
  Description of Artificial Sequence: Synthetic oligonucleotide
  Antisense strand to SEQ ID NO: 874818
auauacacaccaauugugu

SEQ ID NO: 874820 - RNA, 19 nt, Artificial Sequence
  Description of Artificial Sequence: Synthetic oligonucleotide
  Sense strand starting at position 3128 of SEQ ID NO: 588578
cacaauugguguguauaua

SEQ ID NO: 874821 - RNA, 19 nt, Artificial Sequence
  Description of Artificial Sequence: Synthetic oligonucleotide
  Antisense strand to SEQ ID NO: 874820
uauauacacaccaauugug

SEQ ID NO: 874822 - RNA, 19 nt, Artificial Sequence
  Description of Artificial Sequence: Synthetic oligonucleotide
  Sense strand starting at position 3129 of SEQ ID NO: 588578
acaauugguguguauauau

SEQ ID NO: 874823 - RNA, 19 nt, Artificial Sequence
  Description of Artificial Sequence: Synthetic oligonucleotide
  Antisense strand to SEQ ID NO: 874822
auauauacacaccaauugu

SEQ ID NO: 874824 - RNA, 19 nt, Artificial Sequence
  Description of Artificial Sequence: Synthetic oligonucleotide
  Sense strand starting at position 3167 of SEQ ID NO: 588578
acacaauugguguauauau

SEQ ID NO: 874825 - RNA, 19 nt, Artificial Sequence
  Description of Artificial Sequence: Synthetic oligonucleotide
  Antisense strand to SEQ ID NO: 874824
auauauacaccaauugugu

SEQ ID NO: 874826 - RNA, 19 nt, Artificial Sequence
  Description of Artificial Sequence: Synthetic oligonucleotide
  Sense strand starting at position 3258 of SEQ ID NO: 588578
auuggucguagcguuauaa

SEQ ID NO: 874827 - RNA, 19 nt, Artificial Sequence
  Description of Artificial Sequence: Synthetic oligonucleotide
  Antisense strand to SEQ ID NO: 874826
uuauaacgcuacgaccaau

SEQ ID NO: 874828 - RNA, 19 nt, Artificial Sequence
  Description of Artificial Sequence: Synthetic oligonucleotide
  Sense strand starting at position 3259 of SEQ ID NO: 588578
uuggucguagcguuauaaa

SEQ ID NO: 874829 - RNA, 19 nt, Artificial Sequence
  Description of Artificial Sequence: Synthetic oligonucleotide
  Antisense strand to SEQ ID NO: 874828
uuuauaacgcuacgaccaa

SEQ ID NO: 874830 - RNA, 19 nt, Artificial Sequence
  Description of Artificial Sequence: Synthetic oligonucleotide
  Sense strand starting at position 3323 of SEQ ID NO: 588578
ggagcucguaaguaauaga

SEQ ID NO: 874831 - RNA, 19 nt, Artificial Sequence
  Description of Artificial Sequence: Synthetic oligonucleotide
  Antisense strand to SEQ ID NO: 874830
ucuauuacuuacgagcucc

SEQ ID NO: 874832 - RNA, 19 nt, Artificial Sequence
  Description of Artificial Sequence: Synthetic oligonucleotide
  Sense strand starting at position 3334 of SEQ ID NO: 588578
guaauagagcuggaaguga

SEQ ID NO: 874833 - RNA, 19 nt, Artificial Sequence
  Description of Artificial Sequence: Synthetic oligonucleotide
  Antisense strand to SEQ ID NO: 874832
ucacuuccagcucuauuac

SEQ ID NO: 874834 - RNA, 19 nt, Artificial Sequence
  Description of Artificial Sequence: Synthetic oligonucleotide
  Sense strand starting at position 3430 of SEQ ID NO: 588578
gaacuuguguguuuaggga

SEQ ID NO: 874835 - RNA, 19 nt, Artificial Sequence
  Description of Artificial Sequence: Synthetic oligonucleotide
  Antisense strand to SEQ ID NO: 874834
ucccuaaacacacaaguuc

SEQ ID NO: 874836 - RNA, 19 nt, Artificial Sequence
  Description of Artificial Sequence: Synthetic oligonucleotide
  Sense strand starting at position 3514 of SEQ ID NO: 588578
ggcaacuugggcugagaua

SEQ ID NO: 874837 - RNA, 19 nt, Artificial Sequence
  Description of Artificial Sequence: Synthetic oligonucleotide
  Antisense strand to SEQ ID NO: 874836
uaucucagcccaaguugcc

SEQ ID NO: 874838 - RNA, 19 nt, Artificial Sequence
  Description of Artificial Sequence: Synthetic oligonucleotide
  Sense strand starting at position 3697 of SEQ ID NO: 588578
auguaccagcaaugauaua

SEQ ID NO: 874839 - RNA, 19 nt, Artificial Sequence
  Description of Artificial Sequence: Synthetic oligonucleotide
  Antisense strand to SEQ ID NO: 874838
uauaucauugcugguacau

SEQ ID NO: 874840 - RNA, 19 nt, Artificial Sequence
  Description of Artificial Sequence: Synthetic oligonucleotide
  Sense strand starting at position 349 of SEQ ID NO: 588579
ggugcuaaggcauacauua

SEQ ID NO: 874841 - RNA, 19 nt, Artificial Sequence
  Description of Artificial Sequence: Synthetic oligonucleotide
  Antisense strand to SEQ ID NO: 874840
uaauguaugccuuagcacc

SEQ ID NO: 874842 - RNA, 19 nt, Artificial Sequence
  Description of Artificial Sequence: Synthetic oligonucleotide
  Sense strand starting at position 480 of SEQ ID NO: 588579
cagauaagguguuauuuau

SEQ ID NO: 874843 - RNA, 19 nt, Artificial Sequence
  Description of Artificial Sequence: Synthetic oligonucleotide
  Antisense strand to SEQ ID NO: 874842
auaaauaacaccuuaucug

SEQ ID NO: 874844 - RNA, 19 nt, Artificial Sequence
  Description of Artificial Sequence: Synthetic oligonucleotide
  Sense strand starting at position 521 of SEQ ID NO: 588579
aggaauuucuagggaaaca

SEQ ID NO: 874845 - RNA, 19 nt, Artificial Sequence
  Description of Artificial Sequence: Synthetic oligonucleotide
  Antisense strand to SEQ ID NO: 874844
uguuucccuagaaauuccu

SEQ ID NO: 874846 - RNA, 19 nt, Artificial Sequence
  Description of Artificial Sequence: Synthetic oligonucleotide
  Sense strand starting at position 580 of SEQ ID NO: 588579
gaggcagucugaucacuua

SEQ ID NO: 874847 - RNA, 19 nt, Artificial Sequence
  Description of Artificial Sequence: Synthetic oligonucleotide
  Antisense strand to SEQ ID NO: 874846
uaagugaucagacugccuc

SEQ ID NO: 874848 - RNA, 19 nt, Artificial Sequence
  Description of Artificial Sequence: Synthetic oligonucleotide
  Sense strand starting at position 583 of SEQ ID NO: 588579
gcagucugaucacuuauca

SEQ ID NO: 874849 - RNA, 19 nt, Artificial Sequence
  Description of Artificial Sequence: Synthetic oligonucleotide
  Antisense strand to SEQ ID NO: 874848
ugauaagugaucagacugc

SEQ ID NO: 874850 - RNA, 19 nt, Artificial Sequence
  Description of Artificial Sequence: Synthetic oligonucleotide
  Sense strand starting at position 890 of SEQ ID NO: 588579
gcuugauuuccaugugacu

SEQ ID NO: 874851 - RNA, 19 nt, Artificial Sequence
  Description of Artificial Sequence: Synthetic oligonucleotide
  Antisense strand to SEQ ID NO: 874850
agucacauggaaaucaagc

SEQ ID NO: 874852 - RNA, 19 nt, Artificial Sequence
  Description of Artificial Sequence: Synthetic oligonucleotide
  Sense strand starting at position 902 of SEQ ID NO: 588579
ugugacugcaggcaagaau

SEQ ID NO: 874853 - RNA, 19 nt, Artificial Sequence
  Description of Artificial Sequence: Synthetic oligonucleotide
  Antisense strand to SEQ ID NO: 874852
auucuugccugcagucaca

SEQ ID NO: 874854 - RNA, 19 nt, Artificial Sequence
  Description of Artificial Sequence: Synthetic oligonucleotide
  Sense strand starting at position 913 of SEQ ID NO: 588579
gcaagaauagcccagccuu

SEQ ID NO: 874855 - RNA, 19 nt, Artificial Sequence
  Description of Artificial Sequence: Synthetic oligonucleotide
  Antisense strand to SEQ ID NO: 874854
aaggcugggcuauucuugc

SEQ ID NO: 874856 - RNA, 19 nt, Artificial Sequence
  Description of Artificial Sequence: Synthetic oligonucleotide
  Sense strand starting at position 926 of SEQ ID NO: 588579
agccuuugugccucugcaa

SEQ ID NO: 874857 - RNA, 19 nt, Artificial Sequence
  Description of Artificial Sequence: Synthetic oligonucleotide
  Antisense strand to SEQ ID NO: 874856
uugcagaggcacaaaggcu

SEQ ID NO: 874858 - RNA, 19 nt, Artificial Sequence
  Description of Artificial Sequence: Synthetic oligonucleotide
  Sense strand starting at position 927 of SEQ ID NO: 588579
gccuuugugccucugcaaa

SEQ ID NO: 874859 - RNA, 19 nt, Artificial Sequence
  Description of Artificial Sequence: Synthetic oligonucleotide
  Antisense strand to SEQ ID NO: 874858
uuugcagaggcacaaaggc

SEQ ID NO: 874860 - RNA, 19 nt, Artificial Sequence
  Description of Artificial Sequence: Synthetic oligonucleotide
  Sense strand starting at position 1468 of SEQ ID NO: 588579
cuuagucagcgagagcaaa

SEQ ID NO: 874861 - RNA, 19 nt, Artificial Sequence
  Description of Artificial Sequence: Synthetic oligonucleotide
  Antisense strand to SEQ ID NO: 874860
uuugcucucgcugacuaag

SEQ ID NO: 874862 - RNA, 19 nt, Artificial Sequence
  Description of Artificial Sequence: Synthetic oligonucleotide
  Sense strand starting at position 1505 of SEQ ID NO: 588579
ugcugaaaggucuaggauu

SEQ ID NO: 874863 - RNA, 19 nt, Artificial Sequence
  Description of Artificial Sequence: Synthetic oligonucleotide
  Antisense strand to SEQ ID NO: 874862
aauccuagaccuuucagca

SEQ ID NO: 874864 - RNA, 19 nt, Artificial Sequence
  Description of Artificial Sequence: Synthetic oligonucleotide
  Sense strand starting at position 1507 of SEQ ID NO: 588579
cugaaaggucuaggauuau

SEQ ID NO: 874865 - RNA, 19 nt, Artificial Sequence
  Description of Artificial Sequence: Synthetic oligonucleotide
  Antisense strand to SEQ ID NO: 874864
auaauccuagaccuuucag

SEQ ID NO: 874866 - RNA, 19 nt, Artificial Sequence
  Description of Artificial Sequence: Synthetic oligonucleotide
  Sense strand starting at position 1549 of SEQ ID NO: 588579
gagacuugcgaguagcaaa

SEQ ID NO: 874867 - RNA, 19 nt, Artificial Sequence
  Description of Artificial Sequence: Synthetic oligonucleotide
  Antisense strand to SEQ ID NO: 874866
uuugcuacucgcaagucuc

SEQ ID NO: 874868 - RNA, 19 nt, Artificial Sequence
  Description of Artificial Sequence: Synthetic oligonucleotide
  Sense strand starting at position 2265 of SEQ ID NO: 588579
uugugagguggucagauaa

SEQ ID NO: 874869 - RNA, 19 nt, Artificial Sequence
  Description of Artificial Sequence: Synthetic oligonucleotide
  Antisense strand to SEQ ID NO: 874868
uuaucugaccaccucacaa

SEQ ID NO: 874870 - RNA, 19 nt, Artificial Sequence
  Description of Artificial Sequence: Synthetic oligonucleotide
  Sense strand starting at position 2284 of SEQ ID NO: 588579
aauauaggcugcucuguua

SEQ ID NO: 874871 - RNA, 19 nt, Artificial Sequence
  Description of Artificial Sequence: Synthetic oligonucleotide
  Antisense strand to SEQ ID NO: 874870
uaacagagcagccuauauu

SEQ ID NO: 874872 - RNA, 19 nt, Artificial Sequence
  Description of Artificial Sequence: Synthetic oligonucleotide
  Sense strand starting at position 2287 of SEQ ID NO: 588579
auaggcugcucuguuaaau

SEQ ID NO: 874873 - RNA, 19 nt, Artificial Sequence
  Description of Artificial Sequence: Synthetic oligonucleotide
  Antisense strand to SEQ ID NO: 874872
auuuaacagagcagccuau

SEQ ID NO: 874874 - RNA, 19 nt, Artificial Sequence
  Description of Artificial Sequence: Synthetic oligonucleotide
  Sense strand starting at position 2293 of SEQ ID NO: 588579
ugcucuguuaaaugggaau

SEQ ID NO: 874875 - RNA, 19 nt, Artificial Sequence
  Description of Artificial Sequence: Synthetic oligonucleotide
  Antisense strand to SEQ ID NO: 874874
auucccauuuaacagagca

SEQ ID NO: 874876 - RNA, 19 nt, Artificial Sequence
  Description of Artificial Sequence: Synthetic oligonucleotide
  Sense strand starting at position 2478 of SEQ ID NO: 588579
guuucuagcuccucagauu

SEQ ID NO: 874877 - RNA, 19 nt, Artificial Sequence
  Description of Artificial Sequence: Synthetic oligonucleotide
  Antisense strand to SEQ ID NO: 874876
aaucugaggagcuagaaac

SEQ ID NO: 874878 - RNA, 19 nt, Artificial Sequence
  Description of Artificial Sequence: Synthetic oligonucleotide
  Sense strand starting at position 2565 of SEQ ID NO: 588579
ugagaagcgcuuuaaucag

SEQ ID NO: 874879 - RNA, 19 nt, Artificial Sequence
  Description of Artificial Sequence: Synthetic oligonucleotide
  Antisense strand to SEQ ID NO: 874878
cugauuaaagcgcuucuca

SEQ ID NO: 874880 - RNA, 19 nt, Artificial Sequence
  Description of Artificial Sequence: Synthetic oligonucleotide
  Sense strand starting at position 2636 of SEQ ID NO: 588579
gcauucuuagucugaugau

SEQ ID NO: 874881 - RNA, 19 nt, Artificial Sequence
  Description of Artificial Sequence: Synthetic oligonucleotide
  Antisense strand to SEQ ID NO: 874880
aucaucagacuaagaaugc

SEQ ID NO: 874882 - RNA, 19 nt, Artificial Sequence
  Description of Artificial Sequence: Synthetic oligonucleotide
  Sense strand starting at position 2642 of SEQ ID NO: 588579
uuagucugaugauccaauu

SEQ ID NO: 874883 - RNA, 19 nt, Artificial Sequence
  Description of Artificial Sequence: Synthetic oligonucleotide
  Antisense strand to SEQ ID NO: 874882
aauuggaucaucagacuaa

SEQ ID NO: 874884 - RNA, 19 nt, Artificial Sequence
  Description of Artificial Sequence: Synthetic oligonucleotide
  Sense strand starting at position 2834 of SEQ ID NO: 588579
auuagauuauaggaccaaa

SEQ ID NO: 874885 - RNA, 19 nt, Artificial Sequence
  Description of Artificial Sequence: Synthetic oligonucleotide
  Antisense strand to SEQ ID NO: 874884
uuugguccuauaaucuaau

SEQ ID NO: 874886 - RNA, 19 nt, Artificial Sequence
  Description of Artificial Sequence: Synthetic oligonucleotide
  Sense strand starting at position 3033 of SEQ ID NO: 588579
ugcuucuuccgcuuaguca

SEQ ID NO: 874887 - RNA, 19 nt, Artificial Sequence
  Description of Artificial Sequence: Synthetic oligonucleotide
  Antisense strand to SEQ ID NO: 874886
ugacuaagcggaagaagca

SEQ ID NO: 874888 - RNA, 19 nt, Artificial Sequence
  Description of Artificial Sequence: Synthetic oligonucleotide
  Sense strand starting at position 3066 of SEQ ID NO: 588579
ggcucugaagcuuguacaa

SEQ ID NO: 874889 - RNA, 19 nt, Artificial Sequence
  Description of Artificial Sequence: Synthetic oligonucleotide
  Antisense strand to SEQ ID NO: 874888
uuguacaagcuucagagcc

SEQ ID NO: 874890 - RNA, 19 nt, Artificial Sequence
  Description of Artificial Sequence: Synthetic oligonucleotide
  Sense strand starting at position 3088 of SEQ ID NO: 588579
ggagcucugcuuuaaccaa

SEQ ID NO: 874891 - RNA, 19 nt, Artificial Sequence
  Description of Artificial Sequence: Synthetic oligonucleotide
  Antisense strand to SEQ ID NO: 874890
uugguuaaagcagagcucc

SEQ ID NO: 874892 - RNA, 19 nt, Artificial Sequence
  Description of Artificial Sequence: Synthetic oligonucleotide
  Sense strand starting at position 3374 of SEQ ID NO: 588579
augaucucguaccuacaga

SEQ ID NO: 874893 - RNA, 19 nt, Artificial Sequence
  Description of Artificial Sequence: Synthetic oligonucleotide
  Antisense strand to SEQ ID NO: 874892
ucuguagguacgagaucau

SEQ ID NO: 874894 - RNA, 19 nt, Artificial Sequence
  Description of Artificial Sequence: Synthetic oligonucleotide
  Sense strand starting at position 3459 of SEQ ID NO: 588579
gucucaaaccuagauugca

SEQ ID NO: 874895 - RNA, 19 nt, Artificial Sequence
  Description of Artificial Sequence: Synthetic oligonucleotide
  Antisense strand to SEQ ID NO: 874894
ugcaaucuagguuugagac

SEQ ID NO: 874896 - RNA, 19 nt, Artificial Sequence
  Description of Artificial Sequence: Synthetic oligonucleotide
  Sense strand starting at position 3483 of SEQ ID NO: 588579
aaaugcagccgugauacuu

SEQ ID NO: 874897 - RNA, 19 nt, Artificial Sequence
  Description of Artificial Sequence: Synthetic oligonucleotide
  Antisense strand to SEQ ID NO: 874896
aaguaucacggcugcauuu

SEQ ID NO: 874898 - RNA, 19 nt, Artificial Sequence
  Description of Artificial Sequence: Synthetic oligonucleotide
  Sense strand starting at position 3535 of SEQ ID NO: 588579
agugaauggaacugccaua

SEQ ID NO: 874899 - RNA, 19 nt, Artificial Sequence
  Description of Artificial Sequence: Synthetic oligonucleotide
  Antisense strand to SEQ ID NO: 874898
uauggcaguuccauucacu

SEQ ID NO: 874900 - RNA, 19 nt, Artificial Sequence
  Description of Artificial Sequence: Synthetic oligonucleotide
  Sense strand starting at position 3542 of SEQ ID NO: 588579
ggaacugccauagaugcua

SEQ ID NO: 874901 - RNA, 19 nt, Artificial Sequence
  Description of Artificial Sequence: Synthetic oligonucleotide
  Antisense strand to SEQ ID NO: 874900
uagcaucuauggcaguucc

SEQ ID NO: 874902 - RNA, 19 nt, Artificial Sequence
  Description of Artificial Sequence: Synthetic oligonucleotide
  Sense strand starting at position 3579 of SEQ ID NO: 588579
cgauaaacccauugugaug

SEQ ID NO: 874903 - RNA, 19 nt, Artificial Sequence
  Description of Artificial Sequence: Synthetic oligonucleotide
  Antisense strand to SEQ ID NO: 874902
caucacaauggguuuaucg

SEQ ID NO: 874904 - RNA, 19 nt, Artificial Sequence
  Description of Artificial Sequence: Synthetic oligonucleotide
  Sense strand starting at position 3667 of SEQ ID NO: 588579
guaauuaugcaaugucucu

SEQ ID NO: 874905 - RNA, 19 nt, Artificial Sequence
  Description of Artificial Sequence: Synthetic oligonucleotide
  Antisense strand to SEQ ID NO: 874904
agagacauugcauaauuac

SEQ ID NO: 874906 - RNA, 19 nt, Artificial Sequence
  Description of Artificial Sequence: Synthetic oligonucleotide
  Sense strand starting at position 3736 of SEQ ID NO: 588579
auccucagagccuaguaaa

SEQ ID NO: 874907 - RNA, 19 nt, Artificial Sequence
  Description of Artificial Sequence: Synthetic oligonucleotide
  Antisense strand to SEQ ID NO: 874906
uuuacuaggcucugaggau

SEQ ID NO: 874908 - RNA, 19 nt, Artificial Sequence
  Description of Artificial Sequence: Synthetic oligonucleotide
  Sense strand starting at position 3765 of SEQ ID NO: 588579
uugguuggcacucauauga

SEQ ID NO: 874909 - RNA, 19 nt, Artificial Sequence
  Description of Artificial Sequence: Synthetic oligonucleotide
  Antisense strand to SEQ ID NO: 874908
ucauaugagugccaaccaa

SEQ ID NO: 874910 - RNA, 19 nt, Artificial Sequence
  Description of Artificial Sequence: Synthetic oligonucleotide
  Sense strand starting at position 3791 of SEQ ID NO: 588579
ugaauauacgacugcaaga

SEQ ID NO: 874911 - RNA, 19 nt, Artificial Sequence
  Description of Artificial Sequence: Synthetic oligonucleotide
  Antisense strand to SEQ ID NO: 874910
ucuugcagucguauauuca

SEQ ID NO: 874912 - RNA, 19 nt, Artificial Sequence
  Description of Artificial Sequence: Synthetic oligonucleotide
  Sense strand starting at position 3838 of SEQ ID NO: 588579
guucuugucauagagucac

SEQ ID NO: 874913 - RNA, 19 nt, Artificial Sequence
  Description of Artificial Sequence: Synthetic oligonucleotide
  Antisense strand to SEQ ID NO: 874912
gugacucuaugacaagaac

SEQ ID NO: 874914 - RNA, 19 nt, Artificial Sequence
  Description of Artificial Sequence: Synthetic oligonucleotide
  Sense strand starting at position 3844 of SEQ ID NO: 588579
gucauagagucaccucaag

SEQ ID NO: 874915 - RNA, 19 nt, Artificial Sequence
  Description of Artificial Sequence: Synthetic oligonucleotide
  Antisense strand to SEQ ID NO: 874914
cuugaggugacucuaugac

SEQ ID NO: 874916 - RNA, 19 nt, Artificial Sequence
  Description of Artificial Sequence: Synthetic oligonucleotide
  Sense strand starting at position 3909 of SEQ ID NO: 588579
ggauccuccuguuugaaua

SEQ ID NO: 874917 - RNA, 19 nt, Artificial Sequence
  Description of Artificial Sequence: Synthetic oligonucleotide
  Antisense strand to SEQ ID NO: 874916
uauucaaacaggaggaucc

SEQ ID NO: 874918 - RNA, 19 nt, Artificial Sequence
  Description of Artificial Sequence: Synthetic oligonucleotide
  Sense strand starting at position 3976 of SEQ ID NO: 588579
gaaguacgugcaugaaaug

SEQ ID NO: 874919 - RNA, 19 nt, Artificial Sequence
  Description of Artificial Sequence: Synthetic oligonucleotide
  Antisense strand to SEQ ID NO: 874918
cauuucaugcacguacuuc

SEQ ID NO: 874920 - RNA, 19 nt, Artificial Sequence
  Description of Artificial Sequence: Synthetic oligonucleotide
  Sense strand starting at position 242 of SEQ ID NO: 588580
acgcucaaccuguauugga

SEQ ID NO: 874921 - RNA, 19 nt, Artificial Sequence
  Description of Artificial Sequence: Synthetic oligonucleotide
  Antisense strand to SEQ ID NO: 874920
uccaauacagguugagcgu

SEQ ID NO: 874922 - RNA, 19 nt, Artificial Sequence
  Description of Artificial Sequence: Synthetic oligonucleotide
  Sense strand starting at position 252 of SEQ ID NO: 588580
uguauuggaucccuaugca

SEQ ID NO: 874923 - RNA, 19 nt, Artificial Sequence
  Description of Artificial Sequence: Synthetic oligonucleotide
  Antisense strand to SEQ ID NO: 874922
ugcauagggauccaauaca

SEQ ID NO: 874924 - RNA, 19 nt, Artificial Sequence
  Description of Artificial Sequence: Synthetic oligonucleotide
  Sense strand starting at position 288 of SEQ ID NO: 588580
guguguuccaaguugccuu

SEQ ID NO: 874925 - RNA, 19 nt, Artificial Sequence
  Description of Artificial Sequence: Synthetic oligonucleotide
  Antisense strand to SEQ ID NO: 874924
aaggcaacuuggaacacac

SEQ ID NO: 874926 - RNA, 19 nt, Artificial Sequence
  Description of Artificial Sequence: Synthetic oligonucleotide
  Sense strand starting at position 309 of SEQ ID NO: 588580
gggucaucagcuugaaaua

SEQ ID NO: 874927 - RNA, 19 nt, Artificial Sequence
  Description of Artificial Sequence: Synthetic oligonucleotide
  Antisense strand to SEQ ID NO: 874926
uauuucaagcugaugaccc

SEQ ID NO: 874928 - RNA, 19 nt, Artificial Sequence
  Description of Artificial Sequence: Synthetic oligonucleotide
  Sense strand starting at position 310 of SEQ ID NO: 588580
ggucaucagcuugaaauau

SEQ ID NO: 874929 - RNA, 19 nt, Artificial Sequence
  Description of Artificial Sequence: Synthetic oligonucleotide
  Antisense strand to SEQ ID NO: 874928
auauuucaagcugaugacc

SEQ ID NO: 874930 - RNA, 19 nt, Artificial Sequence
  Description of Artificial Sequence: Synthetic oligonucleotide
  Sense strand starting at position 318 of SEQ ID NO: 588580
gcuugaaauaugugaaguc

SEQ ID NO: 874931 - RNA, 19 nt, Artificial Sequence
  Description of Artificial Sequence: Synthetic oligonucleotide
  Antisense strand to SEQ ID NO: 874930
gacuucacauauuucaagc

SEQ ID NO: 874932 - RNA, 19 nt, Artificial Sequence
  Description of Artificial Sequence: Synthetic oligonucleotide
  Sense strand starting at position 319 of SEQ ID NO: 588580
cuugaaauaugugaagucu

SEQ ID NO: 874933 - RNA, 19 nt, Artificial Sequence
  Description of Artificial Sequence: Synthetic oligonucleotide
  Antisense strand to SEQ ID NO: 874932
agacuucacauauuucaag

SEQ ID NO: 874934 - RNA, 19 nt, Artificial Sequence
  Description of Artificial Sequence: Synthetic oligonucleotide
  Sense strand starting at position 327 of SEQ ID NO: 588580
augugaagucuguagggaa

SEQ ID NO: 874935 - RNA, 19 nt, Artificial Sequence
  Description of Artificial Sequence: Synthetic oligonucleotide
  Antisense strand to SEQ ID NO: 874934
uucccuacagacuucacau

SEQ ID NO: 874936 - RNA, 19 nt, Artificial Sequence
  Description of Artificial Sequence: Synthetic oligonucleotide
  Sense strand starting at position 369 of SEQ ID NO: 588580
cggguuagcucccaaauac

SEQ ID NO: 874937 - RNA, 19 nt, Artificial Sequence
  Description of Artificial Sequence: Synthetic oligonucleotide
  Antisense strand to SEQ ID NO: 874936
guauuugggagcuaacccg

SEQ ID NO: 874938 - RNA, 19 nt, Artificial Sequence
  Description of Artificial Sequence: Synthetic oligonucleotide
  Sense strand starting at position 397 of SEQ ID NO: 588580
ggugacuuuagguguguga

SEQ ID NO: 874939 - RNA, 19 nt, Artificial Sequence
  Description of Artificial Sequence: Synthetic oligonucleotide
  Antisense strand to SEQ ID NO: 874938
ucacacaccuaaagucacc

SEQ ID NO: 874940 - RNA, 19 nt, Artificial Sequence
  Description of Artificial Sequence: Synthetic oligonucleotide
  Sense strand starting at position 399 of SEQ ID NO: 588580
ugacuuuaggugugugaac

SEQ ID NO: 874941 - RNA, 19 nt, Artificial Sequence
  Description of Artificial Sequence: Synthetic oligonucleotide
  Antisense strand to SEQ ID NO: 874940
guucacacaccuaaaguca

SEQ ID NO: 874942 - RNA, 19 nt, Artificial Sequence
  Description of Artificial Sequence: Synthetic oligonucleotide
  Sense strand starting at position 400 of SEQ ID NO: 588580
gacuuuaggugugugaaca

SEQ ID NO: 874943 - RNA, 19 nt, Artificial Sequence
  Description of Artificial Sequence: Synthetic oligonucleotide
  Antisense strand to SEQ ID NO: 874942
uguucacacaccuaaaguc

SEQ ID NO: 874944 - RNA, 19 nt, Artificial Sequence
  Description of Artificial Sequence: Synthetic oligonucleotide
  Sense strand starting at position 401 of SEQ ID NO: 588580
acuuuaggugugugaacaa

SEQ ID NO: 874945 - RNA, 19 nt, Artificial Sequence
  Description of Artificial Sequence: Synthetic oligonucleotide
  Antisense strand to SEQ ID NO: 874944
uuguucacacaccuaaagu

SEQ ID NO: 874946 - RNA, 19 nt, Artificial Sequence
  Description of Artificial Sequence: Synthetic oligonucleotide
  Sense strand starting at position 414 of SEQ ID NO: 588580
gaacaaacuggguguguua

SEQ ID NO: 874947 - RNA, 19 nt, Artificial Sequence
  Description of Artificial Sequence: Synthetic oligonucleotide
  Antisense strand to SEQ ID NO: 874946
uaacacacccaguuuguuc

SEQ ID NO: 874948 - RNA, 19 nt, Artificial Sequence
  Description of Artificial Sequence: Synthetic oligonucleotide
  Sense strand starting at position 417 of SEQ ID NO: 588580
caaacuggguguguuacau

SEQ ID NO: 874949 - RNA, 19 nt, Artificial Sequence
  Description of Artificial Sequence: Synthetic oligonucleotide
  Antisense strand to SEQ ID NO: 874948
auguaacacacccaguuug

SEQ ID NO: 874950 - RNA, 19 nt, Artificial Sequence
  Description of Artificial Sequence: Synthetic oligonucleotide
  Sense strand starting at position 421 of SEQ ID NO: 588580
cuggguguguuacauccaa

SEQ ID NO: 874951 - RNA, 19 nt, Artificial Sequence
  Description of Artificial Sequence: Synthetic oligonucleotide
  Antisense strand to SEQ ID NO: 874950
uuggauguaacacacccag

SEQ ID NO: 874952 - RNA, 19 nt, Artificial Sequence
  Description of Artificial Sequence: Synthetic oligonucleotide
  Sense strand starting at position 457 of SEQ ID NO: 588580
uuugucucucugggaggaa

SEQ ID NO: 874953 - RNA, 19 nt, Artificial Sequence
  Description of Artificial Sequence: Synthetic oligonucleotide
  Antisense strand to SEQ ID NO: 874952
uuccucccagagagacaaa

SEQ ID NO: 874954 - RNA, 19 nt, Artificial Sequence
  Description of Artificial Sequence: Synthetic oligonucleotide
  Sense strand starting at position 471 of SEQ ID NO: 588580
aggaacugugguugaggua

SEQ ID NO: 874955 - RNA, 19 nt, Artificial Sequence
  Description of Artificial Sequence: Synthetic oligonucleotide
  Antisense strand to SEQ ID NO: 874954
uaccucaaccacaguuccu

SEQ ID NO: 874956 - RNA, 19 nt, Artificial Sequence
  Description of Artificial Sequence: Synthetic oligonucleotide
  Sense strand starting at position 664 of SEQ ID NO: 588580
uucucuugccuuuggagua

SEQ ID NO: 874957 - RNA, 19 nt, Artificial Sequence
  Description of Artificial Sequence: Synthetic oligonucleotide
  Antisense strand to SEQ ID NO: 874956
uacuccaaaggcaagagaa

SEQ ID NO: 874958 - RNA, 19 nt, Artificial Sequence
  Description of Artificial Sequence: Synthetic oligonucleotide
  Sense strand starting at position 882 of SEQ ID NO: 588580
acaacaugucacuauaugu

SEQ ID NO: 874959 - RNA, 19 nt, Artificial Sequence
  Description of Artificial Sequence: Synthetic oligonucleotide
  Antisense strand to SEQ ID NO: 874958
acauauagugacauguugu

SEQ ID NO: 874960 - RNA, 19 nt, Artificial Sequence
  Description of Artificial Sequence: Synthetic oligonucleotide
  Sense strand starting at position 887 of SEQ ID NO: 588580
augucacuauaugucagau

SEQ ID NO: 874961 - RNA, 19 nt, Artificial Sequence
  Description of Artificial Sequence: Synthetic oligonucleotide
  Antisense strand to SEQ ID NO: 874960
aucugacauauagugacau

SEQ ID NO: 874962 - RNA, 19 nt, Artificial Sequence
  Description of Artificial Sequence: Synthetic oligonucleotide
  Sense strand starting at position 889 of SEQ ID NO: 588580
gucacuauaugucagauug

SEQ ID NO: 874963 - RNA, 19 nt, Artificial Sequence
  Description of Artificial Sequence: Synthetic oligonucleotide
  Antisense strand to SEQ ID NO: 874962
caaucugacauauagugac

SEQ ID NO: 874964 - RNA, 19 nt, Artificial Sequence
  Description of Artificial Sequence: Synthetic oligonucleotide
  Sense strand starting at position 1042 of SEQ ID NO: 588580
aucuuuguucccuggguga

SEQ ID NO: 874965 - RNA, 19 nt, Artificial Sequence
  Description of Artificial Sequence: Synthetic oligonucleotide
  Antisense strand to SEQ ID NO: 874964
ucacccagggaacaaagau

SEQ ID NO: 874966 - RNA, 19 nt, Artificial Sequence
  Description of Artificial Sequence: Synthetic oligonucleotide
  Sense strand starting at position 1044 of SEQ ID NO: 588580
cuuuguucccugggugaau

SEQ ID NO: 874967 - RNA, 19 nt, Artificial Sequence
  Description of Artificial Sequence: Synthetic oligonucleotide
  Antisense strand to SEQ ID NO: 874966
auucacccagggaacaaag

SEQ ID NO: 874968 - RNA, 19 nt, Artificial Sequence
  Description of Artificial Sequence: Synthetic oligonucleotide
  Sense strand starting at position 1045 of SEQ ID NO: 588580
uuuguucccugggugaaua

SEQ ID NO: 874969 - RNA, 19 nt, Artificial Sequence
  Description of Artificial Sequence: Synthetic oligonucleotide
  Antisense strand to SEQ ID NO: 874968
uauucacccagggaacaaa

SEQ ID NO: 874970 - RNA, 19 nt, Artificial Sequence
  Description of Artificial Sequence: Synthetic oligonucleotide
  Sense strand starting at position 1046 of SEQ ID NO: 588580
uuguucccugggugaauaa

SEQ ID NO: 874971 - RNA, 19 nt, Artificial Sequence
  Description of Artificial Sequence: Synthetic oligonucleotide
  Antisense strand to SEQ ID NO: 874970
uuauucacccagggaacaa

SEQ ID NO: 874972 - RNA, 19 nt, Artificial Sequence
  Description of Artificial Sequence: Synthetic oligonucleotide
  Sense strand starting at position 1047 of SEQ ID NO: 588580
uguucccugggugaauaau

SEQ ID NO: 874973 - RNA, 19 nt, Artificial Sequence
  Description of Artificial Sequence: Synthetic oligonucleotide
  Antisense strand to SEQ ID NO: 874972
auuauucacccagggaaca

SEQ ID NO: 874974 - RNA, 19 nt, Artificial Sequence
  Description of Artificial Sequence: Synthetic oligonucleotide
  Sense strand starting at position 1087 of SEQ ID NO: 588580
gcugucauccggcacaauc

SEQ ID NO: 874975 - RNA, 19 nt, Artificial Sequence
  Description of Artificial Sequence: Synthetic oligonucleotide
  Antisense strand to SEQ ID NO: 874974
gauugugccggaugacagc

SEQ ID NO: 874976 - RNA, 19 nt, Artificial Sequence
  Description of Artificial Sequence: Synthetic oligonucleotide
  Sense strand starting at position 1097 of SEQ ID NO: 588580
ggcacaaucugccuuguaa

SEQ ID NO: 874977 - RNA, 19 nt, Artificial Sequence
  Description of Artificial Sequence: Synthetic oligonucleotide
  Antisense strand to SEQ ID NO: 874976
uuacaaggcagauugugcc

SEQ ID NO: 874978 - RNA, 19 nt, Artificial Sequence
  Description of Artificial Sequence: Synthetic oligonucleotide
  Sense strand starting at position 1126 of SEQ ID NO: 588580
cugcaagcugagugauguu

SEQ ID NO: 874979 - RNA, 19 nt, Artificial Sequence
  Description of Artificial Sequence: Synthetic oligonucleotide
  Antisense strand to SEQ ID NO: 874978
aacaucacucagcuugcag

SEQ ID NO: 874980 - RNA, 19 nt, Artificial Sequence
  Description of Artificial Sequence: Synthetic oligonucleotide
  Sense strand starting at position 1133 of SEQ ID NO: 588580
cugagugauguuugcccuu

SEQ ID NO: 874981 - RNA, 19 nt, Artificial Sequence
  Description of Artificial Sequence: Synthetic oligonucleotide
  Antisense strand to SEQ ID NO: 874980
aagggcaaacaucacucag

SEQ ID NO: 874982 - RNA, 19 nt, Artificial Sequence
  Description of Artificial Sequence: Synthetic oligonucleotide
  Sense strand starting at position 1206 of SEQ ID NO: 588580
cgccgagucugcaugagaa

SEQ ID NO: 874983 - RNA, 19 nt, Artificial Sequence
  Description of Artificial Sequence: Synthetic oligonucleotide
  Antisense strand to SEQ ID NO: 874982
uucucaugcagacucggcg

SEQ ID NO: 874984 - RNA, 19 nt, Artificial Sequence
  Description of Artificial Sequence: Synthetic oligonucleotide
  Sense strand starting at position 1208 of SEQ ID NO: 588580
ccgagucugcaugagaacu

SEQ ID NO: 874985 - RNA, 19 nt, Artificial Sequence
  Description of Artificial Sequence: Synthetic oligonucleotide
  Antisense strand to SEQ ID NO: 874984
aguucucaugcagacucgg

SEQ ID NO: 874986 - RNA, 19 nt, Artificial Sequence
  Description of Artificial Sequence: Synthetic oligonucleotide
  Sense strand starting at position 1216 of SEQ ID NO: 588580
gcaugagaacucggcuuag

SEQ ID NO: 874987 - RNA, 19 nt, Artificial Sequence
  Description of Artificial Sequence: Synthetic oligonucleotide
  Antisense strand to SEQ ID NO: 874986
cuaagccgaguucucaugc

SEQ ID NO: 874988 - RNA, 19 nt, Artificial Sequence
  Description of Artificial Sequence: Synthetic oligonucleotide
  Sense strand starting at position 1243 of SEQ ID NO: 588580
acugaaaucugucaugcug

SEQ ID NO: 874989 - RNA, 19 nt, Artificial Sequence
  Description of Artificial Sequence: Synthetic oligonucleotide
  Antisense strand to SEQ ID NO: 874988
cagcaugacagauuucagu

SEQ ID NO: 874990 - RNA, 19 nt, Artificial Sequence
  Description of Artificial Sequence: Synthetic oligonucleotide
  Sense strand starting at position 2210 of SEQ ID NO: 588580
gcggaugagugaucgcucu

SEQ ID NO: 874991 - RNA, 19 nt, Artificial Sequence
  Description of Artificial Sequence: Synthetic oligonucleotide
  Antisense strand to SEQ ID NO: 874990
agagcgaucacucauccgc

SEQ ID NO: 874992 - RNA, 19 nt, Artificial Sequence
  Description of Artificial Sequence: Synthetic oligonucleotide
  Sense strand starting at position 3303 of SEQ ID NO: 588580
cgugcuucuccagaaggca

SEQ ID NO: 874993 - RNA, 19 nt, Artificial Sequence
  Description of Artificial Sequence: Synthetic oligonucleotide
  Antisense strand to SEQ ID NO: 874992
ugccuucuggagaagcacg

SEQ ID NO: 874994 - RNA, 19 nt, Artificial Sequence
  Description of Artificial Sequence: Synthetic oligonucleotide
  Sense strand starting at position 3440 of SEQ ID NO: 588580
ggagguggcuccuagcaga

SEQ ID NO: 874995 - RNA, 19 nt, Artificial Sequence
  Description of Artificial Sequence: Synthetic oligonucleotide
  Antisense strand to SEQ ID NO: 874994
ucugcuaggagccaccucc

SEQ ID NO: 874996 - RNA, 19 nt, Artificial Sequence
  Description of Artificial Sequence: Synthetic oligonucleotide
  Sense strand starting at position 3647 of SEQ ID NO: 588580
uucuguuucuggccaugga

SEQ ID NO: 874997 - RNA, 19 nt, Artificial Sequence
  Description of Artificial Sequence: Synthetic oligonucleotide
  Antisense strand to SEQ ID NO: 874996
uccauggccagaaacagaa

SEQ ID NO: 874998 - RNA, 19 nt, Artificial Sequence
  Description of Artificial Sequence: Synthetic oligonucleotide
  Sense strand starting at position 3861 of SEQ ID NO: 588580
gcugccagcacuuguuaga

SEQ ID NO: 874999 - RNA, 19 nt, Artificial Sequence
  Description of Artificial Sequence: Synthetic oligonucleotide
  Antisense strand to SEQ ID NO: 874998
ucuaacaagugcuggcagc

SEQ ID NO: 875000 - RNA, 19 nt, Artificial Sequence
  Description of Artificial Sequence: Synthetic oligonucleotide
  Sense strand starting at position 17 of SEQ ID NO: 588581
ucaaauuaggccggguuua

SEQ ID NO: 875001 - RNA, 19 nt, Artificial Sequence
  Description of Artificial Sequence: Synthetic oligonucleotide
  Antisense strand to SEQ ID NO: 875000
uaaacccggccuaauuuga

SEQ ID NO: 875002 - RNA, 19 nt, Artificial Sequence
  Description of Artificial Sequence: Synthetic oligonucleotide
  Sense strand starting at position 447 of SEQ ID NO: 588581
cauggugacgaucauuaau

SEQ ID NO: 875003 - RNA, 19 nt, Artificial Sequence
  Description of Artificial Sequence: Synthetic oligonucleotide
  Antisense strand to SEQ ID NO: 875002
auuaaugaucgucaccaug

SEQ ID NO: 875004 - RNA, 19 nt, Artificial Sequence
  Description of Artificial Sequence: Synthetic oligonucleotide
  Sense strand starting at position 449 of SEQ ID NO: 588581
uggugacgaucauuaauaa

SEQ ID NO: 875005 - RNA, 19 nt, Artificial Sequence
  Description of Artificial Sequence: Synthetic oligonucleotide
  Antisense strand to SEQ ID NO: 875004
uuauuaaugaucgucacca

SEQ ID NO: 875006 - RNA, 19 nt, Artificial Sequence
  Description of Artificial Sequence: Synthetic oligonucleotide
  Sense strand starting at position 876 of SEQ ID NO: 588581
gaacauaugcccuacgaga

SEQ ID NO: 875007 - RNA, 19 nt, Artificial Sequence
  Description of Artificial Sequence: Synthetic oligonucleotide
  Antisense strand to SEQ ID NO: 875006
ucucguagggcauauguuc

SEQ ID NO: 875008 - RNA, 19 nt, Artificial Sequence
  Description of Artificial Sequence: Synthetic oligonucleotide
  Sense strand starting at position 1129 of SEQ ID NO: 588581
uacauugcucccuaggguu

SEQ ID NO: 875009 - RNA, 19 nt, Artificial Sequence
  Description of Artificial Sequence: Synthetic oligonucleotide
  Antisense strand to SEQ ID NO: 875008
aacccuagggagcaaugua

SEQ ID NO: 875010 - RNA, 19 nt, Artificial Sequence
  Description of Artificial Sequence: Synthetic oligonucleotide
  Sense strand starting at position 1259 of SEQ ID NO: 588581
ggagacauauguucuagau

SEQ ID NO: 875011 - RNA, 19 nt, Artificial Sequence
  Description of Artificial Sequence: Synthetic oligonucleotide
  Antisense strand to SEQ ID NO: 875010
aucuagaacauaugucucc

SEQ ID NO: 875012 - RNA, 19 nt, Artificial Sequence
  Description of Artificial Sequence: Synthetic oligonucleotide
  Sense strand starting at position 1274 of SEQ ID NO: 588581
agauccagcuuugcaauua

SEQ ID NO: 875013 - RNA, 19 nt, Artificial Sequence
  Description of Artificial Sequence: Synthetic oligonucleotide
  Antisense strand to SEQ ID NO: 875012
uaauugcaaagcuggaucu

SEQ ID NO: 875014 - RNA, 19 nt, Artificial Sequence
  Description of Artificial Sequence: Synthetic oligonucleotide
  Sense strand starting at position 1350 of SEQ ID NO: 588581
guuggaguaccucgaggau

SEQ ID NO: 875015 - RNA, 19 nt, Artificial Sequence
  Description of Artificial Sequence: Synthetic oligonucleotide
  Antisense strand to SEQ ID NO: 875014
auccucgagguacuccaac

SEQ ID NO: 875016 - RNA, 19 nt, Artificial Sequence
  Description of Artificial Sequence: Synthetic oligonucleotide
  Sense strand starting at position 1352 of SEQ ID NO: 588581
uggaguaccucgaggauga

SEQ ID NO: 875017 - RNA, 19 nt, Artificial Sequence
  Description of Artificial Sequence: Synthetic oligonucleotide
  Antisense strand to SEQ ID NO: 875016
ucauccucgagguacucca

SEQ ID NO: 875018 - RNA, 19 nt, Artificial Sequence
  Description of Artificial Sequence: Synthetic oligonucleotide
  Sense strand starting at position 1356 of SEQ ID NO: 588581
guaccucgaggaugagaau

SEQ ID NO: 875019 - RNA, 19 nt, Artificial Sequence
  Description of Artificial Sequence: Synthetic oligonucleotide
  Antisense strand to SEQ ID NO: 875018
auucucauccucgagguac

SEQ ID NO: 875020 - RNA, 19 nt, Artificial Sequence
  Description of Artificial Sequence: Synthetic oligonucleotide
  Sense strand starting at position 1396 of SEQ ID NO: 588581
auccuaggcgcuuagagua

SEQ ID NO: 875021 - RNA, 19 nt, Artificial Sequence
  Description of Artificial Sequence: Synthetic oligonucleotide
  Antisense strand to SEQ ID NO: 875020
uacucuaagcgccuaggau

SEQ ID NO: 875022 - RNA, 19 nt, Artificial Sequence
  Description of Artificial Sequence: Synthetic oligonucleotide
  Sense strand starting at position 1410 of SEQ ID NO: 588581
gaguaaugcuggcccuaag

SEQ ID NO: 875023 - RNA, 19 nt, Artificial Sequence
  Description of Artificial Sequence: Synthetic oligonucleotide
  Antisense strand to SEQ ID NO: 875022
cuuagggccagcauuacuc

SEQ ID NO: 875024 - RNA, 19 nt, Artificial Sequence
  Description of Artificial Sequence: Synthetic oligonucleotide
  Sense strand starting at position 1429 of SEQ ID NO: 588581
aaaucuguugaaugacuga

SEQ ID NO: 875025 - RNA, 19 nt, Artificial Sequence
  Description of Artificial Sequence: Synthetic oligonucleotide
  Antisense strand to SEQ ID NO: 875024
ucagucauucaacagauuu

SEQ ID NO: 875026 - RNA, 19 nt, Artificial Sequence
  Description of Artificial Sequence: Synthetic oligonucleotide
  Sense strand starting at position 1485 of SEQ ID NO: 588581
uacugaaccuugcuuguga

SEQ ID NO: 875027 - RNA, 19 nt, Artificial Sequence
  Description of Artificial Sequence: Synthetic oligonucleotide
  Antisense strand to SEQ ID NO: 875026
ucacaagcaagguucagua

SEQ ID NO: 875028 - RNA, 19 nt, Artificial Sequence
  Description of Artificial Sequence: Synthetic oligonucleotide
  Sense strand starting at position 1486 of SEQ ID NO: 588581
acugaaccuugcuugugaa

SEQ ID NO: 875029 - RNA, 19 nt, Artificial Sequence
  Description of Artificial Sequence: Synthetic oligonucleotide
  Antisense strand to SEQ ID NO: 875028
uucacaagcaagguucagu

SEQ ID NO: 875030 - RNA, 19 nt, Artificial Sequence
  Description of Artificial Sequence: Synthetic oligonucleotide
  Sense strand starting at position 1516 of SEQ ID NO: 588581
ggcaaaugaguuuaguuua

SEQ ID NO: 875031 - RNA, 19 nt, Artificial Sequence
  Description of Artificial Sequence: Synthetic oligonucleotide
  Antisense strand to SEQ ID NO: 875030
uaaacuaaacucauuugcc

SEQ ID NO: 875032 - RNA, 19 nt, Artificial Sequence
  Description of Artificial Sequence: Synthetic oligonucleotide
  Sense strand starting at position 1521 of SEQ ID NO: 588581
augaguuuaguuuaccaag

SEQ ID NO: 875033 - RNA, 19 nt, Artificial Sequence
  Description of Artificial Sequence: Synthetic oligonucleotide
  Antisense strand to SEQ ID NO: 875032
cuugguaaacuaaacucau

SEQ ID NO: 875034 - RNA, 19 nt, Artificial Sequence
  Description of Artificial Sequence: Synthetic oligonucleotide
  Sense strand starting at position 1641 of SEQ ID NO: 588581
ggugguauuuccguuauaa

SEQ ID NO: 875035 - RNA, 19 nt, Artificial Sequence
  Description of Artificial Sequence: Synthetic oligonucleotide
  Antisense strand to SEQ ID NO: 875034
uuauaacggaaauaccacc

SEQ ID NO: 875036 - RNA, 19 nt, Artificial Sequence
  Description of Artificial Sequence: Synthetic oligonucleotide
  Sense strand starting at position 1705 of SEQ ID NO: 588581
cucaaugagugcuucucaa

SEQ ID NO: 875037 - RNA, 19 nt, Artificial Sequence
  Description of Artificial Sequence: Synthetic oligonucleotide
  Antisense strand to SEQ ID NO: 875036
uugagaagcacucauugag

SEQ ID NO: 875038 - RNA, 19 nt, Artificial Sequence
  Description of Artificial Sequence: Synthetic oligonucleotide
  Sense strand starting at position 1798 of SEQ ID NO: 588581
ugaauucgucccuaauccu

SEQ ID NO: 875039 - RNA, 19 nt, Artificial Sequence
  Description of Artificial Sequence: Synthetic oligonucleotide
  Antisense strand to SEQ ID NO: 875038
aggauuagggacgaauuca

SEQ ID NO: 875040 - RNA, 19 nt, Artificial Sequence
  Description of Artificial Sequence: Synthetic oligonucleotide
  Sense strand starting at position 1911 of SEQ ID NO: 588581
caugaagacucuucuggua

SEQ ID NO: 875041 - RNA, 19 nt, Artificial Sequence
  Description of Artificial Sequence: Synthetic oligonucleotide
  Antisense strand to SEQ ID NO: 875040
uaccagaagagucuucaug

SEQ ID NO: 875042 - RNA, 19 nt, Artificial Sequence
  Description of Artificial Sequence: Synthetic oligonucleotide
  Sense strand starting at position 1926 of SEQ ID NO: 588581
gguaaugcccgacacagau

SEQ ID NO: 875043 - RNA, 19 nt, Artificial Sequence
  Description of Artificial Sequence: Synthetic oligonucleotide
  Antisense strand to SEQ ID NO: 875042
aucugugucgggcauuacc

SEQ ID NO: 875044 - RNA, 19 nt, Artificial Sequence
  Description of Artificial Sequence: Synthetic oligonucleotide
  Sense strand starting at position 2084 of SEQ ID NO: 588581
ugggaaauguaguccagua

SEQ ID NO: 875045 - RNA, 19 nt, Artificial Sequence
  Description of Artificial Sequence: Synthetic oligonucleotide
  Antisense strand to SEQ ID NO: 875044
uacuggacuacauuuccca

SEQ ID NO: 875046 - RNA, 19 nt, Artificial Sequence
  Description of Artificial Sequence: Synthetic oligonucleotide
  Sense strand starting at position 2172 of SEQ ID NO: 588581
ucgggaagaaucuggguga

SEQ ID NO: 875047 - RNA, 19 nt, Artificial Sequence
  Description of Artificial Sequence: Synthetic oligonucleotide
  Antisense strand to SEQ ID NO: 875046
ucacccagauucuucccga

SEQ ID NO: 875048 - RNA, 19 nt, Artificial Sequence
  Description of Artificial Sequence: Synthetic oligonucleotide
  Sense strand starting at position 2211 of SEQ ID NO: 588581
ggcggucauagcguuacuu

SEQ ID NO: 875049 - RNA, 19 nt, Artificial Sequence
  Description of Artificial Sequence: Synthetic oligonucleotide
  Antisense strand to SEQ ID NO: 875048
aaguaacgcuaugaccgcc

SEQ ID NO: 875050 - RNA, 19 nt, Artificial Sequence
  Description of Artificial Sequence: Synthetic oligonucleotide
  Sense strand starting at position 2891 of SEQ ID NO: 588581
aagguacacgcuuagagaa

SEQ ID NO: 875051 - RNA, 19 nt, Artificial Sequence
  Description of Artificial Sequence: Synthetic oligonucleotide
  Antisense strand to SEQ ID NO: 875050
uucucuaagcguguaccuu

SEQ ID NO: 875052 - RNA, 19 nt, Artificial Sequence
  Description of Artificial Sequence: Synthetic oligonucleotide
  Sense strand starting at position 3017 of SEQ ID NO: 588581
uuaaacucucagggcauaa

SEQ ID NO: 875053 - RNA, 19 nt, Artificial Sequence
  Description of Artificial Sequence: Synthetic oligonucleotide
  Antisense strand to SEQ ID NO: 875052
uuaugcccugagaguuuaa

SEQ ID NO: 875054 - RNA, 19 nt, Artificial Sequence
  Description of Artificial Sequence: Synthetic oligonucleotide
  Sense strand starting at position 3060 of SEQ ID NO: 588581
gguccuuucuagucugaga

SEQ ID NO: 875055 - RNA, 19 nt, Artificial Sequence
  Description of Artificial Sequence: Synthetic oligonucleotide
  Antisense strand to SEQ ID NO: 875054
ucucagacuagaaaggacc

SEQ ID NO: 875056 - RNA, 19 nt, Artificial Sequence
  Description of Artificial Sequence: Synthetic oligonucleotide
  Sense strand starting at position 3062 of SEQ ID NO: 588581
uccuuucuagucugagaug

SEQ ID NO: 875057 - RNA, 19 nt, Artificial Sequence
  Description of Artificial Sequence: Synthetic oligonucleotide
  Antisense strand to SEQ ID NO: 875056
caucucagacuagaaagga

SEQ ID NO: 875058 - RNA, 19 nt, Artificial Sequence
  Description of Artificial Sequence: Synthetic oligonucleotide
  Sense strand starting at position 3076 of SEQ ID NO: 588581
agaugucugucaguuacag

SEQ ID NO: 875059 - RNA, 19 nt, Artificial Sequence
  Description of Artificial Sequence: Synthetic oligonucleotide
  Antisense strand to SEQ ID NO: 875058
cuguaacugacagacaucu

SEQ ID NO: 875060 - RNA, 19 nt, Artificial Sequence
  Description of Artificial Sequence: Synthetic oligonucleotide
  Sense strand starting at position 3078 of SEQ ID NO: 588581
augucugucaguuacaguu

SEQ ID NO: 875061 - RNA, 19 nt, Artificial Sequence
  Description of Artificial Sequence: Synthetic oligonucleotide
  Antisense strand to SEQ ID NO: 875060
aacuguaacugacagacau

SEQ ID NO: 875062 - RNA, 19 nt, Artificial Sequence
  Description of Artificial Sequence: Synthetic oligonucleotide
  Sense strand starting at position 3148 of SEQ ID NO: 588581
agccuacuuggccacaaua

SEQ ID NO: 875063 - RNA, 19 nt, Artificial Sequence
  Description of Artificial Sequence: Synthetic oligonucleotide
  Antisense strand to SEQ ID NO: 875062
uauuguggccaaguaggcu

SEQ ID NO: 875064 - RNA, 19 nt, Artificial Sequence
  Description of Artificial Sequence: Synthetic oligonucleotide
  Sense strand starting at position 3190 of SEQ ID NO: 588581
gugguagaauuguccuuga

SEQ ID NO: 875065 - RNA, 19 nt, Artificial Sequence
  Description of Artificial Sequence: Synthetic oligonucleotide
  Antisense strand to SEQ ID NO: 875064
ucaaggacaauucuaccac

SEQ ID NO: 875066 - RNA, 19 nt, Artificial Sequence
  Description of Artificial Sequence: Synthetic oligonucleotide
  Sense strand starting at position 3193 of SEQ ID NO: 588581
guagaauuguccuugagac

SEQ ID NO: 875067 - RNA, 19 nt, Artificial Sequence
  Description of Artificial Sequence: Synthetic oligonucleotide
  Antisense strand to SEQ ID NO: 875066
gucucaaggacaauucuac

SEQ ID NO: 875068 - RNA, 19 nt, Artificial Sequence
  Description of Artificial Sequence: Synthetic oligonucleotide
  Sense strand starting at position 3194 of SEQ ID NO: 588581
uagaauuguccuugagaca

SEQ ID NO: 875069 - RNA, 19 nt, Artificial Sequence
  Description of Artificial Sequence: Synthetic oligonucleotide
  Antisense strand to SEQ ID NO: 875068
ugucucaaggacaauucua

SEQ ID NO: 875070 - RNA, 19 nt, Artificial Sequence
  Description of Artificial Sequence: Synthetic oligonucleotide
  Sense strand starting at position 3372 of SEQ ID NO: 588581
ggguaagaaucugcuguuu

SEQ ID NO: 875071 - RNA, 19 nt, Artificial Sequence
  Description of Artificial Sequence: Synthetic oligonucleotide
  Antisense strand to SEQ ID NO: 875070
aaacagcagauucuuaccc

SEQ ID NO: 875072 - RNA, 19 nt, Artificial Sequence
  Description of Artificial Sequence: Synthetic oligonucleotide
  Sense strand starting at position 3528 of SEQ ID NO: 588581
ccuagcuuccuugagguga

SEQ ID NO: 875073 - RNA, 19 nt, Artificial Sequence
  Description of Artificial Sequence: Synthetic oligonucleotide
  Antisense strand to SEQ ID NO: 875072
ucaccucaaggaagcuagg

SEQ ID NO: 875074 - RNA, 19 nt, Artificial Sequence
  Description of Artificial Sequence: Synthetic oligonucleotide
  Sense strand starting at position 3532 of SEQ ID NO: 588581
gcuuccuugaggugaccaa

SEQ ID NO: 875075 - RNA, 19 nt, Artificial Sequence
  Description of Artificial Sequence: Synthetic oligonucleotide
  Antisense strand to SEQ ID NO: 875074
uuggucaccucaaggaagc

SEQ ID NO: 875076 - RNA, 19 nt, Artificial Sequence
  Description of Artificial Sequence: Synthetic oligonucleotide
  Sense strand starting at position 3588 of SEQ ID NO: 588581
auucccauauuguucugua

SEQ ID NO: 875077 - RNA, 19 nt, Artificial Sequence
  Description of Artificial Sequence: Synthetic oligonucleotide
  Antisense strand to SEQ ID NO: 875076
uacagaacaauaugggaau

SEQ ID NO: 875078 - RNA, 19 nt, Artificial Sequence
  Description of Artificial Sequence: Synthetic oligonucleotide
  Sense strand starting at position 3725 of SEQ ID NO: 588581
gcacuaucccaaggacaac

SEQ ID NO: 875079 - RNA, 19 nt, Artificial Sequence
  Description of Artificial Sequence: Synthetic oligonucleotide
  Antisense strand to SEQ ID NO: 875078
guuguccuugggauagugc

SEQ ID NO: 875080 - RNA, 19 nt, Artificial Sequence
  Description of Artificial Sequence: Synthetic oligonucleotide
  Sense strand starting at position 2 of SEQ ID NO: 588582
gaaccaagcuugugauguc

SEQ ID NO: 875081 - RNA, 19 nt, Artificial Sequence
  Description of Artificial Sequence: Synthetic oligonucleotide
  Antisense strand to SEQ ID NO: 875080
gacaucacaagcuugguuc

SEQ ID NO: 875082 - RNA, 19 nt, Artificial Sequence
  Description of Artificial Sequence: Synthetic oligonucleotide
  Sense strand starting at position 178 of SEQ ID NO: 588582
uuccgcuacugcgauuuaa

SEQ ID NO: 875083 - RNA, 19 nt, Artificial Sequence
  Description of Artificial Sequence: Synthetic oligonucleotide
  Antisense strand to SEQ ID NO: 875082
uuaaaucgcaguagcggaa

SEQ ID NO: 875084 - RNA, 19 nt, Artificial Sequence
  Description of Artificial Sequence: Synthetic oligonucleotide
  Sense strand starting at position 285 of SEQ ID NO: 588582
aaaugaccaugugagaaua

SEQ ID NO: 875085 - RNA, 19 nt, Artificial Sequence
  Description of Artificial Sequence: Synthetic oligonucleotide
  Antisense strand to SEQ ID NO: 875084
uauucucacauggucauuu

SEQ ID NO: 875086 - RNA, 19 nt, Artificial Sequence
  Description of Artificial Sequence: Synthetic oligonucleotide
  Sense strand starting at position 989 of SEQ ID NO: 588582
cgaccuugcuccuggguaa

SEQ ID NO: 875087 - RNA, 19 nt, Artificial Sequence
  Description of Artificial Sequence: Synthetic oligonucleotide
  Antisense strand to SEQ ID NO: 875086
uuacccaggagcaaggucg

SEQ ID NO: 875088 - RNA, 19 nt, Artificial Sequence
  Description of Artificial Sequence: Synthetic oligonucleotide
  Sense strand starting at position 1036 of SEQ ID NO: 588582
cuuggucuuacuuggaaga

SEQ ID NO: 875089 - RNA, 19 nt, Artificial Sequence
  Description of Artificial Sequence: Synthetic oligonucleotide
  Antisense strand to SEQ ID NO: 875088
ucuuccaaguaagaccaag

SEQ ID NO: 875090 - RNA, 19 nt, Artificial Sequence
  Description of Artificial Sequence: Synthetic oligonucleotide
  Sense strand starting at position 1038 of SEQ ID NO: 588582
uggucuuacuuggaagaca

SEQ ID NO: 875091 - RNA, 19 nt, Artificial Sequence
  Description of Artificial Sequence: Synthetic oligonucleotide
  Antisense strand to SEQ ID NO: 875090
ugucuuccaaguaagacca

SEQ ID NO: 875092 - RNA, 19 nt, Artificial Sequence
  Description of Artificial Sequence: Synthetic oligonucleotide
  Sense strand starting at position 1080 of SEQ ID NO: 588582
gcggguugcucaggucuuu

SEQ ID NO: 875093 - RNA, 19 nt, Artificial Sequence
  Description of Artificial Sequence: Synthetic oligonucleotide
  Antisense strand to SEQ ID NO: 875092
aaagaccugagcaacccgc

SEQ ID NO: 875094 - RNA, 19 nt, Artificial Sequence
  Description of Artificial Sequence: Synthetic oligonucleotide
  Sense strand starting at position 1262 of SEQ ID NO: 588582
gagcgaagccugugcuaac

SEQ ID NO: 875095 - RNA, 19 nt, Artificial Sequence
  Description of Artificial Sequence: Synthetic oligonucleotide
  Antisense strand to SEQ ID NO: 875094
guuagcacaggcuucgcuc

SEQ ID NO: 875096 - RNA, 19 nt, Artificial Sequence
  Description of Artificial Sequence: Synthetic oligonucleotide
  Sense strand starting at position 2098 of SEQ ID NO: 588582
ggguccugggcuugagagu

SEQ ID NO: 875097 - RNA, 19 nt, Artificial Sequence
  Description of Artificial Sequence: Synthetic oligonucleotide
  Antisense strand to SEQ ID NO: 875096
acucucaagcccaggaccc

SEQ ID NO: 875098 - RNA, 19 nt, Artificial Sequence
  Description of Artificial Sequence: Synthetic oligonucleotide
  Sense strand starting at position 2243 of SEQ ID NO: 588582
cgccaagugagcugugaac

SEQ ID NO: 875099 - RNA, 19 nt, Artificial Sequence
  Description of Artificial Sequence: Synthetic oligonucleotide
  Antisense strand to SEQ ID NO: 875098
guucacagcucacuuggcg

SEQ ID NO: 875100 - RNA, 19 nt, Artificial Sequence
  Description of Artificial Sequence: Synthetic oligonucleotide
  Sense strand starting at position 2245 of SEQ ID NO: 588582
ccaagugagcugugaacca

SEQ ID NO: 875101 - RNA, 19 nt, Artificial Sequence
  Description of Artificial Sequence: Synthetic oligonucleotide
  Antisense strand to SEQ ID NO: 875100
ugguucacagcucacuugg

SEQ ID NO: 875102 - RNA, 19 nt, Artificial Sequence
  Description of Artificial Sequence: Synthetic oligonucleotide
  Sense strand starting at position 2313 of SEQ ID NO: 588582
auauuuggcuuaggagaau

SEQ ID NO: 875103 - RNA, 19 nt, Artificial Sequence
  Description of Artificial Sequence: Synthetic oligonucleotide
  Antisense strand to SEQ ID NO: 875102
auucuccuaagccaaauau

SEQ ID NO: 875104 - RNA, 19 nt, Artificial Sequence
  Description of Artificial Sequence: Synthetic oligonucleotide
  Sense strand starting at position 2333 of SEQ ID NO: 588582
ucauaaaguuagccagauc

SEQ ID NO: 875105 - RNA, 19 nt, Artificial Sequence
  Description of Artificial Sequence: Synthetic oligonucleotide
  Antisense strand to SEQ ID NO: 875104
gaucuggcuaacuuuauga

SEQ ID NO: 875106 - RNA, 19 nt, Artificial Sequence
  Description of Artificial Sequence: Synthetic oligonucleotide
  Sense strand starting at position 2348 of SEQ ID NO: 588582
gaucucgggucucaauuua

SEQ ID NO: 875107 - RNA, 19 nt, Artificial Sequence
  Description of Artificial Sequence: Synthetic oligonucleotide
  Antisense strand to SEQ ID NO: 875106
uaaauugagacccgagauc

SEQ ID NO: 875108 - RNA, 19 nt, Artificial Sequence
  Description of Artificial Sequence: Synthetic oligonucleotide
  Sense strand starting at position 2387 of SEQ ID NO: 588582
auagcaucccuggaguaca

SEQ ID NO: 875109 - RNA, 19 nt, Artificial Sequence
  Description of Artificial Sequence: Synthetic oligonucleotide
  Antisense strand to SEQ ID NO: 875108
uguacuccagggaugcuau

SEQ ID NO: 875110 - RNA, 19 nt, Artificial Sequence
  Description of Artificial Sequence: Synthetic oligonucleotide
  Sense strand starting at position 2495 of SEQ ID NO: 588582
guuucuuucgcccgggagu

SEQ ID NO: 875111 - RNA, 19 nt, Artificial Sequence
  Description of Artificial Sequence: Synthetic oligonucleotide
  Antisense strand to SEQ ID NO: 875110
acucccgggcgaaagaaac

SEQ ID NO: 875112 - RNA, 19 nt, Artificial Sequence
  Description of Artificial Sequence: Synthetic oligonucleotide
  Sense strand starting at position 2775 of SEQ ID NO: 588582
ggcacaauggcugaggaau

SEQ ID NO: 875113 - RNA, 19 nt, Artificial Sequence
  Description of Artificial Sequence: Synthetic oligonucleotide
  Antisense strand to SEQ ID NO: 875112
auuccucagccauugugcc

SEQ ID NO: 875114 - RNA, 19 nt, Artificial Sequence
  Description of Artificial Sequence: Synthetic oligonucleotide
  Sense strand starting at position 2951 of SEQ ID NO: 588582
uggcguccacugcucgaua

SEQ ID NO: 875115 - RNA, 19 nt, Artificial Sequence
  Description of Artificial Sequence: Synthetic oligonucleotide
  Antisense strand to SEQ ID NO: 875114
uaucgagcaguggacgcca

SEQ ID NO: 875116 - RNA, 19 nt, Artificial Sequence
  Description of Artificial Sequence: Synthetic oligonucleotide
  Sense strand starting at position 3024 of SEQ ID NO: 588582
agaagaucgaguggucauc

SEQ ID NO: 875117 - RNA, 19 nt, Artificial Sequence
  Description of Artificial Sequence: Synthetic oligonucleotide
  Antisense strand to SEQ ID NO: 875116
gaugaccacucgaucuucu

SEQ ID NO: 875118 - RNA, 19 nt, Artificial Sequence
  Description of Artificial Sequence: Synthetic oligonucleotide
  Sense strand starting at position 3175 of SEQ ID NO: 588582
acugauuugugucggguga

SEQ ID NO: 875119 - RNA, 19 nt, Artificial Sequence
  Description of Artificial Sequence: Synthetic oligonucleotide
  Antisense strand to SEQ ID NO: 875118
ucacccgacacaaaucagu

SEQ ID NO: 875120 - RNA, 19 nt, Artificial Sequence
  Description of Artificial Sequence: Synthetic oligonucleotide
  Sense strand starting at position 3177 of SEQ ID NO: 588582
ugauuugugucgggugagu

SEQ ID NO: 875121 - RNA, 19 nt, Artificial Sequence
  Description of Artificial Sequence: Synthetic oligonucleotide
  Antisense strand to SEQ ID NO: 875120
acucacccgacacaaauca

SEQ ID NO: 875122 - RNA, 19 nt, Artificial Sequence
  Description of Artificial Sequence: Synthetic oligonucleotide
  Sense strand starting at position 3250 of SEQ ID NO: 588582
uccacugucuugcuguaga

SEQ ID NO: 875123 - RNA, 19 nt, Artificial Sequence
  Description of Artificial Sequence: Synthetic oligonucleotide
  Antisense strand to SEQ ID NO: 875122
ucuacagcaagacagugga

SEQ ID NO: 875124 - RNA, 19 nt, Artificial Sequence
  Description of Artificial Sequence: Synthetic oligonucleotide
  Sense strand starting at position 3393 of SEQ ID NO: 588582
agggcagggucuguuagua

SEQ ID NO: 875125 - RNA, 19 nt, Artificial Sequence
  Description of Artificial Sequence: Synthetic oligonucleotide
  Antisense strand to SEQ ID NO: 875124
uacuaacagacccugcccu

SEQ ID NO: 875126 - RNA, 19 nt, Artificial Sequence
  Description of Artificial Sequence: Synthetic oligonucleotide
  Sense strand starting at position 3403 of SEQ ID NO: 588582
cuguuaguauccucauucu

SEQ ID NO: 875127 - RNA, 19 nt, Artificial Sequence
  Description of Artificial Sequence: Synthetic oligonucleotide
  Antisense strand to SEQ ID NO: 875126
agaaugaggauacuaacag

SEQ ID NO: 875128 - RNA, 19 nt, Artificial Sequence
  Description of Artificial Sequence: Synthetic oligonucleotide
  Sense strand starting at position 3415 of SEQ ID NO: 588582
ucauucucgcauugagaug

SEQ ID NO: 875129 - RNA, 19 nt, Artificial Sequence
  Description of Artificial Sequence: Synthetic oligonucleotide
  Antisense strand to SEQ ID NO: 875128
caucucaaugcgagaauga

SEQ ID NO: 875130 - RNA, 19 nt, Artificial Sequence
  Description of Artificial Sequence: Synthetic oligonucleotide
  Sense strand starting at position 3426 of SEQ ID NO: 588582
uugagaugacugggaugua

SEQ ID NO: 875131 - RNA, 19 nt, Artificial Sequence
  Description of Artificial Sequence: Synthetic oligonucleotide
  Antisense strand to SEQ ID NO: 875130
uacaucccagucaucucaa

SEQ ID NO: 875132 - RNA, 19 nt, Artificial Sequence
  Description of Artificial Sequence: Synthetic oligonucleotide
  Sense strand starting at position 3448 of SEQ ID NO: 588582
ggaacaacuuggccaagau

SEQ ID NO: 875133 - RNA, 19 nt, Artificial Sequence
  Description of Artificial Sequence: Synthetic oligonucleotide
  Antisense strand to SEQ ID NO: 875132
aucuuggccaaguuguucc

SEQ ID NO: 875134 - RNA, 19 nt, Artificial Sequence
  Description of Artificial Sequence: Synthetic oligonucleotide
  Sense strand starting at position 3458 of SEQ ID NO: 588582
ggccaagaucuaggaguau

SEQ ID NO: 875135 - RNA, 19 nt, Artificial Sequence
  Description of Artificial Sequence: Synthetic oligonucleotide
  Antisense strand to SEQ ID NO: 875134
auacuccuagaucuuggcc

SEQ ID NO: 875136 - RNA, 19 nt, Artificial Sequence
  Description of Artificial Sequence: Synthetic oligonucleotide
  Sense strand starting at position 3640 of SEQ ID NO: 588582
aagcuagguuacccagaaa

SEQ ID NO: 875137 - RNA, 19 nt, Artificial Sequence
  Description of Artificial Sequence: Synthetic oligonucleotide
  Antisense strand to SEQ ID NO: 875136
uuucuggguaaccuagcuu

SEQ ID NO: 875138 - RNA, 19 nt, Artificial Sequence
  Description of Artificial Sequence: Synthetic oligonucleotide
  Sense strand starting at position 3852 of SEQ ID NO: 588582
gcauauugcucuuuccaug

SEQ ID NO: 875139 - RNA, 19 nt, Artificial Sequence
  Description of Artificial Sequence: Synthetic oligonucleotide
  Antisense strand to SEQ ID NO: 875138
cauggaaagagcaauaugc

SEQ ID NO: 875140 - RNA, 19 nt, Artificial Sequence
  Description of Artificial Sequence: Synthetic oligonucleotide
  Sense strand starting at position 3908 of SEQ ID NO: 588582
ggcuguggcuugugcagaa

SEQ ID NO: 875141 - RNA, 19 nt, Artificial Sequence
  Description of Artificial Sequence: Synthetic oligonucleotide
  Antisense strand to SEQ ID NO: 875140
uucugcacaagccacagcc

SEQ ID NO: 875142 - RNA, 19 nt, Artificial Sequence
  Description of Artificial Sequence: Synthetic oligonucleotide
  Sense strand starting at position 46 of SEQ ID NO: 588583
ugguucucauaacuaaaga

SEQ ID NO: 875143 - RNA, 19 nt, Artificial Sequence
  Description of Artificial Sequence: Synthetic oligonucleotide
  Antisense strand to SEQ ID NO: 875142
ucuuuaguuaugagaacca

SEQ ID NO: 875144 - RNA, 19 nt, Artificial Sequence
  Description of Artificial Sequence: Synthetic oligonucleotide
  Sense strand starting at position 155 of SEQ ID NO: 588583
auugaaucuccuugaugau

SEQ ID NO: 875145 - RNA, 19 nt, Artificial Sequence
  Description of Artificial Sequence: Synthetic oligonucleotide
  Antisense strand to SEQ ID NO: 875144
aucaucaaggagauucaau

SEQ ID NO: 875146 - RNA, 19 nt, Artificial Sequence
  Description of Artificial Sequence: Synthetic oligonucleotide
  Sense strand starting at position 460 of SEQ ID NO: 588583
gguacauugccagaacaca

SEQ ID NO: 875147 - RNA, 19 nt, Artificial Sequence
  Description of Artificial Sequence: Synthetic oligonucleotide
  Antisense strand to SEQ ID NO: 875146
uguguucuggcaauguacc

SEQ ID NO: 875148 - RNA, 19 nt, Artificial Sequence
  Description of Artificial Sequence: Synthetic oligonucleotide
  Sense strand starting at position 498 of SEQ ID NO: 588583
ugaauacaucagugaaagu

SEQ ID NO: 875149 - RNA, 19 nt, Artificial Sequence
  Description of Artificial Sequence: Synthetic oligonucleotide
  Antisense strand to SEQ ID NO: 875148
acuuucacugauguauuca

SEQ ID NO: 875150 - RNA, 19 nt, Artificial Sequence
  Description of Artificial Sequence: Synthetic oligonucleotide
  Sense strand starting at position 529 of SEQ ID NO: 588583
auuccuuauccaggguaaa

SEQ ID NO: 875151 - RNA, 19 nt, Artificial Sequence
  Description of Artificial Sequence: Synthetic oligonucleotide
  Antisense strand to SEQ ID NO: 875150
uuuacccuggauaaggaau

SEQ ID NO: 875152 - RNA, 19 nt, Artificial Sequence
  Description of Artificial Sequence: Synthetic oligonucleotide
  Sense strand starting at position 530 of SEQ ID NO: 588583
uuccuuauccaggguaaac

SEQ ID NO: 875153 - RNA, 19 nt, Artificial Sequence
  Description of Artificial Sequence: Synthetic oligonucleotide
  Antisense strand to SEQ ID NO: 875152
guuuacccuggauaaggaa

SEQ ID NO: 875154 - RNA, 19 nt, Artificial Sequence
  Description of Artificial Sequence: Synthetic oligonucleotide
  Sense strand starting at position 558 of SEQ ID NO: 588583
augggaaucuacccuuacu

SEQ ID NO: 875155 - RNA, 19 nt, Artificial Sequence
  Description of Artificial Sequence: Synthetic oligonucleotide
  Antisense strand to SEQ ID NO: 875154
aguaaggguagauucccau

SEQ ID NO: 875156 - RNA, 19 nt, Artificial Sequence
  Description of Artificial Sequence: Synthetic oligonucleotide
  Sense strand starting at position 635 of SEQ ID NO: 588583
uuugcuuagagauaguaga

SEQ ID NO: 875157 - RNA, 19 nt, Artificial Sequence
  Description of Artificial Sequence: Synthetic oligonucleotide
  Antisense strand to SEQ ID NO: 875156
ucuacuaucucuaagcaaa

SEQ ID NO: 875158 - RNA, 19 nt, Artificial Sequence
  Description of Artificial Sequence: Synthetic oligonucleotide
  Sense strand starting at position 642 of SEQ ID NO: 588583
agagauaguagaugauguu

SEQ ID NO: 875159 - RNA, 19 nt, Artificial Sequence
  Description of Artificial Sequence: Synthetic oligonucleotide
  Antisense strand to SEQ ID NO: 875158
aacaucaucuacuaucucu

SEQ ID NO: 875160 - RNA, 19 nt, Artificial Sequence
  Description of Artificial Sequence: Synthetic oligonucleotide
  Sense strand starting at position 651 of SEQ ID NO: 588583
agaugauguucuucucuaa

SEQ ID NO: 875161 - RNA, 19 nt, Artificial Sequence
  Description of Artificial Sequence: Synthetic oligonucleotide
  Antisense strand to SEQ ID NO: 875160
uuagagaagaacaucaucu

SEQ ID NO: 875162 - RNA, 19 nt, Artificial Sequence
  Description of Artificial Sequence: Synthetic oligonucleotide
  Sense strand starting at position 654 of SEQ ID NO: 588583
ugauguucuucucuaaaug

SEQ ID NO: 875163 - RNA, 19 nt, Artificial Sequence
  Description of Artificial Sequence: Synthetic oligonucleotide
  Antisense strand to SEQ ID NO: 875162
cauuuagagaagaacauca

SEQ ID NO: 875164 - RNA, 19 nt, Artificial Sequence
  Description of Artificial Sequence: Synthetic oligonucleotide
  Sense strand starting at position 671 of SEQ ID NO: 588583
ugcaguaccagguaaagaa

SEQ ID NO: 875165 - RNA, 19 nt, Artificial Sequence
  Description of Artificial Sequence: Synthetic oligonucleotide
  Antisense strand to SEQ ID NO: 875164
uucuuuaccugguacugca

SEQ ID NO: 875166 - RNA, 19 nt, Artificial Sequence
  Description of Artificial Sequence: Synthetic oligonucleotide
  Sense strand starting at position 684 of SEQ ID NO: 588583
aaagaaagguacuuguagu

SEQ ID NO: 875167 - RNA, 19 nt, Artificial Sequence
  Description of Artificial Sequence: Synthetic oligonucleotide
  Antisense strand to SEQ ID NO: 875166
acuacaaguaccuuucuuu

SEQ ID NO: 875168 - RNA, 19 nt, Artificial Sequence
  Description of Artificial Sequence: Synthetic oligonucleotide
  Sense strand starting at position 697 of SEQ ID NO: 588583
uguaguaucugacuauaca

SEQ ID NO: 875169 - RNA, 19 nt, Artificial Sequence
  Description of Artificial Sequence: Synthetic oligonucleotide
  Antisense strand to SEQ ID NO: 875168
uguauagucagauacuaca

SEQ ID NO: 875170 - RNA, 19 nt, Artificial Sequence
  Description of Artificial Sequence: Synthetic oligonucleotide
  Sense strand starting at position 698 of SEQ ID NO: 588583
guaguaucugacuauacac

SEQ ID NO: 875171 - RNA, 19 nt, Artificial Sequence
  Description of Artificial Sequence: Synthetic oligonucleotide
  Antisense strand to SEQ ID NO: 875170
guguauagucagauacuac

SEQ ID NO: 875172 - RNA, 19 nt, Artificial Sequence
  Description of Artificial Sequence: Synthetic oligonucleotide
  Sense strand starting at position 793 of SEQ ID NO: 588583
aguuaagagaucuggauuc

SEQ ID NO: 875173 - RNA, 19 nt, Artificial Sequence
  Description of Artificial Sequence: Synthetic oligonucleotide
  Antisense strand to SEQ ID NO: 875172
gaauccagaucucuuaacu

SEQ ID NO: 875174 - RNA, 19 nt, Artificial Sequence
  Description of Artificial Sequence: Synthetic oligonucleotide
  Sense strand starting at position 1104 of SEQ ID NO: 588583
gaccuuaaaucggucaaac

SEQ ID NO: 875175 - RNA, 19 nt, Artificial Sequence
  Description of Artificial Sequence: Synthetic oligonucleotide
  Antisense strand to SEQ ID NO: 875174
guuugaccgauuuaagguc

SEQ ID NO: 875176 - RNA, 19 nt, Artificial Sequence
  Description of Artificial Sequence: Synthetic oligonucleotide
  Sense strand starting at position 1106 of SEQ ID NO: 588583
ccuuaaaucggucaaacuc

SEQ ID NO: 875177 - RNA, 19 nt, Artificial Sequence
  Description of Artificial Sequence: Synthetic oligonucleotide
  Antisense strand to SEQ ID NO: 875176
gaguuugaccgauuuaagg

SEQ ID NO: 875178 - RNA, 19 nt, Artificial Sequence
  Description of Artificial Sequence: Synthetic oligonucleotide
  Sense strand starting at position 1591 of SEQ ID NO: 588583
cccagaggucccugaguaa

SEQ ID NO: 875179 - RNA, 19 nt, Artificial Sequence
  Description of Artificial Sequence: Synthetic oligonucleotide
  Antisense strand to SEQ ID NO: 875178
uuacucagggaccucuggg

SEQ ID NO: 875180 - RNA, 19 nt, Artificial Sequence
  Description of Artificial Sequence: Synthetic oligonucleotide
  Sense strand starting at position 2047 of SEQ ID NO: 588583
ggaauucgcagccagaaau

SEQ ID NO: 875181 - RNA, 19 nt, Artificial Sequence
  Description of Artificial Sequence: Synthetic oligonucleotide
  Antisense strand to SEQ ID NO: 875180
auuucuggcugcgaauucc

SEQ ID NO: 875182 - RNA, 19 nt, Artificial Sequence
  Description of Artificial Sequence: Synthetic oligonucleotide
  Sense strand starting at position 2057 of SEQ ID NO: 588583
gccagaaaucgggaagcca

SEQ ID NO: 875183 - RNA, 19 nt, Artificial Sequence
  Description of Artificial Sequence: Synthetic oligonucleotide
  Antisense strand to SEQ ID NO: 875182
uggcuucccgauuucuggc

SEQ ID NO: 875184 - RNA, 19 nt, Artificial Sequence
  Description of Artificial Sequence: Synthetic oligonucleotide
  Sense strand starting at position 2216 of SEQ ID NO: 588583
gaacucugguagucuaaag

SEQ ID NO: 875185 - RNA, 19 nt, Artificial Sequence
  Description of Artificial Sequence: Synthetic oligonucleotide
  Antisense strand to SEQ ID NO: 875184
cuuuagacuaccagaguuc

SEQ ID NO: 875186 - RNA, 19 nt, Artificial Sequence
  Description of Artificial Sequence: Synthetic oligonucleotide
  Sense strand starting at position 2223 of SEQ ID NO: 588583
gguagucuaaaggauuguu

SEQ ID NO: 875187 - RNA, 19 nt, Artificial Sequence
  Description of Artificial Sequence: Synthetic oligonucleotide
  Antisense strand to SEQ ID NO: 875186
aacaauccuuuagacuacc

SEQ ID NO: 875188 - RNA, 19 nt, Artificial Sequence
  Description of Artificial Sequence: Synthetic oligonucleotide
  Sense strand starting at position 2415 of SEQ ID NO: 588583
uaagucuucgaguggagaa

SEQ ID NO: 875189 - RNA, 19 nt, Artificial Sequence
  Description of Artificial Sequence: Synthetic oligonucleotide
  Antisense strand to SEQ ID NO: 875188
uucuccacucgaagacuua

SEQ ID NO: 875190 - RNA, 19 nt, Artificial Sequence
  Description of Artificial Sequence: Synthetic oligonucleotide
  Sense strand starting at position 2416 of SEQ ID NO: 588583
aagucuucgaguggagaag

SEQ ID NO: 875191 - RNA, 19 nt, Artificial Sequence
  Description of Artificial Sequence: Synthetic oligonucleotide
  Antisense strand to SEQ ID NO: 875190
cuucuccacucgaagacuu

SEQ ID NO: 875192 - RNA, 19 nt, Artificial Sequence
  Description of Artificial Sequence: Synthetic oligonucleotide
  Sense strand starting at position 2499 of SEQ ID NO: 588583
gaaauagaaccgugaucaa

SEQ ID NO: 875193 - RNA, 19 nt, Artificial Sequence
  Description of Artificial Sequence: Synthetic oligonucleotide
  Antisense strand to SEQ ID NO: 875192
uugaucacgguucuauuuc

SEQ ID NO: 875194 - RNA, 19 nt, Artificial Sequence
  Description of Artificial Sequence: Synthetic oligonucleotide
  Sense strand starting at position 2502 of SEQ ID NO: 588583
auagaaccgugaucaagau

SEQ ID NO: 875195 - RNA, 19 nt, Artificial Sequence
  Description of Artificial Sequence: Synthetic oligonucleotide
  Antisense strand to SEQ ID NO: 875194
aucuugaucacgguucuau

SEQ ID NO: 875196 - RNA, 19 nt, Artificial Sequence
  Description of Artificial Sequence: Synthetic oligonucleotide
  Sense strand starting at position 2546 of SEQ ID NO: 588583
uuacguucuagugaaggaa

SEQ ID NO: 875197 - RNA, 19 nt, Artificial Sequence
  Description of Artificial Sequence: Synthetic oligonucleotide
  Antisense strand to SEQ ID NO: 875196
uuccuucacuagaacguaa

SEQ ID NO: 875198 - RNA, 19 nt, Artificial Sequence
  Description of Artificial Sequence: Synthetic oligonucleotide
  Sense strand starting at position 2549 of SEQ ID NO: 588583
cguucuagugaaggaaaua

SEQ ID NO: 875199 - RNA, 19 nt, Artificial Sequence
  Description of Artificial Sequence: Synthetic oligonucleotide
  Antisense strand to SEQ ID NO: 875198
uauuuccuucacuagaacg

SEQ ID NO: 875200 - RNA, 19 nt, Artificial Sequence
  Description of Artificial Sequence: Synthetic oligonucleotide
  Sense strand starting at position 2599 of SEQ ID NO: 588583
agcauuuaguaggaggaaa

SEQ ID NO: 875201 - RNA, 19 nt, Artificial Sequence
  Description of Artificial Sequence: Synthetic oligonucleotide
  Antisense strand to SEQ ID NO: 875200
uuuccuccuacuaaaugcu

SEQ ID NO: 875202 - RNA, 19 nt, Artificial Sequence
  Description of Artificial Sequence: Synthetic oligonucleotide
  Sense strand starting at position 2679 of SEQ ID NO: 588583
ucgagaggaugcuuaaaga

SEQ ID NO: 875203 - RNA, 19 nt, Artificial Sequence
  Description of Artificial Sequence: Synthetic oligonucleotide
  Antisense strand to SEQ ID NO: 875202
ucuuuaagcauccucucga

SEQ ID NO: 875204 - RNA, 19 nt, Artificial Sequence
  Description of Artificial Sequence: Synthetic oligonucleotide
  Sense strand starting at position 2889 of SEQ ID NO: 588583
ugucaucuccuuuagagag

SEQ ID NO: 875205 - RNA, 19 nt, Artificial Sequence
  Description of Artificial Sequence: Synthetic oligonucleotide
  Antisense strand to SEQ ID NO: 875204
cucucuaaaggagaugaca

SEQ ID NO: 875206 - RNA, 19 nt, Artificial Sequence
  Description of Artificial Sequence: Synthetic oligonucleotide
  Sense strand starting at position 2933 of SEQ ID NO: 588583
cgucgagucccugucacau

SEQ ID NO: 875207 - RNA, 19 nt, Artificial Sequence
  Description of Artificial Sequence: Synthetic oligonucleotide
  Antisense strand to SEQ ID NO: 875206
augugacagggacucgacg

SEQ ID NO: 875208 - RNA, 19 nt, Artificial Sequence
  Description of Artificial Sequence: Synthetic oligonucleotide
  Sense strand starting at position 3228 of SEQ ID NO: 588583
accuuucucccaggaggua

SEQ ID NO: 875209 - RNA, 19 nt, Artificial Sequence
  Description of Artificial Sequence: Synthetic oligonucleotide
  Antisense strand to SEQ ID NO: 875208
uaccuccugggagaaaggu

SEQ ID NO: 875210 - RNA, 19 nt, Artificial Sequence
  Description of Artificial Sequence: Synthetic oligonucleotide
  Sense strand starting at position 3229 of SEQ ID NO: 588583
ccuuucucccaggagguaa

SEQ ID NO: 875211 - RNA, 19 nt, Artificial Sequence
  Description of Artificial Sequence: Synthetic oligonucleotide
  Antisense strand to SEQ ID NO: 875210
uuaccuccugggagaaagg

SEQ ID NO: 875212 - RNA, 19 nt, Artificial Sequence
  Description of Artificial Sequence: Synthetic oligonucleotide
  Sense strand starting at position 3284 of SEQ ID NO: 588583
guacauagcccagaguuua

SEQ ID NO: 875213 - RNA, 19 nt, Artificial Sequence
  Description of Artificial Sequence: Synthetic oligonucleotide
  Antisense strand to SEQ ID NO: 875212
uaaacucugggcuauguac

SEQ ID NO: 875214 - RNA, 19 nt, Artificial Sequence
  Description of Artificial Sequence: Synthetic oligonucleotide
  Sense strand starting at position 3317 of SEQ ID NO: 588583
cuugacuuacauugcugaa

SEQ ID NO: 875215 - RNA, 19 nt, Artificial Sequence
  Description of Artificial Sequence: Synthetic oligonucleotide
  Antisense strand to SEQ ID NO: 875214
uucagcaauguaagucaag

SEQ ID NO: 875216 - RNA, 19 nt, Artificial Sequence
  Description of Artificial Sequence: Synthetic oligonucleotide
  Sense strand starting at position 3319 of SEQ ID NO: 588583
ugacuuacauugcugaaca

SEQ ID NO: 875217 - RNA, 19 nt, Artificial Sequence
  Description of Artificial Sequence: Synthetic oligonucleotide
  Antisense strand to SEQ ID NO: 875216
uguucagcaauguaaguca

SEQ ID NO: 875218 - RNA, 19 nt, Artificial Sequence
  Description of Artificial Sequence: Synthetic oligonucleotide
  Sense strand starting at position 3506 of SEQ ID NO: 588583
gagguacuucuggguauag

SEQ ID NO: 875219 - RNA, 19 nt, Artificial Sequence
  Description of Artificial Sequence: Synthetic oligonucleotide
  Antisense strand to SEQ ID NO: 875218
cuauacccagaaguaccuc

SEQ ID NO: 875220 - RNA, 19 nt, Artificial Sequence
  Description of Artificial Sequence: Synthetic oligonucleotide
  Sense strand starting at position 3508 of SEQ ID NO: 588583
gguacuucuggguauagga

SEQ ID NO: 875221 - RNA, 19 nt, Artificial Sequence
  Description of Artificial Sequence: Synthetic oligonucleotide
  Antisense strand to SEQ ID NO: 875220
uccuauacccagaaguacc

SEQ ID NO: 875222 - RNA, 19 nt, Artificial Sequence
  Description of Artificial Sequence: Synthetic oligonucleotide
  Sense strand starting at position 62 of SEQ ID NO: 588584
cuugcaauagacggguauu

SEQ ID NO: 875223 - RNA, 19 nt, Artificial Sequence
  Description of Artificial Sequence: Synthetic oligonucleotide
  Antisense strand to SEQ ID NO: 875222
aauacccgucuauugcaag

SEQ ID NO: 875224 - RNA, 19 nt, Artificial Sequence
  Description of Artificial Sequence: Synthetic oligonucleotide
  Sense strand starting at position 72 of SEQ ID NO: 588584
acggguauuucuuaaagaa

SEQ ID NO: 875225 - RNA, 19 nt, Artificial Sequence
  Description of Artificial Sequence: Synthetic oligonucleotide
  Antisense strand to SEQ ID NO: 875224
uucuuuaagaaauacccgu

SEQ ID NO: 875226 - RNA, 19 nt, Artificial Sequence
  Description of Artificial Sequence: Synthetic oligonucleotide
  Sense strand starting at position 167 of SEQ ID NO: 588584
agaagacacuuggaacaua

SEQ ID NO: 875227 - RNA, 19 nt, Artificial Sequence
  Description of Artificial Sequence: Synthetic oligonucleotide
  Antisense strand to SEQ ID NO: 875226
uauguuccaagugucuucu

SEQ ID NO: 875228 - RNA, 19 nt, Artificial Sequence
  Description of Artificial Sequence: Synthetic oligonucleotide
  Sense strand starting at position 558 of SEQ ID NO: 588584
acuguaacugucuauuaca

SEQ ID NO: 875229 - RNA, 19 nt, Artificial Sequence
  Description of Artificial Sequence: Synthetic oligonucleotide
  Antisense strand to SEQ ID NO: 875228
uguaauagacaguuacagu

SEQ ID NO: 875230 - RNA, 19 nt, Artificial Sequence
  Description of Artificial Sequence: Synthetic oligonucleotide
  Sense strand starting at position 619 of SEQ ID NO: 588584
ugguucugccauuaacuau

SEQ ID NO: 875231 - RNA, 19 nt, Artificial Sequence
  Description of Artificial Sequence: Synthetic oligonucleotide
  Antisense strand to SEQ ID NO: 875230
auaguuaauggcagaacca

SEQ ID NO: 875232 - RNA, 19 nt, Artificial Sequence
  Description of Artificial Sequence: Synthetic oligonucleotide
  Sense strand starting at position 648 of SEQ ID NO: 588584
gggcaaauuucucacaaac

SEQ ID NO: 875233 - RNA, 19 nt, Artificial Sequence
  Description of Artificial Sequence: Synthetic oligonucleotide
  Antisense strand to SEQ ID NO: 875232
guuugugagaaauuugccc

SEQ ID NO: 875234 - RNA, 19 nt, Artificial Sequence
  Description of Artificial Sequence: Synthetic oligonucleotide
  Sense strand starting at position 1028 of SEQ ID NO: 588584
gcuggugugacugacaauu

SEQ ID NO: 875235 - RNA, 19 nt, Artificial Sequence
  Description of Artificial Sequence: Synthetic oligonucleotide
  Antisense strand to SEQ ID NO: 875234
aauugucagucacaccagc

SEQ ID NO: 875236 - RNA, 19 nt, Artificial Sequence
  Description of Artificial Sequence: Synthetic oligonucleotide
  Sense strand starting at position 1208 of SEQ ID NO: 588584
cuguucuaagugcaucaaa

SEQ ID NO: 875237 - RNA, 19 nt, Artificial Sequence
  Description of Artificial Sequence: Synthetic oligonucleotide
  Antisense strand to SEQ ID NO: 875236
uuugaugcacuuagaacag

SEQ ID NO: 875238 - RNA, 19 nt, Artificial Sequence
  Description of Artificial Sequence: Synthetic oligonucleotide
  Sense strand starting at position 1342 of SEQ ID NO: 588584
gucucauuccuggaugaca

SEQ ID NO: 875239 - RNA, 19 nt, Artificial Sequence
  Description of Artificial Sequence: Synthetic oligonucleotide
  Antisense strand to SEQ ID NO: 875238
ugucauccaggaaugagac

SEQ ID NO: 875240 - RNA, 19 nt, Artificial Sequence
  Description of Artificial Sequence: Synthetic oligonucleotide
  Sense strand starting at position 1344 of SEQ ID NO: 588584
cucauuccuggaugacaca

SEQ ID NO: 875241 - RNA, 19 nt, Artificial Sequence
  Description of Artificial Sequence: Synthetic oligonucleotide
  Antisense strand to SEQ ID NO: 875240
ugugucauccaggaaugag

SEQ ID NO: 875242 - RNA, 19 nt, Artificial Sequence
  Description of Artificial Sequence: Synthetic oligonucleotide
  Sense strand starting at position 1609 of SEQ ID NO: 588584
ggguuauaacaccaucucu

SEQ ID NO: 875243 - RNA, 19 nt, Artificial Sequence
  Description of Artificial Sequence: Synthetic oligonucleotide
  Antisense strand to SEQ ID NO: 875242
agagaugguguuauaaccc

SEQ ID NO: 875244 - RNA, 19 nt, Artificial Sequence
  Description of Artificial Sequence: Synthetic oligonucleotide
  Sense strand starting at position 1668 of SEQ ID NO: 588584
ggcaccauuuccucauguu

SEQ ID NO: 875245 - RNA, 19 nt, Artificial Sequence
  Description of Artificial Sequence: Synthetic oligonucleotide
  Antisense strand to SEQ ID NO: 875244
aacaugaggaaauggugcc

SEQ ID NO: 875246 - RNA, 19 nt, Artificial Sequence
  Description of Artificial Sequence: Synthetic oligonucleotide
  Sense strand starting at position 2094 of SEQ ID NO: 588584
ccuauaaacugagcuaagu

SEQ ID NO: 875247 - RNA, 19 nt, Artificial Sequence
  Description of Artificial Sequence: Synthetic oligonucleotide
  Antisense strand to SEQ ID NO: 875246
acuuagcucaguuuauagg

SEQ ID NO: 875248 - RNA, 19 nt, Artificial Sequence
  Description of Artificial Sequence: Synthetic oligonucleotide
  Sense strand starting at position 2105 of SEQ ID NO: 588584
agcuaaguacuagacaauu

SEQ ID NO: 875249 - RNA, 19 nt, Artificial Sequence
  Description of Artificial Sequence: Synthetic oligonucleotide
  Antisense strand to SEQ ID NO: 875248
aauugucuaguacuuagcu

SEQ ID NO: 875250 - RNA, 19 nt, Artificial Sequence
  Description of Artificial Sequence: Synthetic oligonucleotide
  Sense strand starting at position 2286 of SEQ ID NO: 588584
gcaaauaugcagcagacua

SEQ ID NO: 875251 - RNA, 19 nt, Artificial Sequence
  Description of Artificial Sequence: Synthetic oligonucleotide
  Antisense strand to SEQ ID NO: 875250
uagucugcugcauauuugc

SEQ ID NO: 875252 - RNA, 19 nt, Artificial Sequence
  Description of Artificial Sequence: Synthetic oligonucleotide
  Sense strand starting at position 2470 of SEQ ID NO: 588584
uuauuugguuccuuaugca

SEQ ID NO: 875253 - RNA, 19 nt, Artificial Sequence
  Description of Artificial Sequence: Synthetic oligonucleotide
  Antisense strand to SEQ ID NO: 875252
ugcauaaggaaccaaauaa

SEQ ID NO: 875254 - RNA, 19 nt, Artificial Sequence
  Description of Artificial Sequence: Synthetic oligonucleotide
  Sense strand starting at position 2509 of SEQ ID NO: 588584
ccuuuaaugugagucuaaa

SEQ ID NO: 875255 - RNA, 19 nt, Artificial Sequence
  Description of Artificial Sequence: Synthetic oligonucleotide
  Antisense strand to SEQ ID NO: 875254
uuuagacucacauuaaagg

SEQ ID NO: 875256 - RNA, 19 nt, Artificial Sequence
  Description of Artificial Sequence: Synthetic oligonucleotide
  Sense strand starting at position 2517 of SEQ ID NO: 588584
gugagucuaaagcaugauu

SEQ ID NO: 875257 - RNA, 19 nt, Artificial Sequence
  Description of Artificial Sequence: Synthetic oligonucleotide
  Antisense strand to SEQ ID NO: 875256
aaucaugcuuuagacucac

SEQ ID NO: 875258 - RNA, 19 nt, Artificial Sequence
  Description of Artificial Sequence: Synthetic oligonucleotide
  Sense strand starting at position 2519 of SEQ ID NO: 588584
gagucuaaagcaugauuga

SEQ ID NO: 875259 - RNA, 19 nt, Artificial Sequence
  Description of Artificial Sequence: Synthetic oligonucleotide
  Antisense strand to SEQ ID NO: 875258
ucaaucaugcuuuagacuc

SEQ ID NO: 875260 - RNA, 19 nt, Artificial Sequence
  Description of Artificial Sequence: Synthetic oligonucleotide
  Sense strand starting at position 2542 of SEQ ID NO: 588584
ugaggucuuccaugguaua

SEQ ID NO: 875261 - RNA, 19 nt, Artificial Sequence
  Description of Artificial Sequence: Synthetic oligonucleotide
  Antisense strand to SEQ ID NO: 875260
uauaccauggaagaccuca

SEQ ID NO: 875262 - RNA, 19 nt, Artificial Sequence
  Description of Artificial Sequence: Synthetic oligonucleotide
  Sense strand starting at position 2543 of SEQ ID NO: 588584
gaggucuuccaugguauag

SEQ ID NO: 875263 - RNA, 19 nt, Artificial Sequence
  Description of Artificial Sequence: Synthetic oligonucleotide
  Antisense strand to SEQ ID NO: 875262
cuauaccauggaagaccuc

SEQ ID NO: 875264 - RNA, 19 nt, Artificial Sequence
  Description of Artificial Sequence: Synthetic oligonucleotide
  Sense strand starting at position 2561 of SEQ ID NO: 588584
gaacuagagcucuggaaca

SEQ ID NO: 875265 - RNA, 19 nt, Artificial Sequence
  Description of Artificial Sequence: Synthetic oligonucleotide
  Antisense strand to SEQ ID NO: 875264
uguuccagagcucuaguuc

SEQ ID NO: 875266 - RNA, 19 nt, Artificial Sequence
  Description of Artificial Sequence: Synthetic oligonucleotide
  Sense strand starting at position 2584 of SEQ ID NO: 588584
acccucuccuguguuaaca

SEQ ID NO: 875267 - RNA, 19 nt, Artificial Sequence
  Description of Artificial Sequence: Synthetic oligonucleotide
  Antisense strand to SEQ ID NO: 875266
uguuaacacaggagagggu

SEQ ID NO: 875268 - RNA, 19 nt, Artificial Sequence
  Description of Artificial Sequence: Synthetic oligonucleotide
  Sense strand starting at position 2607 of SEQ ID NO: 588584
uuacgcauucuacaucuga

SEQ ID NO: 875269 - RNA, 19 nt, Artificial Sequence
  Description of Artificial Sequence: Synthetic oligonucleotide
  Antisense strand to SEQ ID NO: 875268
ucagauguagaaugcguaa

SEQ ID NO: 875270 - RNA, 19 nt, Artificial Sequence
  Description of Artificial Sequence: Synthetic oligonucleotide
  Sense strand starting at position 2620 of SEQ ID NO: 588584
aucugaggucuuugaccau

SEQ ID NO: 875271 - RNA, 19 nt, Artificial Sequence
  Description of Artificial Sequence: Synthetic oligonucleotide
  Antisense strand to SEQ ID NO: 875270
auggucaaagaccucagau

SEQ ID NO: 875272 - RNA, 19 nt, Artificial Sequence
  Description of Artificial Sequence: Synthetic oligonucleotide
  Sense strand starting at position 2623 of SEQ ID NO: 588584
ugaggucuuugaccaugga

SEQ ID NO: 875273 - RNA, 19 nt, Artificial Sequence
  Description of Artificial Sequence: Synthetic oligonucleotide
  Antisense strand to SEQ ID NO: 875272
uccauggucaaagaccuca

SEQ ID NO: 875274 - RNA, 19 nt, Artificial Sequence
  Description of Artificial Sequence: Synthetic oligonucleotide
  Sense strand starting at position 2626 of SEQ ID NO: 588584
ggucuuugaccauggaaag

SEQ ID NO: 875275 - RNA, 19 nt, Artificial Sequence
  Description of Artificial Sequence: Synthetic oligonucleotide
  Antisense strand to SEQ ID NO: 875274
cuuuccauggucaaagacc

SEQ ID NO: 875276 - RNA, 19 nt, Artificial Sequence
  Description of Artificial Sequence: Synthetic oligonucleotide
  Sense strand starting at position 2627 of SEQ ID NO: 588584
gucuuugaccauggaaaga

SEQ ID NO: 875277 - RNA, 19 nt, Artificial Sequence
  Description of Artificial Sequence: Synthetic oligonucleotide
  Antisense strand to SEQ ID NO: 875276
ucuuuccauggucaaagac

SEQ ID NO: 875278 - RNA, 19 nt, Artificial Sequence
  Description of Artificial Sequence: Synthetic oligonucleotide
  Sense strand starting at position 2728 of SEQ ID NO: 588584
guugcuauggcucagguaa

SEQ ID NO: 875279 - RNA, 19 nt, Artificial Sequence
  Description of Artificial Sequence: Synthetic oligonucleotide
  Antisense strand to SEQ ID NO: 875278
uuaccugagccauagcaac

SEQ ID NO: 875280 - RNA, 19 nt, Artificial Sequence
  Description of Artificial Sequence: Synthetic oligonucleotide
  Sense strand starting at position 2783 of SEQ ID NO: 588584
guuuccuuugaguaacagu

SEQ ID NO: 875281 - RNA, 19 nt, Artificial Sequence
  Description of Artificial Sequence: Synthetic oligonucleotide
  Antisense strand to SEQ ID NO: 875280
acuguuacucaaaggaaac

SEQ ID NO: 875282 - RNA, 19 nt, Artificial Sequence
  Description of Artificial Sequence: Synthetic oligonucleotide
  Sense strand starting at position 2794 of SEQ ID NO: 588584
guaacagucccacaccuua

SEQ ID NO: 875283 - RNA, 19 nt, Artificial Sequence
  Description of Artificial Sequence: Synthetic oligonucleotide
  Antisense strand to SEQ ID NO: 875282
uaaggugugggacuguuac

SEQ ID NO: 875284 - RNA, 19 nt, Artificial Sequence
  Description of Artificial Sequence: Synthetic oligonucleotide
  Sense strand starting at position 2871 of SEQ ID NO: 588584
gggcuuugccgucaggaag

SEQ ID NO: 875285 - RNA, 19 nt, Artificial Sequence
  Description of Artificial Sequence: Synthetic oligonucleotide
  Antisense strand to SEQ ID NO: 875284
cuuccugacggcaaagccc

SEQ ID NO: 875286 - RNA, 19 nt, Artificial Sequence
  Description of Artificial Sequence: Synthetic oligonucleotide
  Sense strand starting at position 2872 of SEQ ID NO: 588584
ggcuuugccgucaggaaga

SEQ ID NO: 875287 - RNA, 19 nt, Artificial Sequence
  Description of Artificial Sequence: Synthetic oligonucleotide
  Antisense strand to SEQ ID NO: 875286
ucuuccugacggcaaagcc

SEQ ID NO: 875288 - RNA, 19 nt, Artificial Sequence
  Description of Artificial Sequence: Synthetic oligonucleotide
  Sense strand starting at position 3008 of SEQ ID NO: 588584
uaaugagguuaugcaagua

SEQ ID NO: 875289 - RNA, 19 nt, Artificial Sequence
  Description of Artificial Sequence: Synthetic oligonucleotide
  Antisense strand to SEQ ID NO: 875288
uacuugcauaaccucauua

SEQ ID NO: 875290 - RNA, 19 nt, Artificial Sequence
  Description of Artificial Sequence: Synthetic oligonucleotide
  Sense strand starting at position 3457 of SEQ ID NO: 588584
agaaaccuuguauguuauu

SEQ ID NO: 875291 - RNA, 19 nt, Artificial Sequence
  Description of Artificial Sequence: Synthetic oligonucleotide
  Antisense strand to SEQ ID NO: 875290
aauaacauacaagguuucu

SEQ ID NO: 875292 - RNA, 19 nt, Artificial Sequence
  Description of Artificial Sequence: Synthetic oligonucleotide
  Sense strand starting at position 3462 of SEQ ID NO: 588584
ccuuguauguuauuaauga

SEQ ID NO: 875293 - RNA, 19 nt, Artificial Sequence
  Description of Artificial Sequence: Synthetic oligonucleotide
  Antisense strand to SEQ ID NO: 875292
ucauuaauaacauacaagg

SEQ ID NO: 875294 - RNA, 19 nt, Artificial Sequence
  Description of Artificial Sequence: Synthetic oligonucleotide
  Sense strand starting at position 3500 of SEQ ID NO: 588584
ucagucagaccuggaugua

SEQ ID NO: 875295 - RNA, 19 nt, Artificial Sequence
  Description of Artificial Sequence: Synthetic oligonucleotide
  Antisense strand to SEQ ID NO: 875294
uacauccaggucugacuga

SEQ ID NO: 875296 - RNA, 19 nt, Artificial Sequence
  Description of Artificial Sequence: Synthetic oligonucleotide
  Sense strand starting at position 3503 of SEQ ID NO: 588584
gucagaccuggauguaaau

SEQ ID NO: 875297 - RNA, 19 nt, Artificial Sequence
  Description of Artificial Sequence: Synthetic oligonucleotide
  Antisense strand to SEQ ID NO: 875296
auuuacauccaggucugac

SEQ ID NO: 875298 - RNA, 19 nt, Artificial Sequence
  Description of Artificial Sequence: Synthetic oligonucleotide
  Sense strand starting at position 3632 of SEQ ID NO: 588584
aacauagugccaggaauau

SEQ ID NO: 875299 - RNA, 19 nt, Artificial Sequence
  Description of Artificial Sequence: Synthetic oligonucleotide
  Antisense strand to SEQ ID NO: 875298
auauuccuggcacuauguu

SEQ ID NO: 875300 - RNA, 19 nt, Artificial Sequence
  Description of Artificial Sequence: Synthetic oligonucleotide
  Sense strand starting at position 3977 of SEQ ID NO: 588584
cggccuaaugauggauauu

SEQ ID NO: 875301 - RNA, 19 nt, Artificial Sequence
  Description of Artificial Sequence: Synthetic oligonucleotide
  Antisense strand to SEQ ID NO: 875300
aauauccaucauuaggccg

SEQ ID NO: 875302 - RNA, 19 nt, Artificial Sequence
  Description of Artificial Sequence: Synthetic oligonucleotide
  Sense strand starting at position 3 of SEQ ID NO: 588585
gcagacauuuguugaauga

SEQ ID NO: 875303 - RNA, 19 nt, Artificial Sequence
  Description of Artificial Sequence: Synthetic oligonucleotide
  Antisense strand to SEQ ID NO: 875302
ucauucaacaaaugucugc

SEQ ID NO: 875304 - RNA, 19 nt, Artificial Sequence
  Description of Artificial Sequence: Synthetic oligonucleotide
  Sense strand starting at position 16 of SEQ ID NO: 588585
gaaugaauguuaucacgga

SEQ ID NO: 875305 - RNA, 19 nt, Artificial Sequence
  Description of Artificial Sequence: Synthetic oligonucleotide
  Antisense strand to SEQ ID NO: 875304
uccgugauaacauucauuc

SEQ ID NO: 875306 - RNA, 19 nt, Artificial Sequence
  Description of Artificial Sequence: Synthetic oligonucleotide
  Sense strand starting at position 20 of SEQ ID NO: 588585
gaauguuaucacggacagg

SEQ ID NO: 875307 - RNA, 19 nt, Artificial Sequence
  Description of Artificial Sequence: Synthetic oligonucleotide
  Antisense strand to SEQ ID NO: 875306
ccuguccgugauaacauuc

SEQ ID NO: 875308 - RNA, 19 nt, Artificial Sequence
  Description of Artificial Sequence: Synthetic oligonucleotide
  Sense strand starting at position 35 of SEQ ID NO: 588585
cagggaauacgguacuagu

SEQ ID NO: 875309 - RNA, 19 nt, Artificial Sequence
  Description of Artificial Sequence: Synthetic oligonucleotide
  Antisense strand to SEQ ID NO: 875308
acuaguaccguauucccug

SEQ ID NO: 875310 - RNA, 19 nt, Artificial Sequence
  Description of Artificial Sequence: Synthetic oligonucleotide
  Sense strand starting at position 45 of SEQ ID NO: 588585
gguacuagugcuuguugaa

SEQ ID NO: 875311 - RNA, 19 nt, Artificial Sequence
  Description of Artificial Sequence: Synthetic oligonucleotide
  Antisense strand to SEQ ID NO: 875310
uucaacaagcacuaguacc

SEQ ID NO: 875312 - RNA, 19 nt, Artificial Sequence
  Description of Artificial Sequence: Synthetic oligonucleotide
  Sense strand starting at position 60 of SEQ ID NO: 588585
ugaacugcacgccagauau

SEQ ID NO: 875313 - RNA, 19 nt, Artificial Sequence
  Description of Artificial Sequence: Synthetic oligonucleotide
  Antisense strand to SEQ ID NO: 875312
auaucuggcgugcaguuca

SEQ ID NO: 875314 - RNA, 19 nt, Artificial Sequence
  Description of Artificial Sequence: Synthetic oligonucleotide
  Sense strand starting at position 66 of SEQ ID NO: 588585
gcacgccagauaugugaaa

SEQ ID NO: 875315 - RNA, 19 nt, Artificial Sequence
  Description of Artificial Sequence: Synthetic oligonucleotide
  Antisense strand to SEQ ID NO: 875314
uuucacauaucuggcgugc

SEQ ID NO: 875316 - RNA, 19 nt, Artificial Sequence
  Description of Artificial Sequence: Synthetic oligonucleotide
  Sense strand starting at position 171 of SEQ ID NO: 588585
agcaauugcucuuccaagu

SEQ ID NO: 875317 - RNA, 19 nt, Artificial Sequence
  Description of Artificial Sequence: Synthetic oligonucleotide
  Antisense strand to SEQ ID NO: 875316
acuuggaagagcaauugcu

SEQ ID NO: 875318 - RNA, 19 nt, Artificial Sequence
  Description of Artificial Sequence: Synthetic oligonucleotide
  Sense strand starting at position 192 of SEQ ID NO: 588585
gcaugauguucccuaccuu

SEQ ID NO: 875319 - RNA, 19 nt, Artificial Sequence
  Description of Artificial Sequence: Synthetic oligonucleotide
  Antisense strand to SEQ ID NO: 875318
aagguagggaacaucaugc

SEQ ID NO: 875320 - RNA, 19 nt, Artificial Sequence
  Description of Artificial Sequence: Synthetic oligonucleotide
  Sense strand starting at position 319 of SEQ ID NO: 588585
gaguccagcccuugaucuu

SEQ ID NO: 875321 - RNA, 19 nt, Artificial Sequence
  Description of Artificial Sequence: Synthetic oligonucleotide
  Antisense strand to SEQ ID NO: 875320
aagaucaagggcuggacuc

SEQ ID NO: 875322 - RNA, 19 nt, Artificial Sequence
  Description of Artificial Sequence: Synthetic oligonucleotide
  Sense strand starting at position 619 of SEQ ID NO: 588585
uccauuauaucagugagac

SEQ ID NO: 875323 - RNA, 19 nt, Artificial Sequence
  Description of Artificial Sequence: Synthetic oligonucleotide
  Antisense strand to SEQ ID NO: 875322
gucucacugauauaaugga

SEQ ID NO: 875324 - RNA, 19 nt, Artificial Sequence
  Description of Artificial Sequence: Synthetic oligonucleotide
  Sense strand starting at position 620 of SEQ ID NO: 588585
ccauuauaucagugagacc

SEQ ID NO: 875325 - RNA, 19 nt, Artificial Sequence
  Description of Artificial Sequence: Synthetic oligonucleotide
  Antisense strand to SEQ ID NO: 875324
ggucucacugauauaaugg

SEQ ID NO: 875326 - RNA, 19 nt, Artificial Sequence
  Description of Artificial Sequence: Synthetic oligonucleotide
  Sense strand starting at position 870 of SEQ ID NO: 588585
gaugaaaucuggcccagca

SEQ ID NO: 875327 - RNA, 19 nt, Artificial Sequence
  Description of Artificial Sequence: Synthetic oligonucleotide
  Antisense strand to SEQ ID NO: 875326
ugcugggccagauuucauc

SEQ ID NO: 875328 - RNA, 19 nt, Artificial Sequence
  Description of Artificial Sequence: Synthetic oligonucleotide
  Sense strand starting at position 872 of SEQ ID NO: 588585
ugaaaucuggcccagcaau

SEQ ID NO: 875329 - RNA, 19 nt, Artificial Sequence
  Description of Artificial Sequence: Synthetic oligonucleotide
  Antisense strand to SEQ ID NO: 875328
auugcugggccagauuuca

SEQ ID NO: 875330 - RNA, 19 nt, Artificial Sequence
  Description of Artificial Sequence: Synthetic oligonucleotide
  Sense strand starting at position 1057 of SEQ ID NO: 588585
gcaauuuccuuggaauaca

SEQ ID NO: 875331 - RNA, 19 nt, Artificial Sequence
  Description of Artificial Sequence: Synthetic oligonucleotide
  Antisense strand to SEQ ID NO: 875330
uguauuccaaggaaauugc

SEQ ID NO: 875332 - RNA, 19 nt, Artificial Sequence
  Description of Artificial Sequence: Synthetic oligonucleotide
  Sense strand starting at position 1105 of SEQ ID NO: 588585
acucucuggcccugauauu

SEQ ID NO: 875333 - RNA, 19 nt, Artificial Sequence
  Description of Artificial Sequence: Synthetic oligonucleotide
  Antisense strand to SEQ ID NO: 875332
aauaucagggccagagagu

SEQ ID NO: 875334 - RNA, 19 nt, Artificial Sequence
  Description of Artificial Sequence: Synthetic oligonucleotide
  Sense strand starting at position 1106 of SEQ ID NO: 588585
cucucuggcccugauauua

SEQ ID NO: 875335 - RNA, 19 nt, Artificial Sequence
  Description of Artificial Sequence: Synthetic oligonucleotide
  Antisense strand to SEQ ID NO: 875334
uaauaucagggccagagag

SEQ ID NO: 875336 - RNA, 19 nt, Artificial Sequence
  Description of Artificial Sequence: Synthetic oligonucleotide
  Sense strand starting at position 1193 of SEQ ID NO: 588585
caggaacgucuguaauguu

SEQ ID NO: 875337 - RNA, 19 nt, Artificial Sequence
  Description of Artificial Sequence: Synthetic oligonucleotide
  Antisense strand to SEQ ID NO: 875336
aacauuacagacguuccug

SEQ ID NO: 875338 - RNA, 19 nt, Artificial Sequence
  Description of Artificial Sequence: Synthetic oligonucleotide
  Sense strand starting at position 1215 of SEQ ID NO: 588585
uguuaucacgccuaagaaa

SEQ ID NO: 875339 - RNA, 19 nt, Artificial Sequence
  Description of Artificial Sequence: Synthetic oligonucleotide
  Antisense strand to SEQ ID NO: 875338
uuucuuaggcgugauaaca

SEQ ID NO: 875340 - RNA, 19 nt, Artificial Sequence
  Description of Artificial Sequence: Synthetic oligonucleotide
  Sense strand starting at position 1275 of SEQ ID NO: 588585
acuguuucguacuccuaaa

SEQ ID NO: 875341 - RNA, 19 nt, Artificial Sequence
  Description of Artificial Sequence: Synthetic oligonucleotide
  Antisense strand to SEQ ID NO: 875340
uuuaggaguacgaaacagu

SEQ ID NO: 875342 - RNA, 19 nt, Artificial Sequence
  Description of Artificial Sequence: Synthetic oligonucleotide
  Sense strand starting at position 1389 of SEQ ID NO: 588585
guacauacagagugcucaa

SEQ ID NO: 875343 - RNA, 19 nt, Artificial Sequence
  Description of Artificial Sequence: Synthetic oligonucleotide
  Antisense strand to SEQ ID NO: 875342
uugagcacucuguauguac

SEQ ID NO: 875344 - RNA, 19 nt, Artificial Sequence
  Description of Artificial Sequence: Synthetic oligonucleotide
  Sense strand starting at position 1455 of SEQ ID NO: 588585
gaggguagauauuauacca

SEQ ID NO: 875345 - RNA, 19 nt, Artificial Sequence
  Description of Artificial Sequence: Synthetic oligonucleotide
  Antisense strand to SEQ ID NO: 875344
ugguauaauaucuacccuc

SEQ ID NO: 875346 - RNA, 19 nt, Artificial Sequence
  Description of Artificial Sequence: Synthetic oligonucleotide
  Sense strand starting at position 1532 of SEQ ID NO: 588585
gagcuuucccaaggucagu

SEQ ID NO: 875347 - RNA, 19 nt, Artificial Sequence
  Description of Artificial Sequence: Synthetic oligonucleotide
  Antisense strand to SEQ ID NO: 875346
acugaccuugggaaagcuc

SEQ ID NO: 875348 - RNA, 19 nt, Artificial Sequence
  Description of Artificial Sequence: Synthetic oligonucleotide
  Sense strand starting at position 1543 of SEQ ID NO: 588585
aggucagucaagcaaggau

SEQ ID NO: 875349 - RNA, 19 nt, Artificial Sequence
  Description of Artificial Sequence: Synthetic oligonucleotide
  Antisense strand to SEQ ID NO: 875348
auccuugcuugacugaccu

SEQ ID NO: 875350 - RNA, 19 nt, Artificial Sequence
  Description of Artificial Sequence: Synthetic oligonucleotide
  Sense strand starting at position 2428 of SEQ ID NO: 588585
ugacguccucgugcugauu

SEQ ID NO: 875351 - RNA, 19 nt, Artificial Sequence
  Description of Artificial Sequence: Synthetic oligonucleotide
  Antisense strand to SEQ ID NO: 875350
aaucagcacgaggacguca

SEQ ID NO: 875352 - RNA, 19 nt, Artificial Sequence
  Description of Artificial Sequence: Synthetic oligonucleotide
  Sense strand starting at position 2529 of SEQ ID NO: 588585
auacauuugucacacggga

SEQ ID NO: 875353 - RNA, 19 nt, Artificial Sequence
  Description of Artificial Sequence: Synthetic oligonucleotide
  Antisense strand to SEQ ID NO: 875352
ucccgugugacaaauguau

SEQ ID NO: 875354 - RNA, 19 nt, Artificial Sequence
  Description of Artificial Sequence: Synthetic oligonucleotide
  Sense strand starting at position 2553 of SEQ ID NO: 588585
cggccaugaacacgaguua

SEQ ID NO: 875355 - RNA, 19 nt, Artificial Sequence
  Description of Artificial Sequence: Synthetic oligonucleotide
  Antisense strand to SEQ ID NO: 875354
uaacucguguucauggccg

SEQ ID NO: 875356 - RNA, 19 nt, Artificial Sequence
  Description of Artificial Sequence: Synthetic oligonucleotide
  Sense strand starting at position 2647 of SEQ ID NO: 588585
cuaugcugaguuuaucaga

SEQ ID NO: 875357 - RNA, 19 nt, Artificial Sequence
  Description of Artificial Sequence: Synthetic oligonucleotide
  Antisense strand to SEQ ID NO: 875356
ucugauaaacucagcauag

SEQ ID NO: 875358 - RNA, 19 nt, Artificial Sequence
  Description of Artificial Sequence: Synthetic oligonucleotide
  Sense strand starting at position 2747 of SEQ ID NO: 588585
gcugacucauuuggaauua

SEQ ID NO: 875359 - RNA, 19 nt, Artificial Sequence
  Description of Artificial Sequence: Synthetic oligonucleotide
  Antisense strand to SEQ ID NO: 875358
uaauuccaaaugagucagc

SEQ ID NO: 875360 - RNA, 19 nt, Artificial Sequence
  Description of Artificial Sequence: Synthetic oligonucleotide
  Sense strand starting at position 2759 of SEQ ID NO: 588585
ggaauuaaugcguguguaa

SEQ ID NO: 875361 - RNA, 19 nt, Artificial Sequence
  Description of Artificial Sequence: Synthetic oligonucleotide
  Antisense strand to SEQ ID NO: 875360
uuacacacgcauuaauucc

SEQ ID NO: 875362 - RNA, 19 nt, Artificial Sequence
  Description of Artificial Sequence: Synthetic oligonucleotide
  Sense strand starting at position 2761 of SEQ ID NO: 588585
aauuaaugcguguguaaau

SEQ ID NO: 875363 - RNA, 19 nt, Artificial Sequence
  Description of Artificial Sequence: Synthetic oligonucleotide
  Antisense strand to SEQ ID NO: 875362
auuuacacacgcauuaauu

SEQ ID NO: 875364 - RNA, 19 nt, Artificial Sequence
  Description of Artificial Sequence: Synthetic oligonucleotide
  Sense strand starting at position 2792 of SEQ ID NO: 588585
gcucaaacugucgggacaa

SEQ ID NO: 875365 - RNA, 19 nt, Artificial Sequence
  Description of Artificial Sequence: Synthetic oligonucleotide
  Antisense strand to SEQ ID NO: 875364
uugucccgacaguuugagc

SEQ ID NO: 875366 - RNA, 19 nt, Artificial Sequence
  Description of Artificial Sequence: Synthetic oligonucleotide
  Sense strand starting at position 2967 of SEQ ID NO: 588585
acgauuugguggcauuuau

SEQ ID NO: 875367 - RNA, 19 nt, Artificial Sequence
  Description of Artificial Sequence: Synthetic oligonucleotide
  Antisense strand to SEQ ID NO: 875366
auaaaugccaccaaaucgu

SEQ ID NO: 875368 - RNA, 19 nt, Artificial Sequence
  Description of Artificial Sequence: Synthetic oligonucleotide
  Sense strand starting at position 3102 of SEQ ID NO: 588585
cuaucucugugaguuuacu

SEQ ID NO: 875369 - RNA, 19 nt, Artificial Sequence
  Description of Artificial Sequence: Synthetic oligonucleotide
  Antisense strand to SEQ ID NO: 875368
aguaaacucacagagauag

SEQ ID NO: 875370 - RNA, 19 nt, Artificial Sequence
  Description of Artificial Sequence: Synthetic oligonucleotide
  Sense strand starting at position 3180 of SEQ ID NO: 588585
uuugacuuagccuguauuu

SEQ ID NO: 875371 - RNA, 19 nt, Artificial Sequence
  Description of Artificial Sequence: Synthetic oligonucleotide
  Antisense strand to SEQ ID NO: 875370
aaauacaggcuaagucaaa

SEQ ID NO: 875372 - RNA, 19 nt, Artificial Sequence
  Description of Artificial Sequence: Synthetic oligonucleotide
  Sense strand starting at position 3253 of SEQ ID NO: 588585
uuaauaucccauuguaugu

SEQ ID NO: 875373 - RNA, 19 nt, Artificial Sequence
  Description of Artificial Sequence: Synthetic oligonucleotide
  Antisense strand to SEQ ID NO: 875372
acauacaaugggauauuaa

SEQ ID NO: 875374 - RNA, 19 nt, Artificial Sequence
  Description of Artificial Sequence: Synthetic oligonucleotide
  Sense strand starting at position 3260 of SEQ ID NO: 588585
cccauuguauguguauauu

SEQ ID NO: 875375 - RNA, 19 nt, Artificial Sequence
  Description of Artificial Sequence: Synthetic oligonucleotide
  Antisense strand to SEQ ID NO: 875374
aauauacacauacaauggg

SEQ ID NO: 875376 - RNA, 19 nt, Artificial Sequence
  Description of Artificial Sequence: Synthetic oligonucleotide
  Sense strand starting at position 3357 of SEQ ID NO: 588585
ugaacaugccuguacacau

SEQ ID NO: 875377 - RNA, 19 nt, Artificial Sequence
  Description of Artificial Sequence: Synthetic oligonucleotide
  Antisense strand to SEQ ID NO: 875376
auguguacaggcauguuca

SEQ ID NO: 875378 - RNA, 19 nt, Artificial Sequence
  Description of Artificial Sequence: Synthetic oligonucleotide
  Sense strand starting at position 3378 of SEQ ID NO: 588585
uugaguaccuguucccagu

SEQ ID NO: 875379 - RNA, 19 nt, Artificial Sequence
  Description of Artificial Sequence: Synthetic oligonucleotide
  Antisense strand to SEQ ID NO: 875378
acugggaacagguacucaa

SEQ ID NO: 875380 - RNA, 19 nt, Artificial Sequence
  Description of Artificial Sequence: Synthetic oligonucleotide
  Sense strand starting at position 3765 of SEQ ID NO: 588585
gagcuauacugguccucau

SEQ ID NO: 875381 - RNA, 19 nt, Artificial Sequence
  Description of Artificial Sequence: Synthetic oligonucleotide
  Antisense strand to SEQ ID NO: 875380
augaggaccaguauagcuc

SEQ ID NO: 875382 - RNA, 19 nt, Artificial Sequence
  Description of Artificial Sequence: Synthetic oligonucleotide
  Sense strand starting at position 530 of SEQ ID NO: 588586
uaaaguggcagugauggaa

SEQ ID NO: 875383 - RNA, 19 nt, Artificial Sequence
  Description of Artificial Sequence: Synthetic oligonucleotide
  Antisense strand to SEQ ID NO: 875382
uuccaucacugccacuuua

SEQ ID NO: 875384 - RNA, 19 nt, Artificial Sequence
  Description of Artificial Sequence: Synthetic oligonucleotide
  Sense strand starting at position 699 of SEQ ID NO: 588586
ucuccugauuucugaugau

SEQ ID NO: 875385 - RNA, 19 nt, Artificial Sequence
  Description of Artificial Sequence: Synthetic oligonucleotide
  Antisense strand to SEQ ID NO: 875384
aucaucagaaaucaggaga

SEQ ID NO: 875386 - RNA, 19 nt, Artificial Sequence
  Description of Artificial Sequence: Synthetic oligonucleotide
  Sense strand starting at position 702 of SEQ ID NO: 588586
ccugauuucugaugauguc

SEQ ID NO: 875387 - RNA, 19 nt, Artificial Sequence
  Description of Artificial Sequence: Synthetic oligonucleotide
  Antisense strand to SEQ ID NO: 875386
gacaucaucagaaaucagg

SEQ ID NO: 875388 - RNA, 19 nt, Artificial Sequence
  Description of Artificial Sequence: Synthetic oligonucleotide
  Sense strand starting at position 950 of SEQ ID NO: 588586
ccuuguaaaccucagacgu

SEQ ID NO: 875389 - RNA, 19 nt, Artificial Sequence
  Description of Artificial Sequence: Synthetic oligonucleotide
  Antisense strand to SEQ ID NO: 875388
acgucugagguuuacaagg

SEQ ID NO: 875390 - RNA, 19 nt, Artificial Sequence
  Description of Artificial Sequence: Synthetic oligonucleotide
  Sense strand starting at position 1312 of SEQ ID NO: 588586
ccagucuguuauguuuauu

SEQ ID NO: 875391 - RNA, 19 nt, Artificial Sequence
  Description of Artificial Sequence: Synthetic oligonucleotide
  Antisense strand to SEQ ID NO: 875390
aauaaacauaacagacugg

SEQ ID NO: 875392 - RNA, 19 nt, Artificial Sequence
  Description of Artificial Sequence: Synthetic oligonucleotide
  Sense strand starting at position 1470 of SEQ ID NO: 588586
gaucaaaguuaggugguaa

SEQ ID NO: 875393 - RNA, 19 nt, Artificial Sequence
  Description of Artificial Sequence: Synthetic oligonucleotide
  Antisense strand to SEQ ID NO: 875392
uuaccaccuaacuuugauc

SEQ ID NO: 875394 - RNA, 19 nt, Artificial Sequence
  Description of Artificial Sequence: Synthetic oligonucleotide
  Sense strand starting at position 1471 of SEQ ID NO: 588586
aucaaaguuaggugguaaa

SEQ ID NO: 875395 - RNA, 19 nt, Artificial Sequence
  Description of Artificial Sequence: Synthetic oligonucleotide
  Antisense strand to SEQ ID NO: 875394
uuuaccaccuaacuuugau

SEQ ID NO: 875396 - RNA, 19 nt, Artificial Sequence
  Description of Artificial Sequence: Synthetic oligonucleotide
  Sense strand starting at position 1474 of SEQ ID NO: 588586
aaaguuaggugguaaagga

SEQ ID NO: 875397 - RNA, 19 nt, Artificial Sequence
  Description of Artificial Sequence: Synthetic oligonucleotide
  Antisense strand to SEQ ID NO: 875396
uccuuuaccaccuaacuuu

SEQ ID NO: 875398 - RNA, 19 nt, Artificial Sequence
  Description of Artificial Sequence: Synthetic oligonucleotide
  Sense strand starting at position 1482 of SEQ ID NO: 588586
gugguaaaggagcauucaa

SEQ ID NO: 875399 - RNA, 19 nt, Artificial Sequence
  Description of Artificial Sequence: Synthetic oligonucleotide
  Antisense strand to SEQ ID NO: 875398
uugaaugcuccuuuaccac

SEQ ID NO: 875400 - RNA, 19 nt, Artificial Sequence
  Description of Artificial Sequence: Synthetic oligonucleotide
  Sense strand starting at position 1840 of SEQ ID NO: 588586
gucucauacucaccuuguu

SEQ ID NO: 875401 - RNA, 19 nt, Artificial Sequence
  Description of Artificial Sequence: Synthetic oligonucleotide
  Antisense strand to SEQ ID NO: 875400
aacaaggugaguaugagac

SEQ ID NO: 875402 - RNA, 19 nt, Artificial Sequence
  Description of Artificial Sequence: Synthetic oligonucleotide
  Sense strand starting at position 1843 of SEQ ID NO: 588586
ucauacucaccuuguuaga

SEQ ID NO: 875403 - RNA, 19 nt, Artificial Sequence
  Description of Artificial Sequence: Synthetic oligonucleotide
  Antisense strand to SEQ ID NO: 875402
ucuaacaaggugaguauga

SEQ ID NO: 875404 - RNA, 19 nt, Artificial Sequence
  Description of Artificial Sequence: Synthetic oligonucleotide
  Sense strand starting at position 1845 of SEQ ID NO: 588586
auacucaccuuguuagaua

SEQ ID NO: 875405 - RNA, 19 nt, Artificial Sequence
  Description of Artificial Sequence: Synthetic oligonucleotide
  Antisense strand to SEQ ID NO: 875404
uaucuaacaaggugaguau

SEQ ID NO: 875406 - RNA, 19 nt, Artificial Sequence
  Description of Artificial Sequence: Synthetic oligonucleotide
  Sense strand starting at position 2077 of SEQ ID NO: 588586
acuggugcucagcagacau

SEQ ID NO: 875407 - RNA, 19 nt, Artificial Sequence
  Description of Artificial Sequence: Synthetic oligonucleotide
  Antisense strand to SEQ ID NO: 875406
augucugcugagcaccagu

SEQ ID NO: 875408 - RNA, 19 nt, Artificial Sequence
  Description of Artificial Sequence: Synthetic oligonucleotide
  Sense strand starting at position 2088 of SEQ ID NO: 588586
gcagacauuuguugaauga

SEQ ID NO: 875409 - RNA, 19 nt, Artificial Sequence
  Description of Artificial Sequence: Synthetic oligonucleotide
  Antisense strand to SEQ ID NO: 875408
ucauucaacaaaugucugc

SEQ ID NO: 875410 - RNA, 19 nt, Artificial Sequence
  Description of Artificial Sequence: Synthetic oligonucleotide
  Sense strand starting at position 2101 of SEQ ID NO: 588586
gaaugaauguuaucacgga

SEQ ID NO: 875411 - RNA, 19 nt, Artificial Sequence
  Description of Artificial Sequence: Synthetic oligonucleotide
  Antisense strand to SEQ ID NO: 875410
uccgugauaacauucauuc

SEQ ID NO: 875412 - RNA, 19 nt, Artificial Sequence
  Description of Artificial Sequence: Synthetic oligonucleotide
  Sense strand starting at position 2105 of SEQ ID NO: 588586
gaauguuaucacggacagg

SEQ ID NO: 875413 - RNA, 19 nt, Artificial Sequence
  Description of Artificial Sequence: Synthetic oligonucleotide
  Antisense strand to SEQ ID NO: 875412
ccuguccgugauaacauuc

SEQ ID NO: 875414 - RNA, 19 nt, Artificial Sequence
  Description of Artificial Sequence: Synthetic oligonucleotide
  Sense strand starting at position 2120 of SEQ ID NO: 588586
cagggaauacgguacuagu

SEQ ID NO: 875415 - RNA, 19 nt, Artificial Sequence
  Description of Artificial Sequence: Synthetic oligonucleotide
  Antisense strand to SEQ ID NO: 875414
acuaguaccguauucccug

SEQ ID NO: 875416 - RNA, 19 nt, Artificial Sequence
  Description of Artificial Sequence: Synthetic oligonucleotide
  Sense strand starting at position 2130 of SEQ ID NO: 588586
gguacuagugcuuguugaa

SEQ ID NO: 875417 - RNA, 19 nt, Artificial Sequence
  Description of Artificial Sequence: Synthetic oligonucleotide
  Antisense strand to SEQ ID NO: 875416
uucaacaagcacuaguacc

SEQ ID NO: 875418 - RNA, 19 nt, Artificial Sequence
  Description of Artificial Sequence: Synthetic oligonucleotide
  Sense strand starting at position 2145 of SEQ ID NO: 588586
ugaacugcacgccagauau

SEQ ID NO: 875419 - RNA, 19 nt, Artificial Sequence
  Description of Artificial Sequence: Synthetic oligonucleotide
  Antisense strand to SEQ ID NO: 875418
auaucuggcgugcaguuca

SEQ ID NO: 875420 - RNA, 19 nt, Artificial Sequence
  Description of Artificial Sequence: Synthetic oligonucleotide
  Sense strand starting at position 2151 of SEQ ID NO: 588586
gcacgccagauaugugaaa

SEQ ID NO: 875421 - RNA, 19 nt, Artificial Sequence
  Description of Artificial Sequence: Synthetic oligonucleotide
  Antisense strand to SEQ ID NO: 875420
uuucacauaucuggcgugc

SEQ ID NO: 875422 - RNA, 19 nt, Artificial Sequence
  Description of Artificial Sequence: Synthetic oligonucleotide
  Sense strand starting at position 2256 of SEQ ID NO: 588586
agcaauugcucuuccaagu

SEQ ID NO: 875423 - RNA, 19 nt, Artificial Sequence
  Description of Artificial Sequence: Synthetic oligonucleotide
  Antisense strand to SEQ ID NO: 875422
acuuggaagagcaauugcu

SEQ ID NO: 875424 - RNA, 19 nt, Artificial Sequence
  Description of Artificial Sequence: Synthetic oligonucleotide
  Sense strand starting at position 2277 of SEQ ID NO: 588586
gcaugauguucccuaccuu

SEQ ID NO: 875425 - RNA, 19 nt, Artificial Sequence
  Description of Artificial Sequence: Synthetic oligonucleotide
  Antisense strand to SEQ ID NO: 875424
aagguagggaacaucaugc

SEQ ID NO: 875426 - RNA, 19 nt, Artificial Sequence
  Description of Artificial Sequence: Synthetic oligonucleotide
  Sense strand starting at position 2404 of SEQ ID NO: 588586
gaguccagcccuugaucuu

SEQ ID NO: 875427 - RNA, 19 nt, Artificial Sequence
  Description of Artificial Sequence: Synthetic oligonucleotide
  Antisense strand to SEQ ID NO: 875426
aagaucaagggcuggacuc

SEQ ID NO: 875428 - RNA, 19 nt, Artificial Sequence
  Description of Artificial Sequence: Synthetic oligonucleotide
  Sense strand starting at position 2704 of SEQ ID NO: 588586
uccauuauaucagugagac

SEQ ID NO: 875429 - RNA, 19 nt, Artificial Sequence
  Description of Artificial Sequence: Synthetic oligonucleotide
  Antisense strand to SEQ ID NO: 875428
gucucacugauauaaugga

SEQ ID NO: 875430 - RNA, 19 nt, Artificial Sequence
  Description of Artificial Sequence: Synthetic oligonucleotide
  Sense strand starting at position 2705 of SEQ ID NO: 588586
ccauuauaucagugagacc

SEQ ID NO: 875431 - RNA, 19 nt, Artificial Sequence
  Description of Artificial Sequence: Synthetic oligonucleotide
  Antisense strand to SEQ ID NO: 875430
ggucucacugauauaaugg

SEQ ID NO: 875432 - RNA, 19 nt, Artificial Sequence
  Description of Artificial Sequence: Synthetic oligonucleotide
  Sense strand starting at position 2955 of SEQ ID NO: 588586
gaugaaaucuggcccagca

SEQ ID NO: 875433 - RNA, 19 nt, Artificial Sequence
  Description of Artificial Sequence: Synthetic oligonucleotide
  Antisense strand to SEQ ID NO: 875432
ugcugggccagauuucauc

SEQ ID NO: 875434 - RNA, 19 nt, Artificial Sequence
  Description of Artificial Sequence: Synthetic oligonucleotide
  Sense strand starting at position 2957 of SEQ ID NO: 588586
ugaaaucuggcccagcaau

SEQ ID NO: 875435 - RNA, 19 nt, Artificial Sequence
  Description of Artificial Sequence: Synthetic oligonucleotide
  Antisense strand to SEQ ID NO: 875434
auugcugggccagauuuca

SEQ ID NO: 875436 - RNA, 19 nt, Artificial Sequence
  Description of Artificial Sequence: Synthetic oligonucleotide
  Sense strand starting at position 3142 of SEQ ID NO: 588586
gcaauuuccuuggaauaca

SEQ ID NO: 875437 - RNA, 19 nt, Artificial Sequence
  Description of Artificial Sequence: Synthetic oligonucleotide
  Antisense strand to SEQ ID NO: 875436
uguauuccaaggaaauugc

SEQ ID NO: 875438 - RNA, 19 nt, Artificial Sequence
  Description of Artificial Sequence: Synthetic oligonucleotide
  Sense strand starting at position 3190 of SEQ ID NO: 588586
acucucuggcccugauauu

SEQ ID NO: 875439 - RNA, 19 nt, Artificial Sequence
  Description of Artificial Sequence: Synthetic oligonucleotide
  Antisense strand to SEQ ID NO: 875438
aauaucagggccagagagu

SEQ ID NO: 875440 - RNA, 19 nt, Artificial Sequence
  Description of Artificial Sequence: Synthetic oligonucleotide
  Sense strand starting at position 3191 of SEQ ID NO: 588586
cucucuggcccugauauua

SEQ ID NO: 875441 - RNA, 19 nt, Artificial Sequence
  Description of Artificial Sequence: Synthetic oligonucleotide
  Antisense strand to SEQ ID NO: 875440
uaauaucagggccagagag

SEQ ID NO: 875442 - RNA, 19 nt, Artificial Sequence
  Description of Artificial Sequence: Synthetic oligonucleotide
  Sense strand starting at position 3277 of SEQ ID NO: 588586
gcaggaacgucuguaaugu

SEQ ID NO: 875443 - RNA, 19 nt, Artificial Sequence
  Description of Artificial Sequence: Synthetic oligonucleotide
  Antisense strand to SEQ ID NO: 875442
acauuacagacguuccugc

SEQ ID NO: 875444 - RNA, 19 nt, Artificial Sequence
  Description of Artificial Sequence: Synthetic oligonucleotide
  Sense strand starting at position 3278 of SEQ ID NO: 588586
caggaacgucuguaauguu

SEQ ID NO: 875445 - RNA, 19 nt, Artificial Sequence
  Description of Artificial Sequence: Synthetic oligonucleotide
  Antisense strand to SEQ ID NO: 875444
aacauuacagacguuccug

SEQ ID NO: 875446 - RNA, 19 nt, Artificial Sequence
  Description of Artificial Sequence: Synthetic oligonucleotide
  Sense strand starting at position 3300 of SEQ ID NO: 588586
uguuaucacgccuaagaaa

SEQ ID NO: 875447 - RNA, 19 nt, Artificial Sequence
  Description of Artificial Sequence: Synthetic oligonucleotide
  Antisense strand to SEQ ID NO: 875446
uuucuuaggcgugauaaca

SEQ ID NO: 875448 - RNA, 19 nt, Artificial Sequence
  Description of Artificial Sequence: Synthetic oligonucleotide
  Sense strand starting at position 3360 of SEQ ID NO: 588586
acuguuucguacuccuaaa

SEQ ID NO: 875449 - RNA, 19 nt, Artificial Sequence
  Description of Artificial Sequence: Synthetic oligonucleotide
  Antisense strand to SEQ ID NO: 875448
uuuaggaguacgaaacagu

SEQ ID NO: 875450 - RNA, 19 nt, Artificial Sequence
  Description of Artificial Sequence: Synthetic oligonucleotide
  Sense strand starting at position 3474 of SEQ ID NO: 588586
guacauacagagugcucaa

SEQ ID NO: 875451 - RNA, 19 nt, Artificial Sequence
  Description of Artificial Sequence: Synthetic oligonucleotide
  Antisense strand to SEQ ID NO: 875450
uugagcacucuguauguac

SEQ ID NO: 875452 - RNA, 19 nt, Artificial Sequence
  Description of Artificial Sequence: Synthetic oligonucleotide
  Sense strand starting at position 3540 of SEQ ID NO: 588586
gaggguagauauuauacca

SEQ ID NO: 875453 - RNA, 19 nt, Artificial Sequence
  Description of Artificial Sequence: Synthetic oligonucleotide
  Antisense strand to SEQ ID NO: 875452
ugguauaauaucuacccuc

SEQ ID NO: 875454 - RNA, 19 nt, Artificial Sequence
  Description of Artificial Sequence: Synthetic oligonucleotide
  Sense strand starting at position 3617 of SEQ ID NO: 588586
gagcuuucccaaggucagu

SEQ ID NO: 875455 - RNA, 19 nt, Artificial Sequence
  Description of Artificial Sequence: Synthetic oligonucleotide
  Antisense strand to SEQ ID NO: 875454
acugaccuugggaaagcuc

SEQ ID NO: 875456 - RNA, 19 nt, Artificial Sequence
  Description of Artificial Sequence: Synthetic oligonucleotide
  Sense strand starting at position 3628 of SEQ ID NO: 588586
aggucagucaagcaaggau

SEQ ID NO: 875457 - RNA, 19 nt, Artificial Sequence
  Description of Artificial Sequence: Synthetic oligonucleotide
  Antisense strand to SEQ ID NO: 875456
auccuugcuugacugaccu

SEQ ID NO: 875458 - RNA, 19 nt, Artificial Sequence
  Description of Artificial Sequence: Synthetic oligonucleotide
  Sense strand starting at position 3643 of SEQ ID NO: 588586
ggaugugaugcucggccuu

SEQ ID NO: 875459 - RNA, 19 nt, Artificial Sequence
  Description of Artificial Sequence: Synthetic oligonucleotide
  Antisense strand to SEQ ID NO: 875458
aaggccgagcaucacaucc

SEQ ID NO: 875460 - RNA, 19 nt, Artificial Sequence
  Description of Artificial Sequence: Synthetic oligonucleotide
  Sense strand starting at position 3645 of SEQ ID NO: 588586
augugaugcucggccuuca

SEQ ID NO: 875461 - RNA, 19 nt, Artificial Sequence
  Description of Artificial Sequence: Synthetic oligonucleotide
  Antisense strand to SEQ ID NO: 875460
ugaaggccgagcaucacau

SEQ ID NO: 875462 - RNA, 19 nt, Artificial Sequence
  Description of Artificial Sequence: Synthetic oligonucleotide
  Sense strand starting at position 103 of SEQ ID NO: 588587
gaguccagcccuugaucuu

SEQ ID NO: 875463 - RNA, 19 nt, Artificial Sequence
  Description of Artificial Sequence: Synthetic oligonucleotide
  Antisense strand to SEQ ID NO: 875462
aagaucaagggcuggacuc

SEQ ID NO: 875464 - RNA, 19 nt, Artificial Sequence
  Description of Artificial Sequence: Synthetic oligonucleotide
  Sense strand starting at position 403 of SEQ ID NO: 588587
uccauuauaucagugagac

SEQ ID NO: 875465 - RNA, 19 nt, Artificial Sequence
  Description of Artificial Sequence: Synthetic oligonucleotide
  Antisense strand to SEQ ID NO: 875464
gucucacugauauaaugga

SEQ ID NO: 875466 - RNA, 19 nt, Artificial Sequence
  Description of Artificial Sequence: Synthetic oligonucleotide
  Sense strand starting at position 404 of SEQ ID NO: 588587
ccauuauaucagugagacc

SEQ ID NO: 875467 - RNA, 19 nt, Artificial Sequence
  Description of Artificial Sequence: Synthetic oligonucleotide
  Antisense strand to SEQ ID NO: 875466
ggucucacugauauaaugg

SEQ ID NO: 875468 - RNA, 19 nt, Artificial Sequence
  Description of Artificial Sequence: Synthetic oligonucleotide
  Sense strand starting at position 407 of SEQ ID NO: 588587
uuauaucagugagaccuuu

SEQ ID NO: 875469 - RNA, 19 nt, Artificial Sequence
  Description of Artificial Sequence: Synthetic oligonucleotide
  Antisense strand to SEQ ID NO: 875468
aaaggucucacugauauaa

SEQ ID NO: 875470 - RNA, 19 nt, Artificial Sequence
  Description of Artificial Sequence: Synthetic oligonucleotide
  Sense strand starting at position 654 of SEQ ID NO: 588587
gaugaaaucuggcccagca

SEQ ID NO: 875471 - RNA, 19 nt, Artificial Sequence
  Description of Artificial Sequence: Synthetic oligonucleotide
  Antisense strand to SEQ ID NO: 875470
ugcugggccagauuucauc

SEQ ID NO: 875472 - RNA, 19 nt, Artificial Sequence
  Description of Artificial Sequence: Synthetic oligonucleotide
  Sense strand starting at position 656 of SEQ ID NO: 588587
ugaaaucuggcccagcaau

SEQ ID NO: 875473 - RNA, 19 nt, Artificial Sequence
  Description of Artificial Sequence: Synthetic oligonucleotide
  Antisense strand to SEQ ID NO: 875472
auugcugggccagauuuca

SEQ ID NO: 875474 - RNA, 19 nt, Artificial Sequence
  Description of Artificial Sequence: Synthetic oligonucleotide
  Sense strand starting at position 841 of SEQ ID NO: 588587
gcaauuuccuuggaauaca

SEQ ID NO: 875475 - RNA, 19 nt, Artificial Sequence
  Description of Artificial Sequence: Synthetic oligonucleotide
  Antisense strand to SEQ ID NO: 875474
uguauuccaaggaaauugc

SEQ ID NO: 875476 - RNA, 19 nt, Artificial Sequence
  Description of Artificial Sequence: Synthetic oligonucleotide
  Sense strand starting at position 889 of SEQ ID NO: 588587
acucucuggcccugauauu

SEQ ID NO: 875477 - RNA, 19 nt, Artificial Sequence
  Description of Artificial Sequence: Synthetic oligonucleotide
  Antisense strand to SEQ ID NO: 875476
aauaucagggccagagagu

SEQ ID NO: 875478 - RNA, 19 nt, Artificial Sequence
  Description of Artificial Sequence: Synthetic oligonucleotide
  Sense strand starting at position 890 of SEQ ID NO: 588587
cucucuggcccugauauua

SEQ ID NO: 875479 - RNA, 19 nt, Artificial Sequence
  Description of Artificial Sequence: Synthetic oligonucleotide
  Antisense strand to SEQ ID NO: 875478
uaauaucagggccagagag

SEQ ID NO: 875480 - RNA, 19 nt, Artificial Sequence
  Description of Artificial Sequence: Synthetic oligonucleotide
  Sense strand starting at position 976 of SEQ ID NO: 588587
gcaggaacgucuguaaugu

SEQ ID NO: 875481 - RNA, 19 nt, Artificial Sequence
  Description of Artificial Sequence: Synthetic oligonucleotide
  Antisense strand to SEQ ID NO: 875480
acauuacagacguuccugc

SEQ ID NO: 875482 - RNA, 19 nt, Artificial Sequence
  Description of Artificial Sequence: Synthetic oligonucleotide
  Sense strand starting at position 977 of SEQ ID NO: 588587
caggaacgucuguaauguu

SEQ ID NO: 875483 - RNA, 19 nt, Artificial Sequence
  Description of Artificial Sequence: Synthetic oligonucleotide
  Antisense strand to SEQ ID NO: 875482
aacauuacagacguuccug

SEQ ID NO: 875484 - RNA, 19 nt, Artificial Sequence
  Description of Artificial Sequence: Synthetic oligonucleotide
  Sense strand starting at position 999 of SEQ ID NO: 588587
uguuaucacgccuaagaaa

SEQ ID NO: 875485 - RNA, 19 nt, Artificial Sequence
  Description of Artificial Sequence: Synthetic oligonucleotide
  Antisense strand to SEQ ID NO: 875484
uuucuuaggcgugauaaca

SEQ ID NO: 875486 - RNA, 19 nt, Artificial Sequence
  Description of Artificial Sequence: Synthetic oligonucleotide
  Sense strand starting at position 1059 of SEQ ID NO: 588587
acuguuucguacuccuaaa

SEQ ID NO: 875487 - RNA, 19 nt, Artificial Sequence
  Description of Artificial Sequence: Synthetic oligonucleotide
  Antisense strand to SEQ ID NO: 875486
uuuaggaguacgaaacagu

SEQ ID NO: 875488 - RNA, 19 nt, Artificial Sequence
  Description of Artificial Sequence: Synthetic oligonucleotide
  Sense strand starting at position 1173 of SEQ ID NO: 588587
guacauacagagugcucaa

SEQ ID NO: 875489 - RNA, 19 nt, Artificial Sequence
  Description of Artificial Sequence: Synthetic oligonucleotide
  Antisense strand to SEQ ID NO: 875488
uugagcacucuguauguac

SEQ ID NO: 875490 - RNA, 19 nt, Artificial Sequence
  Description of Artificial Sequence: Synthetic oligonucleotide
  Sense strand starting at position 1239 of SEQ ID NO: 588587
gaggguagauauuauacca

SEQ ID NO: 875491 - RNA, 19 nt, Artificial Sequence
  Description of Artificial Sequence: Synthetic oligonucleotide
  Antisense strand to SEQ ID NO: 875490
ugguauaauaucuacccuc

SEQ ID NO: 875492 - RNA, 19 nt, Artificial Sequence
  Description of Artificial Sequence: Synthetic oligonucleotide
  Sense strand starting at position 1316 of SEQ ID NO: 588587
gagcuuucccaaggucagu

SEQ ID NO: 875493 - RNA, 19 nt, Artificial Sequence
  Description of Artificial Sequence: Synthetic oligonucleotide
  Antisense strand to SEQ ID NO: 875492
acugaccuugggaaagcuc

SEQ ID NO: 875494 - RNA, 19 nt, Artificial Sequence
  Description of Artificial Sequence: Synthetic oligonucleotide
  Sense strand starting at position 1327 of SEQ ID NO: 588587
aggucagucaagcaaggau

SEQ ID NO: 875495 - RNA, 19 nt, Artificial Sequence
  Description of Artificial Sequence: Synthetic oligonucleotide
  Antisense strand to SEQ ID NO: 875494
auccuugcuugacugaccu

SEQ ID NO: 875496 - RNA, 19 nt, Artificial Sequence
  Description of Artificial Sequence: Synthetic oligonucleotide
  Sense strand starting at position 1342 of SEQ ID NO: 588587
ggaugugaugcucggccuu

SEQ ID NO: 875497 - RNA, 19 nt, Artificial Sequence
  Description of Artificial Sequence: Synthetic oligonucleotide
  Antisense strand to SEQ ID NO: 875496
aaggccgagcaucacaucc

SEQ ID NO: 875498 - RNA, 19 nt, Artificial Sequence
  Description of Artificial Sequence: Synthetic oligonucleotide
  Sense strand starting at position 1344 of SEQ ID NO: 588587
augugaugcucggccuuca

SEQ ID NO: 875499 - RNA, 19 nt, Artificial Sequence
  Description of Artificial Sequence: Synthetic oligonucleotide
  Antisense strand to SEQ ID NO: 875498
ugaaggccgagcaucacau

SEQ ID NO: 875500 - RNA, 19 nt, Artificial Sequence
  Description of Artificial Sequence: Synthetic oligonucleotide
  Sense strand starting at position 2212 of SEQ ID NO: 588587
ugacguccucgugcugauu

SEQ ID NO: 875501 - RNA, 19 nt, Artificial Sequence
  Description of Artificial Sequence: Synthetic oligonucleotide
  Antisense strand to SEQ ID NO: 875500
aaucagcacgaggacguca

SEQ ID NO: 875502 - RNA, 19 nt, Artificial Sequence
  Description of Artificial Sequence: Synthetic oligonucleotide
  Sense strand starting at position 2313 of SEQ ID NO: 588587
auacauuugucacacggga

SEQ ID NO: 875503 - RNA, 19 nt, Artificial Sequence
  Description of Artificial Sequence: Synthetic oligonucleotide
  Antisense strand to SEQ ID NO: 875502
ucccgugugacaaauguau

SEQ ID NO: 875504 - RNA, 19 nt, Artificial Sequence
  Description of Artificial Sequence: Synthetic oligonucleotide
  Sense strand starting at position 2337 of SEQ ID NO: 588587
cggccaugaacacgaguua

SEQ ID NO: 875505 - RNA, 19 nt, Artificial Sequence
  Description of Artificial Sequence: Synthetic oligonucleotide
  Antisense strand to SEQ ID NO: 875504
uaacucguguucauggccg

SEQ ID NO: 875506 - RNA, 19 nt, Artificial Sequence
  Description of Artificial Sequence: Synthetic oligonucleotide
  Sense strand starting at position 2431 of SEQ ID NO: 588587
cuaugcugaguuuaucaga

SEQ ID NO: 875507 - RNA, 19 nt, Artificial Sequence
  Description of Artificial Sequence: Synthetic oligonucleotide
  Antisense strand to SEQ ID NO: 875506
ucugauaaacucagcauag

SEQ ID NO: 875508 - RNA, 19 nt, Artificial Sequence
  Description of Artificial Sequence: Synthetic oligonucleotide
  Sense strand starting at position 2436 of SEQ ID NO: 588587
cugaguuuaucagaacuuc

SEQ ID NO: 875509 - RNA, 19 nt, Artificial Sequence
  Description of Artificial Sequence: Synthetic oligonucleotide
  Antisense strand to SEQ ID NO: 875508
gaaguucugauaaacucag

SEQ ID NO: 875510 - RNA, 19 nt, Artificial Sequence
  Description of Artificial Sequence: Synthetic oligonucleotide
  Sense strand starting at position 2531 of SEQ ID NO: 588587
gcugacucauuuggaauua

SEQ ID NO: 875511 - RNA, 19 nt, Artificial Sequence
  Description of Artificial Sequence: Synthetic oligonucleotide
  Antisense strand to SEQ ID NO: 875510
uaauuccaaaugagucagc

SEQ ID NO: 875512 - RNA, 19 nt, Artificial Sequence
  Description of Artificial Sequence: Synthetic oligonucleotide
  Sense strand starting at position 2542 of SEQ ID NO: 588587
uggaauuaaugcgugugua

SEQ ID NO: 875513 - RNA, 19 nt, Artificial Sequence
  Description of Artificial Sequence: Synthetic oligonucleotide
  Antisense strand to SEQ ID NO: 875512
uacacacgcauuaauucca

SEQ ID NO: 875514 - RNA, 19 nt, Artificial Sequence
  Description of Artificial Sequence: Synthetic oligonucleotide
  Sense strand starting at position 2543 of SEQ ID NO: 588587
ggaauuaaugcguguguaa

SEQ ID NO: 875515 - RNA, 19 nt, Artificial Sequence
  Description of Artificial Sequence: Synthetic oligonucleotide
  Antisense strand to SEQ ID NO: 875514
uuacacacgcauuaauucc

SEQ ID NO: 875516 - RNA, 19 nt, Artificial Sequence
  Description of Artificial Sequence: Synthetic oligonucleotide
  Sense strand starting at position 2545 of SEQ ID NO: 588587
aauuaaugcguguguaaau

SEQ ID NO: 875517 - RNA, 19 nt, Artificial Sequence
  Description of Artificial Sequence: Synthetic oligonucleotide
  Antisense strand to SEQ ID NO: 875516
auuuacacacgcauuaauu

SEQ ID NO: 875518 - RNA, 19 nt, Artificial Sequence
  Description of Artificial Sequence: Synthetic oligonucleotide
  Sense strand starting at position 2546 of SEQ ID NO: 588587
auuaaugcguguguaaaug

SEQ ID NO: 875519 - RNA, 19 nt, Artificial Sequence
  Description of Artificial Sequence: Synthetic oligonucleotide
  Antisense strand to SEQ ID NO: 875518
cauuuacacacgcauuaau

SEQ ID NO: 875520 - RNA, 19 nt, Artificial Sequence
  Description of Artificial Sequence: Synthetic oligonucleotide
  Sense strand starting at position 2576 of SEQ ID NO: 588587
gcucaaacugucgggacaa

SEQ ID NO: 875521 - RNA, 19 nt, Artificial Sequence
  Description of Artificial Sequence: Synthetic oligonucleotide
  Antisense strand to SEQ ID NO: 875520
uugucccgacaguuugagc

SEQ ID NO: 875522 - RNA, 19 nt, Artificial Sequence
  Description of Artificial Sequence: Synthetic oligonucleotide
  Sense strand starting at position 2751 of SEQ ID NO: 588587
acgauuugguggcauuuau

SEQ ID NO: 875523 - RNA, 19 nt, Artificial Sequence
  Description of Artificial Sequence: Synthetic oligonucleotide
  Antisense strand to SEQ ID NO: 875522
auaaaugccaccaaaucgu

SEQ ID NO: 875524 - RNA, 19 nt, Artificial Sequence
  Description of Artificial Sequence: Synthetic oligonucleotide
  Sense strand starting at position 2886 of SEQ ID NO: 588587
cuaucucugugaguuuacu

SEQ ID NO: 875525 - RNA, 19 nt, Artificial Sequence
  Description of Artificial Sequence: Synthetic oligonucleotide
  Antisense strand to SEQ ID NO: 875524
aguaaacucacagagauag

SEQ ID NO: 875526 - RNA, 19 nt, Artificial Sequence
  Description of Artificial Sequence: Synthetic oligonucleotide
  Sense strand starting at position 2964 of SEQ ID NO: 588587
uuugacuuagccuguauuu

SEQ ID NO: 875527 - RNA, 19 nt, Artificial Sequence
  Description of Artificial Sequence: Synthetic oligonucleotide
  Antisense strand to SEQ ID NO: 875526
aaauacaggcuaagucaaa

SEQ ID NO: 875528 - RNA, 19 nt, Artificial Sequence
  Description of Artificial Sequence: Synthetic oligonucleotide
  Sense strand starting at position 3037 of SEQ ID NO: 588587
uuaauaucccauuguaugu

SEQ ID NO: 875529 - RNA, 19 nt, Artificial Sequence
  Description of Artificial Sequence: Synthetic oligonucleotide
  Antisense strand to SEQ ID NO: 875528
acauacaaugggauauuaa

SEQ ID NO: 875530 - RNA, 19 nt, Artificial Sequence
  Description of Artificial Sequence: Synthetic oligonucleotide
  Sense strand starting at position 3044 of SEQ ID NO: 588587
cccauuguauguguauauu

SEQ ID NO: 875531 - RNA, 19 nt, Artificial Sequence
  Description of Artificial Sequence: Synthetic oligonucleotide
  Antisense strand to SEQ ID NO: 875530
aauauacacauacaauggg

SEQ ID NO: 875532 - RNA, 19 nt, Artificial Sequence
  Description of Artificial Sequence: Synthetic oligonucleotide
  Sense strand starting at position 3141 of SEQ ID NO: 588587
ugaacaugccuguacacau

SEQ ID NO: 875533 - RNA, 19 nt, Artificial Sequence
  Description of Artificial Sequence: Synthetic oligonucleotide
  Antisense strand to SEQ ID NO: 875532
auguguacaggcauguuca

SEQ ID NO: 875534 - RNA, 19 nt, Artificial Sequence
  Description of Artificial Sequence: Synthetic oligonucleotide
  Sense strand starting at position 3162 of SEQ ID NO: 588587
uugaguaccuguucccagu

SEQ ID NO: 875535 - RNA, 19 nt, Artificial Sequence
  Description of Artificial Sequence: Synthetic oligonucleotide
  Antisense strand to SEQ ID NO: 875534
acugggaacagguacucaa

SEQ ID NO: 875536 - RNA, 19 nt, Artificial Sequence
  Description of Artificial Sequence: Synthetic oligonucleotide
  Sense strand starting at position 3549 of SEQ ID NO: 588587
gagcuauacugguccucau

SEQ ID NO: 875537 - RNA, 19 nt, Artificial Sequence
  Description of Artificial Sequence: Synthetic oligonucleotide
  Antisense strand to SEQ ID NO: 875536
augaggaccaguauagcuc

SEQ ID NO: 875538 - RNA, 19 nt, Artificial Sequence
  Description of Artificial Sequence: Synthetic oligonucleotide
  Sense strand starting at position 3869 of SEQ ID NO: 588587
uaauuugucugauguccag

SEQ ID NO: 875539 - RNA, 19 nt, Artificial Sequence
  Description of Artificial Sequence: Synthetic oligonucleotide
  Antisense strand to SEQ ID NO: 875538
cuggacaucagacaaauua

SEQ ID NO: 875540 - RNA, 19 nt, Artificial Sequence
  Description of Artificial Sequence: Synthetic oligonucleotide
  Sense strand starting at position 3892 of SEQ ID NO: 588587
ccuugaaauuguccagaga

SEQ ID NO: 875541 - RNA, 19 nt, Artificial Sequence
  Description of Artificial Sequence: Synthetic oligonucleotide
  Antisense strand to SEQ ID NO: 875540
ucucuggacaauuucaagg

SEQ ID NO: 875542 - RNA, 19 nt, Artificial Sequence
  Description of Artificial Sequence: Synthetic oligonucleotide
  Sense strand starting at position 131 of SEQ ID NO: 588588
gcaggaauuucuggaaauu

SEQ ID NO: 875543 - RNA, 19 nt, Artificial Sequence
  Description of Artificial Sequence: Synthetic oligonucleotide
  Antisense strand to SEQ ID NO: 875542
aauuuccagaaauuccugc

SEQ ID NO: 875544 - RNA, 19 nt, Artificial Sequence
  Description of Artificial Sequence: Synthetic oligonucleotide
  Sense strand starting at position 826 of SEQ ID NO: 588588
cugcaaugcuuugcaaaua

SEQ ID NO: 875545 - RNA, 19 nt, Artificial Sequence
  Description of Artificial Sequence: Synthetic oligonucleotide
  Antisense strand to SEQ ID NO: 875544
uauuugcaaagcauugcag

SEQ ID NO: 875546 - RNA, 19 nt, Artificial Sequence
  Description of Artificial Sequence: Synthetic oligonucleotide
  Sense strand starting at position 876 of SEQ ID NO: 588588
agugaaauugaguggauga

SEQ ID NO: 875547 - RNA, 19 nt, Artificial Sequence
  Description of Artificial Sequence: Synthetic oligonucleotide
  Antisense strand to SEQ ID NO: 875546
ucauccacucaauuucacu

SEQ ID NO: 875548 - RNA, 19 nt, Artificial Sequence
  Description of Artificial Sequence: Synthetic oligonucleotide
  Sense strand starting at position 877 of SEQ ID NO: 588588
gugaaauugaguggaugaa

SEQ ID NO: 875549 - RNA, 19 nt, Artificial Sequence
  Description of Artificial Sequence: Synthetic oligonucleotide
  Antisense strand to SEQ ID NO: 875548
uucauccacucaauuucac

SEQ ID NO: 875550 - RNA, 19 nt, Artificial Sequence
  Description of Artificial Sequence: Synthetic oligonucleotide
  Sense strand starting at position 1017 of SEQ ID NO: 588588
uaaagucuccaagagagcu

SEQ ID NO: 875551 - RNA, 19 nt, Artificial Sequence
  Description of Artificial Sequence: Synthetic oligonucleotide
  Antisense strand to SEQ ID NO: 875550
agcucucuuggagacuuua

SEQ ID NO: 875552 - RNA, 19 nt, Artificial Sequence
  Description of Artificial Sequence: Synthetic oligonucleotide
  Sense strand starting at position 1031 of SEQ ID NO: 588588
gagcuagcacaaugaugua

SEQ ID NO: 875553 - RNA, 19 nt, Artificial Sequence
  Description of Artificial Sequence: Synthetic oligonucleotide
  Antisense strand to SEQ ID NO: 875552
uacaucauugugcuagcuc

SEQ ID NO: 875554 - RNA, 19 nt, Artificial Sequence
  Description of Artificial Sequence: Synthetic oligonucleotide
  Sense strand starting at position 1374 of SEQ ID NO: 588588
cgcccacuucuauaagacu

SEQ ID NO: 875555 - RNA, 19 nt, Artificial Sequence
  Description of Artificial Sequence: Synthetic oligonucleotide
  Antisense strand to SEQ ID NO: 875554
agucuuauagaagugggcg

SEQ ID NO: 875556 - RNA, 19 nt, Artificial Sequence
  Description of Artificial Sequence: Synthetic oligonucleotide
  Sense strand starting at position 1382 of SEQ ID NO: 588588
ucuauaagacuuugaaugu

SEQ ID NO: 875557 - RNA, 19 nt, Artificial Sequence
  Description of Artificial Sequence: Synthetic oligonucleotide
  Antisense strand to SEQ ID NO: 875556
acauucaaagucuuauaga

SEQ ID NO: 875558 - RNA, 19 nt, Artificial Sequence
  Description of Artificial Sequence: Synthetic oligonucleotide
  Sense strand starting at position 1459 of SEQ ID NO: 588588
uuuagaaguucccucaaag

SEQ ID NO: 875559 - RNA, 19 nt, Artificial Sequence
  Description of Artificial Sequence: Synthetic oligonucleotide
  Antisense strand to SEQ ID NO: 875558
cuuugagggaacuucuaaa

SEQ ID NO: 875560 - RNA, 19 nt, Artificial Sequence
  Description of Artificial Sequence: Synthetic oligonucleotide
  Sense strand starting at position 2067 of SEQ ID NO: 588588
agcuuaauuccugacuuga

SEQ ID NO: 875561 - RNA, 19 nt, Artificial Sequence
  Description of Artificial Sequence: Synthetic oligonucleotide
  Antisense strand to SEQ ID NO: 875560
ucaagucaggaauuaagcu

SEQ ID NO: 875562 - RNA, 19 nt, Artificial Sequence
  Description of Artificial Sequence: Synthetic oligonucleotide
  Sense strand starting at position 2080 of SEQ ID NO: 588588
acuugauucccuugucuga

SEQ ID NO: 875563 - RNA, 19 nt, Artificial Sequence
  Description of Artificial Sequence: Synthetic oligonucleotide
  Antisense strand to SEQ ID NO: 875562
ucagacaagggaaucaagu

SEQ ID NO: 875564 - RNA, 19 nt, Artificial Sequence
  Description of Artificial Sequence: Synthetic oligonucleotide
  Sense strand starting at position 2082 of SEQ ID NO: 588588
uugauucccuugucugaaa

SEQ ID NO: 875565 - RNA, 19 nt, Artificial Sequence
  Description of Artificial Sequence: Synthetic oligonucleotide
  Antisense strand to SEQ ID NO: 875564
uuucagacaagggaaucaa

SEQ ID NO: 875566 - RNA, 19 nt, Artificial Sequence
  Description of Artificial Sequence: Synthetic oligonucleotide
  Sense strand starting at position 2083 of SEQ ID NO: 588588
ugauucccuugucugaaau

SEQ ID NO: 875567 - RNA, 19 nt, Artificial Sequence
  Description of Artificial Sequence: Synthetic oligonucleotide
  Antisense strand to SEQ ID NO: 875566
auuucagacaagggaauca

SEQ ID NO: 875568 - RNA, 19 nt, Artificial Sequence
  Description of Artificial Sequence: Synthetic oligonucleotide
  Sense strand starting at position 2115 of SEQ ID NO: 588588
uuccauuaagguugaauua

SEQ ID NO: 875569 - RNA, 19 nt, Artificial Sequence
  Description of Artificial Sequence: Synthetic oligonucleotide
  Antisense strand to SEQ ID NO: 875568
uaauucaaccuuaauggaa

SEQ ID NO: 875570 - RNA, 19 nt, Artificial Sequence
  Description of Artificial Sequence: Synthetic oligonucleotide
  Sense strand starting at position 2150 of SEQ ID NO: 588588
ggagaauauuuagaaaugu

SEQ ID NO: 875571 - RNA, 19 nt, Artificial Sequence
  Description of Artificial Sequence: Synthetic oligonucleotide
  Antisense strand to SEQ ID NO: 875570
acauuucuaaauauucucc

SEQ ID NO: 875572 - RNA, 19 nt, Artificial Sequence
  Description of Artificial Sequence: Synthetic oligonucleotide
  Sense strand starting at position 2159 of SEQ ID NO: 588588
uuagaaauguacuaggaau

SEQ ID NO: 875573 - RNA, 19 nt, Artificial Sequence
  Description of Artificial Sequence: Synthetic oligonucleotide
  Antisense strand to SEQ ID NO: 875572
auuccuaguacauuucuaa

SEQ ID NO: 875574 - RNA, 19 nt, Artificial Sequence
  Description of Artificial Sequence: Synthetic oligonucleotide
  Sense strand starting at position 2204 of SEQ ID NO: 588588
guggcuauacugugacuau

SEQ ID NO: 875575 - RNA, 19 nt, Artificial Sequence
  Description of Artificial Sequence: Synthetic oligonucleotide
  Antisense strand to SEQ ID NO: 875574
auagucacaguauagccac

SEQ ID NO: 875576 - RNA, 19 nt, Artificial Sequence
  Description of Artificial Sequence: Synthetic oligonucleotide
  Sense strand starting at position 2211 of SEQ ID NO: 588588
uacugugacuaucugguau

SEQ ID NO: 875577 - RNA, 19 nt, Artificial Sequence
  Description of Artificial Sequence: Synthetic oligonucleotide
  Antisense strand to SEQ ID NO: 875576
auaccagauagucacagua

SEQ ID NO: 875578 - RNA, 19 nt, Artificial Sequence
  Description of Artificial Sequence: Synthetic oligonucleotide
  Sense strand starting at position 2682 of SEQ ID NO: 588588
gccaccguguacucaaaua

SEQ ID NO: 875579 - RNA, 19 nt, Artificial Sequence
  Description of Artificial Sequence: Synthetic oligonucleotide
  Antisense strand to SEQ ID NO: 875578
uauuugaguacacgguggc

SEQ ID NO: 875580 - RNA, 19 nt, Artificial Sequence
  Description of Artificial Sequence: Synthetic oligonucleotide
  Sense strand starting at position 3438 of SEQ ID NO: 588588
cuaaguaaacaauguaugu

SEQ ID NO: 875581 - RNA, 19 nt, Artificial Sequence
  Description of Artificial Sequence: Synthetic oligonucleotide
  Antisense strand to SEQ ID NO: 875580
acauacauuguuuacuuag

SEQ ID NO: 875582 - RNA, 19 nt, Artificial Sequence
  Description of Artificial Sequence: Synthetic oligonucleotide
  Sense strand starting at position 3474 of SEQ ID NO: 588588
ggccuaggcacuuaagaga

SEQ ID NO: 875583 - RNA, 19 nt, Artificial Sequence
  Description of Artificial Sequence: Synthetic oligonucleotide
  Antisense strand to SEQ ID NO: 875582
ucucuuaagugccuaggcc

SEQ ID NO: 875584 - RNA, 19 nt, Artificial Sequence
  Description of Artificial Sequence: Synthetic oligonucleotide
  Sense strand starting at position 3527 of SEQ ID NO: 588588
cucuuuccagcugagagaa

SEQ ID NO: 875585 - RNA, 19 nt, Artificial Sequence
  Description of Artificial Sequence: Synthetic oligonucleotide
  Antisense strand to SEQ ID NO: 875584
uucucucagcuggaaagag

SEQ ID NO: 875586 - RNA, 19 nt, Artificial Sequence
  Description of Artificial Sequence: Synthetic oligonucleotide
  Sense strand starting at position 3560 of SEQ ID NO: 588588
ggugaaguggauugcacaa

SEQ ID NO: 875587 - RNA, 19 nt, Artificial Sequence
  Description of Artificial Sequence: Synthetic oligonucleotide
  Antisense strand to SEQ ID NO: 875586
uugugcaauccacuucacc

SEQ ID NO: 875588 - RNA, 19 nt, Artificial Sequence
  Description of Artificial Sequence: Synthetic oligonucleotide
  Sense strand starting at position 3572 of SEQ ID NO: 588588
ugcacaagaucacaaagau

SEQ ID NO: 875589 - RNA, 19 nt, Artificial Sequence
  Description of Artificial Sequence: Synthetic oligonucleotide
  Antisense strand to SEQ ID NO: 875588
aucuuugugaucuugugca

SEQ ID NO: 875590 - RNA, 19 nt, Artificial Sequence
  Description of Artificial Sequence: Synthetic oligonucleotide
  Sense strand starting at position 3620 of SEQ ID NO: 588588
gcccuaggagucugguauu

SEQ ID NO: 875591 - RNA, 19 nt, Artificial Sequence
  Description of Artificial Sequence: Synthetic oligonucleotide
  Antisense strand to SEQ ID NO: 875590
aauaccagacuccuagggc

SEQ ID NO: 875592 - RNA, 19 nt, Artificial Sequence
  Description of Artificial Sequence: Synthetic oligonucleotide
  Sense strand starting at position 3626 of SEQ ID NO: 588588
ggagucugguauucuuaga

SEQ ID NO: 875593 - RNA, 19 nt, Artificial Sequence
  Description of Artificial Sequence: Synthetic oligonucleotide
  Antisense strand to SEQ ID NO: 875592
ucuaagaauaccagacucc

SEQ ID NO: 875594 - RNA, 19 nt, Artificial Sequence
  Description of Artificial Sequence: Synthetic oligonucleotide
  Sense strand starting at position 3642 of SEQ ID NO: 588588
agaaucauuccacagcugu

SEQ ID NO: 875595 - RNA, 19 nt, Artificial Sequence
  Description of Artificial Sequence: Synthetic oligonucleotide
  Antisense strand to SEQ ID NO: 875594
acagcuguggaaugauucu

SEQ ID NO: 875596 - RNA, 19 nt, Artificial Sequence
  Description of Artificial Sequence: Synthetic oligonucleotide
  Sense strand starting at position 3715 of SEQ ID NO: 588588
gucacuuugucauccucua

SEQ ID NO: 875597 - RNA, 19 nt, Artificial Sequence
  Description of Artificial Sequence: Synthetic oligonucleotide
  Antisense strand to SEQ ID NO: 875596
uagaggaugacaaagugac

SEQ ID NO: 875598 - RNA, 19 nt, Artificial Sequence
  Description of Artificial Sequence: Synthetic oligonucleotide
  Sense strand starting at position 3758 of SEQ ID NO: 588588
acaacaggugcuuagugaa

SEQ ID NO: 875599 - RNA, 19 nt, Artificial Sequence
  Description of Artificial Sequence: Synthetic oligonucleotide
  Antisense strand to SEQ ID NO: 875598
uucacuaagcaccuguugu

SEQ ID NO: 875600 - RNA, 19 nt, Artificial Sequence
  Description of Artificial Sequence: Synthetic oligonucleotide
  Sense strand starting at position 3772 of SEQ ID NO: 588588
gugaaugucuucuuccagu

SEQ ID NO: 875601 - RNA, 19 nt, Artificial Sequence
  Description of Artificial Sequence: Synthetic oligonucleotide
  Antisense strand to SEQ ID NO: 875600
acuggaagaagacauucac

SEQ ID NO: 875602 - RNA, 19 nt, Artificial Sequence
  Description of Artificial Sequence: Synthetic oligonucleotide
  Sense strand starting at position 3778 of SEQ ID NO: 588588
gucuucuuccagugaagug

SEQ ID NO: 875603 - RNA, 19 nt, Artificial Sequence
  Description of Artificial Sequence: Synthetic oligonucleotide
  Antisense strand to SEQ ID NO: 875602
cacuucacuggaagaagac

SEQ ID NO: 875604 - RNA, 19 nt, Artificial Sequence
  Description of Artificial Sequence: Synthetic oligonucleotide
  Sense strand starting at position 3779 of SEQ ID NO: 588588
ucuucuuccagugaagugu

SEQ ID NO: 875605 - RNA, 19 nt, Artificial Sequence
  Description of Artificial Sequence: Synthetic oligonucleotide
  Antisense strand to SEQ ID NO: 875604
acacuucacuggaagaaga

SEQ ID NO: 875606 - RNA, 19 nt, Artificial Sequence
  Description of Artificial Sequence: Synthetic oligonucleotide
  Sense strand starting at position 3783 of SEQ ID NO: 588588
cuuccagugaaguguauga

SEQ ID NO: 875607 - RNA, 19 nt, Artificial Sequence
  Description of Artificial Sequence: Synthetic oligonucleotide
  Antisense strand to SEQ ID NO: 875606
ucauacacuucacuggaag

SEQ ID NO: 875608 - RNA, 19 nt, Artificial Sequence
  Description of Artificial Sequence: Synthetic oligonucleotide
  Sense strand starting at position 3794 of SEQ ID NO: 588588
guguaugaaaccuaugugu

SEQ ID NO: 875609 - RNA, 19 nt, Artificial Sequence
  Description of Artificial Sequence: Synthetic oligonucleotide
  Antisense strand to SEQ ID NO: 875608
acacauagguuucauacac

SEQ ID NO: 875610 - RNA, 19 nt, Artificial Sequence
  Description of Artificial Sequence: Synthetic oligonucleotide
  Sense strand starting at position 3796 of SEQ ID NO: 588588
guaugaaaccuaugugugu

SEQ ID NO: 875611 - RNA, 19 nt, Artificial Sequence
  Description of Artificial Sequence: Synthetic oligonucleotide
  Antisense strand to SEQ ID NO: 875610
acacacauagguuucauac

SEQ ID NO: 875612 - RNA, 19 nt, Artificial Sequence
  Description of Artificial Sequence: Synthetic oligonucleotide
  Sense strand starting at position 3797 of SEQ ID NO: 588588
uaugaaaccuauguguguu

SEQ ID NO: 875613 - RNA, 19 nt, Artificial Sequence
  Description of Artificial Sequence: Synthetic oligonucleotide
  Antisense strand to SEQ ID NO: 875612
aacacacauagguuucaua

SEQ ID NO: 875614 - RNA, 19 nt, Artificial Sequence
  Description of Artificial Sequence: Synthetic oligonucleotide
  Sense strand starting at position 3798 of SEQ ID NO: 588588
augaaaccuauguguguuu

SEQ ID NO: 875615 - RNA, 19 nt, Artificial Sequence
  Description of Artificial Sequence: Synthetic oligonucleotide
  Antisense strand to SEQ ID NO: 875614
aaacacacauagguuucau

SEQ ID NO: 875616 - RNA, 19 nt, Artificial Sequence
  Description of Artificial Sequence: Synthetic oligonucleotide
  Sense strand starting at position 3912 of SEQ ID NO: 588588
cacugacugcggcaauaaa

SEQ ID NO: 875617 - RNA, 19 nt, Artificial Sequence
  Description of Artificial Sequence: Synthetic oligonucleotide
  Antisense strand to SEQ ID NO: 875616
uuuauugccgcagucagug

SEQ ID NO: 875618 - RNA, 19 nt, Artificial Sequence
  Description of Artificial Sequence: Synthetic oligonucleotide
  Sense strand starting at position 3923 of SEQ ID NO: 588588
gcaauaaaguaagcauuau

SEQ ID NO: 875619 - RNA, 19 nt, Artificial Sequence
  Description of Artificial Sequence: Synthetic oligonucleotide
  Antisense strand to SEQ ID NO: 875618
auaaugcuuacuuuauugc

SEQ ID NO: 875620 - RNA, 19 nt, Artificial Sequence
  Description of Artificial Sequence: Synthetic oligonucleotide
  Sense strand starting at position 3927 of SEQ ID NO: 588588
uaaaguaagcauuaucguu

SEQ ID NO: 875621 - RNA, 19 nt, Artificial Sequence
  Description of Artificial Sequence: Synthetic oligonucleotide
  Antisense strand to SEQ ID NO: 875620
aacgauaaugcuuacuuua

SEQ ID NO: 875622 - RNA, 19 nt, Artificial Sequence
  Description of Artificial Sequence: Synthetic oligonucleotide
  Sense strand starting at position 52 of SEQ ID NO: 588589
cuccuaacagcuugauaga

SEQ ID NO: 875623 - RNA, 19 nt, Artificial Sequence
  Description of Artificial Sequence: Synthetic oligonucleotide
  Antisense strand to SEQ ID NO: 875622
ucuaucaagcuguuaggag

SEQ ID NO: 875624 - RNA, 19 nt, Artificial Sequence
  Description of Artificial Sequence: Synthetic oligonucleotide
  Sense strand starting at position 90 of SEQ ID NO: 588589
cuacuaggacccugugaua

SEQ ID NO: 875625 - RNA, 19 nt, Artificial Sequence
  Description of Artificial Sequence: Synthetic oligonucleotide
  Antisense strand to SEQ ID NO: 875624
uaucacaggguccuaguag

SEQ ID NO: 875626 - RNA, 19 nt, Artificial Sequence
  Description of Artificial Sequence: Synthetic oligonucleotide
  Sense strand starting at position 149 of SEQ ID NO: 588589
ccucacucuuagguuauua

SEQ ID NO: 875627 - RNA, 19 nt, Artificial Sequence
  Description of Artificial Sequence: Synthetic oligonucleotide
  Antisense strand to SEQ ID NO: 875626
uaauaaccuaagagugagg

SEQ ID NO: 875628 - RNA, 19 nt, Artificial Sequence
  Description of Artificial Sequence: Synthetic oligonucleotide
  Sense strand starting at position 153 of SEQ ID NO: 588589
acucuuagguuauuaggua

SEQ ID NO: 875629 - RNA, 19 nt, Artificial Sequence
  Description of Artificial Sequence: Synthetic oligonucleotide
  Antisense strand to SEQ ID NO: 875628
uaccuaauaaccuaagagu

SEQ ID NO: 875630 - RNA, 19 nt, Artificial Sequence
  Description of Artificial Sequence: Synthetic oligonucleotide
  Sense strand starting at position 157 of SEQ ID NO: 588589
uuagguuauuagguacuua

SEQ ID NO: 875631 - RNA, 19 nt, Artificial Sequence
  Description of Artificial Sequence: Synthetic oligonucleotide
  Antisense strand to SEQ ID NO: 875630
uaaguaccuaauaaccuaa

SEQ ID NO: 875632 - RNA, 19 nt, Artificial Sequence
  Description of Artificial Sequence: Synthetic oligonucleotide
  Sense strand starting at position 161 of SEQ ID NO: 588589
guuauuagguacuuaauac

SEQ ID NO: 875633 - RNA, 19 nt, Artificial Sequence
  Description of Artificial Sequence: Synthetic oligonucleotide
  Antisense strand to SEQ ID NO: 875632
guauuaaguaccuaauaac

SEQ ID NO: 875634 - RNA, 19 nt, Artificial Sequence
  Description of Artificial Sequence: Synthetic oligonucleotide
  Sense strand starting at position 264 of SEQ ID NO: 588589
ugucuuccugaacacagau

SEQ ID NO: 875635 - RNA, 19 nt, Artificial Sequence
  Description of Artificial Sequence: Synthetic oligonucleotide
  Antisense strand to SEQ ID NO: 875634
aucuguguucaggaagaca

SEQ ID NO: 875636 - RNA, 19 nt, Artificial Sequence
  Description of Artificial Sequence: Synthetic oligonucleotide
  Sense strand starting at position 365 of SEQ ID NO: 588589
cuuccauaguguccuugaa

SEQ ID NO: 875637 - RNA, 19 nt, Artificial Sequence
  Description of Artificial Sequence: Synthetic oligonucleotide
  Antisense strand to SEQ ID NO: 875636
uucaaggacacuauggaag

SEQ ID NO: 875638 - RNA, 19 nt, Artificial Sequence
  Description of Artificial Sequence: Synthetic oligonucleotide
  Sense strand starting at position 1272 of SEQ ID NO: 588589
cuuguauugcucuucuguu

SEQ ID NO: 875639 - RNA, 19 nt, Artificial Sequence
  Description of Artificial Sequence: Synthetic oligonucleotide
  Antisense strand to SEQ ID NO: 875638
aacagaagagcaauacaag

SEQ ID NO: 875640 - RNA, 19 nt, Artificial Sequence
  Description of Artificial Sequence: Synthetic oligonucleotide
  Sense strand starting at position 1508 of SEQ ID NO: 588589
aauguuaguagguguagga

SEQ ID NO: 875641 - RNA, 19 nt, Artificial Sequence
  Description of Artificial Sequence: Synthetic oligonucleotide
  Antisense strand to SEQ ID NO: 875640
uccuacaccuacuaacauu

SEQ ID NO: 875642 - RNA, 19 nt, Artificial Sequence
  Description of Artificial Sequence: Synthetic oligonucleotide
  Sense strand starting at position 1588 of SEQ ID NO: 588589
ccguauuuaguuugucuuu

SEQ ID NO: 875643 - RNA, 19 nt, Artificial Sequence
  Description of Artificial Sequence: Synthetic oligonucleotide
  Antisense strand to SEQ ID NO: 875642
aaagacaaacuaaauacgg

SEQ ID NO: 875644 - RNA, 19 nt, Artificial Sequence
  Description of Artificial Sequence: Synthetic oligonucleotide
  Sense strand starting at position 1719 of SEQ ID NO: 588589
uuaccuugagcuuggaagu

SEQ ID NO: 875645 - RNA, 19 nt, Artificial Sequence
  Description of Artificial Sequence: Synthetic oligonucleotide
  Antisense strand to SEQ ID NO: 875644
acuuccaagcucaagguaa

SEQ ID NO: 875646 - RNA, 19 nt, Artificial Sequence
  Description of Artificial Sequence: Synthetic oligonucleotide
  Sense strand starting at position 1720 of SEQ ID NO: 588589
uaccuugagcuuggaagua

SEQ ID NO: 875647 - RNA, 19 nt, Artificial Sequence
  Description of Artificial Sequence: Synthetic oligonucleotide
  Antisense strand to SEQ ID NO: 875646
uacuuccaagcucaaggua

SEQ ID NO: 875648 - RNA, 19 nt, Artificial Sequence
  Description of Artificial Sequence: Synthetic oligonucleotide
  Sense strand starting at position 2100 of SEQ ID NO: 588589
aaacaagaggucuagcuuu

SEQ ID NO: 875649 - RNA, 19 nt, Artificial Sequence
  Description of Artificial Sequence: Synthetic oligonucleotide
  Antisense strand to SEQ ID NO: 875648
aaagcuagaccucuuguuu

SEQ ID NO: 875650 - RNA, 19 nt, Artificial Sequence
  Description of Artificial Sequence: Synthetic oligonucleotide
  Sense strand starting at position 2106 of SEQ ID NO: 588589
gaggucuagcuuuaacaag

SEQ ID NO: 875651 - RNA, 19 nt, Artificial Sequence
  Description of Artificial Sequence: Synthetic oligonucleotide
  Antisense strand to SEQ ID NO: 875650
cuuguuaaagcuagaccuc

SEQ ID NO: 875652 - RNA, 19 nt, Artificial Sequence
  Description of Artificial Sequence: Synthetic oligonucleotide
  Sense strand starting at position 2462 of SEQ ID NO: 588589
gacuguguuucccucagau

SEQ ID NO: 875653 - RNA, 19 nt, Artificial Sequence
  Description of Artificial Sequence: Synthetic oligonucleotide
  Antisense strand to SEQ ID NO: 875652
aucugagggaaacacaguc

SEQ ID NO: 875654 - RNA, 19 nt, Artificial Sequence
  Description of Artificial Sequence: Synthetic oligonucleotide
  Sense strand starting at position 2556 of SEQ ID NO: 588589
ucaggcauuccagagguga

SEQ ID NO: 875655 - RNA, 19 nt, Artificial Sequence
  Description of Artificial Sequence: Synthetic oligonucleotide
  Antisense strand to SEQ ID NO: 875654
ucaccucuggaaugccuga

SEQ ID NO: 875656 - RNA, 19 nt, Artificial Sequence
  Description of Artificial Sequence: Synthetic oligonucleotide
  Sense strand starting at position 2558 of SEQ ID NO: 588589
aggcauuccagaggugaac

SEQ ID NO: 875657 - RNA, 19 nt, Artificial Sequence
  Description of Artificial Sequence: Synthetic oligonucleotide
  Antisense strand to SEQ ID NO: 875656
guucaccucuggaaugccu

SEQ ID NO: 875658 - RNA, 19 nt, Artificial Sequence
  Description of Artificial Sequence: Synthetic oligonucleotide
  Sense strand starting at position 2569 of SEQ ID NO: 588589
aggugaacuguccauugcu

SEQ ID NO: 875659 - RNA, 19 nt, Artificial Sequence
  Description of Artificial Sequence: Synthetic oligonucleotide
  Antisense strand to SEQ ID NO: 875658
agcaauggacaguucaccu

SEQ ID NO: 875660 - RNA, 19 nt, Artificial Sequence
  Description of Artificial Sequence: Synthetic oligonucleotide
  Sense strand starting at position 2729 of SEQ ID NO: 588589
uauauaauggagugagguu

SEQ ID NO: 875661 - RNA, 19 nt, Artificial Sequence
  Description of Artificial Sequence: Synthetic oligonucleotide
  Antisense strand to SEQ ID NO: 875660
aaccucacuccauuauaua

SEQ ID NO: 875662 - RNA, 19 nt, Artificial Sequence
  Description of Artificial Sequence: Synthetic oligonucleotide
  Sense strand starting at position 2831 of SEQ ID NO: 588589
uagagacagucuucuugga

SEQ ID NO: 875663 - RNA, 19 nt, Artificial Sequence
  Description of Artificial Sequence: Synthetic oligonucleotide
  Antisense strand to SEQ ID NO: 875662
uccaagaagacugucucua

SEQ ID NO: 875664 - RNA, 19 nt, Artificial Sequence
  Description of Artificial Sequence: Synthetic oligonucleotide
  Sense strand starting at position 2833 of SEQ ID NO: 588589
gagacagucuucuuggauu

SEQ ID NO: 875665 - RNA, 19 nt, Artificial Sequence
  Description of Artificial Sequence: Synthetic oligonucleotide
  Antisense strand to SEQ ID NO: 875664
aauccaagaagacugucuc

SEQ ID NO: 875666 - RNA, 19 nt, Artificial Sequence
  Description of Artificial Sequence: Synthetic oligonucleotide
  Sense strand starting at position 2873 of SEQ ID NO: 588589
uauguaaccuggucagauu

SEQ ID NO: 875667 - RNA, 19 nt, Artificial Sequence
  Description of Artificial Sequence: Synthetic oligonucleotide
  Antisense strand to SEQ ID NO: 875666
aaucugaccagguuacaua

SEQ ID NO: 875668 - RNA, 19 nt, Artificial Sequence
  Description of Artificial Sequence: Synthetic oligonucleotide
  Sense strand starting at position 2874 of SEQ ID NO: 588589
auguaaccuggucagauua

SEQ ID NO: 875669 - RNA, 19 nt, Artificial Sequence
  Description of Artificial Sequence: Synthetic oligonucleotide
  Antisense strand to SEQ ID NO: 875668
uaaucugaccagguuacau

SEQ ID NO: 875670 - RNA, 19 nt, Artificial Sequence
  Description of Artificial Sequence: Synthetic oligonucleotide
  Sense strand starting at position 2943 of SEQ ID NO: 588589
ccaacucauugggcuguua

SEQ ID NO: 875671 - RNA, 19 nt, Artificial Sequence
  Description of Artificial Sequence: Synthetic oligonucleotide
  Antisense strand to SEQ ID NO: 875670
uaacagcccaaugaguugg

SEQ ID NO: 875672 - RNA, 19 nt, Artificial Sequence
  Description of Artificial Sequence: Synthetic oligonucleotide
  Sense strand starting at position 2954 of SEQ ID NO: 588589
ggcuguuaugaggauuacu

SEQ ID NO: 875673 - RNA, 19 nt, Artificial Sequence
  Description of Artificial Sequence: Synthetic oligonucleotide
  Antisense strand to SEQ ID NO: 875672
aguaauccucauaacagcc

SEQ ID NO: 875674 - RNA, 19 nt, Artificial Sequence
  Description of Artificial Sequence: Synthetic oligonucleotide
  Sense strand starting at position 2981 of SEQ ID NO: 588589
gcgugcagugcucuuauca

SEQ ID NO: 875675 - RNA, 19 nt, Artificial Sequence
  Description of Artificial Sequence: Synthetic oligonucleotide
  Antisense strand to SEQ ID NO: 875674
ugauaagagcacugcacgc

SEQ ID NO: 875676 - RNA, 19 nt, Artificial Sequence
  Description of Artificial Sequence: Synthetic oligonucleotide
  Sense strand starting at position 2982 of SEQ ID NO: 588589
cgugcagugcucuuaucac

SEQ ID NO: 875677 - RNA, 19 nt, Artificial Sequence
  Description of Artificial Sequence: Synthetic oligonucleotide
  Antisense strand to SEQ ID NO: 875676
gugauaagagcacugcacg

SEQ ID NO: 875678 - RNA, 19 nt, Artificial Sequence
  Description of Artificial Sequence: Synthetic oligonucleotide
  Sense strand starting at position 3008 of SEQ ID NO: 588589
ggugcguaagcgucaggaa

SEQ ID NO: 875679 - RNA, 19 nt, Artificial Sequence
  Description of Artificial Sequence: Synthetic oligonucleotide
  Antisense strand to SEQ ID NO: 875678
uuccugacgcuuacgcacc

SEQ ID NO: 875680 - RNA, 19 nt, Artificial Sequence
  Description of Artificial Sequence: Synthetic oligonucleotide
  Sense strand starting at position 3010 of SEQ ID NO: 588589
ugcguaagcgucaggaaau

SEQ ID NO: 875681 - RNA, 19 nt, Artificial Sequence
  Description of Artificial Sequence: Synthetic oligonucleotide
  Antisense strand to SEQ ID NO: 875680
auuuccugacgcuuacgca

SEQ ID NO: 875682 - RNA, 19 nt, Artificial Sequence
  Description of Artificial Sequence: Synthetic oligonucleotide
  Sense strand starting at position 3088 of SEQ ID NO: 588589
gaaugacauuaagcaguuu

SEQ ID NO: 875683 - RNA, 19 nt, Artificial Sequence
  Description of Artificial Sequence: Synthetic oligonucleotide
  Antisense strand to SEQ ID NO: 875682
aaacugcuuaaugucauuc

SEQ ID NO: 875684 - RNA, 19 nt, Artificial Sequence
  Description of Artificial Sequence: Synthetic oligonucleotide
  Sense strand starting at position 3615 of SEQ ID NO: 588589
cugaaugucuaguuugaga

SEQ ID NO: 875685 - RNA, 19 nt, Artificial Sequence
  Description of Artificial Sequence: Synthetic oligonucleotide
  Antisense strand to SEQ ID NO: 875684
ucucaaacuagacauucag

SEQ ID NO: 875686 - RNA, 19 nt, Artificial Sequence
  Description of Artificial Sequence: Synthetic oligonucleotide
  Sense strand starting at position 3617 of SEQ ID NO: 588589
gaaugucuaguuugagaaa

SEQ ID NO: 875687 - RNA, 19 nt, Artificial Sequence
  Description of Artificial Sequence: Synthetic oligonucleotide
  Antisense strand to SEQ ID NO: 875686
uuucucaaacuagacauuc

SEQ ID NO: 875688 - RNA, 19 nt, Artificial Sequence
  Description of Artificial Sequence: Synthetic oligonucleotide
  Sense strand starting at position 3628 of SEQ ID NO: 588589
uugagaaacuguucccaau

SEQ ID NO: 875689 - RNA, 19 nt, Artificial Sequence
  Description of Artificial Sequence: Synthetic oligonucleotide
  Antisense strand to SEQ ID NO: 875688
auugggaacaguuucucaa

SEQ ID NO: 875690 - RNA, 19 nt, Artificial Sequence
  Description of Artificial Sequence: Synthetic oligonucleotide
  Sense strand starting at position 3772 of SEQ ID NO: 588589
ccuauuuccgcucauguga

SEQ ID NO: 875691 - RNA, 19 nt, Artificial Sequence
  Description of Artificial Sequence: Synthetic oligonucleotide
  Antisense strand to SEQ ID NO: 875690
ucacaugagcggaaauagg

SEQ ID NO: 875692 - RNA, 19 nt, Artificial Sequence
  Description of Artificial Sequence: Synthetic oligonucleotide
  Sense strand starting at position 3785 of SEQ ID NO: 588589
augugaacucuccaguucu

SEQ ID NO: 875693 - RNA, 19 nt, Artificial Sequence
  Description of Artificial Sequence: Synthetic oligonucleotide
  Antisense strand to SEQ ID NO: 875692
agaacuggagaguucacau

SEQ ID NO: 875694 - RNA, 19 nt, Artificial Sequence
  Description of Artificial Sequence: Synthetic oligonucleotide
  Sense strand starting at position 3841 of SEQ ID NO: 588589
acuaaaggcccuggucaaa

SEQ ID NO: 875695 - RNA, 19 nt, Artificial Sequence
  Description of Artificial Sequence: Synthetic oligonucleotide
  Antisense strand to SEQ ID NO: 875694
uuugaccagggccuuuagu

SEQ ID NO: 875696 - RNA, 19 nt, Artificial Sequence
  Description of Artificial Sequence: Synthetic oligonucleotide
  Sense strand starting at position 3905 of SEQ ID NO: 588589
guauucuccauagggauag

SEQ ID NO: 875697 - RNA, 19 nt, Artificial Sequence
  Description of Artificial Sequence: Synthetic oligonucleotide
  Antisense strand to SEQ ID NO: 875696
cuaucccuauggagaauac

SEQ ID NO: 875698 - RNA, 19 nt, Artificial Sequence
  Description of Artificial Sequence: Synthetic oligonucleotide
  Sense strand starting at position 3917 of SEQ ID NO: 588589
gggauagucucuuuggcau

SEQ ID NO: 875699 - RNA, 19 nt, Artificial Sequence
  Description of Artificial Sequence: Synthetic oligonucleotide
  Antisense strand to SEQ ID NO: 875698
augccaaagagacuauccc

SEQ ID NO: 875700 - RNA, 19 nt, Artificial Sequence
  Description of Artificial Sequence: Synthetic oligonucleotide
  Sense strand starting at position 3920 of SEQ ID NO: 588589
auagucucuuuggcauuua

SEQ ID NO: 875701 - RNA, 19 nt, Artificial Sequence
  Description of Artificial Sequence: Synthetic oligonucleotide
  Antisense strand to SEQ ID NO: 875700
uaaaugccaaagagacuau

SEQ ID NO: 875702 - RNA, 19 nt, Artificial Sequence
  Description of Artificial Sequence: Synthetic oligonucleotide
  Sense strand starting at position 41 of SEQ ID NO: 588590
auggaaucucuacggcaaa

SEQ ID NO: 875703 - RNA, 19 nt, Artificial Sequence
  Description of Artificial Sequence: Synthetic oligonucleotide
  Antisense strand to SEQ ID NO: 875702
uuugccguagagauuccau

SEQ ID NO: 875704 - RNA, 19 nt, Artificial Sequence
  Description of Artificial Sequence: Synthetic oligonucleotide
  Sense strand starting at position 176 of SEQ ID NO: 588590
uacaucaggucucugagaa

SEQ ID NO: 875705 - RNA, 19 nt, Artificial Sequence
  Description of Artificial Sequence: Synthetic oligonucleotide
  Antisense strand to SEQ ID NO: 875704
uucucagagaccugaugua

SEQ ID NO: 875706 - RNA, 19 nt, Artificial Sequence
  Description of Artificial Sequence: Synthetic oligonucleotide
  Sense strand starting at position 177 of SEQ ID NO: 588590
acaucaggucucugagaau

SEQ ID NO: 875707 - RNA, 19 nt, Artificial Sequence
  Description of Artificial Sequence: Synthetic oligonucleotide
  Antisense strand to SEQ ID NO: 875706
auucucagagaccugaugu

SEQ ID NO: 875708 - RNA, 19 nt, Artificial Sequence
  Description of Artificial Sequence: Synthetic oligonucleotide
  Sense strand starting at position 189 of SEQ ID NO: 588590
ugagaaucccauugcccau

SEQ ID NO: 875709 - RNA, 19 nt, Artificial Sequence
  Description of Artificial Sequence: Synthetic oligonucleotide
  Antisense strand to SEQ ID NO: 875708
augggcaaugggauucuca

SEQ ID NO: 875710 - RNA, 19 nt, Artificial Sequence
  Description of Artificial Sequence: Synthetic oligonucleotide
  Sense strand starting at position 224 of SEQ ID NO: 588590
cugcauuaauuugaaggga

SEQ ID NO: 875711 - RNA, 19 nt, Artificial Sequence
  Description of Artificial Sequence: Synthetic oligonucleotide
  Antisense strand to SEQ ID NO: 875710
ucccuucaaauuaaugcag

SEQ ID NO: 875712 - RNA, 19 nt, Artificial Sequence
  Description of Artificial Sequence: Synthetic oligonucleotide
  Sense strand starting at position 256 of SEQ ID NO: 588590
ggagaaugcuaaccagauu

SEQ ID NO: 875713 - RNA, 19 nt, Artificial Sequence
  Description of Artificial Sequence: Synthetic oligonucleotide
  Antisense strand to SEQ ID NO: 875712
aaucugguuagcauucucc

SEQ ID NO: 875714 - RNA, 19 nt, Artificial Sequence
  Description of Artificial Sequence: Synthetic oligonucleotide
  Sense strand starting at position 262 of SEQ ID NO: 588590
ugcuaaccagauuaaagua

SEQ ID NO: 875715 - RNA, 19 nt, Artificial Sequence
  Description of Artificial Sequence: Synthetic oligonucleotide
  Antisense strand to SEQ ID NO: 875714
uacuuuaaucugguuagca

SEQ ID NO: 875716 - RNA, 19 nt, Artificial Sequence
  Description of Artificial Sequence: Synthetic oligonucleotide
  Sense strand starting at position 324 of SEQ ID NO: 588590
aguguauuccugcaaggau

SEQ ID NO: 875717 - RNA, 19 nt, Artificial Sequence
  Description of Artificial Sequence: Synthetic oligonucleotide
  Antisense strand to SEQ ID NO: 875716
auccuugcaggaauacacu

SEQ ID NO: 875718 - RNA, 19 nt, Artificial Sequence
  Description of Artificial Sequence: Synthetic oligonucleotide
  Sense strand starting at position 327 of SEQ ID NO: 588590
guauuccugcaaggauaag

SEQ ID NO: 875719 - RNA, 19 nt, Artificial Sequence
  Description of Artificial Sequence: Synthetic oligonucleotide
  Antisense strand to SEQ ID NO: 875718
cuuauccuugcaggaauac

SEQ ID NO: 875720 - RNA, 19 nt, Artificial Sequence
  Description of Artificial Sequence: Synthetic oligonucleotide
  Sense strand starting at position 350 of SEQ ID NO: 588590
aaaguuguggccuaaugau

SEQ ID NO: 875721 - RNA, 19 nt, Artificial Sequence
  Description of Artificial Sequence: Synthetic oligonucleotide
  Antisense strand to SEQ ID NO: 875720
aucauuaggccacaacuuu

SEQ ID NO: 875722 - RNA, 19 nt, Artificial Sequence
  Description of Artificial Sequence: Synthetic oligonucleotide
  Sense strand starting at position 685 of SEQ ID NO: 588590
uauauaagucuggaugcaa

SEQ ID NO: 875723 - RNA, 19 nt, Artificial Sequence
  Description of Artificial Sequence: Synthetic oligonucleotide
  Antisense strand to SEQ ID NO: 875722
uugcauccagacuuauaua

SEQ ID NO: 875724 - RNA, 19 nt, Artificial Sequence
  Description of Artificial Sequence: Synthetic oligonucleotide
  Sense strand starting at position 753 of SEQ ID NO: 588590
ggcguaauaaacuaaucug

SEQ ID NO: 875725 - RNA, 19 nt, Artificial Sequence
  Description of Artificial Sequence: Synthetic oligonucleotide
  Antisense strand to SEQ ID NO: 875724
cagauuaguuuauuacgcc

SEQ ID NO: 875726 - RNA, 19 nt, Artificial Sequence
  Description of Artificial Sequence: Synthetic oligonucleotide
  Sense strand starting at position 756 of SEQ ID NO: 588590
guaauaaacuaaucuggcu

SEQ ID NO: 875727 - RNA, 19 nt, Artificial Sequence
  Description of Artificial Sequence: Synthetic oligonucleotide
  Antisense strand to SEQ ID NO: 875726
agccagauuaguuuauuac

SEQ ID NO: 875728 - RNA, 19 nt, Artificial Sequence
  Description of Artificial Sequence: Synthetic oligonucleotide
  Sense strand starting at position 763 of SEQ ID NO: 588590
acuaaucuggcugauuaca

SEQ ID NO: 875729 - RNA, 19 nt, Artificial Sequence
  Description of Artificial Sequence: Synthetic oligonucleotide
  Antisense strand to SEQ ID NO: 875728
uguaaucagccagauuagu

SEQ ID NO: 875730 - RNA, 19 nt, Artificial Sequence
  Description of Artificial Sequence: Synthetic oligonucleotide
  Sense strand starting at position 779 of SEQ ID NO: 588590
acacacugaccgcagaaau

SEQ ID NO: 875731 - RNA, 19 nt, Artificial Sequence
  Description of Artificial Sequence: Synthetic oligonucleotide
  Antisense strand to SEQ ID NO: 875730
auuucugcggucagugugu

SEQ ID NO: 875732 - RNA, 19 nt, Artificial Sequence
  Description of Artificial Sequence: Synthetic oligonucleotide
  Sense strand starting at position 923 of SEQ ID NO: 588590
guaauaaacugccuagaag

SEQ ID NO: 875733 - RNA, 19 nt, Artificial Sequence
  Description of Artificial Sequence: Synthetic oligonucleotide
  Antisense strand to SEQ ID NO: 875732
cuucuaggcaguuuauuac

SEQ ID NO: 875734 - RNA, 19 nt, Artificial Sequence
  Description of Artificial Sequence: Synthetic oligonucleotide
  Sense strand starting at position 1003 of SEQ ID NO: 588590
ccaggagagaaguguuuaa

SEQ ID NO: 875735 - RNA, 19 nt, Artificial Sequence
  Description of Artificial Sequence: Synthetic oligonucleotide
  Antisense strand to SEQ ID NO: 875734
uuaaacacuucucuccugg

SEQ ID NO: 875736 - RNA, 19 nt, Artificial Sequence
  Description of Artificial Sequence: Synthetic oligonucleotide
  Sense strand starting at position 1467 of SEQ ID NO: 588590
ggugucuuucuuggaagaa

SEQ ID NO: 875737 - RNA, 19 nt, Artificial Sequence
  Description of Artificial Sequence: Synthetic oligonucleotide
  Antisense strand to SEQ ID NO: 875736
uucuuccaagaaagacacc

SEQ ID NO: 875738 - RNA, 19 nt, Artificial Sequence
  Description of Artificial Sequence: Synthetic oligonucleotide
  Sense strand starting at position 1480 of SEQ ID NO: 588590
gaagaagagugguucucag

SEQ ID NO: 875739 - RNA, 19 nt, Artificial Sequence
  Description of Artificial Sequence: Synthetic oligonucleotide
  Antisense strand to SEQ ID NO: 875738
cugagaaccacucuucuuc

SEQ ID NO: 875740 - RNA, 19 nt, Artificial Sequence
  Description of Artificial Sequence: Synthetic oligonucleotide
  Sense strand starting at position 1487 of SEQ ID NO: 588590
agugguucucaggaauggu

SEQ ID NO: 875741 - RNA, 19 nt, Artificial Sequence
  Description of Artificial Sequence: Synthetic oligonucleotide
  Antisense strand to SEQ ID NO: 875740
accauuccugagaaccacu

SEQ ID NO: 875742 - RNA, 19 nt, Artificial Sequence
  Description of Artificial Sequence: Synthetic oligonucleotide
  Sense strand starting at position 2208 of SEQ ID NO: 588590
ccauuuauagagcgcugua

SEQ ID NO: 875743 - RNA, 19 nt, Artificial Sequence
  Description of Artificial Sequence: Synthetic oligonucleotide
  Antisense strand to SEQ ID NO: 875742
uacagcgcucuauaaaugg

SEQ ID NO: 875744 - RNA, 19 nt, Artificial Sequence
  Description of Artificial Sequence: Synthetic oligonucleotide
  Sense strand starting at position 2510 of SEQ ID NO: 588590
uugcguauuucccuugauu

SEQ ID NO: 875745 - RNA, 19 nt, Artificial Sequence
  Description of Artificial Sequence: Synthetic oligonucleotide
  Antisense strand to SEQ ID NO: 875744
aaucaagggaaauacgcaa

SEQ ID NO: 875746 - RNA, 19 nt, Artificial Sequence
  Description of Artificial Sequence: Synthetic oligonucleotide
  Sense strand starting at position 2599 of SEQ ID NO: 588590
cguaguacuggauaaucuu

SEQ ID NO: 875747 - RNA, 19 nt, Artificial Sequence
  Description of Artificial Sequence: Synthetic oligonucleotide
  Antisense strand to SEQ ID NO: 875746
aagauuauccaguacuacg

SEQ ID NO: 875748 - RNA, 19 nt, Artificial Sequence
  Description of Artificial Sequence: Synthetic oligonucleotide
  Sense strand starting at position 2605 of SEQ ID NO: 588590
acuggauaaucuuucugau

SEQ ID NO: 875749 - RNA, 19 nt, Artificial Sequence
  Description of Artificial Sequence: Synthetic oligonucleotide
  Antisense strand to SEQ ID NO: 875748
aucagaaagauuauccagu

SEQ ID NO: 875750 - RNA, 19 nt, Artificial Sequence
  Description of Artificial Sequence: Synthetic oligonucleotide
  Sense strand starting at position 2739 of SEQ ID NO: 588590
gccggagcggcaucgaaua

SEQ ID NO: 875751 - RNA, 19 nt, Artificial Sequence
  Description of Artificial Sequence: Synthetic oligonucleotide
  Antisense strand to SEQ ID NO: 875750
uauucgaugccgcuccggc

SEQ ID NO: 875752 - RNA, 19 nt, Artificial Sequence
  Description of Artificial Sequence: Synthetic oligonucleotide
  Sense strand starting at position 2831 of SEQ ID NO: 588590
agcccuuuacagggauaau

SEQ ID NO: 875753 - RNA, 19 nt, Artificial Sequence
  Description of Artificial Sequence: Synthetic oligonucleotide
  Antisense strand to SEQ ID NO: 875752
auuaucccuguaaagggcu

SEQ ID NO: 875754 - RNA, 19 nt, Artificial Sequence
  Description of Artificial Sequence: Synthetic oligonucleotide
  Sense strand starting at position 2842 of SEQ ID NO: 588590
gggauaaucccucaugcuu

SEQ ID NO: 875755 - RNA, 19 nt, Artificial Sequence
  Description of Artificial Sequence: Synthetic oligonucleotide
  Antisense strand to SEQ ID NO: 875754
aagcaugagggauuauccc

SEQ ID NO: 875756 - RNA, 19 nt, Artificial Sequence
  Description of Artificial Sequence: Synthetic oligonucleotide
  Sense strand starting at position 2900 of SEQ ID NO: 588590
accuuccuugauggauuaa

SEQ ID NO: 875757 - RNA, 19 nt, Artificial Sequence
  Description of Artificial Sequence: Synthetic oligonucleotide
  Antisense strand to SEQ ID NO: 875756
uuaauccaucaaggaaggu

SEQ ID NO: 875758 - RNA, 19 nt, Artificial Sequence
  Description of Artificial Sequence: Synthetic oligonucleotide
  Sense strand starting at position 2973 of SEQ ID NO: 588590
guagaaaugcugcaaauua

SEQ ID NO: 875759 - RNA, 19 nt, Artificial Sequence
  Description of Artificial Sequence: Synthetic oligonucleotide
  Antisense strand to SEQ ID NO: 875758
uaauuugcagcauuucuac

SEQ ID NO: 875760 - RNA, 19 nt, Artificial Sequence
  Description of Artificial Sequence: Synthetic oligonucleotide
  Sense strand starting at position 3110 of SEQ ID NO: 588590
cuggaugcugcucauagaa

SEQ ID NO: 875761 - RNA, 19 nt, Artificial Sequence
  Description of Artificial Sequence: Synthetic oligonucleotide
  Antisense strand to SEQ ID NO: 875760
uucuaugagcagcauccag

SEQ ID NO: 875762 - RNA, 19 nt, Artificial Sequence
  Description of Artificial Sequence: Synthetic oligonucleotide
  Sense strand starting at position 3155 of SEQ ID NO: 588590
ucguccucacauuacuaua

SEQ ID NO: 875763 - RNA, 19 nt, Artificial Sequence
  Description of Artificial Sequence: Synthetic oligonucleotide
  Antisense strand to SEQ ID NO: 875762
uauaguaaugugaggacga

SEQ ID NO: 875764 - RNA, 19 nt, Artificial Sequence
  Description of Artificial Sequence: Synthetic oligonucleotide
  Sense strand starting at position 3315 of SEQ ID NO: 588590
gaauccuucgcggaugaag

SEQ ID NO: 875765 - RNA, 19 nt, Artificial Sequence
  Description of Artificial Sequence: Synthetic oligonucleotide
  Antisense strand to SEQ ID NO: 875764
cuucauccgcgaaggauuc

SEQ ID NO: 875766 - RNA, 19 nt, Artificial Sequence
  Description of Artificial Sequence: Synthetic oligonucleotide
  Sense strand starting at position 3434 of SEQ ID NO: 588590
gcuuuauggccgcuaccua

SEQ ID NO: 875767 - RNA, 19 nt, Artificial Sequence
  Description of Artificial Sequence: Synthetic oligonucleotide
  Antisense strand to SEQ ID NO: 875766
uagguagcggccauaaagc

SEQ ID NO: 875768 - RNA, 19 nt, Artificial Sequence
  Description of Artificial Sequence: Synthetic oligonucleotide
  Sense strand starting at position 3476 of SEQ ID NO: 588590
agugacuugauaugguuaa

SEQ ID NO: 875769 - RNA, 19 nt, Artificial Sequence
  Description of Artificial Sequence: Synthetic oligonucleotide
  Antisense strand to SEQ ID NO: 875768
uuaaccauaucaagucacu

SEQ ID NO: 875770 - RNA, 19 nt, Artificial Sequence
  Description of Artificial Sequence: Synthetic oligonucleotide
  Sense strand starting at position 3537 of SEQ ID NO: 588590
agacguuguaaccaaguua

SEQ ID NO: 875771 - RNA, 19 nt, Artificial Sequence
  Description of Artificial Sequence: Synthetic oligonucleotide
  Antisense strand to SEQ ID NO: 875770
uaacuugguuacaacgucu

SEQ ID NO: 875772 - RNA, 19 nt, Artificial Sequence
  Description of Artificial Sequence: Synthetic oligonucleotide
  Sense strand starting at position 3646 of SEQ ID NO: 588590
cagguuagggcucaagcau

SEQ ID NO: 875773 - RNA, 19 nt, Artificial Sequence
  Description of Artificial Sequence: Synthetic oligonucleotide
  Antisense strand to SEQ ID NO: 875772
augcuugagcccuaaccug

SEQ ID NO: 875774 - RNA, 19 nt, Artificial Sequence
  Description of Artificial Sequence: Synthetic oligonucleotide
  Sense strand starting at position 3664 of SEQ ID NO: 588590
uuugcucuugaagauguga

SEQ ID NO: 875775 - RNA, 19 nt, Artificial Sequence
  Description of Artificial Sequence: Synthetic oligonucleotide
  Antisense strand to SEQ ID NO: 875774
ucacaucuucaagagcaaa

SEQ ID NO: 875776 - RNA, 19 nt, Artificial Sequence
  Description of Artificial Sequence: Synthetic oligonucleotide
  Sense strand starting at position 3675 of SEQ ID NO: 588590
agaugugaugucugugaag

SEQ ID NO: 875777 - RNA, 19 nt, Artificial Sequence
  Description of Artificial Sequence: Synthetic oligonucleotide
  Antisense strand to SEQ ID NO: 875776
cuucacagacaucacaucu

SEQ ID NO: 875778 - RNA, 19 nt, Artificial Sequence
  Description of Artificial Sequence: Synthetic oligonucleotide
  Sense strand starting at position 3677 of SEQ ID NO: 588590
augugaugucugugaagag

SEQ ID NO: 875779 - RNA, 19 nt, Artificial Sequence
  Description of Artificial Sequence: Synthetic oligonucleotide
  Antisense strand to SEQ ID NO: 875778
cucuucacagacaucacau

SEQ ID NO: 875780 - RNA, 19 nt, Artificial Sequence
  Description of Artificial Sequence: Synthetic oligonucleotide
  Sense strand starting at position 3968 of SEQ ID NO: 588590
aaagguaggcaguaauauu

SEQ ID NO: 875781 - RNA, 19 nt, Artificial Sequence
  Description of Artificial Sequence: Synthetic oligonucleotide
  Antisense strand to SEQ ID NO: 875780
aauauuacugccuaccuuu

SEQ ID NO: 875782 - RNA, 19 nt, Artificial Sequence
  Description of Artificial Sequence: Synthetic oligonucleotide
  Sense strand starting at position 177 of SEQ ID NO: 588591
aguguaaccuuaucaguca

SEQ ID NO: 875783 - RNA, 19 nt, Artificial Sequence
  Description of Artificial Sequence: Synthetic oligonucleotide
  Antisense strand to SEQ ID NO: 875782
ugacugauaagguuacacu

SEQ ID NO: 875784 - RNA, 19 nt, Artificial Sequence
  Description of Artificial Sequence: Synthetic oligonucleotide
  Sense strand starting at position 180 of SEQ ID NO: 588591
guaaccuuaucagucaaca

SEQ ID NO: 875785 - RNA, 19 nt, Artificial Sequence
  Description of Artificial Sequence: Synthetic oligonucleotide
  Antisense strand to SEQ ID NO: 875784
uguugacugauaagguuac

SEQ ID NO: 875786 - RNA, 19 nt, Artificial Sequence
  Description of Artificial Sequence: Synthetic oligonucleotide
  Sense strand starting at position 205 of SEQ ID NO: 588591
uauggagaauugccuaaug

SEQ ID NO: 875787 - RNA, 19 nt, Artificial Sequence
  Description of Artificial Sequence: Synthetic oligonucleotide
  Antisense strand to SEQ ID NO: 875786
cauuaggcaauucuccaua

SEQ ID NO: 875788 - RNA, 19 nt, Artificial Sequence
  Description of Artificial Sequence: Synthetic oligonucleotide
  Sense strand starting at position 207 of SEQ ID NO: 588591
uggagaauugccuaaugug

SEQ ID NO: 875789 - RNA, 19 nt, Artificial Sequence
  Description of Artificial Sequence: Synthetic oligonucleotide
  Antisense strand to SEQ ID NO: 875788
cacauuaggcaauucucca

SEQ ID NO: 875790 - RNA, 19 nt, Artificial Sequence
  Description of Artificial Sequence: Synthetic oligonucleotide
  Sense strand starting at position 213 of SEQ ID NO: 588591
auugccuaauguguaaaga

SEQ ID NO: 875791 - RNA, 19 nt, Artificial Sequence
  Description of Artificial Sequence: Synthetic oligonucleotide
  Antisense strand to SEQ ID NO: 875790
ucuuuacacauuaggcaau

SEQ ID NO: 875792 - RNA, 19 nt, Artificial Sequence
  Description of Artificial Sequence: Synthetic oligonucleotide
  Sense strand starting at position 214 of SEQ ID NO: 588591
uugccuaauguguaaagaa

SEQ ID NO: 875793 - RNA, 19 nt, Artificial Sequence
  Description of Artificial Sequence: Synthetic oligonucleotide
  Antisense strand to SEQ ID NO: 875792
uucuuuacacauuaggcaa

SEQ ID NO: 875794 - RNA, 19 nt, Artificial Sequence
  Description of Artificial Sequence: Synthetic oligonucleotide
  Sense strand starting at position 289 of SEQ ID NO: 588591
auccaacuguguuccuauu

SEQ ID NO: 875795 - RNA, 19 nt, Artificial Sequence
  Description of Artificial Sequence: Synthetic oligonucleotide
  Antisense strand to SEQ ID NO: 875794
aauaggaacacaguuggau

SEQ ID NO: 875796 - RNA, 19 nt, Artificial Sequence
  Description of Artificial Sequence: Synthetic oligonucleotide
  Sense strand starting at position 393 of SEQ ID NO: 588591
cuuuauaugcaucagugaa

SEQ ID NO: 875797 - RNA, 19 nt, Artificial Sequence
  Description of Artificial Sequence: Synthetic oligonucleotide
  Antisense strand to SEQ ID NO: 875796
uucacugaugcauauaaag

SEQ ID NO: 875798 - RNA, 19 nt, Artificial Sequence
  Description of Artificial Sequence: Synthetic oligonucleotide
  Sense strand starting at position 395 of SEQ ID NO: 588591
uuauaugcaucagugaaca

SEQ ID NO: 875799 - RNA, 19 nt, Artificial Sequence
  Description of Artificial Sequence: Synthetic oligonucleotide
  Antisense strand to SEQ ID NO: 875798
uguucacugaugcauauaa

SEQ ID NO: 875800 - RNA, 19 nt, Artificial Sequence
  Description of Artificial Sequence: Synthetic oligonucleotide
  Sense strand starting at position 670 of SEQ ID NO: 588591
uuuguaaacugccugauaa

SEQ ID NO: 875801 - RNA, 19 nt, Artificial Sequence
  Description of Artificial Sequence: Synthetic oligonucleotide
  Antisense strand to SEQ ID NO: 875800
uuaucaggcaguuuacaaa

SEQ ID NO: 875802 - RNA, 19 nt, Artificial Sequence
  Description of Artificial Sequence: Synthetic oligonucleotide
  Sense strand starting at position 671 of SEQ ID NO: 588591
uuguaaacugccugauaau

SEQ ID NO: 875803 - RNA, 19 nt, Artificial Sequence
  Description of Artificial Sequence: Synthetic oligonucleotide
  Antisense strand to SEQ ID NO: 875802
auuaucaggcaguuuacaa

SEQ ID NO: 875804 - RNA, 19 nt, Artificial Sequence
  Description of Artificial Sequence: Synthetic oligonucleotide
  Sense strand starting at position 672 of SEQ ID NO: 588591
uguaaacugccugauaaug

SEQ ID NO: 875805 - RNA, 19 nt, Artificial Sequence
  Description of Artificial Sequence: Synthetic oligonucleotide
  Antisense strand to SEQ ID NO: 875804
cauuaucaggcaguuuaca

SEQ ID NO: 875806 - RNA, 19 nt, Artificial Sequence
  Description of Artificial Sequence: Synthetic oligonucleotide
  Sense strand starting at position 706 of SEQ ID NO: 588591
ucuacugugaaggaauguu

SEQ ID NO: 875807 - RNA, 19 nt, Artificial Sequence
  Description of Artificial Sequence: Synthetic oligonucleotide
  Antisense strand to SEQ ID NO: 875806
aacauuccuucacaguaga

SEQ ID NO: 875808 - RNA, 19 nt, Artificial Sequence
  Description of Artificial Sequence: Synthetic oligonucleotide
  Sense strand starting at position 828 of SEQ ID NO: 588591
agaauaauaugggaacuua

SEQ ID NO: 875809 - RNA, 19 nt, Artificial Sequence
  Description of Artificial Sequence: Synthetic oligonucleotide
  Antisense strand to SEQ ID NO: 875808
uaaguucccauauuauucu

SEQ ID NO: 875810 - RNA, 19 nt, Artificial Sequence
  Description of Artificial Sequence: Synthetic oligonucleotide
  Sense strand starting at position 836 of SEQ ID NO: 588591
augggaacuuagcucaaua

SEQ ID NO: 875811 - RNA, 19 nt, Artificial Sequence
  Description of Artificial Sequence: Synthetic oligonucleotide
  Antisense strand to SEQ ID NO: 875810
uauugagcuaaguucccau

SEQ ID NO: 875812 - RNA, 19 nt, Artificial Sequence
  Description of Artificial Sequence: Synthetic oligonucleotide
  Sense strand starting at position 925 of SEQ ID NO: 588591
cuacuuaugugacucauau

SEQ ID NO: 875813 - RNA, 19 nt, Artificial Sequence
  Description of Artificial Sequence: Synthetic oligonucleotide
  Antisense strand to SEQ ID NO: 875812
auaugagucacauaaguag

SEQ ID NO: 875814 - RNA, 19 nt, Artificial Sequence
  Description of Artificial Sequence: Synthetic oligonucleotide
  Sense strand starting at position 1001 of SEQ ID NO: 588591
cuaucauugugaucuauau

SEQ ID NO: 875815 - RNA, 19 nt, Artificial Sequence
  Description of Artificial Sequence: Synthetic oligonucleotide
  Antisense strand to SEQ ID NO: 875814
auauagaucacaaugauag

SEQ ID NO: 875816 - RNA, 19 nt, Artificial Sequence
  Description of Artificial Sequence: Synthetic oligonucleotide
  Sense strand starting at position 1346 of SEQ ID NO: 588591
gacagauaguacuuugguu

SEQ ID NO: 875817 - RNA, 19 nt, Artificial Sequence
  Description of Artificial Sequence: Synthetic oligonucleotide
  Antisense strand to SEQ ID NO: 875816
aaccaaaguacuaucuguc

SEQ ID NO: 875818 - RNA, 19 nt, Artificial Sequence
  Description of Artificial Sequence: Synthetic oligonucleotide
  Sense strand starting at position 1348 of SEQ ID NO: 588591
cagauaguacuuugguuaa

SEQ ID NO: 875819 - RNA, 19 nt, Artificial Sequence
  Description of Artificial Sequence: Synthetic oligonucleotide
  Antisense strand to SEQ ID NO: 875818
uuaaccaaaguacuaucug

SEQ ID NO: 875820 - RNA, 19 nt, Artificial Sequence
  Description of Artificial Sequence: Synthetic oligonucleotide
  Sense strand starting at position 1352 of SEQ ID NO: 588591
uaguacuuugguuaacaga

SEQ ID NO: 875821 - RNA, 19 nt, Artificial Sequence
  Description of Artificial Sequence: Synthetic oligonucleotide
  Antisense strand to SEQ ID NO: 875820
ucuguuaaccaaaguacua

SEQ ID NO: 875822 - RNA, 19 nt, Artificial Sequence
  Description of Artificial Sequence: Synthetic oligonucleotide
  Sense strand starting at position 1517 of SEQ ID NO: 588591
gugcaagcuuaccuggaau

SEQ ID NO: 875823 - RNA, 19 nt, Artificial Sequence
  Description of Artificial Sequence: Synthetic oligonucleotide
  Antisense strand to SEQ ID NO: 875822
auuccagguaagcuugcac

SEQ ID NO: 875824 - RNA, 19 nt, Artificial Sequence
  Description of Artificial Sequence: Synthetic oligonucleotide
  Sense strand starting at position 1519 of SEQ ID NO: 588591
gcaagcuuaccuggaauau

SEQ ID NO: 875825 - RNA, 19 nt, Artificial Sequence
  Description of Artificial Sequence: Synthetic oligonucleotide
  Antisense strand to SEQ ID NO: 875824
auauuccagguaagcuugc

SEQ ID NO: 875826 - RNA, 19 nt, Artificial Sequence
  Description of Artificial Sequence: Synthetic oligonucleotide
  Sense strand starting at position 2013 of SEQ ID NO: 588591
aggcaacaggguuguuuaa

SEQ ID NO: 875827 - RNA, 19 nt, Artificial Sequence
  Description of Artificial Sequence: Synthetic oligonucleotide
  Antisense strand to SEQ ID NO: 875826
uuaaacaacccuguugccu

SEQ ID NO: 875828 - RNA, 19 nt, Artificial Sequence
  Description of Artificial Sequence: Synthetic oligonucleotide
  Sense strand starting at position 2015 of SEQ ID NO: 588591
gcaacaggguuguuuaaag

SEQ ID NO: 875829 - RNA, 19 nt, Artificial Sequence
  Description of Artificial Sequence: Synthetic oligonucleotide
  Antisense strand to SEQ ID NO: 875828
cuuuaaacaacccuguugc

SEQ ID NO: 875830 - RNA, 19 nt, Artificial Sequence
  Description of Artificial Sequence: Synthetic oligonucleotide
  Sense strand starting at position 2025 of SEQ ID NO: 588591
uguuuaaagaguuggaaac

SEQ ID NO: 875831 - RNA, 19 nt, Artificial Sequence
  Description of Artificial Sequence: Synthetic oligonucleotide
  Antisense strand to SEQ ID NO: 875830
guuuccaacucuuuaaaca

SEQ ID NO: 875832 - RNA, 19 nt, Artificial Sequence
  Description of Artificial Sequence: Synthetic oligonucleotide
  Sense strand starting at position 2088 of SEQ ID NO: 588591
auaugugacuguucugcaa

SEQ ID NO: 875833 - RNA, 19 nt, Artificial Sequence
  Description of Artificial Sequence: Synthetic oligonucleotide
  Antisense strand to SEQ ID NO: 875832
uugcagaacagucacauau

SEQ ID NO: 875834 - RNA, 19 nt, Artificial Sequence
  Description of Artificial Sequence: Synthetic oligonucleotide
  Sense strand starting at position 2092 of SEQ ID NO: 588591
gugacuguucugcaaucug

SEQ ID NO: 875835 - RNA, 19 nt, Artificial Sequence
  Description of Artificial Sequence: Synthetic oligonucleotide
  Antisense strand to SEQ ID NO: 875834
cagauugcagaacagucac

SEQ ID NO: 875836 - RNA, 19 nt, Artificial Sequence
  Description of Artificial Sequence: Synthetic oligonucleotide
  Sense strand starting at position 2144 of SEQ ID NO: 588591
augcuugcugacugacuaa

SEQ ID NO: 875837 - RNA, 19 nt, Artificial Sequence
  Description of Artificial Sequence: Synthetic oligonucleotide
  Antisense strand to SEQ ID NO: 875836
uuagucagucagcaagcau

SEQ ID NO: 875838 - RNA, 19 nt, Artificial Sequence
  Description of Artificial Sequence: Synthetic oligonucleotide
  Sense strand starting at position 2170 of SEQ ID NO: 588591
aaauaagacugugugggua

SEQ ID NO: 875839 - RNA, 19 nt, Artificial Sequence
  Description of Artificial Sequence: Synthetic oligonucleotide
  Antisense strand to SEQ ID NO: 875838
uacccacacagucuuauuu

SEQ ID NO: 875840 - RNA, 19 nt, Artificial Sequence
  Description of Artificial Sequence: Synthetic oligonucleotide
  Sense strand starting at position 2178 of SEQ ID NO: 588591
cuguguggguagaagagua

SEQ ID NO: 875841 - RNA, 19 nt, Artificial Sequence
  Description of Artificial Sequence: Synthetic oligonucleotide
  Antisense strand to SEQ ID NO: 875840
uacucuucuacccacacag

SEQ ID NO: 875842 - RNA, 19 nt, Artificial Sequence
  Description of Artificial Sequence: Synthetic oligonucleotide
  Sense strand starting at position 2273 of SEQ ID NO: 588591
acuccaaauguuggguaaa

SEQ ID NO: 875843 - RNA, 19 nt, Artificial Sequence
  Description of Artificial Sequence: Synthetic oligonucleotide
  Antisense strand to SEQ ID NO: 875842
uuuacccaacauuuggagu

SEQ ID NO: 875844 - RNA, 19 nt, Artificial Sequence
  Description of Artificial Sequence: Synthetic oligonucleotide
  Sense strand starting at position 2276 of SEQ ID NO: 588591
ccaaauguuggguaaagcu

SEQ ID NO: 875845 - RNA, 19 nt, Artificial Sequence
  Description of Artificial Sequence: Synthetic oligonucleotide
  Antisense strand to SEQ ID NO: 875844
agcuuuacccaacauuugg

SEQ ID NO: 875846 - RNA, 19 nt, Artificial Sequence
  Description of Artificial Sequence: Synthetic oligonucleotide
  Sense strand starting at position 3696 of SEQ ID NO: 588591
ugagaugguaucuguugca

SEQ ID NO: 875847 - RNA, 19 nt, Artificial Sequence
  Description of Artificial Sequence: Synthetic oligonucleotide
  Antisense strand to SEQ ID NO: 875846
ugcaacagauaccaucuca

SEQ ID NO: 875848 - RNA, 19 nt, Artificial Sequence
  Description of Artificial Sequence: Synthetic oligonucleotide
  Sense strand starting at position 3814 of SEQ ID NO: 588591
acucauuaccagugucuau

SEQ ID NO: 875849 - RNA, 19 nt, Artificial Sequence
  Description of Artificial Sequence: Synthetic oligonucleotide
  Antisense strand to SEQ ID NO: 875848
auagacacugguaaugagu

SEQ ID NO: 875850 - RNA, 19 nt, Artificial Sequence
  Description of Artificial Sequence: Synthetic oligonucleotide
  Sense strand starting at position 3841 of SEQ ID NO: 588591
guaugcaucccugacagau

SEQ ID NO: 875851 - RNA, 19 nt, Artificial Sequence
  Description of Artificial Sequence: Synthetic oligonucleotide
  Antisense strand to SEQ ID NO: 875850
aucugucagggaugcauac

SEQ ID NO: 875852 - RNA, 19 nt, Artificial Sequence
  Description of Artificial Sequence: Synthetic oligonucleotide
  Sense strand starting at position 3891 of SEQ ID NO: 588591
uagucacagugacugauaa

SEQ ID NO: 875853 - RNA, 19 nt, Artificial Sequence
  Description of Artificial Sequence: Synthetic oligonucleotide
  Antisense strand to SEQ ID NO: 875852
uuaucagucacugugacua

SEQ ID NO: 875854 - RNA, 19 nt, Artificial Sequence
  Description of Artificial Sequence: Synthetic oligonucleotide
  Sense strand starting at position 3898 of SEQ ID NO: 588591
agugacugauaacaugaaa

SEQ ID NO: 875855 - RNA, 19 nt, Artificial Sequence
  Description of Artificial Sequence: Synthetic oligonucleotide
  Antisense strand to SEQ ID NO: 875854
uuucauguuaucagucacu

SEQ ID NO: 875856 - RNA, 19 nt, Artificial Sequence
  Description of Artificial Sequence: Synthetic oligonucleotide
  Sense strand starting at position 3927 of SEQ ID NO: 588591
gagaaaggacucuggccua

SEQ ID NO: 875857 - RNA, 19 nt, Artificial Sequence
  Description of Artificial Sequence: Synthetic oligonucleotide
  Antisense strand to SEQ ID NO: 875856
uaggccagaguccuuucuc

SEQ ID NO: 875858 - RNA, 19 nt, Artificial Sequence
  Description of Artificial Sequence: Synthetic oligonucleotide
  Sense strand starting at position 3952 of SEQ ID NO: 588591
uucccugugcauuaugaga

SEQ ID NO: 875859 - RNA, 19 nt, Artificial Sequence
  Description of Artificial Sequence: Synthetic oligonucleotide
  Antisense strand to SEQ ID NO: 875858
ucucauaaugcacagggaa

SEQ ID NO: 875860 - RNA, 19 nt, Artificial Sequence
  Description of Artificial Sequence: Synthetic oligonucleotide
  Sense strand starting at position 3960 of SEQ ID NO: 588591
gcauuaugagaagacagcu

SEQ ID NO: 875861 - RNA, 19 nt, Artificial Sequence
  Description of Artificial Sequence: Synthetic oligonucleotide
  Antisense strand to SEQ ID NO: 875860
agcugucuucucauaaugc

SEQ ID NO: 875862 - RNA, 19 nt, Artificial Sequence
  Description of Artificial Sequence: Synthetic oligonucleotide
  Sense strand starting at position 81 of SEQ ID NO: 588592
uugggugaaugaucugguu

SEQ ID NO: 875863 - RNA, 19 nt, Artificial Sequence
  Description of Artificial Sequence: Synthetic oligonucleotide
  Antisense strand to SEQ ID NO: 875862
aaccagaucauucacccaa

SEQ ID NO: 875864 - RNA, 19 nt, Artificial Sequence
  Description of Artificial Sequence: Synthetic oligonucleotide
  Sense strand starting at position 83 of SEQ ID NO: 588592
gggugaaugaucugguuag

SEQ ID NO: 875865 - RNA, 19 nt, Artificial Sequence
  Description of Artificial Sequence: Synthetic oligonucleotide
  Antisense strand to SEQ ID NO: 875864
cuaaccagaucauucaccc

SEQ ID NO: 875866 - RNA, 19 nt, Artificial Sequence
  Description of Artificial Sequence: Synthetic oligonucleotide
  Sense strand starting at position 87 of SEQ ID NO: 588592
gaaugaucugguuaguuua

SEQ ID NO: 875867 - RNA, 19 nt, Artificial Sequence
  Description of Artificial Sequence: Synthetic oligonucleotide
  Antisense strand to SEQ ID NO: 875866
uaaacuaaccagaucauuc

SEQ ID NO: 875868 - RNA, 19 nt, Artificial Sequence
  Description of Artificial Sequence: Synthetic oligonucleotide
  Sense strand starting at position 327 of SEQ ID NO: 588592
uguccugcucuuuauaaga

SEQ ID NO: 875869 - RNA, 19 nt, Artificial Sequence
  Description of Artificial Sequence: Synthetic oligonucleotide
  Antisense strand to SEQ ID NO: 875868
ucuuauaaagagcaggaca

SEQ ID NO: 875870 - RNA, 19 nt, Artificial Sequence
  Description of Artificial Sequence: Synthetic oligonucleotide
  Sense strand starting at position 381 of SEQ ID NO: 588592
aacugcgugguuuagaaau

SEQ ID NO: 875871 - RNA, 19 nt, Artificial Sequence
  Description of Artificial Sequence: Synthetic oligonucleotide
  Antisense strand to SEQ ID NO: 875870
auuucuaaaccacgcaguu

SEQ ID NO: 875872 - RNA, 19 nt, Artificial Sequence
  Description of Artificial Sequence: Synthetic oligonucleotide
  Sense strand starting at position 491 of SEQ ID NO: 588592
aucugaagccaauguuaag

SEQ ID NO: 875873 - RNA, 19 nt, Artificial Sequence
  Description of Artificial Sequence: Synthetic oligonucleotide
  Antisense strand to SEQ ID NO: 875872
cuuaacauuggcuucagau

SEQ ID NO: 875874 - RNA, 19 nt, Artificial Sequence
  Description of Artificial Sequence: Synthetic oligonucleotide
  Sense strand starting at position 508 of SEQ ID NO: 588592
agucuuucugacuauuauu

SEQ ID NO: 875875 - RNA, 19 nt, Artificial Sequence
  Description of Artificial Sequence: Synthetic oligonucleotide
  Antisense strand to SEQ ID NO: 875874
aauaauagucagaaagacu

SEQ ID NO: 875876 - RNA, 19 nt, Artificial Sequence
  Description of Artificial Sequence: Synthetic oligonucleotide
  Sense strand starting at position 675 of SEQ ID NO: 588592
gaaaucagauuguuuguga

SEQ ID NO: 875877 - RNA, 19 nt, Artificial Sequence
  Description of Artificial Sequence: Synthetic oligonucleotide
  Antisense strand to SEQ ID NO: 875876
ucacaaacaaucugauuuc

SEQ ID NO: 875878 - RNA, 19 nt, Artificial Sequence
  Description of Artificial Sequence: Synthetic oligonucleotide
  Sense strand starting at position 676 of SEQ ID NO: 588592
aaaucagauuguuugugaa

SEQ ID NO: 875879 - RNA, 19 nt, Artificial Sequence
  Description of Artificial Sequence: Synthetic oligonucleotide
  Antisense strand to SEQ ID NO: 875878
uucacaaacaaucugauuu

SEQ ID NO: 875880 - RNA, 19 nt, Artificial Sequence
  Description of Artificial Sequence: Synthetic oligonucleotide
  Sense strand starting at position 678 of SEQ ID NO: 588592
aucagauuguuugugaaga

SEQ ID NO: 875881 - RNA, 19 nt, Artificial Sequence
  Description of Artificial Sequence: Synthetic oligonucleotide
  Antisense strand to SEQ ID NO: 875880
ucuucacaaacaaucugau

SEQ ID NO: 875882 - RNA, 19 nt, Artificial Sequence
  Description of Artificial Sequence: Synthetic oligonucleotide
  Sense strand starting at position 691 of SEQ ID NO: 588592
ugaagaaacccgcaucuua

SEQ ID NO: 875883 - RNA, 19 nt, Artificial Sequence
  Description of Artificial Sequence: Synthetic oligonucleotide
  Antisense strand to SEQ ID NO: 875882
uaagaugcggguuucuuca

SEQ ID NO: 875884 - RNA, 19 nt, Artificial Sequence
  Description of Artificial Sequence: Synthetic oligonucleotide
  Sense strand starting at position 727 of SEQ ID NO: 588592
accuuauggcuccagaauu

SEQ ID NO: 875885 - RNA, 19 nt, Artificial Sequence
  Description of Artificial Sequence: Synthetic oligonucleotide
  Antisense strand to SEQ ID NO: 875884
aauucuggagccauaaggu

SEQ ID NO: 875886 - RNA, 19 nt, Artificial Sequence
  Description of Artificial Sequence: Synthetic oligonucleotide
  Sense strand starting at position 867 of SEQ ID NO: 588592
ugaacauguccugaagcaa

SEQ ID NO: 875887 - RNA, 19 nt, Artificial Sequence
  Description of Artificial Sequence: Synthetic oligonucleotide
  Antisense strand to SEQ ID NO: 875886
uugcuucaggacauguuca

SEQ ID NO: 875888 - RNA, 19 nt, Artificial Sequence
  Description of Artificial Sequence: Synthetic oligonucleotide
  Sense strand starting at position 1260 of SEQ ID NO: 588592
ggguuuguuacacaggcaa

SEQ ID NO: 875889 - RNA, 19 nt, Artificial Sequence
  Description of Artificial Sequence: Synthetic oligonucleotide
  Antisense strand to SEQ ID NO: 875888
uugccuguguaacaaaccc

SEQ ID NO: 875890 - RNA, 19 nt, Artificial Sequence
  Description of Artificial Sequence: Synthetic oligonucleotide
  Sense strand starting at position 1281 of SEQ ID NO: 588592
uguguacgucuuucuguau

SEQ ID NO: 875891 - RNA, 19 nt, Artificial Sequence
  Description of Artificial Sequence: Synthetic oligonucleotide
  Antisense strand to SEQ ID NO: 875890
auacagaaagacguacaca

SEQ ID NO: 875892 - RNA, 19 nt, Artificial Sequence
  Description of Artificial Sequence: Synthetic oligonucleotide
  Sense strand starting at position 1288 of SEQ ID NO: 588592
gucuuucuguauuuccaau

SEQ ID NO: 875893 - RNA, 19 nt, Artificial Sequence
  Description of Artificial Sequence: Synthetic oligonucleotide
  Antisense strand to SEQ ID NO: 875892
auuggaaauacagaaagac

SEQ ID NO: 875894 - RNA, 19 nt, Artificial Sequence
  Description of Artificial Sequence: Synthetic oligonucleotide
  Sense strand starting at position 1325 of SEQ ID NO: 588592
uuauuaagaguuuggcaaa

SEQ ID NO: 875895 - RNA, 19 nt, Artificial Sequence
  Description of Artificial Sequence: Synthetic oligonucleotide
  Antisense strand to SEQ ID NO: 875894
uuugccaaacucuuaauaa

SEQ ID NO: 875896 - RNA, 19 nt, Artificial Sequence
  Description of Artificial Sequence: Synthetic oligonucleotide
  Sense strand starting at position 1382 of SEQ ID NO: 588592
aaaugcucuggaugucuga

SEQ ID NO: 875897 - RNA, 19 nt, Artificial Sequence
  Description of Artificial Sequence: Synthetic oligonucleotide
  Antisense strand to SEQ ID NO: 875896
ucagacauccagagcauuu

SEQ ID NO: 875898 - RNA, 19 nt, Artificial Sequence
  Description of Artificial Sequence: Synthetic oligonucleotide
  Sense strand starting at position 1385 of SEQ ID NO: 588592
ugcucuggaugucugagaa

SEQ ID NO: 875899 - RNA, 19 nt, Artificial Sequence
  Description of Artificial Sequence: Synthetic oligonucleotide
  Antisense strand to SEQ ID NO: 875898
uucucagacauccagagca

SEQ ID NO: 875900 - RNA, 19 nt, Artificial Sequence
  Description of Artificial Sequence: Synthetic oligonucleotide
  Sense strand starting at position 1409 of SEQ ID NO: 588592
uugauucuauuccuggcaa

SEQ ID NO: 875901 - RNA, 19 nt, Artificial Sequence
  Description of Artificial Sequence: Synthetic oligonucleotide
  Antisense strand to SEQ ID NO: 875900
uugccaggaauagaaucaa

SEQ ID NO: 875902 - RNA, 19 nt, Artificial Sequence
  Description of Artificial Sequence: Synthetic oligonucleotide
  Sense strand starting at position 1475 of SEQ ID NO: 588592
uugacauucgcauaaacaa

SEQ ID NO: 875903 - RNA, 19 nt, Artificial Sequence
  Description of Artificial Sequence: Synthetic oligonucleotide
  Antisense strand to SEQ ID NO: 875902
uuguuuaugcgaaugucaa

SEQ ID NO: 875904 - RNA, 19 nt, Artificial Sequence
  Description of Artificial Sequence: Synthetic oligonucleotide
  Sense strand starting at position 1764 of SEQ ID NO: 588592
agaagacacgauugcucaa

SEQ ID NO: 875905 - RNA, 19 nt, Artificial Sequence
  Description of Artificial Sequence: Synthetic oligonucleotide
  Antisense strand to SEQ ID NO: 875904
uugagcaaucgugucuucu

SEQ ID NO: 875906 - RNA, 19 nt, Artificial Sequence
  Description of Artificial Sequence: Synthetic oligonucleotide
  Sense strand starting at position 2028 of SEQ ID NO: 588592
cagacuuggcugcaaugau

SEQ ID NO: 875907 - RNA, 19 nt, Artificial Sequence
  Description of Artificial Sequence: Synthetic oligonucleotide
  Antisense strand to SEQ ID NO: 875906
aucauugcagccaagucug

SEQ ID NO: 875908 - RNA, 19 nt, Artificial Sequence
  Description of Artificial Sequence: Synthetic oligonucleotide
  Sense strand starting at position 2188 of SEQ ID NO: 588592
uguauucccagagguauag

SEQ ID NO: 875909 - RNA, 19 nt, Artificial Sequence
  Description of Artificial Sequence: Synthetic oligonucleotide
  Antisense strand to SEQ ID NO: 875908
cuauaccucugggaauaca

SEQ ID NO: 875910 - RNA, 19 nt, Artificial Sequence
  Description of Artificial Sequence: Synthetic oligonucleotide
  Sense strand starting at position 2252 of SEQ ID NO: 588592
accagaaaucugggucuau

SEQ ID NO: 875911 - RNA, 19 nt, Artificial Sequence
  Description of Artificial Sequence: Synthetic oligonucleotide
  Antisense strand to SEQ ID NO: 875910
auagacccagauuucuggu

SEQ ID NO: 875912 - RNA, 19 nt, Artificial Sequence
  Description of Artificial Sequence: Synthetic oligonucleotide
  Sense strand starting at position 2253 of SEQ ID NO: 588592
ccagaaaucugggucuauu

SEQ ID NO: 875913 - RNA, 19 nt, Artificial Sequence
  Description of Artificial Sequence: Synthetic oligonucleotide
  Antisense strand to SEQ ID NO: 875912
aauagacccagauuucugg

SEQ ID NO: 875914 - RNA, 19 nt, Artificial Sequence
  Description of Artificial Sequence: Synthetic oligonucleotide
  Sense strand starting at position 2474 of SEQ ID NO: 588592
gccuaaucugccuaauaug

SEQ ID NO: 875915 - RNA, 19 nt, Artificial Sequence
  Description of Artificial Sequence: Synthetic oligonucleotide
  Antisense strand to SEQ ID NO: 875914
cauauuaggcagauuaggc

SEQ ID NO: 875916 - RNA, 19 nt, Artificial Sequence
  Description of Artificial Sequence: Synthetic oligonucleotide
  Sense strand starting at position 2512 of SEQ ID NO: 588592
gcaugcuuuguuguauguu

SEQ ID NO: 875917 - RNA, 19 nt, Artificial Sequence
  Description of Artificial Sequence: Synthetic oligonucleotide
  Antisense strand to SEQ ID NO: 875916
aacauacaacaaagcaugc

SEQ ID NO: 875918 - RNA, 19 nt, Artificial Sequence
  Description of Artificial Sequence: Synthetic oligonucleotide
  Sense strand starting at position 2734 of SEQ ID NO: 588592
ggagagauguggucaggcu

SEQ ID NO: 875919 - RNA, 19 nt, Artificial Sequence
  Description of Artificial Sequence: Synthetic oligonucleotide
  Antisense strand to SEQ ID NO: 875918
agccugaccacaucucucc

SEQ ID NO: 875920 - RNA, 19 nt, Artificial Sequence
  Description of Artificial Sequence: Synthetic oligonucleotide
  Sense strand starting at position 2735 of SEQ ID NO: 588592
gagagauguggucaggcua

SEQ ID NO: 875921 - RNA, 19 nt, Artificial Sequence
  Description of Artificial Sequence: Synthetic oligonucleotide
  Antisense strand to SEQ ID NO: 875920
uagccugaccacaucucuc

SEQ ID NO: 875922 - RNA, 19 nt, Artificial Sequence
  Description of Artificial Sequence: Synthetic oligonucleotide
  Sense strand starting at position 2782 of SEQ ID NO: 588592
gccucaaaugaugauucca

SEQ ID NO: 875923 - RNA, 19 nt, Artificial Sequence
  Description of Artificial Sequence: Synthetic oligonucleotide
  Antisense strand to SEQ ID NO: 875922
uggaaucaucauuugaggc

SEQ ID NO: 875924 - RNA, 19 nt, Artificial Sequence
  Description of Artificial Sequence: Synthetic oligonucleotide
  Sense strand starting at position 2884 of SEQ ID NO: 588592
gaugguucccuguauacag

SEQ ID NO: 875925 - RNA, 19 nt, Artificial Sequence
  Description of Artificial Sequence: Synthetic oligonucleotide
  Antisense strand to SEQ ID NO: 875924
cuguauacagggaaccauc

SEQ ID NO: 875926 - RNA, 19 nt, Artificial Sequence
  Description of Artificial Sequence: Synthetic oligonucleotide
  Sense strand starting at position 2914 of SEQ ID NO: 588592
ccaugaauugcucauacug

SEQ ID NO: 875927 - RNA, 19 nt, Artificial Sequence
  Description of Artificial Sequence: Synthetic oligonucleotide
  Antisense strand to SEQ ID NO: 875926
caguaugagcaauucaugg

SEQ ID NO: 875928 - RNA, 19 nt, Artificial Sequence
  Description of Artificial Sequence: Synthetic oligonucleotide
  Sense strand starting at position 3031 of SEQ ID NO: 588592
cccaaagcuguguuacguu

SEQ ID NO: 875929 - RNA, 19 nt, Artificial Sequence
  Description of Artificial Sequence: Synthetic oligonucleotide
  Antisense strand to SEQ ID NO: 875928
aacguaacacagcuuuggg

SEQ ID NO: 875930 - RNA, 19 nt, Artificial Sequence
  Description of Artificial Sequence: Synthetic oligonucleotide
  Sense strand starting at position 3036 of SEQ ID NO: 588592
agcuguguuacguuugucu

SEQ ID NO: 875931 - RNA, 19 nt, Artificial Sequence
  Description of Artificial Sequence: Synthetic oligonucleotide
  Antisense strand to SEQ ID NO: 875930
agacaaacguaacacagcu

SEQ ID NO: 875932 - RNA, 19 nt, Artificial Sequence
  Description of Artificial Sequence: Synthetic oligonucleotide
  Sense strand starting at position 3094 of SEQ ID NO: 588592
uugcaaugaccauauuguu

SEQ ID NO: 875933 - RNA, 19 nt, Artificial Sequence
  Description of Artificial Sequence: Synthetic oligonucleotide
  Antisense strand to SEQ ID NO: 875932
aacaauauggucauugcaa

SEQ ID NO: 875934 - RNA, 19 nt, Artificial Sequence
  Description of Artificial Sequence: Synthetic oligonucleotide
  Sense strand starting at position 3148 of SEQ ID NO: 588592
uucuuuggccucgugaguu

SEQ ID NO: 875935 - RNA, 19 nt, Artificial Sequence
  Description of Artificial Sequence: Synthetic oligonucleotide
  Antisense strand to SEQ ID NO: 875934
aacucacgaggccaaagaa

SEQ ID NO: 875936 - RNA, 19 nt, Artificial Sequence
  Description of Artificial Sequence: Synthetic oligonucleotide
  Sense strand starting at position 3785 of SEQ ID NO: 588592
cuuccaauaguagguugaa

SEQ ID NO: 875937 - RNA, 19 nt, Artificial Sequence
  Description of Artificial Sequence: Synthetic oligonucleotide
  Antisense strand to SEQ ID NO: 875936
uucaaccuacuauuggaag

SEQ ID NO: 875938 - RNA, 19 nt, Artificial Sequence
  Description of Artificial Sequence: Synthetic oligonucleotide
  Sense strand starting at position 3786 of SEQ ID NO: 588592
uuccaauaguagguugaau

SEQ ID NO: 875939 - RNA, 19 nt, Artificial Sequence
  Description of Artificial Sequence: Synthetic oligonucleotide
  Antisense strand to SEQ ID NO: 875938
auucaaccuacuauuggaa

SEQ ID NO: 875940 - RNA, 19 nt, Artificial Sequence
  Description of Artificial Sequence: Synthetic oligonucleotide
  Sense strand starting at position 3788 of SEQ ID NO: 588592
ccaauaguagguugaauac

SEQ ID NO: 875941 - RNA, 19 nt, Artificial Sequence
  Description of Artificial Sequence: Synthetic oligonucleotide
  Antisense strand to SEQ ID NO: 875940
guauucaaccuacuauugg

SEQ ID NO: 875942 - RNA, 19 nt, Artificial Sequence
  Description of Artificial Sequence: Synthetic oligonucleotide
  Sense strand starting at position 158 of SEQ ID NO: 588593
acugacuucuugccaugua

SEQ ID NO: 875943 - RNA, 19 nt, Artificial Sequence
  Description of Artificial Sequence: Synthetic oligonucleotide
  Antisense strand to SEQ ID NO: 875942
uacauggcaagaagucagu

SEQ ID NO: 875944 - RNA, 19 nt, Artificial Sequence
  Description of Artificial Sequence: Synthetic oligonucleotide
  Sense strand starting at position 223 of SEQ ID NO: 588593
gccauaaucccaugagaug

SEQ ID NO: 875945 - RNA, 19 nt, Artificial Sequence
  Description of Artificial Sequence: Synthetic oligonucleotide
  Antisense strand to SEQ ID NO: 875944
caucucaugggauuauggc

SEQ ID NO: 875946 - RNA, 19 nt, Artificial Sequence
  Description of Artificial Sequence: Synthetic oligonucleotide
  Sense strand starting at position 226 of SEQ ID NO: 588593
auaaucccaugagaugaau

SEQ ID NO: 875947 - RNA, 19 nt, Artificial Sequence
  Description of Artificial Sequence: Synthetic oligonucleotide
  Antisense strand to SEQ ID NO: 875946
auucaucucaugggauuau

SEQ ID NO: 875948 - RNA, 19 nt, Artificial Sequence
  Description of Artificial Sequence: Synthetic oligonucleotide
  Sense strand starting at position 391 of SEQ ID NO: 588593
uccaguuggaagugguaaa

SEQ ID NO: 875949 - RNA, 19 nt, Artificial Sequence
  Description of Artificial Sequence: Synthetic oligonucleotide
  Antisense strand to SEQ ID NO: 875948
uuuaccacuuccaacugga

SEQ ID NO: 875950 - RNA, 19 nt, Artificial Sequence
  Description of Artificial Sequence: Synthetic oligonucleotide
  Sense strand starting at position 457 of SEQ ID NO: 588593
aaauuaggagugugaccua

SEQ ID NO: 875951 - RNA, 19 nt, Artificial Sequence
  Description of Artificial Sequence: Synthetic oligonucleotide
  Antisense strand to SEQ ID NO: 875950
uaggucacacuccuaauuu

SEQ ID NO: 875952 - RNA, 19 nt, Artificial Sequence
  Description of Artificial Sequence: Synthetic oligonucleotide
  Sense strand starting at position 460 of SEQ ID NO: 588593
uuaggagugugaccuaaag

SEQ ID NO: 875953 - RNA, 19 nt, Artificial Sequence
  Description of Artificial Sequence: Synthetic oligonucleotide
  Antisense strand to SEQ ID NO: 875952
cuuuaggucacacuccuaa

SEQ ID NO: 875954 - RNA, 19 nt, Artificial Sequence
  Description of Artificial Sequence: Synthetic oligonucleotide
  Sense strand starting at position 503 of SEQ ID NO: 588593
uggauuacagaagguaagu

SEQ ID NO: 875955 - RNA, 19 nt, Artificial Sequence
  Description of Artificial Sequence: Synthetic oligonucleotide
  Antisense strand to SEQ ID NO: 875954
acuuaccuucuguaaucca

SEQ ID NO: 875956 - RNA, 19 nt, Artificial Sequence
  Description of Artificial Sequence: Synthetic oligonucleotide
  Sense strand starting at position 514 of SEQ ID NO: 588593
agguaaguuuagguuuaaa

SEQ ID NO: 875957 - RNA, 19 nt, Artificial Sequence
  Description of Artificial Sequence: Synthetic oligonucleotide
  Antisense strand to SEQ ID NO: 875956
uuuaaaccuaaacuuaccu

SEQ ID NO: 875958 - RNA, 19 nt, Artificial Sequence
  Description of Artificial Sequence: Synthetic oligonucleotide
  Sense strand starting at position 617 of SEQ ID NO: 588593
auuuaaagauucugagcau

SEQ ID NO: 875959 - RNA, 19 nt, Artificial Sequence
  Description of Artificial Sequence: Synthetic oligonucleotide
  Antisense strand to SEQ ID NO: 875958
augcucagaaucuuuaaau

SEQ ID NO: 875960 - RNA, 19 nt, Artificial Sequence
  Description of Artificial Sequence: Synthetic oligonucleotide
  Sense strand starting at position 620 of SEQ ID NO: 588593
uaaagauucugagcauggu

SEQ ID NO: 875961 - RNA, 19 nt, Artificial Sequence
  Description of Artificial Sequence: Synthetic oligonucleotide
  Antisense strand to SEQ ID NO: 875960
accaugcucagaaucuuua

SEQ ID NO: 875962 - RNA, 19 nt, Artificial Sequence
  Description of Artificial Sequence: Synthetic oligonucleotide
  Sense strand starting at position 623 of SEQ ID NO: 588593
agauucugagcaugguaca

SEQ ID NO: 875963 - RNA, 19 nt, Artificial Sequence
  Description of Artificial Sequence: Synthetic oligonucleotide
  Antisense strand to SEQ ID NO: 875962
uguaccaugcucagaaucu

SEQ ID NO: 875964 - RNA, 19 nt, Artificial Sequence
  Description of Artificial Sequence: Synthetic oligonucleotide
  Sense strand starting at position 636 of SEQ ID NO: 588593
gguacaguaucuccaagga

SEQ ID NO: 875965 - RNA, 19 nt, Artificial Sequence
  Description of Artificial Sequence: Synthetic oligonucleotide
  Antisense strand to SEQ ID NO: 875964
uccuuggagauacuguacc

SEQ ID NO: 875966 - RNA, 19 nt, Artificial Sequence
  Description of Artificial Sequence: Synthetic oligonucleotide
  Sense strand starting at position 683 of SEQ ID NO: 588593
ggugucaccaucuacugua

SEQ ID NO: 875967 - RNA, 19 nt, Artificial Sequence
  Description of Artificial Sequence: Synthetic oligonucleotide
  Antisense strand to SEQ ID NO: 875966
uacaguagauggugacacc

SEQ ID NO: 875968 - RNA, 19 nt, Artificial Sequence
  Description of Artificial Sequence: Synthetic oligonucleotide
  Sense strand starting at position 778 of SEQ ID NO: 588593
ccuggugccgcugauaaga

SEQ ID NO: 875969 - RNA, 19 nt, Artificial Sequence
  Description of Artificial Sequence: Synthetic oligonucleotide
  Antisense strand to SEQ ID NO: 875968
ucuuaucagcggcaccagg

SEQ ID NO: 875970 - RNA, 19 nt, Artificial Sequence
  Description of Artificial Sequence: Synthetic oligonucleotide
  Sense strand starting at position 828 of SEQ ID NO: 588593
cagccagcugucgagaaau

SEQ ID NO: 875971 - RNA, 19 nt, Artificial Sequence
  Description of Artificial Sequence: Synthetic oligonucleotide
  Antisense strand to SEQ ID NO: 875970
auuucucgacagcuggcug

SEQ ID NO: 875972 - RNA, 19 nt, Artificial Sequence
  Description of Artificial Sequence: Synthetic oligonucleotide
  Sense strand starting at position 834 of SEQ ID NO: 588593
gcugucgagaaauguacaa

SEQ ID NO: 875973 - RNA, 19 nt, Artificial Sequence
  Description of Artificial Sequence: Synthetic oligonucleotide
  Antisense strand to SEQ ID NO: 875972
uuguacauuucucgacagc

SEQ ID NO: 875974 - RNA, 19 nt, Artificial Sequence
  Description of Artificial Sequence: Synthetic oligonucleotide
  Sense strand starting at position 836 of SEQ ID NO: 588593
ugucgagaaauguacaaug

SEQ ID NO: 875975 - RNA, 19 nt, Artificial Sequence
  Description of Artificial Sequence: Synthetic oligonucleotide
  Antisense strand to SEQ ID NO: 875974
cauuguacauuucucgaca

SEQ ID NO: 875976 - RNA, 19 nt, Artificial Sequence
  Description of Artificial Sequence: Synthetic oligonucleotide
  Sense strand starting at position 855 of SEQ ID NO: 588593
agauuauacugagaaggaa

SEQ ID NO: 875977 - RNA, 19 nt, Artificial Sequence
  Description of Artificial Sequence: Synthetic oligonucleotide
  Antisense strand to SEQ ID NO: 875976
uuccuucucaguauaaucu

SEQ ID NO: 875978 - RNA, 19 nt, Artificial Sequence
  Description of Artificial Sequence: Synthetic oligonucleotide
  Sense strand starting at position 1129 of SEQ ID NO: 588593
aaagaugcucuugggucua

SEQ ID NO: 875979 - RNA, 19 nt, Artificial Sequence
  Description of Artificial Sequence: Synthetic oligonucleotide
  Antisense strand to SEQ ID NO: 875978
uagacccaagagcaucuuu

SEQ ID NO: 875980 - RNA, 19 nt, Artificial Sequence
  Description of Artificial Sequence: Synthetic oligonucleotide
  Sense strand starting at position 1238 of SEQ ID NO: 588593
ugguguuggagucacugua

SEQ ID NO: 875981 - RNA, 19 nt, Artificial Sequence
  Description of Artificial Sequence: Synthetic oligonucleotide
  Antisense strand to SEQ ID NO: 875980
uacagugacuccaacacca

SEQ ID NO: 875982 - RNA, 19 nt, Artificial Sequence
  Description of Artificial Sequence: Synthetic oligonucleotide
  Sense strand starting at position 1463 of SEQ ID NO: 588593
ggucaaacgauugacuguu

SEQ ID NO: 875983 - RNA, 19 nt, Artificial Sequence
  Description of Artificial Sequence: Synthetic oligonucleotide
  Antisense strand to SEQ ID NO: 875982
aacagucaaucguuugacc

SEQ ID NO: 875984 - RNA, 19 nt, Artificial Sequence
  Description of Artificial Sequence: Synthetic oligonucleotide
  Sense strand starting at position 1471 of SEQ ID NO: 588593
gauugacuguucccagucu

SEQ ID NO: 875985 - RNA, 19 nt, Artificial Sequence
  Description of Artificial Sequence: Synthetic oligonucleotide
  Antisense strand to SEQ ID NO: 875984
agacugggaacagucaauc

SEQ ID NO: 875986 - RNA, 19 nt, Artificial Sequence
  Description of Artificial Sequence: Synthetic oligonucleotide
  Sense strand starting at position 2667 of SEQ ID NO: 588593
cucuuauauuaguuagaug

SEQ ID NO: 875987 - RNA, 19 nt, Artificial Sequence
  Description of Artificial Sequence: Synthetic oligonucleotide
  Antisense strand to SEQ ID NO: 875986
caucuaacuaauauaagag

SEQ ID NO: 875988 - RNA, 19 nt, Artificial Sequence
  Description of Artificial Sequence: Synthetic oligonucleotide
  Sense strand starting at position 2936 of SEQ ID NO: 588593
cagcgugugcaagauuuga

SEQ ID NO: 875989 - RNA, 19 nt, Artificial Sequence
  Description of Artificial Sequence: Synthetic oligonucleotide
  Antisense strand to SEQ ID NO: 875988
ucaaaucuugcacacgcug

SEQ ID NO: 875990 - RNA, 19 nt, Artificial Sequence
  Description of Artificial Sequence: Synthetic oligonucleotide
  Sense strand starting at position 2975 of SEQ ID NO: 588593
uggagcauucguuaggacu

SEQ ID NO: 875991 - RNA, 19 nt, Artificial Sequence
  Description of Artificial Sequence: Synthetic oligonucleotide
  Antisense strand to SEQ ID NO: 875990
aguccuaacgaaugcucca

SEQ ID NO: 875992 - RNA, 19 nt, Artificial Sequence
  Description of Artificial Sequence: Synthetic oligonucleotide
  Sense strand starting at position 3073 of SEQ ID NO: 588593
auagcuguuugauccuaaa

SEQ ID NO: 875993 - RNA, 19 nt, Artificial Sequence
  Description of Artificial Sequence: Synthetic oligonucleotide
  Antisense strand to SEQ ID NO: 875992
uuuaggaucaaacagcuau

SEQ ID NO: 875994 - RNA, 19 nt, Artificial Sequence
  Description of Artificial Sequence: Synthetic oligonucleotide
  Sense strand starting at position 3153 of SEQ ID NO: 588593
ugugcauucccagugucuu

SEQ ID NO: 875995 - RNA, 19 nt, Artificial Sequence
  Description of Artificial Sequence: Synthetic oligonucleotide
  Antisense strand to SEQ ID NO: 875994
aagacacugggaaugcaca

SEQ ID NO: 875996 - RNA, 19 nt, Artificial Sequence
  Description of Artificial Sequence: Synthetic oligonucleotide
  Sense strand starting at position 3178 of SEQ ID NO: 588593
ucagaaaugccauggguuc

SEQ ID NO: 875997 - RNA, 19 nt, Artificial Sequence
  Description of Artificial Sequence: Synthetic oligonucleotide
  Antisense strand to SEQ ID NO: 875996
gaacccauggcauuucuga

SEQ ID NO: 875998 - RNA, 19 nt, Artificial Sequence
  Description of Artificial Sequence: Synthetic oligonucleotide
  Sense strand starting at position 3191 of SEQ ID NO: 588593
ggguucagauggcuuuaca

SEQ ID NO: 875999 - RNA, 19 nt, Artificial Sequence
  Description of Artificial Sequence: Synthetic oligonucleotide
  Antisense strand to SEQ ID NO: 875998
uguaaagccaucugaaccc

SEQ ID NO: 876000 - RNA, 19 nt, Artificial Sequence
  Description of Artificial Sequence: Synthetic oligonucleotide
  Sense strand starting at position 3237 of SEQ ID NO: 588593
agaucaucccuauguuacu

SEQ ID NO: 876001 - RNA, 19 nt, Artificial Sequence
  Description of Artificial Sequence: Synthetic oligonucleotide
  Antisense strand to SEQ ID NO: 876000
aguaacauagggaugaucu

SEQ ID NO: 876002 - RNA, 19 nt, Artificial Sequence
  Description of Artificial Sequence: Synthetic oligonucleotide
  Sense strand starting at position 3453 of SEQ ID NO: 588593
gcugcaugccguuuauagu

SEQ ID NO: 876003 - RNA, 19 nt, Artificial Sequence
  Description of Artificial Sequence: Synthetic oligonucleotide
  Antisense strand to SEQ ID NO: 876002
acuauaaacggcaugcagc

SEQ ID NO: 876004 - RNA, 19 nt, Artificial Sequence
  Description of Artificial Sequence: Synthetic oligonucleotide
  Sense strand starting at position 3488 of SEQ ID NO: 588593
cacgauaaguauucguaua

SEQ ID NO: 876005 - RNA, 19 nt, Artificial Sequence
  Description of Artificial Sequence: Synthetic oligonucleotide
  Antisense strand to SEQ ID NO: 876004
uauacgaauacuuaucgug

SEQ ID NO: 876006 - RNA, 19 nt, Artificial Sequence
  Description of Artificial Sequence: Synthetic oligonucleotide
  Sense strand starting at position 3489 of SEQ ID NO: 588593
acgauaaguauucguauau

SEQ ID NO: 876007 - RNA, 19 nt, Artificial Sequence
  Description of Artificial Sequence: Synthetic oligonucleotide
  Antisense strand to SEQ ID NO: 876006
auauacgaauacuuaucgu

SEQ ID NO: 876008 - RNA, 19 nt, Artificial Sequence
  Description of Artificial Sequence: Synthetic oligonucleotide
  Sense strand starting at position 3509 of SEQ ID NO: 588593
aaggaaggccucugugaag

SEQ ID NO: 876009 - RNA, 19 nt, Artificial Sequence
  Description of Artificial Sequence: Synthetic oligonucleotide
  Antisense strand to SEQ ID NO: 876008
cuucacagaggccuuccuu

SEQ ID NO: 876010 - RNA, 19 nt, Artificial Sequence
  Description of Artificial Sequence: Synthetic oligonucleotide
  Sense strand starting at position 3520 of SEQ ID NO: 588593
cugugaaguccaggaguaa

SEQ ID NO: 876011 - RNA, 19 nt, Artificial Sequence
  Description of Artificial Sequence: Synthetic oligonucleotide
  Antisense strand to SEQ ID NO: 876010
uuacuccuggacuucacag

SEQ ID NO: 876012 - RNA, 19 nt, Artificial Sequence
  Description of Artificial Sequence: Synthetic oligonucleotide
  Sense strand starting at position 3521 of SEQ ID NO: 588593
ugugaaguccaggaguaaa

SEQ ID NO: 876013 - RNA, 19 nt, Artificial Sequence
  Description of Artificial Sequence: Synthetic oligonucleotide
  Antisense strand to SEQ ID NO: 876012
uuuacuccuggacuucaca

SEQ ID NO: 876014 - RNA, 19 nt, Artificial Sequence
  Description of Artificial Sequence: Synthetic oligonucleotide
  Sense strand starting at position 3553 of SEQ ID NO: 588593
uuuguuuaaccuggcauuu

SEQ ID NO: 876015 - RNA, 19 nt, Artificial Sequence
  Description of Artificial Sequence: Synthetic oligonucleotide
  Antisense strand to SEQ ID NO: 876014
aaaugccagguuaaacaaa

SEQ ID NO: 876016 - RNA, 19 nt, Artificial Sequence
  Description of Artificial Sequence: Synthetic oligonucleotide
  Sense strand starting at position 3625 of SEQ ID NO: 588593
auaugugaaucugcacuau

SEQ ID NO: 876017 - RNA, 19 nt, Artificial Sequence
  Description of Artificial Sequence: Synthetic oligonucleotide
  Antisense strand to SEQ ID NO: 876016
auagugcagauucacauau

SEQ ID NO: 876018 - RNA, 19 nt, Artificial Sequence
  Description of Artificial Sequence: Synthetic oligonucleotide
  Sense strand starting at position 3629 of SEQ ID NO: 588593
gugaaucugcacuauauau

SEQ ID NO: 876019 - RNA, 19 nt, Artificial Sequence
  Description of Artificial Sequence: Synthetic oligonucleotide
  Antisense strand to SEQ ID NO: 876018
auauauagugcagauucac

SEQ ID NO: 876020 - RNA, 19 nt, Artificial Sequence
  Description of Artificial Sequence: Synthetic oligonucleotide
  Sense strand starting at position 3746 of SEQ ID NO: 588593
auuuauuccagaggcgcaa

SEQ ID NO: 876021 - RNA, 19 nt, Artificial Sequence
  Description of Artificial Sequence: Synthetic oligonucleotide
  Antisense strand to SEQ ID NO: 876020
uugcgccucuggaauaaau

SEQ ID NO: 876022 - RNA, 19 nt, Artificial Sequence
  Description of Artificial Sequence: Synthetic oligonucleotide
  Sense strand starting at position 2 of SEQ ID NO: 588595
gcagccucaugcuuuaauu

SEQ ID NO: 876023 - RNA, 19 nt, Artificial Sequence
  Description of Artificial Sequence: Synthetic oligonucleotide
  Antisense strand to SEQ ID NO: 876022
aauuaaagcaugaggcugc

SEQ ID NO: 876024 - RNA, 19 nt, Artificial Sequence
  Description of Artificial Sequence: Synthetic oligonucleotide
  Sense strand starting at position 239 of SEQ ID NO: 588595
gggugugaccacugcgaaa

SEQ ID NO: 876025 - RNA, 19 nt, Artificial Sequence
  Description of Artificial Sequence: Synthetic oligonucleotide
  Antisense strand to SEQ ID NO: 876024
uuucgcaguggucacaccc

SEQ ID NO: 876026 - RNA, 19 nt, Artificial Sequence
  Description of Artificial Sequence: Synthetic oligonucleotide
  Sense strand starting at position 274 of SEQ ID NO: 588595
agaagugacaagugauauc

SEQ ID NO: 876027 - RNA, 19 nt, Artificial Sequence
  Description of Artificial Sequence: Synthetic oligonucleotide
  Antisense strand to SEQ ID NO: 876026
gauaucacuugucacuucu

SEQ ID NO: 876028 - RNA, 19 nt, Artificial Sequence
  Description of Artificial Sequence: Synthetic oligonucleotide
  Sense strand starting at position 284 of SEQ ID NO: 588595
agugauaucuuguuccacu

SEQ ID NO: 876029 - RNA, 19 nt, Artificial Sequence
  Description of Artificial Sequence: Synthetic oligonucleotide
  Antisense strand to SEQ ID NO: 876028
aguggaacaagauaucacu

SEQ ID NO: 876030 - RNA, 19 nt, Artificial Sequence
  Description of Artificial Sequence: Synthetic oligonucleotide
  Sense strand starting at position 285 of SEQ ID NO: 588595
gugauaucuuguuccacuc

SEQ ID NO: 876031 - RNA, 19 nt, Artificial Sequence
  Description of Artificial Sequence: Synthetic oligonucleotide
  Antisense strand to SEQ ID NO: 876030
gaguggaacaagauaucac

SEQ ID NO: 876032 - RNA, 19 nt, Artificial Sequence
  Description of Artificial Sequence: Synthetic oligonucleotide
  Sense strand starting at position 316 of SEQ ID NO: 588595
ccaaguggcuuugccgaaa

SEQ ID NO: 876033 - RNA, 19 nt, Artificial Sequence
  Description of Artificial Sequence: Synthetic oligonucleotide
  Antisense strand to SEQ ID NO: 876032
uuucggcaaagccacuugg

SEQ ID NO: 876034 - RNA, 19 nt, Artificial Sequence
  Description of Artificial Sequence: Synthetic oligonucleotide
  Sense strand starting at position 319 of SEQ ID NO: 588595
aguggcuuugccgaaagga

SEQ ID NO: 876035 - RNA, 19 nt, Artificial Sequence
  Description of Artificial Sequence: Synthetic oligonucleotide
  Antisense strand to SEQ ID NO: 876034
uccuuucggcaaagccacu

SEQ ID NO: 876036 - RNA, 19 nt, Artificial Sequence
  Description of Artificial Sequence: Synthetic oligonucleotide
  Sense strand starting at position 614 of SEQ ID NO: 588595
gcagaaugcugagcugagu

SEQ ID NO: 876037 - RNA, 19 nt, Artificial Sequence
  Description of Artificial Sequence: Synthetic oligonucleotide
  Antisense strand to SEQ ID NO: 876036
acucagcucagcauucugc

SEQ ID NO: 876038 - RNA, 19 nt, Artificial Sequence
  Description of Artificial Sequence: Synthetic oligonucleotide
  Sense strand starting at position 1146 of SEQ ID NO: 588595
gcaggaaacuccgucggaa

SEQ ID NO: 876039 - RNA, 19 nt, Artificial Sequence
  Description of Artificial Sequence: Synthetic oligonucleotide
  Antisense strand to SEQ ID NO: 876038
uuccgacggaguuuccugc

SEQ ID NO: 876040 - RNA, 19 nt, Artificial Sequence
  Description of Artificial Sequence: Synthetic oligonucleotide
  Sense strand starting at position 1214 of SEQ ID NO: 588595
cgcugaguuucuuagagaa

SEQ ID NO: 876041 - RNA, 19 nt, Artificial Sequence
  Description of Artificial Sequence: Synthetic oligonucleotide
  Antisense strand to SEQ ID NO: 876040
uucucuaagaaacucagcg

SEQ ID NO: 876042 - RNA, 19 nt, Artificial Sequence
  Description of Artificial Sequence: Synthetic oligonucleotide
  Sense strand starting at position 1216 of SEQ ID NO: 588595
cugaguuucuuagagaagg

SEQ ID NO: 876043 - RNA, 19 nt, Artificial Sequence
  Description of Artificial Sequence: Synthetic oligonucleotide
  Antisense strand to SEQ ID NO: 876042
ccuucucuaagaaacucag

SEQ ID NO: 876044 - RNA, 19 nt, Artificial Sequence
  Description of Artificial Sequence: Synthetic oligonucleotide
  Sense strand starting at position 2914 of SEQ ID NO: 588595
aggguccuugcaggagaau

SEQ ID NO: 876045 - RNA, 19 nt, Artificial Sequence
  Description of Artificial Sequence: Synthetic oligonucleotide
  Antisense strand to SEQ ID NO: 876044
auucuccugcaaggacccu

SEQ ID NO: 876046 - RNA, 19 nt, Artificial Sequence
  Description of Artificial Sequence: Synthetic oligonucleotide
  Sense strand starting at position 2923 of SEQ ID NO: 588595
gcaggagaauggagugaua

SEQ ID NO: 876047 - RNA, 19 nt, Artificial Sequence
  Description of Artificial Sequence: Synthetic oligonucleotide
  Antisense strand to SEQ ID NO: 876046
uaucacuccauucuccugc

SEQ ID NO: 876048 - RNA, 19 nt, Artificial Sequence
  Description of Artificial Sequence: Synthetic oligonucleotide
  Sense strand starting at position 3074 of SEQ ID NO: 588595
caaggucauucccuggaca

SEQ ID NO: 876049 - RNA, 19 nt, Artificial Sequence
  Description of Artificial Sequence: Synthetic oligonucleotide
  Antisense strand to SEQ ID NO: 876048
uguccagggaaugaccuug

SEQ ID NO: 876050 - RNA, 19 nt, Artificial Sequence
  Description of Artificial Sequence: Synthetic oligonucleotide
  Sense strand starting at position 3075 of SEQ ID NO: 588595
aaggucauucccuggacaa

SEQ ID NO: 876051 - RNA, 19 nt, Artificial Sequence
  Description of Artificial Sequence: Synthetic oligonucleotide
  Antisense strand to SEQ ID NO: 876050
uuguccagggaaugaccuu

SEQ ID NO: 876052 - RNA, 19 nt, Artificial Sequence
  Description of Artificial Sequence: Synthetic oligonucleotide
  Sense strand starting at position 3076 of SEQ ID NO: 588595
aggucauucccuggacaaa

SEQ ID NO: 876053 - RNA, 19 nt, Artificial Sequence
  Description of Artificial Sequence: Synthetic oligonucleotide
  Antisense strand to SEQ ID NO: 876052
uuuguccagggaaugaccu

SEQ ID NO: 876054 - RNA, 19 nt, Artificial Sequence
  Description of Artificial Sequence: Synthetic oligonucleotide
  Sense strand starting at position 3141 of SEQ ID NO: 588595
gcccuugaucuuggccaca

SEQ ID NO: 876055 - RNA, 19 nt, Artificial Sequence
  Description of Artificial Sequence: Synthetic oligonucleotide
  Antisense strand to SEQ ID NO: 876054
uguggccaagaucaagggc

SEQ ID NO: 876056 - RNA, 19 nt, Artificial Sequence
  Description of Artificial Sequence: Synthetic oligonucleotide
  Sense strand starting at position 3506 of SEQ ID NO: 588595
caggaucucucagugagca

SEQ ID NO: 876057 - RNA, 19 nt, Artificial Sequence
  Description of Artificial Sequence: Synthetic oligonucleotide
  Antisense strand to SEQ ID NO: 876056
ugcucacugagagauccug

SEQ ID NO: 876058 - RNA, 19 nt, Artificial Sequence
  Description of Artificial Sequence: Synthetic oligonucleotide
  Sense strand starting at position 3507 of SEQ ID NO: 588595
aggaucucucagugagcau

SEQ ID NO: 876059 - RNA, 19 nt, Artificial Sequence
  Description of Artificial Sequence: Synthetic oligonucleotide
  Antisense strand to SEQ ID NO: 876058
augcucacugagagauccu

SEQ ID NO: 876060 - RNA, 19 nt, Artificial Sequence
  Description of Artificial Sequence: Synthetic oligonucleotide
  Sense strand starting at position 3508 of SEQ ID NO: 588595
ggaucucucagugagcaua

SEQ ID NO: 876061 - RNA, 19 nt, Artificial Sequence
  Description of Artificial Sequence: Synthetic oligonucleotide
  Antisense strand to SEQ ID NO: 876060
uaugcucacugagagaucc

SEQ ID NO: 876062 - RNA, 19 nt, Artificial Sequence
  Description of Artificial Sequence: Synthetic oligonucleotide
  Sense strand starting at position 3682 of SEQ ID NO: 588595
agacauucuuccuuaguga

SEQ ID NO: 876063 - RNA, 19 nt, Artificial Sequence
  Description of Artificial Sequence: Synthetic oligonucleotide
  Antisense strand to SEQ ID NO: 876062
ucacuaaggaagaaugucu

SEQ ID NO: 876064 - RNA, 19 nt, Artificial Sequence
  Description of Artificial Sequence: Synthetic oligonucleotide
  Sense strand starting at position 3686 of SEQ ID NO: 588595
auucuuccuuagugaagga

SEQ ID NO: 876065 - RNA, 19 nt, Artificial Sequence
  Description of Artificial Sequence: Synthetic oligonucleotide
  Antisense strand to SEQ ID NO: 876064
uccuucacuaaggaagaau

SEQ ID NO: 876066 - RNA, 19 nt, Artificial Sequence
  Description of Artificial Sequence: Synthetic oligonucleotide
  Sense strand starting at position 3690 of SEQ ID NO: 588595
uuccuuagugaaggauauu

SEQ ID NO: 876067 - RNA, 19 nt, Artificial Sequence
  Description of Artificial Sequence: Synthetic oligonucleotide
  Antisense strand to SEQ ID NO: 876066
aauauccuucacuaaggaa

SEQ ID NO: 876068 - RNA, 19 nt, Artificial Sequence
  Description of Artificial Sequence: Synthetic oligonucleotide
  Sense strand starting at position 3699 of SEQ ID NO: 588595
gaaggauauuuggaaagca

SEQ ID NO: 876069 - RNA, 19 nt, Artificial Sequence
  Description of Artificial Sequence: Synthetic oligonucleotide
  Antisense strand to SEQ ID NO: 876068
ugcuuuccaaauauccuuc

SEQ ID NO: 876070 - RNA, 19 nt, Artificial Sequence
  Description of Artificial Sequence: Synthetic oligonucleotide
  Sense strand starting at position 3738 of SEQ ID NO: 588595
agcggauaagcagaaauca

SEQ ID NO: 876071 - RNA, 19 nt, Artificial Sequence
  Description of Artificial Sequence: Synthetic oligonucleotide
  Antisense strand to SEQ ID NO: 876070
ugauuucugcuuauccgcu

SEQ ID NO: 876072 - RNA, 19 nt, Artificial Sequence
  Description of Artificial Sequence: Synthetic oligonucleotide
  Sense strand starting at position 3761 of SEQ ID NO: 588595
cccaauuucugugugccua

SEQ ID NO: 876073 - RNA, 19 nt, Artificial Sequence
  Description of Artificial Sequence: Synthetic oligonucleotide
  Antisense strand to SEQ ID NO: 876072
uaggcacacagaaauuggg

SEQ ID NO: 876074 - RNA, 19 nt, Artificial Sequence
  Description of Artificial Sequence: Synthetic oligonucleotide
  Sense strand starting at position 3762 of SEQ ID NO: 588595
ccaauuucugugugccuau

SEQ ID NO: 876075 - RNA, 19 nt, Artificial Sequence
  Description of Artificial Sequence: Synthetic oligonucleotide
  Antisense strand to SEQ ID NO: 876074
auaggcacacagaaauugg

SEQ ID NO: 876076 - RNA, 19 nt, Artificial Sequence
  Description of Artificial Sequence: Synthetic oligonucleotide
  Sense strand starting at position 3781 of SEQ ID NO: 588595
acguauguacaccaacaua

SEQ ID NO: 876077 - RNA, 19 nt, Artificial Sequence
  Description of Artificial Sequence: Synthetic oligonucleotide
  Antisense strand to SEQ ID NO: 876076
uauguugguguacauacgu

SEQ ID NO: 876078 - RNA, 19 nt, Artificial Sequence
  Description of Artificial Sequence: Synthetic oligonucleotide
  Sense strand starting at position 3848 of SEQ ID NO: 588595
ccgugcuacugaguaugua

SEQ ID NO: 876079 - RNA, 19 nt, Artificial Sequence
  Description of Artificial Sequence: Synthetic oligonucleotide
  Antisense strand to SEQ ID NO: 876078
uacauacucaguagcacgg

SEQ ID NO: 876080 - RNA, 19 nt, Artificial Sequence
  Description of Artificial Sequence: Synthetic oligonucleotide
  Sense strand starting at position 3901 of SEQ ID NO: 588595
ugaggugagcucuguuuau

SEQ ID NO: 876081 - RNA, 19 nt, Artificial Sequence
  Description of Artificial Sequence: Synthetic oligonucleotide
  Antisense strand to SEQ ID NO: 876080
auaaacagagcucaccuca

SEQ ID NO: 876082 - RNA, 19 nt, Artificial Sequence
  Description of Artificial Sequence: Synthetic oligonucleotide
  Sense strand starting at position 3944 of SEQ ID NO: 588595
guccgagucucacacuguu

SEQ ID NO: 876083 - RNA, 19 nt, Artificial Sequence
  Description of Artificial Sequence: Synthetic oligonucleotide
  Antisense strand to SEQ ID NO: 876082
aacagugugagacucggac

SEQ ID NO: 876084 - RNA, 19 nt, Artificial Sequence
  Description of Artificial Sequence: Synthetic oligonucleotide
  Sense strand starting at position 99 of SEQ ID NO: 588596
ugaugcuuucuugacuuga

SEQ ID NO: 876085 - RNA, 19 nt, Artificial Sequence
  Description of Artificial Sequence: Synthetic oligonucleotide
  Antisense strand to SEQ ID NO: 876084
ucaagucaagaaagcauca

SEQ ID NO: 876086 - RNA, 19 nt, Artificial Sequence
  Description of Artificial Sequence: Synthetic oligonucleotide
  Sense strand starting at position 101 of SEQ ID NO: 588596
augcuuucuugacuugacu

SEQ ID NO: 876087 - RNA, 19 nt, Artificial Sequence
  Description of Artificial Sequence: Synthetic oligonucleotide
  Antisense strand to SEQ ID NO: 876086
agucaagucaagaaagcau

SEQ ID NO: 876088 - RNA, 19 nt, Artificial Sequence
  Description of Artificial Sequence: Synthetic oligonucleotide
  Sense strand starting at position 202 of SEQ ID NO: 588596
ugucaucaucugggucaau

SEQ ID NO: 876089 - RNA, 19 nt, Artificial Sequence
  Description of Artificial Sequence: Synthetic oligonucleotide
  Antisense strand to SEQ ID NO: 876088
auugacccagaugaugaca

SEQ ID NO: 876090 - RNA, 19 nt, Artificial Sequence
  Description of Artificial Sequence: Synthetic oligonucleotide
  Sense strand starting at position 213 of SEQ ID NO: 588596
gggucaauccgauacuuaa

SEQ ID NO: 876091 - RNA, 19 nt, Artificial Sequence
  Description of Artificial Sequence: Synthetic oligonucleotide
  Antisense strand to SEQ ID NO: 876090
uuaaguaucggauugaccc

SEQ ID NO: 876092 - RNA, 19 nt, Artificial Sequence
  Description of Artificial Sequence: Synthetic oligonucleotide
  Sense strand starting at position 293 of SEQ ID NO: 588596
cccaguguauucuugagaa

SEQ ID NO: 876093 - RNA, 19 nt, Artificial Sequence
  Description of Artificial Sequence: Synthetic oligonucleotide
  Antisense strand to SEQ ID NO: 876092
uucucaagaauacacuggg

SEQ ID NO: 876094 - RNA, 19 nt, Artificial Sequence
  Description of Artificial Sequence: Synthetic oligonucleotide
  Sense strand starting at position 295 of SEQ ID NO: 588596
caguguauucuugagaaau

SEQ ID NO: 876095 - RNA, 19 nt, Artificial Sequence
  Description of Artificial Sequence: Synthetic oligonucleotide
  Antisense strand to SEQ ID NO: 876094
auuucucaagaauacacug

SEQ ID NO: 876096 - RNA, 19 nt, Artificial Sequence
  Description of Artificial Sequence: Synthetic oligonucleotide
  Sense strand starting at position 423 of SEQ ID NO: 588596
ggcacaaacucuucuuuga

SEQ ID NO: 876097 - RNA, 19 nt, Artificial Sequence
  Description of Artificial Sequence: Synthetic oligonucleotide
  Antisense strand to SEQ ID NO: 876096
ucaaagaagaguuugugcc

SEQ ID NO: 876098 - RNA, 19 nt, Artificial Sequence
  Description of Artificial Sequence: Synthetic oligonucleotide
  Sense strand starting at position 470 of SEQ ID NO: 588596
guugucauuccugagaacc

SEQ ID NO: 876099 - RNA, 19 nt, Artificial Sequence
  Description of Artificial Sequence: Synthetic oligonucleotide
  Antisense strand to SEQ ID NO: 876098
gguucucaggaaugacaac

SEQ ID NO: 876100 - RNA, 19 nt, Artificial Sequence
  Description of Artificial Sequence: Synthetic oligonucleotide
  Sense strand starting at position 678 of SEQ ID NO: 588596
gaacauaacuggccuguau

SEQ ID NO: 876101 - RNA, 19 nt, Artificial Sequence
  Description of Artificial Sequence: Synthetic oligonucleotide
  Antisense strand to SEQ ID NO: 876100
auacaggccaguuauguuc

SEQ ID NO: 876102 - RNA, 19 nt, Artificial Sequence
  Description of Artificial Sequence: Synthetic oligonucleotide
  Sense strand starting at position 697 of SEQ ID NO: 588596
uuuagacaacuugguaauc

SEQ ID NO: 876103 - RNA, 19 nt, Artificial Sequence
  Description of Artificial Sequence: Synthetic oligonucleotide
  Antisense strand to SEQ ID NO: 876102
gauuaccaaguugucuaaa

SEQ ID NO: 876104 - RNA, 19 nt, Artificial Sequence
  Description of Artificial Sequence: Synthetic oligonucleotide
  Sense strand starting at position 747 of SEQ ID NO: 588596
aagugcuaauguuugauga

SEQ ID NO: 876105 - RNA, 19 nt, Artificial Sequence
  Description of Artificial Sequence: Synthetic oligonucleotide
  Antisense strand to SEQ ID NO: 876104
ucaucaaacauuagcacuu

SEQ ID NO: 876106 - RNA, 19 nt, Artificial Sequence
  Description of Artificial Sequence: Synthetic oligonucleotide
  Sense strand starting at position 748 of SEQ ID NO: 588596
agugcuaauguuugaugaa

SEQ ID NO: 876107 - RNA, 19 nt, Artificial Sequence
  Description of Artificial Sequence: Synthetic oligonucleotide
  Antisense strand to SEQ ID NO: 876106
uucaucaaacauuagcacu

SEQ ID NO: 876108 - RNA, 19 nt, Artificial Sequence
  Description of Artificial Sequence: Synthetic oligonucleotide
  Sense strand starting at position 817 of SEQ ID NO: 588596
ugagcagcaccugaugaaa

SEQ ID NO: 876109 - RNA, 19 nt, Artificial Sequence
  Description of Artificial Sequence: Synthetic oligonucleotide
  Antisense strand to SEQ ID NO: 876108
uuucaucaggugcugcuca

SEQ ID NO: 876110 - RNA, 19 nt, Artificial Sequence
  Description of Artificial Sequence: Synthetic oligonucleotide
  Sense strand starting at position 820 of SEQ ID NO: 588596
gcagcaccugaugaaagau

SEQ ID NO: 876111 - RNA, 19 nt, Artificial Sequence
  Description of Artificial Sequence: Synthetic oligonucleotide
  Antisense strand to SEQ ID NO: 876110
aucuuucaucaggugcugc

SEQ ID NO: 876112 - RNA, 19 nt, Artificial Sequence
  Description of Artificial Sequence: Synthetic oligonucleotide
  Sense strand starting at position 871 of SEQ ID NO: 588596
gucucacuugggcaguauu

SEQ ID NO: 876113 - RNA, 19 nt, Artificial Sequence
  Description of Artificial Sequence: Synthetic oligonucleotide
  Antisense strand to SEQ ID NO: 876112
aauacugcccaagugagac

SEQ ID NO: 876114 - RNA, 19 nt, Artificial Sequence
  Description of Artificial Sequence: Synthetic oligonucleotide
  Sense strand starting at position 874 of SEQ ID NO: 588596
ucacuugggcaguauuauu

SEQ ID NO: 876115 - RNA, 19 nt, Artificial Sequence
  Description of Artificial Sequence: Synthetic oligonucleotide
  Antisense strand to SEQ ID NO: 876114
aauaauacugcccaaguga

SEQ ID NO: 876116 - RNA, 19 nt, Artificial Sequence
  Description of Artificial Sequence: Synthetic oligonucleotide
  Sense strand starting at position 1106 of SEQ ID NO: 588596
agagcaagaucacuucugu

SEQ ID NO: 876117 - RNA, 19 nt, Artificial Sequence
  Description of Artificial Sequence: Synthetic oligonucleotide
  Antisense strand to SEQ ID NO: 876116
acagaagugaucuugcucu

SEQ ID NO: 876118 - RNA, 19 nt, Artificial Sequence
  Description of Artificial Sequence: Synthetic oligonucleotide
  Sense strand starting at position 1145 of SEQ ID NO: 588596
gccucauggucuuccaaga

SEQ ID NO: 876119 - RNA, 19 nt, Artificial Sequence
  Description of Artificial Sequence: Synthetic oligonucleotide
  Antisense strand to SEQ ID NO: 876118
ucuuggaagaccaugaggc

SEQ ID NO: 876120 - RNA, 19 nt, Artificial Sequence
  Description of Artificial Sequence: Synthetic oligonucleotide
  Sense strand starting at position 1382 of SEQ ID NO: 588596
ugcagauacguuguugcau

SEQ ID NO: 876121 - RNA, 19 nt, Artificial Sequence
  Description of Artificial Sequence: Synthetic oligonucleotide
  Antisense strand to SEQ ID NO: 876120
augcaacaacguaucugca

SEQ ID NO: 876122 - RNA, 19 nt, Artificial Sequence
  Description of Artificial Sequence: Synthetic oligonucleotide
  Sense strand starting at position 1613 of SEQ ID NO: 588596
cguugacccuucucaggau

SEQ ID NO: 876123 - RNA, 19 nt, Artificial Sequence
  Description of Artificial Sequence: Synthetic oligonucleotide
  Antisense strand to SEQ ID NO: 876122
auccugagaagggucaacg

SEQ ID NO: 876124 - RNA, 19 nt, Artificial Sequence
  Description of Artificial Sequence: Synthetic oligonucleotide
  Sense strand starting at position 2101 of SEQ ID NO: 588596
uugguagcugcucaaauau

SEQ ID NO: 876125 - RNA, 19 nt, Artificial Sequence
  Description of Artificial Sequence: Synthetic oligonucleotide
  Antisense strand to SEQ ID NO: 876124
auauuugagcagcuaccaa

SEQ ID NO: 876126 - RNA, 19 nt, Artificial Sequence
  Description of Artificial Sequence: Synthetic oligonucleotide
  Sense strand starting at position 2126 of SEQ ID NO: 588596
gaucacugguucuuucgau

SEQ ID NO: 876127 - RNA, 19 nt, Artificial Sequence
  Description of Artificial Sequence: Synthetic oligonucleotide
  Antisense strand to SEQ ID NO: 876126
aucgaaagaaccagugauc

SEQ ID NO: 876128 - RNA, 19 nt, Artificial Sequence
  Description of Artificial Sequence: Synthetic oligonucleotide
  Sense strand starting at position 2140 of SEQ ID NO: 588596
ucgaucugucgcucagcua

SEQ ID NO: 876129 - RNA, 19 nt, Artificial Sequence
  Description of Artificial Sequence: Synthetic oligonucleotide
  Antisense strand to SEQ ID NO: 876128
uagcugagcgacagaucga

SEQ ID NO: 876130 - RNA, 19 nt, Artificial Sequence
  Description of Artificial Sequence: Synthetic oligonucleotide
  Sense strand starting at position 2177 of SEQ ID NO: 588596
uguaauucgccugaucauu

SEQ ID NO: 876131 - RNA, 19 nt, Artificial Sequence
  Description of Artificial Sequence: Synthetic oligonucleotide
  Antisense strand to SEQ ID NO: 876130
aaugaucaggcgaauuaca

SEQ ID NO: 876132 - RNA, 19 nt, Artificial Sequence
  Description of Artificial Sequence: Synthetic oligonucleotide
  Sense strand starting at position 2185 of SEQ ID NO: 588596
gccugaucauuggucuaaa

SEQ ID NO: 876133 - RNA, 19 nt, Artificial Sequence
  Description of Artificial Sequence: Synthetic oligonucleotide
  Antisense strand to SEQ ID NO: 876132
uuuagaccaaugaucaggc

SEQ ID NO: 876134 - RNA, 19 nt, Artificial Sequence
  Description of Artificial Sequence: Synthetic oligonucleotide
  Sense strand starting at position 2284 of SEQ ID NO: 588596
caguauuacgacuauuaag

SEQ ID NO: 876135 - RNA, 19 nt, Artificial Sequence
  Description of Artificial Sequence: Synthetic oligonucleotide
  Antisense strand to SEQ ID NO: 876134
cuuaauagucguaauacug

SEQ ID NO: 876136 - RNA, 19 nt, Artificial Sequence
  Description of Artificial Sequence: Synthetic oligonucleotide
  Sense strand starting at position 2295 of SEQ ID NO: 588596
cuauuaagccguuaaauuc

SEQ ID NO: 876137 - RNA, 19 nt, Artificial Sequence
  Description of Artificial Sequence: Synthetic oligonucleotide
  Antisense strand to SEQ ID NO: 876136
gaauuuaacggcuuaauag

SEQ ID NO: 876138 - RNA, 19 nt, Artificial Sequence
  Description of Artificial Sequence: Synthetic oligonucleotide
  Sense strand starting at position 2356 of SEQ ID NO: 588596
cugcuuccugaggauacuu

SEQ ID NO: 876139 - RNA, 19 nt, Artificial Sequence
  Description of Artificial Sequence: Synthetic oligonucleotide
  Antisense strand to SEQ ID NO: 876138
aaguauccucaggaagcag

SEQ ID NO: 876140 - RNA, 19 nt, Artificial Sequence
  Description of Artificial Sequence: Synthetic oligonucleotide
  Sense strand starting at position 2364 of SEQ ID NO: 588596
ugaggauacuuagugcuuu

SEQ ID NO: 876141 - RNA, 19 nt, Artificial Sequence
  Description of Artificial Sequence: Synthetic oligonucleotide
  Antisense strand to SEQ ID NO: 876140
aaagcacuaaguauccuca

SEQ ID NO: 876142 - RNA, 19 nt, Artificial Sequence
  Description of Artificial Sequence: Synthetic oligonucleotide
  Sense strand starting at position 2496 of SEQ ID NO: 588596
acgaucucuccguacacua

SEQ ID NO: 876143 - RNA, 19 nt, Artificial Sequence
  Description of Artificial Sequence: Synthetic oligonucleotide
  Antisense strand to SEQ ID NO: 876142
uaguguacggagagaucgu

SEQ ID NO: 876144 - RNA, 19 nt, Artificial Sequence
  Description of Artificial Sequence: Synthetic oligonucleotide
  Sense strand starting at position 2611 of SEQ ID NO: 588596
augccuaucgcugcgugau

SEQ ID NO: 876145 - RNA, 19 nt, Artificial Sequence
  Description of Artificial Sequence: Synthetic oligonucleotide
  Antisense strand to SEQ ID NO: 876144
aucacgcagcgauaggcau

SEQ ID NO: 876146 - RNA, 19 nt, Artificial Sequence
  Description of Artificial Sequence: Synthetic oligonucleotide
  Sense strand starting at position 3403 of SEQ ID NO: 588596
cacuuaugcccugguggga

SEQ ID NO: 876147 - RNA, 19 nt, Artificial Sequence
  Description of Artificial Sequence: Synthetic oligonucleotide
  Antisense strand to SEQ ID NO: 876146
ucccaccagggcauaagug

SEQ ID NO: 876148 - RNA, 19 nt, Artificial Sequence
  Description of Artificial Sequence: Synthetic oligonucleotide
  Sense strand starting at position 3513 of SEQ ID NO: 588596
cccuuucuugcccagagua

SEQ ID NO: 876149 - RNA, 19 nt, Artificial Sequence
  Description of Artificial Sequence: Synthetic oligonucleotide
  Antisense strand to SEQ ID NO: 876148
uacucugggcaagaaaggg

SEQ ID NO: 876150 - RNA, 19 nt, Artificial Sequence
  Description of Artificial Sequence: Synthetic oligonucleotide
  Sense strand starting at position 3515 of SEQ ID NO: 588596
cuuucuugcccagaguaga

SEQ ID NO: 876151 - RNA, 19 nt, Artificial Sequence
  Description of Artificial Sequence: Synthetic oligonucleotide
  Antisense strand to SEQ ID NO: 876150
ucuacucugggcaagaaag

SEQ ID NO: 876152 - RNA, 19 nt, Artificial Sequence
  Description of Artificial Sequence: Synthetic oligonucleotide
  Sense strand starting at position 3767 of SEQ ID NO: 588596
gacugacaguucucauggu

SEQ ID NO: 876153 - RNA, 19 nt, Artificial Sequence
  Description of Artificial Sequence: Synthetic oligonucleotide
  Antisense strand to SEQ ID NO: 876152
accaugagaacugucaguc

SEQ ID NO: 876154 - RNA, 19 nt, Artificial Sequence
  Description of Artificial Sequence: Synthetic oligonucleotide
  Sense strand starting at position 3771 of SEQ ID NO: 588596
gacaguucucaugguuuag

SEQ ID NO: 876155 - RNA, 19 nt, Artificial Sequence
  Description of Artificial Sequence: Synthetic oligonucleotide
  Antisense strand to SEQ ID NO: 876154
cuaaaccaugagaacuguc

SEQ ID NO: 876156 - RNA, 19 nt, Artificial Sequence
  Description of Artificial Sequence: Synthetic oligonucleotide
  Sense strand starting at position 3801 of SEQ ID NO: 588596
uugcccuguuuauccagaa

SEQ ID NO: 876157 - RNA, 19 nt, Artificial Sequence
  Description of Artificial Sequence: Synthetic oligonucleotide
  Antisense strand to SEQ ID NO: 876156
uucuggauaaacagggcaa

SEQ ID NO: 876158 - RNA, 19 nt, Artificial Sequence
  Description of Artificial Sequence: Synthetic oligonucleotide
  Sense strand starting at position 3802 of SEQ ID NO: 588596
ugcccuguuuauccagaaa

SEQ ID NO: 876159 - RNA, 19 nt, Artificial Sequence
  Description of Artificial Sequence: Synthetic oligonucleotide
  Antisense strand to SEQ ID NO: 876158
uuucuggauaaacagggca

SEQ ID NO: 876160 - RNA, 19 nt, Artificial Sequence
  Description of Artificial Sequence: Synthetic oligonucleotide
  Sense strand starting at position 3892 of SEQ ID NO: 588596
aagucaaagcgagauuguu

SEQ ID NO: 876161 - RNA, 19 nt, Artificial Sequence
  Description of Artificial Sequence: Synthetic oligonucleotide
  Antisense strand to SEQ ID NO: 876160
aacaaucucgcuuugacuu

SEQ ID NO: 876162 - RNA, 19 nt, Artificial Sequence
  Description of Artificial Sequence: Synthetic oligonucleotide
  Sense strand starting at position 3982 of SEQ ID NO: 588596
aagagaagugcuggccuuu

SEQ ID NO: 876163 - RNA, 19 nt, Artificial Sequence
  Description of Artificial Sequence: Synthetic oligonucleotide
  Antisense strand to SEQ ID NO: 876162
aaaggccagcacuucucuu

SEQ ID NO: 876164 - RNA, 19 nt, Artificial Sequence
  Description of Artificial Sequence: Synthetic oligonucleotide
  Sense strand starting at position 35 of SEQ ID NO: 588597
aguacagcuuuguuucuau

SEQ ID NO: 876165 - RNA, 19 nt, Artificial Sequence
  Description of Artificial Sequence: Synthetic oligonucleotide
  Antisense strand to SEQ ID NO: 876164
auagaaacaaagcuguacu

SEQ ID NO: 876166 - RNA, 19 nt, Artificial Sequence
  Description of Artificial Sequence: Synthetic oligonucleotide
  Sense strand starting at position 294 of SEQ ID NO: 588597
auggcauuggguuguugua

SEQ ID NO: 876167 - RNA, 19 nt, Artificial Sequence
  Description of Artificial Sequence: Synthetic oligonucleotide
  Antisense strand to SEQ ID NO: 876166
uacaacaacccaaugccau

SEQ ID NO: 876168 - RNA, 19 nt, Artificial Sequence
  Description of Artificial Sequence: Synthetic oligonucleotide
  Sense strand starting at position 296 of SEQ ID NO: 588597
ggcauuggguuguuguaaa

SEQ ID NO: 876169 - RNA, 19 nt, Artificial Sequence
  Description of Artificial Sequence: Synthetic oligonucleotide
  Antisense strand to SEQ ID NO: 876168
uuuacaacaacccaaugcc

SEQ ID NO: 876170 - RNA, 19 nt, Artificial Sequence
  Description of Artificial Sequence: Synthetic oligonucleotide
  Sense strand starting at position 420 of SEQ ID NO: 588597
gugauuagguuuccauaaa

SEQ ID NO: 876171 - RNA, 19 nt, Artificial Sequence
  Description of Artificial Sequence: Synthetic oligonucleotide
  Antisense strand to SEQ ID NO: 876170
uuuauggaaaccuaaucac

SEQ ID NO: 876172 - RNA, 19 nt, Artificial Sequence
  Description of Artificial Sequence: Synthetic oligonucleotide
  Sense strand starting at position 878 of SEQ ID NO: 588597
aaaucaguugaguagcauu

SEQ ID NO: 876173 - RNA, 19 nt, Artificial Sequence
  Description of Artificial Sequence: Synthetic oligonucleotide
  Antisense strand to SEQ ID NO: 876172
aaugcuacucaacugauuu

SEQ ID NO: 876174 - RNA, 19 nt, Artificial Sequence
  Description of Artificial Sequence: Synthetic oligonucleotide
  Sense strand starting at position 920 of SEQ ID NO: 588597
gugagcuaucucuaaacca

SEQ ID NO: 876175 - RNA, 19 nt, Artificial Sequence
  Description of Artificial Sequence: Synthetic oligonucleotide
  Antisense strand to SEQ ID NO: 876174
ugguuuagagauagcucac

SEQ ID NO: 876176 - RNA, 19 nt, Artificial Sequence
  Description of Artificial Sequence: Synthetic oligonucleotide
  Sense strand starting at position 979 of SEQ ID NO: 588597
ggucguaaugaagaauaug

SEQ ID NO: 876177 - RNA, 19 nt, Artificial Sequence
  Description of Artificial Sequence: Synthetic oligonucleotide
  Antisense strand to SEQ ID NO: 876176
cauauucuucauuacgacc

SEQ ID NO: 876178 - RNA, 19 nt, Artificial Sequence
  Description of Artificial Sequence: Synthetic oligonucleotide
  Sense strand starting at position 1054 of SEQ ID NO: 588597
ggcucagagcucuaucuga

SEQ ID NO: 876179 - RNA, 19 nt, Artificial Sequence
  Description of Artificial Sequence: Synthetic oligonucleotide
  Antisense strand to SEQ ID NO: 876178
ucagauagagcucugagcc

SEQ ID NO: 876180 - RNA, 19 nt, Artificial Sequence
  Description of Artificial Sequence: Synthetic oligonucleotide
  Sense strand starting at position 1067 of SEQ ID NO: 588597
aucugagaaucucauuuga

SEQ ID NO: 876181 - RNA, 19 nt, Artificial Sequence
  Description of Artificial Sequence: Synthetic oligonucleotide
  Antisense strand to SEQ ID NO: 876180
ucaaaugagauucucagau

SEQ ID NO: 876182 - RNA, 19 nt, Artificial Sequence
  Description of Artificial Sequence: Synthetic oligonucleotide
  Sense strand starting at position 1292 of SEQ ID NO: 588597
caggaacugucauuccuga

SEQ ID NO: 876183 - RNA, 19 nt, Artificial Sequence
  Description of Artificial Sequence: Synthetic oligonucleotide
  Antisense strand to SEQ ID NO: 876182
ucaggaaugacaguuccug

SEQ ID NO: 876184 - RNA, 19 nt, Artificial Sequence
  Description of Artificial Sequence: Synthetic oligonucleotide
  Sense strand starting at position 1297 of SEQ ID NO: 588597
acugucauuccugaaagua

SEQ ID NO: 876185 - RNA, 19 nt, Artificial Sequence
  Description of Artificial Sequence: Synthetic oligonucleotide
  Antisense strand to SEQ ID NO: 876184
uacuuucaggaaugacagu

SEQ ID NO: 876186 - RNA, 19 nt, Artificial Sequence
  Description of Artificial Sequence: Synthetic oligonucleotide
  Sense strand starting at position 1315 of SEQ ID NO: 588597
aacucugugucgcugaaga

SEQ ID NO: 876187 - RNA, 19 nt, Artificial Sequence
  Description of Artificial Sequence: Synthetic oligonucleotide
  Antisense strand to SEQ ID NO: 876186
ucuucagcgacacagaguu

SEQ ID NO: 876188 - RNA, 19 nt, Artificial Sequence
  Description of Artificial Sequence: Synthetic oligonucleotide
  Sense strand starting at position 1317 of SEQ ID NO: 588597
cucugugucgcugaagaau

SEQ ID NO: 876189 - RNA, 19 nt, Artificial Sequence
  Description of Artificial Sequence: Synthetic oligonucleotide
  Antisense strand to SEQ ID NO: 876188
auucuucagcgacacagag

SEQ ID NO: 876190 - RNA, 19 nt, Artificial Sequence
  Description of Artificial Sequence: Synthetic oligonucleotide
  Sense strand starting at position 1323 of SEQ ID NO: 588597
gucgcugaagaaugucaga

SEQ ID NO: 876191 - RNA, 19 nt, Artificial Sequence
  Description of Artificial Sequence: Synthetic oligonucleotide
  Antisense strand to SEQ ID NO: 876190
ucugacauucuucagcgac

SEQ ID NO: 876192 - RNA, 19 nt, Artificial Sequence
  Description of Artificial Sequence: Synthetic oligonucleotide
  Sense strand starting at position 1326 of SEQ ID NO: 588597
gcugaagaaugucagagaa

SEQ ID NO: 876193 - RNA, 19 nt, Artificial Sequence
  Description of Artificial Sequence: Synthetic oligonucleotide
  Antisense strand to SEQ ID NO: 876192
uucucugacauucuucagc

SEQ ID NO: 876194 - RNA, 19 nt, Artificial Sequence
  Description of Artificial Sequence: Synthetic oligonucleotide
  Sense strand starting at position 1328 of SEQ ID NO: 588597
ugaagaaugucagagaaga

SEQ ID NO: 876195 - RNA, 19 nt, Artificial Sequence
  Description of Artificial Sequence: Synthetic oligonucleotide
  Antisense strand to SEQ ID NO: 876194
ucuucucugacauucuuca

SEQ ID NO: 876196 - RNA, 19 nt, Artificial Sequence
  Description of Artificial Sequence: Synthetic oligonucleotide
  Sense strand starting at position 1344 of SEQ ID NO: 588597
agaauuaugacgggcugga

SEQ ID NO: 876197 - RNA, 19 nt, Artificial Sequence
  Description of Artificial Sequence: Synthetic oligonucleotide
  Antisense strand to SEQ ID NO: 876196
uccagcccgucauaauucu

SEQ ID NO: 876198 - RNA, 19 nt, Artificial Sequence
  Description of Artificial Sequence: Synthetic oligonucleotide
  Sense strand starting at position 1380 of SEQ ID NO: 588597
aaucuugaaggcuauguua

SEQ ID NO: 876199 - RNA, 19 nt, Artificial Sequence
  Description of Artificial Sequence: Synthetic oligonucleotide
  Antisense strand to SEQ ID NO: 876198
uaacauagccuucaagauu

SEQ ID NO: 876200 - RNA, 19 nt, Artificial Sequence
  Description of Artificial Sequence: Synthetic oligonucleotide
  Sense strand starting at position 1382 of SEQ ID NO: 588597
ucuugaaggcuauguuaaa

SEQ ID NO: 876201 - RNA, 19 nt, Artificial Sequence
  Description of Artificial Sequence: Synthetic oligonucleotide
  Antisense strand to SEQ ID NO: 876200
uuuaacauagccuucaaga

SEQ ID NO: 876202 - RNA, 19 nt, Artificial Sequence
  Description of Artificial Sequence: Synthetic oligonucleotide
  Sense strand starting at position 1383 of SEQ ID NO: 588597
cuugaaggcuauguuaaag

SEQ ID NO: 876203 - RNA, 19 nt, Artificial Sequence
  Description of Artificial Sequence: Synthetic oligonucleotide
  Antisense strand to SEQ ID NO: 876202
cuuuaacauagccuucaag

SEQ ID NO: 876204 - RNA, 19 nt, Artificial Sequence
  Description of Artificial Sequence: Synthetic oligonucleotide
  Sense strand starting at position 1462 of SEQ ID NO: 588597
ucugaucaagucugacuuu

SEQ ID NO: 876205 - RNA, 19 nt, Artificial Sequence
  Description of Artificial Sequence: Synthetic oligonucleotide
  Antisense strand to SEQ ID NO: 876204
aaagucagacuugaucaga

SEQ ID NO: 876206 - RNA, 19 nt, Artificial Sequence
  Description of Artificial Sequence: Synthetic oligonucleotide
  Sense strand starting at position 1538 of SEQ ID NO: 588597
ugcuguaaugcagaaaggu

SEQ ID NO: 876207 - RNA, 19 nt, Artificial Sequence
  Description of Artificial Sequence: Synthetic oligonucleotide
  Antisense strand to SEQ ID NO: 876206
accuuucugcauuacagca

SEQ ID NO: 876208 - RNA, 19 nt, Artificial Sequence
  Description of Artificial Sequence: Synthetic oligonucleotide
  Sense strand starting at position 2194 of SEQ ID NO: 588597
gcaagcauucccugcagga

SEQ ID NO: 876209 - RNA, 19 nt, Artificial Sequence
  Description of Artificial Sequence: Synthetic oligonucleotide
  Antisense strand to SEQ ID NO: 876208
uccugcagggaaugcuugc

SEQ ID NO: 876210 - RNA, 19 nt, Artificial Sequence
  Description of Artificial Sequence: Synthetic oligonucleotide
  Sense strand starting at position 2275 of SEQ ID NO: 588597
cgcccuaugguguaaugga

SEQ ID NO: 876211 - RNA, 19 nt, Artificial Sequence
  Description of Artificial Sequence: Synthetic oligonucleotide
  Antisense strand to SEQ ID NO: 876210
uccauuacaccauagggcg

SEQ ID NO: 876212 - RNA, 19 nt, Artificial Sequence
  Description of Artificial Sequence: Synthetic oligonucleotide
  Sense strand starting at position 2302 of SEQ ID NO: 588597
gguugcuagaguuagaauc

SEQ ID NO: 876213 - RNA, 19 nt, Artificial Sequence
  Description of Artificial Sequence: Synthetic oligonucleotide
  Antisense strand to SEQ ID NO: 876212
gauucuaacucuagcaacc

SEQ ID NO: 876214 - RNA, 19 nt, Artificial Sequence
  Description of Artificial Sequence: Synthetic oligonucleotide
  Sense strand starting at position 2382 of SEQ ID NO: 588597
cagucuuccggagcguuau

SEQ ID NO: 876215 - RNA, 19 nt, Artificial Sequence
  Description of Artificial Sequence: Synthetic oligonucleotide
  Antisense strand to SEQ ID NO: 876214
auaacgcuccggaagacug

SEQ ID NO: 876216 - RNA, 19 nt, Artificial Sequence
  Description of Artificial Sequence: Synthetic oligonucleotide
  Sense strand starting at position 2433 of SEQ ID NO: 588597
agaacugugagaugacgua

SEQ ID NO: 876217 - RNA, 19 nt, Artificial Sequence
  Description of Artificial Sequence: Synthetic oligonucleotide
  Antisense strand to SEQ ID NO: 876216
uacgucaucucacaguucu

SEQ ID NO: 876218 - RNA, 19 nt, Artificial Sequence
  Description of Artificial Sequence: Synthetic oligonucleotide
  Sense strand starting at position 2465 of SEQ ID NO: 588597
ucacaauacuuggcuugua

SEQ ID NO: 876219 - RNA, 19 nt, Artificial Sequence
  Description of Artificial Sequence: Synthetic oligonucleotide
  Antisense strand to SEQ ID NO: 876218
uacaagccaaguauuguga

SEQ ID NO: 876220 - RNA, 19 nt, Artificial Sequence
  Description of Artificial Sequence: Synthetic oligonucleotide
  Sense strand starting at position 2468 of SEQ ID NO: 588597
caauacuuggcuuguagua

SEQ ID NO: 876221 - RNA, 19 nt, Artificial Sequence
  Description of Artificial Sequence: Synthetic oligonucleotide
  Antisense strand to SEQ ID NO: 876220
uacuacaagccaaguauug

SEQ ID NO: 876222 - RNA, 19 nt, Artificial Sequence
  Description of Artificial Sequence: Synthetic oligonucleotide
  Sense strand starting at position 2511 of SEQ ID NO: 588597
ccuauuauaugagaggcaa

SEQ ID NO: 876223 - RNA, 19 nt, Artificial Sequence
  Description of Artificial Sequence: Synthetic oligonucleotide
  Antisense strand to SEQ ID NO: 876222
uugccucucauauaauagg

SEQ ID NO: 876224 - RNA, 19 nt, Artificial Sequence
  Description of Artificial Sequence: Synthetic oligonucleotide
  Sense strand starting at position 3037 of SEQ ID NO: 588597
agauuagacacguaggagu

SEQ ID NO: 876225 - RNA, 19 nt, Artificial Sequence
  Description of Artificial Sequence: Synthetic oligonucleotide
  Antisense strand to SEQ ID NO: 876224
acuccuacgugucuaaucu

SEQ ID NO: 876226 - RNA, 19 nt, Artificial Sequence
  Description of Artificial Sequence: Synthetic oligonucleotide
  Sense strand starting at position 3181 of SEQ ID NO: 588597
gcaccaccagauugauaaa

SEQ ID NO: 876227 - RNA, 19 nt, Artificial Sequence
  Description of Artificial Sequence: Synthetic oligonucleotide
  Antisense strand to SEQ ID NO: 876226
uuuaucaaucugguggugc

SEQ ID NO: 876228 - RNA, 19 nt, Artificial Sequence
  Description of Artificial Sequence: Synthetic oligonucleotide
  Sense strand starting at position 3248 of SEQ ID NO: 588597
agaagacagccuugacuuu

SEQ ID NO: 876229 - RNA, 19 nt, Artificial Sequence
  Description of Artificial Sequence: Synthetic oligonucleotide
  Antisense strand to SEQ ID NO: 876228
aaagucaaggcugucuucu

SEQ ID NO: 876230 - RNA, 19 nt, Artificial Sequence
  Description of Artificial Sequence: Synthetic oligonucleotide
  Sense strand starting at position 3255 of SEQ ID NO: 588597
agccuugacuuucuaugau

SEQ ID NO: 876231 - RNA, 19 nt, Artificial Sequence
  Description of Artificial Sequence: Synthetic oligonucleotide
  Antisense strand to SEQ ID NO: 876230
aucauagaaagucaaggcu

SEQ ID NO: 876232 - RNA, 19 nt, Artificial Sequence
  Description of Artificial Sequence: Synthetic oligonucleotide
  Sense strand starting at position 3692 of SEQ ID NO: 588597
ggaaauugaugugaguaau

SEQ ID NO: 876233 - RNA, 19 nt, Artificial Sequence
  Description of Artificial Sequence: Synthetic oligonucleotide
  Antisense strand to SEQ ID NO: 876232
auuacucacaucaauuucc

SEQ ID NO: 876234 - RNA, 19 nt, Artificial Sequence
  Description of Artificial Sequence: Synthetic oligonucleotide
  Sense strand starting at position 3778 of SEQ ID NO: 588597
uuugauaaaucagcugugu

SEQ ID NO: 876235 - RNA, 19 nt, Artificial Sequence
  Description of Artificial Sequence: Synthetic oligonucleotide
  Antisense strand to SEQ ID NO: 876234
acacagcugauuuaucaaa

SEQ ID NO: 876236 - RNA, 19 nt, Artificial Sequence
  Description of Artificial Sequence: Synthetic oligonucleotide
  Sense strand starting at position 3780 of SEQ ID NO: 588597
ugauaaaucagcuguguag

SEQ ID NO: 876237 - RNA, 19 nt, Artificial Sequence
  Description of Artificial Sequence: Synthetic oligonucleotide
  Antisense strand to SEQ ID NO: 876236
cuacacagcugauuuauca

SEQ ID NO: 876238 - RNA, 19 nt, Artificial Sequence
  Description of Artificial Sequence: Synthetic oligonucleotide
  Sense strand starting at position 3783 of SEQ ID NO: 588597
uaaaucagcuguguaggua

SEQ ID NO: 876239 - RNA, 19 nt, Artificial Sequence
  Description of Artificial Sequence: Synthetic oligonucleotide
  Antisense strand to SEQ ID NO: 876238
uaccuacacagcugauuua

SEQ ID NO: 876240 - RNA, 19 nt, Artificial Sequence
  Description of Artificial Sequence: Synthetic oligonucleotide
  Sense strand starting at position 3813 of SEQ ID NO: 588597
gaaccaguugagcaguuaa

SEQ ID NO: 876241 - RNA, 19 nt, Artificial Sequence
  Description of Artificial Sequence: Synthetic oligonucleotide
  Antisense strand to SEQ ID NO: 876240
uuaacugcucaacugguuc

SEQ ID NO: 876242 - RNA, 19 nt, Artificial Sequence
  Description of Artificial Sequence: Synthetic oligonucleotide
  Sense strand starting at position 3848 of SEQ ID NO: 588597
ucgggauugcucuugugcu

SEQ ID NO: 876243 - RNA, 19 nt, Artificial Sequence
  Description of Artificial Sequence: Synthetic oligonucleotide
  Antisense strand to SEQ ID NO: 876242
agcacaagagcaaucccga

SEQ ID NO: 876244 - RNA, 19 nt, Artificial Sequence
  Description of Artificial Sequence: Synthetic oligonucleotide
  Sense strand starting at position 30 of SEQ ID NO: 588598
gugccuuguacagagguua

SEQ ID NO: 876245 - RNA, 19 nt, Artificial Sequence
  Description of Artificial Sequence: Synthetic oligonucleotide
  Antisense strand to SEQ ID NO: 876244
uaaccucuguacaaggcac

SEQ ID NO: 876246 - RNA, 19 nt, Artificial Sequence
  Description of Artificial Sequence: Synthetic oligonucleotide
  Sense strand starting at position 61 of SEQ ID NO: 588598
cguguuagaaaucaaagca

SEQ ID NO: 876247 - RNA, 19 nt, Artificial Sequence
  Description of Artificial Sequence: Synthetic oligonucleotide
  Antisense strand to SEQ ID NO: 876246
ugcuuugauuucuaacacg

SEQ ID NO: 876248 - RNA, 19 nt, Artificial Sequence
  Description of Artificial Sequence: Synthetic oligonucleotide
  Sense strand starting at position 81 of SEQ ID NO: 588598
gcagcauaguuauuuaauu

SEQ ID NO: 876249 - RNA, 19 nt, Artificial Sequence
  Description of Artificial Sequence: Synthetic oligonucleotide
  Antisense strand to SEQ ID NO: 876248
aauuaaauaacuaugcugc

SEQ ID NO: 876250 - RNA, 19 nt, Artificial Sequence
  Description of Artificial Sequence: Synthetic oligonucleotide
  Sense strand starting at position 98 of SEQ ID NO: 588598
uuuauaccuguguagugaa

SEQ ID NO: 876251 - RNA, 19 nt, Artificial Sequence
  Description of Artificial Sequence: Synthetic oligonucleotide
  Antisense strand to SEQ ID NO: 876250
uucacuacacagguauaaa

SEQ ID NO: 876252 - RNA, 19 nt, Artificial Sequence
  Description of Artificial Sequence: Synthetic oligonucleotide
  Sense strand starting at position 334 of SEQ ID NO: 588598
agacaaacguuaguagaua

SEQ ID NO: 876253 - RNA, 19 nt, Artificial Sequence
  Description of Artificial Sequence: Synthetic oligonucleotide
  Antisense strand to SEQ ID NO: 876252
uaucuacuaacguuugucu

SEQ ID NO: 876254 - RNA, 19 nt, Artificial Sequence
  Description of Artificial Sequence: Synthetic oligonucleotide
  Sense strand starting at position 423 of SEQ ID NO: 588598
gccucuuaagcguuggcaa

SEQ ID NO: 876255 - RNA, 19 nt, Artificial Sequence
  Description of Artificial Sequence: Synthetic oligonucleotide
  Antisense strand to SEQ ID NO: 876254
uugccaacgcuuaagaggc

SEQ ID NO: 876256 - RNA, 19 nt, Artificial Sequence
  Description of Artificial Sequence: Synthetic oligonucleotide
  Sense strand starting at position 463 of SEQ ID NO: 588598
ugauguguauuaccucauu

SEQ ID NO: 876257 - RNA, 19 nt, Artificial Sequence
  Description of Artificial Sequence: Synthetic oligonucleotide
  Antisense strand to SEQ ID NO: 876256
aaugagguaauacacauca

SEQ ID NO: 876258 - RNA, 19 nt, Artificial Sequence
  Description of Artificial Sequence: Synthetic oligonucleotide
  Sense strand starting at position 523 of SEQ ID NO: 588598
uguauuacagacuaaaguu

SEQ ID NO: 876259 - RNA, 19 nt, Artificial Sequence
  Description of Artificial Sequence: Synthetic oligonucleotide
  Antisense strand to SEQ ID NO: 876258
aacuuuagucuguaauaca

SEQ ID NO: 876260 - RNA, 19 nt, Artificial Sequence
  Description of Artificial Sequence: Synthetic oligonucleotide
  Sense strand starting at position 742 of SEQ ID NO: 588598
uaaggcuuauguguaauau

SEQ ID NO: 876261 - RNA, 19 nt, Artificial Sequence
  Description of Artificial Sequence: Synthetic oligonucleotide
  Antisense strand to SEQ ID NO: 876260
auauuacacauaagccuua

SEQ ID NO: 876262 - RNA, 19 nt, Artificial Sequence
  Description of Artificial Sequence: Synthetic oligonucleotide
  Sense strand starting at position 743 of SEQ ID NO: 588598
aaggcuuauguguaauaua

SEQ ID NO: 876263 - RNA, 19 nt, Artificial Sequence
  Description of Artificial Sequence: Synthetic oligonucleotide
  Antisense strand to SEQ ID NO: 876262
uauauuacacauaagccuu

SEQ ID NO: 876264 - RNA, 19 nt, Artificial Sequence
  Description of Artificial Sequence: Synthetic oligonucleotide
  Sense strand starting at position 928 of SEQ ID NO: 588598
cgcuuacggccaguucaaa

SEQ ID NO: 876265 - RNA, 19 nt, Artificial Sequence
  Description of Artificial Sequence: Synthetic oligonucleotide
  Antisense strand to SEQ ID NO: 876264
uuugaacuggccguaagcg

SEQ ID NO: 876266 - RNA, 19 nt, Artificial Sequence
  Description of Artificial Sequence: Synthetic oligonucleotide
  Sense strand starting at position 1017 of SEQ ID NO: 588598
gcuugaaagaagugaaauc

SEQ ID NO: 876267 - RNA, 19 nt, Artificial Sequence
  Description of Artificial Sequence: Synthetic oligonucleotide
  Antisense strand to SEQ ID NO: 876266
gauuucacuucuuucaagc

SEQ ID NO: 876268 - RNA, 19 nt, Artificial Sequence
  Description of Artificial Sequence: Synthetic oligonucleotide
  Sense strand starting at position 1027 of SEQ ID NO: 588598
agugaaaucaacggauaac

SEQ ID NO: 876269 - RNA, 19 nt, Artificial Sequence
  Description of Artificial Sequence: Synthetic oligonucleotide
  Antisense strand to SEQ ID NO: 876268
guuauccguugauuucacu

SEQ ID NO: 876270 - RNA, 19 nt, Artificial Sequence
  Description of Artificial Sequence: Synthetic oligonucleotide
  Sense strand starting at position 1067 of SEQ ID NO: 588598
acugcaacucaugagaucu

SEQ ID NO: 876271 - RNA, 19 nt, Artificial Sequence
  Description of Artificial Sequence: Synthetic oligonucleotide
  Antisense strand to SEQ ID NO: 876270
agaucucaugaguugcagu

SEQ ID NO: 876272 - RNA, 19 nt, Artificial Sequence
  Description of Artificial Sequence: Synthetic oligonucleotide
  Sense strand starting at position 1078 of SEQ ID NO: 588598
ugagaucucucaguccuuu

SEQ ID NO: 876273 - RNA, 19 nt, Artificial Sequence
  Description of Artificial Sequence: Synthetic oligonucleotide
  Antisense strand to SEQ ID NO: 876272
aaaggacugagagaucuca

SEQ ID NO: 876274 - RNA, 19 nt, Artificial Sequence
  Description of Artificial Sequence: Synthetic oligonucleotide
  Sense strand starting at position 1234 of SEQ ID NO: 588598
ucugaagcauccuuagaga

SEQ ID NO: 876275 - RNA, 19 nt, Artificial Sequence
  Description of Artificial Sequence: Synthetic oligonucleotide
  Antisense strand to SEQ ID NO: 876274
ucucuaaggaugcuucaga

SEQ ID NO: 876276 - RNA, 19 nt, Artificial Sequence
  Description of Artificial Sequence: Synthetic oligonucleotide
  Sense strand starting at position 1330 of SEQ ID NO: 588598
agaagucgcuuucuagaag

SEQ ID NO: 876277 - RNA, 19 nt, Artificial Sequence
  Description of Artificial Sequence: Synthetic oligonucleotide
  Antisense strand to SEQ ID NO: 876276
cuucuagaaagcgacuucu

SEQ ID NO: 876278 - RNA, 19 nt, Artificial Sequence
  Description of Artificial Sequence: Synthetic oligonucleotide
  Sense strand starting at position 2120 of SEQ ID NO: 588598
gacaauugcuaggcggaga

SEQ ID NO: 876279 - RNA, 19 nt, Artificial Sequence
  Description of Artificial Sequence: Synthetic oligonucleotide
  Antisense strand to SEQ ID NO: 876278
ucuccgccuagcaauuguc

SEQ ID NO: 876280 - RNA, 19 nt, Artificial Sequence
  Description of Artificial Sequence: Synthetic oligonucleotide
  Sense strand starting at position 2427 of SEQ ID NO: 588598
aaggguuauuggguaccua

SEQ ID NO: 876281 - RNA, 19 nt, Artificial Sequence
  Description of Artificial Sequence: Synthetic oligonucleotide
  Antisense strand to SEQ ID NO: 876280
uagguacccaauaacccuu

SEQ ID NO: 876282 - RNA, 19 nt, Artificial Sequence
  Description of Artificial Sequence: Synthetic oligonucleotide
  Sense strand starting at position 2428 of SEQ ID NO: 588598
aggguuauuggguaccuau

SEQ ID NO: 876283 - RNA, 19 nt, Artificial Sequence
  Description of Artificial Sequence: Synthetic oligonucleotide
  Antisense strand to SEQ ID NO: 876282
auagguacccaauaacccu

SEQ ID NO: 876284 - RNA, 19 nt, Artificial Sequence
  Description of Artificial Sequence: Synthetic oligonucleotide
  Sense strand starting at position 2471 of SEQ ID NO: 588598
cccugaugucuuuaugagc

SEQ ID NO: 876285 - RNA, 19 nt, Artificial Sequence
  Description of Artificial Sequence: Synthetic oligonucleotide
  Antisense strand to SEQ ID NO: 876284
gcucauaaagacaucaggg

SEQ ID NO: 876286 - RNA, 19 nt, Artificial Sequence
  Description of Artificial Sequence: Synthetic oligonucleotide
  Sense strand starting at position 2477 of SEQ ID NO: 588598
ugucuuuaugagcaccaua

SEQ ID NO: 876287 - RNA, 19 nt, Artificial Sequence
  Description of Artificial Sequence: Synthetic oligonucleotide
  Antisense strand to SEQ ID NO: 876286
uauggugcucauaaagaca

SEQ ID NO: 876288 - RNA, 19 nt, Artificial Sequence
  Description of Artificial Sequence: Synthetic oligonucleotide
  Sense strand starting at position 2693 of SEQ ID NO: 588598
ccagaaucagaucguguua

SEQ ID NO: 876289 - RNA, 19 nt, Artificial Sequence
  Description of Artificial Sequence: Synthetic oligonucleotide
  Antisense strand to SEQ ID NO: 876288
uaacacgaucugauucugg

SEQ ID NO: 876290 - RNA, 19 nt, Artificial Sequence
  Description of Artificial Sequence: Synthetic oligonucleotide
  Sense strand starting at position 2705 of SEQ ID NO: 588598
cguguuacugcuuuguuua

SEQ ID NO: 876291 - RNA, 19 nt, Artificial Sequence
  Description of Artificial Sequence: Synthetic oligonucleotide
  Antisense strand to SEQ ID NO: 876290
uaaacaaagcaguaacacg

SEQ ID NO: 876292 - RNA, 19 nt, Artificial Sequence
  Description of Artificial Sequence: Synthetic oligonucleotide
  Sense strand starting at position 3125 of SEQ ID NO: 588598
cuguucuuacaauaaguca

SEQ ID NO: 876293 - RNA, 19 nt, Artificial Sequence
  Description of Artificial Sequence: Synthetic oligonucleotide
  Antisense strand to SEQ ID NO: 876292
ugacuuauuguaagaacag

SEQ ID NO: 876294 - RNA, 19 nt, Artificial Sequence
  Description of Artificial Sequence: Synthetic oligonucleotide
  Sense strand starting at position 3244 of SEQ ID NO: 588598
aaugucagguccuuaguga

SEQ ID NO: 876295 - RNA, 19 nt, Artificial Sequence
  Description of Artificial Sequence: Synthetic oligonucleotide
  Antisense strand to SEQ ID NO: 876294
ucacuaaggaccugacauu

SEQ ID NO: 876296 - RNA, 19 nt, Artificial Sequence
  Description of Artificial Sequence: Synthetic oligonucleotide
  Sense strand starting at position 3264 of SEQ ID NO: 588598
gccuucuuugguuacccaa

SEQ ID NO: 876297 - RNA, 19 nt, Artificial Sequence
  Description of Artificial Sequence: Synthetic oligonucleotide
  Antisense strand to SEQ ID NO: 876296
uuggguaaccaaagaaggc

SEQ ID NO: 876298 - RNA, 19 nt, Artificial Sequence
  Description of Artificial Sequence: Synthetic oligonucleotide
  Sense strand starting at position 3395 of SEQ ID NO: 588598
ugcucucuuggcgcugaua

SEQ ID NO: 876299 - RNA, 19 nt, Artificial Sequence
  Description of Artificial Sequence: Synthetic oligonucleotide
  Antisense strand to SEQ ID NO: 876298
uaucagcgccaagagagca

SEQ ID NO: 876300 - RNA, 19 nt, Artificial Sequence
  Description of Artificial Sequence: Synthetic oligonucleotide
  Sense strand starting at position 3396 of SEQ ID NO: 588598
gcucucuuggcgcugauau

SEQ ID NO: 876301 - RNA, 19 nt, Artificial Sequence
  Description of Artificial Sequence: Synthetic oligonucleotide
  Antisense strand to SEQ ID NO: 876300
auaucagcgccaagagagc

SEQ ID NO: 876302 - RNA, 19 nt, Artificial Sequence
  Description of Artificial Sequence: Synthetic oligonucleotide
  Sense strand starting at position 3475 of SEQ ID NO: 588598
gagagugguagaugagauc

SEQ ID NO: 876303 - RNA, 19 nt, Artificial Sequence
  Description of Artificial Sequence: Synthetic oligonucleotide
  Antisense strand to SEQ ID NO: 876302
gaucucaucuaccacucuc

SEQ ID NO: 876304 - RNA, 19 nt, Artificial Sequence
  Description of Artificial Sequence: Synthetic oligonucleotide
  Sense strand starting at position 3506 of SEQ ID NO: 588598
ggaaggugcucugugagga

SEQ ID NO: 876305 - RNA, 19 nt, Artificial Sequence
  Description of Artificial Sequence: Synthetic oligonucleotide
  Antisense strand to SEQ ID NO: 876304
uccucacagagcaccuucc

SEQ ID NO: 876306 - RNA, 19 nt, Artificial Sequence
  Description of Artificial Sequence: Synthetic oligonucleotide
  Sense strand starting at position 3516 of SEQ ID NO: 588598
cugugaggacuuuggacau

SEQ ID NO: 876307 - RNA, 19 nt, Artificial Sequence
  Description of Artificial Sequence: Synthetic oligonucleotide
  Antisense strand to SEQ ID NO: 876306
auguccaaaguccucacag

SEQ ID NO: 876308 - RNA, 19 nt, Artificial Sequence
  Description of Artificial Sequence: Synthetic oligonucleotide
  Sense strand starting at position 3547 of SEQ ID NO: 588598
uugagaagucauuggagua

SEQ ID NO: 876309 - RNA, 19 nt, Artificial Sequence
  Description of Artificial Sequence: Synthetic oligonucleotide
  Antisense strand to SEQ ID NO: 876308
uacuccaaugacuucucaa

SEQ ID NO: 876310 - RNA, 19 nt, Artificial Sequence
  Description of Artificial Sequence: Synthetic oligonucleotide
  Sense strand starting at position 3548 of SEQ ID NO: 588598
ugagaagucauuggaguau

SEQ ID NO: 876311 - RNA, 19 nt, Artificial Sequence
  Description of Artificial Sequence: Synthetic oligonucleotide
  Antisense strand to SEQ ID NO: 876310
auacuccaaugacuucuca

SEQ ID NO: 876312 - RNA, 19 nt, Artificial Sequence
  Description of Artificial Sequence: Synthetic oligonucleotide
  Sense strand starting at position 3625 of SEQ ID NO: 588598
cggucuuggcucguuguaa

SEQ ID NO: 876313 - RNA, 19 nt, Artificial Sequence
  Description of Artificial Sequence: Synthetic oligonucleotide
  Antisense strand to SEQ ID NO: 876312
uuacaacgagccaagaccg

SEQ ID NO: 876314 - RNA, 19 nt, Artificial Sequence
  Description of Artificial Sequence: Synthetic oligonucleotide
  Sense strand starting at position 3921 of SEQ ID NO: 588598
aaaugauaguagcuugaac

SEQ ID NO: 876315 - RNA, 19 nt, Artificial Sequence
  Description of Artificial Sequence: Synthetic oligonucleotide
  Antisense strand to SEQ ID NO: 876314
guucaagcuacuaucauuu

SEQ ID NO: 876316 - RNA, 19 nt, Artificial Sequence
  Description of Artificial Sequence: Synthetic oligonucleotide
  Sense strand starting at position 3923 of SEQ ID NO: 588598
augauaguagcuugaacua

SEQ ID NO: 876317 - RNA, 19 nt, Artificial Sequence
  Description of Artificial Sequence: Synthetic oligonucleotide
  Antisense strand to SEQ ID NO: 876316
uaguucaagcuacuaucau

SEQ ID NO: 876318 - RNA, 19 nt, Artificial Sequence
  Description of Artificial Sequence: Synthetic oligonucleotide
  Sense strand starting at position 3961 of SEQ ID NO: 588598
ggugcaaagugaucugauu

SEQ ID NO: 876319 - RNA, 19 nt, Artificial Sequence
  Description of Artificial Sequence: Synthetic oligonucleotide
  Antisense strand to SEQ ID NO: 876318
aaucagaucacuuugcacc

SEQ ID NO: 876320 - RNA, 19 nt, Artificial Sequence
  Description of Artificial Sequence: Synthetic oligonucleotide
  Sense strand starting at position 3967 of SEQ ID NO: 588598
aagugaucugauuggauug

SEQ ID NO: 876321 - RNA, 19 nt, Artificial Sequence
  Description of Artificial Sequence: Synthetic oligonucleotide
  Antisense strand to SEQ ID NO: 876320
caauccaaucagaucacuu

SEQ ID NO: 876322 - RNA, 19 nt, Artificial Sequence
  Description of Artificial Sequence: Synthetic oligonucleotide
  Sense strand starting at position 3972 of SEQ ID NO: 588598
aucugauuggauuguacuu

SEQ ID NO: 876323 - RNA, 19 nt, Artificial Sequence
  Description of Artificial Sequence: Synthetic oligonucleotide
  Antisense strand to SEQ ID NO: 876322
aaguacaauccaaucagau

SEQ ID NO: 876324 - RNA, 19 nt, Artificial Sequence
  Description of Artificial Sequence: Synthetic oligonucleotide
  Sense strand starting at position 678 of SEQ ID NO: 588599
gagccacaugggugaagau

SEQ ID NO: 876325 - RNA, 19 nt, Artificial Sequence
  Description of Artificial Sequence: Synthetic oligonucleotide
  Antisense strand to SEQ ID NO: 876324
aucuucacccauguggcuc

SEQ ID NO: 876326 - RNA, 19 nt, Artificial Sequence
  Description of Artificial Sequence: Synthetic oligonucleotide
  Sense strand starting at position 1057 of SEQ ID NO: 588599
uggcacugcucauccauua

SEQ ID NO: 876327 - RNA, 19 nt, Artificial Sequence
  Description of Artificial Sequence: Synthetic oligonucleotide
  Antisense strand to SEQ ID NO: 876326
uaauggaugagcagugcca

SEQ ID NO: 876328 - RNA, 19 nt, Artificial Sequence
  Description of Artificial Sequence: Synthetic oligonucleotide
  Sense strand starting at position 1107 of SEQ ID NO: 588599
ccauuugcuccaugacgua

SEQ ID NO: 876329 - RNA, 19 nt, Artificial Sequence
  Description of Artificial Sequence: Synthetic oligonucleotide
  Antisense strand to SEQ ID NO: 876328
uacgucauggagcaaaugg

SEQ ID NO: 876330 - RNA, 19 nt, Artificial Sequence
  Description of Artificial Sequence: Synthetic oligonucleotide
  Sense strand starting at position 1157 of SEQ ID NO: 588599
gcagcuacgacagauugaa

SEQ ID NO: 876331 - RNA, 19 nt, Artificial Sequence
  Description of Artificial Sequence: Synthetic oligonucleotide
  Antisense strand to SEQ ID NO: 876330
uucaaucugucguagcugc

SEQ ID NO: 876332 - RNA, 19 nt, Artificial Sequence
  Description of Artificial Sequence: Synthetic oligonucleotide
  Sense strand starting at position 1180 of SEQ ID NO: 588599
gcuggcauccaagagcaaa

SEQ ID NO: 876333 - RNA, 19 nt, Artificial Sequence
  Description of Artificial Sequence: Synthetic oligonucleotide
  Antisense strand to SEQ ID NO: 876332
uuugcucuuggaugccagc

SEQ ID NO: 876334 - RNA, 19 nt, Artificial Sequence
  Description of Artificial Sequence: Synthetic oligonucleotide
  Sense strand starting at position 1222 of SEQ ID NO: 588599
ucgaaucgaucauucuaua

SEQ ID NO: 876335 - RNA, 19 nt, Artificial Sequence
  Description of Artificial Sequence: Synthetic oligonucleotide
  Antisense strand to SEQ ID NO: 876334
uauagaaugaucgauucga

SEQ ID NO: 876336 - RNA, 19 nt, Artificial Sequence
  Description of Artificial Sequence: Synthetic oligonucleotide
  Sense strand starting at position 1271 of SEQ ID NO: 588599
aggaccucucaaggucaua

SEQ ID NO: 876337 - RNA, 19 nt, Artificial Sequence
  Description of Artificial Sequence: Synthetic oligonucleotide
  Antisense strand to SEQ ID NO: 876336
uaugaccuugagagguccu

SEQ ID NO: 876338 - RNA, 19 nt, Artificial Sequence
  Description of Artificial Sequence: Synthetic oligonucleotide
  Sense strand starting at position 1310 of SEQ ID NO: 588599
cccuucucuuuggugaaca

SEQ ID NO: 876339 - RNA, 19 nt, Artificial Sequence
  Description of Artificial Sequence: Synthetic oligonucleotide
  Antisense strand to SEQ ID NO: 876338
uguucaccaaagagaaggg

SEQ ID NO: 876340 - RNA, 19 nt, Artificial Sequence
  Description of Artificial Sequence: Synthetic oligonucleotide
  Sense strand starting at position 1353 of SEQ ID NO: 588599
cuugguggucccuaaagau

SEQ ID NO: 876341 - RNA, 19 nt, Artificial Sequence
  Description of Artificial Sequence: Synthetic oligonucleotide
  Antisense strand to SEQ ID NO: 876340
aucuuuagggaccaccaag

SEQ ID NO: 876342 - RNA, 19 nt, Artificial Sequence
  Description of Artificial Sequence: Synthetic oligonucleotide
  Sense strand starting at position 1579 of SEQ ID NO: 588599
cccucuacgguuugagaaa

SEQ ID NO: 876343 - RNA, 19 nt, Artificial Sequence
  Description of Artificial Sequence: Synthetic oligonucleotide
  Antisense strand to SEQ ID NO: 876342
uuucucaaaccguagaggg

SEQ ID NO: 876344 - RNA, 19 nt, Artificial Sequence
  Description of Artificial Sequence: Synthetic oligonucleotide
  Sense strand starting at position 1674 of SEQ ID NO: 588599
ggaaggugucccgggagau

SEQ ID NO: 876345 - RNA, 19 nt, Artificial Sequence
  Description of Artificial Sequence: Synthetic oligonucleotide
  Antisense strand to SEQ ID NO: 876344
aucucccgggacaccuucc

SEQ ID NO: 876346 - RNA, 19 nt, Artificial Sequence
  Description of Artificial Sequence: Synthetic oligonucleotide
  Sense strand starting at position 1675 of SEQ ID NO: 588599
gaaggugucccgggagaug

SEQ ID NO: 876347 - RNA, 19 nt, Artificial Sequence
  Description of Artificial Sequence: Synthetic oligonucleotide
  Antisense strand to SEQ ID NO: 876346
caucucccgggacaccuuc

SEQ ID NO: 876348 - RNA, 19 nt, Artificial Sequence
  Description of Artificial Sequence: Synthetic oligonucleotide
  Sense strand starting at position 1759 of SEQ ID NO: 588599
cggccugcucuggaugaga

SEQ ID NO: 876349 - RNA, 19 nt, Artificial Sequence
  Description of Artificial Sequence: Synthetic oligonucleotide
  Antisense strand to SEQ ID NO: 876348
ucucauccagagcaggccg

SEQ ID NO: 876350 - RNA, 19 nt, Artificial Sequence
  Description of Artificial Sequence: Synthetic oligonucleotide
  Sense strand starting at position 1761 of SEQ ID NO: 588599
gccugcucuggaugagaaa

SEQ ID NO: 876351 - RNA, 19 nt, Artificial Sequence
  Description of Artificial Sequence: Synthetic oligonucleotide
  Antisense strand to SEQ ID NO: 876350
uuucucauccagagcaggc

SEQ ID NO: 876352 - RNA, 19 nt, Artificial Sequence
  Description of Artificial Sequence: Synthetic oligonucleotide
  Sense strand starting at position 1931 of SEQ ID NO: 588599
aggguuugcuucucccaca

SEQ ID NO: 876353 - RNA, 19 nt, Artificial Sequence
  Description of Artificial Sequence: Synthetic oligonucleotide
  Antisense strand to SEQ ID NO: 876352
ugugggagaagcaaacccu

SEQ ID NO: 876354 - RNA, 19 nt, Artificial Sequence
  Description of Artificial Sequence: Synthetic oligonucleotide
  Sense strand starting at position 1974 of SEQ ID NO: 588599
aagacuuacucguugccau

SEQ ID NO: 876355 - RNA, 19 nt, Artificial Sequence
  Description of Artificial Sequence: Synthetic oligonucleotide
  Antisense strand to SEQ ID NO: 876354
auggcaacgaguaagucuu

SEQ ID NO: 876356 - RNA, 19 nt, Artificial Sequence
  Description of Artificial Sequence: Synthetic oligonucleotide
  Sense strand starting at position 2268 of SEQ ID NO: 588599
uuuacugagccaugaaaca

SEQ ID NO: 876357 - RNA, 19 nt, Artificial Sequence
  Description of Artificial Sequence: Synthetic oligonucleotide
  Antisense strand to SEQ ID NO: 876356
uguuucauggcucaguaaa

SEQ ID NO: 876358 - RNA, 19 nt, Artificial Sequence
  Description of Artificial Sequence: Synthetic oligonucleotide
  Sense strand starting at position 2349 of SEQ ID NO: 588599
cucuaaagucaccgaacaa

SEQ ID NO: 876359 - RNA, 19 nt, Artificial Sequence
  Description of Artificial Sequence: Synthetic oligonucleotide
  Antisense strand to SEQ ID NO: 876358
uuguucggugacuuuagag

SEQ ID NO: 876360 - RNA, 19 nt, Artificial Sequence
  Description of Artificial Sequence: Synthetic oligonucleotide
  Sense strand starting at position 2450 of SEQ ID NO: 588599
gcgccucauccauaaagug

SEQ ID NO: 876361 - RNA, 19 nt, Artificial Sequence
  Description of Artificial Sequence: Synthetic oligonucleotide
  Antisense strand to SEQ ID NO: 876360
cacuuuauggaugaggcgc

SEQ ID NO: 876362 - RNA, 19 nt, Artificial Sequence
  Description of Artificial Sequence: Synthetic oligonucleotide
  Sense strand starting at position 2459 of SEQ ID NO: 588599
ccauaaagugggcaucaua

SEQ ID NO: 876363 - RNA, 19 nt, Artificial Sequence
  Description of Artificial Sequence: Synthetic oligonucleotide
  Antisense strand to SEQ ID NO: 876362
uaugaugcccacuuuaugg

SEQ ID NO: 876364 - RNA, 19 nt, Artificial Sequence
  Description of Artificial Sequence: Synthetic oligonucleotide
  Sense strand starting at position 2462 of SEQ ID NO: 588599
uaaagugggcaucauauua

SEQ ID NO: 876365 - RNA, 19 nt, Artificial Sequence
  Description of Artificial Sequence: Synthetic oligonucleotide
  Antisense strand to SEQ ID NO: 876364
uaauaugaugcccacuuua

SEQ ID NO: 876366 - RNA, 19 nt, Artificial Sequence
  Description of Artificial Sequence: Synthetic oligonucleotide
  Sense strand starting at position 2580 of SEQ ID NO: 588599
ggcgucaaagaauggaauu

SEQ ID NO: 876367 - RNA, 19 nt, Artificial Sequence
  Description of Artificial Sequence: Synthetic oligonucleotide
  Antisense strand to SEQ ID NO: 876366
aauuccauucuuugacgcc

SEQ ID NO: 876368 - RNA, 19 nt, Artificial Sequence
  Description of Artificial Sequence: Synthetic oligonucleotide
  Sense strand starting at position 2636 of SEQ ID NO: 588599
gcccucaaaugugcucaau

SEQ ID NO: 876369 - RNA, 19 nt, Artificial Sequence
  Description of Artificial Sequence: Synthetic oligonucleotide
  Antisense strand to SEQ ID NO: 876368
auugagcacauuugagggc

SEQ ID NO: 876370 - RNA, 19 nt, Artificial Sequence
  Description of Artificial Sequence: Synthetic oligonucleotide
  Sense strand starting at position 2650 of SEQ ID NO: 588599
ucaauacugguuuguggaa

SEQ ID NO: 876371 - RNA, 19 nt, Artificial Sequence
  Description of Artificial Sequence: Synthetic oligonucleotide
  Antisense strand to SEQ ID NO: 876370
uuccacaaaccaguauuga

SEQ ID NO: 876372 - RNA, 19 nt, Artificial Sequence
  Description of Artificial Sequence: Synthetic oligonucleotide
  Sense strand starting at position 2651 of SEQ ID NO: 588599
caauacugguuuguggaau

SEQ ID NO: 876373 - RNA, 19 nt, Artificial Sequence
  Description of Artificial Sequence: Synthetic oligonucleotide
  Antisense strand to SEQ ID NO: 876372
auuccacaaaccaguauug

SEQ ID NO: 876374 - RNA, 19 nt, Artificial Sequence
  Description of Artificial Sequence: Synthetic oligonucleotide
  Sense strand starting at position 2657 of SEQ ID NO: 588599
ugguuuguggaaugaauga

SEQ ID NO: 876375 - RNA, 19 nt, Artificial Sequence
  Description of Artificial Sequence: Synthetic oligonucleotide
  Antisense strand to SEQ ID NO: 876374
ucauucauuccacaaacca

SEQ ID NO: 876376 - RNA, 19 nt, Artificial Sequence
  Description of Artificial Sequence: Synthetic oligonucleotide
  Sense strand starting at position 2752 of SEQ ID NO: 588599
agaaucuauucccagggaa

SEQ ID NO: 876377 - RNA, 19 nt, Artificial Sequence
  Description of Artificial Sequence: Synthetic oligonucleotide
  Antisense strand to SEQ ID NO: 876376
uucccugggaauagauucu

SEQ ID NO: 876378 - RNA, 19 nt, Artificial Sequence
  Description of Artificial Sequence: Synthetic oligonucleotide
  Sense strand starting at position 2754 of SEQ ID NO: 588599
aaucuauucccagggaagu

SEQ ID NO: 876379 - RNA, 19 nt, Artificial Sequence
  Description of Artificial Sequence: Synthetic oligonucleotide
  Antisense strand to SEQ ID NO: 876378
acuucccugggaauagauu

SEQ ID NO: 876380 - RNA, 19 nt, Artificial Sequence
  Description of Artificial Sequence: Synthetic oligonucleotide
  Sense strand starting at position 2755 of SEQ ID NO: 588599
aucuauucccagggaagug

SEQ ID NO: 876381 - RNA, 19 nt, Artificial Sequence
  Description of Artificial Sequence: Synthetic oligonucleotide
  Antisense strand to SEQ ID NO: 876380
cacuucccugggaauagau

SEQ ID NO: 876382 - RNA, 19 nt, Artificial Sequence
  Description of Artificial Sequence: Synthetic oligonucleotide
  Sense strand starting at position 2788 of SEQ ID NO: 588599
agaggugucucugaauugu

SEQ ID NO: 876383 - RNA, 19 nt, Artificial Sequence
  Description of Artificial Sequence: Synthetic oligonucleotide
  Antisense strand to SEQ ID NO: 876382
acaauucagagacaccucu

SEQ ID NO: 876384 - RNA, 19 nt, Artificial Sequence
  Description of Artificial Sequence: Synthetic oligonucleotide
  Sense strand starting at position 2798 of SEQ ID NO: 588599
cugaauuguuugugccuga

SEQ ID NO: 876385 - RNA, 19 nt, Artificial Sequence
  Description of Artificial Sequence: Synthetic oligonucleotide
  Antisense strand to SEQ ID NO: 876384
ucaggcacaaacaauucag

SEQ ID NO: 876386 - RNA, 19 nt, Artificial Sequence
  Description of Artificial Sequence: Synthetic oligonucleotide
  Sense strand starting at position 2801 of SEQ ID NO: 588599
aauuguuugugccugacca

SEQ ID NO: 876387 - RNA, 19 nt, Artificial Sequence
  Description of Artificial Sequence: Synthetic oligonucleotide
  Antisense strand to SEQ ID NO: 876386
uggucaggcacaaacaauu

SEQ ID NO: 876388 - RNA, 19 nt, Artificial Sequence
  Description of Artificial Sequence: Synthetic oligonucleotide
  Sense strand starting at position 2803 of SEQ ID NO: 588599
uuguuugugccugaccaga

SEQ ID NO: 876389 - RNA, 19 nt, Artificial Sequence
  Description of Artificial Sequence: Synthetic oligonucleotide
  Antisense strand to SEQ ID NO: 876388
ucuggucaggcacaaacaa

SEQ ID NO: 876390 - RNA, 19 nt, Artificial Sequence
  Description of Artificial Sequence: Synthetic oligonucleotide
  Sense strand starting at position 3047 of SEQ ID NO: 588599
uuaggucuguggcucagaa

SEQ ID NO: 876391 - RNA, 19 nt, Artificial Sequence
  Description of Artificial Sequence: Synthetic oligonucleotide
  Antisense strand to SEQ ID NO: 876390
uucugagccacagaccuaa

SEQ ID NO: 876392 - RNA, 19 nt, Artificial Sequence
  Description of Artificial Sequence: Synthetic oligonucleotide
  Sense strand starting at position 3169 of SEQ ID NO: 588599
gcaagcaggccucagauaa

SEQ ID NO: 876393 - RNA, 19 nt, Artificial Sequence
  Description of Artificial Sequence: Synthetic oligonucleotide
  Antisense strand to SEQ ID NO: 876392
uuaucugaggccugcuugc

SEQ ID NO: 876394 - RNA, 19 nt, Artificial Sequence
  Description of Artificial Sequence: Synthetic oligonucleotide
  Sense strand starting at position 3288 of SEQ ID NO: 588599
ccugguuaaagcggugaaa

SEQ ID NO: 876395 - RNA, 19 nt, Artificial Sequence
  Description of Artificial Sequence: Synthetic oligonucleotide
  Antisense strand to SEQ ID NO: 876394
uuucaccgcuuuaaccagg

SEQ ID NO: 876396 - RNA, 19 nt, Artificial Sequence
  Description of Artificial Sequence: Synthetic oligonucleotide
  Sense strand starting at position 3647 of SEQ ID NO: 588599
gaagguguccuuggucuga

SEQ ID NO: 876397 - RNA, 19 nt, Artificial Sequence
  Description of Artificial Sequence: Synthetic oligonucleotide
  Antisense strand to SEQ ID NO: 876396
ucagaccaaggacaccuuc

SEQ ID NO: 876398 - RNA, 19 nt, Artificial Sequence
  Description of Artificial Sequence: Synthetic oligonucleotide
  Sense strand starting at position 3651 of SEQ ID NO: 588599
guguccuuggucugaucca

SEQ ID NO: 876399 - RNA, 19 nt, Artificial Sequence
  Description of Artificial Sequence: Synthetic oligonucleotide
  Antisense strand to SEQ ID NO: 876398
uggaucagaccaaggacac

SEQ ID NO: 876400 - RNA, 19 nt, Artificial Sequence
  Description of Artificial Sequence: Synthetic oligonucleotide
  Sense strand starting at position 112 of SEQ ID NO: 588600
ucacuagcugugggaucau

SEQ ID NO: 876401 - RNA, 19 nt, Artificial Sequence
  Description of Artificial Sequence: Synthetic oligonucleotide
  Antisense strand to SEQ ID NO: 876400
augaucccacagcuaguga

SEQ ID NO: 876402 - RNA, 19 nt, Artificial Sequence
  Description of Artificial Sequence: Synthetic oligonucleotide
  Sense strand starting at position 170 of SEQ ID NO: 588600
ucuguaaauggagaucgua

SEQ ID NO: 876403 - RNA, 19 nt, Artificial Sequence
  Description of Artificial Sequence: Synthetic oligonucleotide
  Antisense strand to SEQ ID NO: 876402
uacgaucuccauuuacaga

SEQ ID NO: 876404 - RNA, 19 nt, Artificial Sequence
  Description of Artificial Sequence: Synthetic oligonucleotide
  Sense strand starting at position 423 of SEQ ID NO: 588600
cuggacuuagcuugaagga

SEQ ID NO: 876405 - RNA, 19 nt, Artificial Sequence
  Description of Artificial Sequence: Synthetic oligonucleotide
  Antisense strand to SEQ ID NO: 876404
uccuucaagcuaaguccag

SEQ ID NO: 876406 - RNA, 19 nt, Artificial Sequence
  Description of Artificial Sequence: Synthetic oligonucleotide
  Sense strand starting at position 1061 of SEQ ID NO: 588600
gaagccugguauggagaaa

SEQ ID NO: 876407 - RNA, 19 nt, Artificial Sequence
  Description of Artificial Sequence: Synthetic oligonucleotide
  Antisense strand to SEQ ID NO: 876406
uuucuccauaccaggcuuc

SEQ ID NO: 876408 - RNA, 19 nt, Artificial Sequence
  Description of Artificial Sequence: Synthetic oligonucleotide
  Sense strand starting at position 1096 of SEQ ID NO: 588600
acugcagaguugugaaguu

SEQ ID NO: 876409 - RNA, 19 nt, Artificial Sequence
  Description of Artificial Sequence: Synthetic oligonucleotide
  Antisense strand to SEQ ID NO: 876408
aacuucacaacucugcagu

SEQ ID NO: 876410 - RNA, 19 nt, Artificial Sequence
  Description of Artificial Sequence: Synthetic oligonucleotide
  Sense strand starting at position 1277 of SEQ ID NO: 588600
gagaauccagccuguaagu

SEQ ID NO: 876411 - RNA, 19 nt, Artificial Sequence
  Description of Artificial Sequence: Synthetic oligonucleotide
  Antisense strand to SEQ ID NO: 876410
acuuacaggcuggauucuc

SEQ ID NO: 876412 - RNA, 19 nt, Artificial Sequence
  Description of Artificial Sequence: Synthetic oligonucleotide
  Sense strand starting at position 1434 of SEQ ID NO: 588600
gcggcaucgugaugcauga

SEQ ID NO: 876413 - RNA, 19 nt, Artificial Sequence
  Description of Artificial Sequence: Synthetic oligonucleotide
  Antisense strand to SEQ ID NO: 876412
ucaugcaucacgaugccgc

SEQ ID NO: 876414 - RNA, 19 nt, Artificial Sequence
  Description of Artificial Sequence: Synthetic oligonucleotide
  Sense strand starting at position 1436 of SEQ ID NO: 588600
ggcaucgugaugcaugaau

SEQ ID NO: 876415 - RNA, 19 nt, Artificial Sequence
  Description of Artificial Sequence: Synthetic oligonucleotide
  Antisense strand to SEQ ID NO: 876414
auucaugcaucacgaugcc

SEQ ID NO: 876416 - RNA, 19 nt, Artificial Sequence
  Description of Artificial Sequence: Synthetic oligonucleotide
  Sense strand starting at position 1438 of SEQ ID NO: 588600
caucgugaugcaugaauca

SEQ ID NO: 876417 - RNA, 19 nt, Artificial Sequence
  Description of Artificial Sequence: Synthetic oligonucleotide
  Antisense strand to SEQ ID NO: 876416
ugauucaugcaucacgaug

SEQ ID NO: 876418 - RNA, 19 nt, Artificial Sequence
  Description of Artificial Sequence: Synthetic oligonucleotide
  Sense strand starting at position 2485 of SEQ ID NO: 588600
cccggaagaucggauguga

SEQ ID NO: 876419 - RNA, 19 nt, Artificial Sequence
  Description of Artificial Sequence: Synthetic oligonucleotide
  Antisense strand to SEQ ID NO: 876418
ucacauccgaucuuccggg

SEQ ID NO: 876420 - RNA, 19 nt, Artificial Sequence
  Description of Artificial Sequence: Synthetic oligonucleotide
  Sense strand starting at position 2489 of SEQ ID NO: 588600
gaagaucggaugugaauga

SEQ ID NO: 876421 - RNA, 19 nt, Artificial Sequence
  Description of Artificial Sequence: Synthetic oligonucleotide
  Antisense strand to SEQ ID NO: 876420
ucauucacauccgaucuuc

SEQ ID NO: 876422 - RNA, 19 nt, Artificial Sequence
  Description of Artificial Sequence: Synthetic oligonucleotide
  Sense strand starting at position 2913 of SEQ ID NO: 588600
cagagagugaugggucaga

SEQ ID NO: 876423 - RNA, 19 nt, Artificial Sequence
  Description of Artificial Sequence: Synthetic oligonucleotide
  Antisense strand to SEQ ID NO: 876422
ucugacccaucacucucug

SEQ ID NO: 876424 - RNA, 19 nt, Artificial Sequence
  Description of Artificial Sequence: Synthetic oligonucleotide
  Sense strand starting at position 2963 of SEQ ID NO: 588600
agcuguuucucugagccga

SEQ ID NO: 876425 - RNA, 19 nt, Artificial Sequence
  Description of Artificial Sequence: Synthetic oligonucleotide
  Antisense strand to SEQ ID NO: 876424
ucggcucagagaaacagcu

SEQ ID NO: 876426 - RNA, 19 nt, Artificial Sequence
  Description of Artificial Sequence: Synthetic oligonucleotide
  Sense strand starting at position 3037 of SEQ ID NO: 588600
gggugugguucagguggua

SEQ ID NO: 876427 - RNA, 19 nt, Artificial Sequence
  Description of Artificial Sequence: Synthetic oligonucleotide
  Antisense strand to SEQ ID NO: 876426
uaccaccugaaccacaccc

SEQ ID NO: 876428 - RNA, 19 nt, Artificial Sequence
  Description of Artificial Sequence: Synthetic oligonucleotide
  Sense strand starting at position 3182 of SEQ ID NO: 588600
uccuguuugucucuuccau

SEQ ID NO: 876429 - RNA, 19 nt, Artificial Sequence
  Description of Artificial Sequence: Synthetic oligonucleotide
  Antisense strand to SEQ ID NO: 876428
auggaagagacaaacagga

SEQ ID NO: 876430 - RNA, 19 nt, Artificial Sequence
  Description of Artificial Sequence: Synthetic oligonucleotide
  Sense strand starting at position 3186 of SEQ ID NO: 588600
guuugucucuuccauggga

SEQ ID NO: 876431 - RNA, 19 nt, Artificial Sequence
  Description of Artificial Sequence: Synthetic oligonucleotide
  Antisense strand to SEQ ID NO: 876430
ucccauggaagagacaaac

SEQ ID NO: 876432 - RNA, 19 nt, Artificial Sequence
  Description of Artificial Sequence: Synthetic oligonucleotide
  Sense strand starting at position 3188 of SEQ ID NO: 588600
uugucucuuccaugggaga

SEQ ID NO: 876433 - RNA, 19 nt, Artificial Sequence
  Description of Artificial Sequence: Synthetic oligonucleotide
  Antisense strand to SEQ ID NO: 876432
ucucccauggaagagacaa

SEQ ID NO: 876434 - RNA, 19 nt, Artificial Sequence
  Description of Artificial Sequence: Synthetic oligonucleotide
  Sense strand starting at position 3189 of SEQ ID NO: 588600
ugucucuuccaugggagaa

SEQ ID NO: 876435 - RNA, 19 nt, Artificial Sequence
  Description of Artificial Sequence: Synthetic oligonucleotide
  Antisense strand to SEQ ID NO: 876434
uucucccauggaagagaca

SEQ ID NO: 876436 - RNA, 19 nt, Artificial Sequence
  Description of Artificial Sequence: Synthetic oligonucleotide
  Sense strand starting at position 3190 of SEQ ID NO: 588600
gucucuuccaugggagaac

SEQ ID NO: 876437 - RNA, 19 nt, Artificial Sequence
  Description of Artificial Sequence: Synthetic oligonucleotide
  Antisense strand to SEQ ID NO: 876436
guucucccauggaagagac

SEQ ID NO: 876438 - RNA, 19 nt, Artificial Sequence
  Description of Artificial Sequence: Synthetic oligonucleotide
  Sense strand starting at position 3254 of SEQ ID NO: 588600
ugagguguuacccagcaaa

SEQ ID NO: 876439 - RNA, 19 nt, Artificial Sequence
  Description of Artificial Sequence: Synthetic oligonucleotide
  Antisense strand to SEQ ID NO: 876438
uuugcuggguaacaccuca

SEQ ID NO: 876440 - RNA, 19 nt, Artificial Sequence
  Description of Artificial Sequence: Synthetic oligonucleotide
  Sense strand starting at position 3257 of SEQ ID NO: 588600
gguguuacccagcaaaucu

SEQ ID NO: 876441 - RNA, 19 nt, Artificial Sequence
  Description of Artificial Sequence: Synthetic oligonucleotide
  Antisense strand to SEQ ID NO: 876440
agauuugcuggguaacacc

SEQ ID NO: 876442 - RNA, 19 nt, Artificial Sequence
  Description of Artificial Sequence: Synthetic oligonucleotide
  Sense strand starting at position 3264 of SEQ ID NO: 588600
cccagcaaaucucugugaa

SEQ ID NO: 876443 - RNA, 19 nt, Artificial Sequence
  Description of Artificial Sequence: Synthetic oligonucleotide
  Antisense strand to SEQ ID NO: 876442
uucacagagauuugcuggg

SEQ ID NO: 876444 - RNA, 19 nt, Artificial Sequence
  Description of Artificial Sequence: Synthetic oligonucleotide
  Sense strand starting at position 3265 of SEQ ID NO: 588600
ccagcaaaucucugugaau

SEQ ID NO: 876445 - RNA, 19 nt, Artificial Sequence
  Description of Artificial Sequence: Synthetic oligonucleotide
  Antisense strand to SEQ ID NO: 876444
auucacagagauuugcugg

SEQ ID NO: 876446 - RNA, 19 nt, Artificial Sequence
  Description of Artificial Sequence: Synthetic oligonucleotide
  Sense strand starting at position 3266 of SEQ ID NO: 588600
cagcaaaucucugugaaug

SEQ ID NO: 876447 - RNA, 19 nt, Artificial Sequence
  Description of Artificial Sequence: Synthetic oligonucleotide
  Antisense strand to SEQ ID NO: 876446
cauucacagagauuugcug

SEQ ID NO: 876448 - RNA, 19 nt, Artificial Sequence
  Description of Artificial Sequence: Synthetic oligonucleotide
  Sense strand starting at position 3267 of SEQ ID NO: 588600
agcaaaucucugugaauga

SEQ ID NO: 876449 - RNA, 19 nt, Artificial Sequence
  Description of Artificial Sequence: Synthetic oligonucleotide
  Antisense strand to SEQ ID NO: 876448
ucauucacagagauuugcu

SEQ ID NO: 876450 - RNA, 19 nt, Artificial Sequence
  Description of Artificial Sequence: Synthetic oligonucleotide
  Sense strand starting at position 3268 of SEQ ID NO: 588600
gcaaaucucugugaaugag

SEQ ID NO: 876451 - RNA, 19 nt, Artificial Sequence
  Description of Artificial Sequence: Synthetic oligonucleotide
  Antisense strand to SEQ ID NO: 876450
cucauucacagagauuugc

SEQ ID NO: 876452 - RNA, 19 nt, Artificial Sequence
  Description of Artificial Sequence: Synthetic oligonucleotide
  Sense strand starting at position 3411 of SEQ ID NO: 588600
uucuuuccacaguguucua

SEQ ID NO: 876453 - RNA, 19 nt, Artificial Sequence
  Description of Artificial Sequence: Synthetic oligonucleotide
  Antisense strand to SEQ ID NO: 876452
uagaacacuguggaaagaa

SEQ ID NO: 876454 - RNA, 19 nt, Artificial Sequence
  Description of Artificial Sequence: Synthetic oligonucleotide
  Sense strand starting at position 3612 of SEQ ID NO: 588600
gagcucauucugcagagga

SEQ ID NO: 876455 - RNA, 19 nt, Artificial Sequence
  Description of Artificial Sequence: Synthetic oligonucleotide
  Antisense strand to SEQ ID NO: 876454
uccucugcagaaugagcuc

SEQ ID NO: 876456 - RNA, 19 nt, Artificial Sequence
  Description of Artificial Sequence: Synthetic oligonucleotide
  Sense strand starting at position 3641 of SEQ ID NO: 588600
guuggagggaucuggugua

SEQ ID NO: 876457 - RNA, 19 nt, Artificial Sequence
  Description of Artificial Sequence: Synthetic oligonucleotide
  Antisense strand to SEQ ID NO: 876456
uacaccagaucccuccaac

SEQ ID NO: 876458 - RNA, 19 nt, Artificial Sequence
  Description of Artificial Sequence: Synthetic oligonucleotide
  Sense strand starting at position 3644 of SEQ ID NO: 588600
ggagggaucugguguagac

SEQ ID NO: 876459 - RNA, 19 nt, Artificial Sequence
  Description of Artificial Sequence: Synthetic oligonucleotide
  Antisense strand to SEQ ID NO: 876458
gucuacaccagaucccucc

SEQ ID NO: 876460 - RNA, 19 nt, Artificial Sequence
  Description of Artificial Sequence: Synthetic oligonucleotide
  Sense strand starting at position 3668 of SEQ ID NO: 588600
agcagaaugucccaaccuu

SEQ ID NO: 876461 - RNA, 19 nt, Artificial Sequence
  Description of Artificial Sequence: Synthetic oligonucleotide
  Antisense strand to SEQ ID NO: 876460
aagguugggacauucugcu

SEQ ID NO: 876462 - RNA, 19 nt, Artificial Sequence
  Description of Artificial Sequence: Synthetic oligonucleotide
  Sense strand starting at position 3809 of SEQ ID NO: 588600
ggaugacagcaguaguagu

SEQ ID NO: 876463 - RNA, 19 nt, Artificial Sequence
  Description of Artificial Sequence: Synthetic oligonucleotide
  Antisense strand to SEQ ID NO: 876462
acuacuacugcugucaucc

SEQ ID NO: 876464 - RNA, 19 nt, Artificial Sequence
  Description of Artificial Sequence: Synthetic oligonucleotide
  Sense strand starting at position 3826 of SEQ ID NO: 588600
guuaaagcccuuuagaaac

SEQ ID NO: 876465 - RNA, 19 nt, Artificial Sequence
  Description of Artificial Sequence: Synthetic oligonucleotide
  Antisense strand to SEQ ID NO: 876464
guuucuaaagggcuuuaac

SEQ ID NO: 876466 - RNA, 19 nt, Artificial Sequence
  Description of Artificial Sequence: Synthetic oligonucleotide
  Sense strand starting at position 128 of SEQ ID NO: 588601
ggagcuuccucuucucaca

SEQ ID NO: 876467 - RNA, 19 nt, Artificial Sequence
  Description of Artificial Sequence: Synthetic oligonucleotide
  Antisense strand to SEQ ID NO: 876466
ugugagaagaggaagcucc

SEQ ID NO: 876468 - RNA, 19 nt, Artificial Sequence
  Description of Artificial Sequence: Synthetic oligonucleotide
  Sense strand starting at position 150 of SEQ ID NO: 588601
cuguauuguggcuaccuca

SEQ ID NO: 876469 - RNA, 19 nt, Artificial Sequence
  Description of Artificial Sequence: Synthetic oligonucleotide
  Antisense strand to SEQ ID NO: 876468
ugagguagccacaauacag

SEQ ID NO: 876470 - RNA, 19 nt, Artificial Sequence
  Description of Artificial Sequence: Synthetic oligonucleotide
  Sense strand starting at position 269 of SEQ ID NO: 588601
caccguguucucugauuuc

SEQ ID NO: 876471 - RNA, 19 nt, Artificial Sequence
  Description of Artificial Sequence: Synthetic oligonucleotide
  Antisense strand to SEQ ID NO: 876470
gaaaucagagaacacggug

SEQ ID NO: 876472 - RNA, 19 nt, Artificial Sequence
  Description of Artificial Sequence: Synthetic oligonucleotide
  Sense strand starting at position 272 of SEQ ID NO: 588601
cguguucucugauuucugu

SEQ ID NO: 876473 - RNA, 19 nt, Artificial Sequence
  Description of Artificial Sequence: Synthetic oligonucleotide
  Antisense strand to SEQ ID NO: 876472
acagaaaucagagaacacg

SEQ ID NO: 876474 - RNA, 19 nt, Artificial Sequence
  Description of Artificial Sequence: Synthetic oligonucleotide
  Sense strand starting at position 337 of SEQ ID NO: 588601
ucgauucugcuugaccuau

SEQ ID NO: 876475 - RNA, 19 nt, Artificial Sequence
  Description of Artificial Sequence: Synthetic oligonucleotide
  Antisense strand to SEQ ID NO: 876474
auaggucaagcagaaucga

SEQ ID NO: 876476 - RNA, 19 nt, Artificial Sequence
  Description of Artificial Sequence: Synthetic oligonucleotide
  Sense strand starting at position 914 of SEQ ID NO: 588601
cugucauugcccguuagcu

SEQ ID NO: 876477 - RNA, 19 nt, Artificial Sequence
  Description of Artificial Sequence: Synthetic oligonucleotide
  Antisense strand to SEQ ID NO: 876476
agcuaacgggcaaugacag

SEQ ID NO: 876478 - RNA, 19 nt, Artificial Sequence
  Description of Artificial Sequence: Synthetic oligonucleotide
  Sense strand starting at position 1016 of SEQ ID NO: 588601
agaauagaauaugugcuua

SEQ ID NO: 876479 - RNA, 19 nt, Artificial Sequence
  Description of Artificial Sequence: Synthetic oligonucleotide
  Antisense strand to SEQ ID NO: 876478
uaagcacauauucuauucu

SEQ ID NO: 876480 - RNA, 19 nt, Artificial Sequence
  Description of Artificial Sequence: Synthetic oligonucleotide
  Sense strand starting at position 1174 of SEQ ID NO: 588601
cuacgacgaguuuauuaga

SEQ ID NO: 876481 - RNA, 19 nt, Artificial Sequence
  Description of Artificial Sequence: Synthetic oligonucleotide
  Antisense strand to SEQ ID NO: 876480
ucuaauaaacucgucguag

SEQ ID NO: 876482 - RNA, 19 nt, Artificial Sequence
  Description of Artificial Sequence: Synthetic oligonucleotide
  Sense strand starting at position 1183 of SEQ ID NO: 588601
guuuauuagagagggcaac

SEQ ID NO: 876483 - RNA, 19 nt, Artificial Sequence
  Description of Artificial Sequence: Synthetic oligonucleotide
  Antisense strand to SEQ ID NO: 876482
guugcccucucuaauaaac

SEQ ID NO: 876484 - RNA, 19 nt, Artificial Sequence
  Description of Artificial Sequence: Synthetic oligonucleotide
  Sense strand starting at position 1221 of SEQ ID NO: 588601
cacggacguucucucaaau

SEQ ID NO: 876485 - RNA, 19 nt, Artificial Sequence
  Description of Artificial Sequence: Synthetic oligonucleotide
  Antisense strand to SEQ ID NO: 876484
auuugagagaacguccgug

SEQ ID NO: 876486 - RNA, 19 nt, Artificial Sequence
  Description of Artificial Sequence: Synthetic oligonucleotide
  Sense strand starting at position 1245 of SEQ ID NO: 588601
ucugaaggugcaugagaua

SEQ ID NO: 876487 - RNA, 19 nt, Artificial Sequence
  Description of Artificial Sequence: Synthetic oligonucleotide
  Antisense strand to SEQ ID NO: 876486
uaucucaugcaccuucaga

SEQ ID NO: 876488 - RNA, 19 nt, Artificial Sequence
  Description of Artificial Sequence: Synthetic oligonucleotide
  Sense strand starting at position 2645 of SEQ ID NO: 588601
gcgccugucgggucaacua

SEQ ID NO: 876489 - RNA, 19 nt, Artificial Sequence
  Description of Artificial Sequence: Synthetic oligonucleotide
  Antisense strand to SEQ ID NO: 876488
uaguugacccgacaggcgc

SEQ ID NO: 876490 - RNA, 19 nt, Artificial Sequence
  Description of Artificial Sequence: Synthetic oligonucleotide
  Sense strand starting at position 2691 of SEQ ID NO: 588601
gcuggacaacuagaauguu

SEQ ID NO: 876491 - RNA, 19 nt, Artificial Sequence
  Description of Artificial Sequence: Synthetic oligonucleotide
  Antisense strand to SEQ ID NO: 876490
aacauucuaguuguccagc

SEQ ID NO: 876492 - RNA, 19 nt, Artificial Sequence
  Description of Artificial Sequence: Synthetic oligonucleotide
  Sense strand starting at position 2749 of SEQ ID NO: 588601
gaggcucucuagucugaag

SEQ ID NO: 876493 - RNA, 19 nt, Artificial Sequence
  Description of Artificial Sequence: Synthetic oligonucleotide
  Antisense strand to SEQ ID NO: 876492
cuucagacuagagagccuc

SEQ ID NO: 876494 - RNA, 19 nt, Artificial Sequence
  Description of Artificial Sequence: Synthetic oligonucleotide
  Sense strand starting at position 2798 of SEQ ID NO: 588601
ggguuucccuauuccaauc

SEQ ID NO: 876495 - RNA, 19 nt, Artificial Sequence
  Description of Artificial Sequence: Synthetic oligonucleotide
  Antisense strand to SEQ ID NO: 876494
gauuggaauagggaaaccc

SEQ ID NO: 876496 - RNA, 19 nt, Artificial Sequence
  Description of Artificial Sequence: Synthetic oligonucleotide
  Sense strand starting at position 2810 of SEQ ID NO: 588601
uccaauccuguuugaaaug

SEQ ID NO: 876497 - RNA, 19 nt, Artificial Sequence
  Description of Artificial Sequence: Synthetic oligonucleotide
  Antisense strand to SEQ ID NO: 876496
cauuucaaacaggauugga

SEQ ID NO: 876498 - RNA, 19 nt, Artificial Sequence
  Description of Artificial Sequence: Synthetic oligonucleotide
  Sense strand starting at position 2884 of SEQ ID NO: 588601
uguuuaaugcuuugaguag

SEQ ID NO: 876499 - RNA, 19 nt, Artificial Sequence
  Description of Artificial Sequence: Synthetic oligonucleotide
  Antisense strand to SEQ ID NO: 876498
cuacucaaagcauuaaaca

SEQ ID NO: 876500 - RNA, 19 nt, Artificial Sequence
  Description of Artificial Sequence: Synthetic oligonucleotide
  Sense strand starting at position 2888 of SEQ ID NO: 588601
uaaugcuuugaguagauaa

SEQ ID NO: 876501 - RNA, 19 nt, Artificial Sequence
  Description of Artificial Sequence: Synthetic oligonucleotide
  Antisense strand to SEQ ID NO: 876500
uuaucuacucaaagcauua

SEQ ID NO: 876502 - RNA, 19 nt, Artificial Sequence
  Description of Artificial Sequence: Synthetic oligonucleotide
  Sense strand starting at position 2890 of SEQ ID NO: 588601
augcuuugaguagauaauc

SEQ ID NO: 876503 - RNA, 19 nt, Artificial Sequence
  Description of Artificial Sequence: Synthetic oligonucleotide
  Antisense strand to SEQ ID NO: 876502
gauuaucuacucaaagcau

SEQ ID NO: 876504 - RNA, 19 nt, Artificial Sequence
  Description of Artificial Sequence: Synthetic oligonucleotide
  Sense strand starting at position 2895 of SEQ ID NO: 588601
uugaguagauaauccugaa

SEQ ID NO: 876505 - RNA, 19 nt, Artificial Sequence
  Description of Artificial Sequence: Synthetic oligonucleotide
  Antisense strand to SEQ ID NO: 876504
uucaggauuaucuacucaa

SEQ ID NO: 876506 - RNA, 19 nt, Artificial Sequence
  Description of Artificial Sequence: Synthetic oligonucleotide
  Sense strand starting at position 2993 of SEQ ID NO: 588601
ccagguggacucugaguau

SEQ ID NO: 876507 - RNA, 19 nt, Artificial Sequence
  Description of Artificial Sequence: Synthetic oligonucleotide
  Antisense strand to SEQ ID NO: 876506
auacucagaguccaccugg

SEQ ID NO: 876508 - RNA, 19 nt, Artificial Sequence
  Description of Artificial Sequence: Synthetic oligonucleotide
  Sense strand starting at position 3132 of SEQ ID NO: 588601
gguagaugccuuuguuaga

SEQ ID NO: 876509 - RNA, 19 nt, Artificial Sequence
  Description of Artificial Sequence: Synthetic oligonucleotide
  Antisense strand to SEQ ID NO: 876508
ucuaacaaaggcaucuacc

SEQ ID NO: 876510 - RNA, 19 nt, Artificial Sequence
  Description of Artificial Sequence: Synthetic oligonucleotide
  Sense strand starting at position 3133 of SEQ ID NO: 588601
guagaugccuuuguuagau

SEQ ID NO: 876511 - RNA, 19 nt, Artificial Sequence
  Description of Artificial Sequence: Synthetic oligonucleotide
  Antisense strand to SEQ ID NO: 876510
aucuaacaaaggcaucuac

SEQ ID NO: 876512 - RNA, 19 nt, Artificial Sequence
  Description of Artificial Sequence: Synthetic oligonucleotide
  Sense strand starting at position 3240 of SEQ ID NO: 588601
guugaauaagagcacgauu

SEQ ID NO: 876513 - RNA, 19 nt, Artificial Sequence
  Description of Artificial Sequence: Synthetic oligonucleotide
  Antisense strand to SEQ ID NO: 876512
aaucgugcucuuauucaac

SEQ ID NO: 876514 - RNA, 19 nt, Artificial Sequence
  Description of Artificial Sequence: Synthetic oligonucleotide
  Sense strand starting at position 3258 of SEQ ID NO: 588601
uagaguccugucugguuau

SEQ ID NO: 876515 - RNA, 19 nt, Artificial Sequence
  Description of Artificial Sequence: Synthetic oligonucleotide
  Antisense strand to SEQ ID NO: 876514
auaaccagacaggacucua

SEQ ID NO: 876516 - RNA, 19 nt, Artificial Sequence
  Description of Artificial Sequence: Synthetic oligonucleotide
  Sense strand starting at position 3271 of SEQ ID NO: 588601
gguuaucuguugcccaaga

SEQ ID NO: 876517 - RNA, 19 nt, Artificial Sequence
  Description of Artificial Sequence: Synthetic oligonucleotide
  Antisense strand to SEQ ID NO: 876516
ucuugggcaacagauaacc

SEQ ID NO: 876518 - RNA, 19 nt, Artificial Sequence
  Description of Artificial Sequence: Synthetic oligonucleotide
  Sense strand starting at position 3272 of SEQ ID NO: 588601
guuaucuguugcccaagaa

SEQ ID NO: 876519 - RNA, 19 nt, Artificial Sequence
  Description of Artificial Sequence: Synthetic oligonucleotide
  Antisense strand to SEQ ID NO: 876518
uucuugggcaacagauaac

SEQ ID NO: 876520 - RNA, 19 nt, Artificial Sequence
  Description of Artificial Sequence: Synthetic oligonucleotide
  Sense strand starting at position 3273 of SEQ ID NO: 588601
uuaucuguugcccaagaaa

SEQ ID NO: 876521 - RNA, 19 nt, Artificial Sequence
  Description of Artificial Sequence: Synthetic oligonucleotide
  Antisense strand to SEQ ID NO: 876520
uuucuugggcaacagauaa

SEQ ID NO: 876522 - RNA, 19 nt, Artificial Sequence
  Description of Artificial Sequence: Synthetic oligonucleotide
  Sense strand starting at position 3476 of SEQ ID NO: 588601
uugugaguggcccaucuuu

SEQ ID NO: 876523 - RNA, 19 nt, Artificial Sequence
  Description of Artificial Sequence: Synthetic oligonucleotide
  Antisense strand to SEQ ID NO: 876522
aaagaugggccacucacaa

SEQ ID NO: 876524 - RNA, 19 nt, Artificial Sequence
  Description of Artificial Sequence: Synthetic oligonucleotide
  Sense strand starting at position 3501 of SEQ ID NO: 588601
cuacgaacuuugguuugau

SEQ ID NO: 876525 - RNA, 19 nt, Artificial Sequence
  Description of Artificial Sequence: Synthetic oligonucleotide
  Antisense strand to SEQ ID NO: 876524
aucaaaccaaaguucguag

SEQ ID NO: 876526 - RNA, 19 nt, Artificial Sequence
  Description of Artificial Sequence: Synthetic oligonucleotide
  Sense strand starting at position 3536 of SEQ ID NO: 588601
augagaaccuuugcugaga

SEQ ID NO: 876527 - RNA, 19 nt, Artificial Sequence
  Description of Artificial Sequence: Synthetic oligonucleotide
  Antisense strand to SEQ ID NO: 876526
ucucagcaaagguucucau

SEQ ID NO: 876528 - RNA, 19 nt, Artificial Sequence
  Description of Artificial Sequence: Synthetic oligonucleotide
  Sense strand starting at position 3537 of SEQ ID NO: 588601
ugagaaccuuugcugagau

SEQ ID NO: 876529 - RNA, 19 nt, Artificial Sequence
  Description of Artificial Sequence: Synthetic oligonucleotide
  Antisense strand to SEQ ID NO: 876528
aucucagcaaagguucuca

SEQ ID NO: 876530 - RNA, 19 nt, Artificial Sequence
  Description of Artificial Sequence: Synthetic oligonucleotide
  Sense strand starting at position 3613 of SEQ ID NO: 588601
aggguuaaauaggaugaau

SEQ ID NO: 876531 - RNA, 19 nt, Artificial Sequence
  Description of Artificial Sequence: Synthetic oligonucleotide
  Antisense strand to SEQ ID NO: 876530
auucauccuauuuaacccu

SEQ ID NO: 876532 - RNA, 19 nt, Artificial Sequence
  Description of Artificial Sequence: Synthetic oligonucleotide
  Sense strand starting at position 3633 of SEQ ID NO: 588601
uugagauacucucugcuac

SEQ ID NO: 876533 - RNA, 19 nt, Artificial Sequence
  Description of Artificial Sequence: Synthetic oligonucleotide
  Antisense strand to SEQ ID NO: 876532
guagcagagaguaucucaa

SEQ ID NO: 876534 - RNA, 19 nt, Artificial Sequence
  Description of Artificial Sequence: Synthetic oligonucleotide
  Sense strand starting at position 3688 of SEQ ID NO: 588601
gauugaaaccuguggcuag

SEQ ID NO: 876535 - RNA, 19 nt, Artificial Sequence
  Description of Artificial Sequence: Synthetic oligonucleotide
  Antisense strand to SEQ ID NO: 876534
cuagccacagguuucaauc

SEQ ID NO: 876536 - RNA, 19 nt, Artificial Sequence
  Description of Artificial Sequence: Synthetic oligonucleotide
  Sense strand starting at position 3726 of SEQ ID NO: 588601
gugggaaucacuuguucug

SEQ ID NO: 876537 - RNA, 19 nt, Artificial Sequence
  Description of Artificial Sequence: Synthetic oligonucleotide
  Antisense strand to SEQ ID NO: 876536
cagaacaagugauucccac

SEQ ID NO: 876538 - RNA, 19 nt, Artificial Sequence
  Description of Artificial Sequence: Synthetic oligonucleotide
  Sense strand starting at position 3733 of SEQ ID NO: 588601
ucacuuguucuggagaauc

SEQ ID NO: 876539 - RNA, 19 nt, Artificial Sequence
  Description of Artificial Sequence: Synthetic oligonucleotide
  Antisense strand to SEQ ID NO: 876538
gauucuccagaacaaguga

SEQ ID NO: 876540 - RNA, 19 nt, Artificial Sequence
  Description of Artificial Sequence: Synthetic oligonucleotide
  Sense strand starting at position 3815 of SEQ ID NO: 588601
acaaucugggcucauguua

SEQ ID NO: 876541 - RNA, 19 nt, Artificial Sequence
  Description of Artificial Sequence: Synthetic oligonucleotide
  Antisense strand to SEQ ID NO: 876540
uaacaugagcccagauugu

SEQ ID NO: 876542 - RNA, 19 nt, Artificial Sequence
  Description of Artificial Sequence: Synthetic oligonucleotide
  Sense strand starting at position 3838 of SEQ ID NO: 588601
cccauugaauaguuuguga

SEQ ID NO: 876543 - RNA, 19 nt, Artificial Sequence
  Description of Artificial Sequence: Synthetic oligonucleotide
  Antisense strand to SEQ ID NO: 876542
ucacaaacuauucaauggg

SEQ ID NO: 876544 - RNA, 19 nt, Artificial Sequence
  Description of Artificial Sequence: Synthetic oligonucleotide
  Sense strand starting at position 3867 of SEQ ID NO: 588601
caugacuucuugccagagu

SEQ ID NO: 876545 - RNA, 19 nt, Artificial Sequence
  Description of Artificial Sequence: Synthetic oligonucleotide
  Antisense strand to SEQ ID NO: 876544
acucuggcaagaagucaug

SEQ ID NO: 876546 - RNA, 19 nt, Artificial Sequence
  Description of Artificial Sequence: Synthetic oligonucleotide
  Sense strand starting at position 22 of SEQ ID NO: 588602
ugaagcauugcagguagaa

SEQ ID NO: 876547 - RNA, 19 nt, Artificial Sequence
  Description of Artificial Sequence: Synthetic oligonucleotide
  Antisense strand to SEQ ID NO: 876546
uucuaccugcaaugcuuca

SEQ ID NO: 876548 - RNA, 19 nt, Artificial Sequence
  Description of Artificial Sequence: Synthetic oligonucleotide
  Sense strand starting at position 659 of SEQ ID NO: 588602
ucugcuaggccgucucauu

SEQ ID NO: 876549 - RNA, 19 nt, Artificial Sequence
  Description of Artificial Sequence: Synthetic oligonucleotide
  Antisense strand to SEQ ID NO: 876548
aaugagacggccuagcaga

SEQ ID NO: 876550 - RNA, 19 nt, Artificial Sequence
  Description of Artificial Sequence: Synthetic oligonucleotide
  Sense strand starting at position 911 of SEQ ID NO: 588602
acaccaauuguguauauau

SEQ ID NO: 876551 - RNA, 19 nt, Artificial Sequence
  Description of Artificial Sequence: Synthetic oligonucleotide
  Antisense strand to SEQ ID NO: 876550
auauauacacaauuggugu

SEQ ID NO: 876552 - RNA, 19 nt, Artificial Sequence
  Description of Artificial Sequence: Synthetic oligonucleotide
  Sense strand starting at position 1047 of SEQ ID NO: 588602
cauggaaaguaauuagcau

SEQ ID NO: 876553 - RNA, 19 nt, Artificial Sequence
  Description of Artificial Sequence: Synthetic oligonucleotide
  Antisense strand to SEQ ID NO: 876552
augcuaauuacuuuccaug

SEQ ID NO: 876554 - RNA, 19 nt, Artificial Sequence
  Description of Artificial Sequence: Synthetic oligonucleotide
  Sense strand starting at position 1067 of SEQ ID NO: 588602
cugccugguaucuagaaag

SEQ ID NO: 876555 - RNA, 19 nt, Artificial Sequence
  Description of Artificial Sequence: Synthetic oligonucleotide
  Antisense strand to SEQ ID NO: 876554
cuuucuagauaccaggcag

SEQ ID NO: 876556 - RNA, 19 nt, Artificial Sequence
  Description of Artificial Sequence: Synthetic oligonucleotide
  Sense strand starting at position 1089 of SEQ ID NO: 588602
uugaucauguuagcuauaa

SEQ ID NO: 876557 - RNA, 19 nt, Artificial Sequence
  Description of Artificial Sequence: Synthetic oligonucleotide
  Antisense strand to SEQ ID NO: 876556
uuauagcuaacaugaucaa

SEQ ID NO: 876558 - RNA, 19 nt, Artificial Sequence
  Description of Artificial Sequence: Synthetic oligonucleotide
  Sense strand starting at position 1090 of SEQ ID NO: 588602
ugaucauguuagcuauaau

SEQ ID NO: 876559 - RNA, 19 nt, Artificial Sequence
  Description of Artificial Sequence: Synthetic oligonucleotide
  Antisense strand to SEQ ID NO: 876558
auuauagcuaacaugauca

SEQ ID NO: 876560 - RNA, 19 nt, Artificial Sequence
  Description of Artificial Sequence: Synthetic oligonucleotide
  Sense strand starting at position 1093 of SEQ ID NO: 588602
ucauguuagcuauaauuag

SEQ ID NO: 876561 - RNA, 19 nt, Artificial Sequence
  Description of Artificial Sequence: Synthetic oligonucleotide
  Antisense strand to SEQ ID NO: 876560
cuaauuauagcuaacauga

SEQ ID NO: 876562 - RNA, 19 nt, Artificial Sequence
  Description of Artificial Sequence: Synthetic oligonucleotide
  Sense strand starting at position 1105 of SEQ ID NO: 588602
uaauuaguaggguauguuu

SEQ ID NO: 876563 - RNA, 19 nt, Artificial Sequence
  Description of Artificial Sequence: Synthetic oligonucleotide
  Antisense strand to SEQ ID NO: 876562
aaacauacccuacuaauua

SEQ ID NO: 876564 - RNA, 19 nt, Artificial Sequence
  Description of Artificial Sequence: Synthetic oligonucleotide
  Sense strand starting at position 1197 of SEQ ID NO: 588602
uguaaaguccaugaaagca

SEQ ID NO: 876565 - RNA, 19 nt, Artificial Sequence
  Description of Artificial Sequence: Synthetic oligonucleotide
  Antisense strand to SEQ ID NO: 876564
ugcuuucauggacuuuaca

SEQ ID NO: 876566 - RNA, 19 nt, Artificial Sequence
  Description of Artificial Sequence: Synthetic oligonucleotide
  Sense strand starting at position 1205 of SEQ ID NO: 588602
ccaugaaagcacgaaguau

SEQ ID NO: 876567 - RNA, 19 nt, Artificial Sequence
  Description of Artificial Sequence: Synthetic oligonucleotide
  Antisense strand to SEQ ID NO: 876566
auacuucgugcuuucaugg

SEQ ID NO: 876568 - RNA, 19 nt, Artificial Sequence
  Description of Artificial Sequence: Synthetic oligonucleotide
  Sense strand starting at position 1245 of SEQ ID NO: 588602
acacguuaauuacugaaau

SEQ ID NO: 876569 - RNA, 19 nt, Artificial Sequence
  Description of Artificial Sequence: Synthetic oligonucleotide
  Antisense strand to SEQ ID NO: 876568
auuucaguaauuaacgugu

SEQ ID NO: 876570 - RNA, 19 nt, Artificial Sequence
  Description of Artificial Sequence: Synthetic oligonucleotide
  Sense strand starting at position 1273 of SEQ ID NO: 588602
ugaauaaacgaaugcuuua

SEQ ID NO: 876571 - RNA, 19 nt, Artificial Sequence
  Description of Artificial Sequence: Synthetic oligonucleotide
  Antisense strand to SEQ ID NO: 876570
uaaagcauucguuuauuca

SEQ ID NO: 876572 - RNA, 19 nt, Artificial Sequence
  Description of Artificial Sequence: Synthetic oligonucleotide
  Sense strand starting at position 1400 of SEQ ID NO: 588602
gugauaccacuuuaaggua

SEQ ID NO: 876573 - RNA, 19 nt, Artificial Sequence
  Description of Artificial Sequence: Synthetic oligonucleotide
  Antisense strand to SEQ ID NO: 876572
uaccuuaaagugguaucac

SEQ ID NO: 876574 - RNA, 19 nt, Artificial Sequence
  Description of Artificial Sequence: Synthetic oligonucleotide
  Sense strand starting at position 1474 of SEQ ID NO: 588602
aaguuugaggauuaagcga

SEQ ID NO: 876575 - RNA, 19 nt, Artificial Sequence
  Description of Artificial Sequence: Synthetic oligonucleotide
  Antisense strand to SEQ ID NO: 876574
ucgcuuaauccucaaacuu

SEQ ID NO: 876576 - RNA, 19 nt, Artificial Sequence
  Description of Artificial Sequence: Synthetic oligonucleotide
  Sense strand starting at position 1488 of SEQ ID NO: 588602
agcgacauaagcuaaguaa

SEQ ID NO: 876577 - RNA, 19 nt, Artificial Sequence
  Description of Artificial Sequence: Synthetic oligonucleotide
  Antisense strand to SEQ ID NO: 876576
uuacuuagcuuaugucgcu

SEQ ID NO: 876578 - RNA, 19 nt, Artificial Sequence
  Description of Artificial Sequence: Synthetic oligonucleotide
  Sense strand starting at position 1512 of SEQ ID NO: 588602
cugguuggugcuuaauaaa

SEQ ID NO: 876579 - RNA, 19 nt, Artificial Sequence
  Description of Artificial Sequence: Synthetic oligonucleotide
  Antisense strand to SEQ ID NO: 876578
uuuauuaagcaccaaccag

SEQ ID NO: 876580 - RNA, 19 nt, Artificial Sequence
  Description of Artificial Sequence: Synthetic oligonucleotide
  Sense strand starting at position 2017 of SEQ ID NO: 588602
gcgcaauaccaagaacuuu

SEQ ID NO: 876581 - RNA, 19 nt, Artificial Sequence
  Description of Artificial Sequence: Synthetic oligonucleotide
  Antisense strand to SEQ ID NO: 876580
aaaguucuugguauugcgc

SEQ ID NO: 876582 - RNA, 19 nt, Artificial Sequence
  Description of Artificial Sequence: Synthetic oligonucleotide
  Sense strand starting at position 2300 of SEQ ID NO: 588602
acaaacuugcccgaguaau

SEQ ID NO: 876583 - RNA, 19 nt, Artificial Sequence
  Description of Artificial Sequence: Synthetic oligonucleotide
  Antisense strand to SEQ ID NO: 876582
auuacucgggcaaguuugu

SEQ ID NO: 876584 - RNA, 19 nt, Artificial Sequence
  Description of Artificial Sequence: Synthetic oligonucleotide
  Sense strand starting at position 2407 of SEQ ID NO: 588602
gugugcuaucugccaguuu

SEQ ID NO: 876585 - RNA, 19 nt, Artificial Sequence
  Description of Artificial Sequence: Synthetic oligonucleotide
  Antisense strand to SEQ ID NO: 876584
aaacuggcagauagcacac

SEQ ID NO: 876586 - RNA, 19 nt, Artificial Sequence
  Description of Artificial Sequence: Synthetic oligonucleotide
  Sense strand starting at position 2468 of SEQ ID NO: 588602
ucuuauggaguuuauaauc

SEQ ID NO: 876587 - RNA, 19 nt, Artificial Sequence
  Description of Artificial Sequence: Synthetic oligonucleotide
  Antisense strand to SEQ ID NO: 876586
gauuauaaacuccauaaga

SEQ ID NO: 876588 - RNA, 19 nt, Artificial Sequence
  Description of Artificial Sequence: Synthetic oligonucleotide
  Sense strand starting at position 2473 of SEQ ID NO: 588602
uggaguuuauaauccaguu

SEQ ID NO: 876589 - RNA, 19 nt, Artificial Sequence
  Description of Artificial Sequence: Synthetic oligonucleotide
  Antisense strand to SEQ ID NO: 876588
aacuggauuauaaacucca

SEQ ID NO: 876590 - RNA, 19 nt, Artificial Sequence
  Description of Artificial Sequence: Synthetic oligonucleotide
  Sense strand starting at position 2485 of SEQ ID NO: 588602
uccaguuggagauguauug

SEQ ID NO: 876591 - RNA, 19 nt, Artificial Sequence
  Description of Artificial Sequence: Synthetic oligonucleotide
  Antisense strand to SEQ ID NO: 876590
caauacaucuccaacugga

SEQ ID NO: 876592 - RNA, 19 nt, Artificial Sequence
  Description of Artificial Sequence: Synthetic oligonucleotide
  Sense strand starting at position 2492 of SEQ ID NO: 588602
ggagauguauugccaauaa

SEQ ID NO: 876593 - RNA, 19 nt, Artificial Sequence
  Description of Artificial Sequence: Synthetic oligonucleotide
  Antisense strand to SEQ ID NO: 876592
uuauuggcaauacaucucc

SEQ ID NO: 876594 - RNA, 19 nt, Artificial Sequence
  Description of Artificial Sequence: Synthetic oligonucleotide
  Sense strand starting at position 2581 of SEQ ID NO: 588602
gagacuggcuaaucugaau

SEQ ID NO: 876595 - RNA, 19 nt, Artificial Sequence
  Description of Artificial Sequence: Synthetic oligonucleotide
  Antisense strand to SEQ ID NO: 876594
auucagauuagccagucuc

SEQ ID NO: 876596 - RNA, 19 nt, Artificial Sequence
  Description of Artificial Sequence: Synthetic oligonucleotide
  Sense strand starting at position 2610 of SEQ ID NO: 588602
gcuuccuuccaggaggagu

SEQ ID NO: 876597 - RNA, 19 nt, Artificial Sequence
  Description of Artificial Sequence: Synthetic oligonucleotide
  Antisense strand to SEQ ID NO: 876596
acuccuccuggaaggaagc

SEQ ID NO: 876598 - RNA, 19 nt, Artificial Sequence
  Description of Artificial Sequence: Synthetic oligonucleotide
  Sense strand starting at position 2627 of SEQ ID NO: 588602
guucacgaucuagggauua

SEQ ID NO: 876599 - RNA, 19 nt, Artificial Sequence
  Description of Artificial Sequence: Synthetic oligonucleotide
  Antisense strand to SEQ ID NO: 876598
uaaucccuagaucgugaac

SEQ ID NO: 876600 - RNA, 19 nt, Artificial Sequence
  Description of Artificial Sequence: Synthetic oligonucleotide
  Sense strand starting at position 3158 of SEQ ID NO: 588602
gcgacaaguagacauaaca

SEQ ID NO: 876601 - RNA, 19 nt, Artificial Sequence
  Description of Artificial Sequence: Synthetic oligonucleotide
  Antisense strand to SEQ ID NO: 876600
uguuaugucuacuugucgc

SEQ ID NO: 876602 - RNA, 19 nt, Artificial Sequence
  Description of Artificial Sequence: Synthetic oligonucleotide
  Sense strand starting at position 3195 of SEQ ID NO: 588602
ugguaagagcuguaguaga

SEQ ID NO: 876603 - RNA, 19 nt, Artificial Sequence
  Description of Artificial Sequence: Synthetic oligonucleotide
  Antisense strand to SEQ ID NO: 876602
ucuacuacagcucuuacca

SEQ ID NO: 876604 - RNA, 19 nt, Artificial Sequence
  Description of Artificial Sequence: Synthetic oligonucleotide
  Sense strand starting at position 3398 of SEQ ID NO: 588602
gguggaauuccagggcauu

SEQ ID NO: 876605 - RNA, 19 nt, Artificial Sequence
  Description of Artificial Sequence: Synthetic oligonucleotide
  Antisense strand to SEQ ID NO: 876604
aaugcccuggaauuccacc

SEQ ID NO: 876606 - RNA, 19 nt, Artificial Sequence
  Description of Artificial Sequence: Synthetic oligonucleotide
  Sense strand starting at position 3409 of SEQ ID NO: 588602
agggcauucugaguuaaua

SEQ ID NO: 876607 - RNA, 19 nt, Artificial Sequence
  Description of Artificial Sequence: Synthetic oligonucleotide
  Antisense strand to SEQ ID NO: 876606
uauuaacucagaaugcccu

SEQ ID NO: 876608 - RNA, 19 nt, Artificial Sequence
  Description of Artificial Sequence: Synthetic oligonucleotide
  Sense strand starting at position 3411 of SEQ ID NO: 588602
ggcauucugaguuaauagg

SEQ ID NO: 876609 - RNA, 19 nt, Artificial Sequence
  Description of Artificial Sequence: Synthetic oligonucleotide
  Antisense strand to SEQ ID NO: 876608
ccuauuaacucagaaugcc

SEQ ID NO: 876610 - RNA, 19 nt, Artificial Sequence
  Description of Artificial Sequence: Synthetic oligonucleotide
  Sense strand starting at position 3484 of SEQ ID NO: 588602
guaggaaugcuaugggaug

SEQ ID NO: 876611 - RNA, 19 nt, Artificial Sequence
  Description of Artificial Sequence: Synthetic oligonucleotide
  Antisense strand to SEQ ID NO: 876610
caucccauagcauuccuac

SEQ ID NO: 876612 - RNA, 19 nt, Artificial Sequence
  Description of Artificial Sequence: Synthetic oligonucleotide
  Sense strand starting at position 3495 of SEQ ID NO: 588602
augggaugcuaucucucua

SEQ ID NO: 876613 - RNA, 19 nt, Artificial Sequence
  Description of Artificial Sequence: Synthetic oligonucleotide
  Antisense strand to SEQ ID NO: 876612
uagagagauagcaucccau

SEQ ID NO: 876614 - RNA, 19 nt, Artificial Sequence
  Description of Artificial Sequence: Synthetic oligonucleotide
  Sense strand starting at position 3529 of SEQ ID NO: 588602
uugcaaggaagauguuauu

SEQ ID NO: 876615 - RNA, 19 nt, Artificial Sequence
  Description of Artificial Sequence: Synthetic oligonucleotide
  Antisense strand to SEQ ID NO: 876614
aauaacaucuuccuugcaa

SEQ ID NO: 876616 - RNA, 19 nt, Artificial Sequence
  Description of Artificial Sequence: Synthetic oligonucleotide
  Sense strand starting at position 3538 of SEQ ID NO: 588602
agauguuauuaucuuucca

SEQ ID NO: 876617 - RNA, 19 nt, Artificial Sequence
  Description of Artificial Sequence: Synthetic oligonucleotide
  Antisense strand to SEQ ID NO: 876616
uggaaagauaauaacaucu

SEQ ID NO: 876618 - RNA, 19 nt, Artificial Sequence
  Description of Artificial Sequence: Synthetic oligonucleotide
  Sense strand starting at position 3545 of SEQ ID NO: 588602
auuaucuuuccagguaaga

SEQ ID NO: 876619 - RNA, 19 nt, Artificial Sequence
  Description of Artificial Sequence: Synthetic oligonucleotide
  Antisense strand to SEQ ID NO: 876618
ucuuaccuggaaagauaau

SEQ ID NO: 876620 - RNA, 19 nt, Artificial Sequence
  Description of Artificial Sequence: Synthetic oligonucleotide
  Sense strand starting at position 3640 of SEQ ID NO: 588602
ucucacuacucagugagau

SEQ ID NO: 876621 - RNA, 19 nt, Artificial Sequence
  Description of Artificial Sequence: Synthetic oligonucleotide
  Antisense strand to SEQ ID NO: 876620
aucucacugaguagugaga

SEQ ID NO: 876622 - RNA, 19 nt, Artificial Sequence
  Description of Artificial Sequence: Synthetic oligonucleotide
  Sense strand starting at position 3641 of SEQ ID NO: 588602
cucacuacucagugagaua

SEQ ID NO: 876623 - RNA, 19 nt, Artificial Sequence
  Description of Artificial Sequence: Synthetic oligonucleotide
  Antisense strand to SEQ ID NO: 876622
uaucucacugaguagugag

SEQ ID NO: 876624 - RNA, 19 nt, Artificial Sequence
  Description of Artificial Sequence: Synthetic oligonucleotide
  Sense strand starting at position 3904 of SEQ ID NO: 588602
gcuguauaugggugagaga

SEQ ID NO: 876625 - RNA, 19 nt, Artificial Sequence
  Description of Artificial Sequence: Synthetic oligonucleotide
  Antisense strand to SEQ ID NO: 876624
ucucucacccauauacagc

SEQ ID NO: 876626 - RNA, 19 nt, Artificial Sequence
  Description of Artificial Sequence: Synthetic oligonucleotide
  Sense strand starting at position 540 of SEQ ID NO: 588603
uaaggugaacuucgacaca

SEQ ID NO: 876627 - RNA, 19 nt, Artificial Sequence
  Description of Artificial Sequence: Synthetic oligonucleotide
  Antisense strand to SEQ ID NO: 876626
ugugucgaaguucaccuua

SEQ ID NO: 876628 - RNA, 19 nt, Artificial Sequence
  Description of Artificial Sequence: Synthetic oligonucleotide
  Sense strand starting at position 543 of SEQ ID NO: 588603
ggugaacuucgacacauua

SEQ ID NO: 876629 - RNA, 19 nt, Artificial Sequence
  Description of Artificial Sequence: Synthetic oligonucleotide
  Antisense strand to SEQ ID NO: 876628
uaaugugucgaaguucacc

SEQ ID NO: 876630 - RNA, 19 nt, Artificial Sequence
  Description of Artificial Sequence: Synthetic oligonucleotide
  Sense strand starting at position 580 of SEQ ID NO: 588603
auaucacuugcugauggau

SEQ ID NO: 876631 - RNA, 19 nt, Artificial Sequence
  Description of Artificial Sequence: Synthetic oligonucleotide
  Antisense strand to SEQ ID NO: 876630
auccaucagcaagugauau

SEQ ID NO: 876632 - RNA, 19 nt, Artificial Sequence
  Description of Artificial Sequence: Synthetic oligonucleotide
  Sense strand starting at position 626 of SEQ ID NO: 588603
ccaauauuccgauaauguc

SEQ ID NO: 876633 - RNA, 19 nt, Artificial Sequence
  Description of Artificial Sequence: Synthetic oligonucleotide
  Antisense strand to SEQ ID NO: 876632
gacauuaucggaauauugg

SEQ ID NO: 876634 - RNA, 19 nt, Artificial Sequence
  Description of Artificial Sequence: Synthetic oligonucleotide
  Sense strand starting at position 635 of SEQ ID NO: 588603
cgauaaugucagggauaca

SEQ ID NO: 876635 - RNA, 19 nt, Artificial Sequence
  Description of Artificial Sequence: Synthetic oligonucleotide
  Antisense strand to SEQ ID NO: 876634
uguaucccugacauuaucg

SEQ ID NO: 876636 - RNA, 19 nt, Artificial Sequence
  Description of Artificial Sequence: Synthetic oligonucleotide
  Sense strand starting at position 746 of SEQ ID NO: 588603
uuuguagcacaguaagaau

SEQ ID NO: 876637 - RNA, 19 nt, Artificial Sequence
  Description of Artificial Sequence: Synthetic oligonucleotide
  Antisense strand to SEQ ID NO: 876636
auucuuacugugcuacaaa

SEQ ID NO: 876638 - RNA, 19 nt, Artificial Sequence
  Description of Artificial Sequence: Synthetic oligonucleotide
  Sense strand starting at position 961 of SEQ ID NO: 588603
guguguuacguaguauugu

SEQ ID NO: 876639 - RNA, 19 nt, Artificial Sequence
  Description of Artificial Sequence: Synthetic oligonucleotide
  Antisense strand to SEQ ID NO: 876638
acaauacuacguaacacac

SEQ ID NO: 876640 - RNA, 19 nt, Artificial Sequence
  Description of Artificial Sequence: Synthetic oligonucleotide
  Sense strand starting at position 987 of SEQ ID NO: 588603
auuauccugucaucaguaa

SEQ ID NO: 876641 - RNA, 19 nt, Artificial Sequence
  Description of Artificial Sequence: Synthetic oligonucleotide
  Antisense strand to SEQ ID NO: 876640
uuacugaugacaggauaau

SEQ ID NO: 876642 - RNA, 19 nt, Artificial Sequence
  Description of Artificial Sequence: Synthetic oligonucleotide
  Sense strand starting at position 1004 of SEQ ID NO: 588603
aaguguugcagguaacuga

SEQ ID NO: 876643 - RNA, 19 nt, Artificial Sequence
  Description of Artificial Sequence: Synthetic oligonucleotide
  Antisense strand to SEQ ID NO: 876642
ucaguuaccugcaacacuu

SEQ ID NO: 876644 - RNA, 19 nt, Artificial Sequence
  Description of Artificial Sequence: Synthetic oligonucleotide
  Sense strand starting at position 1029 of SEQ ID NO: 588603
uucugagauguuuaucauc

SEQ ID NO: 876645 - RNA, 19 nt, Artificial Sequence
  Description of Artificial Sequence: Synthetic oligonucleotide
  Antisense strand to SEQ ID NO: 876644
gaugauaaacaucucagaa

SEQ ID NO: 876646 - RNA, 19 nt, Artificial Sequence
  Description of Artificial Sequence: Synthetic oligonucleotide
  Sense strand starting at position 1031 of SEQ ID NO: 588603
cugagauguuuaucaucca

SEQ ID NO: 876647 - RNA, 19 nt, Artificial Sequence
  Description of Artificial Sequence: Synthetic oligonucleotide
  Antisense strand to SEQ ID NO: 876646
uggaugauaaacaucucag

SEQ ID NO: 876648 - RNA, 19 nt, Artificial Sequence
  Description of Artificial Sequence: Synthetic oligonucleotide
  Sense strand starting at position 1038 of SEQ ID NO: 588603
guuuaucauccauaacagu

SEQ ID NO: 876649 - RNA, 19 nt, Artificial Sequence
  Description of Artificial Sequence: Synthetic oligonucleotide
  Antisense strand to SEQ ID NO: 876648
acuguuauggaugauaaac

SEQ ID NO: 876650 - RNA, 19 nt, Artificial Sequence
  Description of Artificial Sequence: Synthetic oligonucleotide
  Sense strand starting at position 1088 of SEQ ID NO: 588603
aaaguucuugaaugaguga

SEQ ID NO: 876651 - RNA, 19 nt, Artificial Sequence
  Description of Artificial Sequence: Synthetic oligonucleotide
  Antisense strand to SEQ ID NO: 876650
ucacucauucaagaacuuu

SEQ ID NO: 876652 - RNA, 19 nt, Artificial Sequence
  Description of Artificial Sequence: Synthetic oligonucleotide
  Sense strand starting at position 1157 of SEQ ID NO: 588603
aguacagaacgguaguuua

SEQ ID NO: 876653 - RNA, 19 nt, Artificial Sequence
  Description of Artificial Sequence: Synthetic oligonucleotide
  Antisense strand to SEQ ID NO: 876652
uaaacuaccguucuguacu

SEQ ID NO: 876654 - RNA, 19 nt, Artificial Sequence
  Description of Artificial Sequence: Synthetic oligonucleotide
  Sense strand starting at position 1160 of SEQ ID NO: 588603
acagaacgguaguuuagaa

SEQ ID NO: 876655 - RNA, 19 nt, Artificial Sequence
  Description of Artificial Sequence: Synthetic oligonucleotide
  Antisense strand to SEQ ID NO: 876654
uucuaaacuaccguucugu

SEQ ID NO: 876656 - RNA, 19 nt, Artificial Sequence
  Description of Artificial Sequence: Synthetic oligonucleotide
  Sense strand starting at position 1186 of SEQ ID NO: 588603
ucuugaaugugacucacaa

SEQ ID NO: 876657 - RNA, 19 nt, Artificial Sequence
  Description of Artificial Sequence: Synthetic oligonucleotide
  Antisense strand to SEQ ID NO: 876656
uugugagucacauucaaga

SEQ ID NO: 876658 - RNA, 19 nt, Artificial Sequence
  Description of Artificial Sequence: Synthetic oligonucleotide
  Sense strand starting at position 1331 of SEQ ID NO: 588603
ucagacaaguguccucaaa

SEQ ID NO: 876659 - RNA, 19 nt, Artificial Sequence
  Description of Artificial Sequence: Synthetic oligonucleotide
  Antisense strand to SEQ ID NO: 876658
uuugaggacacuugucuga

SEQ ID NO: 876660 - RNA, 19 nt, Artificial Sequence
  Description of Artificial Sequence: Synthetic oligonucleotide
  Sense strand starting at position 1400 of SEQ ID NO: 588603
agggaagauuucuacaguc

SEQ ID NO: 876661 - RNA, 19 nt, Artificial Sequence
  Description of Artificial Sequence: Synthetic oligonucleotide
  Antisense strand to SEQ ID NO: 876660
gacuguagaaaucuucccu

SEQ ID NO: 876662 - RNA, 19 nt, Artificial Sequence
  Description of Artificial Sequence: Synthetic oligonucleotide
  Sense strand starting at position 1497 of SEQ ID NO: 588603
aggcaugauucucucaaag

SEQ ID NO: 876663 - RNA, 19 nt, Artificial Sequence
  Description of Artificial Sequence: Synthetic oligonucleotide
  Antisense strand to SEQ ID NO: 876662
cuuugagagaaucaugccu

SEQ ID NO: 876664 - RNA, 19 nt, Artificial Sequence
  Description of Artificial Sequence: Synthetic oligonucleotide
  Sense strand starting at position 1592 of SEQ ID NO: 588603
agcguuaucaguccuuggu

SEQ ID NO: 876665 - RNA, 19 nt, Artificial Sequence
  Description of Artificial Sequence: Synthetic oligonucleotide
  Antisense strand to SEQ ID NO: 876664
accaaggacugauaacgcu

SEQ ID NO: 876666 - RNA, 19 nt, Artificial Sequence
  Description of Artificial Sequence: Synthetic oligonucleotide
  Sense strand starting at position 1990 of SEQ ID NO: 588603
gcgguuauuacgucacauc

SEQ ID NO: 876667 - RNA, 19 nt, Artificial Sequence
  Description of Artificial Sequence: Synthetic oligonucleotide
  Antisense strand to SEQ ID NO: 876666
gaugugacguaauaaccgc

SEQ ID NO: 876668 - RNA, 19 nt, Artificial Sequence
  Description of Artificial Sequence: Synthetic oligonucleotide
  Sense strand starting at position 2033 of SEQ ID NO: 588603
cagauuccucgcgaggaaa

SEQ ID NO: 876669 - RNA, 19 nt, Artificial Sequence
  Description of Artificial Sequence: Synthetic oligonucleotide
  Antisense strand to SEQ ID NO: 876668
uuuccucgcgaggaaucug

SEQ ID NO: 876670 - RNA, 19 nt, Artificial Sequence
  Description of Artificial Sequence: Synthetic oligonucleotide
  Sense strand starting at position 2109 of SEQ ID NO: 588603
gcuauacccgaccaaauua

SEQ ID NO: 876671 - RNA, 19 nt, Artificial Sequence
  Description of Artificial Sequence: Synthetic oligonucleotide
  Antisense strand to SEQ ID NO: 876670
uaauuuggucggguauagc

SEQ ID NO: 876672 - RNA, 19 nt, Artificial Sequence
  Description of Artificial Sequence: Synthetic oligonucleotide
  Sense strand starting at position 2144 of SEQ ID NO: 588603
aggaguacucguaguugug

SEQ ID NO: 876673 - RNA, 19 nt, Artificial Sequence
  Description of Artificial Sequence: Synthetic oligonucleotide
  Antisense strand to SEQ ID NO: 876672
cacaacuacgaguacuccu

SEQ ID NO: 876674 - RNA, 19 nt, Artificial Sequence
  Description of Artificial Sequence: Synthetic oligonucleotide
  Sense strand starting at position 2186 of SEQ ID NO: 588603
agacgaaaguaugcuaaau

SEQ ID NO: 876675 - RNA, 19 nt, Artificial Sequence
  Description of Artificial Sequence: Synthetic oligonucleotide
  Antisense strand to SEQ ID NO: 876674
auuuagcauacuuucgucu

SEQ ID NO: 876676 - RNA, 19 nt, Artificial Sequence
  Description of Artificial Sequence: Synthetic oligonucleotide
  Sense strand starting at position 2329 of SEQ ID NO: 588603
ugaccuagagaguguauga

SEQ ID NO: 876677 - RNA, 19 nt, Artificial Sequence
  Description of Artificial Sequence: Synthetic oligonucleotide
  Antisense strand to SEQ ID NO: 876676
ucauacacucucuagguca

SEQ ID NO: 876678 - RNA, 19 nt, Artificial Sequence
  Description of Artificial Sequence: Synthetic oligonucleotide
  Sense strand starting at position 2424 of SEQ ID NO: 588603
ccuccaucuguacaggaau

SEQ ID NO: 876679 - RNA, 19 nt, Artificial Sequence
  Description of Artificial Sequence: Synthetic oligonucleotide
  Antisense strand to SEQ ID NO: 876678
auuccuguacagauggagg

SEQ ID NO: 876680 - RNA, 19 nt, Artificial Sequence
  Description of Artificial Sequence: Synthetic oligonucleotide
  Sense strand starting at position 2427 of SEQ ID NO: 588603
ccaucuguacaggaauagu

SEQ ID NO: 876681 - RNA, 19 nt, Artificial Sequence
  Description of Artificial Sequence: Synthetic oligonucleotide
  Antisense strand to SEQ ID NO: 876680
acuauuccuguacagaugg

SEQ ID NO: 876682 - RNA, 19 nt, Artificial Sequence
  Description of Artificial Sequence: Synthetic oligonucleotide
  Sense strand starting at position 2638 of SEQ ID NO: 588603
acagcauuacaacgaauua

SEQ ID NO: 876683 - RNA, 19 nt, Artificial Sequence
  Description of Artificial Sequence: Synthetic oligonucleotide
  Antisense strand to SEQ ID NO: 876682
uaauucguuguaaugcugu

SEQ ID NO: 876684 - RNA, 19 nt, Artificial Sequence
  Description of Artificial Sequence: Synthetic oligonucleotide
  Sense strand starting at position 2670 of SEQ ID NO: 588603
aauugacucuuauucguga

SEQ ID NO: 876685 - RNA, 19 nt, Artificial Sequence
  Description of Artificial Sequence: Synthetic oligonucleotide
  Antisense strand to SEQ ID NO: 876684
ucacgaauaagagucaauu

SEQ ID NO: 876686 - RNA, 19 nt, Artificial Sequence
  Description of Artificial Sequence: Synthetic oligonucleotide
  Sense strand starting at position 2675 of SEQ ID NO: 588603
acucuuauucgugauucua

SEQ ID NO: 876687 - RNA, 19 nt, Artificial Sequence
  Description of Artificial Sequence: Synthetic oligonucleotide
  Antisense strand to SEQ ID NO: 876686
uagaaucacgaauaagagu

SEQ ID NO: 876688 - RNA, 19 nt, Artificial Sequence
  Description of Artificial Sequence: Synthetic oligonucleotide
  Sense strand starting at position 2846 of SEQ ID NO: 588603
agaagaaacuuccuuguuu

SEQ ID NO: 876689 - RNA, 19 nt, Artificial Sequence
  Description of Artificial Sequence: Synthetic oligonucleotide
  Antisense strand to SEQ ID NO: 876688
aaacaaggaaguuucuucu

SEQ ID NO: 876690 - RNA, 19 nt, Artificial Sequence
  Description of Artificial Sequence: Synthetic oligonucleotide
  Sense strand starting at position 3104 of SEQ ID NO: 588603
gugugaucuccagaauaca

SEQ ID NO: 876691 - RNA, 19 nt, Artificial Sequence
  Description of Artificial Sequence: Synthetic oligonucleotide
  Antisense strand to SEQ ID NO: 876690
uguauucuggagaucacac

SEQ ID NO: 876692 - RNA, 19 nt, Artificial Sequence
  Description of Artificial Sequence: Synthetic oligonucleotide
  Sense strand starting at position 3179 of SEQ ID NO: 588603
gagaaagauggugguaauu

SEQ ID NO: 876693 - RNA, 19 nt, Artificial Sequence
  Description of Artificial Sequence: Synthetic oligonucleotide
  Antisense strand to SEQ ID NO: 876692
aauuaccaccaucuuucuc

SEQ ID NO: 876694 - RNA, 19 nt, Artificial Sequence
  Description of Artificial Sequence: Synthetic oligonucleotide
  Sense strand starting at position 3181 of SEQ ID NO: 588603
gaaagauggugguaauuuc

SEQ ID NO: 876695 - RNA, 19 nt, Artificial Sequence
  Description of Artificial Sequence: Synthetic oligonucleotide
  Antisense strand to SEQ ID NO: 876694
gaaauuaccaccaucuuuc

SEQ ID NO: 876696 - RNA, 19 nt, Artificial Sequence
  Description of Artificial Sequence: Synthetic oligonucleotide
  Sense strand starting at position 3317 of SEQ ID NO: 588603
ucuagacaucucuggaaac

SEQ ID NO: 876697 - RNA, 19 nt, Artificial Sequence
  Description of Artificial Sequence: Synthetic oligonucleotide
  Antisense strand to SEQ ID NO: 876696
guuuccagagaugucuaga

SEQ ID NO: 876698 - RNA, 19 nt, Artificial Sequence
  Description of Artificial Sequence: Synthetic oligonucleotide
  Sense strand starting at position 3481 of SEQ ID NO: 588603
uuaggaauauacuucugua

SEQ ID NO: 876699 - RNA, 19 nt, Artificial Sequence
  Description of Artificial Sequence: Synthetic oligonucleotide
  Antisense strand to SEQ ID NO: 876698
uacagaaguauauuccuaa

SEQ ID NO: 876700 - RNA, 19 nt, Artificial Sequence
  Description of Artificial Sequence: Synthetic oligonucleotide
  Sense strand starting at position 3645 of SEQ ID NO: 588603
guggaacgauacuuucuga

SEQ ID NO: 876701 - RNA, 19 nt, Artificial Sequence
  Description of Artificial Sequence: Synthetic oligonucleotide
  Antisense strand to SEQ ID NO: 876700
ucagaaaguaucguuccac

SEQ ID NO: 876702 - RNA, 19 nt, Artificial Sequence
  Description of Artificial Sequence: Synthetic oligonucleotide
  Sense strand starting at position 3700 of SEQ ID NO: 588603
uuggucauugcucaauuaa

SEQ ID NO: 876703 - RNA, 19 nt, Artificial Sequence
  Description of Artificial Sequence: Synthetic oligonucleotide
  Antisense strand to SEQ ID NO: 876702
uuaauugagcaaugaccaa

SEQ ID NO: 876704 - RNA, 19 nt, Artificial Sequence
  Description of Artificial Sequence: Synthetic oligonucleotide
  Sense strand starting at position 3983 of SEQ ID NO: 588603
ccuacucuugaccagaagu

SEQ ID NO: 876705 - RNA, 19 nt, Artificial Sequence
  Description of Artificial Sequence: Synthetic oligonucleotide
  Antisense strand to SEQ ID NO: 876704
acuucuggucaagaguagg

SEQ ID NO: 876706 - RNA, 19 nt, Artificial Sequence
  Description of Artificial Sequence: Synthetic oligonucleotide
  Sense strand starting at position 8 of SEQ ID NO: 588604
ggcgcuccauuucuggaaa

SEQ ID NO: 876707 - RNA, 19 nt, Artificial Sequence
  Description of Artificial Sequence: Synthetic oligonucleotide
  Antisense strand to SEQ ID NO: 876706
uuuccagaaauggagcgcc

SEQ ID NO: 876708 - RNA, 19 nt, Artificial Sequence
  Description of Artificial Sequence: Synthetic oligonucleotide
  Sense strand starting at position 108 of SEQ ID NO: 588604
uuuagucauuuccgaagca

SEQ ID NO: 876709 - RNA, 19 nt, Artificial Sequence
  Description of Artificial Sequence: Synthetic oligonucleotide
  Antisense strand to SEQ ID NO: 876708
ugcuucggaaaugacuaaa

SEQ ID NO: 876710 - RNA, 19 nt, Artificial Sequence
  Description of Artificial Sequence: Synthetic oligonucleotide
  Sense strand starting at position 198 of SEQ ID NO: 588604
gcaagaaccuucccaaaug

SEQ ID NO: 876711 - RNA, 19 nt, Artificial Sequence
  Description of Artificial Sequence: Synthetic oligonucleotide
  Antisense strand to SEQ ID NO: 876710
cauuugggaagguucuugc

SEQ ID NO: 876712 - RNA, 19 nt, Artificial Sequence
  Description of Artificial Sequence: Synthetic oligonucleotide
  Sense strand starting at position 687 of SEQ ID NO: 588604
ucuaaaguuugccuuaaag

SEQ ID NO: 876713 - RNA, 19 nt, Artificial Sequence
  Description of Artificial Sequence: Synthetic oligonucleotide
  Antisense strand to SEQ ID NO: 876712
cuuuaaggcaaacuuuaga

SEQ ID NO: 876714 - RNA, 19 nt, Artificial Sequence
  Description of Artificial Sequence: Synthetic oligonucleotide
  Sense strand starting at position 822 of SEQ ID NO: 588604
gugaucaauuuguuacugu

SEQ ID NO: 876715 - RNA, 19 nt, Artificial Sequence
  Description of Artificial Sequence: Synthetic oligonucleotide
  Antisense strand to SEQ ID NO: 876714
acaguaacaaauugaucac

SEQ ID NO: 876716 - RNA, 19 nt, Artificial Sequence
  Description of Artificial Sequence: Synthetic oligonucleotide
  Sense strand starting at position 858 of SEQ ID NO: 588604
gagccuaggagagguauaa

SEQ ID NO: 876717 - RNA, 19 nt, Artificial Sequence
  Description of Artificial Sequence: Synthetic oligonucleotide
  Antisense strand to SEQ ID NO: 876716
uuauaccucuccuaggcuc

SEQ ID NO: 876718 - RNA, 19 nt, Artificial Sequence
  Description of Artificial Sequence: Synthetic oligonucleotide
  Sense strand starting at position 1334 of SEQ ID NO: 588604
ccugcacacucguuauacu

SEQ ID NO: 876719 - RNA, 19 nt, Artificial Sequence
  Description of Artificial Sequence: Synthetic oligonucleotide
  Antisense strand to SEQ ID NO: 876718
aguauaacgagugugcagg

SEQ ID NO: 876720 - RNA, 19 nt, Artificial Sequence
  Description of Artificial Sequence: Synthetic oligonucleotide
  Sense strand starting at position 2333 of SEQ ID NO: 588604
uacugaaauuggcacagua

SEQ ID NO: 876721 - RNA, 19 nt, Artificial Sequence
  Description of Artificial Sequence: Synthetic oligonucleotide
  Antisense strand to SEQ ID NO: 876720
uacugugccaauuucagua

SEQ ID NO: 876722 - RNA, 19 nt, Artificial Sequence
  Description of Artificial Sequence: Synthetic oligonucleotide
  Sense strand starting at position 2335 of SEQ ID NO: 588604
cugaaauuggcacaguaac

SEQ ID NO: 876723 - RNA, 19 nt, Artificial Sequence
  Description of Artificial Sequence: Synthetic oligonucleotide
  Antisense strand to SEQ ID NO: 876722
guuacugugccaauuucag

SEQ ID NO: 876724 - RNA, 19 nt, Artificial Sequence
  Description of Artificial Sequence: Synthetic oligonucleotide
  Sense strand starting at position 2388 of SEQ ID NO: 588604
ugaaguaggcuccaagagu

SEQ ID NO: 876725 - RNA, 19 nt, Artificial Sequence
  Description of Artificial Sequence: Synthetic oligonucleotide
  Antisense strand to SEQ ID NO: 876724
acucuuggagccuacuuca

SEQ ID NO: 876726 - RNA, 19 nt, Artificial Sequence
  Description of Artificial Sequence: Synthetic oligonucleotide
  Sense strand starting at position 2397 of SEQ ID NO: 588604
cuccaagaguauuccgaug

SEQ ID NO: 876727 - RNA, 19 nt, Artificial Sequence
  Description of Artificial Sequence: Synthetic oligonucleotide
  Antisense strand to SEQ ID NO: 876726
caucggaauacucuuggag

SEQ ID NO: 876728 - RNA, 19 nt, Artificial Sequence
  Description of Artificial Sequence: Synthetic oligonucleotide
  Sense strand starting at position 2518 of SEQ ID NO: 588604
gguuucuggaaguaguaaa

SEQ ID NO: 876729 - RNA, 19 nt, Artificial Sequence
  Description of Artificial Sequence: Synthetic oligonucleotide
  Antisense strand to SEQ ID NO: 876728
uuuacuacuuccagaaacc

SEQ ID NO: 876730 - RNA, 19 nt, Artificial Sequence
  Description of Artificial Sequence: Synthetic oligonucleotide
  Sense strand starting at position 2781 of SEQ ID NO: 588604
cuggcuucuguuugccaaa

SEQ ID NO: 876731 - RNA, 19 nt, Artificial Sequence
  Description of Artificial Sequence: Synthetic oligonucleotide
  Antisense strand to SEQ ID NO: 876730
uuuggcaaacagaagccag

SEQ ID NO: 876732 - RNA, 19 nt, Artificial Sequence
  Description of Artificial Sequence: Synthetic oligonucleotide
  Sense strand starting at position 2782 of SEQ ID NO: 588604
uggcuucuguuugccaaau

SEQ ID NO: 876733 - RNA, 19 nt, Artificial Sequence
  Description of Artificial Sequence: Synthetic oligonucleotide
  Antisense strand to SEQ ID NO: 876732
auuuggcaaacagaagcca

SEQ ID NO: 876734 - RNA, 19 nt, Artificial Sequence
  Description of Artificial Sequence: Synthetic oligonucleotide
  Sense strand starting at position 2792 of SEQ ID NO: 588604
uugccaaaugaguggaagu

SEQ ID NO: 876735 - RNA, 19 nt, Artificial Sequence
  Description of Artificial Sequence: Synthetic oligonucleotide
  Antisense strand to SEQ ID NO: 876734
acuuccacucauuuggcaa

SEQ ID NO: 876736 - RNA, 19 nt, Artificial Sequence
  Description of Artificial Sequence: Synthetic oligonucleotide
  Sense strand starting at position 2818 of SEQ ID NO: 588604
cuggccgugaucuguaaua

SEQ ID NO: 876737 - RNA, 19 nt, Artificial Sequence
  Description of Artificial Sequence: Synthetic oligonucleotide
  Antisense strand to SEQ ID NO: 876736
uauuacagaucacggccag

SEQ ID NO: 876738 - RNA, 19 nt, Artificial Sequence
  Description of Artificial Sequence: Synthetic oligonucleotide
  Sense strand starting at position 2820 of SEQ ID NO: 588604
ggccgugaucuguaauaau

SEQ ID NO: 876739 - RNA, 19 nt, Artificial Sequence
  Description of Artificial Sequence: Synthetic oligonucleotide
  Antisense strand to SEQ ID NO: 876738
auuauuacagaucacggcc

SEQ ID NO: 876740 - RNA, 19 nt, Artificial Sequence
  Description of Artificial Sequence: Synthetic oligonucleotide
  Sense strand starting at position 2823 of SEQ ID NO: 588604
cgugaucuguaauaaugac

SEQ ID NO: 876741 - RNA, 19 nt, Artificial Sequence
  Description of Artificial Sequence: Synthetic oligonucleotide
  Antisense strand to SEQ ID NO: 876740
gucauuauuacagaucacg

SEQ ID NO: 876742 - RNA, 19 nt, Artificial Sequence
  Description of Artificial Sequence: Synthetic oligonucleotide
  Sense strand starting at position 2901 of SEQ ID NO: 588604
cuuugaggcuuagaaauga

SEQ ID NO: 876743 - RNA, 19 nt, Artificial Sequence
  Description of Artificial Sequence: Synthetic oligonucleotide
  Antisense strand to SEQ ID NO: 876742
ucauuucuaagccucaaag

SEQ ID NO: 876744 - RNA, 19 nt, Artificial Sequence
  Description of Artificial Sequence: Synthetic oligonucleotide
  Sense strand starting at position 3120 of SEQ ID NO: 588604
gggucucuugagcauagga

SEQ ID NO: 876745 - RNA, 19 nt, Artificial Sequence
  Description of Artificial Sequence: Synthetic oligonucleotide
  Antisense strand to SEQ ID NO: 876744
uccuaugcucaagagaccc

SEQ ID NO: 876746 - RNA, 19 nt, Artificial Sequence
  Description of Artificial Sequence: Synthetic oligonucleotide
  Sense strand starting at position 3122 of SEQ ID NO: 588604
gucucuugagcauaggagu

SEQ ID NO: 876747 - RNA, 19 nt, Artificial Sequence
  Description of Artificial Sequence: Synthetic oligonucleotide
  Antisense strand to SEQ ID NO: 876746
acuccuaugcucaagagac

SEQ ID NO: 876748 - RNA, 19 nt, Artificial Sequence
  Description of Artificial Sequence: Synthetic oligonucleotide
  Sense strand starting at position 3234 of SEQ ID NO: 588604
guaagugguugagcuggaa

SEQ ID NO: 876749 - RNA, 19 nt, Artificial Sequence
  Description of Artificial Sequence: Synthetic oligonucleotide
  Antisense strand to SEQ ID NO: 876748
uuccagcucaaccacuuac

SEQ ID NO: 876750 - RNA, 19 nt, Artificial Sequence
  Description of Artificial Sequence: Synthetic oligonucleotide
  Sense strand starting at position 3237 of SEQ ID NO: 588604
agugguugagcuggaaagu

SEQ ID NO: 876751 - RNA, 19 nt, Artificial Sequence
  Description of Artificial Sequence: Synthetic oligonucleotide
  Antisense strand to SEQ ID NO: 876750
acuuuccagcucaaccacu

SEQ ID NO: 876752 - RNA, 19 nt, Artificial Sequence
  Description of Artificial Sequence: Synthetic oligonucleotide
  Sense strand starting at position 3257 of SEQ ID NO: 588604
cacggcagauugucuaauu

SEQ ID NO: 876753 - RNA, 19 nt, Artificial Sequence
  Description of Artificial Sequence: Synthetic oligonucleotide
  Antisense strand to SEQ ID NO: 876752
aauuagacaaucugccgug

SEQ ID NO: 876754 - RNA, 19 nt, Artificial Sequence
  Description of Artificial Sequence: Synthetic oligonucleotide
  Sense strand starting at position 3268 of SEQ ID NO: 588604
gucuaauuccagugccugu

SEQ ID NO: 876755 - RNA, 19 nt, Artificial Sequence
  Description of Artificial Sequence: Synthetic oligonucleotide
  Antisense strand to SEQ ID NO: 876754
acaggcacuggaauuagac

SEQ ID NO: 876756 - RNA, 19 nt, Artificial Sequence
  Description of Artificial Sequence: Synthetic oligonucleotide
  Sense strand starting at position 3392 of SEQ ID NO: 588604
ccagcucuuguggaugaaa

SEQ ID NO: 876757 - RNA, 19 nt, Artificial Sequence
  Description of Artificial Sequence: Synthetic oligonucleotide
  Antisense strand to SEQ ID NO: 876756
uuucauccacaagagcugg

SEQ ID NO: 876758 - RNA, 19 nt, Artificial Sequence
  Description of Artificial Sequence: Synthetic oligonucleotide
  Sense strand starting at position 3435 of SEQ ID NO: 588604
gaggaaauggauuguucug

SEQ ID NO: 876759 - RNA, 19 nt, Artificial Sequence
  Description of Artificial Sequence: Synthetic oligonucleotide
  Antisense strand to SEQ ID NO: 876758
cagaacaauccauuuccuc

SEQ ID NO: 876760 - RNA, 19 nt, Artificial Sequence
  Description of Artificial Sequence: Synthetic oligonucleotide
  Sense strand starting at position 3437 of SEQ ID NO: 588604
ggaaauggauuguucugca

SEQ ID NO: 876761 - RNA, 19 nt, Artificial Sequence
  Description of Artificial Sequence: Synthetic oligonucleotide
  Antisense strand to SEQ ID NO: 876760
ugcagaacaauccauuucc

SEQ ID NO: 876762 - RNA, 19 nt, Artificial Sequence
  Description of Artificial Sequence: Synthetic oligonucleotide
  Sense strand starting at position 3441 of SEQ ID NO: 588604
auggauuguucugcaaauu

SEQ ID NO: 876763 - RNA, 19 nt, Artificial Sequence
  Description of Artificial Sequence: Synthetic oligonucleotide
  Antisense strand to SEQ ID NO: 876762
aauuugcagaacaauccau

SEQ ID NO: 876764 - RNA, 19 nt, Artificial Sequence
  Description of Artificial Sequence: Synthetic oligonucleotide
  Sense strand starting at position 3442 of SEQ ID NO: 588604
uggauuguucugcaaauug

SEQ ID NO: 876765 - RNA, 19 nt, Artificial Sequence
  Description of Artificial Sequence: Synthetic oligonucleotide
  Antisense strand to SEQ ID NO: 876764
caauuugcagaacaaucca

SEQ ID NO: 876766 - RNA, 19 nt, Artificial Sequence
  Description of Artificial Sequence: Synthetic oligonucleotide
  Sense strand starting at position 3454 of SEQ ID NO: 588604
caaauuguuuagccguuua

SEQ ID NO: 876767 - RNA, 19 nt, Artificial Sequence
  Description of Artificial Sequence: Synthetic oligonucleotide
  Antisense strand to SEQ ID NO: 876766
uaaacggcuaaacaauuug

SEQ ID NO: 876768 - RNA, 19 nt, Artificial Sequence
  Description of Artificial Sequence: Synthetic oligonucleotide
  Sense strand starting at position 3457 of SEQ ID NO: 588604
auuguuuagccguuuagcu

SEQ ID NO: 876769 - RNA, 19 nt, Artificial Sequence
  Description of Artificial Sequence: Synthetic oligonucleotide
  Antisense strand to SEQ ID NO: 876768
agcuaaacggcuaaacaau

SEQ ID NO: 876770 - RNA, 19 nt, Artificial Sequence
  Description of Artificial Sequence: Synthetic oligonucleotide
  Sense strand starting at position 3464 of SEQ ID NO: 588604
agccguuuagcuggagauc

SEQ ID NO: 876771 - RNA, 19 nt, Artificial Sequence
  Description of Artificial Sequence: Synthetic oligonucleotide
  Antisense strand to SEQ ID NO: 876770
gaucuccagcuaaacggcu

SEQ ID NO: 876772 - RNA, 19 nt, Artificial Sequence
  Description of Artificial Sequence: Synthetic oligonucleotide
  Sense strand starting at position 3465 of SEQ ID NO: 588604
gccguuuagcuggagaucu

SEQ ID NO: 876773 - RNA, 19 nt, Artificial Sequence
  Description of Artificial Sequence: Synthetic oligonucleotide
  Antisense strand to SEQ ID NO: 876772
agaucuccagcuaaacggc

SEQ ID NO: 876774 - RNA, 19 nt, Artificial Sequence
  Description of Artificial Sequence: Synthetic oligonucleotide
  Sense strand starting at position 3583 of SEQ ID NO: 588604
aaucgaaguucugagacag

SEQ ID NO: 876775 - RNA, 19 nt, Artificial Sequence
  Description of Artificial Sequence: Synthetic oligonucleotide
  Antisense strand to SEQ ID NO: 876774
cugucucagaacuucgauu

SEQ ID NO: 876776 - RNA, 19 nt, Artificial Sequence
  Description of Artificial Sequence: Synthetic oligonucleotide
  Sense strand starting at position 3587 of SEQ ID NO: 588604
gaaguucugagacagcgua

SEQ ID NO: 876777 - RNA, 19 nt, Artificial Sequence
  Description of Artificial Sequence: Synthetic oligonucleotide
  Antisense strand to SEQ ID NO: 876776
uacgcugucucagaacuuc

SEQ ID NO: 876778 - RNA, 19 nt, Artificial Sequence
  Description of Artificial Sequence: Synthetic oligonucleotide
  Sense strand starting at position 3600 of SEQ ID NO: 588604
agcguauugcaguguuacu

SEQ ID NO: 876779 - RNA, 19 nt, Artificial Sequence
  Description of Artificial Sequence: Synthetic oligonucleotide
  Antisense strand to SEQ ID NO: 876778
aguaacacugcaauacgcu

SEQ ID NO: 876780 - RNA, 19 nt, Artificial Sequence
  Description of Artificial Sequence: Synthetic oligonucleotide
  Sense strand starting at position 3601 of SEQ ID NO: 588604
gcguauugcaguguuacua

SEQ ID NO: 876781 - RNA, 19 nt, Artificial Sequence
  Description of Artificial Sequence: Synthetic oligonucleotide
  Antisense strand to SEQ ID NO: 876780
uaguaacacugcaauacgc

SEQ ID NO: 876782 - RNA, 19 nt, Artificial Sequence
  Description of Artificial Sequence: Synthetic oligonucleotide
  Sense strand starting at position 3626 of SEQ ID NO: 588604
uugugauacuggccauauu

SEQ ID NO: 876783 - RNA, 19 nt, Artificial Sequence
  Description of Artificial Sequence: Synthetic oligonucleotide
  Antisense strand to SEQ ID NO: 876782
aauauggccaguaucacaa

SEQ ID NO: 876784 - RNA, 19 nt, Artificial Sequence
  Description of Artificial Sequence: Synthetic oligonucleotide
  Sense strand starting at position 3717 of SEQ ID NO: 588604
uuucuaggcacugggauaa

SEQ ID NO: 876785 - RNA, 19 nt, Artificial Sequence
  Description of Artificial Sequence: Synthetic oligonucleotide
  Antisense strand to SEQ ID NO: 876784
uuaucccagugccuagaaa

SEQ ID NO: 876786 - RNA, 19 nt, Artificial Sequence
  Description of Artificial Sequence: Synthetic oligonucleotide
  Sense strand starting at position 376 of SEQ ID NO: 588605
ucuaaaguuugccuuaaag

SEQ ID NO: 876787 - RNA, 19 nt, Artificial Sequence
  Description of Artificial Sequence: Synthetic oligonucleotide
  Antisense strand to SEQ ID NO: 876786
cuuuaaggcaaacuuuaga

SEQ ID NO: 876788 - RNA, 19 nt, Artificial Sequence
  Description of Artificial Sequence: Synthetic oligonucleotide
  Sense strand starting at position 511 of SEQ ID NO: 588605
gugaucaauuuguuacugu

SEQ ID NO: 876789 - RNA, 19 nt, Artificial Sequence
  Description of Artificial Sequence: Synthetic oligonucleotide
  Antisense strand to SEQ ID NO: 876788
acaguaacaaauugaucac

SEQ ID NO: 876790 - RNA, 19 nt, Artificial Sequence
  Description of Artificial Sequence: Synthetic oligonucleotide
  Sense strand starting at position 547 of SEQ ID NO: 588605
gagccuaggagagguauaa

SEQ ID NO: 876791 - RNA, 19 nt, Artificial Sequence
  Description of Artificial Sequence: Synthetic oligonucleotide
  Antisense strand to SEQ ID NO: 876790
uuauaccucuccuaggcuc

SEQ ID NO: 876792 - RNA, 19 nt, Artificial Sequence
  Description of Artificial Sequence: Synthetic oligonucleotide
  Sense strand starting at position 1023 of SEQ ID NO: 588605
ccugcacacucguuauacu

SEQ ID NO: 876793 - RNA, 19 nt, Artificial Sequence
  Description of Artificial Sequence: Synthetic oligonucleotide
  Antisense strand to SEQ ID NO: 876792
aguauaacgagugugcagg

SEQ ID NO: 876794 - RNA, 19 nt, Artificial Sequence
  Description of Artificial Sequence: Synthetic oligonucleotide
  Sense strand starting at position 2022 of SEQ ID NO: 588605
uacugaaauuggcacagua

SEQ ID NO: 876795 - RNA, 19 nt, Artificial Sequence
  Description of Artificial Sequence: Synthetic oligonucleotide
  Antisense strand to SEQ ID NO: 876794
uacugugccaauuucagua

SEQ ID NO: 876796 - RNA, 19 nt, Artificial Sequence
  Description of Artificial Sequence: Synthetic oligonucleotide
  Sense strand starting at position 2024 of SEQ ID NO: 588605
cugaaauuggcacaguaac

SEQ ID NO: 876797 - RNA, 19 nt, Artificial Sequence
  Description of Artificial Sequence: Synthetic oligonucleotide
  Antisense strand to SEQ ID NO: 876796
guuacugugccaauuucag

SEQ ID NO: 876798 - RNA, 19 nt, Artificial Sequence
  Description of Artificial Sequence: Synthetic oligonucleotide
  Sense strand starting at position 2077 of SEQ ID NO: 588605
ugaaguaggcuccaagagu

SEQ ID NO: 876799 - RNA, 19 nt, Artificial Sequence
  Description of Artificial Sequence: Synthetic oligonucleotide
  Antisense strand to SEQ ID NO: 876798
acucuuggagccuacuuca

SEQ ID NO: 876800 - RNA, 19 nt, Artificial Sequence
  Description of Artificial Sequence: Synthetic oligonucleotide
  Sense strand starting at position 2086 of SEQ ID NO: 588605
cuccaagaguauuccgaug

SEQ ID NO: 876801 - RNA, 19 nt, Artificial Sequence
  Description of Artificial Sequence: Synthetic oligonucleotide
  Antisense strand to SEQ ID NO: 876800
caucggaauacucuuggag

SEQ ID NO: 876802 - RNA, 19 nt, Artificial Sequence
  Description of Artificial Sequence: Synthetic oligonucleotide
  Sense strand starting at position 2088 of SEQ ID NO: 588605
ccaagaguauuccgaugag

SEQ ID NO: 876803 - RNA, 19 nt, Artificial Sequence
  Description of Artificial Sequence: Synthetic oligonucleotide
  Antisense strand to SEQ ID NO: 876802
cucaucggaauacucuugg

SEQ ID NO: 876804 - RNA, 19 nt, Artificial Sequence
  Description of Artificial Sequence: Synthetic oligonucleotide
  Sense strand starting at position 2207 of SEQ ID NO: 588605
gguuucuggaaguaguaaa

SEQ ID NO: 876805 - RNA, 19 nt, Artificial Sequence
  Description of Artificial Sequence: Synthetic oligonucleotide
  Antisense strand to SEQ ID NO: 876804
uuuacuacuuccagaaacc

SEQ ID NO: 876806 - RNA, 19 nt, Artificial Sequence
  Description of Artificial Sequence: Synthetic oligonucleotide
  Sense strand starting at position 2470 of SEQ ID NO: 588605
cuggcuucuguuugccaaa

SEQ ID NO: 876807 - RNA, 19 nt, Artificial Sequence
  Description of Artificial Sequence: Synthetic oligonucleotide
  Antisense strand to SEQ ID NO: 876806
uuuggcaaacagaagccag

SEQ ID NO: 876808 - RNA, 19 nt, Artificial Sequence
  Description of Artificial Sequence: Synthetic oligonucleotide
  Sense strand starting at position 2471 of SEQ ID NO: 588605
uggcuucuguuugccaaau

SEQ ID NO: 876809 - RNA, 19 nt, Artificial Sequence
  Description of Artificial Sequence: Synthetic oligonucleotide
  Antisense strand to SEQ ID NO: 876808
auuuggcaaacagaagcca

SEQ ID NO: 876810 - RNA, 19 nt, Artificial Sequence
  Description of Artificial Sequence: Synthetic oligonucleotide
  Sense strand starting at position 2481 of SEQ ID NO: 588605
uugccaaaugaguggaagu

SEQ ID NO: 876811 - RNA, 19 nt, Artificial Sequence
  Description of Artificial Sequence: Synthetic oligonucleotide
  Antisense strand to SEQ ID NO: 876810
acuuccacucauuuggcaa

SEQ ID NO: 876812 - RNA, 19 nt, Artificial Sequence
  Description of Artificial Sequence: Synthetic oligonucleotide
  Sense strand starting at position 2507 of SEQ ID NO: 588605
cuggccgugaucuguaaua

SEQ ID NO: 876813 - RNA, 19 nt, Artificial Sequence
  Description of Artificial Sequence: Synthetic oligonucleotide
  Antisense strand to SEQ ID NO: 876812
uauuacagaucacggccag

SEQ ID NO: 876814 - RNA, 19 nt, Artificial Sequence
  Description of Artificial Sequence: Synthetic oligonucleotide
  Sense strand starting at position 2509 of SEQ ID NO: 588605
ggccgugaucuguaauaau

SEQ ID NO: 876815 - RNA, 19 nt, Artificial Sequence
  Description of Artificial Sequence: Synthetic oligonucleotide
  Antisense strand to SEQ ID NO: 876814
auuauuacagaucacggcc

SEQ ID NO: 876816 - RNA, 19 nt, Artificial Sequence
  Description of Artificial Sequence: Synthetic oligonucleotide
  Sense strand starting at position 2512 of SEQ ID NO: 588605
cgugaucuguaauaaugac

SEQ ID NO: 876817 - RNA, 19 nt, Artificial Sequence
  Description of Artificial Sequence: Synthetic oligonucleotide
  Antisense strand to SEQ ID NO: 876816
gucauuauuacagaucacg

SEQ ID NO: 876818 - RNA, 19 nt, Artificial Sequence
  Description of Artificial Sequence: Synthetic oligonucleotide
  Sense strand starting at position 2590 of SEQ ID NO: 588605
cuuugaggcuuagaaauga

SEQ ID NO: 876819 - RNA, 19 nt, Artificial Sequence
  Description of Artificial Sequence: Synthetic oligonucleotide
  Antisense strand to SEQ ID NO: 876818
ucauuucuaagccucaaag

SEQ ID NO: 876820 - RNA, 19 nt, Artificial Sequence
  Description of Artificial Sequence: Synthetic oligonucleotide
  Sense strand starting at position 2809 of SEQ ID NO: 588605
gggucucuugagcauagga

SEQ ID NO: 876821 - RNA, 19 nt, Artificial Sequence
  Description of Artificial Sequence: Synthetic oligonucleotide
  Antisense strand to SEQ ID NO: 876820
uccuaugcucaagagaccc

SEQ ID NO: 876822 - RNA, 19 nt, Artificial Sequence
  Description of Artificial Sequence: Synthetic oligonucleotide
  Sense strand starting at position 2811 of SEQ ID NO: 588605
gucucuugagcauaggagu

SEQ ID NO: 876823 - RNA, 19 nt, Artificial Sequence
  Description of Artificial Sequence: Synthetic oligonucleotide
  Antisense strand to SEQ ID NO: 876822
acuccuaugcucaagagac

SEQ ID NO: 876824 - RNA, 19 nt, Artificial Sequence
  Description of Artificial Sequence: Synthetic oligonucleotide
  Sense strand starting at position 2923 of SEQ ID NO: 588605
guaagugguugagcuggaa

SEQ ID NO: 876825 - RNA, 19 nt, Artificial Sequence
  Description of Artificial Sequence: Synthetic oligonucleotide
  Antisense strand to SEQ ID NO: 876824
uuccagcucaaccacuuac

SEQ ID NO: 876826 - RNA, 19 nt, Artificial Sequence
  Description of Artificial Sequence: Synthetic oligonucleotide
  Sense strand starting at position 2926 of SEQ ID NO: 588605
agugguugagcuggaaagu

SEQ ID NO: 876827 - RNA, 19 nt, Artificial Sequence
  Description of Artificial Sequence: Synthetic oligonucleotide
  Antisense strand to SEQ ID NO: 876826
acuuuccagcucaaccacu

SEQ ID NO: 876828 - RNA, 19 nt, Artificial Sequence
  Description of Artificial Sequence: Synthetic oligonucleotide
  Sense strand starting at position 2946 of SEQ ID NO: 588605
cacggcagauugucuaauu

SEQ ID NO: 876829 - RNA, 19 nt, Artificial Sequence
  Description of Artificial Sequence: Synthetic oligonucleotide
  Antisense strand to SEQ ID NO: 876828
aauuagacaaucugccgug

SEQ ID NO: 876830 - RNA, 19 nt, Artificial Sequence
  Description of Artificial Sequence: Synthetic oligonucleotide
  Sense strand starting at position 2957 of SEQ ID NO: 588605
gucuaauuccagugccugu

SEQ ID NO: 876831 - RNA, 19 nt, Artificial Sequence
  Description of Artificial Sequence: Synthetic oligonucleotide
  Antisense strand to SEQ ID NO: 876830
acaggcacuggaauuagac

SEQ ID NO: 876832 - RNA, 19 nt, Artificial Sequence
  Description of Artificial Sequence: Synthetic oligonucleotide
  Sense strand starting at position 3081 of SEQ ID NO: 588605
ccagcucuuguggaugaaa

SEQ ID NO: 876833 - RNA, 19 nt, Artificial Sequence
  Description of Artificial Sequence: Synthetic oligonucleotide
  Antisense strand to SEQ ID NO: 876832
uuucauccacaagagcugg

SEQ ID NO: 876834 - RNA, 19 nt, Artificial Sequence
  Description of Artificial Sequence: Synthetic oligonucleotide
  Sense strand starting at position 3124 of SEQ ID NO: 588605
gaggaaauggauuguucug

SEQ ID NO: 876835 - RNA, 19 nt, Artificial Sequence
  Description of Artificial Sequence: Synthetic oligonucleotide
  Antisense strand to SEQ ID NO: 876834
cagaacaauccauuuccuc

SEQ ID NO: 876836 - RNA, 19 nt, Artificial Sequence
  Description of Artificial Sequence: Synthetic oligonucleotide
  Sense strand starting at position 3126 of SEQ ID NO: 588605
ggaaauggauuguucugca

SEQ ID NO: 876837 - RNA, 19 nt, Artificial Sequence
  Description of Artificial Sequence: Synthetic oligonucleotide
  Antisense strand to SEQ ID NO: 876836
ugcagaacaauccauuucc

SEQ ID NO: 876838 - RNA, 19 nt, Artificial Sequence
  Description of Artificial Sequence: Synthetic oligonucleotide
  Sense strand starting at position 3130 of SEQ ID NO: 588605
auggauuguucugcaaauu

SEQ ID NO: 876839 - RNA, 19 nt, Artificial Sequence
  Description of Artificial Sequence: Synthetic oligonucleotide
  Antisense strand to SEQ ID NO: 876838
aauuugcagaacaauccau

SEQ ID NO: 876840 - RNA, 19 nt, Artificial Sequence
  Description of Artificial Sequence: Synthetic oligonucleotide
  Sense strand starting at position 3131 of SEQ ID NO: 588605
uggauuguucugcaaauug

SEQ ID NO: 876841 - RNA, 19 nt, Artificial Sequence
  Description of Artificial Sequence: Synthetic oligonucleotide
  Antisense strand to SEQ ID NO: 876840
caauuugcagaacaaucca

SEQ ID NO: 876842 - RNA, 19 nt, Artificial Sequence
  Description of Artificial Sequence: Synthetic oligonucleotide
  Sense strand starting at position 3143 of SEQ ID NO: 588605
caaauuguuuagccguuua

SEQ ID NO: 876843 - RNA, 19 nt, Artificial Sequence
  Description of Artificial Sequence: Synthetic oligonucleotide
  Antisense strand to SEQ ID NO: 876842
uaaacggcuaaacaauuug

SEQ ID NO: 876844 - RNA, 19 nt, Artificial Sequence
  Description of Artificial Sequence: Synthetic oligonucleotide
  Sense strand starting at position 3146 of SEQ ID NO: 588605
auuguuuagccguuuagcu

SEQ ID NO: 876845 - RNA, 19 nt, Artificial Sequence
  Description of Artificial Sequence: Synthetic oligonucleotide
  Antisense strand to SEQ ID NO: 876844
agcuaaacggcuaaacaau

SEQ ID NO: 876846 - RNA, 19 nt, Artificial Sequence
  Description of Artificial Sequence: Synthetic oligonucleotide
  Sense strand starting at position 3153 of SEQ ID NO: 588605
agccguuuagcuggagauc

SEQ ID NO: 876847 - RNA, 19 nt, Artificial Sequence
  Description of Artificial Sequence: Synthetic oligonucleotide
  Antisense strand to SEQ ID NO: 876846
gaucuccagcuaaacggcu

SEQ ID NO: 876848 - RNA, 19 nt, Artificial Sequence
  Description of Artificial Sequence: Synthetic oligonucleotide
  Sense strand starting at position 3154 of SEQ ID NO: 588605
gccguuuagcuggagaucu

SEQ ID NO: 876849 - RNA, 19 nt, Artificial Sequence
  Description of Artificial Sequence: Synthetic oligonucleotide
  Antisense strand to SEQ ID NO: 876848
agaucuccagcuaaacggc

SEQ ID NO: 876850 - RNA, 19 nt, Artificial Sequence
  Description of Artificial Sequence: Synthetic oligonucleotide
  Sense strand starting at position 3272 of SEQ ID NO: 588605
aaucgaaguucugagacag

SEQ ID NO: 876851 - RNA, 19 nt, Artificial Sequence
  Description of Artificial Sequence: Synthetic oligonucleotide
  Antisense strand to SEQ ID NO: 876850
cugucucagaacuucgauu

SEQ ID NO: 876852 - RNA, 19 nt, Artificial Sequence
  Description of Artificial Sequence: Synthetic oligonucleotide
  Sense strand starting at position 3276 of SEQ ID NO: 588605
gaaguucugagacagcgua

SEQ ID NO: 876853 - RNA, 19 nt, Artificial Sequence
  Description of Artificial Sequence: Synthetic oligonucleotide
  Antisense strand to SEQ ID NO: 876852
uacgcugucucagaacuuc

SEQ ID NO: 876854 - RNA, 19 nt, Artificial Sequence
  Description of Artificial Sequence: Synthetic oligonucleotide
  Sense strand starting at position 3289 of SEQ ID NO: 588605
agcguauugcaguguuacu

SEQ ID NO: 876855 - RNA, 19 nt, Artificial Sequence
  Description of Artificial Sequence: Synthetic oligonucleotide
  Antisense strand to SEQ ID NO: 876854
aguaacacugcaauacgcu

SEQ ID NO: 876856 - RNA, 19 nt, Artificial Sequence
  Description of Artificial Sequence: Synthetic oligonucleotide
  Sense strand starting at position 3290 of SEQ ID NO: 588605
gcguauugcaguguuacua

SEQ ID NO: 876857 - RNA, 19 nt, Artificial Sequence
  Description of Artificial Sequence: Synthetic oligonucleotide
  Antisense strand to SEQ ID NO: 876856
uaguaacacugcaauacgc

SEQ ID NO: 876858 - RNA, 19 nt, Artificial Sequence
  Description of Artificial Sequence: Synthetic oligonucleotide
  Sense strand starting at position 3315 of SEQ ID NO: 588605
uugugauacuggccauauu

SEQ ID NO: 876859 - RNA, 19 nt, Artificial Sequence
  Description of Artificial Sequence: Synthetic oligonucleotide
  Antisense strand to SEQ ID NO: 876858
aauauggccaguaucacaa

SEQ ID NO: 876860 - RNA, 19 nt, Artificial Sequence
  Description of Artificial Sequence: Synthetic oligonucleotide
  Sense strand starting at position 3406 of SEQ ID NO: 588605
uuucuaggcacugggauaa

SEQ ID NO: 876861 - RNA, 19 nt, Artificial Sequence
  Description of Artificial Sequence: Synthetic oligonucleotide
  Antisense strand to SEQ ID NO: 876860
uuaucccagugccuagaaa

SEQ ID NO: 876862 - RNA, 19 nt, Artificial Sequence
  Description of Artificial Sequence: Synthetic oligonucleotide
  Sense strand starting at position 3824 of SEQ ID NO: 588605
aaagaaguuugguggagaa

SEQ ID NO: 876863 - RNA, 19 nt, Artificial Sequence
  Description of Artificial Sequence: Synthetic oligonucleotide
  Antisense strand to SEQ ID NO: 876862
uucuccaccaaacuucuuu

SEQ ID NO: 876864 - RNA, 19 nt, Artificial Sequence
  Description of Artificial Sequence: Synthetic oligonucleotide
  Sense strand starting at position 3839 of SEQ ID NO: 588605
agaaauaacucggaagggu

SEQ ID NO: 876865 - RNA, 19 nt, Artificial Sequence
  Description of Artificial Sequence: Synthetic oligonucleotide
  Antisense strand to SEQ ID NO: 876864
acccuuccgaguuauuucu

SEQ ID NO: 876866 - RNA, 19 nt, Artificial Sequence
  Description of Artificial Sequence: Synthetic oligonucleotide
  Sense strand starting at position 159 of SEQ ID NO: 588606
gccucaguuuccuugugca

SEQ ID NO: 876867 - RNA, 19 nt, Artificial Sequence
  Description of Artificial Sequence: Synthetic oligonucleotide
  Antisense strand to SEQ ID NO: 876866
ugcacaaggaaacugaggc

SEQ ID NO: 876868 - RNA, 19 nt, Artificial Sequence
  Description of Artificial Sequence: Synthetic oligonucleotide
  Sense strand starting at position 342 of SEQ ID NO: 588606
ggcgcuccauuucuggaaa

SEQ ID NO: 876869 - RNA, 19 nt, Artificial Sequence
  Description of Artificial Sequence: Synthetic oligonucleotide
  Antisense strand to SEQ ID NO: 876868
uuuccagaaauggagcgcc

SEQ ID NO: 876870 - RNA, 19 nt, Artificial Sequence
  Description of Artificial Sequence: Synthetic oligonucleotide
  Sense strand starting at position 442 of SEQ ID NO: 588606
uuuagucauuuccgaagca

SEQ ID NO: 876871 - RNA, 19 nt, Artificial Sequence
  Description of Artificial Sequence: Synthetic oligonucleotide
  Antisense strand to SEQ ID NO: 876870
ugcuucggaaaugacuaaa

SEQ ID NO: 876872 - RNA, 19 nt, Artificial Sequence
  Description of Artificial Sequence: Synthetic oligonucleotide
  Sense strand starting at position 532 of SEQ ID NO: 588606
gcaagaaccuucccaaaug

SEQ ID NO: 876873 - RNA, 19 nt, Artificial Sequence
  Description of Artificial Sequence: Synthetic oligonucleotide
  Antisense strand to SEQ ID NO: 876872
cauuugggaagguucuugc

SEQ ID NO: 876874 - RNA, 19 nt, Artificial Sequence
  Description of Artificial Sequence: Synthetic oligonucleotide
  Sense strand starting at position 1021 of SEQ ID NO: 588606
ucuaaaguuugccuuaaag

SEQ ID NO: 876875 - RNA, 19 nt, Artificial Sequence
  Description of Artificial Sequence: Synthetic oligonucleotide
  Antisense strand to SEQ ID NO: 876874
cuuuaaggcaaacuuuaga

SEQ ID NO: 876876 - RNA, 19 nt, Artificial Sequence
  Description of Artificial Sequence: Synthetic oligonucleotide
  Sense strand starting at position 1156 of SEQ ID NO: 588606
gugaucaauuuguuacugu

SEQ ID NO: 876877 - RNA, 19 nt, Artificial Sequence
  Description of Artificial Sequence: Synthetic oligonucleotide
  Antisense strand to SEQ ID NO: 876876
acaguaacaaauugaucac

SEQ ID NO: 876878 - RNA, 19 nt, Artificial Sequence
  Description of Artificial Sequence: Synthetic oligonucleotide
  Sense strand starting at position 1192 of SEQ ID NO: 588606
gagccuaggagagguauaa

SEQ ID NO: 876879 - RNA, 19 nt, Artificial Sequence
  Description of Artificial Sequence: Synthetic oligonucleotide
  Antisense strand to SEQ ID NO: 876878
uuauaccucuccuaggcuc

SEQ ID NO: 876880 - RNA, 19 nt, Artificial Sequence
  Description of Artificial Sequence: Synthetic oligonucleotide
  Sense strand starting at position 1668 of SEQ ID NO: 588606
ccugcacacucguuauacu

SEQ ID NO: 876881 - RNA, 19 nt, Artificial Sequence
  Description of Artificial Sequence: Synthetic oligonucleotide
  Antisense strand to SEQ ID NO: 876880
aguauaacgagugugcagg

SEQ ID NO: 876882 - RNA, 19 nt, Artificial Sequence
  Description of Artificial Sequence: Synthetic oligonucleotide
  Sense strand starting at position 2667 of SEQ ID NO: 588606
uacugaaauuggcacagua

SEQ ID NO: 876883 - RNA, 19 nt, Artificial Sequence
  Description of Artificial Sequence: Synthetic oligonucleotide
  Antisense strand to SEQ ID NO: 876882
uacugugccaauuucagua

SEQ ID NO: 876884 - RNA, 19 nt, Artificial Sequence
  Description of Artificial Sequence: Synthetic oligonucleotide
  Sense strand starting at position 2669 of SEQ ID NO: 588606
cugaaauuggcacaguaac

SEQ ID NO: 876885 - RNA, 19 nt, Artificial Sequence
  Description of Artificial Sequence: Synthetic oligonucleotide
  Antisense strand to SEQ ID NO: 876884
guuacugugccaauuucag

SEQ ID NO: 876886 - RNA, 19 nt, Artificial Sequence
  Description of Artificial Sequence: Synthetic oligonucleotide
  Sense strand starting at position 2722 of SEQ ID NO: 588606
ugaaguaggcuccaagagu

SEQ ID NO: 876887 - RNA, 19 nt, Artificial Sequence
  Description of Artificial Sequence: Synthetic oligonucleotide
  Antisense strand to SEQ ID NO: 876886
acucuuggagccuacuuca

SEQ ID NO: 876888 - RNA, 19 nt, Artificial Sequence
  Description of Artificial Sequence: Synthetic oligonucleotide
  Sense strand starting at position 2731 of SEQ ID NO: 588606
cuccaagaguauuccgaug

SEQ ID NO: 876889 - RNA, 19 nt, Artificial Sequence
  Description of Artificial Sequence: Synthetic oligonucleotide
  Antisense strand to SEQ ID NO: 876888
caucggaauacucuuggag

SEQ ID NO: 876890 - RNA, 19 nt, Artificial Sequence
  Description of Artificial Sequence: Synthetic oligonucleotide
  Sense strand starting at position 2852 of SEQ ID NO: 588606
gguuucuggaaguaguaaa

SEQ ID NO: 876891 - RNA, 19 nt, Artificial Sequence
  Description of Artificial Sequence: Synthetic oligonucleotide
  Antisense strand to SEQ ID NO: 876890
uuuacuacuuccagaaacc

SEQ ID NO: 876892 - RNA, 19 nt, Artificial Sequence
  Description of Artificial Sequence: Synthetic oligonucleotide
  Sense strand starting at position 3115 of SEQ ID NO: 588606
cuggcuucuguuugccaaa

SEQ ID NO: 876893 - RNA, 19 nt, Artificial Sequence
  Description of Artificial Sequence: Synthetic oligonucleotide
  Antisense strand to SEQ ID NO: 876892
uuuggcaaacagaagccag

SEQ ID NO: 876894 - RNA, 19 nt, Artificial Sequence
  Description of Artificial Sequence: Synthetic oligonucleotide
  Sense strand starting at position 3116 of SEQ ID NO: 588606
uggcuucuguuugccaaau

SEQ ID NO: 876895 - RNA, 19 nt, Artificial Sequence
  Description of Artificial Sequence: Synthetic oligonucleotide
  Antisense strand to SEQ ID NO: 876894
auuuggcaaacagaagcca

SEQ ID NO: 876896 - RNA, 19 nt, Artificial Sequence
  Description of Artificial Sequence: Synthetic oligonucleotide
  Sense strand starting at position 3126 of SEQ ID NO: 588606
uugccaaaugaguggaagu

SEQ ID NO: 876897 - RNA, 19 nt, Artificial Sequence
  Description of Artificial Sequence: Synthetic oligonucleotide
  Antisense strand to SEQ ID NO: 876896
acuuccacucauuuggcaa

SEQ ID NO: 876898 - RNA, 19 nt, Artificial Sequence
  Description of Artificial Sequence: Synthetic oligonucleotide
  Sense strand starting at position 3152 of SEQ ID NO: 588606
cuggccgugaucuguaaua

SEQ ID NO: 876899 - RNA, 19 nt, Artificial Sequence
  Description of Artificial Sequence: Synthetic oligonucleotide
  Antisense strand to SEQ ID NO: 876898
uauuacagaucacggccag

SEQ ID NO: 876900 - RNA, 19 nt, Artificial Sequence
  Description of Artificial Sequence: Synthetic oligonucleotide
  Sense strand starting at position 3154 of SEQ ID NO: 588606
ggccgugaucuguaauaau

SEQ ID NO: 876901 - RNA, 19 nt, Artificial Sequence
  Description of Artificial Sequence: Synthetic oligonucleotide
  Antisense strand to SEQ ID NO: 876900
auuauuacagaucacggcc

SEQ ID NO: 876902 - RNA, 19 nt, Artificial Sequence
  Description of Artificial Sequence: Synthetic oligonucleotide
  Sense strand starting at position 3157 of SEQ ID NO: 588606
cgugaucuguaauaaugac

SEQ ID NO: 876903 - RNA, 19 nt, Artificial Sequence
  Description of Artificial Sequence: Synthetic oligonucleotide
  Antisense strand to SEQ ID NO: 876902
gucauuauuacagaucacg

SEQ ID NO: 876904 - RNA, 19 nt, Artificial Sequence
  Description of Artificial Sequence: Synthetic oligonucleotide
  Sense strand starting at position 3235 of SEQ ID NO: 588606
cuuugaggcuuagaaauga

SEQ ID NO: 876905 - RNA, 19 nt, Artificial Sequence
  Description of Artificial Sequence: Synthetic oligonucleotide
  Antisense strand to SEQ ID NO: 876904
ucauuucuaagccucaaag

SEQ ID NO: 876906 - RNA, 19 nt, Artificial Sequence
  Description of Artificial Sequence: Synthetic oligonucleotide
  Sense strand starting at position 3454 of SEQ ID NO: 588606
gggucucuugagcauagga

SEQ ID NO: 876907 - RNA, 19 nt, Artificial Sequence
  Description of Artificial Sequence: Synthetic oligonucleotide
  Antisense strand to SEQ ID NO: 876906
uccuaugcucaagagaccc

SEQ ID NO: 876908 - RNA, 19 nt, Artificial Sequence
  Description of Artificial Sequence: Synthetic oligonucleotide
  Sense strand starting at position 3456 of SEQ ID NO: 588606
gucucuugagcauaggagu

SEQ ID NO: 876909 - RNA, 19 nt, Artificial Sequence
  Description of Artificial Sequence: Synthetic oligonucleotide
  Antisense strand to SEQ ID NO: 876908
acuccuaugcucaagagac

SEQ ID NO: 876910 - RNA, 19 nt, Artificial Sequence
  Description of Artificial Sequence: Synthetic oligonucleotide
  Sense strand starting at position 3568 of SEQ ID NO: 588606
guaagugguugagcuggaa

SEQ ID NO: 876911 - RNA, 19 nt, Artificial Sequence
  Description of Artificial Sequence: Synthetic oligonucleotide
  Antisense strand to SEQ ID NO: 876910
uuccagcucaaccacuuac

SEQ ID NO: 876912 - RNA, 19 nt, Artificial Sequence
  Description of Artificial Sequence: Synthetic oligonucleotide
  Sense strand starting at position 3571 of SEQ ID NO: 588606
agugguugagcuggaaagu

SEQ ID NO: 876913 - RNA, 19 nt, Artificial Sequence
  Description of Artificial Sequence: Synthetic oligonucleotide
  Antisense strand to SEQ ID NO: 876912
acuuuccagcucaaccacu

SEQ ID NO: 876914 - RNA, 19 nt, Artificial Sequence
  Description of Artificial Sequence: Synthetic oligonucleotide
  Sense strand starting at position 3591 of SEQ ID NO: 588606
cacggcagauugucuaauu

SEQ ID NO: 876915 - RNA, 19 nt, Artificial Sequence
  Description of Artificial Sequence: Synthetic oligonucleotide
  Antisense strand to SEQ ID NO: 876914
aauuagacaaucugccgug

SEQ ID NO: 876916 - RNA, 19 nt, Artificial Sequence
  Description of Artificial Sequence: Synthetic oligonucleotide
  Sense strand starting at position 3602 of SEQ ID NO: 588606
gucuaauuccagugccugu

SEQ ID NO: 876917 - RNA, 19 nt, Artificial Sequence
  Description of Artificial Sequence: Synthetic oligonucleotide
  Antisense strand to SEQ ID NO: 876916
acaggcacuggaauuagac

SEQ ID NO: 876918 - RNA, 19 nt, Artificial Sequence
  Description of Artificial Sequence: Synthetic oligonucleotide
  Sense strand starting at position 3726 of SEQ ID NO: 588606
ccagcucuuguggaugaaa

SEQ ID NO: 876919 - RNA, 19 nt, Artificial Sequence
  Description of Artificial Sequence: Synthetic oligonucleotide
  Antisense strand to SEQ ID NO: 876918
uuucauccacaagagcugg

SEQ ID NO: 876920 - RNA, 19 nt, Artificial Sequence
  Description of Artificial Sequence: Synthetic oligonucleotide
  Sense strand starting at position 3769 of SEQ ID NO: 588606
gaggaaauggauuguucug

SEQ ID NO: 876921 - RNA, 19 nt, Artificial Sequence
  Description of Artificial Sequence: Synthetic oligonucleotide
  Antisense strand to SEQ ID NO: 876920
cagaacaauccauuuccuc

SEQ ID NO: 876922 - RNA, 19 nt, Artificial Sequence
  Description of Artificial Sequence: Synthetic oligonucleotide
  Sense strand starting at position 3771 of SEQ ID NO: 588606
ggaaauggauuguucugca

SEQ ID NO: 876923 - RNA, 19 nt, Artificial Sequence
  Description of Artificial Sequence: Synthetic oligonucleotide
  Antisense strand to SEQ ID NO: 876922
ugcagaacaauccauuucc

SEQ ID NO: 876924 - RNA, 19 nt, Artificial Sequence
  Description of Artificial Sequence: Synthetic oligonucleotide
  Sense strand starting at position 3775 of SEQ ID NO: 588606
auggauuguucugcaaauu

SEQ ID NO: 876925 - RNA, 19 nt, Artificial Sequence
  Description of Artificial Sequence: Synthetic oligonucleotide
  Antisense strand to SEQ ID NO: 876924
aauuugcagaacaauccau

SEQ ID NO: 876926 - RNA, 19 nt, Artificial Sequence
  Description of Artificial Sequence: Synthetic oligonucleotide
  Sense strand starting at position 3776 of SEQ ID NO: 588606
uggauuguucugcaaauug

SEQ ID NO: 876927 - RNA, 19 nt, Artificial Sequence
  Description of Artificial Sequence: Synthetic oligonucleotide
  Antisense strand to SEQ ID NO: 876926
caauuugcagaacaaucca

SEQ ID NO: 876928 - RNA, 19 nt, Artificial Sequence
  Description of Artificial Sequence: Synthetic oligonucleotide
  Sense strand starting at position 3788 of SEQ ID NO: 588606
caaauuguuuagccguuua

SEQ ID NO: 876929 - RNA, 19 nt, Artificial Sequence
  Description of Artificial Sequence: Synthetic oligonucleotide
  Antisense strand to SEQ ID NO: 876928
uaaacggcuaaacaauuug

SEQ ID NO: 876930 - RNA, 19 nt, Artificial Sequence
  Description of Artificial Sequence: Synthetic oligonucleotide
  Sense strand starting at position 3791 of SEQ ID NO: 588606
auuguuuagccguuuagcu

SEQ ID NO: 876931 - RNA, 19 nt, Artificial Sequence
  Description of Artificial Sequence: Synthetic oligonucleotide
  Antisense strand to SEQ ID NO: 876930
agcuaaacggcuaaacaau

SEQ ID NO: 876932 - RNA, 19 nt, Artificial Sequence
  Description of Artificial Sequence: Synthetic oligonucleotide
  Sense strand starting at position 3798 of SEQ ID NO: 588606
agccguuuagcuggagauc

SEQ ID NO: 876933 - RNA, 19 nt, Artificial Sequence
  Description of Artificial Sequence: Synthetic oligonucleotide
  Antisense strand to SEQ ID NO: 876932
gaucuccagcuaaacggcu

SEQ ID NO: 876934 - RNA, 19 nt, Artificial Sequence
  Description of Artificial Sequence: Synthetic oligonucleotide
  Sense strand starting at position 3799 of SEQ ID NO: 588606
gccguuuagcuggagaucu

SEQ ID NO: 876935 - RNA, 19 nt, Artificial Sequence
  Description of Artificial Sequence: Synthetic oligonucleotide
  Antisense strand to SEQ ID NO: 876934
agaucuccagcuaaacggc

SEQ ID NO: 876936 - RNA, 19 nt, Artificial Sequence
  Description of Artificial Sequence: Synthetic oligonucleotide
  Sense strand starting at position 3917 of SEQ ID NO: 588606
aaucgaaguucugagacag

SEQ ID NO: 876937 - RNA, 19 nt, Artificial Sequence
  Description of Artificial Sequence: Synthetic oligonucleotide
  Antisense strand to SEQ ID NO: 876936
cugucucagaacuucgauu

SEQ ID NO: 876938 - RNA, 19 nt, Artificial Sequence
  Description of Artificial Sequence: Synthetic oligonucleotide
  Sense strand starting at position 3921 of SEQ ID NO: 588606
gaaguucugagacagcgua

SEQ ID NO: 876939 - RNA, 19 nt, Artificial Sequence
  Description of Artificial Sequence: Synthetic oligonucleotide
  Antisense strand to SEQ ID NO: 876938
uacgcugucucagaacuuc

SEQ ID NO: 876940 - RNA, 19 nt, Artificial Sequence
  Description of Artificial Sequence: Synthetic oligonucleotide
  Sense strand starting at position 3934 of SEQ ID NO: 588606
agcguauugcaguguuacu

SEQ ID NO: 876941 - RNA, 19 nt, Artificial Sequence
  Description of Artificial Sequence: Synthetic oligonucleotide
  Antisense strand to SEQ ID NO: 876940
aguaacacugcaauacgcu

SEQ ID NO: 876942 - RNA, 19 nt, Artificial Sequence
  Description of Artificial Sequence: Synthetic oligonucleotide
  Sense strand starting at position 3935 of SEQ ID NO: 588606
gcguauugcaguguuacua

SEQ ID NO: 876943 - RNA, 19 nt, Artificial Sequence
  Description of Artificial Sequence: Synthetic oligonucleotide
  Antisense strand to SEQ ID NO: 876942
uaguaacacugcaauacgc

SEQ ID NO: 876944 - RNA, 19 nt, Artificial Sequence
  Description of Artificial Sequence: Synthetic oligonucleotide
  Sense strand starting at position 3960 of SEQ ID NO: 588606
uugugauacuggccauauu

SEQ ID NO: 876945 - RNA, 19 nt, Artificial Sequence
  Description of Artificial Sequence: Synthetic oligonucleotide
  Antisense strand to SEQ ID NO: 876944
aauauggccaguaucacaa

SEQ ID NO: 876946 - RNA, 19 nt, Artificial Sequence
  Description of Artificial Sequence: Synthetic oligonucleotide
  Sense strand starting at position 14 of SEQ ID NO: 588607
ugauucuccugccauuuga

SEQ ID NO: 876947 - RNA, 19 nt, Artificial Sequence
  Description of Artificial Sequence: Synthetic oligonucleotide
  Antisense strand to SEQ ID NO: 876946
ucaaauggcaggagaauca

SEQ ID NO: 876948 - RNA, 19 nt, Artificial Sequence
  Description of Artificial Sequence: Synthetic oligonucleotide
  Sense strand starting at position 444 of SEQ ID NO: 588607
cgaggacucugugagcaca

SEQ ID NO: 876949 - RNA, 19 nt, Artificial Sequence
  Description of Artificial Sequence: Synthetic oligonucleotide
  Antisense strand to SEQ ID NO: 876948
ugugcucacagaguccucg

SEQ ID NO: 876950 - RNA, 19 nt, Artificial Sequence
  Description of Artificial Sequence: Synthetic oligonucleotide
  Sense strand starting at position 512 of SEQ ID NO: 588607
guggcaucuacacagguuu

SEQ ID NO: 876951 - RNA, 19 nt, Artificial Sequence
  Description of Artificial Sequence: Synthetic oligonucleotide
  Antisense strand to SEQ ID NO: 876950
aaaccuguguagaugccac

SEQ ID NO: 876952 - RNA, 19 nt, Artificial Sequence
  Description of Artificial Sequence: Synthetic oligonucleotide
  Sense strand starting at position 524 of SEQ ID NO: 588607
cagguuucucccugaaggu

SEQ ID NO: 876953 - RNA, 19 nt, Artificial Sequence
  Description of Artificial Sequence: Synthetic oligonucleotide
  Antisense strand to SEQ ID NO: 876952
accuucagggagaaaccug

SEQ ID NO: 876954 - RNA, 19 nt, Artificial Sequence
  Description of Artificial Sequence: Synthetic oligonucleotide
  Sense strand starting at position 620 of SEQ ID NO: 588607
cuucgcggucaucuguaaa

SEQ ID NO: 876955 - RNA, 19 nt, Artificial Sequence
  Description of Artificial Sequence: Synthetic oligonucleotide
  Antisense strand to SEQ ID NO: 876954
uuuacagaugaccgcgaag

SEQ ID NO: 876956 - RNA, 19 nt, Artificial Sequence
  Description of Artificial Sequence: Synthetic oligonucleotide
  Sense strand starting at position 623 of SEQ ID NO: 588607
cgcggucaucuguaaaccu

SEQ ID NO: 876957 - RNA, 19 nt, Artificial Sequence
  Description of Artificial Sequence: Synthetic oligonucleotide
  Antisense strand to SEQ ID NO: 876956
agguuuacagaugaccgcg

SEQ ID NO: 876958 - RNA, 19 nt, Artificial Sequence
  Description of Artificial Sequence: Synthetic oligonucleotide
  Sense strand starting at position 695 of SEQ ID NO: 588607
gaaugaaucucugacuagu

SEQ ID NO: 876959 - RNA, 19 nt, Artificial Sequence
  Description of Artificial Sequence: Synthetic oligonucleotide
  Antisense strand to SEQ ID NO: 876958
acuagucagagauucauuc

SEQ ID NO: 876960 - RNA, 19 nt, Artificial Sequence
  Description of Artificial Sequence: Synthetic oligonucleotide
  Sense strand starting at position 773 of SEQ ID NO: 588607
gcaucccuguggucacaga

SEQ ID NO: 876961 - RNA, 19 nt, Artificial Sequence
  Description of Artificial Sequence: Synthetic oligonucleotide
  Antisense strand to SEQ ID NO: 876960
ucugugaccacagggaugc

SEQ ID NO: 876962 - RNA, 19 nt, Artificial Sequence
  Description of Artificial Sequence: Synthetic oligonucleotide
  Sense strand starting at position 942 of SEQ ID NO: 588607
cuguaaacaucuugucucu

SEQ ID NO: 876963 - RNA, 19 nt, Artificial Sequence
  Description of Artificial Sequence: Synthetic oligonucleotide
  Antisense strand to SEQ ID NO: 876962
agagacaagauguuuacag

SEQ ID NO: 876964 - RNA, 19 nt, Artificial Sequence
  Description of Artificial Sequence: Synthetic oligonucleotide
  Sense strand starting at position 944 of SEQ ID NO: 588607
guaaacaucuugucucuca

SEQ ID NO: 876965 - RNA, 19 nt, Artificial Sequence
  Description of Artificial Sequence: Synthetic oligonucleotide
  Antisense strand to SEQ ID NO: 876964
ugagagacaagauguuuac

SEQ ID NO: 876966 - RNA, 19 nt, Artificial Sequence
  Description of Artificial Sequence: Synthetic oligonucleotide
  Sense strand starting at position 984 of SEQ ID NO: 588607
uuggcuucugcccagaaga

SEQ ID NO: 876967 - RNA, 19 nt, Artificial Sequence
  Description of Artificial Sequence: Synthetic oligonucleotide
  Antisense strand to SEQ ID NO: 876966
ucuucugggcagaagccaa

SEQ ID NO: 876968 - RNA, 19 nt, Artificial Sequence
  Description of Artificial Sequence: Synthetic oligonucleotide
  Sense strand starting at position 986 of SEQ ID NO: 588607
ggcuucugcccagaagauu

SEQ ID NO: 876969 - RNA, 19 nt, Artificial Sequence
  Description of Artificial Sequence: Synthetic oligonucleotide
  Antisense strand to SEQ ID NO: 876968
aaucuucugggcagaagcc

SEQ ID NO: 876970 - RNA, 19 nt, Artificial Sequence
  Description of Artificial Sequence: Synthetic oligonucleotide
  Sense strand starting at position 995 of SEQ ID NO: 588607
ccagaagauucuugacucu

SEQ ID NO: 876971 - RNA, 19 nt, Artificial Sequence
  Description of Artificial Sequence: Synthetic oligonucleotide
  Antisense strand to SEQ ID NO: 876970
agagucaagaaucuucugg

SEQ ID NO: 876972 - RNA, 19 nt, Artificial Sequence
  Description of Artificial Sequence: Synthetic oligonucleotide
  Sense strand starting at position 1180 of SEQ ID NO: 588607
aguuaaaugacuugucgag

SEQ ID NO: 876973 - RNA, 19 nt, Artificial Sequence
  Description of Artificial Sequence: Synthetic oligonucleotide
  Antisense strand to SEQ ID NO: 876972
cucgacaagucauuuaacu

SEQ ID NO: 876974 - RNA, 19 nt, Artificial Sequence
  Description of Artificial Sequence: Synthetic oligonucleotide
  Sense strand starting at position 1182 of SEQ ID NO: 588607
uuaaaugacuugucgagcu

SEQ ID NO: 876975 - RNA, 19 nt, Artificial Sequence
  Description of Artificial Sequence: Synthetic oligonucleotide
  Antisense strand to SEQ ID NO: 876974
agcucgacaagucauuuaa

SEQ ID NO: 876976 - RNA, 19 nt, Artificial Sequence
  Description of Artificial Sequence: Synthetic oligonucleotide
  Sense strand starting at position 1184 of SEQ ID NO: 588607
aaaugacuugucgagcuca

SEQ ID NO: 876977 - RNA, 19 nt, Artificial Sequence
  Description of Artificial Sequence: Synthetic oligonucleotide
  Antisense strand to SEQ ID NO: 876976
ugagcucgacaagucauuu

SEQ ID NO: 876978 - RNA, 19 nt, Artificial Sequence
  Description of Artificial Sequence: Synthetic oligonucleotide
  Sense strand starting at position 1282 of SEQ ID NO: 588607
aggugauccuuggugacca

SEQ ID NO: 876979 - RNA, 19 nt, Artificial Sequence
  Description of Artificial Sequence: Synthetic oligonucleotide
  Antisense strand to SEQ ID NO: 876978
uggucaccaaggaucaccu

SEQ ID NO: 876980 - RNA, 19 nt, Artificial Sequence
  Description of Artificial Sequence: Synthetic oligonucleotide
  Sense strand starting at position 1286 of SEQ ID NO: 588607
gauccuuggugaccacaau

SEQ ID NO: 876981 - RNA, 19 nt, Artificial Sequence
  Description of Artificial Sequence: Synthetic oligonucleotide
  Antisense strand to SEQ ID NO: 876980
auuguggucaccaaggauc

SEQ ID NO: 876982 - RNA, 19 nt, Artificial Sequence
  Description of Artificial Sequence: Synthetic oligonucleotide
  Sense strand starting at position 1321 of SEQ ID NO: 588607
gcggucucacucuaggagu

SEQ ID NO: 876983 - RNA, 19 nt, Artificial Sequence
  Description of Artificial Sequence: Synthetic oligonucleotide
  Antisense strand to SEQ ID NO: 876982
acuccuagagugagaccgc

SEQ ID NO: 876984 - RNA, 19 nt, Artificial Sequence
  Description of Artificial Sequence: Synthetic oligonucleotide
  Sense strand starting at position 1387 of SEQ ID NO: 588607
gggaaaugaucuugcucuc

SEQ ID NO: 876985 - RNA, 19 nt, Artificial Sequence
  Description of Artificial Sequence: Synthetic oligonucleotide
  Antisense strand to SEQ ID NO: 876984
gagagcaagaucauuuccc

SEQ ID NO: 876986 - RNA, 19 nt, Artificial Sequence
  Description of Artificial Sequence: Synthetic oligonucleotide
  Sense strand starting at position 1581 of SEQ ID NO: 588607
uggaaauguccuugagggu

SEQ ID NO: 876987 - RNA, 19 nt, Artificial Sequence
  Description of Artificial Sequence: Synthetic oligonucleotide
  Antisense strand to SEQ ID NO: 876986
acccucaaggacauuucca

SEQ ID NO: 876988 - RNA, 19 nt, Artificial Sequence
  Description of Artificial Sequence: Synthetic oligonucleotide
  Sense strand starting at position 1584 of SEQ ID NO: 588607
aaauguccuugaggguaga

SEQ ID NO: 876989 - RNA, 19 nt, Artificial Sequence
  Description of Artificial Sequence: Synthetic oligonucleotide
  Antisense strand to SEQ ID NO: 876988
ucuacccucaaggacauuu

SEQ ID NO: 876990 - RNA, 19 nt, Artificial Sequence
  Description of Artificial Sequence: Synthetic oligonucleotide
  Sense strand starting at position 1656 of SEQ ID NO: 588607
acugguugcugacucagua

SEQ ID NO: 876991 - RNA, 19 nt, Artificial Sequence
  Description of Artificial Sequence: Synthetic oligonucleotide
  Antisense strand to SEQ ID NO: 876990
uacugagucagcaaccagu

SEQ ID NO: 876992 - RNA, 19 nt, Artificial Sequence
  Description of Artificial Sequence: Synthetic oligonucleotide
  Sense strand starting at position 1660 of SEQ ID NO: 588607
guugcugacucaguacaga

SEQ ID NO: 876993 - RNA, 19 nt, Artificial Sequence
  Description of Artificial Sequence: Synthetic oligonucleotide
  Antisense strand to SEQ ID NO: 876992
ucuguacugagucagcaac

SEQ ID NO: 876994 - RNA, 19 nt, Artificial Sequence
  Description of Artificial Sequence: Synthetic oligonucleotide
  Sense strand starting at position 1855 of SEQ ID NO: 588607
gggcuucgguguuuguaaa

SEQ ID NO: 876995 - RNA, 19 nt, Artificial Sequence
  Description of Artificial Sequence: Synthetic oligonucleotide
  Antisense strand to SEQ ID NO: 876994
uuuacaaacaccgaagccc

SEQ ID NO: 876996 - RNA, 19 nt, Artificial Sequence
  Description of Artificial Sequence: Synthetic oligonucleotide
  Sense strand starting at position 2027 of SEQ ID NO: 588607
uucugcuucccuggaaacu

SEQ ID NO: 876997 - RNA, 19 nt, Artificial Sequence
  Description of Artificial Sequence: Synthetic oligonucleotide
  Antisense strand to SEQ ID NO: 876996
aguuuccagggaagcagaa

SEQ ID NO: 876998 - RNA, 19 nt, Artificial Sequence
  Description of Artificial Sequence: Synthetic oligonucleotide
  Sense strand starting at position 2578 of SEQ ID NO: 588607
gugaauggaacuugucaca

SEQ ID NO: 876999 - RNA, 19 nt, Artificial Sequence
  Description of Artificial Sequence: Synthetic oligonucleotide
  Antisense strand to SEQ ID NO: 876998
ugugacaaguuccauucac

SEQ ID NO: 877000 - RNA, 19 nt, Artificial Sequence
  Description of Artificial Sequence: Synthetic oligonucleotide
  Sense strand starting at position 2648 of SEQ ID NO: 588607
acccgauuagaccagugua

SEQ ID NO: 877001 - RNA, 19 nt, Artificial Sequence
  Description of Artificial Sequence: Synthetic oligonucleotide
  Antisense strand to SEQ ID NO: 877000
uacacuggucuaaucgggu

SEQ ID NO: 877002 - RNA, 19 nt, Artificial Sequence
  Description of Artificial Sequence: Synthetic oligonucleotide
  Sense strand starting at position 2678 of SEQ ID NO: 588607
ggacaaggguccuuuccuu

SEQ ID NO: 877003 - RNA, 19 nt, Artificial Sequence
  Description of Artificial Sequence: Synthetic oligonucleotide
  Antisense strand to SEQ ID NO: 877002
aaggaaaggacccuugucc

SEQ ID NO: 877004 - RNA, 19 nt, Artificial Sequence
  Description of Artificial Sequence: Synthetic oligonucleotide
  Sense strand starting at position 2754 of SEQ ID NO: 588607
gcauaacuguucuugcugu

SEQ ID NO: 877005 - RNA, 19 nt, Artificial Sequence
  Description of Artificial Sequence: Synthetic oligonucleotide
  Antisense strand to SEQ ID NO: 877004
acagcaagaacaguuaugc

SEQ ID NO: 877006 - RNA, 19 nt, Artificial Sequence
  Description of Artificial Sequence: Synthetic oligonucleotide
  Sense strand starting at position 2761 of SEQ ID NO: 588607
uguucuugcuguuuguuua

SEQ ID NO: 877007 - RNA, 19 nt, Artificial Sequence
  Description of Artificial Sequence: Synthetic oligonucleotide
  Antisense strand to SEQ ID NO: 877006
uaaacaaacagcaagaaca

SEQ ID NO: 877008 - RNA, 19 nt, Artificial Sequence
  Description of Artificial Sequence: Synthetic oligonucleotide
  Sense strand starting at position 2762 of SEQ ID NO: 588607
guucuugcuguuuguuuau

SEQ ID NO: 877009 - RNA, 19 nt, Artificial Sequence
  Description of Artificial Sequence: Synthetic oligonucleotide
  Antisense strand to SEQ ID NO: 877008
auaaacaaacagcaagaac

SEQ ID NO: 877010 - RNA, 19 nt, Artificial Sequence
  Description of Artificial Sequence: Synthetic oligonucleotide
  Sense strand starting at position 2765 of SEQ ID NO: 588607
cuugcuguuuguuuauuua

SEQ ID NO: 877011 - RNA, 19 nt, Artificial Sequence
  Description of Artificial Sequence: Synthetic oligonucleotide
  Antisense strand to SEQ ID NO: 877010
uaaauaaacaaacagcaag

SEQ ID NO: 877012 - RNA, 19 nt, Artificial Sequence
  Description of Artificial Sequence: Synthetic oligonucleotide
  Sense strand starting at position 3139 of SEQ ID NO: 588607
cuugguugcccaugagaug

SEQ ID NO: 877013 - RNA, 19 nt, Artificial Sequence
  Description of Artificial Sequence: Synthetic oligonucleotide
  Antisense strand to SEQ ID NO: 877012
caucucaugggcaaccaag

SEQ ID NO: 877014 - RNA, 19 nt, Artificial Sequence
  Description of Artificial Sequence: Synthetic oligonucleotide
  Sense strand starting at position 3170 of SEQ ID NO: 588607
ggcggcaguccugguucaa

SEQ ID NO: 877015 - RNA, 19 nt, Artificial Sequence
  Description of Artificial Sequence: Synthetic oligonucleotide
  Antisense strand to SEQ ID NO: 877014
uugaaccaggacugccgcc

SEQ ID NO: 877016 - RNA, 19 nt, Artificial Sequence
  Description of Artificial Sequence: Synthetic oligonucleotide
  Sense strand starting at position 3210 of SEQ ID NO: 588607
aguugugugcaccugcauu

SEQ ID NO: 877017 - RNA, 19 nt, Artificial Sequence
  Description of Artificial Sequence: Synthetic oligonucleotide
  Antisense strand to SEQ ID NO: 877016
aaugcaggugcacacaacu

SEQ ID NO: 877018 - RNA, 19 nt, Artificial Sequence
  Description of Artificial Sequence: Synthetic oligonucleotide
  Sense strand starting at position 3222 of SEQ ID NO: 588607
cugcauucucacggguaaa

SEQ ID NO: 877019 - RNA, 19 nt, Artificial Sequence
  Description of Artificial Sequence: Synthetic oligonucleotide
  Antisense strand to SEQ ID NO: 877018
uuuacccgugagaaugcag

SEQ ID NO: 877020 - RNA, 19 nt, Artificial Sequence
  Description of Artificial Sequence: Synthetic oligonucleotide
  Sense strand starting at position 3287 of SEQ ID NO: 588607
augacauugcacgaguuga

SEQ ID NO: 877021 - RNA, 19 nt, Artificial Sequence
  Description of Artificial Sequence: Synthetic oligonucleotide
  Antisense strand to SEQ ID NO: 877020
ucaacucgugcaaugucau

SEQ ID NO: 877022 - RNA, 19 nt, Artificial Sequence
  Description of Artificial Sequence: Synthetic oligonucleotide
  Sense strand starting at position 3360 of SEQ ID NO: 588607
auuugauuguuauugcauc

SEQ ID NO: 877023 - RNA, 19 nt, Artificial Sequence
  Description of Artificial Sequence: Synthetic oligonucleotide
  Antisense strand to SEQ ID NO: 877022
gaugcaauaacaaucaaau

SEQ ID NO: 877024 - RNA, 19 nt, Artificial Sequence
  Description of Artificial Sequence: Synthetic oligonucleotide
  Sense strand starting at position 3737 of SEQ ID NO: 588607
cccagucugugagaggaau

SEQ ID NO: 877025 - RNA, 19 nt, Artificial Sequence
  Description of Artificial Sequence: Synthetic oligonucleotide
  Antisense strand to SEQ ID NO: 877024
auuccucucacagacuggg

SEQ ID NO: 877026 - RNA, 19 nt, Artificial Sequence
  Description of Artificial Sequence: Synthetic oligonucleotide
  Sense strand starting at position 63 of SEQ ID NO: 588608
guggcaucuacacagguuu

SEQ ID NO: 877027 - RNA, 19 nt, Artificial Sequence
  Description of Artificial Sequence: Synthetic oligonucleotide
  Antisense strand to SEQ ID NO: 877026
aaaccuguguagaugccac

SEQ ID NO: 877028 - RNA, 19 nt, Artificial Sequence
  Description of Artificial Sequence: Synthetic oligonucleotide
  Sense strand starting at position 75 of SEQ ID NO: 588608
cagguuucucccugaaggu

SEQ ID NO: 877029 - RNA, 19 nt, Artificial Sequence
  Description of Artificial Sequence: Synthetic oligonucleotide
  Antisense strand to SEQ ID NO: 877028
accuucagggagaaaccug

SEQ ID NO: 877030 - RNA, 19 nt, Artificial Sequence
  Description of Artificial Sequence: Synthetic oligonucleotide
  Sense strand starting at position 164 of SEQ ID NO: 588608
gacugaccuucgcggucau

SEQ ID NO: 877031 - RNA, 19 nt, Artificial Sequence
  Description of Artificial Sequence: Synthetic oligonucleotide
  Antisense strand to SEQ ID NO: 877030
augaccgcgaaggucaguc

SEQ ID NO: 877032 - RNA, 19 nt, Artificial Sequence
  Description of Artificial Sequence: Synthetic oligonucleotide
  Sense strand starting at position 171 of SEQ ID NO: 588608
cuucgcggucaucuguaaa

SEQ ID NO: 877033 - RNA, 19 nt, Artificial Sequence
  Description of Artificial Sequence: Synthetic oligonucleotide
  Antisense strand to SEQ ID NO: 877032
uuuacagaugaccgcgaag

SEQ ID NO: 877034 - RNA, 19 nt, Artificial Sequence
  Description of Artificial Sequence: Synthetic oligonucleotide
  Sense strand starting at position 174 of SEQ ID NO: 588608
cgcggucaucuguaaaccu

SEQ ID NO: 877035 - RNA, 19 nt, Artificial Sequence
  Description of Artificial Sequence: Synthetic oligonucleotide
  Antisense strand to SEQ ID NO: 877034
agguuuacagaugaccgcg

SEQ ID NO: 877036 - RNA, 19 nt, Artificial Sequence
  Description of Artificial Sequence: Synthetic oligonucleotide
  Sense strand starting at position 246 of SEQ ID NO: 588608
gaaugaaucucugacuagu

SEQ ID NO: 877037 - RNA, 19 nt, Artificial Sequence
  Description of Artificial Sequence: Synthetic oligonucleotide
  Antisense strand to SEQ ID NO: 877036
acuagucagagauucauuc

SEQ ID NO: 877038 - RNA, 19 nt, Artificial Sequence
  Description of Artificial Sequence: Synthetic oligonucleotide
  Sense strand starting at position 324 of SEQ ID NO: 588608
gcaucccuguggucacaga

SEQ ID NO: 877039 - RNA, 19 nt, Artificial Sequence
  Description of Artificial Sequence: Synthetic oligonucleotide
  Antisense strand to SEQ ID NO: 877038
ucugugaccacagggaugc

SEQ ID NO: 877040 - RNA, 19 nt, Artificial Sequence
  Description of Artificial Sequence: Synthetic oligonucleotide
  Sense strand starting at position 493 of SEQ ID NO: 588608
cuguaaacaucuugucucu

SEQ ID NO: 877041 - RNA, 19 nt, Artificial Sequence
  Description of Artificial Sequence: Synthetic oligonucleotide
  Antisense strand to SEQ ID NO: 877040
agagacaagauguuuacag

SEQ ID NO: 877042 - RNA, 19 nt, Artificial Sequence
  Description of Artificial Sequence: Synthetic oligonucleotide
  Sense strand starting at position 495 of SEQ ID NO: 588608
guaaacaucuugucucuca

SEQ ID NO: 877043 - RNA, 19 nt, Artificial Sequence
  Description of Artificial Sequence: Synthetic oligonucleotide
  Antisense strand to SEQ ID NO: 877042
ugagagacaagauguuuac

SEQ ID NO: 877044 - RNA, 19 nt, Artificial Sequence
  Description of Artificial Sequence: Synthetic oligonucleotide
  Sense strand starting at position 535 of SEQ ID NO: 588608
uuggcuucugcccagaaga

SEQ ID NO: 877045 - RNA, 19 nt, Artificial Sequence
  Description of Artificial Sequence: Synthetic oligonucleotide
  Antisense strand to SEQ ID NO: 877044
ucuucugggcagaagccaa

SEQ ID NO: 877046 - RNA, 19 nt, Artificial Sequence
  Description of Artificial Sequence: Synthetic oligonucleotide
  Sense strand starting at position 537 of SEQ ID NO: 588608
ggcuucugcccagaagauu

SEQ ID NO: 877047 - RNA, 19 nt, Artificial Sequence
  Description of Artificial Sequence: Synthetic oligonucleotide
  Antisense strand to SEQ ID NO: 877046
aaucuucugggcagaagcc

SEQ ID NO: 877048 - RNA, 19 nt, Artificial Sequence
  Description of Artificial Sequence: Synthetic oligonucleotide
  Sense strand starting at position 546 of SEQ ID NO: 588608
ccagaagauucuugacucu

SEQ ID NO: 877049 - RNA, 19 nt, Artificial Sequence
  Description of Artificial Sequence: Synthetic oligonucleotide
  Antisense strand to SEQ ID NO: 877048
agagucaagaaucuucugg

SEQ ID NO: 877050 - RNA, 19 nt, Artificial Sequence
  Description of Artificial Sequence: Synthetic oligonucleotide
  Sense strand starting at position 731 of SEQ ID NO: 588608
aguuaaaugacuugucgag

SEQ ID NO: 877051 - RNA, 19 nt, Artificial Sequence
  Description of Artificial Sequence: Synthetic oligonucleotide
  Antisense strand to SEQ ID NO: 877050
cucgacaagucauuuaacu

SEQ ID NO: 877052 - RNA, 19 nt, Artificial Sequence
  Description of Artificial Sequence: Synthetic oligonucleotide
  Sense strand starting at position 733 of SEQ ID NO: 588608
uuaaaugacuugucgagcu

SEQ ID NO: 877053 - RNA, 19 nt, Artificial Sequence
  Description of Artificial Sequence: Synthetic oligonucleotide
  Antisense strand to SEQ ID NO: 877052
agcucgacaagucauuuaa

SEQ ID NO: 877054 - RNA, 19 nt, Artificial Sequence
  Description of Artificial Sequence: Synthetic oligonucleotide
  Sense strand starting at position 735 of SEQ ID NO: 588608
aaaugacuugucgagcuca

SEQ ID NO: 877055 - RNA, 19 nt, Artificial Sequence
  Description of Artificial Sequence: Synthetic oligonucleotide
  Antisense strand to SEQ ID NO: 877054
ugagcucgacaagucauuu

SEQ ID NO: 877056 - RNA, 19 nt, Artificial Sequence
  Description of Artificial Sequence: Synthetic oligonucleotide
  Sense strand starting at position 833 of SEQ ID NO: 588608
aggugauccuuggugacca

SEQ ID NO: 877057 - RNA, 19 nt, Artificial Sequence
  Description of Artificial Sequence: Synthetic oligonucleotide
  Antisense strand to SEQ ID NO: 877056
uggucaccaaggaucaccu

SEQ ID NO: 877058 - RNA, 19 nt, Artificial Sequence
  Description of Artificial Sequence: Synthetic oligonucleotide
  Sense strand starting at position 837 of SEQ ID NO: 588608
gauccuuggugaccacaau

SEQ ID NO: 877059 - RNA, 19 nt, Artificial Sequence
  Description of Artificial Sequence: Synthetic oligonucleotide
  Antisense strand to SEQ ID NO: 877058
auuguggucaccaaggauc

SEQ ID NO: 877060 - RNA, 19 nt, Artificial Sequence
  Description of Artificial Sequence: Synthetic oligonucleotide
  Sense strand starting at position 872 of SEQ ID NO: 588608
gcggucucacucuaggagu

SEQ ID NO: 877061 - RNA, 19 nt, Artificial Sequence
  Description of Artificial Sequence: Synthetic oligonucleotide
  Antisense strand to SEQ ID NO: 877060
acuccuagagugagaccgc

SEQ ID NO: 877062 - RNA, 19 nt, Artificial Sequence
  Description of Artificial Sequence: Synthetic oligonucleotide
  Sense strand starting at position 938 of SEQ ID NO: 588608
gggaaaugaucuugcucuc

SEQ ID NO: 877063 - RNA, 19 nt, Artificial Sequence
  Description of Artificial Sequence: Synthetic oligonucleotide
  Antisense strand to SEQ ID NO: 877062
gagagcaagaucauuuccc

SEQ ID NO: 877064 - RNA, 19 nt, Artificial Sequence
  Description of Artificial Sequence: Synthetic oligonucleotide
  Sense strand starting at position 1132 of SEQ ID NO: 588608
uggaaauguccuugagggu

SEQ ID NO: 877065 - RNA, 19 nt, Artificial Sequence
  Description of Artificial Sequence: Synthetic oligonucleotide
  Antisense strand to SEQ ID NO: 877064
acccucaaggacauuucca

SEQ ID NO: 877066 - RNA, 19 nt, Artificial Sequence
  Description of Artificial Sequence: Synthetic oligonucleotide
  Sense strand starting at position 1135 of SEQ ID NO: 588608
aaauguccuugaggguaga

SEQ ID NO: 877067 - RNA, 19 nt, Artificial Sequence
  Description of Artificial Sequence: Synthetic oligonucleotide
  Antisense strand to SEQ ID NO: 877066
ucuacccucaaggacauuu

SEQ ID NO: 877068 - RNA, 19 nt, Artificial Sequence
  Description of Artificial Sequence: Synthetic oligonucleotide
  Sense strand starting at position 1207 of SEQ ID NO: 588608
acugguugcugacucagua

SEQ ID NO: 877069 - RNA, 19 nt, Artificial Sequence
  Description of Artificial Sequence: Synthetic oligonucleotide
  Antisense strand to SEQ ID NO: 877068
uacugagucagcaaccagu

SEQ ID NO: 877070 - RNA, 19 nt, Artificial Sequence
  Description of Artificial Sequence: Synthetic oligonucleotide
  Sense strand starting at position 1211 of SEQ ID NO: 588608
guugcugacucaguacaga

SEQ ID NO: 877071 - RNA, 19 nt, Artificial Sequence
  Description of Artificial Sequence: Synthetic oligonucleotide
  Antisense strand to SEQ ID NO: 877070
ucuguacugagucagcaac

SEQ ID NO: 877072 - RNA, 19 nt, Artificial Sequence
  Description of Artificial Sequence: Synthetic oligonucleotide
  Sense strand starting at position 1406 of SEQ ID NO: 588608
gggcuucgguguuuguaaa

SEQ ID NO: 877073 - RNA, 19 nt, Artificial Sequence
  Description of Artificial Sequence: Synthetic oligonucleotide
  Antisense strand to SEQ ID NO: 877072
uuuacaaacaccgaagccc

SEQ ID NO: 877074 - RNA, 19 nt, Artificial Sequence
  Description of Artificial Sequence: Synthetic oligonucleotide
  Sense strand starting at position 1578 of SEQ ID NO: 588608
uucugcuucccuggaaacu

SEQ ID NO: 877075 - RNA, 19 nt, Artificial Sequence
  Description of Artificial Sequence: Synthetic oligonucleotide
  Antisense strand to SEQ ID NO: 877074
aguuuccagggaagcagaa

SEQ ID NO: 877076 - RNA, 19 nt, Artificial Sequence
  Description of Artificial Sequence: Synthetic oligonucleotide
  Sense strand starting at position 2129 of SEQ ID NO: 588608
gugaauggaacuugucaca

SEQ ID NO: 877077 - RNA, 19 nt, Artificial Sequence
  Description of Artificial Sequence: Synthetic oligonucleotide
  Antisense strand to SEQ ID NO: 877076
ugugacaaguuccauucac

SEQ ID NO: 877078 - RNA, 19 nt, Artificial Sequence
  Description of Artificial Sequence: Synthetic oligonucleotide
  Sense strand starting at position 2199 of SEQ ID NO: 588608
acccgauuagaccagugua

SEQ ID NO: 877079 - RNA, 19 nt, Artificial Sequence
  Description of Artificial Sequence: Synthetic oligonucleotide
  Antisense strand to SEQ ID NO: 877078
uacacuggucuaaucgggu

SEQ ID NO: 877080 - RNA, 19 nt, Artificial Sequence
  Description of Artificial Sequence: Synthetic oligonucleotide
  Sense strand starting at position 2229 of SEQ ID NO: 588608
ggacaaggguccuuuccuu

SEQ ID NO: 877081 - RNA, 19 nt, Artificial Sequence
  Description of Artificial Sequence: Synthetic oligonucleotide
  Antisense strand to SEQ ID NO: 877080
aaggaaaggacccuugucc

SEQ ID NO: 877082 - RNA, 19 nt, Artificial Sequence
  Description of Artificial Sequence: Synthetic oligonucleotide
  Sense strand starting at position 2305 of SEQ ID NO: 588608
gcauaacuguucuugcugu

SEQ ID NO: 877083 - RNA, 19 nt, Artificial Sequence
  Description of Artificial Sequence: Synthetic oligonucleotide
  Antisense strand to SEQ ID NO: 877082
acagcaagaacaguuaugc

SEQ ID NO: 877084 - RNA, 19 nt, Artificial Sequence
  Description of Artificial Sequence: Synthetic oligonucleotide
  Sense strand starting at position 2312 of SEQ ID NO: 588608
uguucuugcuguuuguuua

SEQ ID NO: 877085 - RNA, 19 nt, Artificial Sequence
  Description of Artificial Sequence: Synthetic oligonucleotide
  Antisense strand to SEQ ID NO: 877084
uaaacaaacagcaagaaca

SEQ ID NO: 877086 - RNA, 19 nt, Artificial Sequence
  Description of Artificial Sequence: Synthetic oligonucleotide
  Sense strand starting at position 2313 of SEQ ID NO: 588608
guucuugcuguuuguuuau

SEQ ID NO: 877087 - RNA, 19 nt, Artificial Sequence
  Description of Artificial Sequence: Synthetic oligonucleotide
  Antisense strand to SEQ ID NO: 877086
auaaacaaacagcaagaac

SEQ ID NO: 877088 - RNA, 19 nt, Artificial Sequence
  Description of Artificial Sequence: Synthetic oligonucleotide
  Sense strand starting at position 2316 of SEQ ID NO: 588608
cuugcuguuuguuuauuua

SEQ ID NO: 877089 - RNA, 19 nt, Artificial Sequence
  Description of Artificial Sequence: Synthetic oligonucleotide
  Antisense strand to SEQ ID NO: 877088
uaaauaaacaaacagcaag

SEQ ID NO: 877090 - RNA, 19 nt, Artificial Sequence
  Description of Artificial Sequence: Synthetic oligonucleotide
  Sense strand starting at position 2690 of SEQ ID NO: 588608
cuugguugcccaugagaug

SEQ ID NO: 877091 - RNA, 19 nt, Artificial Sequence
  Description of Artificial Sequence: Synthetic oligonucleotide
  Antisense strand to SEQ ID NO: 877090
caucucaugggcaaccaag

SEQ ID NO: 877092 - RNA, 19 nt, Artificial Sequence
  Description of Artificial Sequence: Synthetic oligonucleotide
  Sense strand starting at position 2721 of SEQ ID NO: 588608
ggcggcaguccugguucaa

SEQ ID NO: 877093 - RNA, 19 nt, Artificial Sequence
  Description of Artificial Sequence: Synthetic oligonucleotide
  Antisense strand to SEQ ID NO: 877092
uugaaccaggacugccgcc

SEQ ID NO: 877094 - RNA, 19 nt, Artificial Sequence
  Description of Artificial Sequence: Synthetic oligonucleotide
  Sense strand starting at position 2761 of SEQ ID NO: 588608
aguugugugcaccugcauu

SEQ ID NO: 877095 - RNA, 19 nt, Artificial Sequence
  Description of Artificial Sequence: Synthetic oligonucleotide
  Antisense strand to SEQ ID NO: 877094
aaugcaggugcacacaacu

SEQ ID NO: 877096 - RNA, 19 nt, Artificial Sequence
  Description of Artificial Sequence: Synthetic oligonucleotide
  Sense strand starting at position 2772 of SEQ ID NO: 588608
ccugcauucucacggguaa

SEQ ID NO: 877097 - RNA, 19 nt, Artificial Sequence
  Description of Artificial Sequence: Synthetic oligonucleotide
  Antisense strand to SEQ ID NO: 877096
uuacccgugagaaugcagg

SEQ ID NO: 877098 - RNA, 19 nt, Artificial Sequence
  Description of Artificial Sequence: Synthetic oligonucleotide
  Sense strand starting at position 2773 of SEQ ID NO: 588608
cugcauucucacggguaaa

SEQ ID NO: 877099 - RNA, 19 nt, Artificial Sequence
  Description of Artificial Sequence: Synthetic oligonucleotide
  Antisense strand to SEQ ID NO: 877098
uuuacccgugagaaugcag

SEQ ID NO: 877100 - RNA, 19 nt, Artificial Sequence
  Description of Artificial Sequence: Synthetic oligonucleotide
  Sense strand starting at position 2838 of SEQ ID NO: 588608
augacauugcacgaguuga

SEQ ID NO: 877101 - RNA, 19 nt, Artificial Sequence
  Description of Artificial Sequence: Synthetic oligonucleotide
  Antisense strand to SEQ ID NO: 877100
ucaacucgugcaaugucau

SEQ ID NO: 877102 - RNA, 19 nt, Artificial Sequence
  Description of Artificial Sequence: Synthetic oligonucleotide
  Sense strand starting at position 2911 of SEQ ID NO: 588608
auuugauuguuauugcauc

SEQ ID NO: 877103 - RNA, 19 nt, Artificial Sequence
  Description of Artificial Sequence: Synthetic oligonucleotide
  Antisense strand to SEQ ID NO: 877102
gaugcaauaacaaucaaau

SEQ ID NO: 877104 - RNA, 19 nt, Artificial Sequence
  Description of Artificial Sequence: Synthetic oligonucleotide
  Sense strand starting at position 3288 of SEQ ID NO: 588608
cccagucugugagaggaau

SEQ ID NO: 877105 - RNA, 19 nt, Artificial Sequence
  Description of Artificial Sequence: Synthetic oligonucleotide
  Antisense strand to SEQ ID NO: 877104
auuccucucacagacuggg

SEQ ID NO: 877106 - RNA, 19 nt, Artificial Sequence
  Description of Artificial Sequence: Synthetic oligonucleotide
  Sense strand starting at position 139 of SEQ ID NO: 588609
gcagaaccacccgaucauu

SEQ ID NO: 877107 - RNA, 19 nt, Artificial Sequence
  Description of Artificial Sequence: Synthetic oligonucleotide
  Antisense strand to SEQ ID NO: 877106
aaugaucgggugguucugc

SEQ ID NO: 877108 - RNA, 19 nt, Artificial Sequence
  Description of Artificial Sequence: Synthetic oligonucleotide
  Sense strand starting at position 685 of SEQ ID NO: 588609
cccuaacuccagugcuaag

SEQ ID NO: 877109 - RNA, 19 nt, Artificial Sequence
  Description of Artificial Sequence: Synthetic oligonucleotide
  Antisense strand to SEQ ID NO: 877108
cuuagcacuggaguuaggg

SEQ ID NO: 877110 - RNA, 19 nt, Artificial Sequence
  Description of Artificial Sequence: Synthetic oligonucleotide
  Sense strand starting at position 720 of SEQ ID NO: 588609
gcucaugugggagaaguca

SEQ ID NO: 877111 - RNA, 19 nt, Artificial Sequence
  Description of Artificial Sequence: Synthetic oligonucleotide
  Antisense strand to SEQ ID NO: 877110
ugacuucucccacaugagc

SEQ ID NO: 877112 - RNA, 19 nt, Artificial Sequence
  Description of Artificial Sequence: Synthetic oligonucleotide
  Sense strand starting at position 970 of SEQ ID NO: 588609
cuucuuguaccuggaacaa

SEQ ID NO: 877113 - RNA, 19 nt, Artificial Sequence
  Description of Artificial Sequence: Synthetic oligonucleotide
  Antisense strand to SEQ ID NO: 877112
uuguuccagguacaagaag

SEQ ID NO: 877114 - RNA, 19 nt, Artificial Sequence
  Description of Artificial Sequence: Synthetic oligonucleotide
  Sense strand starting at position 981 of SEQ ID NO: 588609
uggaacaacucacaggauu

SEQ ID NO: 877115 - RNA, 19 nt, Artificial Sequence
  Description of Artificial Sequence: Synthetic oligonucleotide
  Antisense strand to SEQ ID NO: 877114
aauccugugaguuguucca

SEQ ID NO: 877116 - RNA, 19 nt, Artificial Sequence
  Description of Artificial Sequence: Synthetic oligonucleotide
  Sense strand starting at position 1390 of SEQ ID NO: 588609
accauucucugucugagga

SEQ ID NO: 877117 - RNA, 19 nt, Artificial Sequence
  Description of Artificial Sequence: Synthetic oligonucleotide
  Antisense strand to SEQ ID NO: 877116
uccucagacagagaauggu

SEQ ID NO: 877118 - RNA, 19 nt, Artificial Sequence
  Description of Artificial Sequence: Synthetic oligonucleotide
  Sense strand starting at position 1391 of SEQ ID NO: 588609
ccauucucugucugaggaa

SEQ ID NO: 877119 - RNA, 19 nt, Artificial Sequence
  Description of Artificial Sequence: Synthetic oligonucleotide
  Antisense strand to SEQ ID NO: 877118
uuccucagacagagaaugg

SEQ ID NO: 877120 - RNA, 19 nt, Artificial Sequence
  Description of Artificial Sequence: Synthetic oligonucleotide
  Sense strand starting at position 2144 of SEQ ID NO: 588609
cgggcuuucuggcagaaga

SEQ ID NO: 877121 - RNA, 19 nt, Artificial Sequence
  Description of Artificial Sequence: Synthetic oligonucleotide
  Antisense strand to SEQ ID NO: 877120
ucuucugccagaaagcccg

SEQ ID NO: 877122 - RNA, 19 nt, Artificial Sequence
  Description of Artificial Sequence: Synthetic oligonucleotide
  Sense strand starting at position 2220 of SEQ ID NO: 588609
cgucgcagccgagugaauu

SEQ ID NO: 877123 - RNA, 19 nt, Artificial Sequence
  Description of Artificial Sequence: Synthetic oligonucleotide
  Antisense strand to SEQ ID NO: 877122
aauucacucggcugcgacg

SEQ ID NO: 877124 - RNA, 19 nt, Artificial Sequence
  Description of Artificial Sequence: Synthetic oligonucleotide
  Sense strand starting at position 2221 of SEQ ID NO: 588609
gucgcagccgagugaauuu

SEQ ID NO: 877125 - RNA, 19 nt, Artificial Sequence
  Description of Artificial Sequence: Synthetic oligonucleotide
  Antisense strand to SEQ ID NO: 877124
aaauucacucggcugcgac

SEQ ID NO: 877126 - RNA, 19 nt, Artificial Sequence
  Description of Artificial Sequence: Synthetic oligonucleotide
  Sense strand starting at position 2230 of SEQ ID NO: 588609
gagugaauuucguguacau

SEQ ID NO: 877127 - RNA, 19 nt, Artificial Sequence
  Description of Artificial Sequence: Synthetic oligonucleotide
  Antisense strand to SEQ ID NO: 877126
auguacacgaaauucacuc

SEQ ID NO: 877128 - RNA, 19 nt, Artificial Sequence
  Description of Artificial Sequence: Synthetic oligonucleotide
  Sense strand starting at position 2375 of SEQ ID NO: 588609
guggguuccuccgcgugaa

SEQ ID NO: 877129 - RNA, 19 nt, Artificial Sequence
  Description of Artificial Sequence: Synthetic oligonucleotide
  Antisense strand to SEQ ID NO: 877128
uucacgcggaggaacccac

SEQ ID NO: 877130 - RNA, 19 nt, Artificial Sequence
  Description of Artificial Sequence: Synthetic oligonucleotide
  Sense strand starting at position 2376 of SEQ ID NO: 588609
uggguuccuccgcgugaaa

SEQ ID NO: 877131 - RNA, 19 nt, Artificial Sequence
  Description of Artificial Sequence: Synthetic oligonucleotide
  Antisense strand to SEQ ID NO: 877130
uuucacgcggaggaaccca

SEQ ID NO: 877132 - RNA, 19 nt, Artificial Sequence
  Description of Artificial Sequence: Synthetic oligonucleotide
  Sense strand starting at position 2691 of SEQ ID NO: 588609
ucggucuccgcugcugaaa

SEQ ID NO: 877133 - RNA, 19 nt, Artificial Sequence
  Description of Artificial Sequence: Synthetic oligonucleotide
  Antisense strand to SEQ ID NO: 877132
uuucagcagcggagaccga

SEQ ID NO: 877134 - RNA, 19 nt, Artificial Sequence
  Description of Artificial Sequence: Synthetic oligonucleotide
  Sense strand starting at position 2692 of SEQ ID NO: 588609
cggucuccgcugcugaaau

SEQ ID NO: 877135 - RNA, 19 nt, Artificial Sequence
  Description of Artificial Sequence: Synthetic oligonucleotide
  Antisense strand to SEQ ID NO: 877134
auuucagcagcggagaccg

SEQ ID NO: 877136 - RNA, 19 nt, Artificial Sequence
  Description of Artificial Sequence: Synthetic oligonucleotide
  Sense strand starting at position 2693 of SEQ ID NO: 588609
ggucuccgcugcugaaauu

SEQ ID NO: 877137 - RNA, 19 nt, Artificial Sequence
  Description of Artificial Sequence: Synthetic oligonucleotide
  Antisense strand to SEQ ID NO: 877136
aauuucagcagcggagacc

SEQ ID NO: 877138 - RNA, 19 nt, Artificial Sequence
  Description of Artificial Sequence: Synthetic oligonucleotide
  Sense strand starting at position 2818 of SEQ ID NO: 588609
aggagaucgcuccaucuuu

SEQ ID NO: 877139 - RNA, 19 nt, Artificial Sequence
  Description of Artificial Sequence: Synthetic oligonucleotide
  Antisense strand to SEQ ID NO: 877138
aaagauggagcgaucuccu

SEQ ID NO: 877140 - RNA, 19 nt, Artificial Sequence
  Description of Artificial Sequence: Synthetic oligonucleotide
  Sense strand starting at position 3063 of SEQ ID NO: 588609
caauccugagccugggauu

SEQ ID NO: 877141 - RNA, 19 nt, Artificial Sequence
  Description of Artificial Sequence: Synthetic oligonucleotide
  Antisense strand to SEQ ID NO: 877140
aaucccaggcucaggauug

SEQ ID NO: 877142 - RNA, 19 nt, Artificial Sequence
  Description of Artificial Sequence: Synthetic oligonucleotide
  Sense strand starting at position 3075 of SEQ ID NO: 588609
ugggauuccucucugagaa

SEQ ID NO: 877143 - RNA, 19 nt, Artificial Sequence
  Description of Artificial Sequence: Synthetic oligonucleotide
  Antisense strand to SEQ ID NO: 877142
uucucagagaggaauccca

SEQ ID NO: 877144 - RNA, 19 nt, Artificial Sequence
  Description of Artificial Sequence: Synthetic oligonucleotide
  Sense strand starting at position 3077 of SEQ ID NO: 588609
ggauuccucucugagaaag

SEQ ID NO: 877145 - RNA, 19 nt, Artificial Sequence
  Description of Artificial Sequence: Synthetic oligonucleotide
  Antisense strand to SEQ ID NO: 877144
cuuucucagagaggaaucc

SEQ ID NO: 877146 - RNA, 19 nt, Artificial Sequence
  Description of Artificial Sequence: Synthetic oligonucleotide
  Sense strand starting at position 10 of SEQ ID NO: 588610
uaaauuaaagugcguguuu

SEQ ID NO: 877147 - RNA, 19 nt, Artificial Sequence
  Description of Artificial Sequence: Synthetic oligonucleotide
  Antisense strand to SEQ ID NO: 877146
aaacacgcacuuuaauuua

SEQ ID NO: 877148 - RNA, 19 nt, Artificial Sequence
  Description of Artificial Sequence: Synthetic oligonucleotide
  Sense strand starting at position 11 of SEQ ID NO: 588610
aaauuaaagugcguguuua

SEQ ID NO: 877149 - RNA, 19 nt, Artificial Sequence
  Description of Artificial Sequence: Synthetic oligonucleotide
  Antisense strand to SEQ ID NO: 877148
uaaacacgcacuuuaauuu

SEQ ID NO: 877150 - RNA, 19 nt, Artificial Sequence
  Description of Artificial Sequence: Synthetic oligonucleotide
  Sense strand starting at position 12 of SEQ ID NO: 588610
aauuaaagugcguguuuac

SEQ ID NO: 877151 - RNA, 19 nt, Artificial Sequence
  Description of Artificial Sequence: Synthetic oligonucleotide
  Antisense strand to SEQ ID NO: 877150
guaaacacgcacuuuaauu

SEQ ID NO: 877152 - RNA, 19 nt, Artificial Sequence
  Description of Artificial Sequence: Synthetic oligonucleotide
  Sense strand starting at position 21 of SEQ ID NO: 588610
gcguguuuacuugcugaaa

SEQ ID NO: 877153 - RNA, 19 nt, Artificial Sequence
  Description of Artificial Sequence: Synthetic oligonucleotide
  Antisense strand to SEQ ID NO: 877152
uuucagcaaguaaacacgc

SEQ ID NO: 877154 - RNA, 19 nt, Artificial Sequence
  Description of Artificial Sequence: Synthetic oligonucleotide
  Sense strand starting at position 53 of SEQ ID NO: 588610
aguuaaucauacucagaug

SEQ ID NO: 877155 - RNA, 19 nt, Artificial Sequence
  Description of Artificial Sequence: Synthetic oligonucleotide
  Antisense strand to SEQ ID NO: 877154
caucugaguaugauuaacu

SEQ ID NO: 877156 - RNA, 19 nt, Artificial Sequence
  Description of Artificial Sequence: Synthetic oligonucleotide
  Sense strand starting at position 175 of SEQ ID NO: 588610
uuaugaaugccucaguccu

SEQ ID NO: 877157 - RNA, 19 nt, Artificial Sequence
  Description of Artificial Sequence: Synthetic oligonucleotide
  Antisense strand to SEQ ID NO: 877156
aggacugaggcauucauaa

SEQ ID NO: 877158 - RNA, 19 nt, Artificial Sequence
  Description of Artificial Sequence: Synthetic oligonucleotide
  Sense strand starting at position 207 of SEQ ID NO: 588610
ggcuucuaauugucauaca

SEQ ID NO: 877159 - RNA, 19 nt, Artificial Sequence
  Description of Artificial Sequence: Synthetic oligonucleotide
  Antisense strand to SEQ ID NO: 877158
uguaugacaauuagaagcc

SEQ ID NO: 877160 - RNA, 19 nt, Artificial Sequence
  Description of Artificial Sequence: Synthetic oligonucleotide
  Sense strand starting at position 258 of SEQ ID NO: 588610
augcaucaucgugauauua

SEQ ID NO: 877161 - RNA, 19 nt, Artificial Sequence
  Description of Artificial Sequence: Synthetic oligonucleotide
  Antisense strand to SEQ ID NO: 877160
uaauaucacgaugaugcau

SEQ ID NO: 877162 - RNA, 19 nt, Artificial Sequence
  Description of Artificial Sequence: Synthetic oligonucleotide
  Sense strand starting at position 309 of SEQ ID NO: 588610
ggcugacacuucuuuauau

SEQ ID NO: 877163 - RNA, 19 nt, Artificial Sequence
  Description of Artificial Sequence: Synthetic oligonucleotide
  Antisense strand to SEQ ID NO: 877162
auauaaagaagugucagcc

SEQ ID NO: 877164 - RNA, 19 nt, Artificial Sequence
  Description of Artificial Sequence: Synthetic oligonucleotide
  Sense strand starting at position 310 of SEQ ID NO: 588610
gcugacacuucuuuauaug

SEQ ID NO: 877165 - RNA, 19 nt, Artificial Sequence
  Description of Artificial Sequence: Synthetic oligonucleotide
  Antisense strand to SEQ ID NO: 877164
cauauaaagaagugucagc

SEQ ID NO: 877166 - RNA, 19 nt, Artificial Sequence
  Description of Artificial Sequence: Synthetic oligonucleotide
  Sense strand starting at position 376 of SEQ ID NO: 588610
ggugacacaucuuccgaaa

SEQ ID NO: 877167 - RNA, 19 nt, Artificial Sequence
  Description of Artificial Sequence: Synthetic oligonucleotide
  Antisense strand to SEQ ID NO: 877166
uuucggaagaugugucacc

SEQ ID NO: 877168 - RNA, 19 nt, Artificial Sequence
  Description of Artificial Sequence: Synthetic oligonucleotide
  Sense strand starting at position 448 of SEQ ID NO: 588610
acaguucugggcuaagaua

SEQ ID NO: 877169 - RNA, 19 nt, Artificial Sequence
  Description of Artificial Sequence: Synthetic oligonucleotide
  Antisense strand to SEQ ID NO: 877168
uaucuuagcccagaacugu

SEQ ID NO: 877170 - RNA, 19 nt, Artificial Sequence
  Description of Artificial Sequence: Synthetic oligonucleotide
  Sense strand starting at position 468 of SEQ ID NO: 588610
uuuaguuacuuugucaguu

SEQ ID NO: 877171 - RNA, 19 nt, Artificial Sequence
  Description of Artificial Sequence: Synthetic oligonucleotide
  Antisense strand to SEQ ID NO: 877170
aacugacaaaguaacuaaa

SEQ ID NO: 877172 - RNA, 19 nt, Artificial Sequence
  Description of Artificial Sequence: Synthetic oligonucleotide
  Sense strand starting at position 472 of SEQ ID NO: 588610
guuacuuugucaguuguua

SEQ ID NO: 877173 - RNA, 19 nt, Artificial Sequence
  Description of Artificial Sequence: Synthetic oligonucleotide
  Antisense strand to SEQ ID NO: 877172
uaacaacugacaaaguaac

SEQ ID NO: 877174 - RNA, 19 nt, Artificial Sequence
  Description of Artificial Sequence: Synthetic oligonucleotide
  Sense strand starting at position 484 of SEQ ID NO: 588610
guuguuaguucccugggca

SEQ ID NO: 877175 - RNA, 19 nt, Artificial Sequence
  Description of Artificial Sequence: Synthetic oligonucleotide
  Antisense strand to SEQ ID NO: 877174
ugcccagggaacuaacaac

SEQ ID NO: 877176 - RNA, 19 nt, Artificial Sequence
  Description of Artificial Sequence: Synthetic oligonucleotide
  Sense strand starting at position 564 of SEQ ID NO: 588610
ggcuuaaagugauacaaau

SEQ ID NO: 877177 - RNA, 19 nt, Artificial Sequence
  Description of Artificial Sequence: Synthetic oligonucleotide
  Antisense strand to SEQ ID NO: 877176
auuuguaucacuuuaagcc

SEQ ID NO: 877178 - RNA, 19 nt, Artificial Sequence
  Description of Artificial Sequence: Synthetic oligonucleotide
  Sense strand starting at position 571 of SEQ ID NO: 588610
agugauacaaaucguguuu

SEQ ID NO: 877179 - RNA, 19 nt, Artificial Sequence
  Description of Artificial Sequence: Synthetic oligonucleotide
  Antisense strand to SEQ ID NO: 877178
aaacacgauuuguaucacu

SEQ ID NO: 877180 - RNA, 19 nt, Artificial Sequence
  Description of Artificial Sequence: Synthetic oligonucleotide
  Sense strand starting at position 629 of SEQ ID NO: 588610
uuccuaaggucuuaggaca

SEQ ID NO: 877181 - RNA, 19 nt, Artificial Sequence
  Description of Artificial Sequence: Synthetic oligonucleotide
  Antisense strand to SEQ ID NO: 877180
uguccuaagaccuuaggaa

SEQ ID NO: 877182 - RNA, 19 nt, Artificial Sequence
  Description of Artificial Sequence: Synthetic oligonucleotide
  Sense strand starting at position 640 of SEQ ID NO: 588610
uuaggacaauucucaaagu

SEQ ID NO: 877183 - RNA, 19 nt, Artificial Sequence
  Description of Artificial Sequence: Synthetic oligonucleotide
  Antisense strand to SEQ ID NO: 877182
acuuugagaauuguccuaa

SEQ ID NO: 877184 - RNA, 19 nt, Artificial Sequence
  Description of Artificial Sequence: Synthetic oligonucleotide
  Sense strand starting at position 704 of SEQ ID NO: 588610
acgagcuacgcccaaauau

SEQ ID NO: 877185 - RNA, 19 nt, Artificial Sequence
  Description of Artificial Sequence: Synthetic oligonucleotide
  Antisense strand to SEQ ID NO: 877184
auauuugggcguagcucgu

SEQ ID NO: 877186 - RNA, 19 nt, Artificial Sequence
  Description of Artificial Sequence: Synthetic oligonucleotide
  Sense strand starting at position 713 of SEQ ID NO: 588610
gcccaaauaucgucaaaug

SEQ ID NO: 877187 - RNA, 19 nt, Artificial Sequence
  Description of Artificial Sequence: Synthetic oligonucleotide
  Antisense strand to SEQ ID NO: 877186
cauuugacgauauuugggc

SEQ ID NO: 877188 - RNA, 19 nt, Artificial Sequence
  Description of Artificial Sequence: Synthetic oligonucleotide
  Sense strand starting at position 1035 of SEQ ID NO: 588610
cccguaaaguccuccaaag

SEQ ID NO: 877189 - RNA, 19 nt, Artificial Sequence
  Description of Artificial Sequence: Synthetic oligonucleotide
  Antisense strand to SEQ ID NO: 877188
cuuuggaggacuuuacggg

SEQ ID NO: 877190 - RNA, 19 nt, Artificial Sequence
  Description of Artificial Sequence: Synthetic oligonucleotide
  Sense strand starting at position 1311 of SEQ ID NO: 588610
gggccacuucuccaaggga

SEQ ID NO: 877191 - RNA, 19 nt, Artificial Sequence
  Description of Artificial Sequence: Synthetic oligonucleotide
  Antisense strand to SEQ ID NO: 877190
ucccuuggagaaguggccc

SEQ ID NO: 877192 - RNA, 19 nt, Artificial Sequence
  Description of Artificial Sequence: Synthetic oligonucleotide
  Sense strand starting at position 1357 of SEQ ID NO: 588610
cgcuaauuguccgcaacaa

SEQ ID NO: 877193 - RNA, 19 nt, Artificial Sequence
  Description of Artificial Sequence: Synthetic oligonucleotide
  Antisense strand to SEQ ID NO: 877192
uuguugcggacaauuagcg

SEQ ID NO: 877194 - RNA, 19 nt, Artificial Sequence
  Description of Artificial Sequence: Synthetic oligonucleotide
  Sense strand starting at position 1358 of SEQ ID NO: 588610
gcuaauuguccgcaacaaa

SEQ ID NO: 877195 - RNA, 19 nt, Artificial Sequence
  Description of Artificial Sequence: Synthetic oligonucleotide
  Antisense strand to SEQ ID NO: 877194
uuuguugcggacaauuagc

SEQ ID NO: 877196 - RNA, 19 nt, Artificial Sequence
  Description of Artificial Sequence: Synthetic oligonucleotide
  Sense strand starting at position 1425 of SEQ ID NO: 588610
gagacauguaccugaguga

SEQ ID NO: 877197 - RNA, 19 nt, Artificial Sequence
  Description of Artificial Sequence: Synthetic oligonucleotide
  Antisense strand to SEQ ID NO: 877196
ucacucagguacaugucuc

SEQ ID NO: 877198 - RNA, 19 nt, Artificial Sequence
  Description of Artificial Sequence: Synthetic oligonucleotide
  Sense strand starting at position 1432 of SEQ ID NO: 588610
guaccugagugagacagau

SEQ ID NO: 877199 - RNA, 19 nt, Artificial Sequence
  Description of Artificial Sequence: Synthetic oligonucleotide
  Antisense strand to SEQ ID NO: 877198
aucugucucacucagguac

SEQ ID NO: 877200 - RNA, 19 nt, Artificial Sequence
  Description of Artificial Sequence: Synthetic oligonucleotide
  Sense strand starting at position 1459 of SEQ ID NO: 588610
acaucaugacuucgccuua

SEQ ID NO: 877201 - RNA, 19 nt, Artificial Sequence
  Description of Artificial Sequence: Synthetic oligonucleotide
  Antisense strand to SEQ ID NO: 877200
uaaggcgaagucaugaugu

SEQ ID NO: 877202 - RNA, 19 nt, Artificial Sequence
  Description of Artificial Sequence: Synthetic oligonucleotide
  Sense strand starting at position 1650 of SEQ ID NO: 588610
ucacucggcgugcuagauu

SEQ ID NO: 877203 - RNA, 19 nt, Artificial Sequence
  Description of Artificial Sequence: Synthetic oligonucleotide
  Antisense strand to SEQ ID NO: 877202
aaucuagcacgccgaguga

SEQ ID NO: 877204 - RNA, 19 nt, Artificial Sequence
  Description of Artificial Sequence: Synthetic oligonucleotide
  Sense strand starting at position 1978 of SEQ ID NO: 588610
gggaaaguucaagguuaca

SEQ ID NO: 877205 - RNA, 19 nt, Artificial Sequence
  Description of Artificial Sequence: Synthetic oligonucleotide
  Antisense strand to SEQ ID NO: 877204
uguaaccuugaacuuuccc

SEQ ID NO: 877206 - RNA, 19 nt, Artificial Sequence
  Description of Artificial Sequence: Synthetic oligonucleotide
  Sense strand starting at position 2024 of SEQ ID NO: 588610
aguggugaucgcaggcgaa

SEQ ID NO: 877207 - RNA, 19 nt, Artificial Sequence
  Description of Artificial Sequence: Synthetic oligonucleotide
  Antisense strand to SEQ ID NO: 877206
uucgccugcgaucaccacu

SEQ ID NO: 877208 - RNA, 19 nt, Artificial Sequence
  Description of Artificial Sequence: Synthetic oligonucleotide
  Sense strand starting at position 2025 of SEQ ID NO: 588610
guggugaucgcaggcgaaa

SEQ ID NO: 877209 - RNA, 19 nt, Artificial Sequence
  Description of Artificial Sequence: Synthetic oligonucleotide
  Antisense strand to SEQ ID NO: 877208
uuucgccugcgaucaccac

SEQ ID NO: 877210 - RNA, 19 nt, Artificial Sequence
  Description of Artificial Sequence: Synthetic oligonucleotide
  Sense strand starting at position 2533 of SEQ ID NO: 588610
ucgagcucucuccaaauca

SEQ ID NO: 877211 - RNA, 19 nt, Artificial Sequence
  Description of Artificial Sequence: Synthetic oligonucleotide
  Antisense strand to SEQ ID NO: 877210
ugauuuggagagagcucga

SEQ ID NO: 877212 - RNA, 19 nt, Artificial Sequence
  Description of Artificial Sequence: Synthetic oligonucleotide
  Sense strand starting at position 2700 of SEQ ID NO: 588610
ucccucauuuguuaaaggu

SEQ ID NO: 877213 - RNA, 19 nt, Artificial Sequence
  Description of Artificial Sequence: Synthetic oligonucleotide
  Antisense strand to SEQ ID NO: 877212
accuuuaacaaaugaggga

SEQ ID NO: 877214 - RNA, 19 nt, Artificial Sequence
  Description of Artificial Sequence: Synthetic oligonucleotide
  Sense strand starting at position 2717 of SEQ ID NO: 588610
guauccuaccggugcuaca

SEQ ID NO: 877215 - RNA, 19 nt, Artificial Sequence
  Description of Artificial Sequence: Synthetic oligonucleotide
  Antisense strand to SEQ ID NO: 877214
uguagcaccgguaggauac

SEQ ID NO: 877216 - RNA, 19 nt, Artificial Sequence
  Description of Artificial Sequence: Synthetic oligonucleotide
  Sense strand starting at position 2730 of SEQ ID NO: 588610
gcuacagaaccaugacuuu

SEQ ID NO: 877217 - RNA, 19 nt, Artificial Sequence
  Description of Artificial Sequence: Synthetic oligonucleotide
  Antisense strand to SEQ ID NO: 877216
aaagucaugguucuguagc

SEQ ID NO: 877218 - RNA, 19 nt, Artificial Sequence
  Description of Artificial Sequence: Synthetic oligonucleotide
  Sense strand starting at position 2874 of SEQ ID NO: 588610
ggaacauccgagugggaga

SEQ ID NO: 877219 - RNA, 19 nt, Artificial Sequence
  Description of Artificial Sequence: Synthetic oligonucleotide
  Antisense strand to SEQ ID NO: 877218
ucucccacucggauguucc

SEQ ID NO: 877220 - RNA, 19 nt, Artificial Sequence
  Description of Artificial Sequence: Synthetic oligonucleotide
  Sense strand starting at position 2902 of SEQ ID NO: 588610
accgucugagcccgagaaa

SEQ ID NO: 877221 - RNA, 19 nt, Artificial Sequence
  Description of Artificial Sequence: Synthetic oligonucleotide
  Antisense strand to SEQ ID NO: 877220
uuucucgggcucagacggu

SEQ ID NO: 877222 - RNA, 19 nt, Artificial Sequence
  Description of Artificial Sequence: Synthetic oligonucleotide
  Sense strand starting at position 3618 of SEQ ID NO: 588610
gcaggcuccgagugaauga

SEQ ID NO: 877223 - RNA, 19 nt, Artificial Sequence
  Description of Artificial Sequence: Synthetic oligonucleotide
  Antisense strand to SEQ ID NO: 877222
ucauucacucggagccugc

SEQ ID NO: 877224 - RNA, 19 nt, Artificial Sequence
  Description of Artificial Sequence: Synthetic oligonucleotide
  Sense strand starting at position 3634 of SEQ ID NO: 588610
ugaacuugauuccagggau

SEQ ID NO: 877225 - RNA, 19 nt, Artificial Sequence
  Description of Artificial Sequence: Synthetic oligonucleotide
  Antisense strand to SEQ ID NO: 877224
aucccuggaaucaaguuca

SEQ ID NO: 877226 - RNA, 19 nt, Artificial Sequence
  Description of Artificial Sequence: Synthetic oligonucleotide
  Sense strand starting at position 47 of SEQ ID NO: 588611
cuuucaguucugggaagag

SEQ ID NO: 877227 - RNA, 19 nt, Artificial Sequence
  Description of Artificial Sequence: Synthetic oligonucleotide
  Antisense strand to SEQ ID NO: 877226
cucuucccagaacugaaag

SEQ ID NO: 877228 - RNA, 19 nt, Artificial Sequence
  Description of Artificial Sequence: Synthetic oligonucleotide
  Sense strand starting at position 157 of SEQ ID NO: 588611
acugauauuagaugggcaa

SEQ ID NO: 877229 - RNA, 19 nt, Artificial Sequence
  Description of Artificial Sequence: Synthetic oligonucleotide
  Antisense strand to SEQ ID NO: 877228
uugcccaucuaauaucagu

SEQ ID NO: 877230 - RNA, 19 nt, Artificial Sequence
  Description of Artificial Sequence: Synthetic oligonucleotide
  Sense strand starting at position 158 of SEQ ID NO: 588611
cugauauuagaugggcaau

SEQ ID NO: 877231 - RNA, 19 nt, Artificial Sequence
  Description of Artificial Sequence: Synthetic oligonucleotide
  Antisense strand to SEQ ID NO: 877230
auugcccaucuaauaucag

SEQ ID NO: 877232 - RNA, 19 nt, Artificial Sequence
  Description of Artificial Sequence: Synthetic oligonucleotide
  Sense strand starting at position 159 of SEQ ID NO: 588611
ugauauuagaugggcaaua

SEQ ID NO: 877233 - RNA, 19 nt, Artificial Sequence
  Description of Artificial Sequence: Synthetic oligonucleotide
  Antisense strand to SEQ ID NO: 877232
uauugcccaucuaauauca

SEQ ID NO: 877234 - RNA, 19 nt, Artificial Sequence
  Description of Artificial Sequence: Synthetic oligonucleotide
  Sense strand starting at position 168 of SEQ ID NO: 588611
augggcaauaguggaaaua

SEQ ID NO: 877235 - RNA, 19 nt, Artificial Sequence
  Description of Artificial Sequence: Synthetic oligonucleotide
  Antisense strand to SEQ ID NO: 877234
uauuuccacuauugcccau

SEQ ID NO: 877236 - RNA, 19 nt, Artificial Sequence
  Description of Artificial Sequence: Synthetic oligonucleotide
  Sense strand starting at position 284 of SEQ ID NO: 588611
uaaugcagucucugagaaa

SEQ ID NO: 877237 - RNA, 19 nt, Artificial Sequence
  Description of Artificial Sequence: Synthetic oligonucleotide
  Antisense strand to SEQ ID NO: 877236
uuucucagagacugcauua

SEQ ID NO: 877238 - RNA, 19 nt, Artificial Sequence
  Description of Artificial Sequence: Synthetic oligonucleotide
  Sense strand starting at position 323 of SEQ ID NO: 588611
ucagguaaauaugcaaaga

SEQ ID NO: 877239 - RNA, 19 nt, Artificial Sequence
  Description of Artificial Sequence: Synthetic oligonucleotide
  Antisense strand to SEQ ID NO: 877238
ucuuugcauauuuaccuga

SEQ ID NO: 877240 - RNA, 19 nt, Artificial Sequence
  Description of Artificial Sequence: Synthetic oligonucleotide
  Sense strand starting at position 651 of SEQ ID NO: 588611
ugaagucaugcuuauuacu

SEQ ID NO: 877241 - RNA, 19 nt, Artificial Sequence
  Description of Artificial Sequence: Synthetic oligonucleotide
  Antisense strand to SEQ ID NO: 877240
aguaauaagcaugacuuca

SEQ ID NO: 877242 - RNA, 19 nt, Artificial Sequence
  Description of Artificial Sequence: Synthetic oligonucleotide
  Sense strand starting at position 757 of SEQ ID NO: 588611
cugacauaguagcuauaca

SEQ ID NO: 877243 - RNA, 19 nt, Artificial Sequence
  Description of Artificial Sequence: Synthetic oligonucleotide
  Antisense strand to SEQ ID NO: 877242
uguauagcuacuaugucag

SEQ ID NO: 877244 - RNA, 19 nt, Artificial Sequence
  Description of Artificial Sequence: Synthetic oligonucleotide
  Sense strand starting at position 956 of SEQ ID NO: 588611
ugguuuccucagcaauaua

SEQ ID NO: 877245 - RNA, 19 nt, Artificial Sequence
  Description of Artificial Sequence: Synthetic oligonucleotide
  Antisense strand to SEQ ID NO: 877244
uauauugcugaggaaacca

SEQ ID NO: 877246 - RNA, 19 nt, Artificial Sequence
  Description of Artificial Sequence: Synthetic oligonucleotide
  Sense strand starting at position 1028 of SEQ ID NO: 588611
auguaaugugcucacauau

SEQ ID NO: 877247 - RNA, 19 nt, Artificial Sequence
  Description of Artificial Sequence: Synthetic oligonucleotide
  Antisense strand to SEQ ID NO: 877246
auaugugagcacauuacau

SEQ ID NO: 877248 - RNA, 19 nt, Artificial Sequence
  Description of Artificial Sequence: Synthetic oligonucleotide
  Sense strand starting at position 1058 of SEQ ID NO: 588611
ccauacuauugaguuauau

SEQ ID NO: 877249 - RNA, 19 nt, Artificial Sequence
  Description of Artificial Sequence: Synthetic oligonucleotide
  Antisense strand to SEQ ID NO: 877248
auauaacucaauaguaugg

SEQ ID NO: 877250 - RNA, 19 nt, Artificial Sequence
  Description of Artificial Sequence: Synthetic oligonucleotide
  Sense strand starting at position 1067 of SEQ ID NO: 588611
ugaguuauauuacuggaaa

SEQ ID NO: 877251 - RNA, 19 nt, Artificial Sequence
  Description of Artificial Sequence: Synthetic oligonucleotide
  Antisense strand to SEQ ID NO: 877250
uuuccaguaauauaacuca

SEQ ID NO: 877252 - RNA, 19 nt, Artificial Sequence
  Description of Artificial Sequence: Synthetic oligonucleotide
  Sense strand starting at position 1070 of SEQ ID NO: 588611
guuauauuacuggaaaugu

SEQ ID NO: 877253 - RNA, 19 nt, Artificial Sequence
  Description of Artificial Sequence: Synthetic oligonucleotide
  Antisense strand to SEQ ID NO: 877252
acauuuccaguaauauaac

SEQ ID NO: 877254 - RNA, 19 nt, Artificial Sequence
  Description of Artificial Sequence: Synthetic oligonucleotide
  Sense strand starting at position 1186 of SEQ ID NO: 588611
cguggauuauuucucaguu

SEQ ID NO: 877255 - RNA, 19 nt, Artificial Sequence
  Description of Artificial Sequence: Synthetic oligonucleotide
  Antisense strand to SEQ ID NO: 877254
aacugagaaauaauccacg

SEQ ID NO: 877256 - RNA, 19 nt, Artificial Sequence
  Description of Artificial Sequence: Synthetic oligonucleotide
  Sense strand starting at position 1468 of SEQ ID NO: 588611
ugagacacauugucuaaga

SEQ ID NO: 877257 - RNA, 19 nt, Artificial Sequence
  Description of Artificial Sequence: Synthetic oligonucleotide
  Antisense strand to SEQ ID NO: 877256
ucuuagacaaugugucuca

SEQ ID NO: 877258 - RNA, 19 nt, Artificial Sequence
  Description of Artificial Sequence: Synthetic oligonucleotide
  Sense strand starting at position 1572 of SEQ ID NO: 588611
uuaggaaucccaggguuac

SEQ ID NO: 877259 - RNA, 19 nt, Artificial Sequence
  Description of Artificial Sequence: Synthetic oligonucleotide
  Antisense strand to SEQ ID NO: 877258
guaacccugggauuccuaa

SEQ ID NO: 877260 - RNA, 19 nt, Artificial Sequence
  Description of Artificial Sequence: Synthetic oligonucleotide
  Sense strand starting at position 1573 of SEQ ID NO: 588611
uaggaaucccaggguuaca

SEQ ID NO: 877261 - RNA, 19 nt, Artificial Sequence
  Description of Artificial Sequence: Synthetic oligonucleotide
  Antisense strand to SEQ ID NO: 877260
uguaacccugggauuccua

SEQ ID NO: 877262 - RNA, 19 nt, Artificial Sequence
  Description of Artificial Sequence: Synthetic oligonucleotide
  Sense strand starting at position 1633 of SEQ ID NO: 588611
cugggauucuuuccauacu

SEQ ID NO: 877263 - RNA, 19 nt, Artificial Sequence
  Description of Artificial Sequence: Synthetic oligonucleotide
  Antisense strand to SEQ ID NO: 877262
aguauggaaagaaucccag

SEQ ID NO: 877264 - RNA, 19 nt, Artificial Sequence
  Description of Artificial Sequence: Synthetic oligonucleotide
  Sense strand starting at position 1728 of SEQ ID NO: 588611
caccgaguaccuuagcaaa

SEQ ID NO: 877265 - RNA, 19 nt, Artificial Sequence
  Description of Artificial Sequence: Synthetic oligonucleotide
  Antisense strand to SEQ ID NO: 877264
uuugcuaagguacucggug

SEQ ID NO: 877266 - RNA, 19 nt, Artificial Sequence
  Description of Artificial Sequence: Synthetic oligonucleotide
  Sense strand starting at position 1783 of SEQ ID NO: 588611
agaguuugagggugacuga

SEQ ID NO: 877267 - RNA, 19 nt, Artificial Sequence
  Description of Artificial Sequence: Synthetic oligonucleotide
  Antisense strand to SEQ ID NO: 877266
ucagucacccucaaacucu

SEQ ID NO: 877268 - RNA, 19 nt, Artificial Sequence
  Description of Artificial Sequence: Synthetic oligonucleotide
  Sense strand starting at position 1863 of SEQ ID NO: 588611
uguacacucgaggaguuua

SEQ ID NO: 877269 - RNA, 19 nt, Artificial Sequence
  Description of Artificial Sequence: Synthetic oligonucleotide
  Antisense strand to SEQ ID NO: 877268
uaaacuccucgaguguaca

SEQ ID NO: 877270 - RNA, 19 nt, Artificial Sequence
  Description of Artificial Sequence: Synthetic oligonucleotide
  Sense strand starting at position 1876 of SEQ ID NO: 588611
aguuuacuccacuaacagu

SEQ ID NO: 877271 - RNA, 19 nt, Artificial Sequence
  Description of Artificial Sequence: Synthetic oligonucleotide
  Antisense strand to SEQ ID NO: 877270
acuguuaguggaguaaacu

SEQ ID NO: 877272 - RNA, 19 nt, Artificial Sequence
  Description of Artificial Sequence: Synthetic oligonucleotide
  Sense strand starting at position 1938 of SEQ ID NO: 588611
agugauauucuaugaaguc

SEQ ID NO: 877273 - RNA, 19 nt, Artificial Sequence
  Description of Artificial Sequence: Synthetic oligonucleotide
  Antisense strand to SEQ ID NO: 877272
gacuucauagaauaucacu

SEQ ID NO: 877274 - RNA, 19 nt, Artificial Sequence
  Description of Artificial Sequence: Synthetic oligonucleotide
  Sense strand starting at position 1987 of SEQ ID NO: 588611
uguacugcccaauauagua

SEQ ID NO: 877275 - RNA, 19 nt, Artificial Sequence
  Description of Artificial Sequence: Synthetic oligonucleotide
  Antisense strand to SEQ ID NO: 877274
uacuauauugggcaguaca

SEQ ID NO: 877276 - RNA, 19 nt, Artificial Sequence
  Description of Artificial Sequence: Synthetic oligonucleotide
  Sense strand starting at position 2023 of SEQ ID NO: 588611
acuacugaguacuugaaau

SEQ ID NO: 877277 - RNA, 19 nt, Artificial Sequence
  Description of Artificial Sequence: Synthetic oligonucleotide
  Antisense strand to SEQ ID NO: 877276
auuucaaguacucaguagu

SEQ ID NO: 877278 - RNA, 19 nt, Artificial Sequence
  Description of Artificial Sequence: Synthetic oligonucleotide
  Sense strand starting at position 2176 of SEQ ID NO: 588611
gaauauauguuguuggaau

SEQ ID NO: 877279 - RNA, 19 nt, Artificial Sequence
  Description of Artificial Sequence: Synthetic oligonucleotide
  Antisense strand to SEQ ID NO: 877278
auuccaacaacauauauuc

SEQ ID NO: 877280 - RNA, 19 nt, Artificial Sequence
  Description of Artificial Sequence: Synthetic oligonucleotide
  Sense strand starting at position 2259 of SEQ ID NO: 588611
uuguuuaaggcucacauua

SEQ ID NO: 877281 - RNA, 19 nt, Artificial Sequence
  Description of Artificial Sequence: Synthetic oligonucleotide
  Antisense strand to SEQ ID NO: 877280
uaaugugagccuuaaacaa

SEQ ID NO: 877282 - RNA, 19 nt, Artificial Sequence
  Description of Artificial Sequence: Synthetic oligonucleotide
  Sense strand starting at position 2293 of SEQ ID NO: 588611
agcacuggucuagauaguu

SEQ ID NO: 877283 - RNA, 19 nt, Artificial Sequence
  Description of Artificial Sequence: Synthetic oligonucleotide
  Antisense strand to SEQ ID NO: 877282
aacuaucuagaccagugcu

SEQ ID NO: 877284 - RNA, 19 nt, Artificial Sequence
  Description of Artificial Sequence: Synthetic oligonucleotide
  Sense strand starting at position 2334 of SEQ ID NO: 588611
guuauaggccaagacaagu

SEQ ID NO: 877285 - RNA, 19 nt, Artificial Sequence
  Description of Artificial Sequence: Synthetic oligonucleotide
  Antisense strand to SEQ ID NO: 877284
acuugucuuggccuauaac

SEQ ID NO: 877286 - RNA, 19 nt, Artificial Sequence
  Description of Artificial Sequence: Synthetic oligonucleotide
  Sense strand starting at position 2633 of SEQ ID NO: 588611
gaguuaaguuuacuuagau

SEQ ID NO: 877287 - RNA, 19 nt, Artificial Sequence
  Description of Artificial Sequence: Synthetic oligonucleotide
  Antisense strand to SEQ ID NO: 877286
aucuaaguaaacuuaacuc

SEQ ID NO: 877288 - RNA, 19 nt, Artificial Sequence
  Description of Artificial Sequence: Synthetic oligonucleotide
  Sense strand starting at position 2714 of SEQ ID NO: 588611
uaggcaucugguuauuaua

SEQ ID NO: 877289 - RNA, 19 nt, Artificial Sequence
  Description of Artificial Sequence: Synthetic oligonucleotide
  Antisense strand to SEQ ID NO: 877288
uauaauaaccagaugccua

SEQ ID NO: 877290 - RNA, 19 nt, Artificial Sequence
  Description of Artificial Sequence: Synthetic oligonucleotide
  Sense strand starting at position 3009 of SEQ ID NO: 588611
gcuaaucagcuguaacaaa

SEQ ID NO: 877291 - RNA, 19 nt, Artificial Sequence
  Description of Artificial Sequence: Synthetic oligonucleotide
  Antisense strand to SEQ ID NO: 877290
uuuguuacagcugauuagc

SEQ ID NO: 877292 - RNA, 19 nt, Artificial Sequence
  Description of Artificial Sequence: Synthetic oligonucleotide
  Sense strand starting at position 3068 of SEQ ID NO: 588611
uaguaaguccuggacuuua

SEQ ID NO: 877293 - RNA, 19 nt, Artificial Sequence
  Description of Artificial Sequence: Synthetic oligonucleotide
  Antisense strand to SEQ ID NO: 877292
uaaaguccaggacuuacua

SEQ ID NO: 877294 - RNA, 19 nt, Artificial Sequence
  Description of Artificial Sequence: Synthetic oligonucleotide
  Sense strand starting at position 3120 of SEQ ID NO: 588611
uaaugaauaguguauugca

SEQ ID NO: 877295 - RNA, 19 nt, Artificial Sequence
  Description of Artificial Sequence: Synthetic oligonucleotide
  Antisense strand to SEQ ID NO: 877294
ugcaauacacuauucauua

SEQ ID NO: 877296 - RNA, 19 nt, Artificial Sequence
  Description of Artificial Sequence: Synthetic oligonucleotide
  Sense strand starting at position 3238 of SEQ ID NO: 588611
gucuuaacucaaggauaag

SEQ ID NO: 877297 - RNA, 19 nt, Artificial Sequence
  Description of Artificial Sequence: Synthetic oligonucleotide
  Antisense strand to SEQ ID NO: 877296
cuuauccuugaguuaagac

SEQ ID NO: 877298 - RNA, 19 nt, Artificial Sequence
  Description of Artificial Sequence: Synthetic oligonucleotide
  Sense strand starting at position 3378 of SEQ ID NO: 588611
ggauauauccaaggcugac

SEQ ID NO: 877299 - RNA, 19 nt, Artificial Sequence
  Description of Artificial Sequence: Synthetic oligonucleotide
  Antisense strand to SEQ ID NO: 877298
gucagccuuggauauaucc

SEQ ID NO: 877300 - RNA, 19 nt, Artificial Sequence
  Description of Artificial Sequence: Synthetic oligonucleotide
  Sense strand starting at position 3402 of SEQ ID NO: 588611
ggagaugacuuugcagaau

SEQ ID NO: 877301 - RNA, 19 nt, Artificial Sequence
  Description of Artificial Sequence: Synthetic oligonucleotide
  Antisense strand to SEQ ID NO: 877300
auucugcaaagucaucucc

SEQ ID NO: 877302 - RNA, 19 nt, Artificial Sequence
  Description of Artificial Sequence: Synthetic oligonucleotide
  Sense strand starting at position 3522 of SEQ ID NO: 588611
ucuauccaugcugaguaau

SEQ ID NO: 877303 - RNA, 19 nt, Artificial Sequence
  Description of Artificial Sequence: Synthetic oligonucleotide
  Antisense strand to SEQ ID NO: 877302
auuacucagcauggauaga

SEQ ID NO: 877304 - RNA, 19 nt, Artificial Sequence
  Description of Artificial Sequence: Synthetic oligonucleotide
  Sense strand starting at position 3525 of SEQ ID NO: 588611
auccaugcugaguaauaua

SEQ ID NO: 877305 - RNA, 19 nt, Artificial Sequence
  Description of Artificial Sequence: Synthetic oligonucleotide
  Antisense strand to SEQ ID NO: 877304
uauauuacucagcauggau

SEQ ID NO: 877306 - RNA, 19 nt, Artificial Sequence
  Description of Artificial Sequence: Synthetic oligonucleotide
  Sense strand starting at position 379 of SEQ ID NO: 588612
gaggguauuugggauaccu

SEQ ID NO: 877307 - RNA, 19 nt, Artificial Sequence
  Description of Artificial Sequence: Synthetic oligonucleotide
  Antisense strand to SEQ ID NO: 877306
agguaucccaaauacccuc

SEQ ID NO: 877308 - RNA, 19 nt, Artificial Sequence
  Description of Artificial Sequence: Synthetic oligonucleotide
  Sense strand starting at position 389 of SEQ ID NO: 588612
gggauaccuuaugcuaaag

SEQ ID NO: 877309 - RNA, 19 nt, Artificial Sequence
  Description of Artificial Sequence: Synthetic oligonucleotide
  Antisense strand to SEQ ID NO: 877308
cuuuagcauaagguauccc

SEQ ID NO: 877310 - RNA, 19 nt, Artificial Sequence
  Description of Artificial Sequence: Synthetic oligonucleotide
  Sense strand starting at position 557 of SEQ ID NO: 588612
cuauaauugcaguauggaa

SEQ ID NO: 877311 - RNA, 19 nt, Artificial Sequence
  Description of Artificial Sequence: Synthetic oligonucleotide
  Antisense strand to SEQ ID NO: 877310
uuccauacugcaauuauag

SEQ ID NO: 877312 - RNA, 19 nt, Artificial Sequence
  Description of Artificial Sequence: Synthetic oligonucleotide
  Sense strand starting at position 559 of SEQ ID NO: 588612
auaauugcaguauggaaau

SEQ ID NO: 877313 - RNA, 19 nt, Artificial Sequence
  Description of Artificial Sequence: Synthetic oligonucleotide
  Antisense strand to SEQ ID NO: 877312
auuuccauacugcaauuau

SEQ ID NO: 877314 - RNA, 19 nt, Artificial Sequence
  Description of Artificial Sequence: Synthetic oligonucleotide
  Sense strand starting at position 716 of SEQ ID NO: 588612
aaacauuggugauuaggua

SEQ ID NO: 877315 - RNA, 19 nt, Artificial Sequence
  Description of Artificial Sequence: Synthetic oligonucleotide
  Antisense strand to SEQ ID NO: 877314
uaccuaaucaccaauguuu

SEQ ID NO: 877316 - RNA, 19 nt, Artificial Sequence
  Description of Artificial Sequence: Synthetic oligonucleotide
  Sense strand starting at position 720 of SEQ ID NO: 588612
auuggugauuagguaaaua

SEQ ID NO: 877317 - RNA, 19 nt, Artificial Sequence
  Description of Artificial Sequence: Synthetic oligonucleotide
  Antisense strand to SEQ ID NO: 877316
uauuuaccuaaucaccaau

SEQ ID NO: 877318 - RNA, 19 nt, Artificial Sequence
  Description of Artificial Sequence: Synthetic oligonucleotide
  Sense strand starting at position 758 of SEQ ID NO: 588612
aguauuugccacugcaaag

SEQ ID NO: 877319 - RNA, 19 nt, Artificial Sequence
  Description of Artificial Sequence: Synthetic oligonucleotide
  Antisense strand to SEQ ID NO: 877318
cuuugcaguggcaaauacu

SEQ ID NO: 877320 - RNA, 19 nt, Artificial Sequence
  Description of Artificial Sequence: Synthetic oligonucleotide
  Sense strand starting at position 792 of SEQ ID NO: 588612
acaucuugucccgaucaua

SEQ ID NO: 877321 - RNA, 19 nt, Artificial Sequence
  Description of Artificial Sequence: Synthetic oligonucleotide
  Antisense strand to SEQ ID NO: 877320
uaugaucgggacaagaugu

SEQ ID NO: 877322 - RNA, 19 nt, Artificial Sequence
  Description of Artificial Sequence: Synthetic oligonucleotide
  Sense strand starting at position 895 of SEQ ID NO: 588612
gauugcaaauguccuggaa

SEQ ID NO: 877323 - RNA, 19 nt, Artificial Sequence
  Description of Artificial Sequence: Synthetic oligonucleotide
  Antisense strand to SEQ ID NO: 877322
uuccaggacauuugcaauc

SEQ ID NO: 877324 - RNA, 19 nt, Artificial Sequence
  Description of Artificial Sequence: Synthetic oligonucleotide
  Sense strand starting at position 899 of SEQ ID NO: 588612
gcaaauguccuggaacaca

SEQ ID NO: 877325 - RNA, 19 nt, Artificial Sequence
  Description of Artificial Sequence: Synthetic oligonucleotide
  Antisense strand to SEQ ID NO: 877324
uguguuccaggacauuugc

SEQ ID NO: 877326 - RNA, 19 nt, Artificial Sequence
  Description of Artificial Sequence: Synthetic oligonucleotide
  Sense strand starting at position 927 of SEQ ID NO: 588612
ggaggauucuuggcaggau

SEQ ID NO: 877327 - RNA, 19 nt, Artificial Sequence
  Description of Artificial Sequence: Synthetic oligonucleotide
  Antisense strand to SEQ ID NO: 877326
auccugccaagaauccucc

SEQ ID NO: 877328 - RNA, 19 nt, Artificial Sequence
  Description of Artificial Sequence: Synthetic oligonucleotide
  Sense strand starting at position 930 of SEQ ID NO: 588612
ggauucuuggcaggaucau

SEQ ID NO: 877329 - RNA, 19 nt, Artificial Sequence
  Description of Artificial Sequence: Synthetic oligonucleotide
  Antisense strand to SEQ ID NO: 877328
augauccugccaagaaucc

SEQ ID NO: 877330 - RNA, 19 nt, Artificial Sequence
  Description of Artificial Sequence: Synthetic oligonucleotide
  Sense strand starting at position 931 of SEQ ID NO: 588612
gauucuuggcaggaucauu

SEQ ID NO: 877331 - RNA, 19 nt, Artificial Sequence
  Description of Artificial Sequence: Synthetic oligonucleotide
  Antisense strand to SEQ ID NO: 877330
aaugauccugccaagaauc

SEQ ID NO: 877332 - RNA, 19 nt, Artificial Sequence
  Description of Artificial Sequence: Synthetic oligonucleotide
  Sense strand starting at position 963 of SEQ ID NO: 588612
ccugauuguccagaaucug

SEQ ID NO: 877333 - RNA, 19 nt, Artificial Sequence
  Description of Artificial Sequence: Synthetic oligonucleotide
  Antisense strand to SEQ ID NO: 877332
cagauucuggacaaucagg

SEQ ID NO: 877334 - RNA, 19 nt, Artificial Sequence
  Description of Artificial Sequence: Synthetic oligonucleotide
  Sense strand starting at position 1248 of SEQ ID NO: 588612
cuacaaagccauugaagau

SEQ ID NO: 877335 - RNA, 19 nt, Artificial Sequence
  Description of Artificial Sequence: Synthetic oligonucleotide
  Antisense strand to SEQ ID NO: 877334
aucuucaauggcuuuguag

SEQ ID NO: 877336 - RNA, 19 nt, Artificial Sequence
  Description of Artificial Sequence: Synthetic oligonucleotide
  Sense strand starting at position 1269 of SEQ ID NO: 588612
uuugaagguuaggcaaaua

SEQ ID NO: 877337 - RNA, 19 nt, Artificial Sequence
  Description of Artificial Sequence: Synthetic oligonucleotide
  Antisense strand to SEQ ID NO: 877336
uauuugccuaaccuucaaa

SEQ ID NO: 877338 - RNA, 19 nt, Artificial Sequence
  Description of Artificial Sequence: Synthetic oligonucleotide
  Sense strand starting at position 1341 of SEQ ID NO: 588612
gcaaucuaaguguaauuaa

SEQ ID NO: 877339 - RNA, 19 nt, Artificial Sequence
  Description of Artificial Sequence: Synthetic oligonucleotide
  Antisense strand to SEQ ID NO: 877338
uuaauuacacuuagauugc

SEQ ID NO: 877340 - RNA, 19 nt, Artificial Sequence
  Description of Artificial Sequence: Synthetic oligonucleotide
  Sense strand starting at position 1570 of SEQ ID NO: 588612
caacauggcuuuguggaga

SEQ ID NO: 877341 - RNA, 19 nt, Artificial Sequence
  Description of Artificial Sequence: Synthetic oligonucleotide
  Antisense strand to SEQ ID NO: 877340
ucuccacaaagccauguug

SEQ ID NO: 877342 - RNA, 19 nt, Artificial Sequence
  Description of Artificial Sequence: Synthetic oligonucleotide
  Sense strand starting at position 1575 of SEQ ID NO: 588612
uggcuuuguggagagcaaa

SEQ ID NO: 877343 - RNA, 19 nt, Artificial Sequence
  Description of Artificial Sequence: Synthetic oligonucleotide
  Antisense strand to SEQ ID NO: 877342
uuugcucuccacaaagcca

SEQ ID NO: 877344 - RNA, 19 nt, Artificial Sequence
  Description of Artificial Sequence: Synthetic oligonucleotide
  Sense strand starting at position 1586 of SEQ ID NO: 588612
agagcaaaugguugaauca

SEQ ID NO: 877345 - RNA, 19 nt, Artificial Sequence
  Description of Artificial Sequence: Synthetic oligonucleotide
  Antisense strand to SEQ ID NO: 877344
ugauucaaccauuugcucu

SEQ ID NO: 877346 - RNA, 19 nt, Artificial Sequence
  Description of Artificial Sequence: Synthetic oligonucleotide
  Sense strand starting at position 1651 of SEQ ID NO: 588612
ggaagagaucaaugucgua

SEQ ID NO: 877347 - RNA, 19 nt, Artificial Sequence
  Description of Artificial Sequence: Synthetic oligonucleotide
  Antisense strand to SEQ ID NO: 877346
uacgacauugaucucuucc

SEQ ID NO: 877348 - RNA, 19 nt, Artificial Sequence
  Description of Artificial Sequence: Synthetic oligonucleotide
  Sense strand starting at position 1658 of SEQ ID NO: 588612
aucaaugucguauaucuga

SEQ ID NO: 877349 - RNA, 19 nt, Artificial Sequence
  Description of Artificial Sequence: Synthetic oligonucleotide
  Antisense strand to SEQ ID NO: 877348
ucagauauacgacauugau

SEQ ID NO: 877350 - RNA, 19 nt, Artificial Sequence
  Description of Artificial Sequence: Synthetic oligonucleotide
  Sense strand starting at position 1756 of SEQ ID NO: 588612
uucggacugaucugacacu

SEQ ID NO: 877351 - RNA, 19 nt, Artificial Sequence
  Description of Artificial Sequence: Synthetic oligonucleotide
  Antisense strand to SEQ ID NO: 877350
agugucagaucaguccgaa

SEQ ID NO: 877352 - RNA, 19 nt, Artificial Sequence
  Description of Artificial Sequence: Synthetic oligonucleotide
  Sense strand starting at position 1813 of SEQ ID NO: 588612
cuccauuuaucugugucau

SEQ ID NO: 877353 - RNA, 19 nt, Artificial Sequence
  Description of Artificial Sequence: Synthetic oligonucleotide
  Antisense strand to SEQ ID NO: 877352
augacacagauaaauggag

SEQ ID NO: 877354 - RNA, 19 nt, Artificial Sequence
  Description of Artificial Sequence: Synthetic oligonucleotide
  Sense strand starting at position 1814 of SEQ ID NO: 588612
uccauuuaucugugucauu

SEQ ID NO: 877355 - RNA, 19 nt, Artificial Sequence
  Description of Artificial Sequence: Synthetic oligonucleotide
  Antisense strand to SEQ ID NO: 877354
aaugacacagauaaaugga

SEQ ID NO: 877356 - RNA, 19 nt, Artificial Sequence
  Description of Artificial Sequence: Synthetic oligonucleotide
  Sense strand starting at position 1944 of SEQ ID NO: 588612
agagauucugucuacuucu

SEQ ID NO: 877357 - RNA, 19 nt, Artificial Sequence
  Description of Artificial Sequence: Synthetic oligonucleotide
  Antisense strand to SEQ ID NO: 877356
agaaguagacagaaucucu

SEQ ID NO: 877358 - RNA, 19 nt, Artificial Sequence
  Description of Artificial Sequence: Synthetic oligonucleotide
  Sense strand starting at position 2013 of SEQ ID NO: 588612
caguaaacgccggaggaau

SEQ ID NO: 877359 - RNA, 19 nt, Artificial Sequence
  Description of Artificial Sequence: Synthetic oligonucleotide
  Antisense strand to SEQ ID NO: 877358
auuccuccggcguuuacug

SEQ ID NO: 877360 - RNA, 19 nt, Artificial Sequence
  Description of Artificial Sequence: Synthetic oligonucleotide
  Sense strand starting at position 2182 of SEQ ID NO: 588612
gccauuauacuugagccaa

SEQ ID NO: 877361 - RNA, 19 nt, Artificial Sequence
  Description of Artificial Sequence: Synthetic oligonucleotide
  Antisense strand to SEQ ID NO: 877360
uuggcucaaguauaauggc

SEQ ID NO: 877362 - RNA, 19 nt, Artificial Sequence
  Description of Artificial Sequence: Synthetic oligonucleotide
  Sense strand starting at position 2266 of SEQ ID NO: 588612
ccagguaagugauuaacau

SEQ ID NO: 877363 - RNA, 19 nt, Artificial Sequence
  Description of Artificial Sequence: Synthetic oligonucleotide
  Antisense strand to SEQ ID NO: 877362
auguuaaucacuuaccugg

SEQ ID NO: 877364 - RNA, 19 nt, Artificial Sequence
  Description of Artificial Sequence: Synthetic oligonucleotide
  Sense strand starting at position 2372 of SEQ ID NO: 588612
gccucaugccuguuagcuu

SEQ ID NO: 877365 - RNA, 19 nt, Artificial Sequence
  Description of Artificial Sequence: Synthetic oligonucleotide
  Antisense strand to SEQ ID NO: 877364
aagcuaacaggcaugaggc

SEQ ID NO: 877366 - RNA, 19 nt, Artificial Sequence
  Description of Artificial Sequence: Synthetic oligonucleotide
  Sense strand starting at position 2662 of SEQ ID NO: 588612
uucugaaaucaaggcaaga

SEQ ID NO: 877367 - RNA, 19 nt, Artificial Sequence
  Description of Artificial Sequence: Synthetic oligonucleotide
  Antisense strand to SEQ ID NO: 877366
ucuugccuugauuucagaa

SEQ ID NO: 877368 - RNA, 19 nt, Artificial Sequence
  Description of Artificial Sequence: Synthetic oligonucleotide
  Sense strand starting at position 2760 of SEQ ID NO: 588612
ccaggccuggaguaugaua

SEQ ID NO: 877369 - RNA, 19 nt, Artificial Sequence
  Description of Artificial Sequence: Synthetic oligonucleotide
  Antisense strand to SEQ ID NO: 877368
uaucauacuccaggccugg

SEQ ID NO: 877370 - RNA, 19 nt, Artificial Sequence
  Description of Artificial Sequence: Synthetic oligonucleotide
  Sense strand starting at position 2768 of SEQ ID NO: 588612
ggaguaugauagcuacaua

SEQ ID NO: 877371 - RNA, 19 nt, Artificial Sequence
  Description of Artificial Sequence: Synthetic oligonucleotide
  Antisense strand to SEQ ID NO: 877370
uauguagcuaucauacucc

SEQ ID NO: 877372 - RNA, 19 nt, Artificial Sequence
  Description of Artificial Sequence: Synthetic oligonucleotide
  Sense strand starting at position 2810 of SEQ ID NO: 588612
gcuauagcaucagcuauuu

SEQ ID NO: 877373 - RNA, 19 nt, Artificial Sequence
  Description of Artificial Sequence: Synthetic oligonucleotide
  Antisense strand to SEQ ID NO: 877372
aaauagcugaugcuauagc

SEQ ID NO: 877374 - RNA, 19 nt, Artificial Sequence
  Description of Artificial Sequence: Synthetic oligonucleotide
  Sense strand starting at position 2912 of SEQ ID NO: 588612
aggaauuccuacuuaugua

SEQ ID NO: 877375 - RNA, 19 nt, Artificial Sequence
  Description of Artificial Sequence: Synthetic oligonucleotide
  Antisense strand to SEQ ID NO: 877374
uacauaaguaggaauuccu

SEQ ID NO: 877376 - RNA, 19 nt, Artificial Sequence
  Description of Artificial Sequence: Synthetic oligonucleotide
  Sense strand starting at position 3039 of SEQ ID NO: 588612
ugugaugacaccugagaua

SEQ ID NO: 877377 - RNA, 19 nt, Artificial Sequence
  Description of Artificial Sequence: Synthetic oligonucleotide
  Antisense strand to SEQ ID NO: 877376
uaucucaggugucaucaca

SEQ ID NO: 877378 - RNA, 19 nt, Artificial Sequence
  Description of Artificial Sequence: Synthetic oligonucleotide
  Sense strand starting at position 3232 of SEQ ID NO: 588612
guaagaaacuauccagcua

SEQ ID NO: 877379 - RNA, 19 nt, Artificial Sequence
  Description of Artificial Sequence: Synthetic oligonucleotide
  Antisense strand to SEQ ID NO: 877378
uagcuggauaguuucuuac

SEQ ID NO: 877380 - RNA, 19 nt, Artificial Sequence
  Description of Artificial Sequence: Synthetic oligonucleotide
  Sense strand starting at position 3536 of SEQ ID NO: 588612
gaaauaaagcaguguauac

SEQ ID NO: 877381 - RNA, 19 nt, Artificial Sequence
  Description of Artificial Sequence: Synthetic oligonucleotide
  Antisense strand to SEQ ID NO: 877380
guauacacugcuuuauuuc

SEQ ID NO: 877382 - RNA, 19 nt, Artificial Sequence
  Description of Artificial Sequence: Synthetic oligonucleotide
  Sense strand starting at position 3663 of SEQ ID NO: 588612
ccuuauaucggucacuuaa

SEQ ID NO: 877383 - RNA, 19 nt, Artificial Sequence
  Description of Artificial Sequence: Synthetic oligonucleotide
  Antisense strand to SEQ ID NO: 877382
uuaagugaccgauauaagg

SEQ ID NO: 877384 - RNA, 19 nt, Artificial Sequence
  Description of Artificial Sequence: Synthetic oligonucleotide
  Sense strand starting at position 3751 of SEQ ID NO: 588612
ugugguugacuucagagaa

SEQ ID NO: 877385 - RNA, 19 nt, Artificial Sequence
  Description of Artificial Sequence: Synthetic oligonucleotide
  Antisense strand to SEQ ID NO: 877384
uucucugaagucaaccaca

SEQ ID NO: 877386 - RNA, 19 nt, Artificial Sequence
  Description of Artificial Sequence: Synthetic oligonucleotide
  Sense strand starting at position 5 of SEQ ID NO: 588613
uugucuugucgugucugaa

SEQ ID NO: 877387 - RNA, 19 nt, Artificial Sequence
  Description of Artificial Sequence: Synthetic oligonucleotide
  Antisense strand to SEQ ID NO: 877386
uucagacacgacaagacaa

SEQ ID NO: 877388 - RNA, 19 nt, Artificial Sequence
  Description of Artificial Sequence: Synthetic oligonucleotide
  Sense strand starting at position 56 of SEQ ID NO: 588613
gaucgaauggaaugcauua

SEQ ID NO: 877389 - RNA, 19 nt, Artificial Sequence
  Description of Artificial Sequence: Synthetic oligonucleotide
  Antisense strand to SEQ ID NO: 877388
uaaugcauuccauucgauc

SEQ ID NO: 877390 - RNA, 19 nt, Artificial Sequence
  Description of Artificial Sequence: Synthetic oligonucleotide
  Sense strand starting at position 90 of SEQ ID NO: 588613
ggagguaaacgucacaaug

SEQ ID NO: 877391 - RNA, 19 nt, Artificial Sequence
  Description of Artificial Sequence: Synthetic oligonucleotide
  Antisense strand to SEQ ID NO: 877390
cauugugacguuuaccucc

SEQ ID NO: 877392 - RNA, 19 nt, Artificial Sequence
  Description of Artificial Sequence: Synthetic oligonucleotide
  Sense strand starting at position 102 of SEQ ID NO: 588613
cacaaugguucgucccaga

SEQ ID NO: 877393 - RNA, 19 nt, Artificial Sequence
  Description of Artificial Sequence: Synthetic oligonucleotide
  Antisense strand to SEQ ID NO: 877392
ucugggacgaaccauugug

SEQ ID NO: 877394 - RNA, 19 nt, Artificial Sequence
  Description of Artificial Sequence: Synthetic oligonucleotide
  Sense strand starting at position 242 of SEQ ID NO: 588613
ggacguaauauagacguaa

SEQ ID NO: 877395 - RNA, 19 nt, Artificial Sequence
  Description of Artificial Sequence: Synthetic oligonucleotide
  Antisense strand to SEQ ID NO: 877394
uuacgucuauauuacgucc

SEQ ID NO: 877396 - RNA, 19 nt, Artificial Sequence
  Description of Artificial Sequence: Synthetic oligonucleotide
  Sense strand starting at position 244 of SEQ ID NO: 588613
acguaauauagacguaaau

SEQ ID NO: 877397 - RNA, 19 nt, Artificial Sequence
  Description of Artificial Sequence: Synthetic oligonucleotide
  Antisense strand to SEQ ID NO: 877396
auuuacgucuauauuacgu

SEQ ID NO: 877398 - RNA, 19 nt, Artificial Sequence
  Description of Artificial Sequence: Synthetic oligonucleotide
  Sense strand starting at position 277 of SEQ ID NO: 588613
caacgcugcgccucaauua

SEQ ID NO: 877399 - RNA, 19 nt, Artificial Sequence
  Description of Artificial Sequence: Synthetic oligonucleotide
  Antisense strand to SEQ ID NO: 877398
uaauugaggcgcagcguug

SEQ ID NO: 877400 - RNA, 19 nt, Artificial Sequence
  Description of Artificial Sequence: Synthetic oligonucleotide
  Sense strand starting at position 366 of SEQ ID NO: 588613
cagauuaugcaauguauga

SEQ ID NO: 877401 - RNA, 19 nt, Artificial Sequence
  Description of Artificial Sequence: Synthetic oligonucleotide
  Antisense strand to SEQ ID NO: 877400
ucauacauugcauaaucug

SEQ ID NO: 877402 - RNA, 19 nt, Artificial Sequence
  Description of Artificial Sequence: Synthetic oligonucleotide
  Sense strand starting at position 1897 of SEQ ID NO: 588613
ggcggaggcagcgauuaaa

SEQ ID NO: 877403 - RNA, 19 nt, Artificial Sequence
  Description of Artificial Sequence: Synthetic oligonucleotide
  Antisense strand to SEQ ID NO: 877402
uuuaaucgcugccuccgcc

SEQ ID NO: 877404 - RNA, 19 nt, Artificial Sequence
  Description of Artificial Sequence: Synthetic oligonucleotide
  Sense strand starting at position 1962 of SEQ ID NO: 588613
gggaaagcuccacgcacaa

SEQ ID NO: 877405 - RNA, 19 nt, Artificial Sequence
  Description of Artificial Sequence: Synthetic oligonucleotide
  Antisense strand to SEQ ID NO: 877404
uugugcguggagcuuuccc

SEQ ID NO: 877406 - RNA, 19 nt, Artificial Sequence
  Description of Artificial Sequence: Synthetic oligonucleotide
  Sense strand starting at position 1993 of SEQ ID NO: 588613
gcacaauuagggcgaagau

SEQ ID NO: 877407 - RNA, 19 nt, Artificial Sequence
  Description of Artificial Sequence: Synthetic oligonucleotide
  Antisense strand to SEQ ID NO: 877406
aucuucgcccuaauugugc

SEQ ID NO: 877408 - RNA, 19 nt, Artificial Sequence
  Description of Artificial Sequence: Synthetic oligonucleotide
  Sense strand starting at position 2008 of SEQ ID NO: 588613
agaugacggcugcaaaguu

SEQ ID NO: 877409 - RNA, 19 nt, Artificial Sequence
  Description of Artificial Sequence: Synthetic oligonucleotide
  Antisense strand to SEQ ID NO: 877408
aacuuugcagccgucaucu

SEQ ID NO: 877410 - RNA, 19 nt, Artificial Sequence
  Description of Artificial Sequence: Synthetic oligonucleotide
  Sense strand starting at position 2030 of SEQ ID NO: 588613
gcguaacacgacugggaaa

SEQ ID NO: 877411 - RNA, 19 nt, Artificial Sequence
  Description of Artificial Sequence: Synthetic oligonucleotide
  Antisense strand to SEQ ID NO: 877410
uuucccagucguguuacgc

SEQ ID NO: 877412 - RNA, 19 nt, Artificial Sequence
  Description of Artificial Sequence: Synthetic oligonucleotide
  Sense strand starting at position 2224 of SEQ ID NO: 588613
uguuauuucugcgucuaac

SEQ ID NO: 877413 - RNA, 19 nt, Artificial Sequence
  Description of Artificial Sequence: Synthetic oligonucleotide
  Antisense strand to SEQ ID NO: 877412
guuagacgcagaaauaaca

SEQ ID NO: 877414 - RNA, 19 nt, Artificial Sequence
  Description of Artificial Sequence: Synthetic oligonucleotide
  Sense strand starting at position 2646 of SEQ ID NO: 588613
ccaugagcagcagaucuau

SEQ ID NO: 877415 - RNA, 19 nt, Artificial Sequence
  Description of Artificial Sequence: Synthetic oligonucleotide
  Antisense strand to SEQ ID NO: 877414
auagaucugcugcucaugg

SEQ ID NO: 877416 - RNA, 19 nt, Artificial Sequence
  Description of Artificial Sequence: Synthetic oligonucleotide
  Sense strand starting at position 2657 of SEQ ID NO: 588613
agaucuaucuacucgccaa

SEQ ID NO: 877417 - RNA, 19 nt, Artificial Sequence
  Description of Artificial Sequence: Synthetic oligonucleotide
  Antisense strand to SEQ ID NO: 877416
uuggcgaguagauagaucu

SEQ ID NO: 877418 - RNA, 19 nt, Artificial Sequence
  Description of Artificial Sequence: Synthetic oligonucleotide
  Sense strand starting at position 2661 of SEQ ID NO: 588613
cuaucuacucgccaagauu

SEQ ID NO: 877419 - RNA, 19 nt, Artificial Sequence
  Description of Artificial Sequence: Synthetic oligonucleotide
  Antisense strand to SEQ ID NO: 877418
aaucuuggcgaguagauag

SEQ ID NO: 877420 - RNA, 19 nt, Artificial Sequence
  Description of Artificial Sequence: Synthetic oligonucleotide
  Sense strand starting at position 2807 of SEQ ID NO: 588613
gcacucuuguucgugauuu

SEQ ID NO: 877421 - RNA, 19 nt, Artificial Sequence
  Description of Artificial Sequence: Synthetic oligonucleotide
  Antisense strand to SEQ ID NO: 877420
aaaucacgaacaagagugc

SEQ ID NO: 877422 - RNA, 19 nt, Artificial Sequence
  Description of Artificial Sequence: Synthetic oligonucleotide
  Sense strand starting at position 2811 of SEQ ID NO: 588613
ucuuguucgugauuuaucu

SEQ ID NO: 877423 - RNA, 19 nt, Artificial Sequence
  Description of Artificial Sequence: Synthetic oligonucleotide
  Antisense strand to SEQ ID NO: 877422
agauaaaucacgaacaaga

SEQ ID NO: 877424 - RNA, 19 nt, Artificial Sequence
  Description of Artificial Sequence: Synthetic oligonucleotide
  Sense strand starting at position 2815 of SEQ ID NO: 588613
guucgugauuuaucuggua

SEQ ID NO: 877425 - RNA, 19 nt, Artificial Sequence
  Description of Artificial Sequence: Synthetic oligonucleotide
  Antisense strand to SEQ ID NO: 877424
uaccagauaaaucacgaac

SEQ ID NO: 877426 - RNA, 19 nt, Artificial Sequence
  Description of Artificial Sequence: Synthetic oligonucleotide
  Sense strand starting at position 2817 of SEQ ID NO: 588613
ucgugauuuaucugguagu

SEQ ID NO: 877427 - RNA, 19 nt, Artificial Sequence
  Description of Artificial Sequence: Synthetic oligonucleotide
  Antisense strand to SEQ ID NO: 877426
acuaccagauaaaucacga

SEQ ID NO: 877428 - RNA, 19 nt, Artificial Sequence
  Description of Artificial Sequence: Synthetic oligonucleotide
  Sense strand starting at position 3107 of SEQ ID NO: 588613
cucccugguaguggaauua

SEQ ID NO: 877429 - RNA, 19 nt, Artificial Sequence
  Description of Artificial Sequence: Synthetic oligonucleotide
  Antisense strand to SEQ ID NO: 877428
uaauuccacuaccagggag

SEQ ID NO: 877430 - RNA, 19 nt, Artificial Sequence
  Description of Artificial Sequence: Synthetic oligonucleotide
  Sense strand starting at position 3214 of SEQ ID NO: 588613
uugagaaccucucuuagau

SEQ ID NO: 877431 - RNA, 19 nt, Artificial Sequence
  Description of Artificial Sequence: Synthetic oligonucleotide
  Antisense strand to SEQ ID NO: 877430
aucuaagagagguucucaa

SEQ ID NO: 877432 - RNA, 19 nt, Artificial Sequence
  Description of Artificial Sequence: Synthetic oligonucleotide
  Sense strand starting at position 3269 of SEQ ID NO: 588613
gggucagaaaugcagcuau

SEQ ID NO: 877433 - RNA, 19 nt, Artificial Sequence
  Description of Artificial Sequence: Synthetic oligonucleotide
  Antisense strand to SEQ ID NO: 877432
auagcugcauuucugaccc

SEQ ID NO: 877434 - RNA, 19 nt, Artificial Sequence
  Description of Artificial Sequence: Synthetic oligonucleotide
  Sense strand starting at position 3280 of SEQ ID NO: 588613
gcagcuauugucuagaaau

SEQ ID NO: 877435 - RNA, 19 nt, Artificial Sequence
  Description of Artificial Sequence: Synthetic oligonucleotide
  Antisense strand to SEQ ID NO: 877434
auuucuagacaauagcugc

SEQ ID NO: 877436 - RNA, 19 nt, Artificial Sequence
  Description of Artificial Sequence: Synthetic oligonucleotide
  Sense strand starting at position 3282 of SEQ ID NO: 588613
agcuauugucuagaaaucc

SEQ ID NO: 877437 - RNA, 19 nt, Artificial Sequence
  Description of Artificial Sequence: Synthetic oligonucleotide
  Antisense strand to SEQ ID NO: 877436
ggauuucuagacaauagcu

SEQ ID NO: 877438 - RNA, 19 nt, Artificial Sequence
  Description of Artificial Sequence: Synthetic oligonucleotide
  Sense strand starting at position 3290 of SEQ ID NO: 588613
ucuagaaauccagggcugu

SEQ ID NO: 877439 - RNA, 19 nt, Artificial Sequence
  Description of Artificial Sequence: Synthetic oligonucleotide
  Antisense strand to SEQ ID NO: 877438
acagcccuggauuucuaga

SEQ ID NO: 877440 - RNA, 19 nt, Artificial Sequence
  Description of Artificial Sequence: Synthetic oligonucleotide
  Sense strand starting at position 3301 of SEQ ID NO: 588613
agggcuguccugcauaauc

SEQ ID NO: 877441 - RNA, 19 nt, Artificial Sequence
  Description of Artificial Sequence: Synthetic oligonucleotide
  Antisense strand to SEQ ID NO: 877440
gauuaugcaggacagcccu

SEQ ID NO: 877442 - RNA, 19 nt, Artificial Sequence
  Description of Artificial Sequence: Synthetic oligonucleotide
  Sense strand starting at position 3303 of SEQ ID NO: 588613
ggcuguccugcauaaucua

SEQ ID NO: 877443 - RNA, 19 nt, Artificial Sequence
  Description of Artificial Sequence: Synthetic oligonucleotide
  Antisense strand to SEQ ID NO: 877442
uagauuaugcaggacagcc

SEQ ID NO: 877444 - RNA, 19 nt, Artificial Sequence
  Description of Artificial Sequence: Synthetic oligonucleotide
  Sense strand starting at position 3461 of SEQ ID NO: 588613
gcagugaugcuggaggagu

SEQ ID NO: 877445 - RNA, 19 nt, Artificial Sequence
  Description of Artificial Sequence: Synthetic oligonucleotide
  Antisense strand to SEQ ID NO: 877444
acuccuccagcaucacugc

SEQ ID NO: 877446 - RNA, 19 nt, Artificial Sequence
  Description of Artificial Sequence: Synthetic oligonucleotide
  Sense strand starting at position 3567 of SEQ ID NO: 588613
auuauaucugugcaucauu

SEQ ID NO: 877447 - RNA, 19 nt, Artificial Sequence
  Description of Artificial Sequence: Synthetic oligonucleotide
  Antisense strand to SEQ ID NO: 877446
aaugaugcacagauauaau

SEQ ID NO: 877448 - RNA, 19 nt, Artificial Sequence
  Description of Artificial Sequence: Synthetic oligonucleotide
  Sense strand starting at position 3590 of SEQ ID NO: 588613
guuaccaucuaacuuggaa

SEQ ID NO: 877449 - RNA, 19 nt, Artificial Sequence
  Description of Artificial Sequence: Synthetic oligonucleotide
  Antisense strand to SEQ ID NO: 877448
uuccaaguuagaugguaac

SEQ ID NO: 877450 - RNA, 19 nt, Artificial Sequence
  Description of Artificial Sequence: Synthetic oligonucleotide
  Sense strand starting at position 3615 of SEQ ID NO: 588613
ggaagugugaaagguaucu

SEQ ID NO: 877451 - RNA, 19 nt, Artificial Sequence
  Description of Artificial Sequence: Synthetic oligonucleotide
  Antisense strand to SEQ ID NO: 877450
agauaccuuucacacuucc

SEQ ID NO: 877452 - RNA, 19 nt, Artificial Sequence
  Description of Artificial Sequence: Synthetic oligonucleotide
  Sense strand starting at position 3617 of SEQ ID NO: 588613
aagugugaaagguaucuga

SEQ ID NO: 877453 - RNA, 19 nt, Artificial Sequence
  Description of Artificial Sequence: Synthetic oligonucleotide
  Antisense strand to SEQ ID NO: 877452
ucagauaccuuucacacuu

SEQ ID NO: 877454 - RNA, 19 nt, Artificial Sequence
  Description of Artificial Sequence: Synthetic oligonucleotide
  Sense strand starting at position 3620 of SEQ ID NO: 588613
ugugaaagguaucugagau

SEQ ID NO: 877455 - RNA, 19 nt, Artificial Sequence
  Description of Artificial Sequence: Synthetic oligonucleotide
  Antisense strand to SEQ ID NO: 877454
aucucagauaccuuucaca

SEQ ID NO: 877456 - RNA, 19 nt, Artificial Sequence
  Description of Artificial Sequence: Synthetic oligonucleotide
  Sense strand starting at position 3621 of SEQ ID NO: 588613
gugaaagguaucugagaua

SEQ ID NO: 877457 - RNA, 19 nt, Artificial Sequence
  Description of Artificial Sequence: Synthetic oligonucleotide
  Antisense strand to SEQ ID NO: 877456
uaucucagauaccuuucac

SEQ ID NO: 877458 - RNA, 19 nt, Artificial Sequence
  Description of Artificial Sequence: Synthetic oligonucleotide
  Sense strand starting at position 3719 of SEQ ID NO: 588613
ggccgaagugaugauguau

SEQ ID NO: 877459 - RNA, 19 nt, Artificial Sequence
  Description of Artificial Sequence: Synthetic oligonucleotide
  Antisense strand to SEQ ID NO: 877458
auacaucaucacuucggcc

SEQ ID NO: 877460 - RNA, 19 nt, Artificial Sequence
  Description of Artificial Sequence: Synthetic oligonucleotide
  Sense strand starting at position 3780 of SEQ ID NO: 588613
ugcagauuaacucgaguaa

SEQ ID NO: 877461 - RNA, 19 nt, Artificial Sequence
  Description of Artificial Sequence: Synthetic oligonucleotide
  Antisense strand to SEQ ID NO: 877460
uuacucgaguuaaucugca

SEQ ID NO: 877462 - RNA, 19 nt, Artificial Sequence
  Description of Artificial Sequence: Synthetic oligonucleotide
  Sense strand starting at position 3781 of SEQ ID NO: 588613
gcagauuaacucgaguaaa

SEQ ID NO: 877463 - RNA, 19 nt, Artificial Sequence
  Description of Artificial Sequence: Synthetic oligonucleotide
  Antisense strand to SEQ ID NO: 877462
uuuacucgaguuaaucugc

SEQ ID NO: 877464 - RNA, 19 nt, Artificial Sequence
  Description of Artificial Sequence: Synthetic oligonucleotide
  Sense strand starting at position 3892 of SEQ ID NO: 588613
gcuguaagguucucaggag

SEQ ID NO: 877465 - RNA, 19 nt, Artificial Sequence
  Description of Artificial Sequence: Synthetic oligonucleotide
  Antisense strand to SEQ ID NO: 877464
cuccugagaaccuuacagc

SEQ ID NO: 877466 - RNA, 19 nt, Artificial Sequence
  Description of Artificial Sequence: Synthetic oligonucleotide
  Sense strand starting at position 35 of SEQ ID NO: 588614
uguaacaguccaggaagaa

SEQ ID NO: 877467 - RNA, 19 nt, Artificial Sequence
  Description of Artificial Sequence: Synthetic oligonucleotide
  Antisense strand to SEQ ID NO: 877466
uucuuccuggacuguuaca

SEQ ID NO: 877468 - RNA, 19 nt, Artificial Sequence
  Description of Artificial Sequence: Synthetic oligonucleotide
  Sense strand starting at position 142 of SEQ ID NO: 588614
aucuguuucccauagguca

SEQ ID NO: 877469 - RNA, 19 nt, Artificial Sequence
  Description of Artificial Sequence: Synthetic oligonucleotide
  Antisense strand to SEQ ID NO: 877468
ugaccuaugggaaacagau

SEQ ID NO: 877470 - RNA, 19 nt, Artificial Sequence
  Description of Artificial Sequence: Synthetic oligonucleotide
  Sense strand starting at position 276 of SEQ ID NO: 588614
uuccuaaaguguccuuuaa

SEQ ID NO: 877471 - RNA, 19 nt, Artificial Sequence
  Description of Artificial Sequence: Synthetic oligonucleotide
  Antisense strand to SEQ ID NO: 877470
uuaaaggacacuuuaggaa

SEQ ID NO: 877472 - RNA, 19 nt, Artificial Sequence
  Description of Artificial Sequence: Synthetic oligonucleotide
  Sense strand starting at position 401 of SEQ ID NO: 588614
agcaaauggccuugaacuu

SEQ ID NO: 877473 - RNA, 19 nt, Artificial Sequence
  Description of Artificial Sequence: Synthetic oligonucleotide
  Antisense strand to SEQ ID NO: 877472
aaguucaaggccauuugcu

SEQ ID NO: 877474 - RNA, 19 nt, Artificial Sequence
  Description of Artificial Sequence: Synthetic oligonucleotide
  Sense strand starting at position 463 of SEQ ID NO: 588614
cgaggccacaauuguuaaa

SEQ ID NO: 877475 - RNA, 19 nt, Artificial Sequence
  Description of Artificial Sequence: Synthetic oligonucleotide
  Antisense strand to SEQ ID NO: 877474
uuuaacaauuguggccucg

SEQ ID NO: 877476 - RNA, 19 nt, Artificial Sequence
  Description of Artificial Sequence: Synthetic oligonucleotide
  Sense strand starting at position 490 of SEQ ID NO: 588614
gggcuaaauuuagaagaac

SEQ ID NO: 877477 - RNA, 19 nt, Artificial Sequence
  Description of Artificial Sequence: Synthetic oligonucleotide
  Antisense strand to SEQ ID NO: 877476
guucuucuaaauuuagccc

SEQ ID NO: 877478 - RNA, 19 nt, Artificial Sequence
  Description of Artificial Sequence: Synthetic oligonucleotide
  Sense strand starting at position 631 of SEQ ID NO: 588614
auucuuaaaggcugagacu

SEQ ID NO: 877479 - RNA, 19 nt, Artificial Sequence
  Description of Artificial Sequence: Synthetic oligonucleotide
  Antisense strand to SEQ ID NO: 877478
agucucagccuuuaagaau

SEQ ID NO: 877480 - RNA, 19 nt, Artificial Sequence
  Description of Artificial Sequence: Synthetic oligonucleotide
  Sense strand starting at position 640 of SEQ ID NO: 588614
ggcugagacuguccuacuu

SEQ ID NO: 877481 - RNA, 19 nt, Artificial Sequence
  Description of Artificial Sequence: Synthetic oligonucleotide
  Antisense strand to SEQ ID NO: 877480
aaguaggacagucucagcc

SEQ ID NO: 877482 - RNA, 19 nt, Artificial Sequence
  Description of Artificial Sequence: Synthetic oligonucleotide
  Sense strand starting at position 738 of SEQ ID NO: 588614
augcaacauuuccaggaaa

SEQ ID NO: 877483 - RNA, 19 nt, Artificial Sequence
  Description of Artificial Sequence: Synthetic oligonucleotide
  Antisense strand to SEQ ID NO: 877482
uuuccuggaaauguugcau

SEQ ID NO: 877484 - RNA, 19 nt, Artificial Sequence
  Description of Artificial Sequence: Synthetic oligonucleotide
  Sense strand starting at position 760 of SEQ ID NO: 588614
uuaugugauuugucuuguc

SEQ ID NO: 877485 - RNA, 19 nt, Artificial Sequence
  Description of Artificial Sequence: Synthetic oligonucleotide
  Antisense strand to SEQ ID NO: 877484
gacaagacaaaucacauaa

SEQ ID NO: 877486 - RNA, 19 nt, Artificial Sequence
  Description of Artificial Sequence: Synthetic oligonucleotide
  Sense strand starting at position 769 of SEQ ID NO: 588614
uugucuugucgugucugaa

SEQ ID NO: 877487 - RNA, 19 nt, Artificial Sequence
  Description of Artificial Sequence: Synthetic oligonucleotide
  Antisense strand to SEQ ID NO: 877486
uucagacacgacaagacaa

SEQ ID NO: 877488 - RNA, 19 nt, Artificial Sequence
  Description of Artificial Sequence: Synthetic oligonucleotide
  Sense strand starting at position 820 of SEQ ID NO: 588614
gaucgaauggaaugcauua

SEQ ID NO: 877489 - RNA, 19 nt, Artificial Sequence
  Description of Artificial Sequence: Synthetic oligonucleotide
  Antisense strand to SEQ ID NO: 877488
uaaugcauuccauucgauc

SEQ ID NO: 877490 - RNA, 19 nt, Artificial Sequence
  Description of Artificial Sequence: Synthetic oligonucleotide
  Sense strand starting at position 854 of SEQ ID NO: 588614
ggagguaaacgucacaaug

SEQ ID NO: 877491 - RNA, 19 nt, Artificial Sequence
  Description of Artificial Sequence: Synthetic oligonucleotide
  Antisense strand to SEQ ID NO: 877490
cauugugacguuuaccucc

SEQ ID NO: 877492 - RNA, 19 nt, Artificial Sequence
  Description of Artificial Sequence: Synthetic oligonucleotide
  Sense strand starting at position 866 of SEQ ID NO: 588614
cacaaugguucgucccaga

SEQ ID NO: 877493 - RNA, 19 nt, Artificial Sequence
  Description of Artificial Sequence: Synthetic oligonucleotide
  Antisense strand to SEQ ID NO: 877492
ucugggacgaaccauugug

SEQ ID NO: 877494 - RNA, 19 nt, Artificial Sequence
  Description of Artificial Sequence: Synthetic oligonucleotide
  Sense strand starting at position 1006 of SEQ ID NO: 588614
ggacguaauauagacguaa

SEQ ID NO: 877495 - RNA, 19 nt, Artificial Sequence
  Description of Artificial Sequence: Synthetic oligonucleotide
  Antisense strand to SEQ ID NO: 877494
uuacgucuauauuacgucc

SEQ ID NO: 877496 - RNA, 19 nt, Artificial Sequence
  Description of Artificial Sequence: Synthetic oligonucleotide
  Sense strand starting at position 1008 of SEQ ID NO: 588614
acguaauauagacguaaau

SEQ ID NO: 877497 - RNA, 19 nt, Artificial Sequence
  Description of Artificial Sequence: Synthetic oligonucleotide
  Antisense strand to SEQ ID NO: 877496
auuuacgucuauauuacgu

SEQ ID NO: 877498 - RNA, 19 nt, Artificial Sequence
  Description of Artificial Sequence: Synthetic oligonucleotide
  Sense strand starting at position 1041 of SEQ ID NO: 588614
caacgcugcgccucaauua

SEQ ID NO: 877499 - RNA, 19 nt, Artificial Sequence
  Description of Artificial Sequence: Synthetic oligonucleotide
  Antisense strand to SEQ ID NO: 877498
uaauugaggcgcagcguug

SEQ ID NO: 877500 - RNA, 19 nt, Artificial Sequence
  Description of Artificial Sequence: Synthetic oligonucleotide
  Sense strand starting at position 1130 of SEQ ID NO: 588614
cagauuaugcaauguauga

SEQ ID NO: 877501 - RNA, 19 nt, Artificial Sequence
  Description of Artificial Sequence: Synthetic oligonucleotide
  Antisense strand to SEQ ID NO: 877500
ucauacauugcauaaucug

SEQ ID NO: 877502 - RNA, 19 nt, Artificial Sequence
  Description of Artificial Sequence: Synthetic oligonucleotide
  Sense strand starting at position 1447 of SEQ ID NO: 588614
ggcgcucuucuuuaccaaa

SEQ ID NO: 877503 - RNA, 19 nt, Artificial Sequence
  Description of Artificial Sequence: Synthetic oligonucleotide
  Antisense strand to SEQ ID NO: 877502
uuugguaaagaagagcgcc

SEQ ID NO: 877504 - RNA, 19 nt, Artificial Sequence
  Description of Artificial Sequence: Synthetic oligonucleotide
  Sense strand starting at position 2661 of SEQ ID NO: 588614
ggcggaggcagcgauuaaa

SEQ ID NO: 877505 - RNA, 19 nt, Artificial Sequence
  Description of Artificial Sequence: Synthetic oligonucleotide
  Antisense strand to SEQ ID NO: 877504
uuuaaucgcugccuccgcc

SEQ ID NO: 877506 - RNA, 19 nt, Artificial Sequence
  Description of Artificial Sequence: Synthetic oligonucleotide
  Sense strand starting at position 2726 of SEQ ID NO: 588614
gggaaagcuccacgcacaa

SEQ ID NO: 877507 - RNA, 19 nt, Artificial Sequence
  Description of Artificial Sequence: Synthetic oligonucleotide
  Antisense strand to SEQ ID NO: 877506
uugugcguggagcuuuccc

SEQ ID NO: 877508 - RNA, 19 nt, Artificial Sequence
  Description of Artificial Sequence: Synthetic oligonucleotide
  Sense strand starting at position 2757 of SEQ ID NO: 588614
gcacaauuagggcgaagau

SEQ ID NO: 877509 - RNA, 19 nt, Artificial Sequence
  Description of Artificial Sequence: Synthetic oligonucleotide
  Antisense strand to SEQ ID NO: 877508
aucuucgcccuaauugugc

SEQ ID NO: 877510 - RNA, 19 nt, Artificial Sequence
  Description of Artificial Sequence: Synthetic oligonucleotide
  Sense strand starting at position 2772 of SEQ ID NO: 588614
agaugacggcugcaaaguu

SEQ ID NO: 877511 - RNA, 19 nt, Artificial Sequence
  Description of Artificial Sequence: Synthetic oligonucleotide
  Antisense strand to SEQ ID NO: 877510
aacuuugcagccgucaucu

SEQ ID NO: 877512 - RNA, 19 nt, Artificial Sequence
  Description of Artificial Sequence: Synthetic oligonucleotide
  Sense strand starting at position 2794 of SEQ ID NO: 588614
gcguaacacgacugggaaa

SEQ ID NO: 877513 - RNA, 19 nt, Artificial Sequence
  Description of Artificial Sequence: Synthetic oligonucleotide
  Antisense strand to SEQ ID NO: 877512
uuucccagucguguuacgc

SEQ ID NO: 877514 - RNA, 19 nt, Artificial Sequence
  Description of Artificial Sequence: Synthetic oligonucleotide
  Sense strand starting at position 2948 of SEQ ID NO: 588614
cgggaucucuuccugugau

SEQ ID NO: 877515 - RNA, 19 nt, Artificial Sequence
  Description of Artificial Sequence: Synthetic oligonucleotide
  Antisense strand to SEQ ID NO: 877514
aucacaggaagagaucccg

SEQ ID NO: 877516 - RNA, 19 nt, Artificial Sequence
  Description of Artificial Sequence: Synthetic oligonucleotide
  Sense strand starting at position 2986 of SEQ ID NO: 588614
aguguuauuucugcgucua

SEQ ID NO: 877517 - RNA, 19 nt, Artificial Sequence
  Description of Artificial Sequence: Synthetic oligonucleotide
  Antisense strand to SEQ ID NO: 877516
uagacgcagaaauaacacu

SEQ ID NO: 877518 - RNA, 19 nt, Artificial Sequence
  Description of Artificial Sequence: Synthetic oligonucleotide
  Sense strand starting at position 2987 of SEQ ID NO: 588614
guguuauuucugcgucuaa

SEQ ID NO: 877519 - RNA, 19 nt, Artificial Sequence
  Description of Artificial Sequence: Synthetic oligonucleotide
  Antisense strand to SEQ ID NO: 877518
uuagacgcagaaauaacac

SEQ ID NO: 877520 - RNA, 19 nt, Artificial Sequence
  Description of Artificial Sequence: Synthetic oligonucleotide
  Sense strand starting at position 2988 of SEQ ID NO: 588614
uguuauuucugcgucuaac

SEQ ID NO: 877521 - RNA, 19 nt, Artificial Sequence
  Description of Artificial Sequence: Synthetic oligonucleotide
  Antisense strand to SEQ ID NO: 877520
guuagacgcagaaauaaca

SEQ ID NO: 877522 - RNA, 19 nt, Artificial Sequence
  Description of Artificial Sequence: Synthetic oligonucleotide
  Sense strand starting at position 3015 of SEQ ID NO: 588614
guagucuucucucccaaau

SEQ ID NO: 877523 - RNA, 19 nt, Artificial Sequence
  Description of Artificial Sequence: Synthetic oligonucleotide
  Antisense strand to SEQ ID NO: 877522
auuugggagagaagacuac

SEQ ID NO: 877524 - RNA, 19 nt, Artificial Sequence
  Description of Artificial Sequence: Synthetic oligonucleotide
  Sense strand starting at position 3410 of SEQ ID NO: 588614
ccaugagcagcagaucuau

SEQ ID NO: 877525 - RNA, 19 nt, Artificial Sequence
  Description of Artificial Sequence: Synthetic oligonucleotide
  Antisense strand to SEQ ID NO: 877524
auagaucugcugcucaugg

SEQ ID NO: 877526 - RNA, 19 nt, Artificial Sequence
  Description of Artificial Sequence: Synthetic oligonucleotide
  Sense strand starting at position 3421 of SEQ ID NO: 588614
agaucuaucuacucgccaa

SEQ ID NO: 877527 - RNA, 19 nt, Artificial Sequence
  Description of Artificial Sequence: Synthetic oligonucleotide
  Antisense strand to SEQ ID NO: 877526
uuggcgaguagauagaucu

SEQ ID NO: 877528 - RNA, 19 nt, Artificial Sequence
  Description of Artificial Sequence: Synthetic oligonucleotide
  Sense strand starting at position 3424 of SEQ ID NO: 588614
ucuaucuacucgccaagau

SEQ ID NO: 877529 - RNA, 19 nt, Artificial Sequence
  Description of Artificial Sequence: Synthetic oligonucleotide
  Antisense strand to SEQ ID NO: 877528
aucuuggcgaguagauaga

SEQ ID NO: 877530 - RNA, 19 nt, Artificial Sequence
  Description of Artificial Sequence: Synthetic oligonucleotide
  Sense strand starting at position 3425 of SEQ ID NO: 588614
cuaucuacucgccaagauu

SEQ ID NO: 877531 - RNA, 19 nt, Artificial Sequence
  Description of Artificial Sequence: Synthetic oligonucleotide
  Antisense strand to SEQ ID NO: 877530
aaucuuggcgaguagauag

SEQ ID NO: 877532 - RNA, 19 nt, Artificial Sequence
  Description of Artificial Sequence: Synthetic oligonucleotide
  Sense strand starting at position 3571 of SEQ ID NO: 588614
gcacucuuguucgugauuu

SEQ ID NO: 877533 - RNA, 19 nt, Artificial Sequence
  Description of Artificial Sequence: Synthetic oligonucleotide
  Antisense strand to SEQ ID NO: 877532
aaaucacgaacaagagugc

SEQ ID NO: 877534 - RNA, 19 nt, Artificial Sequence
  Description of Artificial Sequence: Synthetic oligonucleotide
  Sense strand starting at position 3575 of SEQ ID NO: 588614
ucuuguucgugauuuaucu

SEQ ID NO: 877535 - RNA, 19 nt, Artificial Sequence
  Description of Artificial Sequence: Synthetic oligonucleotide
  Antisense strand to SEQ ID NO: 877534
agauaaaucacgaacaaga

SEQ ID NO: 877536 - RNA, 19 nt, Artificial Sequence
  Description of Artificial Sequence: Synthetic oligonucleotide
  Sense strand starting at position 3579 of SEQ ID NO: 588614
guucgugauuuaucuggua

SEQ ID NO: 877537 - RNA, 19 nt, Artificial Sequence
  Description of Artificial Sequence: Synthetic oligonucleotide
  Antisense strand to SEQ ID NO: 877536
uaccagauaaaucacgaac

SEQ ID NO: 877538 - RNA, 19 nt, Artificial Sequence
  Description of Artificial Sequence: Synthetic oligonucleotide
  Sense strand starting at position 3581 of SEQ ID NO: 588614
ucgugauuuaucugguagu

SEQ ID NO: 877539 - RNA, 19 nt, Artificial Sequence
  Description of Artificial Sequence: Synthetic oligonucleotide
  Antisense strand to SEQ ID NO: 877538
acuaccagauaaaucacga

SEQ ID NO: 877540 - RNA, 19 nt, Artificial Sequence
  Description of Artificial Sequence: Synthetic oligonucleotide
  Sense strand starting at position 3584 of SEQ ID NO: 588614
ugauuuaucugguaguaca

SEQ ID NO: 877541 - RNA, 19 nt, Artificial Sequence
  Description of Artificial Sequence: Synthetic oligonucleotide
  Antisense strand to SEQ ID NO: 877540
uguacuaccagauaaauca

SEQ ID NO: 877542 - RNA, 19 nt, Artificial Sequence
  Description of Artificial Sequence: Synthetic oligonucleotide
  Sense strand starting at position 3871 of SEQ ID NO: 588614
cucccugguaguggaauua

SEQ ID NO: 877543 - RNA, 19 nt, Artificial Sequence
  Description of Artificial Sequence: Synthetic oligonucleotide
  Antisense strand to SEQ ID NO: 877542
uaauuccacuaccagggag

SEQ ID NO: 877544 - RNA, 19 nt, Artificial Sequence
  Description of Artificial Sequence: Synthetic oligonucleotide
  Sense strand starting at position 3978 of SEQ ID NO: 588614
uugagaaccucucuuagau

SEQ ID NO: 877545 - RNA, 19 nt, Artificial Sequence
  Description of Artificial Sequence: Synthetic oligonucleotide
  Antisense strand to SEQ ID NO: 877544
aucuaagagagguucucaa

SEQ ID NO: 877546 - RNA, 19 nt, Artificial Sequence
  Description of Artificial Sequence: Synthetic oligonucleotide
  Sense strand starting at position 76 of SEQ ID NO: 588615
ugggcuucuguuuaaagac

SEQ ID NO: 877547 - RNA, 19 nt, Artificial Sequence
  Description of Artificial Sequence: Synthetic oligonucleotide
  Antisense strand to SEQ ID NO: 877546
gucuuuaaacagaagccca

SEQ ID NO: 877548 - RNA, 19 nt, Artificial Sequence
  Description of Artificial Sequence: Synthetic oligonucleotide
  Sense strand starting at position 85 of SEQ ID NO: 588615
guuuaaagacuuugaugau

SEQ ID NO: 877549 - RNA, 19 nt, Artificial Sequence
  Description of Artificial Sequence: Synthetic oligonucleotide
  Antisense strand to SEQ ID NO: 877548
aucaucaaagucuuuaaac

SEQ ID NO: 877550 - RNA, 19 nt, Artificial Sequence
  Description of Artificial Sequence: Synthetic oligonucleotide
  Sense strand starting at position 86 of SEQ ID NO: 588615
uuuaaagacuuugaugaug

SEQ ID NO: 877551 - RNA, 19 nt, Artificial Sequence
  Description of Artificial Sequence: Synthetic oligonucleotide
  Antisense strand to SEQ ID NO: 877550
caucaucaaagucuuuaaa

SEQ ID NO: 877552 - RNA, 19 nt, Artificial Sequence
  Description of Artificial Sequence: Synthetic oligonucleotide
  Sense strand starting at position 88 of SEQ ID NO: 588615
uaaagacuuugaugaugag

SEQ ID NO: 877553 - RNA, 19 nt, Artificial Sequence
  Description of Artificial Sequence: Synthetic oligonucleotide
  Antisense strand to SEQ ID NO: 877552
cucaucaucaaagucuuua

SEQ ID NO: 877554 - RNA, 19 nt, Artificial Sequence
  Description of Artificial Sequence: Synthetic oligonucleotide
  Sense strand starting at position 104 of SEQ ID NO: 588615
gagggugugggcuaaagau

SEQ ID NO: 877555 - RNA, 19 nt, Artificial Sequence
  Description of Artificial Sequence: Synthetic oligonucleotide
  Antisense strand to SEQ ID NO: 877554
aucuuuagcccacacccuc

SEQ ID NO: 877556 - RNA, 19 nt, Artificial Sequence
  Description of Artificial Sequence: Synthetic oligonucleotide
  Sense strand starting at position 188 of SEQ ID NO: 588615
uaaggaggucuuuggacua

SEQ ID NO: 877557 - RNA, 19 nt, Artificial Sequence
  Description of Artificial Sequence: Synthetic oligonucleotide
  Antisense strand to SEQ ID NO: 877556
uaguccaaagaccuccuua

SEQ ID NO: 877558 - RNA, 19 nt, Artificial Sequence
  Description of Artificial Sequence: Synthetic oligonucleotide
  Sense strand starting at position 221 of SEQ ID NO: 588615
auuagauacuuucuggguu

SEQ ID NO: 877559 - RNA, 19 nt, Artificial Sequence
  Description of Artificial Sequence: Synthetic oligonucleotide
  Antisense strand to SEQ ID NO: 877558
aacccagaaaguaucuaau

SEQ ID NO: 877560 - RNA, 19 nt, Artificial Sequence
  Description of Artificial Sequence: Synthetic oligonucleotide
  Sense strand starting at position 224 of SEQ ID NO: 588615
agauacuuucuggguugga

SEQ ID NO: 877561 - RNA, 19 nt, Artificial Sequence
  Description of Artificial Sequence: Synthetic oligonucleotide
  Antisense strand to SEQ ID NO: 877560
uccaacccagaaaguaucu

SEQ ID NO: 877562 - RNA, 19 nt, Artificial Sequence
  Description of Artificial Sequence: Synthetic oligonucleotide
  Sense strand starting at position 242 of SEQ ID NO: 588615
agguaauaacuugggcaca

SEQ ID NO: 877563 - RNA, 19 nt, Artificial Sequence
  Description of Artificial Sequence: Synthetic oligonucleotide
  Antisense strand to SEQ ID NO: 877562
ugugcccaaguuauuaccu

SEQ ID NO: 877564 - RNA, 19 nt, Artificial Sequence
  Description of Artificial Sequence: Synthetic oligonucleotide
  Sense strand starting at position 330 of SEQ ID NO: 588615
agaaaugagucagaaacga

SEQ ID NO: 877565 - RNA, 19 nt, Artificial Sequence
  Description of Artificial Sequence: Synthetic oligonucleotide
  Antisense strand to SEQ ID NO: 877564
ucguuucugacucauuucu

SEQ ID NO: 877566 - RNA, 19 nt, Artificial Sequence
  Description of Artificial Sequence: Synthetic oligonucleotide
  Sense strand starting at position 381 of SEQ ID NO: 588615
uagagaaucuggugaagga

SEQ ID NO: 877567 - RNA, 19 nt, Artificial Sequence
  Description of Artificial Sequence: Synthetic oligonucleotide
  Antisense strand to SEQ ID NO: 877566
uccuucaccagauucucua

SEQ ID NO: 877568 - RNA, 19 nt, Artificial Sequence
  Description of Artificial Sequence: Synthetic oligonucleotide
  Sense strand starting at position 484 of SEQ ID NO: 588615
acaccaaugcaguguguuu

SEQ ID NO: 877569 - RNA, 19 nt, Artificial Sequence
  Description of Artificial Sequence: Synthetic oligonucleotide
  Antisense strand to SEQ ID NO: 877568
aaacacacugcauuggugu

SEQ ID NO: 877570 - RNA, 19 nt, Artificial Sequence
  Description of Artificial Sequence: Synthetic oligonucleotide
  Sense strand starting at position 864 of SEQ ID NO: 588615
cauauauggucuucuuggu

SEQ ID NO: 877571 - RNA, 19 nt, Artificial Sequence
  Description of Artificial Sequence: Synthetic oligonucleotide
  Antisense strand to SEQ ID NO: 877570
accaagaagaccauauaug

SEQ ID NO: 877572 - RNA, 19 nt, Artificial Sequence
  Description of Artificial Sequence: Synthetic oligonucleotide
  Sense strand starting at position 898 of SEQ ID NO: 588615
cagggacagagcugagauu

SEQ ID NO: 877573 - RNA, 19 nt, Artificial Sequence
  Description of Artificial Sequence: Synthetic oligonucleotide
  Antisense strand to SEQ ID NO: 877572
aaucucagcucugucccug

SEQ ID NO: 877574 - RNA, 19 nt, Artificial Sequence
  Description of Artificial Sequence: Synthetic oligonucleotide
  Sense strand starting at position 992 of SEQ ID NO: 588615
ggcagugggcugugacaua

SEQ ID NO: 877575 - RNA, 19 nt, Artificial Sequence
  Description of Artificial Sequence: Synthetic oligonucleotide
  Antisense strand to SEQ ID NO: 877574
uaugucacagcccacugcc

SEQ ID NO: 877576 - RNA, 19 nt, Artificial Sequence
  Description of Artificial Sequence: Synthetic oligonucleotide
  Sense strand starting at position 1033 of SEQ ID NO: 588615
gaauauauugcugauugua

SEQ ID NO: 877577 - RNA, 19 nt, Artificial Sequence
  Description of Artificial Sequence: Synthetic oligonucleotide
  Antisense strand to SEQ ID NO: 877576
uacaaucagcaauauauuc

SEQ ID NO: 877578 - RNA, 19 nt, Artificial Sequence
  Description of Artificial Sequence: Synthetic oligonucleotide
  Sense strand starting at position 1080 of SEQ ID NO: 588615
agaaacuucugguucgcuu

SEQ ID NO: 877579 - RNA, 19 nt, Artificial Sequence
  Description of Artificial Sequence: Synthetic oligonucleotide
  Antisense strand to SEQ ID NO: 877578
aagcgaaccagaaguuucu

SEQ ID NO: 877580 - RNA, 19 nt, Artificial Sequence
  Description of Artificial Sequence: Synthetic oligonucleotide
  Sense strand starting at position 1122 of SEQ ID NO: 588615
auuuaaggucgcgaugcaa

SEQ ID NO: 877581 - RNA, 19 nt, Artificial Sequence
  Description of Artificial Sequence: Synthetic oligonucleotide
  Antisense strand to SEQ ID NO: 877580
uugcaucgcgaccuuaaau

SEQ ID NO: 877582 - RNA, 19 nt, Artificial Sequence
  Description of Artificial Sequence: Synthetic oligonucleotide
  Sense strand starting at position 1202 of SEQ ID NO: 588615
ggaaauggauguuauauca

SEQ ID NO: 877583 - RNA, 19 nt, Artificial Sequence
  Description of Artificial Sequence: Synthetic oligonucleotide
  Antisense strand to SEQ ID NO: 877582
ugauauaacauccauuucc

SEQ ID NO: 877584 - RNA, 19 nt, Artificial Sequence
  Description of Artificial Sequence: Synthetic oligonucleotide
  Sense strand starting at position 1210 of SEQ ID NO: 588615
auguuauaucaacgaacaa

SEQ ID NO: 877585 - RNA, 19 nt, Artificial Sequence
  Description of Artificial Sequence: Synthetic oligonucleotide
  Antisense strand to SEQ ID NO: 877584
uuguucguugauauaacau

SEQ ID NO: 877586 - RNA, 19 nt, Artificial Sequence
  Description of Artificial Sequence: Synthetic oligonucleotide
  Sense strand starting at position 1227 of SEQ ID NO: 588615
aaaugaggcugucucuaca

SEQ ID NO: 877587 - RNA, 19 nt, Artificial Sequence
  Description of Artificial Sequence: Synthetic oligonucleotide
  Antisense strand to SEQ ID NO: 877586
uguagagacagccucauuu

SEQ ID NO: 877588 - RNA, 19 nt, Artificial Sequence
  Description of Artificial Sequence: Synthetic oligonucleotide
  Sense strand starting at position 1274 of SEQ ID NO: 588615
agugaacaauuacagaaua

SEQ ID NO: 877589 - RNA, 19 nt, Artificial Sequence
  Description of Artificial Sequence: Synthetic oligonucleotide
  Antisense strand to SEQ ID NO: 877588
uauucuguaauuguucacu

SEQ ID NO: 877590 - RNA, 19 nt, Artificial Sequence
  Description of Artificial Sequence: Synthetic oligonucleotide
  Sense strand starting at position 1309 of SEQ ID NO: 588615
ggagccaucacaggaauua

SEQ ID NO: 877591 - RNA, 19 nt, Artificial Sequence
  Description of Artificial Sequence: Synthetic oligonucleotide
  Antisense strand to SEQ ID NO: 877590
uaauuccugugauggcucc

SEQ ID NO: 877592 - RNA, 19 nt, Artificial Sequence
  Description of Artificial Sequence: Synthetic oligonucleotide
  Sense strand starting at position 1599 of SEQ ID NO: 588615
aguccucucuccuccgaaa

SEQ ID NO: 877593 - RNA, 19 nt, Artificial Sequence
  Description of Artificial Sequence: Synthetic oligonucleotide
  Antisense strand to SEQ ID NO: 877592
uuucggaggagagaggacu

SEQ ID NO: 877594 - RNA, 19 nt, Artificial Sequence
  Description of Artificial Sequence: Synthetic oligonucleotide
  Sense strand starting at position 1720 of SEQ ID NO: 588615
ugugcuacucucgcgauau

SEQ ID NO: 877595 - RNA, 19 nt, Artificial Sequence
  Description of Artificial Sequence: Synthetic oligonucleotide
  Antisense strand to SEQ ID NO: 877594
auaucgcgagaguagcaca

SEQ ID NO: 877596 - RNA, 19 nt, Artificial Sequence
  Description of Artificial Sequence: Synthetic oligonucleotide
  Sense strand starting at position 1722 of SEQ ID NO: 588615
ugcuacucucgcgauauga

SEQ ID NO: 877597 - RNA, 19 nt, Artificial Sequence
  Description of Artificial Sequence: Synthetic oligonucleotide
  Antisense strand to SEQ ID NO: 877596
ucauaucgcgagaguagca

SEQ ID NO: 877598 - RNA, 19 nt, Artificial Sequence
  Description of Artificial Sequence: Synthetic oligonucleotide
  Sense strand starting at position 1724 of SEQ ID NO: 588615
cuacucucgcgauaugagu

SEQ ID NO: 877599 - RNA, 19 nt, Artificial Sequence
  Description of Artificial Sequence: Synthetic oligonucleotide
  Antisense strand to SEQ ID NO: 877598
acucauaucgcgagaguag

SEQ ID NO: 877600 - RNA, 19 nt, Artificial Sequence
  Description of Artificial Sequence: Synthetic oligonucleotide
  Sense strand starting at position 1730 of SEQ ID NO: 588615
ucgcgauaugaguggcuga

SEQ ID NO: 877601 - RNA, 19 nt, Artificial Sequence
  Description of Artificial Sequence: Synthetic oligonucleotide
  Antisense strand to SEQ ID NO: 877600
ucagccacucauaucgcga

SEQ ID NO: 877602 - RNA, 19 nt, Artificial Sequence
  Description of Artificial Sequence: Synthetic oligonucleotide
  Sense strand starting at position 1750 of SEQ ID NO: 588615
gcccuagaacuucgucacu

SEQ ID NO: 877603 - RNA, 19 nt, Artificial Sequence
  Description of Artificial Sequence: Synthetic oligonucleotide
  Antisense strand to SEQ ID NO: 877602
agugacgaaguucuagggc

SEQ ID NO: 877604 - RNA, 19 nt, Artificial Sequence
  Description of Artificial Sequence: Synthetic oligonucleotide
  Sense strand starting at position 1752 of SEQ ID NO: 588615
ccuagaacuucgucacuga

SEQ ID NO: 877605 - RNA, 19 nt, Artificial Sequence
  Description of Artificial Sequence: Synthetic oligonucleotide
  Antisense strand to SEQ ID NO: 877604
ucagugacgaaguucuagg

SEQ ID NO: 877606 - RNA, 19 nt, Artificial Sequence
  Description of Artificial Sequence: Synthetic oligonucleotide
  Sense strand starting at position 1816 of SEQ ID NO: 588615
gacaauaccugagacagga

SEQ ID NO: 877607 - RNA, 19 nt, Artificial Sequence
  Description of Artificial Sequence: Synthetic oligonucleotide
  Antisense strand to SEQ ID NO: 877606
uccugucucagguauuguc

SEQ ID NO: 877608 - RNA, 19 nt, Artificial Sequence
  Description of Artificial Sequence: Synthetic oligonucleotide
  Sense strand starting at position 1996 of SEQ ID NO: 588615
cgcguucgugacgucagau

SEQ ID NO: 877609 - RNA, 19 nt, Artificial Sequence
  Description of Artificial Sequence: Synthetic oligonucleotide
  Antisense strand to SEQ ID NO: 877608
aucugacgucacgaacgcg

SEQ ID NO: 877610 - RNA, 19 nt, Artificial Sequence
  Description of Artificial Sequence: Synthetic oligonucleotide
  Sense strand starting at position 1997 of SEQ ID NO: 588615
gcguucgugacgucagaua

SEQ ID NO: 877611 - RNA, 19 nt, Artificial Sequence
  Description of Artificial Sequence: Synthetic oligonucleotide
  Antisense strand to SEQ ID NO: 877610
uaucugacgucacgaacgc

SEQ ID NO: 877612 - RNA, 19 nt, Artificial Sequence
  Description of Artificial Sequence: Synthetic oligonucleotide
  Sense strand starting at position 1999 of SEQ ID NO: 588615
guucgugacgucagauaga

SEQ ID NO: 877613 - RNA, 19 nt, Artificial Sequence
  Description of Artificial Sequence: Synthetic oligonucleotide
  Antisense strand to SEQ ID NO: 877612
ucuaucugacgucacgaac

SEQ ID NO: 877614 - RNA, 19 nt, Artificial Sequence
  Description of Artificial Sequence: Synthetic oligonucleotide
  Sense strand starting at position 2047 of SEQ ID NO: 588615
cuaguagcuggauggaaau

SEQ ID NO: 877615 - RNA, 19 nt, Artificial Sequence
  Description of Artificial Sequence: Synthetic oligonucleotide
  Antisense strand to SEQ ID NO: 877614
auuuccauccagcuacuag

SEQ ID NO: 877616 - RNA, 19 nt, Artificial Sequence
  Description of Artificial Sequence: Synthetic oligonucleotide
  Sense strand starting at position 2089 of SEQ ID NO: 588615
cggcgacuugcguaaucau

SEQ ID NO: 877617 - RNA, 19 nt, Artificial Sequence
  Description of Artificial Sequence: Synthetic oligonucleotide
  Antisense strand to SEQ ID NO: 877616
augauuacgcaagucgccg

SEQ ID NO: 877618 - RNA, 19 nt, Artificial Sequence
  Description of Artificial Sequence: Synthetic oligonucleotide
  Sense strand starting at position 2097 of SEQ ID NO: 588615
ugcguaaucauugugguuu

SEQ ID NO: 877619 - RNA, 19 nt, Artificial Sequence
  Description of Artificial Sequence: Synthetic oligonucleotide
  Antisense strand to SEQ ID NO: 877618
aaaccacaaugauuacgca

SEQ ID NO: 877620 - RNA, 19 nt, Artificial Sequence
  Description of Artificial Sequence: Synthetic oligonucleotide
  Sense strand starting at position 2350 of SEQ ID NO: 588615
uccuaaagugcuuggcuua

SEQ ID NO: 877621 - RNA, 19 nt, Artificial Sequence
  Description of Artificial Sequence: Synthetic oligonucleotide
  Antisense strand to SEQ ID NO: 877620
uaagccaagcacuuuagga

SEQ ID NO: 877622 - RNA, 19 nt, Artificial Sequence
  Description of Artificial Sequence: Synthetic oligonucleotide
  Sense strand starting at position 2832 of SEQ ID NO: 588615
cggguggcuccugagguaa

SEQ ID NO: 877623 - RNA, 19 nt, Artificial Sequence
  Description of Artificial Sequence: Synthetic oligonucleotide
  Antisense strand to SEQ ID NO: 877622
uuaccucaggagccacccg

SEQ ID NO: 877624 - RNA, 19 nt, Artificial Sequence
  Description of Artificial Sequence: Synthetic oligonucleotide
  Sense strand starting at position 3664 of SEQ ID NO: 588615
caaggauguggauggugaa

SEQ ID NO: 877625 - RNA, 19 nt, Artificial Sequence
  Description of Artificial Sequence: Synthetic oligonucleotide
  Antisense strand to SEQ ID NO: 877624
uucaccauccacauccuug

SEQ ID NO: 877626 - RNA, 19 nt, Artificial Sequence
  Description of Artificial Sequence: Synthetic oligonucleotide
  Sense strand starting at position 431 of SEQ ID NO: 588616
gacagugauccgggaacaa

SEQ ID NO: 877627 - RNA, 19 nt, Artificial Sequence
  Description of Artificial Sequence: Synthetic oligonucleotide
  Antisense strand to SEQ ID NO: 877626
uuguucccggaucacuguc

SEQ ID NO: 877628 - RNA, 19 nt, Artificial Sequence
  Description of Artificial Sequence: Synthetic oligonucleotide
  Sense strand starting at position 581 of SEQ ID NO: 588616
ggagcaguaucccuuccuu

SEQ ID NO: 877629 - RNA, 19 nt, Artificial Sequence
  Description of Artificial Sequence: Synthetic oligonucleotide
  Antisense strand to SEQ ID NO: 877628
aaggaagggauacugcucc

SEQ ID NO: 877630 - RNA, 19 nt, Artificial Sequence
  Description of Artificial Sequence: Synthetic oligonucleotide
  Sense strand starting at position 624 of SEQ ID NO: 588616
ccuguuuauuaccugacuu

SEQ ID NO: 877631 - RNA, 19 nt, Artificial Sequence
  Description of Artificial Sequence: Synthetic oligonucleotide
  Antisense strand to SEQ ID NO: 877630
aagucagguaauaaacagg

SEQ ID NO: 877632 - RNA, 19 nt, Artificial Sequence
  Description of Artificial Sequence: Synthetic oligonucleotide
  Sense strand starting at position 761 of SEQ ID NO: 588616
ugccuauugcuccaaagug

SEQ ID NO: 877633 - RNA, 19 nt, Artificial Sequence
  Description of Artificial Sequence: Synthetic oligonucleotide
  Antisense strand to SEQ ID NO: 877632
cacuuuggagcaauaggca

SEQ ID NO: 877634 - RNA, 19 nt, Artificial Sequence
  Description of Artificial Sequence: Synthetic oligonucleotide
  Sense strand starting at position 769 of SEQ ID NO: 588616
gcuccaaagugcucacaca

SEQ ID NO: 877635 - RNA, 19 nt, Artificial Sequence
  Description of Artificial Sequence: Synthetic oligonucleotide
  Antisense strand to SEQ ID NO: 877634
ugugugagcacuuuggagc

SEQ ID NO: 877636 - RNA, 19 nt, Artificial Sequence
  Description of Artificial Sequence: Synthetic oligonucleotide
  Sense strand starting at position 838 of SEQ ID NO: 588616
gugcgacagcuccucucua

SEQ ID NO: 877637 - RNA, 19 nt, Artificial Sequence
  Description of Artificial Sequence: Synthetic oligonucleotide
  Antisense strand to SEQ ID NO: 877636
uagagaggagcugucgcac

SEQ ID NO: 877638 - RNA, 19 nt, Artificial Sequence
  Description of Artificial Sequence: Synthetic oligonucleotide
  Sense strand starting at position 839 of SEQ ID NO: 588616
ugcgacagcuccucucuaa

SEQ ID NO: 877639 - RNA, 19 nt, Artificial Sequence
  Description of Artificial Sequence: Synthetic oligonucleotide
  Antisense strand to SEQ ID NO: 877638
uuagagaggagcugucgca

SEQ ID NO: 877640 - RNA, 19 nt, Artificial Sequence
  Description of Artificial Sequence: Synthetic oligonucleotide
  Sense strand starting at position 1155 of SEQ ID NO: 588616
ugcugaguccugggaugaa

SEQ ID NO: 877641 - RNA, 19 nt, Artificial Sequence
  Description of Artificial Sequence: Synthetic oligonucleotide
  Antisense strand to SEQ ID NO: 877640
uucaucccaggacucagca

SEQ ID NO: 877642 - RNA, 19 nt, Artificial Sequence
  Description of Artificial Sequence: Synthetic oligonucleotide
  Sense strand starting at position 1275 of SEQ ID NO: 588616
ggcugugugacguuucuau

SEQ ID NO: 877643 - RNA, 19 nt, Artificial Sequence
  Description of Artificial Sequence: Synthetic oligonucleotide
  Antisense strand to SEQ ID NO: 877642
auagaaacgucacacagcc

SEQ ID NO: 877644 - RNA, 19 nt, Artificial Sequence
  Description of Artificial Sequence: Synthetic oligonucleotide
  Sense strand starting at position 1279 of SEQ ID NO: 588616
gugugacguuucuauuucu

SEQ ID NO: 877645 - RNA, 19 nt, Artificial Sequence
  Description of Artificial Sequence: Synthetic oligonucleotide
  Antisense strand to SEQ ID NO: 877644
agaaauagaaacgucacac

SEQ ID NO: 877646 - RNA, 19 nt, Artificial Sequence
  Description of Artificial Sequence: Synthetic oligonucleotide
  Sense strand starting at position 1286 of SEQ ID NO: 588616
guuucuauuucucaaggca

SEQ ID NO: 877647 - RNA, 19 nt, Artificial Sequence
  Description of Artificial Sequence: Synthetic oligonucleotide
  Antisense strand to SEQ ID NO: 877646
ugccuugagaaauagaaac

SEQ ID NO: 877648 - RNA, 19 nt, Artificial Sequence
  Description of Artificial Sequence: Synthetic oligonucleotide
  Sense strand starting at position 1356 of SEQ ID NO: 588616
gcaucagauugugugguca

SEQ ID NO: 877649 - RNA, 19 nt, Artificial Sequence
  Description of Artificial Sequence: Synthetic oligonucleotide
  Antisense strand to SEQ ID NO: 877648
ugaccacacaaucugaugc

SEQ ID NO: 877650 - RNA, 19 nt, Artificial Sequence
  Description of Artificial Sequence: Synthetic oligonucleotide
  Sense strand starting at position 2653 of SEQ ID NO: 588616
ccaccuguuguaugauuga

SEQ ID NO: 877651 - RNA, 19 nt, Artificial Sequence
  Description of Artificial Sequence: Synthetic oligonucleotide
  Antisense strand to SEQ ID NO: 877650
ucaaucauacaacaggugg

SEQ ID NO: 877652 - RNA, 19 nt, Artificial Sequence
  Description of Artificial Sequence: Synthetic oligonucleotide
  Sense strand starting at position 2656 of SEQ ID NO: 588616
ccuguuguaugauugaagu

SEQ ID NO: 877653 - RNA, 19 nt, Artificial Sequence
  Description of Artificial Sequence: Synthetic oligonucleotide
  Antisense strand to SEQ ID NO: 877652
acuucaaucauacaacagg

SEQ ID NO: 877654 - RNA, 19 nt, Artificial Sequence
  Description of Artificial Sequence: Synthetic oligonucleotide
  Sense strand starting at position 2659 of SEQ ID NO: 588616
guuguaugauugaaguggu

SEQ ID NO: 877655 - RNA, 19 nt, Artificial Sequence
  Description of Artificial Sequence: Synthetic oligonucleotide
  Antisense strand to SEQ ID NO: 877654
accacuucaaucauacaac

SEQ ID NO: 877656 - RNA, 19 nt, Artificial Sequence
  Description of Artificial Sequence: Synthetic oligonucleotide
  Sense strand starting at position 2662 of SEQ ID NO: 588616
guaugauugaagugguugu

SEQ ID NO: 877657 - RNA, 19 nt, Artificial Sequence
  Description of Artificial Sequence: Synthetic oligonucleotide
  Antisense strand to SEQ ID NO: 877656
acaaccacuucaaucauac

SEQ ID NO: 877658 - RNA, 19 nt, Artificial Sequence
  Description of Artificial Sequence: Synthetic oligonucleotide
  Sense strand starting at position 2675 of SEQ ID NO: 588616
gguuguuuggucucuguuu

SEQ ID NO: 877659 - RNA, 19 nt, Artificial Sequence
  Description of Artificial Sequence: Synthetic oligonucleotide
  Antisense strand to SEQ ID NO: 877658
aaacagagaccaaacaacc

SEQ ID NO: 877660 - RNA, 19 nt, Artificial Sequence
  Description of Artificial Sequence: Synthetic oligonucleotide
  Sense strand starting at position 2682 of SEQ ID NO: 588616
uggucucuguuucuccaua

SEQ ID NO: 877661 - RNA, 19 nt, Artificial Sequence
  Description of Artificial Sequence: Synthetic oligonucleotide
  Antisense strand to SEQ ID NO: 877660
uauggagaaacagagacca

SEQ ID NO: 877662 - RNA, 19 nt, Artificial Sequence
  Description of Artificial Sequence: Synthetic oligonucleotide
  Sense strand starting at position 2687 of SEQ ID NO: 588616
ucuguuucuccauauguuc

SEQ ID NO: 877663 - RNA, 19 nt, Artificial Sequence
  Description of Artificial Sequence: Synthetic oligonucleotide
  Antisense strand to SEQ ID NO: 877662
gaacauauggagaaacaga

SEQ ID NO: 877664 - RNA, 19 nt, Artificial Sequence
  Description of Artificial Sequence: Synthetic oligonucleotide
  Sense strand starting at position 3105 of SEQ ID NO: 588616
ugcuguuguccucgcauaa

SEQ ID NO: 877665 - RNA, 19 nt, Artificial Sequence
  Description of Artificial Sequence: Synthetic oligonucleotide
  Antisense strand to SEQ ID NO: 877664
uuaugcgaggacaacagca

SEQ ID NO: 877666 - RNA, 19 nt, Artificial Sequence
  Description of Artificial Sequence: Synthetic oligonucleotide
  Sense strand starting at position 3106 of SEQ ID NO: 588616
gcuguuguccucgcauaau

SEQ ID NO: 877667 - RNA, 19 nt, Artificial Sequence
  Description of Artificial Sequence: Synthetic oligonucleotide
  Antisense strand to SEQ ID NO: 877666
auuaugcgaggacaacagc

SEQ ID NO: 877668 - RNA, 19 nt, Artificial Sequence
  Description of Artificial Sequence: Synthetic oligonucleotide
  Sense strand starting at position 3118 of SEQ ID NO: 588616
gcauaaucagggcacuguu

SEQ ID NO: 877669 - RNA, 19 nt, Artificial Sequence
  Description of Artificial Sequence: Synthetic oligonucleotide
  Antisense strand to SEQ ID NO: 877668
aacagugcccugauuaugc

SEQ ID NO: 877670 - RNA, 19 nt, Artificial Sequence
  Description of Artificial Sequence: Synthetic oligonucleotide
  Sense strand starting at position 3162 of SEQ ID NO: 588616
cuggaaauccagcaccauu

SEQ ID NO: 877671 - RNA, 19 nt, Artificial Sequence
  Description of Artificial Sequence: Synthetic oligonucleotide
  Antisense strand to SEQ ID NO: 877670
aauggugcuggauuuccag

SEQ ID NO: 877672 - RNA, 19 nt, Artificial Sequence
  Description of Artificial Sequence: Synthetic oligonucleotide
  Sense strand starting at position 3196 of SEQ ID NO: 588616
cucacaguaugggacaaau

SEQ ID NO: 877673 - RNA, 19 nt, Artificial Sequence
  Description of Artificial Sequence: Synthetic oligonucleotide
  Antisense strand to SEQ ID NO: 877672
auuugucccauacugugag

SEQ ID NO: 877674 - RNA, 19 nt, Artificial Sequence
  Description of Artificial Sequence: Synthetic oligonucleotide
  Sense strand starting at position 3402 of SEQ ID NO: 588616
ccguccugagaguauucuu

SEQ ID NO: 877675 - RNA, 19 nt, Artificial Sequence
  Description of Artificial Sequence: Synthetic oligonucleotide
  Antisense strand to SEQ ID NO: 877674
aagaauacucucaggacgg

SEQ ID NO: 877676 - RNA, 19 nt, Artificial Sequence
  Description of Artificial Sequence: Synthetic oligonucleotide
  Sense strand starting at position 3407 of SEQ ID NO: 588616
cugagaguauucuuuccuu

SEQ ID NO: 877677 - RNA, 19 nt, Artificial Sequence
  Description of Artificial Sequence: Synthetic oligonucleotide
  Antisense strand to SEQ ID NO: 877676
aaggaaagaauacucucag

SEQ ID NO: 877678 - RNA, 19 nt, Artificial Sequence
  Description of Artificial Sequence: Synthetic oligonucleotide
  Sense strand starting at position 3410 of SEQ ID NO: 588616
agaguauucuuuccuuugu

SEQ ID NO: 877679 - RNA, 19 nt, Artificial Sequence
  Description of Artificial Sequence: Synthetic oligonucleotide
  Antisense strand to SEQ ID NO: 877678
acaaaggaaagaauacucu

SEQ ID NO: 877680 - RNA, 19 nt, Artificial Sequence
  Description of Artificial Sequence: Synthetic oligonucleotide
  Sense strand starting at position 3849 of SEQ ID NO: 588616
cugugcuggccgucugaga

SEQ ID NO: 877681 - RNA, 19 nt, Artificial Sequence
  Description of Artificial Sequence: Synthetic oligonucleotide
  Antisense strand to SEQ ID NO: 877680
ucucagacggccagcacag

SEQ ID NO: 877682 - RNA, 19 nt, Artificial Sequence
  Description of Artificial Sequence: Synthetic oligonucleotide
  Sense strand starting at position 3969 of SEQ ID NO: 588616
ccgucauccucauuugagu

SEQ ID NO: 877683 - RNA, 19 nt, Artificial Sequence
  Description of Artificial Sequence: Synthetic oligonucleotide
  Antisense strand to SEQ ID NO: 877682
acucaaaugaggaugacgg

SEQ ID NO: 877684 - RNA, 19 nt, Artificial Sequence
  Description of Artificial Sequence: Synthetic oligonucleotide
  Sense strand starting at position 56 of SEQ ID NO: 588617
acaggcauucgugauauuc

SEQ ID NO: 877685 - RNA, 19 nt, Artificial Sequence
  Description of Artificial Sequence: Synthetic oligonucleotide
  Antisense strand to SEQ ID NO: 877684
gaauaucacgaaugccugu

SEQ ID NO: 877686 - RNA, 19 nt, Artificial Sequence
  Description of Artificial Sequence: Synthetic oligonucleotide
  Sense strand starting at position 87 of SEQ ID NO: 588617
cuuacuuaaguuugaauag

SEQ ID NO: 877687 - RNA, 19 nt, Artificial Sequence
  Description of Artificial Sequence: Synthetic oligonucleotide
  Antisense strand to SEQ ID NO: 877686
cuauucaaacuuaaguaag

SEQ ID NO: 877688 - RNA, 19 nt, Artificial Sequence
  Description of Artificial Sequence: Synthetic oligonucleotide
  Sense strand starting at position 108 of SEQ ID NO: 588617
ugugccauuuccuuaaguu

SEQ ID NO: 877689 - RNA, 19 nt, Artificial Sequence
  Description of Artificial Sequence: Synthetic oligonucleotide
  Antisense strand to SEQ ID NO: 877688
aacuuaaggaaauggcaca

SEQ ID NO: 877690 - RNA, 19 nt, Artificial Sequence
  Description of Artificial Sequence: Synthetic oligonucleotide
  Sense strand starting at position 270 of SEQ ID NO: 588617
uauguaacuguguaugaua

SEQ ID NO: 877691 - RNA, 19 nt, Artificial Sequence
  Description of Artificial Sequence: Synthetic oligonucleotide
  Antisense strand to SEQ ID NO: 877690
uaucauacacaguuacaua

SEQ ID NO: 877692 - RNA, 19 nt, Artificial Sequence
  Description of Artificial Sequence: Synthetic oligonucleotide
  Sense strand starting at position 436 of SEQ ID NO: 588617
guaacaauguuggucaaga

SEQ ID NO: 877693 - RNA, 19 nt, Artificial Sequence
  Description of Artificial Sequence: Synthetic oligonucleotide
  Antisense strand to SEQ ID NO: 877692
ucuugaccaacauuguuac

SEQ ID NO: 877694 - RNA, 19 nt, Artificial Sequence
  Description of Artificial Sequence: Synthetic oligonucleotide
  Sense strand starting at position 437 of SEQ ID NO: 588617
uaacaauguuggucaagaa

SEQ ID NO: 877695 - RNA, 19 nt, Artificial Sequence
  Description of Artificial Sequence: Synthetic oligonucleotide
  Antisense strand to SEQ ID NO: 877694
uucuugaccaacauuguua

SEQ ID NO: 877696 - RNA, 19 nt, Artificial Sequence
  Description of Artificial Sequence: Synthetic oligonucleotide
  Sense strand starting at position 441 of SEQ ID NO: 588617
aauguuggucaagaagcaa

SEQ ID NO: 877697 - RNA, 19 nt, Artificial Sequence
  Description of Artificial Sequence: Synthetic oligonucleotide
  Antisense strand to SEQ ID NO: 877696
uugcuucuugaccaacauu

SEQ ID NO: 877698 - RNA, 19 nt, Artificial Sequence
  Description of Artificial Sequence: Synthetic oligonucleotide
  Sense strand starting at position 763 of SEQ ID NO: 588617
gcugcuagggcagaaauca

SEQ ID NO: 877699 - RNA, 19 nt, Artificial Sequence
  Description of Artificial Sequence: Synthetic oligonucleotide
  Antisense strand to SEQ ID NO: 877698
ugauuucugcccuagcagc

SEQ ID NO: 877700 - RNA, 19 nt, Artificial Sequence
  Description of Artificial Sequence: Synthetic oligonucleotide
  Sense strand starting at position 771 of SEQ ID NO: 588617
ggcagaaaucaugagucgu

SEQ ID NO: 877701 - RNA, 19 nt, Artificial Sequence
  Description of Artificial Sequence: Synthetic oligonucleotide
  Antisense strand to SEQ ID NO: 877700
acgacucaugauuucugcc

SEQ ID NO: 877702 - RNA, 19 nt, Artificial Sequence
  Description of Artificial Sequence: Synthetic oligonucleotide
  Sense strand starting at position 1009 of SEQ ID NO: 588617
ucagucugucucuaggaca

SEQ ID NO: 877703 - RNA, 19 nt, Artificial Sequence
  Description of Artificial Sequence: Synthetic oligonucleotide
  Antisense strand to SEQ ID NO: 877702
uguccuagagacagacuga

SEQ ID NO: 877704 - RNA, 19 nt, Artificial Sequence
  Description of Artificial Sequence: Synthetic oligonucleotide
  Sense strand starting at position 1016 of SEQ ID NO: 588617
gucucuaggacagguuaau

SEQ ID NO: 877705 - RNA, 19 nt, Artificial Sequence
  Description of Artificial Sequence: Synthetic oligonucleotide
  Antisense strand to SEQ ID NO: 877704
auuaaccuguccuagagac

SEQ ID NO: 877706 - RNA, 19 nt, Artificial Sequence
  Description of Artificial Sequence: Synthetic oligonucleotide
  Sense strand starting at position 1196 of SEQ ID NO: 588617
ugucaucguccgguuugau

SEQ ID NO: 877707 - RNA, 19 nt, Artificial Sequence
  Description of Artificial Sequence: Synthetic oligonucleotide
  Antisense strand to SEQ ID NO: 877706
aucaaaccggacgaugaca

SEQ ID NO: 877708 - RNA, 19 nt, Artificial Sequence
  Description of Artificial Sequence: Synthetic oligonucleotide
  Sense strand starting at position 1402 of SEQ ID NO: 588617
ucaaccugaugucuagaga

SEQ ID NO: 877709 - RNA, 19 nt, Artificial Sequence
  Description of Artificial Sequence: Synthetic oligonucleotide
  Antisense strand to SEQ ID NO: 877708
ucucuagacaucagguuga

SEQ ID NO: 877710 - RNA, 19 nt, Artificial Sequence
  Description of Artificial Sequence: Synthetic oligonucleotide
  Sense strand starting at position 2217 of SEQ ID NO: 588617
uccagugcucaguugugua

SEQ ID NO: 877711 - RNA, 19 nt, Artificial Sequence
  Description of Artificial Sequence: Synthetic oligonucleotide
  Antisense strand to SEQ ID NO: 877710
uacacaacugagcacugga

SEQ ID NO: 877712 - RNA, 19 nt, Artificial Sequence
  Description of Artificial Sequence: Synthetic oligonucleotide
  Sense strand starting at position 2229 of SEQ ID NO: 588617
uuguguagauugguaaaug

SEQ ID NO: 877713 - RNA, 19 nt, Artificial Sequence
  Description of Artificial Sequence: Synthetic oligonucleotide
  Antisense strand to SEQ ID NO: 877712
cauuuaccaaucuacacaa

SEQ ID NO: 877714 - RNA, 19 nt, Artificial Sequence
  Description of Artificial Sequence: Synthetic oligonucleotide
  Sense strand starting at position 2304 of SEQ ID NO: 588617
gcaugugcagugcuuugua

SEQ ID NO: 877715 - RNA, 19 nt, Artificial Sequence
  Description of Artificial Sequence: Synthetic oligonucleotide
  Antisense strand to SEQ ID NO: 877714
uacaaagcacugcacaugc

SEQ ID NO: 877716 - RNA, 19 nt, Artificial Sequence
  Description of Artificial Sequence: Synthetic oligonucleotide
  Sense strand starting at position 2306 of SEQ ID NO: 588617
augugcagugcuuuguauu

SEQ ID NO: 877717 - RNA, 19 nt, Artificial Sequence
  Description of Artificial Sequence: Synthetic oligonucleotide
  Antisense strand to SEQ ID NO: 877716
aauacaaagcacugcacau

SEQ ID NO: 877718 - RNA, 19 nt, Artificial Sequence
  Description of Artificial Sequence: Synthetic oligonucleotide
  Sense strand starting at position 2387 of SEQ ID NO: 588617
cugaccucucugcaaugaa

SEQ ID NO: 877719 - RNA, 19 nt, Artificial Sequence
  Description of Artificial Sequence: Synthetic oligonucleotide
  Antisense strand to SEQ ID NO: 877718
uucauugcagagaggucag

SEQ ID NO: 877720 - RNA, 19 nt, Artificial Sequence
  Description of Artificial Sequence: Synthetic oligonucleotide
  Sense strand starting at position 2476 of SEQ ID NO: 588617
agcaucgagccugaaauga

SEQ ID NO: 877721 - RNA, 19 nt, Artificial Sequence
  Description of Artificial Sequence: Synthetic oligonucleotide
  Antisense strand to SEQ ID NO: 877720
ucauuucaggcucgaugcu

SEQ ID NO: 877722 - RNA, 19 nt, Artificial Sequence
  Description of Artificial Sequence: Synthetic oligonucleotide
  Sense strand starting at position 2587 of SEQ ID NO: 588617
auuuaaugcuuguuucugu

SEQ ID NO: 877723 - RNA, 19 nt, Artificial Sequence
  Description of Artificial Sequence: Synthetic oligonucleotide
  Antisense strand to SEQ ID NO: 877722
acagaaacaagcauuaaau

SEQ ID NO: 877724 - RNA, 19 nt, Artificial Sequence
  Description of Artificial Sequence: Synthetic oligonucleotide
  Sense strand starting at position 2690 of SEQ ID NO: 588617
ggauuuaugucucauagau

SEQ ID NO: 877725 - RNA, 19 nt, Artificial Sequence
  Description of Artificial Sequence: Synthetic oligonucleotide
  Antisense strand to SEQ ID NO: 877724
aucuaugagacauaaaucc

SEQ ID NO: 877726 - RNA, 19 nt, Artificial Sequence
  Description of Artificial Sequence: Synthetic oligonucleotide
  Sense strand starting at position 2861 of SEQ ID NO: 588617
ugcuuacaucaugaggacu

SEQ ID NO: 877727 - RNA, 19 nt, Artificial Sequence
  Description of Artificial Sequence: Synthetic oligonucleotide
  Antisense strand to SEQ ID NO: 877726
aguccucaugauguaagca

SEQ ID NO: 877728 - RNA, 19 nt, Artificial Sequence
  Description of Artificial Sequence: Synthetic oligonucleotide
  Sense strand starting at position 2927 of SEQ ID NO: 588617
guggaagagcuuuggaauu

SEQ ID NO: 877729 - RNA, 19 nt, Artificial Sequence
  Description of Artificial Sequence: Synthetic oligonucleotide
  Antisense strand to SEQ ID NO: 877728
aauuccaaagcucuuccac

SEQ ID NO: 877730 - RNA, 19 nt, Artificial Sequence
  Description of Artificial Sequence: Synthetic oligonucleotide
  Sense strand starting at position 2940 of SEQ ID NO: 588617
ggaauugucuguucaaagg

SEQ ID NO: 877731 - RNA, 19 nt, Artificial Sequence
  Description of Artificial Sequence: Synthetic oligonucleotide
  Antisense strand to SEQ ID NO: 877730
ccuuugaacagacaauucc

SEQ ID NO: 877732 - RNA, 19 nt, Artificial Sequence
  Description of Artificial Sequence: Synthetic oligonucleotide
  Sense strand starting at position 3070 of SEQ ID NO: 588617
ggaucuauaugaguaaauu

SEQ ID NO: 877733 - RNA, 19 nt, Artificial Sequence
  Description of Artificial Sequence: Synthetic oligonucleotide
  Antisense strand to SEQ ID NO: 877732
aauuuacucauauagaucc

SEQ ID NO: 877734 - RNA, 19 nt, Artificial Sequence
  Description of Artificial Sequence: Synthetic oligonucleotide
  Sense strand starting at position 3276 of SEQ ID NO: 588617
uaaauauaucagggauugu

SEQ ID NO: 877735 - RNA, 19 nt, Artificial Sequence
  Description of Artificial Sequence: Synthetic oligonucleotide
  Antisense strand to SEQ ID NO: 877734
acaaucccugauauauuua

SEQ ID NO: 877736 - RNA, 19 nt, Artificial Sequence
  Description of Artificial Sequence: Synthetic oligonucleotide
  Sense strand starting at position 3280 of SEQ ID NO: 588617
uauaucagggauugucaaa

SEQ ID NO: 877737 - RNA, 19 nt, Artificial Sequence
  Description of Artificial Sequence: Synthetic oligonucleotide
  Antisense strand to SEQ ID NO: 877736
uuugacaaucccugauaua

SEQ ID NO: 877738 - RNA, 19 nt, Artificial Sequence
  Description of Artificial Sequence: Synthetic oligonucleotide
  Sense strand starting at position 3359 of SEQ ID NO: 588617
ucaggauucuagcuauuga

SEQ ID NO: 877739 - RNA, 19 nt, Artificial Sequence
  Description of Artificial Sequence: Synthetic oligonucleotide
  Antisense strand to SEQ ID NO: 877738
ucaauagcuagaauccuga

SEQ ID NO: 877740 - RNA, 19 nt, Artificial Sequence
  Description of Artificial Sequence: Synthetic oligonucleotide
  Sense strand starting at position 3369 of SEQ ID NO: 588617
agcuauugacuuggauauu

SEQ ID NO: 877741 - RNA, 19 nt, Artificial Sequence
  Description of Artificial Sequence: Synthetic oligonucleotide
  Antisense strand to SEQ ID NO: 877740
aauauccaagucaauagcu

SEQ ID NO: 877742 - RNA, 19 nt, Artificial Sequence
  Description of Artificial Sequence: Synthetic oligonucleotide
  Sense strand starting at position 3497 of SEQ ID NO: 588617
acuguaagcacaggugaau

SEQ ID NO: 877743 - RNA, 19 nt, Artificial Sequence
  Description of Artificial Sequence: Synthetic oligonucleotide
  Antisense strand to SEQ ID NO: 877742
auucaccugugcuuacagu

SEQ ID NO: 877744 - RNA, 19 nt, Artificial Sequence
  Description of Artificial Sequence: Synthetic oligonucleotide
  Sense strand starting at position 3543 of SEQ ID NO: 588617
ggugaucugaccuggguau

SEQ ID NO: 877745 - RNA, 19 nt, Artificial Sequence
  Description of Artificial Sequence: Synthetic oligonucleotide
  Antisense strand to SEQ ID NO: 877744
auacccaggucagaucacc

SEQ ID NO: 877746 - RNA, 19 nt, Artificial Sequence
  Description of Artificial Sequence: Synthetic oligonucleotide
  Sense strand starting at position 3602 of SEQ ID NO: 588617
gcaaguuauuuaucugugu

SEQ ID NO: 877747 - RNA, 19 nt, Artificial Sequence
  Description of Artificial Sequence: Synthetic oligonucleotide
  Antisense strand to SEQ ID NO: 877746
acacagauaaauaacuugc

SEQ ID NO: 877748 - RNA, 19 nt, Artificial Sequence
  Description of Artificial Sequence: Synthetic oligonucleotide
  Sense strand starting at position 3605 of SEQ ID NO: 588617
aguuauuuaucuguguagu

SEQ ID NO: 877749 - RNA, 19 nt, Artificial Sequence
  Description of Artificial Sequence: Synthetic oligonucleotide
  Antisense strand to SEQ ID NO: 877748
acuacacagauaaauaacu

SEQ ID NO: 877750 - RNA, 19 nt, Artificial Sequence
  Description of Artificial Sequence: Synthetic oligonucleotide
  Sense strand starting at position 3606 of SEQ ID NO: 588617
guuauuuaucuguguaguc

SEQ ID NO: 877751 - RNA, 19 nt, Artificial Sequence
  Description of Artificial Sequence: Synthetic oligonucleotide
  Antisense strand to SEQ ID NO: 877750
gacuacacagauaaauaac

SEQ ID NO: 877752 - RNA, 19 nt, Artificial Sequence
  Description of Artificial Sequence: Synthetic oligonucleotide
  Sense strand starting at position 3607 of SEQ ID NO: 588617
uuauuuaucuguguaguca

SEQ ID NO: 877753 - RNA, 19 nt, Artificial Sequence
  Description of Artificial Sequence: Synthetic oligonucleotide
  Antisense strand to SEQ ID NO: 877752
ugacuacacagauaaauaa

SEQ ID NO: 877754 - RNA, 19 nt, Artificial Sequence
  Description of Artificial Sequence: Synthetic oligonucleotide
  Sense strand starting at position 3622 of SEQ ID NO: 588617
gucaguguuagggaaggga

SEQ ID NO: 877755 - RNA, 19 nt, Artificial Sequence
  Description of Artificial Sequence: Synthetic oligonucleotide
  Antisense strand to SEQ ID NO: 877754
ucccuucccuaacacugac

SEQ ID NO: 877756 - RNA, 19 nt, Artificial Sequence
  Description of Artificial Sequence: Synthetic oligonucleotide
  Sense strand starting at position 3650 of SEQ ID NO: 588617
uaucuuaucugugugagaa

SEQ ID NO: 877757 - RNA, 19 nt, Artificial Sequence
  Description of Artificial Sequence: Synthetic oligonucleotide
  Antisense strand to SEQ ID NO: 877756
uucucacacagauaagaua

SEQ ID NO: 877758 - RNA, 19 nt, Artificial Sequence
  Description of Artificial Sequence: Synthetic oligonucleotide
  Sense strand starting at position 3651 of SEQ ID NO: 588617
aucuuaucugugugagaaa

SEQ ID NO: 877759 - RNA, 19 nt, Artificial Sequence
  Description of Artificial Sequence: Synthetic oligonucleotide
  Antisense strand to SEQ ID NO: 877758
uuucucacacagauaagau

SEQ ID NO: 877760 - RNA, 19 nt, Artificial Sequence
  Description of Artificial Sequence: Synthetic oligonucleotide
  Sense strand starting at position 3797 of SEQ ID NO: 588617
aguguauuauuacucaaac

SEQ ID NO: 877761 - RNA, 19 nt, Artificial Sequence
  Description of Artificial Sequence: Synthetic oligonucleotide
  Antisense strand to SEQ ID NO: 877760
guuugaguaauaauacacu

SEQ ID NO: 877762 - RNA, 19 nt, Artificial Sequence
  Description of Artificial Sequence: Synthetic oligonucleotide
  Sense strand starting at position 3798 of SEQ ID NO: 588617
guguauuauuacucaaaca

SEQ ID NO: 877763 - RNA, 19 nt, Artificial Sequence
  Description of Artificial Sequence: Synthetic oligonucleotide
  Antisense strand to SEQ ID NO: 877762
uguuugaguaauaauacac

SEQ ID NO: 877764 - RNA, 19 nt, Artificial Sequence
  Description of Artificial Sequence: Synthetic oligonucleotide
  Sense strand starting at position 89 of SEQ ID NO: 588618
agaauuugcucacaagaag

SEQ ID NO: 877765 - RNA, 19 nt, Artificial Sequence
  Description of Artificial Sequence: Synthetic oligonucleotide
  Antisense strand to SEQ ID NO: 877764
cuucuugugagcaaauucu

SEQ ID NO: 877766 - RNA, 19 nt, Artificial Sequence
  Description of Artificial Sequence: Synthetic oligonucleotide
  Sense strand starting at position 225 of SEQ ID NO: 588618
guauuaguuccacacauug

SEQ ID NO: 877767 - RNA, 19 nt, Artificial Sequence
  Description of Artificial Sequence: Synthetic oligonucleotide
  Antisense strand to SEQ ID NO: 877766
caauguguggaacuaauac

SEQ ID NO: 877768 - RNA, 19 nt, Artificial Sequence
  Description of Artificial Sequence: Synthetic oligonucleotide
  Sense strand starting at position 450 of SEQ ID NO: 588618
auuguacuauggguguaua

SEQ ID NO: 877769 - RNA, 19 nt, Artificial Sequence
  Description of Artificial Sequence: Synthetic oligonucleotide
  Antisense strand to SEQ ID NO: 877768
uauacacccauaguacaau

SEQ ID NO: 877770 - RNA, 19 nt, Artificial Sequence
  Description of Artificial Sequence: Synthetic oligonucleotide
  Sense strand starting at position 460 of SEQ ID NO: 588618
ggguguauacugcauaaag

SEQ ID NO: 877771 - RNA, 19 nt, Artificial Sequence
  Description of Artificial Sequence: Synthetic oligonucleotide
  Antisense strand to SEQ ID NO: 877770
cuuuaugcaguauacaccc

SEQ ID NO: 877772 - RNA, 19 nt, Artificial Sequence
  Description of Artificial Sequence: Synthetic oligonucleotide
  Sense strand starting at position 505 of SEQ ID NO: 588618
ugagaauugucuccaucau

SEQ ID NO: 877773 - RNA, 19 nt, Artificial Sequence
  Description of Artificial Sequence: Synthetic oligonucleotide
  Antisense strand to SEQ ID NO: 877772
augauggagacaauucuca

SEQ ID NO: 877774 - RNA, 19 nt, Artificial Sequence
  Description of Artificial Sequence: Synthetic oligonucleotide
  Sense strand starting at position 626 of SEQ ID NO: 588618
ucauaugcccaauggguaa

SEQ ID NO: 877775 - RNA, 19 nt, Artificial Sequence
  Description of Artificial Sequence: Synthetic oligonucleotide
  Antisense strand to SEQ ID NO: 877774
uuacccauugggcauauga

SEQ ID NO: 877776 - RNA, 19 nt, Artificial Sequence
  Description of Artificial Sequence: Synthetic oligonucleotide
  Sense strand starting at position 670 of SEQ ID NO: 588618
gagccugagugagcuuaau

SEQ ID NO: 877777 - RNA, 19 nt, Artificial Sequence
  Description of Artificial Sequence: Synthetic oligonucleotide
  Antisense strand to SEQ ID NO: 877776
auuaagcucacucaggcuc

SEQ ID NO: 877778 - RNA, 19 nt, Artificial Sequence
  Description of Artificial Sequence: Synthetic oligonucleotide
  Sense strand starting at position 708 of SEQ ID NO: 588618
gucagaaauuauccagucu

SEQ ID NO: 877779 - RNA, 19 nt, Artificial Sequence
  Description of Artificial Sequence: Synthetic oligonucleotide
  Antisense strand to SEQ ID NO: 877778
agacuggauaauuucugac

SEQ ID NO: 877780 - RNA, 19 nt, Artificial Sequence
  Description of Artificial Sequence: Synthetic oligonucleotide
  Sense strand starting at position 790 of SEQ ID NO: 588618
ggcauucuaguuuacaaau

SEQ ID NO: 877781 - RNA, 19 nt, Artificial Sequence
  Description of Artificial Sequence: Synthetic oligonucleotide
  Antisense strand to SEQ ID NO: 877780
auuuguaaacuagaaugcc

SEQ ID NO: 877782 - RNA, 19 nt, Artificial Sequence
  Description of Artificial Sequence: Synthetic oligonucleotide
  Sense strand starting at position 920 of SEQ ID NO: 588618
acaugcaaaugucuaugua

SEQ ID NO: 877783 - RNA, 19 nt, Artificial Sequence
  Description of Artificial Sequence: Synthetic oligonucleotide
  Antisense strand to SEQ ID NO: 877782
uacauagacauuugcaugu

SEQ ID NO: 877784 - RNA, 19 nt, Artificial Sequence
  Description of Artificial Sequence: Synthetic oligonucleotide
  Sense strand starting at position 963 of SEQ ID NO: 588618
auaauugucuaucuugagu

SEQ ID NO: 877785 - RNA, 19 nt, Artificial Sequence
  Description of Artificial Sequence: Synthetic oligonucleotide
  Antisense strand to SEQ ID NO: 877784
acucaagauagacaauuau

SEQ ID NO: 877786 - RNA, 19 nt, Artificial Sequence
  Description of Artificial Sequence: Synthetic oligonucleotide
  Sense strand starting at position 986 of SEQ ID NO: 588618
ucaucuccaguaugaguua

SEQ ID NO: 877787 - RNA, 19 nt, Artificial Sequence
  Description of Artificial Sequence: Synthetic oligonucleotide
  Antisense strand to SEQ ID NO: 877786
uaacucauacuggagauga

SEQ ID NO: 877788 - RNA, 19 nt, Artificial Sequence
  Description of Artificial Sequence: Synthetic oligonucleotide
  Sense strand starting at position 1102 of SEQ ID NO: 588618
gggucaguuuaaucaaauu

SEQ ID NO: 877789 - RNA, 19 nt, Artificial Sequence
  Description of Artificial Sequence: Synthetic oligonucleotide
  Antisense strand to SEQ ID NO: 877788
aauuugauuaaacugaccc

SEQ ID NO: 877790 - RNA, 19 nt, Artificial Sequence
  Description of Artificial Sequence: Synthetic oligonucleotide
  Sense strand starting at position 1229 of SEQ ID NO: 588618
uuuguaucuggagauguua

SEQ ID NO: 877791 - RNA, 19 nt, Artificial Sequence
  Description of Artificial Sequence: Synthetic oligonucleotide
  Antisense strand to SEQ ID NO: 877790
uaacaucuccagauacaaa

SEQ ID NO: 877792 - RNA, 19 nt, Artificial Sequence
  Description of Artificial Sequence: Synthetic oligonucleotide
  Sense strand starting at position 1730 of SEQ ID NO: 588618
cagagaccgcguuagaacu

SEQ ID NO: 877793 - RNA, 19 nt, Artificial Sequence
  Description of Artificial Sequence: Synthetic oligonucleotide
  Antisense strand to SEQ ID NO: 877792
aguucuaacgcggucucug

SEQ ID NO: 877794 - RNA, 19 nt, Artificial Sequence
  Description of Artificial Sequence: Synthetic oligonucleotide
  Sense strand starting at position 1986 of SEQ ID NO: 588618
ugaagucuucccgagugga

SEQ ID NO: 877795 - RNA, 19 nt, Artificial Sequence
  Description of Artificial Sequence: Synthetic oligonucleotide
  Antisense strand to SEQ ID NO: 877794
uccacucgggaagacuuca

SEQ ID NO: 877796 - RNA, 19 nt, Artificial Sequence
  Description of Artificial Sequence: Synthetic oligonucleotide
  Sense strand starting at position 2165 of SEQ ID NO: 588618
agacguuagaggugacaga

SEQ ID NO: 877797 - RNA, 19 nt, Artificial Sequence
  Description of Artificial Sequence: Synthetic oligonucleotide
  Antisense strand to SEQ ID NO: 877796
ucugucaccucuaacgucu

SEQ ID NO: 877798 - RNA, 19 nt, Artificial Sequence
  Description of Artificial Sequence: Synthetic oligonucleotide
  Sense strand starting at position 2179 of SEQ ID NO: 588618
acagaauuagcugaaggcu

SEQ ID NO: 877799 - RNA, 19 nt, Artificial Sequence
  Description of Artificial Sequence: Synthetic oligonucleotide
  Antisense strand to SEQ ID NO: 877798
agccuucagcuaauucugu

SEQ ID NO: 877800 - RNA, 19 nt, Artificial Sequence
  Description of Artificial Sequence: Synthetic oligonucleotide
  Sense strand starting at position 2250 of SEQ ID NO: 588618
gcaguuguguagauucgua

SEQ ID NO: 877801 - RNA, 19 nt, Artificial Sequence
  Description of Artificial Sequence: Synthetic oligonucleotide
  Antisense strand to SEQ ID NO: 877800
uacgaaucuacacaacugc

SEQ ID NO: 877802 - RNA, 19 nt, Artificial Sequence
  Description of Artificial Sequence: Synthetic oligonucleotide
  Sense strand starting at position 2358 of SEQ ID NO: 588618
agauguugacaggguuaac

SEQ ID NO: 877803 - RNA, 19 nt, Artificial Sequence
  Description of Artificial Sequence: Synthetic oligonucleotide
  Antisense strand to SEQ ID NO: 877802
guuaacccugucaacaucu

SEQ ID NO: 877804 - RNA, 19 nt, Artificial Sequence
  Description of Artificial Sequence: Synthetic oligonucleotide
  Sense strand starting at position 2368 of SEQ ID NO: 588618
aggguuaacuuguuucuuu

SEQ ID NO: 877805 - RNA, 19 nt, Artificial Sequence
  Description of Artificial Sequence: Synthetic oligonucleotide
  Antisense strand to SEQ ID NO: 877804
aaagaaacaaguuaacccu

SEQ ID NO: 877806 - RNA, 19 nt, Artificial Sequence
  Description of Artificial Sequence: Synthetic oligonucleotide
  Sense strand starting at position 2369 of SEQ ID NO: 588618
ggguuaacuuguuucuuug

SEQ ID NO: 877807 - RNA, 19 nt, Artificial Sequence
  Description of Artificial Sequence: Synthetic oligonucleotide
  Antisense strand to SEQ ID NO: 877806
caaagaaacaaguuaaccc

SEQ ID NO: 877808 - RNA, 19 nt, Artificial Sequence
  Description of Artificial Sequence: Synthetic oligonucleotide
  Sense strand starting at position 2613 of SEQ ID NO: 588618
gugauagacguguauuugu

SEQ ID NO: 877809 - RNA, 19 nt, Artificial Sequence
  Description of Artificial Sequence: Synthetic oligonucleotide
  Antisense strand to SEQ ID NO: 877808
acaaauacacgucuaucac

SEQ ID NO: 877810 - RNA, 19 nt, Artificial Sequence
  Description of Artificial Sequence: Synthetic oligonucleotide
  Sense strand starting at position 2621 of SEQ ID NO: 588618
cguguauuuguagaccagu

SEQ ID NO: 877811 - RNA, 19 nt, Artificial Sequence
  Description of Artificial Sequence: Synthetic oligonucleotide
  Antisense strand to SEQ ID NO: 877810
acuggucuacaaauacacg

SEQ ID NO: 877812 - RNA, 19 nt, Artificial Sequence
  Description of Artificial Sequence: Synthetic oligonucleotide
  Sense strand starting at position 2634 of SEQ ID NO: 588618
accagugagccuucgcuuu

SEQ ID NO: 877813 - RNA, 19 nt, Artificial Sequence
  Description of Artificial Sequence: Synthetic oligonucleotide
  Antisense strand to SEQ ID NO: 877812
aaagcgaaggcucacuggu

SEQ ID NO: 877814 - RNA, 19 nt, Artificial Sequence
  Description of Artificial Sequence: Synthetic oligonucleotide
  Sense strand starting at position 2721 of SEQ ID NO: 588618
ccaugagcucaguggaaua

SEQ ID NO: 877815 - RNA, 19 nt, Artificial Sequence
  Description of Artificial Sequence: Synthetic oligonucleotide
  Antisense strand to SEQ ID NO: 877814
uauuccacugagcucaugg

SEQ ID NO: 877816 - RNA, 19 nt, Artificial Sequence
  Description of Artificial Sequence: Synthetic oligonucleotide
  Sense strand starting at position 2765 of SEQ ID NO: 588618
gucgaaguuaaacauagau

SEQ ID NO: 877817 - RNA, 19 nt, Artificial Sequence
  Description of Artificial Sequence: Synthetic oligonucleotide
  Antisense strand to SEQ ID NO: 877816
aucuauguuuaacuucgac

SEQ ID NO: 877818 - RNA, 19 nt, Artificial Sequence
  Description of Artificial Sequence: Synthetic oligonucleotide
  Sense strand starting at position 2789 of SEQ ID NO: 588618
gaaacuagaucguucugua

SEQ ID NO: 877819 - RNA, 19 nt, Artificial Sequence
  Description of Artificial Sequence: Synthetic oligonucleotide
  Antisense strand to SEQ ID NO: 877818
uacagaacgaucuaguuuc

SEQ ID NO: 877820 - RNA, 19 nt, Artificial Sequence
  Description of Artificial Sequence: Synthetic oligonucleotide
  Sense strand starting at position 3263 of SEQ ID NO: 588618
uucaguuauggagaguaug

SEQ ID NO: 877821 - RNA, 19 nt, Artificial Sequence
  Description of Artificial Sequence: Synthetic oligonucleotide
  Antisense strand to SEQ ID NO: 877820
cauacucuccauaacugaa

SEQ ID NO: 877822 - RNA, 19 nt, Artificial Sequence
  Description of Artificial Sequence: Synthetic oligonucleotide
  Sense strand starting at position 3308 of SEQ ID NO: 588618
ggauuuaggucucacagaa

SEQ ID NO: 877823 - RNA, 19 nt, Artificial Sequence
  Description of Artificial Sequence: Synthetic oligonucleotide
  Antisense strand to SEQ ID NO: 877822
uucugugagaccuaaaucc

SEQ ID NO: 877824 - RNA, 19 nt, Artificial Sequence
  Description of Artificial Sequence: Synthetic oligonucleotide
  Sense strand starting at position 3340 of SEQ ID NO: 588618
gggcuuaucauuuguguug

SEQ ID NO: 877825 - RNA, 19 nt, Artificial Sequence
  Description of Artificial Sequence: Synthetic oligonucleotide
  Antisense strand to SEQ ID NO: 877824
caacacaaaugauaagccc

SEQ ID NO: 877826 - RNA, 19 nt, Artificial Sequence
  Description of Artificial Sequence: Synthetic oligonucleotide
  Sense strand starting at position 3341 of SEQ ID NO: 588618
ggcuuaucauuuguguuga

SEQ ID NO: 877827 - RNA, 19 nt, Artificial Sequence
  Description of Artificial Sequence: Synthetic oligonucleotide
  Antisense strand to SEQ ID NO: 877826
ucaacacaaaugauaagcc

SEQ ID NO: 877828 - RNA, 19 nt, Artificial Sequence
  Description of Artificial Sequence: Synthetic oligonucleotide
  Sense strand starting at position 3410 of SEQ ID NO: 588618
guuauccugaagugguaua

SEQ ID NO: 877829 - RNA, 19 nt, Artificial Sequence
  Description of Artificial Sequence: Synthetic oligonucleotide
  Antisense strand to SEQ ID NO: 877828
uauaccacuucaggauaac

SEQ ID NO: 877830 - RNA, 19 nt, Artificial Sequence
  Description of Artificial Sequence: Synthetic oligonucleotide
  Sense strand starting at position 3569 of SEQ ID NO: 588618
auacauuaaugagaacaug

SEQ ID NO: 877831 - RNA, 19 nt, Artificial Sequence
  Description of Artificial Sequence: Synthetic oligonucleotide
  Antisense strand to SEQ ID NO: 877830
cauguucucauuaauguau

SEQ ID NO: 877832 - RNA, 19 nt, Artificial Sequence
  Description of Artificial Sequence: Synthetic oligonucleotide
  Sense strand starting at position 3731 of SEQ ID NO: 588618
ccauuaaucuugcuggaca

SEQ ID NO: 877833 - RNA, 19 nt, Artificial Sequence
  Description of Artificial Sequence: Synthetic oligonucleotide
  Antisense strand to SEQ ID NO: 877832
uguccagcaagauuaaugg

SEQ ID NO: 877834 - RNA, 19 nt, Artificial Sequence
  Description of Artificial Sequence: Synthetic oligonucleotide
  Sense strand starting at position 3809 of SEQ ID NO: 588618
gaagaugucuuucugauau

SEQ ID NO: 877835 - RNA, 19 nt, Artificial Sequence
  Description of Artificial Sequence: Synthetic oligonucleotide
  Antisense strand to SEQ ID NO: 877834
auaucagaaagacaucuuc

SEQ ID NO: 877836 - RNA, 19 nt, Artificial Sequence
  Description of Artificial Sequence: Synthetic oligonucleotide
  Sense strand starting at position 3843 of SEQ ID NO: 588618
uuuggauaaugcucaguag

SEQ ID NO: 877837 - RNA, 19 nt, Artificial Sequence
  Description of Artificial Sequence: Synthetic oligonucleotide
  Antisense strand to SEQ ID NO: 877836
cuacugagcauuauccaaa

SEQ ID NO: 877838 - RNA, 19 nt, Artificial Sequence
  Description of Artificial Sequence: Synthetic oligonucleotide
  Sense strand starting at position 3844 of SEQ ID NO: 588618
uuggauaaugcucaguagu

SEQ ID NO: 877839 - RNA, 19 nt, Artificial Sequence
  Description of Artificial Sequence: Synthetic oligonucleotide
  Antisense strand to SEQ ID NO: 877838
acuacugagcauuauccaa

SEQ ID NO: 877840 - RNA, 19 nt, Artificial Sequence
  Description of Artificial Sequence: Synthetic oligonucleotide
  Sense strand starting at position 3892 of SEQ ID NO: 588618
cauaguguucuccauagua

SEQ ID NO: 877841 - RNA, 19 nt, Artificial Sequence
  Description of Artificial Sequence: Synthetic oligonucleotide
  Antisense strand to SEQ ID NO: 877840
uacuauggagaacacuaug

SEQ ID NO: 877842 - RNA, 19 nt, Artificial Sequence
  Description of Artificial Sequence: Synthetic oligonucleotide
  Sense strand starting at position 3911 of SEQ ID NO: 588618
guucuaagaguuuacauuc

SEQ ID NO: 877843 - RNA, 19 nt, Artificial Sequence
  Description of Artificial Sequence: Synthetic oligonucleotide
  Antisense strand to SEQ ID NO: 877842
gaauguaaacucuuagaac

SEQ ID NO: 877844 - RNA, 19 nt, Artificial Sequence
  Description of Artificial Sequence: Synthetic oligonucleotide
  Sense strand starting at position 74 of SEQ ID NO: 588619
ucguacaaacuguaaauca

SEQ ID NO: 877845 - RNA, 19 nt, Artificial Sequence
  Description of Artificial Sequence: Synthetic oligonucleotide
  Antisense strand to SEQ ID NO: 877844
ugauuuacaguuuguacga

SEQ ID NO: 877846 - RNA, 19 nt, Artificial Sequence
  Description of Artificial Sequence: Synthetic oligonucleotide
  Sense strand starting at position 92 of SEQ ID NO: 588619
augugauguguccaaagag

SEQ ID NO: 877847 - RNA, 19 nt, Artificial Sequence
  Description of Artificial Sequence: Synthetic oligonucleotide
  Antisense strand to SEQ ID NO: 877846
cucuuuggacacaucacau

SEQ ID NO: 877848 - RNA, 19 nt, Artificial Sequence
  Description of Artificial Sequence: Synthetic oligonucleotide
  Sense strand starting at position 127 of SEQ ID NO: 588619
cgucuaucacuagaaucca

SEQ ID NO: 877849 - RNA, 19 nt, Artificial Sequence
  Description of Artificial Sequence: Synthetic oligonucleotide
  Antisense strand to SEQ ID NO: 877848
uggauucuagugauagacg

SEQ ID NO: 877850 - RNA, 19 nt, Artificial Sequence
  Description of Artificial Sequence: Synthetic oligonucleotide
  Sense strand starting at position 161 of SEQ ID NO: 588619
cauggaauaucuguguagu

SEQ ID NO: 877851 - RNA, 19 nt, Artificial Sequence
  Description of Artificial Sequence: Synthetic oligonucleotide
  Antisense strand to SEQ ID NO: 877850
acuacacagauauuccaug

SEQ ID NO: 877852 - RNA, 19 nt, Artificial Sequence
  Description of Artificial Sequence: Synthetic oligonucleotide
  Sense strand starting at position 426 of SEQ ID NO: 588619
gcagaaucagcagauugua

SEQ ID NO: 877853 - RNA, 19 nt, Artificial Sequence
  Description of Artificial Sequence: Synthetic oligonucleotide
  Antisense strand to SEQ ID NO: 877852
uacaaucugcugauucugc

SEQ ID NO: 877854 - RNA, 19 nt, Artificial Sequence
  Description of Artificial Sequence: Synthetic oligonucleotide
  Sense strand starting at position 525 of SEQ ID NO: 588619
acaggacagucugauauuu

SEQ ID NO: 877855 - RNA, 19 nt, Artificial Sequence
  Description of Artificial Sequence: Synthetic oligonucleotide
  Antisense strand to SEQ ID NO: 877854
aaauaucagacuguccugu

SEQ ID NO: 877856 - RNA, 19 nt, Artificial Sequence
  Description of Artificial Sequence: Synthetic oligonucleotide
  Sense strand starting at position 565 of SEQ ID NO: 588619
aggacuucuuacucuguau

SEQ ID NO: 877857 - RNA, 19 nt, Artificial Sequence
  Description of Artificial Sequence: Synthetic oligonucleotide
  Antisense strand to SEQ ID NO: 877856
auacagaguaagaaguccu

SEQ ID NO: 877858 - RNA, 19 nt, Artificial Sequence
  Description of Artificial Sequence: Synthetic oligonucleotide
  Sense strand starting at position 602 of SEQ ID NO: 588619
ugauucucuucuuccagga

SEQ ID NO: 877859 - RNA, 19 nt, Artificial Sequence
  Description of Artificial Sequence: Synthetic oligonucleotide
  Antisense strand to SEQ ID NO: 877858
uccuggaagaagagaauca

SEQ ID NO: 877860 - RNA, 19 nt, Artificial Sequence
  Description of Artificial Sequence: Synthetic oligonucleotide
  Sense strand starting at position 606 of SEQ ID NO: 588619
ucucuucuuccaggagaua

SEQ ID NO: 877861 - RNA, 19 nt, Artificial Sequence
  Description of Artificial Sequence: Synthetic oligonucleotide
  Antisense strand to SEQ ID NO: 877860
uaucuccuggaagaagaga

SEQ ID NO: 877862 - RNA, 19 nt, Artificial Sequence
  Description of Artificial Sequence: Synthetic oligonucleotide
  Sense strand starting at position 1028 of SEQ ID NO: 588619
guagguucuuagguaaaca

SEQ ID NO: 877863 - RNA, 19 nt, Artificial Sequence
  Description of Artificial Sequence: Synthetic oligonucleotide
  Antisense strand to SEQ ID NO: 877862
uguuuaccuaagaaccuac

SEQ ID NO: 877864 - RNA, 19 nt, Artificial Sequence
  Description of Artificial Sequence: Synthetic oligonucleotide
  Sense strand starting at position 1120 of SEQ ID NO: 588619
uugugugcuccaguucuuu

SEQ ID NO: 877865 - RNA, 19 nt, Artificial Sequence
  Description of Artificial Sequence: Synthetic oligonucleotide
  Antisense strand to SEQ ID NO: 877864
aaagaacuggagcacacaa

SEQ ID NO: 877866 - RNA, 19 nt, Artificial Sequence
  Description of Artificial Sequence: Synthetic oligonucleotide
  Sense strand starting at position 1316 of SEQ ID NO: 588619
ggacacugaaaucguaauu

SEQ ID NO: 877867 - RNA, 19 nt, Artificial Sequence
  Description of Artificial Sequence: Synthetic oligonucleotide
  Antisense strand to SEQ ID NO: 877866
aauuacgauuucagugucc

SEQ ID NO: 877868 - RNA, 19 nt, Artificial Sequence
  Description of Artificial Sequence: Synthetic oligonucleotide
  Sense strand starting at position 1349 of SEQ ID NO: 588619
cgugucacaaaguauuaua

SEQ ID NO: 877869 - RNA, 19 nt, Artificial Sequence
  Description of Artificial Sequence: Synthetic oligonucleotide
  Antisense strand to SEQ ID NO: 877868
uauaauacuuugugacacg

SEQ ID NO: 877870 - RNA, 19 nt, Artificial Sequence
  Description of Artificial Sequence: Synthetic oligonucleotide
  Sense strand starting at position 2206 of SEQ ID NO: 588619
gccaauuagcgcucggcua

SEQ ID NO: 877871 - RNA, 19 nt, Artificial Sequence
  Description of Artificial Sequence: Synthetic oligonucleotide
  Antisense strand to SEQ ID NO: 877870
uagccgagcgcuaauuggc

SEQ ID NO: 877872 - RNA, 19 nt, Artificial Sequence
  Description of Artificial Sequence: Synthetic oligonucleotide
  Sense strand starting at position 2759 of SEQ ID NO: 588619
cuacguugucauucgcuga

SEQ ID NO: 877873 - RNA, 19 nt, Artificial Sequence
  Description of Artificial Sequence: Synthetic oligonucleotide
  Antisense strand to SEQ ID NO: 877872
ucagcgaaugacaacguag

SEQ ID NO: 877874 - RNA, 19 nt, Artificial Sequence
  Description of Artificial Sequence: Synthetic oligonucleotide
  Sense strand starting at position 2859 of SEQ ID NO: 588619
augaaaugaucuuuagcca

SEQ ID NO: 877875 - RNA, 19 nt, Artificial Sequence
  Description of Artificial Sequence: Synthetic oligonucleotide
  Antisense strand to SEQ ID NO: 877874
uggcuaaagaucauuucau

SEQ ID NO: 877876 - RNA, 19 nt, Artificial Sequence
  Description of Artificial Sequence: Synthetic oligonucleotide
  Sense strand starting at position 2860 of SEQ ID NO: 588619
ugaaaugaucuuuagccac

SEQ ID NO: 877877 - RNA, 19 nt, Artificial Sequence
  Description of Artificial Sequence: Synthetic oligonucleotide
  Antisense strand to SEQ ID NO: 877876
guggcuaaagaucauuuca

SEQ ID NO: 877878 - RNA, 19 nt, Artificial Sequence
  Description of Artificial Sequence: Synthetic oligonucleotide
  Sense strand starting at position 3010 of SEQ ID NO: 588619
ugaaauugaccucgggauc

SEQ ID NO: 877879 - RNA, 19 nt, Artificial Sequence
  Description of Artificial Sequence: Synthetic oligonucleotide
  Antisense strand to SEQ ID NO: 877878
gaucccgaggucaauuuca

SEQ ID NO: 877880 - RNA, 19 nt, Artificial Sequence
  Description of Artificial Sequence: Synthetic oligonucleotide
  Sense strand starting at position 3011 of SEQ ID NO: 588619
gaaauugaccucgggaucu

SEQ ID NO: 877881 - RNA, 19 nt, Artificial Sequence
  Description of Artificial Sequence: Synthetic oligonucleotide
  Antisense strand to SEQ ID NO: 877880
agaucccgaggucaauuuc

SEQ ID NO: 877882 - RNA, 19 nt, Artificial Sequence
  Description of Artificial Sequence: Synthetic oligonucleotide
  Sense strand starting at position 3083 of SEQ ID NO: 588619
cuaggaugcggcagugauc

SEQ ID NO: 877883 - RNA, 19 nt, Artificial Sequence
  Description of Artificial Sequence: Synthetic oligonucleotide
  Antisense strand to SEQ ID NO: 877882
gaucacugccgcauccuag

SEQ ID NO: 877884 - RNA, 19 nt, Artificial Sequence
  Description of Artificial Sequence: Synthetic oligonucleotide
  Sense strand starting at position 3105 of SEQ ID NO: 588619
gcuguugcuauuuggaagu

SEQ ID NO: 877885 - RNA, 19 nt, Artificial Sequence
  Description of Artificial Sequence: Synthetic oligonucleotide
  Antisense strand to SEQ ID NO: 877884
acuuccaaauagcaacagc

SEQ ID NO: 877886 - RNA, 19 nt, Artificial Sequence
  Description of Artificial Sequence: Synthetic oligonucleotide
  Sense strand starting at position 3111 of SEQ ID NO: 588619
gcuauuuggaagugucauu

SEQ ID NO: 877887 - RNA, 19 nt, Artificial Sequence
  Description of Artificial Sequence: Synthetic oligonucleotide
  Antisense strand to SEQ ID NO: 877886
aaugacacuuccaaauagc

SEQ ID NO: 877888 - RNA, 19 nt, Artificial Sequence
  Description of Artificial Sequence: Synthetic oligonucleotide
  Sense strand starting at position 3160 of SEQ ID NO: 588619
agacguuggcgugcuaaac

SEQ ID NO: 877889 - RNA, 19 nt, Artificial Sequence
  Description of Artificial Sequence: Synthetic oligonucleotide
  Antisense strand to SEQ ID NO: 877888
guuuagcacgccaacgucu

SEQ ID NO: 877890 - RNA, 19 nt, Artificial Sequence
  Description of Artificial Sequence: Synthetic oligonucleotide
  Sense strand starting at position 3177 of SEQ ID NO: 588619
accugagagggcugagauu

SEQ ID NO: 877891 - RNA, 19 nt, Artificial Sequence
  Description of Artificial Sequence: Synthetic oligonucleotide
  Antisense strand to SEQ ID NO: 877890
aaucucagcccucucaggu

SEQ ID NO: 877892 - RNA, 19 nt, Artificial Sequence
  Description of Artificial Sequence: Synthetic oligonucleotide
  Sense strand starting at position 3351 of SEQ ID NO: 588619
uuggguagguaauuagaaa

SEQ ID NO: 877893 - RNA, 19 nt, Artificial Sequence
  Description of Artificial Sequence: Synthetic oligonucleotide
  Antisense strand to SEQ ID NO: 877892
uuucuaauuaccuacccaa

SEQ ID NO: 877894 - RNA, 19 nt, Artificial Sequence
  Description of Artificial Sequence: Synthetic oligonucleotide
  Sense strand starting at position 3448 of SEQ ID NO: 588619
gaagauaaauggcuccgau

SEQ ID NO: 877895 - RNA, 19 nt, Artificial Sequence
  Description of Artificial Sequence: Synthetic oligonucleotide
  Antisense strand to SEQ ID NO: 877894
aucggagccauuuaucuuc

SEQ ID NO: 877896 - RNA, 19 nt, Artificial Sequence
  Description of Artificial Sequence: Synthetic oligonucleotide
  Sense strand starting at position 3492 of SEQ ID NO: 588619
aguguaauuucgguauagc

SEQ ID NO: 877897 - RNA, 19 nt, Artificial Sequence
  Description of Artificial Sequence: Synthetic oligonucleotide
  Antisense strand to SEQ ID NO: 877896
gcuauaccgaaauuacacu

SEQ ID NO: 877898 - RNA, 19 nt, Artificial Sequence
  Description of Artificial Sequence: Synthetic oligonucleotide
  Sense strand starting at position 3493 of SEQ ID NO: 588619
guguaauuucgguauagcg

SEQ ID NO: 877899 - RNA, 19 nt, Artificial Sequence
  Description of Artificial Sequence: Synthetic oligonucleotide
  Antisense strand to SEQ ID NO: 877898
cgcuauaccgaaauuacac

SEQ ID NO: 877900 - RNA, 19 nt, Artificial Sequence
  Description of Artificial Sequence: Synthetic oligonucleotide
  Sense strand starting at position 3495 of SEQ ID NO: 588619
guaauuucgguauagcgaa

SEQ ID NO: 877901 - RNA, 19 nt, Artificial Sequence
  Description of Artificial Sequence: Synthetic oligonucleotide
  Antisense strand to SEQ ID NO: 877900
uucgcuauaccgaaauuac

SEQ ID NO: 877902 - RNA, 19 nt, Artificial Sequence
  Description of Artificial Sequence: Synthetic oligonucleotide
  Sense strand starting at position 3549 of SEQ ID NO: 588619
aguaacuuucuuugcaaga

SEQ ID NO: 877903 - RNA, 19 nt, Artificial Sequence
  Description of Artificial Sequence: Synthetic oligonucleotide
  Antisense strand to SEQ ID NO: 877902
ucuugcaaagaaaguuacu

SEQ ID NO: 877904 - RNA, 19 nt, Artificial Sequence
  Description of Artificial Sequence: Synthetic oligonucleotide
  Sense strand starting at position 3550 of SEQ ID NO: 588619
guaacuuucuuugcaagag

SEQ ID NO: 877905 - RNA, 19 nt, Artificial Sequence
  Description of Artificial Sequence: Synthetic oligonucleotide
  Antisense strand to SEQ ID NO: 877904
cucuugcaaagaaaguuac

SEQ ID NO: 877906 - RNA, 19 nt, Artificial Sequence
  Description of Artificial Sequence: Synthetic oligonucleotide
  Sense strand starting at position 3554 of SEQ ID NO: 588619
cuuucuuugcaagagauga

SEQ ID NO: 877907 - RNA, 19 nt, Artificial Sequence
  Description of Artificial Sequence: Synthetic oligonucleotide
  Antisense strand to SEQ ID NO: 877906
ucaucucuugcaaagaaag

SEQ ID NO: 877908 - RNA, 19 nt, Artificial Sequence
  Description of Artificial Sequence: Synthetic oligonucleotide
  Sense strand starting at position 3556 of SEQ ID NO: 588619
uucuuugcaagagaugagu

SEQ ID NO: 877909 - RNA, 19 nt, Artificial Sequence
  Description of Artificial Sequence: Synthetic oligonucleotide
  Antisense strand to SEQ ID NO: 877908
acucaucucuugcaaagaa

SEQ ID NO: 877910 - RNA, 19 nt, Artificial Sequence
  Description of Artificial Sequence: Synthetic oligonucleotide
  Sense strand starting at position 3705 of SEQ ID NO: 588619
ggaauagugcuucacugag

SEQ ID NO: 877911 - RNA, 19 nt, Artificial Sequence
  Description of Artificial Sequence: Synthetic oligonucleotide
  Antisense strand to SEQ ID NO: 877910
cucagugaagcacuauucc

SEQ ID NO: 877912 - RNA, 19 nt, Artificial Sequence
  Description of Artificial Sequence: Synthetic oligonucleotide
  Sense strand starting at position 3817 of SEQ ID NO: 588619
uugcauuagauguggaauc

SEQ ID NO: 877913 - RNA, 19 nt, Artificial Sequence
  Description of Artificial Sequence: Synthetic oligonucleotide
  Antisense strand to SEQ ID NO: 877912
gauuccacaucuaaugcaa

SEQ ID NO: 877914 - RNA, 19 nt, Artificial Sequence
  Description of Artificial Sequence: Synthetic oligonucleotide
  Sense strand starting at position 3819 of SEQ ID NO: 588619
gcauuagauguggaaucug

SEQ ID NO: 877915 - RNA, 19 nt, Artificial Sequence
  Description of Artificial Sequence: Synthetic oligonucleotide
  Antisense strand to SEQ ID NO: 877914
cagauuccacaucuaaugc

SEQ ID NO: 877916 - RNA, 19 nt, Artificial Sequence
  Description of Artificial Sequence: Synthetic oligonucleotide
  Sense strand starting at position 3862 of SEQ ID NO: 588619
auauguaugagguagcuuu

SEQ ID NO: 877917 - RNA, 19 nt, Artificial Sequence
  Description of Artificial Sequence: Synthetic oligonucleotide
  Antisense strand to SEQ ID NO: 877916
aaagcuaccucauacauau

SEQ ID NO: 877918 - RNA, 19 nt, Artificial Sequence
  Description of Artificial Sequence: Synthetic oligonucleotide
  Sense strand starting at position 3869 of SEQ ID NO: 588619
ugagguagcuuucuaaacu

SEQ ID NO: 877919 - RNA, 19 nt, Artificial Sequence
  Description of Artificial Sequence: Synthetic oligonucleotide
  Antisense strand to SEQ ID NO: 877918
aguuuagaaagcuaccuca

SEQ ID NO: 877920 - RNA, 19 nt, Artificial Sequence
  Description of Artificial Sequence: Synthetic oligonucleotide
  Sense strand starting at position 3923 of SEQ ID NO: 588619
cagaguuguucuuugauag

SEQ ID NO: 877921 - RNA, 19 nt, Artificial Sequence
  Description of Artificial Sequence: Synthetic oligonucleotide
  Antisense strand to SEQ ID NO: 877920
cuaucaaagaacaacucug

SEQ ID NO: 877922 - RNA, 19 nt, Artificial Sequence
  Description of Artificial Sequence: Synthetic oligonucleotide
  Sense strand starting at position 3930 of SEQ ID NO: 588619
guucuuugauagcuaaaca

SEQ ID NO: 877923 - RNA, 19 nt, Artificial Sequence
  Description of Artificial Sequence: Synthetic oligonucleotide
  Antisense strand to SEQ ID NO: 877922
uguuuagcuaucaaagaac

SEQ ID NO: 877924 - RNA, 19 nt, Artificial Sequence
  Description of Artificial Sequence: Synthetic oligonucleotide
  Sense strand starting at position 149 of SEQ ID NO: 588620
agccuuacuuccuuuagua

SEQ ID NO: 877925 - RNA, 19 nt, Artificial Sequence
  Description of Artificial Sequence: Synthetic oligonucleotide
  Antisense strand to SEQ ID NO: 877924
uacuaaaggaaguaaggcu

SEQ ID NO: 877926 - RNA, 19 nt, Artificial Sequence
  Description of Artificial Sequence: Synthetic oligonucleotide
  Sense strand starting at position 169 of SEQ ID NO: 588620
cuccucuaccuguaagaga

SEQ ID NO: 877927 - RNA, 19 nt, Artificial Sequence
  Description of Artificial Sequence: Synthetic oligonucleotide
  Antisense strand to SEQ ID NO: 877926
ucucuuacagguagaggag

SEQ ID NO: 877928 - RNA, 19 nt, Artificial Sequence
  Description of Artificial Sequence: Synthetic oligonucleotide
  Sense strand starting at position 313 of SEQ ID NO: 588620
gauuaagcuccucauuggu

SEQ ID NO: 877929 - RNA, 19 nt, Artificial Sequence
  Description of Artificial Sequence: Synthetic oligonucleotide
  Antisense strand to SEQ ID NO: 877928
accaaugaggagcuuaauc

SEQ ID NO: 877930 - RNA, 19 nt, Artificial Sequence
  Description of Artificial Sequence: Synthetic oligonucleotide
  Sense strand starting at position 327 of SEQ ID NO: 588620
uugguaggcuccuuguaca

SEQ ID NO: 877931 - RNA, 19 nt, Artificial Sequence
  Description of Artificial Sequence: Synthetic oligonucleotide
  Antisense strand to SEQ ID NO: 877930
uguacaaggagccuaccaa

SEQ ID NO: 877932 - RNA, 19 nt, Artificial Sequence
  Description of Artificial Sequence: Synthetic oligonucleotide
  Sense strand starting at position 500 of SEQ ID NO: 588620
gguaauagguaucuagcau

SEQ ID NO: 877933 - RNA, 19 nt, Artificial Sequence
  Description of Artificial Sequence: Synthetic oligonucleotide
  Antisense strand to SEQ ID NO: 877932
augcuagauaccuauuacc

SEQ ID NO: 877934 - RNA, 19 nt, Artificial Sequence
  Description of Artificial Sequence: Synthetic oligonucleotide
  Sense strand starting at position 609 of SEQ ID NO: 588620
ucaggagaaucguuacuug

SEQ ID NO: 877935 - RNA, 19 nt, Artificial Sequence
  Description of Artificial Sequence: Synthetic oligonucleotide
  Antisense strand to SEQ ID NO: 877934
caaguaacgauucuccuga

SEQ ID NO: 877936 - RNA, 19 nt, Artificial Sequence
  Description of Artificial Sequence: Synthetic oligonucleotide
  Sense strand starting at position 612 of SEQ ID NO: 588620
ggagaaucguuacuuggau

SEQ ID NO: 877937 - RNA, 19 nt, Artificial Sequence
  Description of Artificial Sequence: Synthetic oligonucleotide
  Antisense strand to SEQ ID NO: 877936
auccaaguaacgauucucc

SEQ ID NO: 877938 - RNA, 19 nt, Artificial Sequence
  Description of Artificial Sequence: Synthetic oligonucleotide
  Sense strand starting at position 613 of SEQ ID NO: 588620
gagaaucguuacuuggaug

SEQ ID NO: 877939 - RNA, 19 nt, Artificial Sequence
  Description of Artificial Sequence: Synthetic oligonucleotide
  Antisense strand to SEQ ID NO: 877938
cauccaaguaacgauucuc

SEQ ID NO: 877940 - RNA, 19 nt, Artificial Sequence
  Description of Artificial Sequence: Synthetic oligonucleotide
  Sense strand starting at position 614 of SEQ ID NO: 588620
agaaucguuacuuggauga

SEQ ID NO: 877941 - RNA, 19 nt, Artificial Sequence
  Description of Artificial Sequence: Synthetic oligonucleotide
  Antisense strand to SEQ ID NO: 877940
ucauccaaguaacgauucu

SEQ ID NO: 877942 - RNA, 19 nt, Artificial Sequence
  Description of Artificial Sequence: Synthetic oligonucleotide
  Sense strand starting at position 618 of SEQ ID NO: 588620
ucguuacuuggaugaacau

SEQ ID NO: 877943 - RNA, 19 nt, Artificial Sequence
  Description of Artificial Sequence: Synthetic oligonucleotide
  Antisense strand to SEQ ID NO: 877942
auguucauccaaguaacga

SEQ ID NO: 877944 - RNA, 19 nt, Artificial Sequence
  Description of Artificial Sequence: Synthetic oligonucleotide
  Sense strand starting at position 702 of SEQ ID NO: 588620
uggagcucuguuuggaauu

SEQ ID NO: 877945 - RNA, 19 nt, Artificial Sequence
  Description of Artificial Sequence: Synthetic oligonucleotide
  Antisense strand to SEQ ID NO: 877944
aauuccaaacagagcucca

SEQ ID NO: 877946 - RNA, 19 nt, Artificial Sequence
  Description of Artificial Sequence: Synthetic oligonucleotide
  Sense strand starting at position 1114 of SEQ ID NO: 588620
cugauauaggccugggacu

SEQ ID NO: 877947 - RNA, 19 nt, Artificial Sequence
  Description of Artificial Sequence: Synthetic oligonucleotide
  Antisense strand to SEQ ID NO: 877946
agucccaggccuauaucag

SEQ ID NO: 877948 - RNA, 19 nt, Artificial Sequence
  Description of Artificial Sequence: Synthetic oligonucleotide
  Sense strand starting at position 1115 of SEQ ID NO: 588620
ugauauaggccugggacuu

SEQ ID NO: 877949 - RNA, 19 nt, Artificial Sequence
  Description of Artificial Sequence: Synthetic oligonucleotide
  Antisense strand to SEQ ID NO: 877948
aagucccaggccuauauca

SEQ ID NO: 877950 - RNA, 19 nt, Artificial Sequence
  Description of Artificial Sequence: Synthetic oligonucleotide
  Sense strand starting at position 1197 of SEQ ID NO: 588620
accugacugccucaguuua

SEQ ID NO: 877951 - RNA, 19 nt, Artificial Sequence
  Description of Artificial Sequence: Synthetic oligonucleotide
  Antisense strand to SEQ ID NO: 877950
uaaacugaggcagucaggu

SEQ ID NO: 877952 - RNA, 19 nt, Artificial Sequence
  Description of Artificial Sequence: Synthetic oligonucleotide
  Sense strand starting at position 1199 of SEQ ID NO: 588620
cugacugccucaguuuaca

SEQ ID NO: 877953 - RNA, 19 nt, Artificial Sequence
  Description of Artificial Sequence: Synthetic oligonucleotide
  Antisense strand to SEQ ID NO: 877952
uguaaacugaggcagucag

SEQ ID NO: 877954 - RNA, 19 nt, Artificial Sequence
  Description of Artificial Sequence: Synthetic oligonucleotide
  Sense strand starting at position 1264 of SEQ ID NO: 588620
ggacacauuuagcaaguca

SEQ ID NO: 877955 - RNA, 19 nt, Artificial Sequence
  Description of Artificial Sequence: Synthetic oligonucleotide
  Antisense strand to SEQ ID NO: 877954
ugacuugcuaaaugugucc

SEQ ID NO: 877956 - RNA, 19 nt, Artificial Sequence
  Description of Artificial Sequence: Synthetic oligonucleotide
  Sense strand starting at position 1930 of SEQ ID NO: 588620
agauucuagccgggucuau

SEQ ID NO: 877957 - RNA, 19 nt, Artificial Sequence
  Description of Artificial Sequence: Synthetic oligonucleotide
  Antisense strand to SEQ ID NO: 877956
auagacccggcuagaaucu

SEQ ID NO: 877958 - RNA, 19 nt, Artificial Sequence
  Description of Artificial Sequence: Synthetic oligonucleotide
  Sense strand starting at position 1941 of SEQ ID NO: 588620
gggucuauaccucauagcu

SEQ ID NO: 877959 - RNA, 19 nt, Artificial Sequence
  Description of Artificial Sequence: Synthetic oligonucleotide
  Antisense strand to SEQ ID NO: 877958
agcuaugagguauagaccc

SEQ ID NO: 877960 - RNA, 19 nt, Artificial Sequence
  Description of Artificial Sequence: Synthetic oligonucleotide
  Sense strand starting at position 2036 of SEQ ID NO: 588620
gagcuauuggauuaucagu

SEQ ID NO: 877961 - RNA, 19 nt, Artificial Sequence
  Description of Artificial Sequence: Synthetic oligonucleotide
  Antisense strand to SEQ ID NO: 877960
acugauaauccaauagcuc

SEQ ID NO: 877962 - RNA, 19 nt, Artificial Sequence
  Description of Artificial Sequence: Synthetic oligonucleotide
  Sense strand starting at position 2041 of SEQ ID NO: 588620
auuggauuaucagucgauu

SEQ ID NO: 877963 - RNA, 19 nt, Artificial Sequence
  Description of Artificial Sequence: Synthetic oligonucleotide
  Antisense strand to SEQ ID NO: 877962
aaucgacugauaauccaau

SEQ ID NO: 877964 - RNA, 19 nt, Artificial Sequence
  Description of Artificial Sequence: Synthetic oligonucleotide
  Sense strand starting at position 2043 of SEQ ID NO: 588620
uggauuaucagucgauuac

SEQ ID NO: 877965 - RNA, 19 nt, Artificial Sequence
  Description of Artificial Sequence: Synthetic oligonucleotide
  Antisense strand to SEQ ID NO: 877964
guaaucgacugauaaucca

SEQ ID NO: 877966 - RNA, 19 nt, Artificial Sequence
  Description of Artificial Sequence: Synthetic oligonucleotide
  Sense strand starting at position 2044 of SEQ ID NO: 588620
ggauuaucagucgauuacu

SEQ ID NO: 877967 - RNA, 19 nt, Artificial Sequence
  Description of Artificial Sequence: Synthetic oligonucleotide
  Antisense strand to SEQ ID NO: 877966
aguaaucgacugauaaucc

SEQ ID NO: 877968 - RNA, 19 nt, Artificial Sequence
  Description of Artificial Sequence: Synthetic oligonucleotide
  Sense strand starting at position 2054 of SEQ ID NO: 588620
ucgauuacucgcuugccau

SEQ ID NO: 877969 - RNA, 19 nt, Artificial Sequence
  Description of Artificial Sequence: Synthetic oligonucleotide
  Antisense strand to SEQ ID NO: 877968
auggcaagcgaguaaucga

SEQ ID NO: 877970 - RNA, 19 nt, Artificial Sequence
  Description of Artificial Sequence: Synthetic oligonucleotide
  Sense strand starting at position 2255 of SEQ ID NO: 588620
guuuguuuacagcaguuau

SEQ ID NO: 877971 - RNA, 19 nt, Artificial Sequence
  Description of Artificial Sequence: Synthetic oligonucleotide
  Antisense strand to SEQ ID NO: 877970
auaacugcuguaaacaaac

SEQ ID NO: 877972 - RNA, 19 nt, Artificial Sequence
  Description of Artificial Sequence: Synthetic oligonucleotide
  Sense strand starting at position 2293 of SEQ ID NO: 588620
ugcuacaccuuaucaguua

SEQ ID NO: 877973 - RNA, 19 nt, Artificial Sequence
  Description of Artificial Sequence: Synthetic oligonucleotide
  Antisense strand to SEQ ID NO: 877972
uaacugauaagguguagca

SEQ ID NO: 877974 - RNA, 19 nt, Artificial Sequence
  Description of Artificial Sequence: Synthetic oligonucleotide
  Sense strand starting at position 2381 of SEQ ID NO: 588620
gguuuagcccgucacauca

SEQ ID NO: 877975 - RNA, 19 nt, Artificial Sequence
  Description of Artificial Sequence: Synthetic oligonucleotide
  Antisense strand to SEQ ID NO: 877974
ugaugugacgggcuaaacc

SEQ ID NO: 877976 - RNA, 19 nt, Artificial Sequence
  Description of Artificial Sequence: Synthetic oligonucleotide
  Sense strand starting at position 2394 of SEQ ID NO: 588620
acaucaucuuguucccgaa

SEQ ID NO: 877977 - RNA, 19 nt, Artificial Sequence
  Description of Artificial Sequence: Synthetic oligonucleotide
  Antisense strand to SEQ ID NO: 877976
uucgggaacaagaugaugu

SEQ ID NO: 877978 - RNA, 19 nt, Artificial Sequence
  Description of Artificial Sequence: Synthetic oligonucleotide
  Sense strand starting at position 2396 of SEQ ID NO: 588620
aucaucuuguucccgaauu

SEQ ID NO: 877979 - RNA, 19 nt, Artificial Sequence
  Description of Artificial Sequence: Synthetic oligonucleotide
  Antisense strand to SEQ ID NO: 877978
aauucgggaacaagaugau

SEQ ID NO: 877980 - RNA, 19 nt, Artificial Sequence
  Description of Artificial Sequence: Synthetic oligonucleotide
  Sense strand starting at position 2404 of SEQ ID NO: 588620
guucccgaauuauuguuau

SEQ ID NO: 877981 - RNA, 19 nt, Artificial Sequence
  Description of Artificial Sequence: Synthetic oligonucleotide
  Antisense strand to SEQ ID NO: 877980
auaacaauaauucgggaac

SEQ ID NO: 877982 - RNA, 19 nt, Artificial Sequence
  Description of Artificial Sequence: Synthetic oligonucleotide
  Sense strand starting at position 2407 of SEQ ID NO: 588620
cccgaauuauuguuaugac

SEQ ID NO: 877983 - RNA, 19 nt, Artificial Sequence
  Description of Artificial Sequence: Synthetic oligonucleotide
  Antisense strand to SEQ ID NO: 877982
gucauaacaauaauucggg

SEQ ID NO: 877984 - RNA, 19 nt, Artificial Sequence
  Description of Artificial Sequence: Synthetic oligonucleotide
  Sense strand starting at position 2915 of SEQ ID NO: 588620
aguuuaucuuuaccuaugu

SEQ ID NO: 877985 - RNA, 19 nt, Artificial Sequence
  Description of Artificial Sequence: Synthetic oligonucleotide
  Antisense strand to SEQ ID NO: 877984
acauagguaaagauaaacu

SEQ ID NO: 877986 - RNA, 19 nt, Artificial Sequence
  Description of Artificial Sequence: Synthetic oligonucleotide
  Sense strand starting at position 2916 of SEQ ID NO: 588620
guuuaucuuuaccuaugua

SEQ ID NO: 877987 - RNA, 19 nt, Artificial Sequence
  Description of Artificial Sequence: Synthetic oligonucleotide
  Antisense strand to SEQ ID NO: 877986
uacauagguaaagauaaac

SEQ ID NO: 877988 - RNA, 19 nt, Artificial Sequence
  Description of Artificial Sequence: Synthetic oligonucleotide
  Sense strand starting at position 2983 of SEQ ID NO: 588620
cuaaauacuuagguaugua

SEQ ID NO: 877989 - RNA, 19 nt, Artificial Sequence
  Description of Artificial Sequence: Synthetic oligonucleotide
  Antisense strand to SEQ ID NO: 877988
uacauaccuaaguauuuag

SEQ ID NO: 877990 - RNA, 19 nt, Artificial Sequence
  Description of Artificial Sequence: Synthetic oligonucleotide
  Sense strand starting at position 2987 of SEQ ID NO: 588620
auacuuagguauguaucua

SEQ ID NO: 877991 - RNA, 19 nt, Artificial Sequence
  Description of Artificial Sequence: Synthetic oligonucleotide
  Antisense strand to SEQ ID NO: 877990
uagauacauaccuaaguau

SEQ ID NO: 877992 - RNA, 19 nt, Artificial Sequence
  Description of Artificial Sequence: Synthetic oligonucleotide
  Sense strand starting at position 2991 of SEQ ID NO: 588620
uuagguauguaucuacuaa

SEQ ID NO: 877993 - RNA, 19 nt, Artificial Sequence
  Description of Artificial Sequence: Synthetic oligonucleotide
  Antisense strand to SEQ ID NO: 877992
uuaguagauacauaccuaa

SEQ ID NO: 877994 - RNA, 19 nt, Artificial Sequence
  Description of Artificial Sequence: Synthetic oligonucleotide
  Sense strand starting at position 3106 of SEQ ID NO: 588620
uuugucaguuauuccagua

SEQ ID NO: 877995 - RNA, 19 nt, Artificial Sequence
  Description of Artificial Sequence: Synthetic oligonucleotide
  Antisense strand to SEQ ID NO: 877994
uacuggaauaacugacaaa

SEQ ID NO: 877996 - RNA, 19 nt, Artificial Sequence
  Description of Artificial Sequence: Synthetic oligonucleotide
  Sense strand starting at position 3121 of SEQ ID NO: 588620
aguaauaaccguuauaugu

SEQ ID NO: 877997 - RNA, 19 nt, Artificial Sequence
  Description of Artificial Sequence: Synthetic oligonucleotide
  Antisense strand to SEQ ID NO: 877996
acauauaacgguuauuacu

SEQ ID NO: 877998 - RNA, 19 nt, Artificial Sequence
  Description of Artificial Sequence: Synthetic oligonucleotide
  Sense strand starting at position 3595 of SEQ ID NO: 588620
aaguguaaagcuugaauac

SEQ ID NO: 877999 - RNA, 19 nt, Artificial Sequence
  Description of Artificial Sequence: Synthetic oligonucleotide
  Antisense strand to SEQ ID NO: 877998
guauucaagcuuuacacuu

SEQ ID NO: 878000 - RNA, 19 nt, Artificial Sequence
  Description of Artificial Sequence: Synthetic oligonucleotide
  Sense strand starting at position 3596 of SEQ ID NO: 588620
aguguaaagcuugaauacu

SEQ ID NO: 878001 - RNA, 19 nt, Artificial Sequence
  Description of Artificial Sequence: Synthetic oligonucleotide
  Antisense strand to SEQ ID NO: 878000
aguauucaagcuuuacacu

SEQ ID NO: 878002 - RNA, 19 nt, Artificial Sequence
  Description of Artificial Sequence: Synthetic oligonucleotide
  Sense strand starting at position 3743 of SEQ ID NO: 588620
cagugcaggucaguuuaua

SEQ ID NO: 878003 - RNA, 19 nt, Artificial Sequence
  Description of Artificial Sequence: Synthetic oligonucleotide
  Antisense strand to SEQ ID NO: 878002
uauaaacugaccugcacug

SEQ ID NO: 878004 - RNA, 19 nt, Artificial Sequence
  Description of Artificial Sequence: Synthetic oligonucleotide
  Sense strand starting at position 104 of SEQ ID NO: 588621
aauguccaguagucagaua

SEQ ID NO: 878005 - RNA, 19 nt, Artificial Sequence
  Description of Artificial Sequence: Synthetic oligonucleotide
  Antisense strand to SEQ ID NO: 878004
uaucugacuacuggacauu

SEQ ID NO: 878006 - RNA, 19 nt, Artificial Sequence
  Description of Artificial Sequence: Synthetic oligonucleotide
  Sense strand starting at position 105 of SEQ ID NO: 588621
auguccaguagucagauaa

SEQ ID NO: 878007 - RNA, 19 nt, Artificial Sequence
  Description of Artificial Sequence: Synthetic oligonucleotide
  Antisense strand to SEQ ID NO: 878006
uuaucugacuacuggacau

SEQ ID NO: 878008 - RNA, 19 nt, Artificial Sequence
  Description of Artificial Sequence: Synthetic oligonucleotide
  Sense strand starting at position 277 of SEQ ID NO: 588621
ggucaaguuccacaucaca

SEQ ID NO: 878009 - RNA, 19 nt, Artificial Sequence
  Description of Artificial Sequence: Synthetic oligonucleotide
  Antisense strand to SEQ ID NO: 878008
ugugauguggaacuugacc

SEQ ID NO: 878010 - RNA, 19 nt, Artificial Sequence
  Description of Artificial Sequence: Synthetic oligonucleotide
  Sense strand starting at position 372 of SEQ ID NO: 588621
agcacuuaaccugaguuau

SEQ ID NO: 878011 - RNA, 19 nt, Artificial Sequence
  Description of Artificial Sequence: Synthetic oligonucleotide
  Antisense strand to SEQ ID NO: 878010
auaacucagguuaagugcu

SEQ ID NO: 878012 - RNA, 19 nt, Artificial Sequence
  Description of Artificial Sequence: Synthetic oligonucleotide
  Sense strand starting at position 396 of SEQ ID NO: 588621
ccuauaacugcccagugaa

SEQ ID NO: 878013 - RNA, 19 nt, Artificial Sequence
  Description of Artificial Sequence: Synthetic oligonucleotide
  Antisense strand to SEQ ID NO: 878012
uucacugggcaguuauagg

SEQ ID NO: 878014 - RNA, 19 nt, Artificial Sequence
  Description of Artificial Sequence: Synthetic oligonucleotide
  Sense strand starting at position 399 of SEQ ID NO: 588621
auaacugcccagugaagga

SEQ ID NO: 878015 - RNA, 19 nt, Artificial Sequence
  Description of Artificial Sequence: Synthetic oligonucleotide
  Antisense strand to SEQ ID NO: 878014
uccuucacugggcaguuau

SEQ ID NO: 878016 - RNA, 19 nt, Artificial Sequence
  Description of Artificial Sequence: Synthetic oligonucleotide
  Sense strand starting at position 447 of SEQ ID NO: 588621
ugaugaucuccacauccga

SEQ ID NO: 878017 - RNA, 19 nt, Artificial Sequence
  Description of Artificial Sequence: Synthetic oligonucleotide
  Antisense strand to SEQ ID NO: 878016
ucggauguggagaucauca

SEQ ID NO: 878018 - RNA, 19 nt, Artificial Sequence
  Description of Artificial Sequence: Synthetic oligonucleotide
  Sense strand starting at position 472 of SEQ ID NO: 588621
uccaaaucugcugaacuga

SEQ ID NO: 878019 - RNA, 19 nt, Artificial Sequence
  Description of Artificial Sequence: Synthetic oligonucleotide
  Antisense strand to SEQ ID NO: 878018
ucaguucagcagauuugga

SEQ ID NO: 878020 - RNA, 19 nt, Artificial Sequence
  Description of Artificial Sequence: Synthetic oligonucleotide
  Sense strand starting at position 495 of SEQ ID NO: 588621
guaggucugccucagaaau

SEQ ID NO: 878021 - RNA, 19 nt, Artificial Sequence
  Description of Artificial Sequence: Synthetic oligonucleotide
  Antisense strand to SEQ ID NO: 878020
auuucugaggcagaccuac

SEQ ID NO: 878022 - RNA, 19 nt, Artificial Sequence
  Description of Artificial Sequence: Synthetic oligonucleotide
  Sense strand starting at position 507 of SEQ ID NO: 588621
cagaaauguccuggcuaag

SEQ ID NO: 878023 - RNA, 19 nt, Artificial Sequence
  Description of Artificial Sequence: Synthetic oligonucleotide
  Antisense strand to SEQ ID NO: 878022
cuuagccaggacauuucug

SEQ ID NO: 878024 - RNA, 19 nt, Artificial Sequence
  Description of Artificial Sequence: Synthetic oligonucleotide
  Sense strand starting at position 564 of SEQ ID NO: 588621
ucaugaaggcugggcauau

SEQ ID NO: 878025 - RNA, 19 nt, Artificial Sequence
  Description of Artificial Sequence: Synthetic oligonucleotide
  Antisense strand to SEQ ID NO: 878024
auaugcccagccuucauga

SEQ ID NO: 878026 - RNA, 19 nt, Artificial Sequence
  Description of Artificial Sequence: Synthetic oligonucleotide
  Sense strand starting at position 565 of SEQ ID NO: 588621
caugaaggcugggcauaua

SEQ ID NO: 878027 - RNA, 19 nt, Artificial Sequence
  Description of Artificial Sequence: Synthetic oligonucleotide
  Antisense strand to SEQ ID NO: 878026
uauaugcccagccuucaug

SEQ ID NO: 878028 - RNA, 19 nt, Artificial Sequence
  Description of Artificial Sequence: Synthetic oligonucleotide
  Sense strand starting at position 624 of SEQ ID NO: 588621
agagaagaguucuuucccu

SEQ ID NO: 878029 - RNA, 19 nt, Artificial Sequence
  Description of Artificial Sequence: Synthetic oligonucleotide
  Antisense strand to SEQ ID NO: 878028
agggaaagaacucuucucu

SEQ ID NO: 878030 - RNA, 19 nt, Artificial Sequence
  Description of Artificial Sequence: Synthetic oligonucleotide
  Sense strand starting at position 790 of SEQ ID NO: 588621
augaaugcacuuuggaaca

SEQ ID NO: 878031 - RNA, 19 nt, Artificial Sequence
  Description of Artificial Sequence: Synthetic oligonucleotide
  Antisense strand to SEQ ID NO: 878030
uguuccaaagugcauucau

SEQ ID NO: 878032 - RNA, 19 nt, Artificial Sequence
  Description of Artificial Sequence: Synthetic oligonucleotide
  Sense strand starting at position 1096 of SEQ ID NO: 588621
cuaggagcuccuuauaguc

SEQ ID NO: 878033 - RNA, 19 nt, Artificial Sequence
  Description of Artificial Sequence: Synthetic oligonucleotide
  Antisense strand to SEQ ID NO: 878032
gacuauaaggagcuccuag

SEQ ID NO: 878034 - RNA, 19 nt, Artificial Sequence
  Description of Artificial Sequence: Synthetic oligonucleotide
  Sense strand starting at position 1279 of SEQ ID NO: 588621
agaagagguuaagucacuu

SEQ ID NO: 878035 - RNA, 19 nt, Artificial Sequence
  Description of Artificial Sequence: Synthetic oligonucleotide
  Antisense strand to SEQ ID NO: 878034
aagugacuuaaccucuucu

SEQ ID NO: 878036 - RNA, 19 nt, Artificial Sequence
  Description of Artificial Sequence: Synthetic oligonucleotide
  Sense strand starting at position 1426 of SEQ ID NO: 588621
gguacuagggcccaucaua

SEQ ID NO: 878037 - RNA, 19 nt, Artificial Sequence
  Description of Artificial Sequence: Synthetic oligonucleotide
  Antisense strand to SEQ ID NO: 878036
uaugaugggcccuaguacc

SEQ ID NO: 878038 - RNA, 19 nt, Artificial Sequence
  Description of Artificial Sequence: Synthetic oligonucleotide
  Sense strand starting at position 1448 of SEQ ID NO: 588621
ucucucauuucguuuagca

SEQ ID NO: 878039 - RNA, 19 nt, Artificial Sequence
  Description of Artificial Sequence: Synthetic oligonucleotide
  Antisense strand to SEQ ID NO: 878038
ugcuaaacgaaaugagaga

SEQ ID NO: 878040 - RNA, 19 nt, Artificial Sequence
  Description of Artificial Sequence: Synthetic oligonucleotide
  Sense strand starting at position 1508 of SEQ ID NO: 588621
cugacagacucuuuccaga

SEQ ID NO: 878041 - RNA, 19 nt, Artificial Sequence
  Description of Artificial Sequence: Synthetic oligonucleotide
  Antisense strand to SEQ ID NO: 878040
ucuggaaagagucugucag

SEQ ID NO: 878042 - RNA, 19 nt, Artificial Sequence
  Description of Artificial Sequence: Synthetic oligonucleotide
  Sense strand starting at position 1558 of SEQ ID NO: 588621
guguauucugggcagaacu

SEQ ID NO: 878043 - RNA, 19 nt, Artificial Sequence
  Description of Artificial Sequence: Synthetic oligonucleotide
  Antisense strand to SEQ ID NO: 878042
aguucugcccagaauacac

SEQ ID NO: 878044 - RNA, 19 nt, Artificial Sequence
  Description of Artificial Sequence: Synthetic oligonucleotide
  Sense strand starting at position 2762 of SEQ ID NO: 588621
ugacuauaucccuagcuag

SEQ ID NO: 878045 - RNA, 19 nt, Artificial Sequence
  Description of Artificial Sequence: Synthetic oligonucleotide
  Antisense strand to SEQ ID NO: 878044
cuagcuagggauauaguca

SEQ ID NO: 878046 - RNA, 19 nt, Artificial Sequence
  Description of Artificial Sequence: Synthetic oligonucleotide
  Sense strand starting at position 2804 of SEQ ID NO: 588621
aaguaucucuaguugggau

SEQ ID NO: 878047 - RNA, 19 nt, Artificial Sequence
  Description of Artificial Sequence: Synthetic oligonucleotide
  Antisense strand to SEQ ID NO: 878046
aucccaacuagagauacuu

SEQ ID NO: 878048 - RNA, 19 nt, Artificial Sequence
  Description of Artificial Sequence: Synthetic oligonucleotide
  Sense strand starting at position 2808 of SEQ ID NO: 588621
aucucuaguugggauuuaa

SEQ ID NO: 878049 - RNA, 19 nt, Artificial Sequence
  Description of Artificial Sequence: Synthetic oligonucleotide
  Antisense strand to SEQ ID NO: 878048
uuaaaucccaacuagagau

SEQ ID NO: 878050 - RNA, 19 nt, Artificial Sequence
  Description of Artificial Sequence: Synthetic oligonucleotide
  Sense strand starting at position 2883 of SEQ ID NO: 588621
gauaaugacuuuguguuua

SEQ ID NO: 878051 - RNA, 19 nt, Artificial Sequence
  Description of Artificial Sequence: Synthetic oligonucleotide
  Antisense strand to SEQ ID NO: 878050
uaaacacaaagucauuauc

SEQ ID NO: 878052 - RNA, 19 nt, Artificial Sequence
  Description of Artificial Sequence: Synthetic oligonucleotide
  Sense strand starting at position 2894 of SEQ ID NO: 588621
uguguuuacgaugacauaa

SEQ ID NO: 878053 - RNA, 19 nt, Artificial Sequence
  Description of Artificial Sequence: Synthetic oligonucleotide
  Antisense strand to SEQ ID NO: 878052
uuaugucaucguaaacaca

SEQ ID NO: 878054 - RNA, 19 nt, Artificial Sequence
  Description of Artificial Sequence: Synthetic oligonucleotide
  Sense strand starting at position 2967 of SEQ ID NO: 588621
guuaauauagacugcagga

SEQ ID NO: 878055 - RNA, 19 nt, Artificial Sequence
  Description of Artificial Sequence: Synthetic oligonucleotide
  Antisense strand to SEQ ID NO: 878054
uccugcagucuauauuaac

SEQ ID NO: 878056 - RNA, 19 nt, Artificial Sequence
  Description of Artificial Sequence: Synthetic oligonucleotide
  Sense strand starting at position 2982 of SEQ ID NO: 588621
aggagaauuugacauuccu

SEQ ID NO: 878057 - RNA, 19 nt, Artificial Sequence
  Description of Artificial Sequence: Synthetic oligonucleotide
  Antisense strand to SEQ ID NO: 878056
aggaaugucaaauucuccu

SEQ ID NO: 878058 - RNA, 19 nt, Artificial Sequence
  Description of Artificial Sequence: Synthetic oligonucleotide
  Sense strand starting at position 2990 of SEQ ID NO: 588621
uugacauuccucugaggua

SEQ ID NO: 878059 - RNA, 19 nt, Artificial Sequence
  Description of Artificial Sequence: Synthetic oligonucleotide
  Antisense strand to SEQ ID NO: 878058
uaccucagaggaaugucaa

SEQ ID NO: 878060 - RNA, 19 nt, Artificial Sequence
  Description of Artificial Sequence: Synthetic oligonucleotide
  Sense strand starting at position 3257 of SEQ ID NO: 588621
agaguaauuugacauaggu

SEQ ID NO: 878061 - RNA, 19 nt, Artificial Sequence
  Description of Artificial Sequence: Synthetic oligonucleotide
  Antisense strand to SEQ ID NO: 878060
accuaugucaaauuacucu

SEQ ID NO: 878062 - RNA, 19 nt, Artificial Sequence
  Description of Artificial Sequence: Synthetic oligonucleotide
  Sense strand starting at position 3354 of SEQ ID NO: 588621
gucugcgugcggucaugaa

SEQ ID NO: 878063 - RNA, 19 nt, Artificial Sequence
  Description of Artificial Sequence: Synthetic oligonucleotide
  Antisense strand to SEQ ID NO: 878062
uucaugaccgcacgcagac

SEQ ID NO: 878064 - RNA, 19 nt, Artificial Sequence
  Description of Artificial Sequence: Synthetic oligonucleotide
  Sense strand starting at position 3386 of SEQ ID NO: 588621
gugacugguuaaagggaga

SEQ ID NO: 878065 - RNA, 19 nt, Artificial Sequence
  Description of Artificial Sequence: Synthetic oligonucleotide
  Antisense strand to SEQ ID NO: 878064
ucucccuuuaaccagucac

SEQ ID NO: 878066 - RNA, 19 nt, Artificial Sequence
  Description of Artificial Sequence: Synthetic oligonucleotide
  Sense strand starting at position 3414 of SEQ ID NO: 588621
ugugcuccuccacaaauga

SEQ ID NO: 878067 - RNA, 19 nt, Artificial Sequence
  Description of Artificial Sequence: Synthetic oligonucleotide
  Antisense strand to SEQ ID NO: 878066
ucauuuguggaggagcaca

SEQ ID NO: 878068 - RNA, 19 nt, Artificial Sequence
  Description of Artificial Sequence: Synthetic oligonucleotide
  Sense strand starting at position 3462 of SEQ ID NO: 588621
ugaggugugcuccacagau

SEQ ID NO: 878069 - RNA, 19 nt, Artificial Sequence
  Description of Artificial Sequence: Synthetic oligonucleotide
  Antisense strand to SEQ ID NO: 878068
aucuguggagcacaccuca

SEQ ID NO: 878070 - RNA, 19 nt, Artificial Sequence
  Description of Artificial Sequence: Synthetic oligonucleotide
  Sense strand starting at position 3466 of SEQ ID NO: 588621
gugugcuccacagauggga

SEQ ID NO: 878071 - RNA, 19 nt, Artificial Sequence
  Description of Artificial Sequence: Synthetic oligonucleotide
  Antisense strand to SEQ ID NO: 878070
ucccaucuguggagcacac

SEQ ID NO: 878072 - RNA, 19 nt, Artificial Sequence
  Description of Artificial Sequence: Synthetic oligonucleotide
  Sense strand starting at position 3622 of SEQ ID NO: 588621
uucuuuacuggccacaaga

SEQ ID NO: 878073 - RNA, 19 nt, Artificial Sequence
  Description of Artificial Sequence: Synthetic oligonucleotide
  Antisense strand to SEQ ID NO: 878072
ucuuguggccaguaaagaa

SEQ ID NO: 878074 - RNA, 19 nt, Artificial Sequence
  Description of Artificial Sequence: Synthetic oligonucleotide
  Sense strand starting at position 3624 of SEQ ID NO: 588621
cuuuacuggccacaagauu

SEQ ID NO: 878075 - RNA, 19 nt, Artificial Sequence
  Description of Artificial Sequence: Synthetic oligonucleotide
  Antisense strand to SEQ ID NO: 878074
aaucuuguggccaguaaag

SEQ ID NO: 878076 - RNA, 19 nt, Artificial Sequence
  Description of Artificial Sequence: Synthetic oligonucleotide
  Sense strand starting at position 3826 of SEQ ID NO: 588621
guaugagugggcuagguau

SEQ ID NO: 878077 - RNA, 19 nt, Artificial Sequence
  Description of Artificial Sequence: Synthetic oligonucleotide
  Antisense strand to SEQ ID NO: 878076
auaccuagcccacucauac

SEQ ID NO: 878078 - RNA, 19 nt, Artificial Sequence
  Description of Artificial Sequence: Synthetic oligonucleotide
  Sense strand starting at position 3832 of SEQ ID NO: 588621
gugggcuagguauacauau

SEQ ID NO: 878079 - RNA, 19 nt, Artificial Sequence
  Description of Artificial Sequence: Synthetic oligonucleotide
  Antisense strand to SEQ ID NO: 878078
auauguauaccuagcccac

SEQ ID NO: 878080 - RNA, 19 nt, Artificial Sequence
  Description of Artificial Sequence: Synthetic oligonucleotide
  Sense strand starting at position 3888 of SEQ ID NO: 588621
gggagaugugcucaccugu

SEQ ID NO: 878081 - RNA, 19 nt, Artificial Sequence
  Description of Artificial Sequence: Synthetic oligonucleotide
  Antisense strand to SEQ ID NO: 878080
acaggugagcacaucuccc

SEQ ID NO: 878082 - RNA, 19 nt, Artificial Sequence
  Description of Artificial Sequence: Synthetic oligonucleotide
  Sense strand starting at position 3947 of SEQ ID NO: 588621
uugggaagcugacuuaaua

SEQ ID NO: 878083 - RNA, 19 nt, Artificial Sequence
  Description of Artificial Sequence: Synthetic oligonucleotide
  Antisense strand to SEQ ID NO: 878082
uauuaagucagcuucccaa

SEQ ID NO: 878084 - RNA, 19 nt, Artificial Sequence
  Description of Artificial Sequence: Synthetic oligonucleotide
  Sense strand starting at position 54 of SEQ ID NO: 588622
cagcauaauugcuggugau

SEQ ID NO: 878085 - RNA, 19 nt, Artificial Sequence
  Description of Artificial Sequence: Synthetic oligonucleotide
  Antisense strand to SEQ ID NO: 878084
aucaccagcaauuaugcug

SEQ ID NO: 878086 - RNA, 19 nt, Artificial Sequence
  Description of Artificial Sequence: Synthetic oligonucleotide
  Sense strand starting at position 55 of SEQ ID NO: 588622
agcauaauugcuggugauu

SEQ ID NO: 878087 - RNA, 19 nt, Artificial Sequence
  Description of Artificial Sequence: Synthetic oligonucleotide
  Antisense strand to SEQ ID NO: 878086
aaucaccagcaauuaugcu

SEQ ID NO: 878088 - RNA, 19 nt, Artificial Sequence
  Description of Artificial Sequence: Synthetic oligonucleotide
  Sense strand starting at position 57 of SEQ ID NO: 588622
cauaauugcuggugauuaa

SEQ ID NO: 878089 - RNA, 19 nt, Artificial Sequence
  Description of Artificial Sequence: Synthetic oligonucleotide
  Antisense strand to SEQ ID NO: 878088
uuaaucaccagcaauuaug

SEQ ID NO: 878090 - RNA, 19 nt, Artificial Sequence
  Description of Artificial Sequence: Synthetic oligonucleotide
  Sense strand starting at position 58 of SEQ ID NO: 588622
auaauugcuggugauuaag

SEQ ID NO: 878091 - RNA, 19 nt, Artificial Sequence
  Description of Artificial Sequence: Synthetic oligonucleotide
  Antisense strand to SEQ ID NO: 878090
cuuaaucaccagcaauuau

SEQ ID NO: 878092 - RNA, 19 nt, Artificial Sequence
  Description of Artificial Sequence: Synthetic oligonucleotide
  Sense strand starting at position 60 of SEQ ID NO: 588622
aauugcuggugauuaagua

SEQ ID NO: 878093 - RNA, 19 nt, Artificial Sequence
  Description of Artificial Sequence: Synthetic oligonucleotide
  Antisense strand to SEQ ID NO: 878092
uacuuaaucaccagcaauu

SEQ ID NO: 878094 - RNA, 19 nt, Artificial Sequence
  Description of Artificial Sequence: Synthetic oligonucleotide
  Sense strand starting at position 61 of SEQ ID NO: 588622
auugcuggugauuaaguaa

SEQ ID NO: 878095 - RNA, 19 nt, Artificial Sequence
  Description of Artificial Sequence: Synthetic oligonucleotide
  Antisense strand to SEQ ID NO: 878094
uuacuuaaucaccagcaau

SEQ ID NO: 878096 - RNA, 19 nt, Artificial Sequence
  Description of Artificial Sequence: Synthetic oligonucleotide
  Sense strand starting at position 72 of SEQ ID NO: 588622
uuaaguaauugccagacuu

SEQ ID NO: 878097 - RNA, 19 nt, Artificial Sequence
  Description of Artificial Sequence: Synthetic oligonucleotide
  Antisense strand to SEQ ID NO: 878096
aagucuggcaauuacuuaa

SEQ ID NO: 878098 - RNA, 19 nt, Artificial Sequence
  Description of Artificial Sequence: Synthetic oligonucleotide
  Sense strand starting at position 74 of SEQ ID NO: 588622
aaguaauugccagacuuug

SEQ ID NO: 878099 - RNA, 19 nt, Artificial Sequence
  Description of Artificial Sequence: Synthetic oligonucleotide
  Antisense strand to SEQ ID NO: 878098
caaagucuggcaauuacuu

SEQ ID NO: 878100 - RNA, 19 nt, Artificial Sequence
  Description of Artificial Sequence: Synthetic oligonucleotide
  Sense strand starting at position 80 of SEQ ID NO: 588622
uugccagacuuuguccaau

SEQ ID NO: 878101 - RNA, 19 nt, Artificial Sequence
  Description of Artificial Sequence: Synthetic oligonucleotide
  Antisense strand to SEQ ID NO: 878100
auuggacaaagucuggcaa

SEQ ID NO: 878102 - RNA, 19 nt, Artificial Sequence
  Description of Artificial Sequence: Synthetic oligonucleotide
  Sense strand starting at position 82 of SEQ ID NO: 588622
gccagacuuuguccaauaa

SEQ ID NO: 878103 - RNA, 19 nt, Artificial Sequence
  Description of Artificial Sequence: Synthetic oligonucleotide
  Antisense strand to SEQ ID NO: 878102
uuauuggacaaagucuggc

SEQ ID NO: 878104 - RNA, 19 nt, Artificial Sequence
  Description of Artificial Sequence: Synthetic oligonucleotide
  Sense strand starting at position 143 of SEQ ID NO: 588622
aagacaauggccuaguguu

SEQ ID NO: 878105 - RNA, 19 nt, Artificial Sequence
  Description of Artificial Sequence: Synthetic oligonucleotide
  Antisense strand to SEQ ID NO: 878104
aacacuaggccauugucuu

SEQ ID NO: 878106 - RNA, 19 nt, Artificial Sequence
  Description of Artificial Sequence: Synthetic oligonucleotide
  Sense strand starting at position 190 of SEQ ID NO: 588622
gggcucugcccucgacaaa

SEQ ID NO: 878107 - RNA, 19 nt, Artificial Sequence
  Description of Artificial Sequence: Synthetic oligonucleotide
  Antisense strand to SEQ ID NO: 878106
uuugucgagggcagagccc

SEQ ID NO: 878108 - RNA, 19 nt, Artificial Sequence
  Description of Artificial Sequence: Synthetic oligonucleotide
  Sense strand starting at position 437 of SEQ ID NO: 588622
gacgcacucugcucaguau

SEQ ID NO: 878109 - RNA, 19 nt, Artificial Sequence
  Description of Artificial Sequence: Synthetic oligonucleotide
  Antisense strand to SEQ ID NO: 878108
auacugagcagagugcguc

SEQ ID NO: 878110 - RNA, 19 nt, Artificial Sequence
  Description of Artificial Sequence: Synthetic oligonucleotide
  Sense strand starting at position 440 of SEQ ID NO: 588622
gcacucugcucaguaucau

SEQ ID NO: 878111 - RNA, 19 nt, Artificial Sequence
  Description of Artificial Sequence: Synthetic oligonucleotide
  Antisense strand to SEQ ID NO: 878110
augauacugagcagagugc

SEQ ID NO: 878112 - RNA, 19 nt, Artificial Sequence
  Description of Artificial Sequence: Synthetic oligonucleotide
  Sense strand starting at position 512 of SEQ ID NO: 588622
ucaacauucugcccagagu

SEQ ID NO: 878113 - RNA, 19 nt, Artificial Sequence
  Description of Artificial Sequence: Synthetic oligonucleotide
  Antisense strand to SEQ ID NO: 878112
acucugggcagaauguuga

SEQ ID NO: 878114 - RNA, 19 nt, Artificial Sequence
  Description of Artificial Sequence: Synthetic oligonucleotide
  Sense strand starting at position 523 of SEQ ID NO: 588622
cccagaguucuguagucag

SEQ ID NO: 878115 - RNA, 19 nt, Artificial Sequence
  Description of Artificial Sequence: Synthetic oligonucleotide
  Antisense strand to SEQ ID NO: 878114
cugacuacagaacucuggg

SEQ ID NO: 878116 - RNA, 19 nt, Artificial Sequence
  Description of Artificial Sequence: Synthetic oligonucleotide
  Sense strand starting at position 722 of SEQ ID NO: 588622
cgccgagauugccucuguu

SEQ ID NO: 878117 - RNA, 19 nt, Artificial Sequence
  Description of Artificial Sequence: Synthetic oligonucleotide
  Antisense strand to SEQ ID NO: 878116
aacagaggcaaucucggcg

SEQ ID NO: 878118 - RNA, 19 nt, Artificial Sequence
  Description of Artificial Sequence: Synthetic oligonucleotide
  Sense strand starting at position 1165 of SEQ ID NO: 588622
agauaauucucgccuccaa

SEQ ID NO: 878119 - RNA, 19 nt, Artificial Sequence
  Description of Artificial Sequence: Synthetic oligonucleotide
  Antisense strand to SEQ ID NO: 878118
uuggaggcgagaauuaucu

SEQ ID NO: 878120 - RNA, 19 nt, Artificial Sequence
  Description of Artificial Sequence: Synthetic oligonucleotide
  Sense strand starting at position 1176 of SEQ ID NO: 588622
gccuccaacucucggagaa

SEQ ID NO: 878121 - RNA, 19 nt, Artificial Sequence
  Description of Artificial Sequence: Synthetic oligonucleotide
  Antisense strand to SEQ ID NO: 878120
uucuccgagaguuggaggc

SEQ ID NO: 878122 - RNA, 19 nt, Artificial Sequence
  Description of Artificial Sequence: Synthetic oligonucleotide
  Sense strand starting at position 1177 of SEQ ID NO: 588622
ccuccaacucucggagaaa

SEQ ID NO: 878123 - RNA, 19 nt, Artificial Sequence
  Description of Artificial Sequence: Synthetic oligonucleotide
  Antisense strand to SEQ ID NO: 878122
uuucuccgagaguuggagg

SEQ ID NO: 878124 - RNA, 19 nt, Artificial Sequence
  Description of Artificial Sequence: Synthetic oligonucleotide
  Sense strand starting at position 1178 of SEQ ID NO: 588622
cuccaacucucggagaaag

SEQ ID NO: 878125 - RNA, 19 nt, Artificial Sequence
  Description of Artificial Sequence: Synthetic oligonucleotide
  Antisense strand to SEQ ID NO: 878124
cuuucuccgagaguuggag

SEQ ID NO: 878126 - RNA, 19 nt, Artificial Sequence
  Description of Artificial Sequence: Synthetic oligonucleotide
  Sense strand starting at position 1198 of SEQ ID NO: 588622
guggauuaaucacucgauu

SEQ ID NO: 878127 - RNA, 19 nt, Artificial Sequence
  Description of Artificial Sequence: Synthetic oligonucleotide
  Antisense strand to SEQ ID NO: 878126
aaucgagugauuaauccac

SEQ ID NO: 878128 - RNA, 19 nt, Artificial Sequence
  Description of Artificial Sequence: Synthetic oligonucleotide
  Sense strand starting at position 1536 of SEQ ID NO: 588622
agauaaauggcccggagaa

SEQ ID NO: 878129 - RNA, 19 nt, Artificial Sequence
  Description of Artificial Sequence: Synthetic oligonucleotide
  Antisense strand to SEQ ID NO: 878128
uucuccgggccauuuaucu

SEQ ID NO: 878130 - RNA, 19 nt, Artificial Sequence
  Description of Artificial Sequence: Synthetic oligonucleotide
  Sense strand starting at position 1537 of SEQ ID NO: 588622
gauaaauggcccggagaag

SEQ ID NO: 878131 - RNA, 19 nt, Artificial Sequence
  Description of Artificial Sequence: Synthetic oligonucleotide
  Antisense strand to SEQ ID NO: 878130
cuucuccgggccauuuauc

SEQ ID NO: 878132 - RNA, 19 nt, Artificial Sequence
  Description of Artificial Sequence: Synthetic oligonucleotide
  Sense strand starting at position 2471 of SEQ ID NO: 588622
gggacuacuucucguuuga

SEQ ID NO: 878133 - RNA, 19 nt, Artificial Sequence
  Description of Artificial Sequence: Synthetic oligonucleotide
  Antisense strand to SEQ ID NO: 878132
ucaaacgagaaguaguccc

SEQ ID NO: 878134 - RNA, 19 nt, Artificial Sequence
  Description of Artificial Sequence: Synthetic oligonucleotide
  Sense strand starting at position 2473 of SEQ ID NO: 588622
gacuacuucucguuugaaa

SEQ ID NO: 878135 - RNA, 19 nt, Artificial Sequence
  Description of Artificial Sequence: Synthetic oligonucleotide
  Antisense strand to SEQ ID NO: 878134
uuucaaacgagaaguaguc

SEQ ID NO: 878136 - RNA, 19 nt, Artificial Sequence
  Description of Artificial Sequence: Synthetic oligonucleotide
  Sense strand starting at position 2475 of SEQ ID NO: 588622
cuacuucucguuugaaagu

SEQ ID NO: 878137 - RNA, 19 nt, Artificial Sequence
  Description of Artificial Sequence: Synthetic oligonucleotide
  Antisense strand to SEQ ID NO: 878136
acuuucaaacgagaaguag

SEQ ID NO: 878138 - RNA, 19 nt, Artificial Sequence
  Description of Artificial Sequence: Synthetic oligonucleotide
  Sense strand starting at position 2476 of SEQ ID NO: 588622
uacuucucguuugaaaguu

SEQ ID NO: 878139 - RNA, 19 nt, Artificial Sequence
  Description of Artificial Sequence: Synthetic oligonucleotide
  Antisense strand to SEQ ID NO: 878138
aacuuucaaacgagaagua

SEQ ID NO: 878140 - RNA, 19 nt, Artificial Sequence
  Description of Artificial Sequence: Synthetic oligonucleotide
  Sense strand starting at position 2562 of SEQ ID NO: 588622
acaacuggcgacugaaauu

SEQ ID NO: 878141 - RNA, 19 nt, Artificial Sequence
  Description of Artificial Sequence: Synthetic oligonucleotide
  Antisense strand to SEQ ID NO: 878140
aauuucagucgccaguugu

SEQ ID NO: 878142 - RNA, 19 nt, Artificial Sequence
  Description of Artificial Sequence: Synthetic oligonucleotide
  Sense strand starting at position 2571 of SEQ ID NO: 588622
gacugaaauuugcauguga

SEQ ID NO: 878143 - RNA, 19 nt, Artificial Sequence
  Description of Artificial Sequence: Synthetic oligonucleotide
  Antisense strand to SEQ ID NO: 878142
ucacaugcaaauuucaguc

SEQ ID NO: 878144 - RNA, 19 nt, Artificial Sequence
  Description of Artificial Sequence: Synthetic oligonucleotide
  Sense strand starting at position 2833 of SEQ ID NO: 588622
ccgugauugcccgagcacu

SEQ ID NO: 878145 - RNA, 19 nt, Artificial Sequence
  Description of Artificial Sequence: Synthetic oligonucleotide
  Antisense strand to SEQ ID NO: 878144
agugcucgggcaaucacgg

SEQ ID NO: 878146 - RNA, 19 nt, Artificial Sequence
  Description of Artificial Sequence: Synthetic oligonucleotide
  Sense strand starting at position 2847 of SEQ ID NO: 588622
gcacuugaccgcgagggau

SEQ ID NO: 878147 - RNA, 19 nt, Artificial Sequence
  Description of Artificial Sequence: Synthetic oligonucleotide
  Antisense strand to SEQ ID NO: 878146
aucccucgcggucaagugc

SEQ ID NO: 878148 - RNA, 19 nt, Artificial Sequence
  Description of Artificial Sequence: Synthetic oligonucleotide
  Sense strand starting at position 3094 of SEQ ID NO: 588622
gcuccuuccggcugauuua

SEQ ID NO: 878149 - RNA, 19 nt, Artificial Sequence
  Description of Artificial Sequence: Synthetic oligonucleotide
  Antisense strand to SEQ ID NO: 878148
uaaaucagccggaaggagc

SEQ ID NO: 878150 - RNA, 19 nt, Artificial Sequence
  Description of Artificial Sequence: Synthetic oligonucleotide
  Sense strand starting at position 3185 of SEQ ID NO: 588622
gccauagucccugcgcaaa

SEQ ID NO: 878151 - RNA, 19 nt, Artificial Sequence
  Description of Artificial Sequence: Synthetic oligonucleotide
  Antisense strand to SEQ ID NO: 878150
uuugcgcagggacuauggc

SEQ ID NO: 878152 - RNA, 19 nt, Artificial Sequence
  Description of Artificial Sequence: Synthetic oligonucleotide
  Sense strand starting at position 3430 of SEQ ID NO: 588622
ggacaaaucucacaccuga

SEQ ID NO: 878153 - RNA, 19 nt, Artificial Sequence
  Description of Artificial Sequence: Synthetic oligonucleotide
  Antisense strand to SEQ ID NO: 878152
ucaggugugagauuugucc

SEQ ID NO: 878154 - RNA, 19 nt, Artificial Sequence
  Description of Artificial Sequence: Synthetic oligonucleotide
  Sense strand starting at position 3558 of SEQ ID NO: 588622
gccugcguccucccagaau

SEQ ID NO: 878155 - RNA, 19 nt, Artificial Sequence
  Description of Artificial Sequence: Synthetic oligonucleotide
  Antisense strand to SEQ ID NO: 878154
auucugggaggacgcaggc

SEQ ID NO: 878156 - RNA, 19 nt, Artificial Sequence
  Description of Artificial Sequence: Synthetic oligonucleotide
  Sense strand starting at position 3648 of SEQ ID NO: 588622
agcagagauguuuauguaa

SEQ ID NO: 878157 - RNA, 19 nt, Artificial Sequence
  Description of Artificial Sequence: Synthetic oligonucleotide
  Antisense strand to SEQ ID NO: 878156
uuacauaaacaucucugcu

SEQ ID NO: 878158 - RNA, 19 nt, Artificial Sequence
  Description of Artificial Sequence: Synthetic oligonucleotide
  Sense strand starting at position 3650 of SEQ ID NO: 588622
cagagauguuuauguaaca

SEQ ID NO: 878159 - RNA, 19 nt, Artificial Sequence
  Description of Artificial Sequence: Synthetic oligonucleotide
  Antisense strand to SEQ ID NO: 878158
uguuacauaaacaucucug

SEQ ID NO: 878160 - RNA, 19 nt, Artificial Sequence
  Description of Artificial Sequence: Synthetic oligonucleotide
  Sense strand starting at position 3651 of SEQ ID NO: 588622
agagauguuuauguaacag

SEQ ID NO: 878161 - RNA, 19 nt, Artificial Sequence
  Description of Artificial Sequence: Synthetic oligonucleotide
  Antisense strand to SEQ ID NO: 878160
cuguuacauaaacaucucu

SEQ ID NO: 878162 - RNA, 19 nt, Artificial Sequence
  Description of Artificial Sequence: Synthetic oligonucleotide
  Sense strand starting at position 3888 of SEQ ID NO: 588622
gccagaaguaauggcccau

SEQ ID NO: 878163 - RNA, 19 nt, Artificial Sequence
  Description of Artificial Sequence: Synthetic oligonucleotide
  Antisense strand to SEQ ID NO: 878162
augggccauuacuucuggc

SEQ ID NO: 878164 - RNA, 19 nt, Artificial Sequence
  Description of Artificial Sequence: Synthetic oligonucleotide
  Sense strand starting at position 54 of SEQ ID NO: 588623
cuauuagaaucagaaagaa

SEQ ID NO: 878165 - RNA, 19 nt, Artificial Sequence
  Description of Artificial Sequence: Synthetic oligonucleotide
  Antisense strand to SEQ ID NO: 878164
uucuuucugauucuaauag

SEQ ID NO: 878166 - RNA, 19 nt, Artificial Sequence
  Description of Artificial Sequence: Synthetic oligonucleotide
  Sense strand starting at position 89 of SEQ ID NO: 588623
guguuuaucuguguguaaa

SEQ ID NO: 878167 - RNA, 19 nt, Artificial Sequence
  Description of Artificial Sequence: Synthetic oligonucleotide
  Antisense strand to SEQ ID NO: 878166
uuuacacacagauaaacac

SEQ ID NO: 878168 - RNA, 19 nt, Artificial Sequence
  Description of Artificial Sequence: Synthetic oligonucleotide
  Sense strand starting at position 90 of SEQ ID NO: 588623
uguuuaucuguguguaaag

SEQ ID NO: 878169 - RNA, 19 nt, Artificial Sequence
  Description of Artificial Sequence: Synthetic oligonucleotide
  Antisense strand to SEQ ID NO: 878168
cuuuacacacagauaaaca

SEQ ID NO: 878170 - RNA, 19 nt, Artificial Sequence
  Description of Artificial Sequence: Synthetic oligonucleotide
  Sense strand starting at position 92 of SEQ ID NO: 588623
uuuaucuguguguaaagca

SEQ ID NO: 878171 - RNA, 19 nt, Artificial Sequence
  Description of Artificial Sequence: Synthetic oligonucleotide
  Antisense strand to SEQ ID NO: 878170
ugcuuuacacacagauaaa

SEQ ID NO: 878172 - RNA, 19 nt, Artificial Sequence
  Description of Artificial Sequence: Synthetic oligonucleotide
  Sense strand starting at position 161 of SEQ ID NO: 588623
gaccguggccaucaguuaa

SEQ ID NO: 878173 - RNA, 19 nt, Artificial Sequence
  Description of Artificial Sequence: Synthetic oligonucleotide
  Antisense strand to SEQ ID NO: 878172
uuaacugauggccacgguc

SEQ ID NO: 878174 - RNA, 19 nt, Artificial Sequence
  Description of Artificial Sequence: Synthetic oligonucleotide
  Sense strand starting at position 165 of SEQ ID NO: 588623
guggccaucaguuaaaugu

SEQ ID NO: 878175 - RNA, 19 nt, Artificial Sequence
  Description of Artificial Sequence: Synthetic oligonucleotide
  Antisense strand to SEQ ID NO: 878174
acauuuaacugauggccac

SEQ ID NO: 878176 - RNA, 19 nt, Artificial Sequence
  Description of Artificial Sequence: Synthetic oligonucleotide
  Sense strand starting at position 233 of SEQ ID NO: 588623
gggcuugucguugaaccaa

SEQ ID NO: 878177 - RNA, 19 nt, Artificial Sequence
  Description of Artificial Sequence: Synthetic oligonucleotide
  Antisense strand to SEQ ID NO: 878176
uugguucaacgacaagccc

SEQ ID NO: 878178 - RNA, 19 nt, Artificial Sequence
  Description of Artificial Sequence: Synthetic oligonucleotide
  Sense strand starting at position 419 of SEQ ID NO: 588623
cgugaucggcuuuaugaau

SEQ ID NO: 878179 - RNA, 19 nt, Artificial Sequence
  Description of Artificial Sequence: Synthetic oligonucleotide
  Antisense strand to SEQ ID NO: 878178
auucauaaagccgaucacg

SEQ ID NO: 878180 - RNA, 19 nt, Artificial Sequence
  Description of Artificial Sequence: Synthetic oligonucleotide
  Sense strand starting at position 481 of SEQ ID NO: 588623
augcauaugcuguggguua

SEQ ID NO: 878181 - RNA, 19 nt, Artificial Sequence
  Description of Artificial Sequence: Synthetic oligonucleotide
  Antisense strand to SEQ ID NO: 878180
uaacccacagcauaugcau

SEQ ID NO: 878182 - RNA, 19 nt, Artificial Sequence
  Description of Artificial Sequence: Synthetic oligonucleotide
  Sense strand starting at position 494 of SEQ ID NO: 588623
ggguuagucguaugacuuu

SEQ ID NO: 878183 - RNA, 19 nt, Artificial Sequence
  Description of Artificial Sequence: Synthetic oligonucleotide
  Antisense strand to SEQ ID NO: 878182
aaagucauacgacuaaccc

SEQ ID NO: 878184 - RNA, 19 nt, Artificial Sequence
  Description of Artificial Sequence: Synthetic oligonucleotide
  Sense strand starting at position 550 of SEQ ID NO: 588623
agcacaagugacuggguua

SEQ ID NO: 878185 - RNA, 19 nt, Artificial Sequence
  Description of Artificial Sequence: Synthetic oligonucleotide
  Antisense strand to SEQ ID NO: 878184
uaacccagucacuugugcu

SEQ ID NO: 878186 - RNA, 19 nt, Artificial Sequence
  Description of Artificial Sequence: Synthetic oligonucleotide
  Sense strand starting at position 580 of SEQ ID NO: 588623
aggauuuguugcugaacca

SEQ ID NO: 878187 - RNA, 19 nt, Artificial Sequence
  Description of Artificial Sequence: Synthetic oligonucleotide
  Antisense strand to SEQ ID NO: 878186
ugguucagcaacaaauccu

SEQ ID NO: 878188 - RNA, 19 nt, Artificial Sequence
  Description of Artificial Sequence: Synthetic oligonucleotide
  Sense strand starting at position 596 of SEQ ID NO: 588623
ccaccuggugucuaaagau

SEQ ID NO: 878189 - RNA, 19 nt, Artificial Sequence
  Description of Artificial Sequence: Synthetic oligonucleotide
  Antisense strand to SEQ ID NO: 878188
aucuuuagacaccaggugg

SEQ ID NO: 878190 - RNA, 19 nt, Artificial Sequence
  Description of Artificial Sequence: Synthetic oligonucleotide
  Sense strand starting at position 681 of SEQ ID NO: 588623
guguaaucccaccacuaug

SEQ ID NO: 878191 - RNA, 19 nt, Artificial Sequence
  Description of Artificial Sequence: Synthetic oligonucleotide
  Antisense strand to SEQ ID NO: 878190
cauaguggugggauuacac

SEQ ID NO: 878192 - RNA, 19 nt, Artificial Sequence
  Description of Artificial Sequence: Synthetic oligonucleotide
  Sense strand starting at position 963 of SEQ ID NO: 588623
aaucauuauggaggugauu

SEQ ID NO: 878193 - RNA, 19 nt, Artificial Sequence
  Description of Artificial Sequence: Synthetic oligonucleotide
  Antisense strand to SEQ ID NO: 878192
aaucaccuccauaaugauu

SEQ ID NO: 878194 - RNA, 19 nt, Artificial Sequence
  Description of Artificial Sequence: Synthetic oligonucleotide
  Sense strand starting at position 965 of SEQ ID NO: 588623
ucauuauggaggugauugu

SEQ ID NO: 878195 - RNA, 19 nt, Artificial Sequence
  Description of Artificial Sequence: Synthetic oligonucleotide
  Antisense strand to SEQ ID NO: 878194
acaaucaccuccauaauga

SEQ ID NO: 878196 - RNA, 19 nt, Artificial Sequence
  Description of Artificial Sequence: Synthetic oligonucleotide
  Sense strand starting at position 966 of SEQ ID NO: 588623
cauuauggaggugauugua

SEQ ID NO: 878197 - RNA, 19 nt, Artificial Sequence
  Description of Artificial Sequence: Synthetic oligonucleotide
  Antisense strand to SEQ ID NO: 878196
uacaaucaccuccauaaug

SEQ ID NO: 878198 - RNA, 19 nt, Artificial Sequence
  Description of Artificial Sequence: Synthetic oligonucleotide
  Sense strand starting at position 969 of SEQ ID NO: 588623
uauggaggugauuguaaau

SEQ ID NO: 878199 - RNA, 19 nt, Artificial Sequence
  Description of Artificial Sequence: Synthetic oligonucleotide
  Antisense strand to SEQ ID NO: 878198
auuuacaaucaccuccaua

SEQ ID NO: 878200 - RNA, 19 nt, Artificial Sequence
  Description of Artificial Sequence: Synthetic oligonucleotide
  Sense strand starting at position 978 of SEQ ID NO: 588623
gauuguaaauuuguacgca

SEQ ID NO: 878201 - RNA, 19 nt, Artificial Sequence
  Description of Artificial Sequence: Synthetic oligonucleotide
  Antisense strand to SEQ ID NO: 878200
ugcguacaaauuuacaauc

SEQ ID NO: 878202 - RNA, 19 nt, Artificial Sequence
  Description of Artificial Sequence: Synthetic oligonucleotide
  Sense strand starting at position 982 of SEQ ID NO: 588623
guaaauuuguacgcagcuu

SEQ ID NO: 878203 - RNA, 19 nt, Artificial Sequence
  Description of Artificial Sequence: Synthetic oligonucleotide
  Antisense strand to SEQ ID NO: 878202
aagcugcguacaaauuuac

SEQ ID NO: 878204 - RNA, 19 nt, Artificial Sequence
  Description of Artificial Sequence: Synthetic oligonucleotide
  Sense strand starting at position 2723 of SEQ ID NO: 588623
cgcugaguccuguauuagu

SEQ ID NO: 878205 - RNA, 19 nt, Artificial Sequence
  Description of Artificial Sequence: Synthetic oligonucleotide
  Antisense strand to SEQ ID NO: 878204
acuaauacaggacucagcg

SEQ ID NO: 878206 - RNA, 19 nt, Artificial Sequence
  Description of Artificial Sequence: Synthetic oligonucleotide
  Sense strand starting at position 2732 of SEQ ID NO: 588623
cuguauuaguugucaaccu

SEQ ID NO: 878207 - RNA, 19 nt, Artificial Sequence
  Description of Artificial Sequence: Synthetic oligonucleotide
  Antisense strand to SEQ ID NO: 878206
agguugacaacuaauacag

SEQ ID NO: 878208 - RNA, 19 nt, Artificial Sequence
  Description of Artificial Sequence: Synthetic oligonucleotide
  Sense strand starting at position 2885 of SEQ ID NO: 588623
gagagcaggugguuucgaa

SEQ ID NO: 878209 - RNA, 19 nt, Artificial Sequence
  Description of Artificial Sequence: Synthetic oligonucleotide
  Antisense strand to SEQ ID NO: 878208
uucgaaaccaccugcucuc

SEQ ID NO: 878210 - RNA, 19 nt, Artificial Sequence
  Description of Artificial Sequence: Synthetic oligonucleotide
  Sense strand starting at position 2963 of SEQ ID NO: 588623
uggugucaucaguggauag

SEQ ID NO: 878211 - RNA, 19 nt, Artificial Sequence
  Description of Artificial Sequence: Synthetic oligonucleotide
  Antisense strand to SEQ ID NO: 878210
cuauccacugaugacacca

SEQ ID NO: 878212 - RNA, 19 nt, Artificial Sequence
  Description of Artificial Sequence: Synthetic oligonucleotide
  Sense strand starting at position 2964 of SEQ ID NO: 588623
ggugucaucaguggauagu

SEQ ID NO: 878213 - RNA, 19 nt, Artificial Sequence
  Description of Artificial Sequence: Synthetic oligonucleotide
  Antisense strand to SEQ ID NO: 878212
acuauccacugaugacacc

SEQ ID NO: 878214 - RNA, 19 nt, Artificial Sequence
  Description of Artificial Sequence: Synthetic oligonucleotide
  Sense strand starting at position 2965 of SEQ ID NO: 588623
gugucaucaguggauaguu

SEQ ID NO: 878215 - RNA, 19 nt, Artificial Sequence
  Description of Artificial Sequence: Synthetic oligonucleotide
  Antisense strand to SEQ ID NO: 878214
aacuauccacugaugacac

SEQ ID NO: 878216 - RNA, 19 nt, Artificial Sequence
  Description of Artificial Sequence: Synthetic oligonucleotide
  Sense strand starting at position 3075 of SEQ ID NO: 588623
ggcuuuacauuccucagau

SEQ ID NO: 878217 - RNA, 19 nt, Artificial Sequence
  Description of Artificial Sequence: Synthetic oligonucleotide
  Antisense strand to SEQ ID NO: 878216
aucugaggaauguaaagcc

SEQ ID NO: 878218 - RNA, 19 nt, Artificial Sequence
  Description of Artificial Sequence: Synthetic oligonucleotide
  Sense strand starting at position 3144 of SEQ ID NO: 588623
ucuugaaagcauugauuau

SEQ ID NO: 878219 - RNA, 19 nt, Artificial Sequence
  Description of Artificial Sequence: Synthetic oligonucleotide
  Antisense strand to SEQ ID NO: 878218
auaaucaaugcuuucaaga

SEQ ID NO: 878220 - RNA, 19 nt, Artificial Sequence
  Description of Artificial Sequence: Synthetic oligonucleotide
  Sense strand starting at position 3245 of SEQ ID NO: 588623
ggagacauuucagggaguu

SEQ ID NO: 878221 - RNA, 19 nt, Artificial Sequence
  Description of Artificial Sequence: Synthetic oligonucleotide
  Antisense strand to SEQ ID NO: 878220
aacucccugaaaugucucc

SEQ ID NO: 878222 - RNA, 19 nt, Artificial Sequence
  Description of Artificial Sequence: Synthetic oligonucleotide
  Sense strand starting at position 3297 of SEQ ID NO: 588623
acugaauuggaauggcauu

SEQ ID NO: 878223 - RNA, 19 nt, Artificial Sequence
  Description of Artificial Sequence: Synthetic oligonucleotide
  Antisense strand to SEQ ID NO: 878222
aaugccauuccaauucagu

SEQ ID NO: 878224 - RNA, 19 nt, Artificial Sequence
  Description of Artificial Sequence: Synthetic oligonucleotide
  Sense strand starting at position 3331 of SEQ ID NO: 588623
ugaggucucagugaaguca

SEQ ID NO: 878225 - RNA, 19 nt, Artificial Sequence
  Description of Artificial Sequence: Synthetic oligonucleotide
  Antisense strand to SEQ ID NO: 878224
ugacuucacugagaccuca

SEQ ID NO: 878226 - RNA, 19 nt, Artificial Sequence
  Description of Artificial Sequence: Synthetic oligonucleotide
  Sense strand starting at position 3366 of SEQ ID NO: 588623
cugucaccuguugaaucau

SEQ ID NO: 878227 - RNA, 19 nt, Artificial Sequence
  Description of Artificial Sequence: Synthetic oligonucleotide
  Antisense strand to SEQ ID NO: 878226
augauucaacaggugacag

SEQ ID NO: 878228 - RNA, 19 nt, Artificial Sequence
  Description of Artificial Sequence: Synthetic oligonucleotide
  Sense strand starting at position 3450 of SEQ ID NO: 588623
uuuguaugccaggaugaaa

SEQ ID NO: 878229 - RNA, 19 nt, Artificial Sequence
  Description of Artificial Sequence: Synthetic oligonucleotide
  Antisense strand to SEQ ID NO: 878228
uuucauccuggcauacaaa

SEQ ID NO: 878230 - RNA, 19 nt, Artificial Sequence
  Description of Artificial Sequence: Synthetic oligonucleotide
  Sense strand starting at position 3811 of SEQ ID NO: 588623
ggguuauaggugugaaccu

SEQ ID NO: 878231 - RNA, 19 nt, Artificial Sequence
  Description of Artificial Sequence: Synthetic oligonucleotide
  Antisense strand to SEQ ID NO: 878230
agguucacaccuauaaccc

SEQ ID NO: 878232 - RNA, 19 nt, Artificial Sequence
  Description of Artificial Sequence: Synthetic oligonucleotide
  Sense strand starting at position 3835 of SEQ ID NO: 588623
cagccagguucuucuuuga

SEQ ID NO: 878233 - RNA, 19 nt, Artificial Sequence
  Description of Artificial Sequence: Synthetic oligonucleotide
  Antisense strand to SEQ ID NO: 878232
ucaaagaagaaccuggcug

SEQ ID NO: 878234 - RNA, 19 nt, Artificial Sequence
  Description of Artificial Sequence: Synthetic oligonucleotide
  Sense strand starting at position 3838 of SEQ ID NO: 588623
ccagguucuucuuugagac

SEQ ID NO: 878235 - RNA, 19 nt, Artificial Sequence
  Description of Artificial Sequence: Synthetic oligonucleotide
  Antisense strand to SEQ ID NO: 878234
gucucaaagaagaaccugg

SEQ ID NO: 878236 - RNA, 19 nt, Artificial Sequence
  Description of Artificial Sequence: Synthetic oligonucleotide
  Sense strand starting at position 3851 of SEQ ID NO: 588623
ugagacuuguagccagaag

SEQ ID NO: 878237 - RNA, 19 nt, Artificial Sequence
  Description of Artificial Sequence: Synthetic oligonucleotide
  Antisense strand to SEQ ID NO: 878236
cuucuggcuacaagucuca

SEQ ID NO: 878238 - RNA, 19 nt, Artificial Sequence
  Description of Artificial Sequence: Synthetic oligonucleotide
  Sense strand starting at position 3862 of SEQ ID NO: 588623
gccagaagauuguucagga

SEQ ID NO: 878239 - RNA, 19 nt, Artificial Sequence
  Description of Artificial Sequence: Synthetic oligonucleotide
  Antisense strand to SEQ ID NO: 878238
uccugaacaaucuucuggc

SEQ ID NO: 878240 - RNA, 19 nt, Artificial Sequence
  Description of Artificial Sequence: Synthetic oligonucleotide
  Sense strand starting at position 3883 of SEQ ID NO: 588623
uaguccagauuguaggaaa

SEQ ID NO: 878241 - RNA, 19 nt, Artificial Sequence
  Description of Artificial Sequence: Synthetic oligonucleotide
  Antisense strand to SEQ ID NO: 878240
uuuccuacaaucuggacua

SEQ ID NO: 878242 - RNA, 19 nt, Artificial Sequence
  Description of Artificial Sequence: Synthetic oligonucleotide
  Sense strand starting at position 3910 of SEQ ID NO: 588623
uacaaugaucagggcuaga

SEQ ID NO: 878243 - RNA, 19 nt, Artificial Sequence
  Description of Artificial Sequence: Synthetic oligonucleotide
  Antisense strand to SEQ ID NO: 878242
ucuagcccugaucauugua

SEQ ID NO: 878244 - RNA, 19 nt, Artificial Sequence
  Description of Artificial Sequence: Synthetic oligonucleotide
  Sense strand starting at position 88 of SEQ ID NO: 588624
gggacuugggcacguuaaa

SEQ ID NO: 878245 - RNA, 19 nt, Artificial Sequence
  Description of Artificial Sequence: Synthetic oligonucleotide
  Antisense strand to SEQ ID NO: 878244
uuuaacgugcccaaguccc

SEQ ID NO: 878246 - RNA, 19 nt, Artificial Sequence
  Description of Artificial Sequence: Synthetic oligonucleotide
  Sense strand starting at position 95 of SEQ ID NO: 588624
gggcacguuaaacauuaaa

SEQ ID NO: 878247 - RNA, 19 nt, Artificial Sequence
  Description of Artificial Sequence: Synthetic oligonucleotide
  Antisense strand to SEQ ID NO: 878246
uuuaauguuuaacgugccc

SEQ ID NO: 878248 - RNA, 19 nt, Artificial Sequence
  Description of Artificial Sequence: Synthetic oligonucleotide
  Sense strand starting at position 601 of SEQ ID NO: 588624
cucugauucucggaagccu

SEQ ID NO: 878249 - RNA, 19 nt, Artificial Sequence
  Description of Artificial Sequence: Synthetic oligonucleotide
  Antisense strand to SEQ ID NO: 878248
aggcuuccgagaaucagag

SEQ ID NO: 878250 - RNA, 19 nt, Artificial Sequence
  Description of Artificial Sequence: Synthetic oligonucleotide
  Sense strand starting at position 767 of SEQ ID NO: 588624
ucggauuccuugccuguaa

SEQ ID NO: 878251 - RNA, 19 nt, Artificial Sequence
  Description of Artificial Sequence: Synthetic oligonucleotide
  Antisense strand to SEQ ID NO: 878250
uuacaggcaaggaauccga

SEQ ID NO: 878252 - RNA, 19 nt, Artificial Sequence
  Description of Artificial Sequence: Synthetic oligonucleotide
  Sense strand starting at position 768 of SEQ ID NO: 588624
cggauuccuugccuguaaa

SEQ ID NO: 878253 - RNA, 19 nt, Artificial Sequence
  Description of Artificial Sequence: Synthetic oligonucleotide
  Antisense strand to SEQ ID NO: 878252
uuuacaggcaaggaauccg

SEQ ID NO: 878254 - RNA, 19 nt, Artificial Sequence
  Description of Artificial Sequence: Synthetic oligonucleotide
  Sense strand starting at position 818 of SEQ ID NO: 588624
ccaggaguacuguacgaau

SEQ ID NO: 878255 - RNA, 19 nt, Artificial Sequence
  Description of Artificial Sequence: Synthetic oligonucleotide
  Antisense strand to SEQ ID NO: 878254
auucguacaguacuccugg

SEQ ID NO: 878256 - RNA, 19 nt, Artificial Sequence
  Description of Artificial Sequence: Synthetic oligonucleotide
  Sense strand starting at position 840 of SEQ ID NO: 588624
gucgcaaagucucccaguu

SEQ ID NO: 878257 - RNA, 19 nt, Artificial Sequence
  Description of Artificial Sequence: Synthetic oligonucleotide
  Antisense strand to SEQ ID NO: 878256
aacugggagacuuugcgac

SEQ ID NO: 878258 - RNA, 19 nt, Artificial Sequence
  Description of Artificial Sequence: Synthetic oligonucleotide
  Sense strand starting at position 1385 of SEQ ID NO: 588624
ggcggaagaagccaugaau

SEQ ID NO: 878259 - RNA, 19 nt, Artificial Sequence
  Description of Artificial Sequence: Synthetic oligonucleotide
  Antisense strand to SEQ ID NO: 878258
auucauggcuucuuccgcc

SEQ ID NO: 878260 - RNA, 19 nt, Artificial Sequence
  Description of Artificial Sequence: Synthetic oligonucleotide
  Sense strand starting at position 2203 of SEQ ID NO: 588624
gccucuucccgguaggacu

SEQ ID NO: 878261 - RNA, 19 nt, Artificial Sequence
  Description of Artificial Sequence: Synthetic oligonucleotide
  Antisense strand to SEQ ID NO: 878260
aguccuaccgggaagaggc

SEQ ID NO: 878262 - RNA, 19 nt, Artificial Sequence
  Description of Artificial Sequence: Synthetic oligonucleotide
  Sense strand starting at position 2521 of SEQ ID NO: 588624
gggagcuguccaagguguu

SEQ ID NO: 878263 - RNA, 19 nt, Artificial Sequence
  Description of Artificial Sequence: Synthetic oligonucleotide
  Antisense strand to SEQ ID NO: 878262
aacaccuuggacagcuccc

SEQ ID NO: 878264 - RNA, 19 nt, Artificial Sequence
  Description of Artificial Sequence: Synthetic oligonucleotide
  Sense strand starting at position 2964 of SEQ ID NO: 588624
accuccuuugacuagucau

SEQ ID NO: 878265 - RNA, 19 nt, Artificial Sequence
  Description of Artificial Sequence: Synthetic oligonucleotide
  Antisense strand to SEQ ID NO: 878264
augacuagucaaaggaggu

SEQ ID NO: 878266 - RNA, 19 nt, Artificial Sequence
  Description of Artificial Sequence: Synthetic oligonucleotide
  Sense strand starting at position 3063 of SEQ ID NO: 588624
ugcccucagguuuaucaaa

SEQ ID NO: 878267 - RNA, 19 nt, Artificial Sequence
  Description of Artificial Sequence: Synthetic oligonucleotide
  Antisense strand to SEQ ID NO: 878266
uuugauaaaccugagggca

SEQ ID NO: 878268 - RNA, 19 nt, Artificial Sequence
  Description of Artificial Sequence: Synthetic oligonucleotide
  Sense strand starting at position 3065 of SEQ ID NO: 588624
cccucagguuuaucaaaug

SEQ ID NO: 878269 - RNA, 19 nt, Artificial Sequence
  Description of Artificial Sequence: Synthetic oligonucleotide
  Antisense strand to SEQ ID NO: 878268
cauuugauaaaccugaggg

SEQ ID NO: 878270 - RNA, 19 nt, Artificial Sequence
  Description of Artificial Sequence: Synthetic oligonucleotide
  Sense strand starting at position 3220 of SEQ ID NO: 588624
gccuucccauccuggagaa

SEQ ID NO: 878271 - RNA, 19 nt, Artificial Sequence
  Description of Artificial Sequence: Synthetic oligonucleotide
  Antisense strand to SEQ ID NO: 878270
uucuccaggaugggaaggc

SEQ ID NO: 878272 - RNA, 19 nt, Artificial Sequence
  Description of Artificial Sequence: Synthetic oligonucleotide
  Sense strand starting at position 3221 of SEQ ID NO: 588624
ccuucccauccuggagaaa

SEQ ID NO: 878273 - RNA, 19 nt, Artificial Sequence
  Description of Artificial Sequence: Synthetic oligonucleotide
  Antisense strand to SEQ ID NO: 878272
uuucuccaggaugggaagg

SEQ ID NO: 878274 - RNA, 19 nt, Artificial Sequence
  Description of Artificial Sequence: Synthetic oligonucleotide
  Sense strand starting at position 3304 of SEQ ID NO: 588624
cacucagucccaggugaga

SEQ ID NO: 878275 - RNA, 19 nt, Artificial Sequence
  Description of Artificial Sequence: Synthetic oligonucleotide
  Antisense strand to SEQ ID NO: 878274
ucucaccugggacugagug

SEQ ID NO: 878276 - RNA, 19 nt, Artificial Sequence
  Description of Artificial Sequence: Synthetic oligonucleotide
  Sense strand starting at position 3365 of SEQ ID NO: 588624
ccagguucugugcaagauu

SEQ ID NO: 878277 - RNA, 19 nt, Artificial Sequence
  Description of Artificial Sequence: Synthetic oligonucleotide
  Antisense strand to SEQ ID NO: 878276
aaucuugcacagaaccugg

SEQ ID NO: 878278 - RNA, 19 nt, Artificial Sequence
  Description of Artificial Sequence: Synthetic oligonucleotide
  Sense strand starting at position 3368 of SEQ ID NO: 588624
gguucugugcaagauuccu

SEQ ID NO: 878279 - RNA, 19 nt, Artificial Sequence
  Description of Artificial Sequence: Synthetic oligonucleotide
  Antisense strand to SEQ ID NO: 878278
aggaaucuugcacagaacc

SEQ ID NO: 878280 - RNA, 19 nt, Artificial Sequence
  Description of Artificial Sequence: Synthetic oligonucleotide
  Sense strand starting at position 3373 of SEQ ID NO: 588624
ugugcaagauuccugccua

SEQ ID NO: 878281 - RNA, 19 nt, Artificial Sequence
  Description of Artificial Sequence: Synthetic oligonucleotide
  Antisense strand to SEQ ID NO: 878280
uaggcaggaaucuugcaca

SEQ ID NO: 878282 - RNA, 19 nt, Artificial Sequence
  Description of Artificial Sequence: Synthetic oligonucleotide
  Sense strand starting at position 3374 of SEQ ID NO: 588624
gugcaagauuccugccuau

SEQ ID NO: 878283 - RNA, 19 nt, Artificial Sequence
  Description of Artificial Sequence: Synthetic oligonucleotide
  Antisense strand to SEQ ID NO: 878282
auaggcaggaaucuugcac

SEQ ID NO: 878284 - RNA, 19 nt, Artificial Sequence
  Description of Artificial Sequence: Synthetic oligonucleotide
  Sense strand starting at position 3598 of SEQ ID NO: 588624
cgcagaucuggaugugaug

SEQ ID NO: 878285 - RNA, 19 nt, Artificial Sequence
  Description of Artificial Sequence: Synthetic oligonucleotide
  Antisense strand to SEQ ID NO: 878284
caucacauccagaucugcg

SEQ ID NO: 878286 - RNA, 19 nt, Artificial Sequence
  Description of Artificial Sequence: Synthetic oligonucleotide
  Sense strand starting at position 3625 of SEQ ID NO: 588624
gaacucugcuggccagaga

SEQ ID NO: 878287 - RNA, 19 nt, Artificial Sequence
  Description of Artificial Sequence: Synthetic oligonucleotide
  Antisense strand to SEQ ID NO: 878286
ucucuggccagcagaguuc

SEQ ID NO: 878288 - RNA, 19 nt, Artificial Sequence
  Description of Artificial Sequence: Synthetic oligonucleotide
  Sense strand starting at position 99 of SEQ ID NO: 588625
aagucagucuuggcagcaa

SEQ ID NO: 878289 - RNA, 19 nt, Artificial Sequence
  Description of Artificial Sequence: Synthetic oligonucleotide
  Antisense strand to SEQ ID NO: 878288
uugcugccaagacugacuu

SEQ ID NO: 878290 - RNA, 19 nt, Artificial Sequence
  Description of Artificial Sequence: Synthetic oligonucleotide
  Sense strand starting at position 190 of SEQ ID NO: 588625
acuccuguggcucacaauu

SEQ ID NO: 878291 - RNA, 19 nt, Artificial Sequence
  Description of Artificial Sequence: Synthetic oligonucleotide
  Antisense strand to SEQ ID NO: 878290
aauugugagccacaggagu

SEQ ID NO: 878292 - RNA, 19 nt, Artificial Sequence
  Description of Artificial Sequence: Synthetic oligonucleotide
  Sense strand starting at position 229 of SEQ ID NO: 588625
ucuuuagggucuugugaga

SEQ ID NO: 878293 - RNA, 19 nt, Artificial Sequence
  Description of Artificial Sequence: Synthetic oligonucleotide
  Antisense strand to SEQ ID NO: 878292
ucucacaagacccuaaaga

SEQ ID NO: 878294 - RNA, 19 nt, Artificial Sequence
  Description of Artificial Sequence: Synthetic oligonucleotide
  Sense strand starting at position 578 of SEQ ID NO: 588625
cucugaaucacugggaugu

SEQ ID NO: 878295 - RNA, 19 nt, Artificial Sequence
  Description of Artificial Sequence: Synthetic oligonucleotide
  Antisense strand to SEQ ID NO: 878294
acaucccagugauucagag

SEQ ID NO: 878296 - RNA, 19 nt, Artificial Sequence
  Description of Artificial Sequence: Synthetic oligonucleotide
  Sense strand starting at position 612 of SEQ ID NO: 588625
aagagagugcccuaaccua

SEQ ID NO: 878297 - RNA, 19 nt, Artificial Sequence
  Description of Artificial Sequence: Synthetic oligonucleotide
  Antisense strand to SEQ ID NO: 878296
uagguuagggcacucucuu

SEQ ID NO: 878298 - RNA, 19 nt, Artificial Sequence
  Description of Artificial Sequence: Synthetic oligonucleotide
  Sense strand starting at position 666 of SEQ ID NO: 588625
cuuggaguccaccauaagu

SEQ ID NO: 878299 - RNA, 19 nt, Artificial Sequence
  Description of Artificial Sequence: Synthetic oligonucleotide
  Antisense strand to SEQ ID NO: 878298
acuuaugguggacuccaag

SEQ ID NO: 878300 - RNA, 19 nt, Artificial Sequence
  Description of Artificial Sequence: Synthetic oligonucleotide
  Sense strand starting at position 867 of SEQ ID NO: 588625
uucucaguaugagcuuuau

SEQ ID NO: 878301 - RNA, 19 nt, Artificial Sequence
  Description of Artificial Sequence: Synthetic oligonucleotide
  Antisense strand to SEQ ID NO: 878300
auaaagcucauacugagaa

SEQ ID NO: 878302 - RNA, 19 nt, Artificial Sequence
  Description of Artificial Sequence: Synthetic oligonucleotide
  Sense strand starting at position 871 of SEQ ID NO: 588625
caguaugagcuuuaucugu

SEQ ID NO: 878303 - RNA, 19 nt, Artificial Sequence
  Description of Artificial Sequence: Synthetic oligonucleotide
  Antisense strand to SEQ ID NO: 878302
acagauaaagcucauacug

SEQ ID NO: 878304 - RNA, 19 nt, Artificial Sequence
  Description of Artificial Sequence: Synthetic oligonucleotide
  Sense strand starting at position 873 of SEQ ID NO: 588625
guaugagcuuuaucugucu

SEQ ID NO: 878305 - RNA, 19 nt, Artificial Sequence
  Description of Artificial Sequence: Synthetic oligonucleotide
  Antisense strand to SEQ ID NO: 878304
agacagauaaagcucauac

SEQ ID NO: 878306 - RNA, 19 nt, Artificial Sequence
  Description of Artificial Sequence: Synthetic oligonucleotide
  Sense strand starting at position 1199 of SEQ ID NO: 588625
ccacgugugcuucuugauc

SEQ ID NO: 878307 - RNA, 19 nt, Artificial Sequence
  Description of Artificial Sequence: Synthetic oligonucleotide
  Antisense strand to SEQ ID NO: 878306
gaucaagaagcacacgugg

SEQ ID NO: 878308 - RNA, 19 nt, Artificial Sequence
  Description of Artificial Sequence: Synthetic oligonucleotide
  Sense strand starting at position 2301 of SEQ ID NO: 588625
ggugaagaagccugauaaa

SEQ ID NO: 878309 - RNA, 19 nt, Artificial Sequence
  Description of Artificial Sequence: Synthetic oligonucleotide
  Antisense strand to SEQ ID NO: 878308
uuuaucaggcuucuucacc

SEQ ID NO: 878310 - RNA, 19 nt, Artificial Sequence
  Description of Artificial Sequence: Synthetic oligonucleotide
  Sense strand starting at position 2559 of SEQ ID NO: 588625
ggguaaaucucccugugaa

SEQ ID NO: 878311 - RNA, 19 nt, Artificial Sequence
  Description of Artificial Sequence: Synthetic oligonucleotide
  Antisense strand to SEQ ID NO: 878310
uucacagggagauuuaccc

SEQ ID NO: 878312 - RNA, 19 nt, Artificial Sequence
  Description of Artificial Sequence: Synthetic oligonucleotide
  Sense strand starting at position 2560 of SEQ ID NO: 588625
gguaaaucucccugugaag

SEQ ID NO: 878313 - RNA, 19 nt, Artificial Sequence
  Description of Artificial Sequence: Synthetic oligonucleotide
  Antisense strand to SEQ ID NO: 878312
cuucacagggagauuuacc

SEQ ID NO: 878314 - RNA, 19 nt, Artificial Sequence
  Description of Artificial Sequence: Synthetic oligonucleotide
  Sense strand starting at position 2563 of SEQ ID NO: 588625
aaaucucccugugaaggau

SEQ ID NO: 878315 - RNA, 19 nt, Artificial Sequence
  Description of Artificial Sequence: Synthetic oligonucleotide
  Antisense strand to SEQ ID NO: 878314
auccuucacagggagauuu

SEQ ID NO: 878316 - RNA, 19 nt, Artificial Sequence
  Description of Artificial Sequence: Synthetic oligonucleotide
  Sense strand starting at position 2575 of SEQ ID NO: 588625
gaaggauucucccggagcu

SEQ ID NO: 878317 - RNA, 19 nt, Artificial Sequence
  Description of Artificial Sequence: Synthetic oligonucleotide
  Antisense strand to SEQ ID NO: 878316
agcuccgggagaauccuuc

SEQ ID NO: 878318 - RNA, 19 nt, Artificial Sequence
  Description of Artificial Sequence: Synthetic oligonucleotide
  Sense strand starting at position 2588 of SEQ ID NO: 588625
ggagcuccugcuuggacua

SEQ ID NO: 878319 - RNA, 19 nt, Artificial Sequence
  Description of Artificial Sequence: Synthetic oligonucleotide
  Antisense strand to SEQ ID NO: 878318
uaguccaagcaggagcucc

SEQ ID NO: 878320 - RNA, 19 nt, Artificial Sequence
  Description of Artificial Sequence: Synthetic oligonucleotide
  Sense strand starting at position 3660 of SEQ ID NO: 588625
ucauaucuggagugccaau

SEQ ID NO: 878321 - RNA, 19 nt, Artificial Sequence
  Description of Artificial Sequence: Synthetic oligonucleotide
  Antisense strand to SEQ ID NO: 878320
auuggcacuccagauauga

SEQ ID NO: 878322 - RNA, 19 nt, Artificial Sequence
  Description of Artificial Sequence: Synthetic oligonucleotide
  Sense strand starting at position 3691 of SEQ ID NO: 588625
acagcuugugagggaugau

SEQ ID NO: 878323 - RNA, 19 nt, Artificial Sequence
  Description of Artificial Sequence: Synthetic oligonucleotide
  Antisense strand to SEQ ID NO: 878322
aucaucccucacaagcugu

SEQ ID NO: 878324 - RNA, 19 nt, Artificial Sequence
  Description of Artificial Sequence: Synthetic oligonucleotide
  Sense strand starting at position 3692 of SEQ ID NO: 588625
cagcuugugagggaugauc

SEQ ID NO: 878325 - RNA, 19 nt, Artificial Sequence
  Description of Artificial Sequence: Synthetic oligonucleotide
  Antisense strand to SEQ ID NO: 878324
gaucaucccucacaagcug

SEQ ID NO: 878326 - RNA, 19 nt, Artificial Sequence
  Description of Artificial Sequence: Synthetic oligonucleotide
  Sense strand starting at position 3700 of SEQ ID NO: 588625
gagggaugaucucauggug

SEQ ID NO: 878327 - RNA, 19 nt, Artificial Sequence
  Description of Artificial Sequence: Synthetic oligonucleotide
  Antisense strand to SEQ ID NO: 878326
caccaugagaucaucccuc

SEQ ID NO: 878328 - RNA, 19 nt, Artificial Sequence
  Description of Artificial Sequence: Synthetic oligonucleotide
  Sense strand starting at position 3703 of SEQ ID NO: 588625
ggaugaucucaugguggcu

SEQ ID NO: 878329 - RNA, 19 nt, Artificial Sequence
  Description of Artificial Sequence: Synthetic oligonucleotide
  Antisense strand to SEQ ID NO: 878328
agccaccaugagaucaucc

SEQ ID NO: 878330 - RNA, 19 nt, Artificial Sequence
  Description of Artificial Sequence: Synthetic oligonucleotide
  Sense strand starting at position 3755 of SEQ ID NO: 588625
cuccaacugucauaaagga

SEQ ID NO: 878331 - RNA, 19 nt, Artificial Sequence
  Description of Artificial Sequence: Synthetic oligonucleotide
  Antisense strand to SEQ ID NO: 878330
uccuuuaugacaguuggag

SEQ ID NO: 878332 - RNA, 19 nt, Artificial Sequence
  Description of Artificial Sequence: Synthetic oligonucleotide
  Sense strand starting at position 3910 of SEQ ID NO: 588625
gggcaugguuucccugaga

SEQ ID NO: 878333 - RNA, 19 nt, Artificial Sequence
  Description of Artificial Sequence: Synthetic oligonucleotide
  Antisense strand to SEQ ID NO: 878332
ucucagggaaaccaugccc

SEQ ID NO: 878334 - RNA, 19 nt, Artificial Sequence
  Description of Artificial Sequence: Synthetic oligonucleotide
  Sense strand starting at position 3915 of SEQ ID NO: 588625
ugguuucccugagaugaag

SEQ ID NO: 878335 - RNA, 19 nt, Artificial Sequence
  Description of Artificial Sequence: Synthetic oligonucleotide
  Antisense strand to SEQ ID NO: 878334
cuucaucucagggaaacca

SEQ ID NO: 878336 - RNA, 19 nt, Artificial Sequence
  Description of Artificial Sequence: Synthetic oligonucleotide
  Sense strand starting at position 3973 of SEQ ID NO: 588625
gccacuuuauccuuaggca

SEQ ID NO: 878337 - RNA, 19 nt, Artificial Sequence
  Description of Artificial Sequence: Synthetic oligonucleotide
  Antisense strand to SEQ ID NO: 878336
ugccuaaggauaaaguggc

SEQ ID NO: 878338 - RNA, 19 nt, Artificial Sequence
  Description of Artificial Sequence: Synthetic oligonucleotide
  Sense strand starting at position 3980 of SEQ ID NO: 588625
uauccuuaggcacgauauu

SEQ ID NO: 878339 - RNA, 19 nt, Artificial Sequence
  Description of Artificial Sequence: Synthetic oligonucleotide
  Antisense strand to SEQ ID NO: 878338
aauaucgugccuaaggaua

SEQ ID NO: 878340 - RNA, 19 nt, Artificial Sequence
  Description of Artificial Sequence: Synthetic oligonucleotide
  Sense strand starting at position 8 of SEQ ID NO: 588626
gggaaagacugagauucuc

SEQ ID NO: 878341 - RNA, 19 nt, Artificial Sequence
  Description of Artificial Sequence: Synthetic oligonucleotide
  Antisense strand to SEQ ID NO: 878340
gagaaucucagucuuuccc

SEQ ID NO: 878342 - RNA, 19 nt, Artificial Sequence
  Description of Artificial Sequence: Synthetic oligonucleotide
  Sense strand starting at position 14 of SEQ ID NO: 588626
gacugagauucucagaaag

SEQ ID NO: 878343 - RNA, 19 nt, Artificial Sequence
  Description of Artificial Sequence: Synthetic oligonucleotide
  Antisense strand to SEQ ID NO: 878342
cuuucugagaaucucaguc

SEQ ID NO: 878344 - RNA, 19 nt, Artificial Sequence
  Description of Artificial Sequence: Synthetic oligonucleotide
  Sense strand starting at position 16 of SEQ ID NO: 588626
cugagauucucagaaagac

SEQ ID NO: 878345 - RNA, 19 nt, Artificial Sequence
  Description of Artificial Sequence: Synthetic oligonucleotide
  Antisense strand to SEQ ID NO: 878344
gucuuucugagaaucucag

SEQ ID NO: 878346 - RNA, 19 nt, Artificial Sequence
  Description of Artificial Sequence: Synthetic oligonucleotide
  Sense strand starting at position 60 of SEQ ID NO: 588626
gaagaauuucugugagcgc

SEQ ID NO: 878347 - RNA, 19 nt, Artificial Sequence
  Description of Artificial Sequence: Synthetic oligonucleotide
  Antisense strand to SEQ ID NO: 878346
gcgcucacagaaauucuuc

SEQ ID NO: 878348 - RNA, 19 nt, Artificial Sequence
  Description of Artificial Sequence: Synthetic oligonucleotide
  Sense strand starting at position 163 of SEQ ID NO: 588626
gauacuaacucugcgagca

SEQ ID NO: 878349 - RNA, 19 nt, Artificial Sequence
  Description of Artificial Sequence: Synthetic oligonucleotide
  Antisense strand to SEQ ID NO: 878348
ugcucgcagaguuaguauc

SEQ ID NO: 878350 - RNA, 19 nt, Artificial Sequence
  Description of Artificial Sequence: Synthetic oligonucleotide
  Sense strand starting at position 372 of SEQ ID NO: 588626
gggaucacagcccgacauu

SEQ ID NO: 878351 - RNA, 19 nt, Artificial Sequence
  Description of Artificial Sequence: Synthetic oligonucleotide
  Antisense strand to SEQ ID NO: 878350
aaugucgggcugugauccc

SEQ ID NO: 878352 - RNA, 19 nt, Artificial Sequence
  Description of Artificial Sequence: Synthetic oligonucleotide
  Sense strand starting at position 382 of SEQ ID NO: 588626
cccgacauuucugauuacu

SEQ ID NO: 878353 - RNA, 19 nt, Artificial Sequence
  Description of Artificial Sequence: Synthetic oligonucleotide
  Antisense strand to SEQ ID NO: 878352
aguaaucagaaaugucggg

SEQ ID NO: 878354 - RNA, 19 nt, Artificial Sequence
  Description of Artificial Sequence: Synthetic oligonucleotide
  Sense strand starting at position 411 of SEQ ID NO: 588626
agcucuucccucuggagaa

SEQ ID NO: 878355 - RNA, 19 nt, Artificial Sequence
  Description of Artificial Sequence: Synthetic oligonucleotide
  Antisense strand to SEQ ID NO: 878354
uucuccagagggaagagcu

SEQ ID NO: 878356 - RNA, 19 nt, Artificial Sequence
  Description of Artificial Sequence: Synthetic oligonucleotide
  Sense strand starting at position 424 of SEQ ID NO: 588626
ggagaauccggacgcauaa

SEQ ID NO: 878357 - RNA, 19 nt, Artificial Sequence
  Description of Artificial Sequence: Synthetic oligonucleotide
  Antisense strand to SEQ ID NO: 878356
uuaugcguccggauucucc

SEQ ID NO: 878358 - RNA, 19 nt, Artificial Sequence
  Description of Artificial Sequence: Synthetic oligonucleotide
  Sense strand starting at position 426 of SEQ ID NO: 588626
agaauccggacgcauaaau

SEQ ID NO: 878359 - RNA, 19 nt, Artificial Sequence
  Description of Artificial Sequence: Synthetic oligonucleotide
  Antisense strand to SEQ ID NO: 878358
auuuaugcguccggauucu

SEQ ID NO: 878360 - RNA, 19 nt, Artificial Sequence
  Description of Artificial Sequence: Synthetic oligonucleotide
  Sense strand starting at position 453 of SEQ ID NO: 588626
ggcaaucuccaagaacguu

SEQ ID NO: 878361 - RNA, 19 nt, Artificial Sequence
  Description of Artificial Sequence: Synthetic oligonucleotide
  Antisense strand to SEQ ID NO: 878360
aacguucuuggagauugcc

SEQ ID NO: 878362 - RNA, 19 nt, Artificial Sequence
  Description of Artificial Sequence: Synthetic oligonucleotide
  Sense strand starting at position 651 of SEQ ID NO: 588626
gcgcgaguucuguccguga

SEQ ID NO: 878363 - RNA, 19 nt, Artificial Sequence
  Description of Artificial Sequence: Synthetic oligonucleotide
  Antisense strand to SEQ ID NO: 878362
ucacggacagaacucgcgc

SEQ ID NO: 878364 - RNA, 19 nt, Artificial Sequence
  Description of Artificial Sequence: Synthetic oligonucleotide
  Sense strand starting at position 761 of SEQ ID NO: 588626
cgauuuaccuccuaaggga

SEQ ID NO: 878365 - RNA, 19 nt, Artificial Sequence
  Description of Artificial Sequence: Synthetic oligonucleotide
  Antisense strand to SEQ ID NO: 878364
ucccuuaggagguaaaucg

SEQ ID NO: 878366 - RNA, 19 nt, Artificial Sequence
  Description of Artificial Sequence: Synthetic oligonucleotide
  Sense strand starting at position 782 of SEQ ID NO: 588626
aguguaaaccggcauguca

SEQ ID NO: 878367 - RNA, 19 nt, Artificial Sequence
  Description of Artificial Sequence: Synthetic oligonucleotide
  Antisense strand to SEQ ID NO: 878366
ugacaugccgguuuacacu

SEQ ID NO: 878368 - RNA, 19 nt, Artificial Sequence
  Description of Artificial Sequence: Synthetic oligonucleotide
  Sense strand starting at position 811 of SEQ ID NO: 588626
gcagacgugccuaguggaa

SEQ ID NO: 878369 - RNA, 19 nt, Artificial Sequence
  Description of Artificial Sequence: Synthetic oligonucleotide
  Antisense strand to SEQ ID NO: 878368
uuccacuaggcacgucugc

SEQ ID NO: 878370 - RNA, 19 nt, Artificial Sequence
  Description of Artificial Sequence: Synthetic oligonucleotide
  Sense strand starting at position 892 of SEQ ID NO: 588626
cuccgagugcgucugcaaa

SEQ ID NO: 878371 - RNA, 19 nt, Artificial Sequence
  Description of Artificial Sequence: Synthetic oligonucleotide
  Antisense strand to SEQ ID NO: 878370
uuugcagacgcacucggag

SEQ ID NO: 878372 - RNA, 19 nt, Artificial Sequence
  Description of Artificial Sequence: Synthetic oligonucleotide
  Sense strand starting at position 1108 of SEQ ID NO: 588626
ccgagagcaucauuaccau

SEQ ID NO: 878373 - RNA, 19 nt, Artificial Sequence
  Description of Artificial Sequence: Synthetic oligonucleotide
  Antisense strand to SEQ ID NO: 878372
augguaaugaugcucucgg

SEQ ID NO: 878374 - RNA, 19 nt, Artificial Sequence
  Description of Artificial Sequence: Synthetic oligonucleotide
  Sense strand starting at position 1137 of SEQ ID NO: 588626
gccgaaauacccugaauua

SEQ ID NO: 878375 - RNA, 19 nt, Artificial Sequence
  Description of Artificial Sequence: Synthetic oligonucleotide
  Antisense strand to SEQ ID NO: 878374
uaauucaggguauuucggc

SEQ ID NO: 878376 - RNA, 19 nt, Artificial Sequence
  Description of Artificial Sequence: Synthetic oligonucleotide
  Sense strand starting at position 1147 of SEQ ID NO: 588626
ccugaauuacaucgcugga

SEQ ID NO: 878377 - RNA, 19 nt, Artificial Sequence
  Description of Artificial Sequence: Synthetic oligonucleotide
  Antisense strand to SEQ ID NO: 878376
uccagcgauguaauucagg

SEQ ID NO: 878378 - RNA, 19 nt, Artificial Sequence
  Description of Artificial Sequence: Synthetic oligonucleotide
  Sense strand starting at position 1186 of SEQ ID NO: 588626
gguccuccucuuuguuaga

SEQ ID NO: 878379 - RNA, 19 nt, Artificial Sequence
  Description of Artificial Sequence: Synthetic oligonucleotide
  Antisense strand to SEQ ID NO: 878378
ucuaacaaagaggaggacc

SEQ ID NO: 878380 - RNA, 19 nt, Artificial Sequence
  Description of Artificial Sequence: Synthetic oligonucleotide
  Sense strand starting at position 1419 of SEQ ID NO: 588626
ccuuauuaacugggcgaau

SEQ ID NO: 878381 - RNA, 19 nt, Artificial Sequence
  Description of Artificial Sequence: Synthetic oligonucleotide
  Antisense strand to SEQ ID NO: 878380
auucgcccaguuaauaagg

SEQ ID NO: 878382 - RNA, 19 nt, Artificial Sequence
  Description of Artificial Sequence: Synthetic oligonucleotide
  Sense strand starting at position 1421 of SEQ ID NO: 588626
uuauuaacugggcgaaucu

SEQ ID NO: 878383 - RNA, 19 nt, Artificial Sequence
  Description of Artificial Sequence: Synthetic oligonucleotide
  Antisense strand to SEQ ID NO: 878382
agauucgcccaguuaauaa

SEQ ID NO: 878384 - RNA, 19 nt, Artificial Sequence
  Description of Artificial Sequence: Synthetic oligonucleotide
  Sense strand starting at position 2025 of SEQ ID NO: 588626
uccauagagugccuggaau

SEQ ID NO: 878385 - RNA, 19 nt, Artificial Sequence
  Description of Artificial Sequence: Synthetic oligonucleotide
  Antisense strand to SEQ ID NO: 878384
auuccaggcacucuaugga

SEQ ID NO: 878386 - RNA, 19 nt, Artificial Sequence
  Description of Artificial Sequence: Synthetic oligonucleotide
  Sense strand starting at position 2038 of SEQ ID NO: 588626
uggaaugcgagacgucaau

SEQ ID NO: 878387 - RNA, 19 nt, Artificial Sequence
  Description of Artificial Sequence: Synthetic oligonucleotide
  Antisense strand to SEQ ID NO: 878386
auugacgucucgcauucca

SEQ ID NO: 878388 - RNA, 19 nt, Artificial Sequence
  Description of Artificial Sequence: Synthetic oligonucleotide
  Sense strand starting at position 2415 of SEQ ID NO: 588626
gaggacagcucuuccgaaa

SEQ ID NO: 878389 - RNA, 19 nt, Artificial Sequence
  Description of Artificial Sequence: Synthetic oligonucleotide
  Antisense strand to SEQ ID NO: 878388
uuucggaagagcuguccuc

SEQ ID NO: 878390 - RNA, 19 nt, Artificial Sequence
  Description of Artificial Sequence: Synthetic oligonucleotide
  Sense strand starting at position 2552 of SEQ ID NO: 588626
guucuaaagcuguuuacgu

SEQ ID NO: 878391 - RNA, 19 nt, Artificial Sequence
  Description of Artificial Sequence: Synthetic oligonucleotide
  Antisense strand to SEQ ID NO: 878390
acguaaacagcuuuagaac

SEQ ID NO: 878392 - RNA, 19 nt, Artificial Sequence
  Description of Artificial Sequence: Synthetic oligonucleotide
  Sense strand starting at position 2658 of SEQ ID NO: 588626
gggauaagguuugauuucu

SEQ ID NO: 878393 - RNA, 19 nt, Artificial Sequence
  Description of Artificial Sequence: Synthetic oligonucleotide
  Antisense strand to SEQ ID NO: 878392
agaaaucaaaccuuauccc

SEQ ID NO: 878394 - RNA, 19 nt, Artificial Sequence
  Description of Artificial Sequence: Synthetic oligonucleotide
  Sense strand starting at position 2691 of SEQ ID NO: 588626
uggguuucuuaacuggaca

SEQ ID NO: 878395 - RNA, 19 nt, Artificial Sequence
  Description of Artificial Sequence: Synthetic oligonucleotide
  Antisense strand to SEQ ID NO: 878394
uguccaguuaagaaaccca

SEQ ID NO: 878396 - RNA, 19 nt, Artificial Sequence
  Description of Artificial Sequence: Synthetic oligonucleotide
  Sense strand starting at position 2696 of SEQ ID NO: 588626
uucuuaacuggacacguua

SEQ ID NO: 878397 - RNA, 19 nt, Artificial Sequence
  Description of Artificial Sequence: Synthetic oligonucleotide
  Antisense strand to SEQ ID NO: 878396
uaacguguccaguuaagaa

SEQ ID NO: 878398 - RNA, 19 nt, Artificial Sequence
  Description of Artificial Sequence: Synthetic oligonucleotide
  Sense strand starting at position 2711 of SEQ ID NO: 588626
guuauaacccagcgaagug

SEQ ID NO: 878399 - RNA, 19 nt, Artificial Sequence
  Description of Artificial Sequence: Synthetic oligonucleotide
  Antisense strand to SEQ ID NO: 878398
cacuucgcuggguuauaac

SEQ ID NO: 878400 - RNA, 19 nt, Artificial Sequence
  Description of Artificial Sequence: Synthetic oligonucleotide
  Sense strand starting at position 2757 of SEQ ID NO: 588626
agcagaaacuacucugugu

SEQ ID NO: 878401 - RNA, 19 nt, Artificial Sequence
  Description of Artificial Sequence: Synthetic oligonucleotide
  Antisense strand to SEQ ID NO: 878400
acacagaguaguuucugcu

SEQ ID NO: 878402 - RNA, 19 nt, Artificial Sequence
  Description of Artificial Sequence: Synthetic oligonucleotide
  Sense strand starting at position 2985 of SEQ ID NO: 588626
uuuggucuccucggacaca

SEQ ID NO: 878403 - RNA, 19 nt, Artificial Sequence
  Description of Artificial Sequence: Synthetic oligonucleotide
  Antisense strand to SEQ ID NO: 878402
uguguccgaggagaccaaa

SEQ ID NO: 878404 - RNA, 19 nt, Artificial Sequence
  Description of Artificial Sequence: Synthetic oligonucleotide
  Sense strand starting at position 2997 of SEQ ID NO: 588626
ggacacauuugucaugaaa

SEQ ID NO: 878405 - RNA, 19 nt, Artificial Sequence
  Description of Artificial Sequence: Synthetic oligonucleotide
  Antisense strand to SEQ ID NO: 878404
uuucaugacaaaugugucc

SEQ ID NO: 878406 - RNA, 19 nt, Artificial Sequence
  Description of Artificial Sequence: Synthetic oligonucleotide
  Sense strand starting at position 2999 of SEQ ID NO: 588626
acacauuugucaugaaaug

SEQ ID NO: 878407 - RNA, 19 nt, Artificial Sequence
  Description of Artificial Sequence: Synthetic oligonucleotide
  Antisense strand to SEQ ID NO: 878406
cauuucaugacaaaugugu

SEQ ID NO: 878408 - RNA, 19 nt, Artificial Sequence
  Description of Artificial Sequence: Synthetic oligonucleotide
  Sense strand starting at position 3009 of SEQ ID NO: 588626
caugaaauggugugccgaa

SEQ ID NO: 878409 - RNA, 19 nt, Artificial Sequence
  Description of Artificial Sequence: Synthetic oligonucleotide
  Antisense strand to SEQ ID NO: 878408
uucggcacaccauuucaug

SEQ ID NO: 878410 - RNA, 19 nt, Artificial Sequence
  Description of Artificial Sequence: Synthetic oligonucleotide
  Sense strand starting at position 3010 of SEQ ID NO: 588626
augaaauggugugccgaaa

SEQ ID NO: 878411 - RNA, 19 nt, Artificial Sequence
  Description of Artificial Sequence: Synthetic oligonucleotide
  Antisense strand to SEQ ID NO: 878410
uuucggcacaccauuucau

SEQ ID NO: 878412 - RNA, 19 nt, Artificial Sequence
  Description of Artificial Sequence: Synthetic oligonucleotide
  Sense strand starting at position 3138 of SEQ ID NO: 588626
aagguugcugcugagugaa

SEQ ID NO: 878413 - RNA, 19 nt, Artificial Sequence
  Description of Artificial Sequence: Synthetic oligonucleotide
  Antisense strand to SEQ ID NO: 878412
uucacucagcagcaaccuu

SEQ ID NO: 878414 - RNA, 19 nt, Artificial Sequence
  Description of Artificial Sequence: Synthetic oligonucleotide
  Sense strand starting at position 3329 of SEQ ID NO: 588626
auacaagauuccuuuguag

SEQ ID NO: 878415 - RNA, 19 nt, Artificial Sequence
  Description of Artificial Sequence: Synthetic oligonucleotide
  Antisense strand to SEQ ID NO: 878414
cuacaaaggaaucuuguau

SEQ ID NO: 878416 - RNA, 19 nt, Artificial Sequence
  Description of Artificial Sequence: Synthetic oligonucleotide
  Sense strand starting at position 3331 of SEQ ID NO: 588626
acaagauuccuuuguagac

SEQ ID NO: 878417 - RNA, 19 nt, Artificial Sequence
  Description of Artificial Sequence: Synthetic oligonucleotide
  Antisense strand to SEQ ID NO: 878416
gucuacaaaggaaucuugu

SEQ ID NO: 878418 - RNA, 19 nt, Artificial Sequence
  Description of Artificial Sequence: Synthetic oligonucleotide
  Sense strand starting at position 3417 of SEQ ID NO: 588626
guaaauauggcauguauau

SEQ ID NO: 878419 - RNA, 19 nt, Artificial Sequence
  Description of Artificial Sequence: Synthetic oligonucleotide
  Antisense strand to SEQ ID NO: 878418
auauacaugccauauuuac

SEQ ID NO: 878420 - RNA, 19 nt, Artificial Sequence
  Description of Artificial Sequence: Synthetic oligonucleotide
  Sense strand starting at position 54 of SEQ ID NO: 588627
cugugaaguggguagauga

SEQ ID NO: 878421 - RNA, 19 nt, Artificial Sequence
  Description of Artificial Sequence: Synthetic oligonucleotide
  Antisense strand to SEQ ID NO: 878420
ucaucuacccacuucacag

SEQ ID NO: 878422 - RNA, 19 nt, Artificial Sequence
  Description of Artificial Sequence: Synthetic oligonucleotide
  Sense strand starting at position 71 of SEQ ID NO: 588627
gaccgcucuuccucgcuaa

SEQ ID NO: 878423 - RNA, 19 nt, Artificial Sequence
  Description of Artificial Sequence: Synthetic oligonucleotide
  Antisense strand to SEQ ID NO: 878422
uuagcgaggaagagcgguc

SEQ ID NO: 878424 - RNA, 19 nt, Artificial Sequence
  Description of Artificial Sequence: Synthetic oligonucleotide
  Sense strand starting at position 88 of SEQ ID NO: 588627
aagggugggucgugaggau

SEQ ID NO: 878425 - RNA, 19 nt, Artificial Sequence
  Description of Artificial Sequence: Synthetic oligonucleotide
  Antisense strand to SEQ ID NO: 878424
auccucacgacccacccuu

SEQ ID NO: 878426 - RNA, 19 nt, Artificial Sequence
  Description of Artificial Sequence: Synthetic oligonucleotide
  Sense strand starting at position 223 of SEQ ID NO: 588627
ggaaaugggacucguggaa

SEQ ID NO: 878427 - RNA, 19 nt, Artificial Sequence
  Description of Artificial Sequence: Synthetic oligonucleotide
  Antisense strand to SEQ ID NO: 878426
uuccacgagucccauuucc

SEQ ID NO: 878428 - RNA, 19 nt, Artificial Sequence
  Description of Artificial Sequence: Synthetic oligonucleotide
  Sense strand starting at position 700 of SEQ ID NO: 588627
gcaaguuguggccagagaa

SEQ ID NO: 878429 - RNA, 19 nt, Artificial Sequence
  Description of Artificial Sequence: Synthetic oligonucleotide
  Antisense strand to SEQ ID NO: 878428
uucucuggccacaacuugc

SEQ ID NO: 878430 - RNA, 19 nt, Artificial Sequence
  Description of Artificial Sequence: Synthetic oligonucleotide
  Sense strand starting at position 847 of SEQ ID NO: 588627
guggaacauguuggcuuua

SEQ ID NO: 878431 - RNA, 19 nt, Artificial Sequence
  Description of Artificial Sequence: Synthetic oligonucleotide
  Antisense strand to SEQ ID NO: 878430
uaaagccaacauguuccac

SEQ ID NO: 878432 - RNA, 19 nt, Artificial Sequence
  Description of Artificial Sequence: Synthetic oligonucleotide
  Sense strand starting at position 849 of SEQ ID NO: 588627
ggaacauguuggcuuuaca

SEQ ID NO: 878433 - RNA, 19 nt, Artificial Sequence
  Description of Artificial Sequence: Synthetic oligonucleotide
  Antisense strand to SEQ ID NO: 878432
uguaaagccaacauguucc

SEQ ID NO: 878434 - RNA, 19 nt, Artificial Sequence
  Description of Artificial Sequence: Synthetic oligonucleotide
  Sense strand starting at position 852 of SEQ ID NO: 588627
acauguuggcuuuacagau

SEQ ID NO: 878435 - RNA, 19 nt, Artificial Sequence
  Description of Artificial Sequence: Synthetic oligonucleotide
  Antisense strand to SEQ ID NO: 878434
aucuguaaagccaacaugu

SEQ ID NO: 878436 - RNA, 19 nt, Artificial Sequence
  Description of Artificial Sequence: Synthetic oligonucleotide
  Sense strand starting at position 879 of SEQ ID NO: 588627
gcgguuuccaugcaagaau

SEQ ID NO: 878437 - RNA, 19 nt, Artificial Sequence
  Description of Artificial Sequence: Synthetic oligonucleotide
  Antisense strand to SEQ ID NO: 878436
auucuugcauggaaaccgc

SEQ ID NO: 878438 - RNA, 19 nt, Artificial Sequence
  Description of Artificial Sequence: Synthetic oligonucleotide
  Sense strand starting at position 882 of SEQ ID NO: 588627
guuuccaugcaagaaucuu

SEQ ID NO: 878439 - RNA, 19 nt, Artificial Sequence
  Description of Artificial Sequence: Synthetic oligonucleotide
  Antisense strand to SEQ ID NO: 878438
aagauucuugcauggaaac

SEQ ID NO: 878440 - RNA, 19 nt, Artificial Sequence
  Description of Artificial Sequence: Synthetic oligonucleotide
  Sense strand starting at position 888 of SEQ ID NO: 588627
augcaagaaucuuggauga

SEQ ID NO: 878441 - RNA, 19 nt, Artificial Sequence
  Description of Artificial Sequence: Synthetic oligonucleotide
  Antisense strand to SEQ ID NO: 878440
ucauccaagauucuugcau

SEQ ID NO: 878442 - RNA, 19 nt, Artificial Sequence
  Description of Artificial Sequence: Synthetic oligonucleotide
  Sense strand starting at position 890 of SEQ ID NO: 588627
gcaagaaucuuggaugagg

SEQ ID NO: 878443 - RNA, 19 nt, Artificial Sequence
  Description of Artificial Sequence: Synthetic oligonucleotide
  Antisense strand to SEQ ID NO: 878442
ccucauccaagauucuugc

SEQ ID NO: 878444 - RNA, 19 nt, Artificial Sequence
  Description of Artificial Sequence: Synthetic oligonucleotide
  Sense strand starting at position 923 of SEQ ID NO: 588627
cagagacccuguuaaucgu

SEQ ID NO: 878445 - RNA, 19 nt, Artificial Sequence
  Description of Artificial Sequence: Synthetic oligonucleotide
  Antisense strand to SEQ ID NO: 878444
acgauuaacagggucucug

SEQ ID NO: 878446 - RNA, 19 nt, Artificial Sequence
  Description of Artificial Sequence: Synthetic oligonucleotide
  Sense strand starting at position 1127 of SEQ ID NO: 588627
cgaggucuccuggaaaccu

SEQ ID NO: 878447 - RNA, 19 nt, Artificial Sequence
  Description of Artificial Sequence: Synthetic oligonucleotide
  Antisense strand to SEQ ID NO: 878446
agguuuccaggagaccucg

SEQ ID NO: 878448 - RNA, 19 nt, Artificial Sequence
  Description of Artificial Sequence: Synthetic oligonucleotide
  Sense strand starting at position 2304 of SEQ ID NO: 588627
gcuugauuuaugggcugcu

SEQ ID NO: 878449 - RNA, 19 nt, Artificial Sequence
  Description of Artificial Sequence: Synthetic oligonucleotide
  Antisense strand to SEQ ID NO: 878448
agcagcccauaaaucaagc

SEQ ID NO: 878450 - RNA, 19 nt, Artificial Sequence
  Description of Artificial Sequence: Synthetic oligonucleotide
  Sense strand starting at position 2608 of SEQ ID NO: 588627
ugcugauguucccagucga

SEQ ID NO: 878451 - RNA, 19 nt, Artificial Sequence
  Description of Artificial Sequence: Synthetic oligonucleotide
  Antisense strand to SEQ ID NO: 878450
ucgacugggaacaucagca

SEQ ID NO: 878452 - RNA, 19 nt, Artificial Sequence
  Description of Artificial Sequence: Synthetic oligonucleotide
  Sense strand starting at position 2744 of SEQ ID NO: 588627
ggcccuuaucuagaaggcu

SEQ ID NO: 878453 - RNA, 19 nt, Artificial Sequence
  Description of Artificial Sequence: Synthetic oligonucleotide
  Antisense strand to SEQ ID NO: 878452
agccuucuagauaagggcc

SEQ ID NO: 878454 - RNA, 19 nt, Artificial Sequence
  Description of Artificial Sequence: Synthetic oligonucleotide
  Sense strand starting at position 2808 of SEQ ID NO: 588627
ccagaugggcucugaaaua

SEQ ID NO: 878455 - RNA, 19 nt, Artificial Sequence
  Description of Artificial Sequence: Synthetic oligonucleotide
  Antisense strand to SEQ ID NO: 878454
uauuucagagcccaucugg

SEQ ID NO: 878456 - RNA, 19 nt, Artificial Sequence
  Description of Artificial Sequence: Synthetic oligonucleotide
  Sense strand starting at position 2898 of SEQ ID NO: 588627
cucuguuugucucacauuu

SEQ ID NO: 878457 - RNA, 19 nt, Artificial Sequence
  Description of Artificial Sequence: Synthetic oligonucleotide
  Antisense strand to SEQ ID NO: 878456
aaaugugagacaaacagag

SEQ ID NO: 878458 - RNA, 19 nt, Artificial Sequence
  Description of Artificial Sequence: Synthetic oligonucleotide
  Sense strand starting at position 2900 of SEQ ID NO: 588627
cuguuugucucacauuuac

SEQ ID NO: 878459 - RNA, 19 nt, Artificial Sequence
  Description of Artificial Sequence: Synthetic oligonucleotide
  Antisense strand to SEQ ID NO: 878458
guaaaugugagacaaacag

SEQ ID NO: 878460 - RNA, 19 nt, Artificial Sequence
  Description of Artificial Sequence: Synthetic oligonucleotide
  Sense strand starting at position 2984 of SEQ ID NO: 588627
agucucuguccucagagga

SEQ ID NO: 878461 - RNA, 19 nt, Artificial Sequence
  Description of Artificial Sequence: Synthetic oligonucleotide
  Antisense strand to SEQ ID NO: 878460
uccucugaggacagagacu

SEQ ID NO: 878462 - RNA, 19 nt, Artificial Sequence
  Description of Artificial Sequence: Synthetic oligonucleotide
  Sense strand starting at position 3001 of SEQ ID NO: 588627
gauuuaccuccgugccuuu

SEQ ID NO: 878463 - RNA, 19 nt, Artificial Sequence
  Description of Artificial Sequence: Synthetic oligonucleotide
  Antisense strand to SEQ ID NO: 878462
aaaggcacggagguaaauc

SEQ ID NO: 878464 - RNA, 19 nt, Artificial Sequence
  Description of Artificial Sequence: Synthetic oligonucleotide
  Sense strand starting at position 3059 of SEQ ID NO: 588627
ggcagucacuguugagaac

SEQ ID NO: 878465 - RNA, 19 nt, Artificial Sequence
  Description of Artificial Sequence: Synthetic oligonucleotide
  Antisense strand to SEQ ID NO: 878464
guucucaacagugacugcc

SEQ ID NO: 878466 - RNA, 19 nt, Artificial Sequence
  Description of Artificial Sequence: Synthetic oligonucleotide
  Sense strand starting at position 3840 of SEQ ID NO: 588627
gucauagcuaacugaucga

SEQ ID NO: 878467 - RNA, 19 nt, Artificial Sequence
  Description of Artificial Sequence: Synthetic oligonucleotide
  Antisense strand to SEQ ID NO: 878466
ucgaucaguuagcuaugac

SEQ ID NO: 878468 - RNA, 19 nt, Artificial Sequence
  Description of Artificial Sequence: Synthetic oligonucleotide
  Sense strand starting at position 3843 of SEQ ID NO: 588627
auagcuaacugaucgaaua

SEQ ID NO: 878469 - RNA, 19 nt, Artificial Sequence
  Description of Artificial Sequence: Synthetic oligonucleotide
  Antisense strand to SEQ ID NO: 878468
uauucgaucaguuagcuau

SEQ ID NO: 878470 - RNA, 19 nt, Artificial Sequence
  Description of Artificial Sequence: Synthetic oligonucleotide
  Sense strand starting at position 3900 of SEQ ID NO: 588627
ugugcaugaccuuguaauu

SEQ ID NO: 878471 - RNA, 19 nt, Artificial Sequence
  Description of Artificial Sequence: Synthetic oligonucleotide
  Antisense strand to SEQ ID NO: 878470
aauuacaaggucaugcaca

SEQ ID NO: 878472 - RNA, 19 nt, Artificial Sequence
  Description of Artificial Sequence: Synthetic oligonucleotide
  Sense strand starting at position 3933 of SEQ ID NO: 588627
uagagaaguucuuacaaga

SEQ ID NO: 878473 - RNA, 19 nt, Artificial Sequence
  Description of Artificial Sequence: Synthetic oligonucleotide
  Antisense strand to SEQ ID NO: 878472
ucuuguaagaacuucucua

SEQ ID NO: 878474 - RNA, 19 nt, Artificial Sequence
  Description of Artificial Sequence: Synthetic oligonucleotide
  Sense strand starting at position 3962 of SEQ ID NO: 588627
uugcauauggcugaaccua

SEQ ID NO: 878475 - RNA, 19 nt, Artificial Sequence
  Description of Artificial Sequence: Synthetic oligonucleotide
  Antisense strand to SEQ ID NO: 878474
uagguucagccauaugcaa

SEQ ID NO: 878476 - RNA, 19 nt, Artificial Sequence
  Description of Artificial Sequence: Synthetic oligonucleotide
  Sense strand starting at position 121 of SEQ ID NO: 588628
caagauuuccaccgucugu

SEQ ID NO: 878477 - RNA, 19 nt, Artificial Sequence
  Description of Artificial Sequence: Synthetic oligonucleotide
  Antisense strand to SEQ ID NO: 878476
acagacgguggaaaucuug

SEQ ID NO: 878478 - RNA, 19 nt, Artificial Sequence
  Description of Artificial Sequence: Synthetic oligonucleotide
  Sense strand starting at position 165 of SEQ ID NO: 588628
gcgccuaacugaccuauuu

SEQ ID NO: 878479 - RNA, 19 nt, Artificial Sequence
  Description of Artificial Sequence: Synthetic oligonucleotide
  Antisense strand to SEQ ID NO: 878478
aaauaggucaguuaggcgc

SEQ ID NO: 878480 - RNA, 19 nt, Artificial Sequence
  Description of Artificial Sequence: Synthetic oligonucleotide
  Sense strand starting at position 184 of SEQ ID NO: 588628
ucagguuacuuuccucaca

SEQ ID NO: 878481 - RNA, 19 nt, Artificial Sequence
  Description of Artificial Sequence: Synthetic oligonucleotide
  Antisense strand to SEQ ID NO: 878480
ugugaggaaaguaaccuga

SEQ ID NO: 878482 - RNA, 19 nt, Artificial Sequence
  Description of Artificial Sequence: Synthetic oligonucleotide
  Sense strand starting at position 207 of SEQ ID NO: 588628
ccaggucacuguccugauu

SEQ ID NO: 878483 - RNA, 19 nt, Artificial Sequence
  Description of Artificial Sequence: Synthetic oligonucleotide
  Antisense strand to SEQ ID NO: 878482
aaucaggacagugaccugg

SEQ ID NO: 878484 - RNA, 19 nt, Artificial Sequence
  Description of Artificial Sequence: Synthetic oligonucleotide
  Sense strand starting at position 213 of SEQ ID NO: 588628
cacuguccugauugagaaa

SEQ ID NO: 878485 - RNA, 19 nt, Artificial Sequence
  Description of Artificial Sequence: Synthetic oligonucleotide
  Antisense strand to SEQ ID NO: 878484
uuucucaaucaggacagug

SEQ ID NO: 878486 - RNA, 19 nt, Artificial Sequence
  Description of Artificial Sequence: Synthetic oligonucleotide
  Sense strand starting at position 294 of SEQ ID NO: 588628
ugaaaucuguuacuuguua

SEQ ID NO: 878487 - RNA, 19 nt, Artificial Sequence
  Description of Artificial Sequence: Synthetic oligonucleotide
  Antisense strand to SEQ ID NO: 878486
uaacaaguaacagauuuca

SEQ ID NO: 878488 - RNA, 19 nt, Artificial Sequence
  Description of Artificial Sequence: Synthetic oligonucleotide
  Sense strand starting at position 298 of SEQ ID NO: 588628
aucuguuacuuguuagaca

SEQ ID NO: 878489 - RNA, 19 nt, Artificial Sequence
  Description of Artificial Sequence: Synthetic oligonucleotide
  Antisense strand to SEQ ID NO: 878488
ugucuaacaaguaacagau

SEQ ID NO: 878490 - RNA, 19 nt, Artificial Sequence
  Description of Artificial Sequence: Synthetic oligonucleotide
  Sense strand starting at position 335 of SEQ ID NO: 588628
cucagagaacugcgaguuu

SEQ ID NO: 878491 - RNA, 19 nt, Artificial Sequence
  Description of Artificial Sequence: Synthetic oligonucleotide
  Antisense strand to SEQ ID NO: 878490
aaacucgcaguucucugag

SEQ ID NO: 878492 - RNA, 19 nt, Artificial Sequence
  Description of Artificial Sequence: Synthetic oligonucleotide
  Sense strand starting at position 385 of SEQ ID NO: 588628
cugagagccucccuuuauu

SEQ ID NO: 878493 - RNA, 19 nt, Artificial Sequence
  Description of Artificial Sequence: Synthetic oligonucleotide
  Antisense strand to SEQ ID NO: 878492
aauaaagggaggcucucag

SEQ ID NO: 878494 - RNA, 19 nt, Artificial Sequence
  Description of Artificial Sequence: Synthetic oligonucleotide
  Sense strand starting at position 482 of SEQ ID NO: 588628
gugcgagcacccuuuguaa

SEQ ID NO: 878495 - RNA, 19 nt, Artificial Sequence
  Description of Artificial Sequence: Synthetic oligonucleotide
  Antisense strand to SEQ ID NO: 878494
uuacaaagggugcucgcac

SEQ ID NO: 878496 - RNA, 19 nt, Artificial Sequence
  Description of Artificial Sequence: Synthetic oligonucleotide
  Sense strand starting at position 514 of SEQ ID NO: 588628
gggcgaucgccugcgcuaa

SEQ ID NO: 878497 - RNA, 19 nt, Artificial Sequence
  Description of Artificial Sequence: Synthetic oligonucleotide
  Antisense strand to SEQ ID NO: 878496
uuagcgcaggcgaucgccc

SEQ ID NO: 878498 - RNA, 19 nt, Artificial Sequence
  Description of Artificial Sequence: Synthetic oligonucleotide
  Sense strand starting at position 777 of SEQ ID NO: 588628
gagggauucucagcuccca

SEQ ID NO: 878499 - RNA, 19 nt, Artificial Sequence
  Description of Artificial Sequence: Synthetic oligonucleotide
  Antisense strand to SEQ ID NO: 878498
ugggagcugagaaucccuc

SEQ ID NO: 878500 - RNA, 19 nt, Artificial Sequence
  Description of Artificial Sequence: Synthetic oligonucleotide
  Sense strand starting at position 1093 of SEQ ID NO: 588628
cguaguauucaaggaagaa

SEQ ID NO: 878501 - RNA, 19 nt, Artificial Sequence
  Description of Artificial Sequence: Synthetic oligonucleotide
  Antisense strand to SEQ ID NO: 878500
uucuuccuugaauacuacg

SEQ ID NO: 878502 - RNA, 19 nt, Artificial Sequence
  Description of Artificial Sequence: Synthetic oligonucleotide
  Sense strand starting at position 1834 of SEQ ID NO: 588628
ggguuuguugcuccgccau

SEQ ID NO: 878503 - RNA, 19 nt, Artificial Sequence
  Description of Artificial Sequence: Synthetic oligonucleotide
  Antisense strand to SEQ ID NO: 878502
auggcggagcaacaaaccc

SEQ ID NO: 878504 - RNA, 19 nt, Artificial Sequence
  Description of Artificial Sequence: Synthetic oligonucleotide
  Sense strand starting at position 2189 of SEQ ID NO: 588628
uuugaugucuauguaguaa

SEQ ID NO: 878505 - RNA, 19 nt, Artificial Sequence
  Description of Artificial Sequence: Synthetic oligonucleotide
  Antisense strand to SEQ ID NO: 878504
uuacuacauagacaucaaa

SEQ ID NO: 878506 - RNA, 19 nt, Artificial Sequence
  Description of Artificial Sequence: Synthetic oligonucleotide
  Sense strand starting at position 2232 of SEQ ID NO: 588628
gauugugauuucuaccuga

SEQ ID NO: 878507 - RNA, 19 nt, Artificial Sequence
  Description of Artificial Sequence: Synthetic oligonucleotide
  Antisense strand to SEQ ID NO: 878506
ucagguagaaaucacaauc

SEQ ID NO: 878508 - RNA, 19 nt, Artificial Sequence
  Description of Artificial Sequence: Synthetic oligonucleotide
  Sense strand starting at position 2248 of SEQ ID NO: 588628
ugaucaaaguucccuaaga

SEQ ID NO: 878509 - RNA, 19 nt, Artificial Sequence
  Description of Artificial Sequence: Synthetic oligonucleotide
  Antisense strand to SEQ ID NO: 878508
ucuuagggaacuuugauca

SEQ ID NO: 878510 - RNA, 19 nt, Artificial Sequence
  Description of Artificial Sequence: Synthetic oligonucleotide
  Sense strand starting at position 2249 of SEQ ID NO: 588628
gaucaaaguucccuaagag

SEQ ID NO: 878511 - RNA, 19 nt, Artificial Sequence
  Description of Artificial Sequence: Synthetic oligonucleotide
  Antisense strand to SEQ ID NO: 878510
cucuuagggaacuuugauc

SEQ ID NO: 878512 - RNA, 19 nt, Artificial Sequence
  Description of Artificial Sequence: Synthetic oligonucleotide
  Sense strand starting at position 2250 of SEQ ID NO: 588628
aucaaaguucccuaagagu

SEQ ID NO: 878513 - RNA, 19 nt, Artificial Sequence
  Description of Artificial Sequence: Synthetic oligonucleotide
  Antisense strand to SEQ ID NO: 878512
acucuuagggaacuuugau

SEQ ID NO: 878514 - RNA, 19 nt, Artificial Sequence
  Description of Artificial Sequence: Synthetic oligonucleotide
  Sense strand starting at position 2290 of SEQ ID NO: 588628
caaugagucuuugcgagga

SEQ ID NO: 878515 - RNA, 19 nt, Artificial Sequence
  Description of Artificial Sequence: Synthetic oligonucleotide
  Antisense strand to SEQ ID NO: 878514
uccucgcaaagacucauug

SEQ ID NO: 878516 - RNA, 19 nt, Artificial Sequence
  Description of Artificial Sequence: Synthetic oligonucleotide
  Sense strand starting at position 2293 of SEQ ID NO: 588628
ugagucuuugcgaggaggu

SEQ ID NO: 878517 - RNA, 19 nt, Artificial Sequence
  Description of Artificial Sequence: Synthetic oligonucleotide
  Antisense strand to SEQ ID NO: 878516
accuccucgcaaagacuca

SEQ ID NO: 878518 - RNA, 19 nt, Artificial Sequence
  Description of Artificial Sequence: Synthetic oligonucleotide
  Sense strand starting at position 2437 of SEQ ID NO: 588628
gauuaaaggaccggaguuu

SEQ ID NO: 878519 - RNA, 19 nt, Artificial Sequence
  Description of Artificial Sequence: Synthetic oligonucleotide
  Antisense strand to SEQ ID NO: 878518
aaacuccgguccuuuaauc

SEQ ID NO: 878520 - RNA, 19 nt, Artificial Sequence
  Description of Artificial Sequence: Synthetic oligonucleotide
  Sense strand starting at position 2449 of SEQ ID NO: 588628
ggaguuuaacucgagguga

SEQ ID NO: 878521 - RNA, 19 nt, Artificial Sequence
  Description of Artificial Sequence: Synthetic oligonucleotide
  Antisense strand to SEQ ID NO: 878520
ucaccucgaguuaaacucc

SEQ ID NO: 878522 - RNA, 19 nt, Artificial Sequence
  Description of Artificial Sequence: Synthetic oligonucleotide
  Sense strand starting at position 2451 of SEQ ID NO: 588628
aguuuaacucgaggugacu

SEQ ID NO: 878523 - RNA, 19 nt, Artificial Sequence
  Description of Artificial Sequence: Synthetic oligonucleotide
  Antisense strand to SEQ ID NO: 878522
agucaccucgaguuaaacu

SEQ ID NO: 878524 - RNA, 19 nt, Artificial Sequence
  Description of Artificial Sequence: Synthetic oligonucleotide
  Sense strand starting at position 2462 of SEQ ID NO: 588628
aggugacugcguucguaug

SEQ ID NO: 878525 - RNA, 19 nt, Artificial Sequence
  Description of Artificial Sequence: Synthetic oligonucleotide
  Antisense strand to SEQ ID NO: 878524
cauacgaacgcagucaccu

SEQ ID NO: 878526 - RNA, 19 nt, Artificial Sequence
  Description of Artificial Sequence: Synthetic oligonucleotide
  Sense strand starting at position 2473 of SEQ ID NO: 588628
uucguaugcaaauggaaua

SEQ ID NO: 878527 - RNA, 19 nt, Artificial Sequence
  Description of Artificial Sequence: Synthetic oligonucleotide
  Antisense strand to SEQ ID NO: 878526
uauuccauuugcauacgaa

SEQ ID NO: 878528 - RNA, 19 nt, Artificial Sequence
  Description of Artificial Sequence: Synthetic oligonucleotide
  Sense strand starting at position 2672 of SEQ ID NO: 588628
uugaaaccuuccguuuaag

SEQ ID NO: 878529 - RNA, 19 nt, Artificial Sequence
  Description of Artificial Sequence: Synthetic oligonucleotide
  Antisense strand to SEQ ID NO: 878528
cuuaaacggaagguuucaa

SEQ ID NO: 878530 - RNA, 19 nt, Artificial Sequence
  Description of Artificial Sequence: Synthetic oligonucleotide
  Sense strand starting at position 2819 of SEQ ID NO: 588628
cgaagcuuuccggaagcaa

SEQ ID NO: 878531 - RNA, 19 nt, Artificial Sequence
  Description of Artificial Sequence: Synthetic oligonucleotide
  Antisense strand to SEQ ID NO: 878530
uugcuuccggaaagcuucg

SEQ ID NO: 878532 - RNA, 19 nt, Artificial Sequence
  Description of Artificial Sequence: Synthetic oligonucleotide
  Sense strand starting at position 3275 of SEQ ID NO: 588628
cuuaccaacccuggugaaa

SEQ ID NO: 878533 - RNA, 19 nt, Artificial Sequence
  Description of Artificial Sequence: Synthetic oligonucleotide
  Antisense strand to SEQ ID NO: 878532
uuucaccaggguugguaag

SEQ ID NO: 878534 - RNA, 19 nt, Artificial Sequence
  Description of Artificial Sequence: Synthetic oligonucleotide
  Sense strand starting at position 3301 of SEQ ID NO: 588628
ucauacguaaucugggaga

SEQ ID NO: 878535 - RNA, 19 nt, Artificial Sequence
  Description of Artificial Sequence: Synthetic oligonucleotide
  Antisense strand to SEQ ID NO: 878534
ucucccagauuacguauga

SEQ ID NO: 878536 - RNA, 19 nt, Artificial Sequence
  Description of Artificial Sequence: Synthetic oligonucleotide
  Sense strand starting at position 3303 of SEQ ID NO: 588628
auacguaaucugggagacu

SEQ ID NO: 878537 - RNA, 19 nt, Artificial Sequence
  Description of Artificial Sequence: Synthetic oligonucleotide
  Antisense strand to SEQ ID NO: 878536
agucucccagauuacguau

SEQ ID NO: 878538 - RNA, 19 nt, Artificial Sequence
  Description of Artificial Sequence: Synthetic oligonucleotide
  Sense strand starting at position 3315 of SEQ ID NO: 588628
ggagacuuacauuaacgcu

SEQ ID NO: 878539 - RNA, 19 nt, Artificial Sequence
  Description of Artificial Sequence: Synthetic oligonucleotide
  Antisense strand to SEQ ID NO: 878538
agcguuaauguaagucucc

SEQ ID NO: 878540 - RNA, 19 nt, Artificial Sequence
  Description of Artificial Sequence: Synthetic oligonucleotide
  Sense strand starting at position 3327 of SEQ ID NO: 588628
uaacgcucugccgucuaaa

SEQ ID NO: 878541 - RNA, 19 nt, Artificial Sequence
  Description of Artificial Sequence: Synthetic oligonucleotide
  Antisense strand to SEQ ID NO: 878540
uuuagacggcagagcguua

SEQ ID NO: 878542 - RNA, 19 nt, Artificial Sequence
  Description of Artificial Sequence: Synthetic oligonucleotide
  Sense strand starting at position 3348 of SEQ ID NO: 588628
ucauaccugcucuaugaga

SEQ ID NO: 878543 - RNA, 19 nt, Artificial Sequence
  Description of Artificial Sequence: Synthetic oligonucleotide
  Antisense strand to SEQ ID NO: 878542
ucucauagagcagguauga

SEQ ID NO: 878544 - RNA, 19 nt, Artificial Sequence
  Description of Artificial Sequence: Synthetic oligonucleotide
  Sense strand starting at position 3350 of SEQ ID NO: 588628
auaccugcucuaugagaua

SEQ ID NO: 878545 - RNA, 19 nt, Artificial Sequence
  Description of Artificial Sequence: Synthetic oligonucleotide
  Antisense strand to SEQ ID NO: 878544
uaucucauagagcagguau

SEQ ID NO: 878546 - RNA, 19 nt, Artificial Sequence
  Description of Artificial Sequence: Synthetic oligonucleotide
  Sense strand starting at position 3380 of SEQ ID NO: 588628
gucccuuuccagcacugau

SEQ ID NO: 878547 - RNA, 19 nt, Artificial Sequence
  Description of Artificial Sequence: Synthetic oligonucleotide
  Antisense strand to SEQ ID NO: 878546
aucagugcuggaaagggac

SEQ ID NO: 878548 - RNA, 19 nt, Artificial Sequence
  Description of Artificial Sequence: Synthetic oligonucleotide
  Sense strand starting at position 3383 of SEQ ID NO: 588628
ccuuuccagcacugaugaa

SEQ ID NO: 878549 - RNA, 19 nt, Artificial Sequence
  Description of Artificial Sequence: Synthetic oligonucleotide
  Antisense strand to SEQ ID NO: 878548
uucaucagugcuggaaagg

SEQ ID NO: 878550 - RNA, 19 nt, Artificial Sequence
  Description of Artificial Sequence: Synthetic oligonucleotide
  Sense strand starting at position 3552 of SEQ ID NO: 588628
aguggcaucuuccuuaaua

SEQ ID NO: 878551 - RNA, 19 nt, Artificial Sequence
  Description of Artificial Sequence: Synthetic oligonucleotide
  Antisense strand to SEQ ID NO: 878550
uauuaaggaagaugccacu

SEQ ID NO: 878552 - RNA, 19 nt, Artificial Sequence
  Description of Artificial Sequence: Synthetic oligonucleotide
  Sense strand starting at position 3621 of SEQ ID NO: 588628
ggagcuaaacccugugacu

SEQ ID NO: 878553 - RNA, 19 nt, Artificial Sequence
  Description of Artificial Sequence: Synthetic oligonucleotide
  Antisense strand to SEQ ID NO: 878552
agucacaggguuuagcucc

SEQ ID NO: 878554 - RNA, 19 nt, Artificial Sequence
  Description of Artificial Sequence: Synthetic oligonucleotide
  Sense strand starting at position 3623 of SEQ ID NO: 588628
agcuaaacccugugacuaa

SEQ ID NO: 878555 - RNA, 19 nt, Artificial Sequence
  Description of Artificial Sequence: Synthetic oligonucleotide
  Antisense strand to SEQ ID NO: 878554
uuagucacaggguuuagcu

SEQ ID NO: 878556 - RNA, 19 nt, Artificial Sequence
  Description of Artificial Sequence: Synthetic oligonucleotide
  Sense strand starting at position 4 of SEQ ID NO: 588629
gauuucggguucgaauuga

SEQ ID NO: 878557 - RNA, 19 nt, Artificial Sequence
  Description of Artificial Sequence: Synthetic oligonucleotide
  Antisense strand to SEQ ID NO: 878556
ucaauucgaacccgaaauc

SEQ ID NO: 878558 - RNA, 19 nt, Artificial Sequence
  Description of Artificial Sequence: Synthetic oligonucleotide
  Sense strand starting at position 15 of SEQ ID NO: 588629
cgaauugaguccucgaagc

SEQ ID NO: 878559 - RNA, 19 nt, Artificial Sequence
  Description of Artificial Sequence: Synthetic oligonucleotide
  Antisense strand to SEQ ID NO: 878558
gcuucgaggacucaauucg

SEQ ID NO: 878560 - RNA, 19 nt, Artificial Sequence
  Description of Artificial Sequence: Synthetic oligonucleotide
  Sense strand starting at position 17 of SEQ ID NO: 588629
aauugaguccucgaagcuc

SEQ ID NO: 878561 - RNA, 19 nt, Artificial Sequence
  Description of Artificial Sequence: Synthetic oligonucleotide
  Antisense strand to SEQ ID NO: 878560
gagcuucgaggacucaauu

SEQ ID NO: 878562 - RNA, 19 nt, Artificial Sequence
  Description of Artificial Sequence: Synthetic oligonucleotide
  Sense strand starting at position 159 of SEQ ID NO: 588629
cuggauacaucgcccuuua

SEQ ID NO: 878563 - RNA, 19 nt, Artificial Sequence
  Description of Artificial Sequence: Synthetic oligonucleotide
  Antisense strand to SEQ ID NO: 878562
uaaagggcgauguauccag

SEQ ID NO: 878564 - RNA, 19 nt, Artificial Sequence
  Description of Artificial Sequence: Synthetic oligonucleotide
  Sense strand starting at position 181 of SEQ ID NO: 588629
uuggguuuauaaccaagau

SEQ ID NO: 878565 - RNA, 19 nt, Artificial Sequence
  Description of Artificial Sequence: Synthetic oligonucleotide
  Antisense strand to SEQ ID NO: 878564
aucuugguuauaaacccaa

SEQ ID NO: 878566 - RNA, 19 nt, Artificial Sequence
  Description of Artificial Sequence: Synthetic oligonucleotide
  Sense strand starting at position 251 of SEQ ID NO: 588629
ugucauaaauguuaugaca

SEQ ID NO: 878567 - RNA, 19 nt, Artificial Sequence
  Description of Artificial Sequence: Synthetic oligonucleotide
  Antisense strand to SEQ ID NO: 878566
ugucauaacauuuaugaca

SEQ ID NO: 878568 - RNA, 19 nt, Artificial Sequence
  Description of Artificial Sequence: Synthetic oligonucleotide
  Sense strand starting at position 266 of SEQ ID NO: 588629
gacauuuaauuguggcaaa

SEQ ID NO: 878569 - RNA, 19 nt, Artificial Sequence
  Description of Artificial Sequence: Synthetic oligonucleotide
  Antisense strand to SEQ ID NO: 878568
uuugccacaauuaaauguc

SEQ ID NO: 878570 - RNA, 19 nt, Artificial Sequence
  Description of Artificial Sequence: Synthetic oligonucleotide
  Sense strand starting at position 267 of SEQ ID NO: 588629
acauuuaauuguggcaaau

SEQ ID NO: 878571 - RNA, 19 nt, Artificial Sequence
  Description of Artificial Sequence: Synthetic oligonucleotide
  Antisense strand to SEQ ID NO: 878570
auuugccacaauuaaaugu

SEQ ID NO: 878572 - RNA, 19 nt, Artificial Sequence
  Description of Artificial Sequence: Synthetic oligonucleotide
  Sense strand starting at position 307 of SEQ ID NO: 588629
gugugcaaccguuaacuau

SEQ ID NO: 878573 - RNA, 19 nt, Artificial Sequence
  Description of Artificial Sequence: Synthetic oligonucleotide
  Antisense strand to SEQ ID NO: 878572
auaguuaacgguugcacac

SEQ ID NO: 878574 - RNA, 19 nt, Artificial Sequence
  Description of Artificial Sequence: Synthetic oligonucleotide
  Sense strand starting at position 313 of SEQ ID NO: 588629
aaccguuaacuaugauaga

SEQ ID NO: 878575 - RNA, 19 nt, Artificial Sequence
  Description of Artificial Sequence: Synthetic oligonucleotide
  Antisense strand to SEQ ID NO: 878574
ucuaucauaguuaacgguu

SEQ ID NO: 878576 - RNA, 19 nt, Artificial Sequence
  Description of Artificial Sequence: Synthetic oligonucleotide
  Sense strand starting at position 314 of SEQ ID NO: 588629
accguuaacuaugauagaa

SEQ ID NO: 878577 - RNA, 19 nt, Artificial Sequence
  Description of Artificial Sequence: Synthetic oligonucleotide
  Antisense strand to SEQ ID NO: 878576
uucuaucauaguuaacggu

SEQ ID NO: 878578 - RNA, 19 nt, Artificial Sequence
  Description of Artificial Sequence: Synthetic oligonucleotide
  Sense strand starting at position 1016 of SEQ ID NO: 588629
gaacuugcugguugcgaga

SEQ ID NO: 878579 - RNA, 19 nt, Artificial Sequence
  Description of Artificial Sequence: Synthetic oligonucleotide
  Antisense strand to SEQ ID NO: 878578
ucucgcaaccagcaaguuc

SEQ ID NO: 878580 - RNA, 19 nt, Artificial Sequence
  Description of Artificial Sequence: Synthetic oligonucleotide
  Sense strand starting at position 1264 of SEQ ID NO: 588629
gguaguuggcgggaaggua

SEQ ID NO: 878581 - RNA, 19 nt, Artificial Sequence
  Description of Artificial Sequence: Synthetic oligonucleotide
  Antisense strand to SEQ ID NO: 878580
uaccuucccgccaacuacc

SEQ ID NO: 878582 - RNA, 19 nt, Artificial Sequence
  Description of Artificial Sequence: Synthetic oligonucleotide
  Sense strand starting at position 1349 of SEQ ID NO: 588629
gcguacuucgccuugguga

SEQ ID NO: 878583 - RNA, 19 nt, Artificial Sequence
  Description of Artificial Sequence: Synthetic oligonucleotide
  Antisense strand to SEQ ID NO: 878582
ucaccaaggcgaaguacgc

SEQ ID NO: 878584 - RNA, 19 nt, Artificial Sequence
  Description of Artificial Sequence: Synthetic oligonucleotide
  Sense strand starting at position 1350 of SEQ ID NO: 588629
cguacuucgccuuggugau

SEQ ID NO: 878585 - RNA, 19 nt, Artificial Sequence
  Description of Artificial Sequence: Synthetic oligonucleotide
  Antisense strand to SEQ ID NO: 878584
aucaccaaggcgaaguacg

SEQ ID NO: 878586 - RNA, 19 nt, Artificial Sequence
  Description of Artificial Sequence: Synthetic oligonucleotide
  Sense strand starting at position 1533 of SEQ ID NO: 588629
gcccgaacgaguucacguu

SEQ ID NO: 878587 - RNA, 19 nt, Artificial Sequence
  Description of Artificial Sequence: Synthetic oligonucleotide
  Antisense strand to SEQ ID NO: 878586
aacgugaacucguucgggc

SEQ ID NO: 878588 - RNA, 19 nt, Artificial Sequence
  Description of Artificial Sequence: Synthetic oligonucleotide
  Sense strand starting at position 1539 of SEQ ID NO: 588629
acgaguucacguugaacuc

SEQ ID NO: 878589 - RNA, 19 nt, Artificial Sequence
  Description of Artificial Sequence: Synthetic oligonucleotide
  Antisense strand to SEQ ID NO: 878588
gaguucaacgugaacucgu

SEQ ID NO: 878590 - RNA, 19 nt, Artificial Sequence
  Description of Artificial Sequence: Synthetic oligonucleotide
  Sense strand starting at position 2716 of SEQ ID NO: 588629
gcuguccucucgggaggaa

SEQ ID NO: 878591 - RNA, 19 nt, Artificial Sequence
  Description of Artificial Sequence: Synthetic oligonucleotide
  Antisense strand to SEQ ID NO: 878590
uuccucccgagaggacagc

SEQ ID NO: 878592 - RNA, 19 nt, Artificial Sequence
  Description of Artificial Sequence: Synthetic oligonucleotide
  Sense strand starting at position 2958 of SEQ ID NO: 588629
cgcauuuccucauuagagu

SEQ ID NO: 878593 - RNA, 19 nt, Artificial Sequence
  Description of Artificial Sequence: Synthetic oligonucleotide
  Antisense strand to SEQ ID NO: 878592
acucuaaugaggaaaugcg

SEQ ID NO: 878594 - RNA, 19 nt, Artificial Sequence
  Description of Artificial Sequence: Synthetic oligonucleotide
  Sense strand starting at position 2992 of SEQ ID NO: 588629
ucgcuguggucguuggaaa

SEQ ID NO: 878595 - RNA, 19 nt, Artificial Sequence
  Description of Artificial Sequence: Synthetic oligonucleotide
  Antisense strand to SEQ ID NO: 878594
uuuccaacgaccacagcga

SEQ ID NO: 878596 - RNA, 19 nt, Artificial Sequence
  Description of Artificial Sequence: Synthetic oligonucleotide
  Sense strand starting at position 2993 of SEQ ID NO: 588629
cgcuguggucguuggaaau

SEQ ID NO: 878597 - RNA, 19 nt, Artificial Sequence
  Description of Artificial Sequence: Synthetic oligonucleotide
  Antisense strand to SEQ ID NO: 878596
auuuccaacgaccacagcg

SEQ ID NO: 878598 - RNA, 19 nt, Artificial Sequence
  Description of Artificial Sequence: Synthetic oligonucleotide
  Sense strand starting at position 3059 of SEQ ID NO: 588629
gggcuugaauuccuucuga

SEQ ID NO: 878599 - RNA, 19 nt, Artificial Sequence
  Description of Artificial Sequence: Synthetic oligonucleotide
  Antisense strand to SEQ ID NO: 878598
ucagaaggaauucaagccc

SEQ ID NO: 878600 - RNA, 19 nt, Artificial Sequence
  Description of Artificial Sequence: Synthetic oligonucleotide
  Sense strand starting at position 3064 of SEQ ID NO: 588629
ugaauuccuucugaagcca

SEQ ID NO: 878601 - RNA, 19 nt, Artificial Sequence
  Description of Artificial Sequence: Synthetic oligonucleotide
  Antisense strand to SEQ ID NO: 878600
uggcuucagaaggaauuca

SEQ ID NO: 878602 - RNA, 19 nt, Artificial Sequence
  Description of Artificial Sequence: Synthetic oligonucleotide
  Sense strand starting at position 3721 of SEQ ID NO: 588629
ggagcucuguccugggcau

SEQ ID NO: 878603 - RNA, 19 nt, Artificial Sequence
  Description of Artificial Sequence: Synthetic oligonucleotide
  Antisense strand to SEQ ID NO: 878602
augcccaggacagagcucc

SEQ ID NO: 878604 - RNA, 19 nt, Artificial Sequence
  Description of Artificial Sequence: Synthetic oligonucleotide
  Sense strand starting at position 3722 of SEQ ID NO: 588629
gagcucuguccugggcauu

SEQ ID NO: 878605 - RNA, 19 nt, Artificial Sequence
  Description of Artificial Sequence: Synthetic oligonucleotide
  Antisense strand to SEQ ID NO: 878604
aaugcccaggacagagcuc

SEQ ID NO: 878606 - RNA, 19 nt, Artificial Sequence
  Description of Artificial Sequence: Synthetic oligonucleotide
  Sense strand starting at position 44 of SEQ ID NO: 588630
cugucuaugcccugacaca

SEQ ID NO: 878607 - RNA, 19 nt, Artificial Sequence
  Description of Artificial Sequence: Synthetic oligonucleotide
  Antisense strand to SEQ ID NO: 878606
ugugucagggcauagacag

SEQ ID NO: 878608 - RNA, 19 nt, Artificial Sequence
  Description of Artificial Sequence: Synthetic oligonucleotide
  Sense strand starting at position 45 of SEQ ID NO: 588630
ugucuaugcccugacacaa

SEQ ID NO: 878609 - RNA, 19 nt, Artificial Sequence
  Description of Artificial Sequence: Synthetic oligonucleotide
  Antisense strand to SEQ ID NO: 878608
uugugucagggcauagaca

SEQ ID NO: 878610 - RNA, 19 nt, Artificial Sequence
  Description of Artificial Sequence: Synthetic oligonucleotide
  Sense strand starting at position 559 of SEQ ID NO: 588630
gcaggugaucuaggagaga

SEQ ID NO: 878611 - RNA, 19 nt, Artificial Sequence
  Description of Artificial Sequence: Synthetic oligonucleotide
  Antisense strand to SEQ ID NO: 878610
ucucuccuagaucaccugc

SEQ ID NO: 878612 - RNA, 19 nt, Artificial Sequence
  Description of Artificial Sequence: Synthetic oligonucleotide
  Sense strand starting at position 2606 of SEQ ID NO: 588630
gggagacacguccaacagu

SEQ ID NO: 878613 - RNA, 19 nt, Artificial Sequence
  Description of Artificial Sequence: Synthetic oligonucleotide
  Antisense strand to SEQ ID NO: 878612
acuguuggacgugucuccc

SEQ ID NO: 878614 - RNA, 19 nt, Artificial Sequence
  Description of Artificial Sequence: Synthetic oligonucleotide
  Sense strand starting at position 3374 of SEQ ID NO: 588630
ccucguacuccgucuggua

SEQ ID NO: 878615 - RNA, 19 nt, Artificial Sequence
  Description of Artificial Sequence: Synthetic oligonucleotide
  Antisense strand to SEQ ID NO: 878614
uaccagacggaguacgagg

SEQ ID NO: 878616 - RNA, 19 nt, Artificial Sequence
  Description of Artificial Sequence: Synthetic oligonucleotide
  Sense strand starting at position 3382 of SEQ ID NO: 588630
uccgucugguagucagauu

SEQ ID NO: 878617 - RNA, 19 nt, Artificial Sequence
  Description of Artificial Sequence: Synthetic oligonucleotide
  Antisense strand to SEQ ID NO: 878616
aaucugacuaccagacgga

SEQ ID NO: 878618 - RNA, 19 nt, Artificial Sequence
  Description of Artificial Sequence: Synthetic oligonucleotide
  Sense strand starting at position 3391 of SEQ ID NO: 588630
uagucagauucgucuggca

SEQ ID NO: 878619 - RNA, 19 nt, Artificial Sequence
  Description of Artificial Sequence: Synthetic oligonucleotide
  Antisense strand to SEQ ID NO: 878618
ugccagacgaaucugacua

SEQ ID NO: 878620 - RNA, 19 nt, Artificial Sequence
  Description of Artificial Sequence: Synthetic oligonucleotide
  Sense strand starting at position 3609 of SEQ ID NO: 588630
cuucgugggucuuccacaa

SEQ ID NO: 878621 - RNA, 19 nt, Artificial Sequence
  Description of Artificial Sequence: Synthetic oligonucleotide
  Antisense strand to SEQ ID NO: 878620
uuguggaagacccacgaag

SEQ ID NO: 878622 - RNA, 19 nt, Artificial Sequence
  Description of Artificial Sequence: Synthetic oligonucleotide
  Sense strand starting at position 3754 of SEQ ID NO: 588630
gaagacgucucccaggaga

SEQ ID NO: 878623 - RNA, 19 nt, Artificial Sequence
  Description of Artificial Sequence: Synthetic oligonucleotide
  Antisense strand to SEQ ID NO: 878622
ucuccugggagacgucuuc

SEQ ID NO: 878624 - RNA, 19 nt, Artificial Sequence
  Description of Artificial Sequence: Synthetic oligonucleotide
  Sense strand starting at position 3756 of SEQ ID NO: 588630
agacgucucccaggagaau

SEQ ID NO: 878625 - RNA, 19 nt, Artificial Sequence
  Description of Artificial Sequence: Synthetic oligonucleotide
  Antisense strand to SEQ ID NO: 878624
auucuccugggagacgucu

SEQ ID NO: 878626 - RNA, 19 nt, Artificial Sequence
  Description of Artificial Sequence: Synthetic oligonucleotide
  Sense strand starting at position 3777 of SEQ ID NO: 588630
ccaguucugcugugaggag

SEQ ID NO: 878627 - RNA, 19 nt, Artificial Sequence
  Description of Artificial Sequence: Synthetic oligonucleotide
  Antisense strand to SEQ ID NO: 878626
cuccucacagcagaacugg

SEQ ID NO: 878628 - RNA, 19 nt, Artificial Sequence
  Description of Artificial Sequence: Synthetic oligonucleotide
  Sense strand starting at position 3949 of SEQ ID NO: 588630
ugagguguggcugggaguu

SEQ ID NO: 878629 - RNA, 19 nt, Artificial Sequence
  Description of Artificial Sequence: Synthetic oligonucleotide
  Antisense strand to SEQ ID NO: 878628
aacucccagccacaccuca

SEQ ID NO: 878630 - RNA, 19 nt, Artificial Sequence
  Description of Artificial Sequence: Synthetic oligonucleotide
  Sense strand starting at position 3958 of SEQ ID NO: 588630
gcugggaguugaggugaau

SEQ ID NO: 878631 - RNA, 19 nt, Artificial Sequence
  Description of Artificial Sequence: Synthetic oligonucleotide
  Antisense strand to SEQ ID NO: 878630
auucaccucaacucccagc

SEQ ID NO: 878632 - RNA, 19 nt, Artificial Sequence
  Description of Artificial Sequence: Synthetic oligonucleotide
  Sense strand starting at position 212 of SEQ ID NO: 588631
ggccgaaacuucucagccu

SEQ ID NO: 878633 - RNA, 19 nt, Artificial Sequence
  Description of Artificial Sequence: Synthetic oligonucleotide
  Antisense strand to SEQ ID NO: 878632
aggcugagaaguuucggcc

SEQ ID NO: 878634 - RNA, 19 nt, Artificial Sequence
  Description of Artificial Sequence: Synthetic oligonucleotide
  Sense strand starting at position 234 of SEQ ID NO: 588631
gcuccagggucggaaacuu

SEQ ID NO: 878635 - RNA, 19 nt, Artificial Sequence
  Description of Artificial Sequence: Synthetic oligonucleotide
  Antisense strand to SEQ ID NO: 878634
aaguuuccgacccuggagc

SEQ ID NO: 878636 - RNA, 19 nt, Artificial Sequence
  Description of Artificial Sequence: Synthetic oligonucleotide
  Sense strand starting at position 1541 of SEQ ID NO: 588631
aggaaugacucugacccaa

SEQ ID NO: 878637 - RNA, 19 nt, Artificial Sequence
  Description of Artificial Sequence: Synthetic oligonucleotide
  Antisense strand to SEQ ID NO: 878636
uugggucagagucauuccu

SEQ ID NO: 878638 - RNA, 19 nt, Artificial Sequence
  Description of Artificial Sequence: Synthetic oligonucleotide
  Sense strand starting at position 2265 of SEQ ID NO: 588631
ggccgauugccauucugca

SEQ ID NO: 878639 - RNA, 19 nt, Artificial Sequence
  Description of Artificial Sequence: Synthetic oligonucleotide
  Antisense strand to SEQ ID NO: 878638
ugcagaauggcaaucggcc

SEQ ID NO: 878640 - RNA, 19 nt, Artificial Sequence
  Description of Artificial Sequence: Synthetic oligonucleotide
  Sense strand starting at position 2296 of SEQ ID NO: 588631
agcucuguuauggacugaa

SEQ ID NO: 878641 - RNA, 19 nt, Artificial Sequence
  Description of Artificial Sequence: Synthetic oligonucleotide
  Antisense strand to SEQ ID NO: 878640
uucaguccauaacagagcu

SEQ ID NO: 878642 - RNA, 19 nt, Artificial Sequence
  Description of Artificial Sequence: Synthetic oligonucleotide
  Sense strand starting at position 2299 of SEQ ID NO: 588631
ucuguuauggacugaacgu

SEQ ID NO: 878643 - RNA, 19 nt, Artificial Sequence
  Description of Artificial Sequence: Synthetic oligonucleotide
  Antisense strand to SEQ ID NO: 878642
acguucaguccauaacaga

SEQ ID NO: 878644 - RNA, 19 nt, Artificial Sequence
  Description of Artificial Sequence: Synthetic oligonucleotide
  Sense strand starting at position 2350 of SEQ ID NO: 588631
gucugaugugaugguuuga

SEQ ID NO: 878645 - RNA, 19 nt, Artificial Sequence
  Description of Artificial Sequence: Synthetic oligonucleotide
  Antisense strand to SEQ ID NO: 878644
ucaaaccaucacaucagac

SEQ ID NO: 878646 - RNA, 19 nt, Artificial Sequence
  Description of Artificial Sequence: Synthetic oligonucleotide
  Sense strand starting at position 2939 of SEQ ID NO: 588631
aggcucuggucaucuguua

SEQ ID NO: 878647 - RNA, 19 nt, Artificial Sequence
  Description of Artificial Sequence: Synthetic oligonucleotide
  Antisense strand to SEQ ID NO: 878646
uaacagaugaccagagccu

SEQ ID NO: 878648 - RNA, 19 nt, Artificial Sequence
  Description of Artificial Sequence: Synthetic oligonucleotide
  Sense strand starting at position 3053 of SEQ ID NO: 588631
gggagcauugcucaaauug

SEQ ID NO: 878649 - RNA, 19 nt, Artificial Sequence
  Description of Artificial Sequence: Synthetic oligonucleotide
  Antisense strand to SEQ ID NO: 878648
caauuugagcaaugcuccc

SEQ ID NO: 878650 - RNA, 19 nt, Artificial Sequence
  Description of Artificial Sequence: Synthetic oligonucleotide
  Sense strand starting at position 3079 of SEQ ID NO: 588631
ccaggaugcagugacaagu

SEQ ID NO: 878651 - RNA, 19 nt, Artificial Sequence
  Description of Artificial Sequence: Synthetic oligonucleotide
  Antisense strand to SEQ ID NO: 878650
acuugucacugcauccugg

SEQ ID NO: 878652 - RNA, 19 nt, Artificial Sequence
  Description of Artificial Sequence: Synthetic oligonucleotide
  Sense strand starting at position 3263 of SEQ ID NO: 588631
gaaggcuggugaugcaauu

SEQ ID NO: 878653 - RNA, 19 nt, Artificial Sequence
  Description of Artificial Sequence: Synthetic oligonucleotide
  Antisense strand to SEQ ID NO: 878652
aauugcaucaccagccuuc

SEQ ID NO: 878654 - RNA, 19 nt, Artificial Sequence
  Description of Artificial Sequence: Synthetic oligonucleotide
  Sense strand starting at position 3722 of SEQ ID NO: 588631
gcuguuucgacccaucgga

SEQ ID NO: 878655 - RNA, 19 nt, Artificial Sequence
  Description of Artificial Sequence: Synthetic oligonucleotide
  Antisense strand to SEQ ID NO: 878654
uccgaugggucgaaacagc

SEQ ID NO: 878656 - RNA, 19 nt, Artificial Sequence
  Description of Artificial Sequence: Synthetic oligonucleotide
  Sense strand starting at position 3758 of SEQ ID NO: 588631
gauggugucuaggccagaa

SEQ ID NO: 878657 - RNA, 19 nt, Artificial Sequence
  Description of Artificial Sequence: Synthetic oligonucleotide
  Antisense strand to SEQ ID NO: 878656
uucuggccuagacaccauc

SEQ ID NO: 878658 - RNA, 19 nt, Artificial Sequence
  Description of Artificial Sequence: Synthetic oligonucleotide
  Sense strand starting at position 3810 of SEQ ID NO: 588631
ucucuagggcucuggaauu

SEQ ID NO: 878659 - RNA, 19 nt, Artificial Sequence
  Description of Artificial Sequence: Synthetic oligonucleotide
  Antisense strand to SEQ ID NO: 878658
aauuccagagcccuagaga

SEQ ID NO: 878660 - RNA, 19 nt, Artificial Sequence
  Description of Artificial Sequence: Synthetic oligonucleotide
  Sense strand starting at position 3821 of SEQ ID NO: 588631
cuggaauucucccagucag

SEQ ID NO: 878661 - RNA, 19 nt, Artificial Sequence
  Description of Artificial Sequence: Synthetic oligonucleotide
  Antisense strand to SEQ ID NO: 878660
cugacugggagaauuccag

SEQ ID NO: 878662 - RNA, 19 nt, Artificial Sequence
  Description of Artificial Sequence: Synthetic oligonucleotide
  Sense strand starting at position 21 of SEQ ID NO: 588632
gguccauuguauucugacu

SEQ ID NO: 878663 - RNA, 19 nt, Artificial Sequence
  Description of Artificial Sequence: Synthetic oligonucleotide
  Antisense strand to SEQ ID NO: 878662
agucagaauacaauggacc

SEQ ID NO: 878664 - RNA, 19 nt, Artificial Sequence
  Description of Artificial Sequence: Synthetic oligonucleotide
  Sense strand starting at position 329 of SEQ ID NO: 588632
uguagagagcucuaaacuc

SEQ ID NO: 878665 - RNA, 19 nt, Artificial Sequence
  Description of Artificial Sequence: Synthetic oligonucleotide
  Antisense strand to SEQ ID NO: 878664
gaguuuagagcucucuaca

SEQ ID NO: 878666 - RNA, 19 nt, Artificial Sequence
  Description of Artificial Sequence: Synthetic oligonucleotide
  Sense strand starting at position 478 of SEQ ID NO: 588632
gugucagagcugggaguaa

SEQ ID NO: 878667 - RNA, 19 nt, Artificial Sequence
  Description of Artificial Sequence: Synthetic oligonucleotide
  Antisense strand to SEQ ID NO: 878666
uuacucccagcucugacac

SEQ ID NO: 878668 - RNA, 19 nt, Artificial Sequence
  Description of Artificial Sequence: Synthetic oligonucleotide
  Sense strand starting at position 538 of SEQ ID NO: 588632
cugugucuuggccagaagu

SEQ ID NO: 878669 - RNA, 19 nt, Artificial Sequence
  Description of Artificial Sequence: Synthetic oligonucleotide
  Antisense strand to SEQ ID NO: 878668
acuucuggccaagacacag

SEQ ID NO: 878670 - RNA, 19 nt, Artificial Sequence
  Description of Artificial Sequence: Synthetic oligonucleotide
  Sense strand starting at position 881 of SEQ ID NO: 588632
cugucuuggcuccagcaga

SEQ ID NO: 878671 - RNA, 19 nt, Artificial Sequence
  Description of Artificial Sequence: Synthetic oligonucleotide
  Antisense strand to SEQ ID NO: 878670
ucugcuggagccaagacag

SEQ ID NO: 878672 - RNA, 19 nt, Artificial Sequence
  Description of Artificial Sequence: Synthetic oligonucleotide
  Sense strand starting at position 892 of SEQ ID NO: 588632
ccagcagagacguacugaa

SEQ ID NO: 878673 - RNA, 19 nt, Artificial Sequence
  Description of Artificial Sequence: Synthetic oligonucleotide
  Antisense strand to SEQ ID NO: 878672
uucaguacgucucugcugg

SEQ ID NO: 878674 - RNA, 19 nt, Artificial Sequence
  Description of Artificial Sequence: Synthetic oligonucleotide
  Sense strand starting at position 927 of SEQ ID NO: 588632
ggguaagucaucuguauuu

SEQ ID NO: 878675 - RNA, 19 nt, Artificial Sequence
  Description of Artificial Sequence: Synthetic oligonucleotide
  Antisense strand to SEQ ID NO: 878674
aaauacagaugacuuaccc

SEQ ID NO: 878676 - RNA, 19 nt, Artificial Sequence
  Description of Artificial Sequence: Synthetic oligonucleotide
  Sense strand starting at position 1027 of SEQ ID NO: 588632
gguuccagguuuccuaauu

SEQ ID NO: 878677 - RNA, 19 nt, Artificial Sequence
  Description of Artificial Sequence: Synthetic oligonucleotide
  Antisense strand to SEQ ID NO: 878676
aauuaggaaaccuggaacc

SEQ ID NO: 878678 - RNA, 19 nt, Artificial Sequence
  Description of Artificial Sequence: Synthetic oligonucleotide
  Sense strand starting at position 1056 of SEQ ID NO: 588632
cgcuaaugacgguaacagu

SEQ ID NO: 878679 - RNA, 19 nt, Artificial Sequence
  Description of Artificial Sequence: Synthetic oligonucleotide
  Antisense strand to SEQ ID NO: 878678
acuguuaccgucauuagcg

SEQ ID NO: 878680 - RNA, 19 nt, Artificial Sequence
  Description of Artificial Sequence: Synthetic oligonucleotide
  Sense strand starting at position 1211 of SEQ ID NO: 588632
gagggaaguuaauuggcuu

SEQ ID NO: 878681 - RNA, 19 nt, Artificial Sequence
  Description of Artificial Sequence: Synthetic oligonucleotide
  Antisense strand to SEQ ID NO: 878680
aagccaauuaacuucccuc

SEQ ID NO: 878682 - RNA, 19 nt, Artificial Sequence
  Description of Artificial Sequence: Synthetic oligonucleotide
  Sense strand starting at position 1217 of SEQ ID NO: 588632
aguuaauuggcuuggccaa

SEQ ID NO: 878683 - RNA, 19 nt, Artificial Sequence
  Description of Artificial Sequence: Synthetic oligonucleotide
  Antisense strand to SEQ ID NO: 878682
uuggccaagccaauuaacu

SEQ ID NO: 878684 - RNA, 19 nt, Artificial Sequence
  Description of Artificial Sequence: Synthetic oligonucleotide
  Sense strand starting at position 1264 of SEQ ID NO: 588632
gggacuaaauccuaaauaa

SEQ ID NO: 878685 - RNA, 19 nt, Artificial Sequence
  Description of Artificial Sequence: Synthetic oligonucleotide
  Antisense strand to SEQ ID NO: 878684
uuauuuaggauuuaguccc

SEQ ID NO: 878686 - RNA, 19 nt, Artificial Sequence
  Description of Artificial Sequence: Synthetic oligonucleotide
  Sense strand starting at position 1308 of SEQ ID NO: 588632
gcagcuagucuauguguaa

SEQ ID NO: 878687 - RNA, 19 nt, Artificial Sequence
  Description of Artificial Sequence: Synthetic oligonucleotide
  Antisense strand to SEQ ID NO: 878686
uuacacauagacuagcugc

SEQ ID NO: 878688 - RNA, 19 nt, Artificial Sequence
  Description of Artificial Sequence: Synthetic oligonucleotide
  Sense strand starting at position 1309 of SEQ ID NO: 588632
cagcuagucuauguguaag

SEQ ID NO: 878689 - RNA, 19 nt, Artificial Sequence
  Description of Artificial Sequence: Synthetic oligonucleotide
  Antisense strand to SEQ ID NO: 878688
cuuacacauagacuagcug

SEQ ID NO: 878690 - RNA, 19 nt, Artificial Sequence
  Description of Artificial Sequence: Synthetic oligonucleotide
  Sense strand starting at position 1312 of SEQ ID NO: 588632
cuagucuauguguaagcuu

SEQ ID NO: 878691 - RNA, 19 nt, Artificial Sequence
  Description of Artificial Sequence: Synthetic oligonucleotide
  Antisense strand to SEQ ID NO: 878690
aagcuuacacauagacuag

SEQ ID NO: 878692 - RNA, 19 nt, Artificial Sequence
  Description of Artificial Sequence: Synthetic oligonucleotide
  Sense strand starting at position 1354 of SEQ ID NO: 588632
cgagcuugcuguucuaaga

SEQ ID NO: 878693 - RNA, 19 nt, Artificial Sequence
  Description of Artificial Sequence: Synthetic oligonucleotide
  Antisense strand to SEQ ID NO: 878692
ucuuagaacagcaagcucg

SEQ ID NO: 878694 - RNA, 19 nt, Artificial Sequence
  Description of Artificial Sequence: Synthetic oligonucleotide
  Sense strand starting at position 1367 of SEQ ID NO: 588632
cuaagacuggcauguacuu

SEQ ID NO: 878695 - RNA, 19 nt, Artificial Sequence
  Description of Artificial Sequence: Synthetic oligonucleotide
  Antisense strand to SEQ ID NO: 878694
aaguacaugccagucuuag

SEQ ID NO: 878696 - RNA, 19 nt, Artificial Sequence
  Description of Artificial Sequence: Synthetic oligonucleotide
  Sense strand starting at position 2082 of SEQ ID NO: 588632
ccagcagguuccgugaguu

SEQ ID NO: 878697 - RNA, 19 nt, Artificial Sequence
  Description of Artificial Sequence: Synthetic oligonucleotide
  Antisense strand to SEQ ID NO: 878696
aacucacggaaccugcugg

SEQ ID NO: 878698 - RNA, 19 nt, Artificial Sequence
  Description of Artificial Sequence: Synthetic oligonucleotide
  Sense strand starting at position 2238 of SEQ ID NO: 588632
aggcuagaaggaugcuaau

SEQ ID NO: 878699 - RNA, 19 nt, Artificial Sequence
  Description of Artificial Sequence: Synthetic oligonucleotide
  Antisense strand to SEQ ID NO: 878698
auuagcauccuucuagccu

SEQ ID NO: 878700 - RNA, 19 nt, Artificial Sequence
  Description of Artificial Sequence: Synthetic oligonucleotide
  Sense strand starting at position 2241 of SEQ ID NO: 588632
cuagaaggaugcuaauguu

SEQ ID NO: 878701 - RNA, 19 nt, Artificial Sequence
  Description of Artificial Sequence: Synthetic oligonucleotide
  Antisense strand to SEQ ID NO: 878700
aacauuagcauccuucuag

SEQ ID NO: 878702 - RNA, 19 nt, Artificial Sequence
  Description of Artificial Sequence: Synthetic oligonucleotide
  Sense strand starting at position 2249 of SEQ ID NO: 588632
augcuaauguuagcugagu

SEQ ID NO: 878703 - RNA, 19 nt, Artificial Sequence
  Description of Artificial Sequence: Synthetic oligonucleotide
  Antisense strand to SEQ ID NO: 878702
acucagcuaacauuagcau

SEQ ID NO: 878704 - RNA, 19 nt, Artificial Sequence
  Description of Artificial Sequence: Synthetic oligonucleotide
  Sense strand starting at position 2250 of SEQ ID NO: 588632
ugcuaauguuagcugagua

SEQ ID NO: 878705 - RNA, 19 nt, Artificial Sequence
  Description of Artificial Sequence: Synthetic oligonucleotide
  Antisense strand to SEQ ID NO: 878704
uacucagcuaacauuagca

SEQ ID NO: 878706 - RNA, 19 nt, Artificial Sequence
  Description of Artificial Sequence: Synthetic oligonucleotide
  Sense strand starting at position 2251 of SEQ ID NO: 588632
gcuaauguuagcugaguau

SEQ ID NO: 878707 - RNA, 19 nt, Artificial Sequence
  Description of Artificial Sequence: Synthetic oligonucleotide
  Antisense strand to SEQ ID NO: 878706
auacucagcuaacauuagc

SEQ ID NO: 878708 - RNA, 19 nt, Artificial Sequence
  Description of Artificial Sequence: Synthetic oligonucleotide
  Sense strand starting at position 2516 of SEQ ID NO: 588632
cgauguuuccagggcggga

SEQ ID NO: 878709 - RNA, 19 nt, Artificial Sequence
  Description of Artificial Sequence: Synthetic oligonucleotide
  Antisense strand to SEQ ID NO: 878708
ucccgcccuggaaacaucg

SEQ ID NO: 878710 - RNA, 19 nt, Artificial Sequence
  Description of Artificial Sequence: Synthetic oligonucleotide
  Sense strand starting at position 2552 of SEQ ID NO: 588632
ccagauguggccuguuugu

SEQ ID NO: 878711 - RNA, 19 nt, Artificial Sequence
  Description of Artificial Sequence: Synthetic oligonucleotide
  Antisense strand to SEQ ID NO: 878710
acaaacaggccacaucugg

SEQ ID NO: 878712 - RNA, 19 nt, Artificial Sequence
  Description of Artificial Sequence: Synthetic oligonucleotide
  Sense strand starting at position 2558 of SEQ ID NO: 588632
guggccuguuugucuuuaa

SEQ ID NO: 878713 - RNA, 19 nt, Artificial Sequence
  Description of Artificial Sequence: Synthetic oligonucleotide
  Antisense strand to SEQ ID NO: 878712
uuaaagacaaacaggccac

SEQ ID NO: 878714 - RNA, 19 nt, Artificial Sequence
  Description of Artificial Sequence: Synthetic oligonucleotide
  Sense strand starting at position 2596 of SEQ ID NO: 588632
ccaggauagucuuacgaag

SEQ ID NO: 878715 - RNA, 19 nt, Artificial Sequence
  Description of Artificial Sequence: Synthetic oligonucleotide
  Antisense strand to SEQ ID NO: 878714
cuucguaagacuauccugg

SEQ ID NO: 878716 - RNA, 19 nt, Artificial Sequence
  Description of Artificial Sequence: Synthetic oligonucleotide
  Sense strand starting at position 2695 of SEQ ID NO: 588632
gugagugaugggcgggaua

SEQ ID NO: 878717 - RNA, 19 nt, Artificial Sequence
  Description of Artificial Sequence: Synthetic oligonucleotide
  Antisense strand to SEQ ID NO: 878716
uaucccgcccaucacucac

SEQ ID NO: 878718 - RNA, 19 nt, Artificial Sequence
  Description of Artificial Sequence: Synthetic oligonucleotide
  Sense strand starting at position 2696 of SEQ ID NO: 588632
ugagugaugggcgggauaa

SEQ ID NO: 878719 - RNA, 19 nt, Artificial Sequence
  Description of Artificial Sequence: Synthetic oligonucleotide
  Antisense strand to SEQ ID NO: 878718
uuaucccgcccaucacuca

SEQ ID NO: 878720 - RNA, 19 nt, Artificial Sequence
  Description of Artificial Sequence: Synthetic oligonucleotide
  Sense strand starting at position 2697 of SEQ ID NO: 588632
gagugaugggcgggauaag

SEQ ID NO: 878721 - RNA, 19 nt, Artificial Sequence
  Description of Artificial Sequence: Synthetic oligonucleotide
  Antisense strand to SEQ ID NO: 878720
cuuaucccgcccaucacuc

SEQ ID NO: 878722 - RNA, 19 nt, Artificial Sequence
  Description of Artificial Sequence: Synthetic oligonucleotide
  Sense strand starting at position 2759 of SEQ ID NO: 588632
uccucuuucgcccaugaau

SEQ ID NO: 878723 - RNA, 19 nt, Artificial Sequence
  Description of Artificial Sequence: Synthetic oligonucleotide
  Antisense strand to SEQ ID NO: 878722
auucaugggcgaaagagga

SEQ ID NO: 878724 - RNA, 19 nt, Artificial Sequence
  Description of Artificial Sequence: Synthetic oligonucleotide
  Sense strand starting at position 2761 of SEQ ID NO: 588632
cucuuucgcccaugaaugu

SEQ ID NO: 878725 - RNA, 19 nt, Artificial Sequence
  Description of Artificial Sequence: Synthetic oligonucleotide
  Antisense strand to SEQ ID NO: 878724
acauucaugggcgaaagag

SEQ ID NO: 878726 - RNA, 19 nt, Artificial Sequence
  Description of Artificial Sequence: Synthetic oligonucleotide
  Sense strand starting at position 2762 of SEQ ID NO: 588632
ucuuucgcccaugaaugua

SEQ ID NO: 878727 - RNA, 19 nt, Artificial Sequence
  Description of Artificial Sequence: Synthetic oligonucleotide
  Antisense strand to SEQ ID NO: 878726
uacauucaugggcgaaaga

SEQ ID NO: 878728 - RNA, 19 nt, Artificial Sequence
  Description of Artificial Sequence: Synthetic oligonucleotide
  Sense strand starting at position 2818 of SEQ ID NO: 588632
acauauggcuguccgugaa

SEQ ID NO: 878729 - RNA, 19 nt, Artificial Sequence
  Description of Artificial Sequence: Synthetic oligonucleotide
  Antisense strand to SEQ ID NO: 878728
uucacggacagccauaugu

SEQ ID NO: 878730 - RNA, 19 nt, Artificial Sequence
  Description of Artificial Sequence: Synthetic oligonucleotide
  Sense strand starting at position 2821 of SEQ ID NO: 588632
uauggcuguccgugaauca

SEQ ID NO: 878731 - RNA, 19 nt, Artificial Sequence
  Description of Artificial Sequence: Synthetic oligonucleotide
  Antisense strand to SEQ ID NO: 878730
ugauucacggacagccaua

SEQ ID NO: 878732 - RNA, 19 nt, Artificial Sequence
  Description of Artificial Sequence: Synthetic oligonucleotide
  Sense strand starting at position 3627 of SEQ ID NO: 588632
gacacuguccaucgcuaau

SEQ ID NO: 878733 - RNA, 19 nt, Artificial Sequence
  Description of Artificial Sequence: Synthetic oligonucleotide
  Antisense strand to SEQ ID NO: 878732
auuagcgauggacaguguc

SEQ ID NO: 878734 - RNA, 19 nt, Artificial Sequence
  Description of Artificial Sequence: Synthetic oligonucleotide
  Sense strand starting at position 3630 of SEQ ID NO: 588632
acuguccaucgcuaaucua

SEQ ID NO: 878735 - RNA, 19 nt, Artificial Sequence
  Description of Artificial Sequence: Synthetic oligonucleotide
  Antisense strand to SEQ ID NO: 878734
uagauuagcgauggacagu

SEQ ID NO: 878736 - RNA, 19 nt, Artificial Sequence
  Description of Artificial Sequence: Synthetic oligonucleotide
  Sense strand starting at position 3638 of SEQ ID NO: 588632
ucgcuaaucuagucauaaa

SEQ ID NO: 878737 - RNA, 19 nt, Artificial Sequence
  Description of Artificial Sequence: Synthetic oligonucleotide
  Antisense strand to SEQ ID NO: 878736
uuuaugacuagauuagcga

SEQ ID NO: 878738 - RNA, 19 nt, Artificial Sequence
  Description of Artificial Sequence: Synthetic oligonucleotide
  Sense strand starting at position 3871 of SEQ ID NO: 588632
uauguugaauauugggaga

SEQ ID NO: 878739 - RNA, 19 nt, Artificial Sequence
  Description of Artificial Sequence: Synthetic oligonucleotide
  Antisense strand to SEQ ID NO: 878738
ucucccaauauucaacaua

SEQ ID NO: 878740 - RNA, 19 nt, Artificial Sequence
  Description of Artificial Sequence: Synthetic oligonucleotide
  Sense strand starting at position 3873 of SEQ ID NO: 588632
uguugaauauugggagaaa

SEQ ID NO: 878741 - RNA, 19 nt, Artificial Sequence
  Description of Artificial Sequence: Synthetic oligonucleotide
  Antisense strand to SEQ ID NO: 878740
uuucucccaauauucaaca

SEQ ID NO: 878742 - RNA, 19 nt, Artificial Sequence
  Description of Artificial Sequence: Synthetic oligonucleotide
  Sense strand starting at position 294 of SEQ ID NO: 588633
ucacguaagucucuacgga

SEQ ID NO: 878743 - RNA, 19 nt, Artificial Sequence
  Description of Artificial Sequence: Synthetic oligonucleotide
  Antisense strand to SEQ ID NO: 878742
uccguagagacuuacguga

SEQ ID NO: 878744 - RNA, 19 nt, Artificial Sequence
  Description of Artificial Sequence: Synthetic oligonucleotide
  Sense strand starting at position 295 of SEQ ID NO: 588633
cacguaagucucuacggaa

SEQ ID NO: 878745 - RNA, 19 nt, Artificial Sequence
  Description of Artificial Sequence: Synthetic oligonucleotide
  Antisense strand to SEQ ID NO: 878744
uuccguagagacuuacgug

SEQ ID NO: 878746 - RNA, 19 nt, Artificial Sequence
  Description of Artificial Sequence: Synthetic oligonucleotide
  Sense strand starting at position 408 of SEQ ID NO: 588633
acggcagagugcucuaaga

SEQ ID NO: 878747 - RNA, 19 nt, Artificial Sequence
  Description of Artificial Sequence: Synthetic oligonucleotide
  Antisense strand to SEQ ID NO: 878746
ucuuagagcacucugccgu

SEQ ID NO: 878748 - RNA, 19 nt, Artificial Sequence
  Description of Artificial Sequence: Synthetic oligonucleotide
  Sense strand starting at position 410 of SEQ ID NO: 588633
ggcagagugcucuaagaaa

SEQ ID NO: 878749 - RNA, 19 nt, Artificial Sequence
  Description of Artificial Sequence: Synthetic oligonucleotide
  Antisense strand to SEQ ID NO: 878748
uuucuuagagcacucugcc

SEQ ID NO: 878750 - RNA, 19 nt, Artificial Sequence
  Description of Artificial Sequence: Synthetic oligonucleotide
  Sense strand starting at position 485 of SEQ ID NO: 588633
uaacaaaggcucugaugga

SEQ ID NO: 878751 - RNA, 19 nt, Artificial Sequence
  Description of Artificial Sequence: Synthetic oligonucleotide
  Antisense strand to SEQ ID NO: 878750
uccaucagagccuuuguua

SEQ ID NO: 878752 - RNA, 19 nt, Artificial Sequence
  Description of Artificial Sequence: Synthetic oligonucleotide
  Sense strand starting at position 621 of SEQ ID NO: 588633
acagaaaggcugugauuaa

SEQ ID NO: 878753 - RNA, 19 nt, Artificial Sequence
  Description of Artificial Sequence: Synthetic oligonucleotide
  Antisense strand to SEQ ID NO: 878752
uuaaucacagccuuucugu

SEQ ID NO: 878754 - RNA, 19 nt, Artificial Sequence
  Description of Artificial Sequence: Synthetic oligonucleotide
  Sense strand starting at position 680 of SEQ ID NO: 588633
ggcacauauucucucuuga

SEQ ID NO: 878755 - RNA, 19 nt, Artificial Sequence
  Description of Artificial Sequence: Synthetic oligonucleotide
  Antisense strand to SEQ ID NO: 878754
ucaagagagaauaugugcc

SEQ ID NO: 878756 - RNA, 19 nt, Artificial Sequence
  Description of Artificial Sequence: Synthetic oligonucleotide
  Sense strand starting at position 687 of SEQ ID NO: 588633
auucucucuugagcuuaga

SEQ ID NO: 878757 - RNA, 19 nt, Artificial Sequence
  Description of Artificial Sequence: Synthetic oligonucleotide
  Antisense strand to SEQ ID NO: 878756
ucuaagcucaagagagaau

SEQ ID NO: 878758 - RNA, 19 nt, Artificial Sequence
  Description of Artificial Sequence: Synthetic oligonucleotide
  Sense strand starting at position 690 of SEQ ID NO: 588633
cucucuugagcuuagaaau

SEQ ID NO: 878759 - RNA, 19 nt, Artificial Sequence
  Description of Artificial Sequence: Synthetic oligonucleotide
  Antisense strand to SEQ ID NO: 878758
auuucuaagcucaagagag

SEQ ID NO: 878760 - RNA, 19 nt, Artificial Sequence
  Description of Artificial Sequence: Synthetic oligonucleotide
  Sense strand starting at position 718 of SEQ ID NO: 588633
augagauucuugucaacuc

SEQ ID NO: 878761 - RNA, 19 nt, Artificial Sequence
  Description of Artificial Sequence: Synthetic oligonucleotide
  Antisense strand to SEQ ID NO: 878760
gaguugacaagaaucucau

SEQ ID NO: 878762 - RNA, 19 nt, Artificial Sequence
  Description of Artificial Sequence: Synthetic oligonucleotide
  Sense strand starting at position 880 of SEQ ID NO: 588633
ugagcuuccucugccuaua

SEQ ID NO: 878763 - RNA, 19 nt, Artificial Sequence
  Description of Artificial Sequence: Synthetic oligonucleotide
  Antisense strand to SEQ ID NO: 878762
uauaggcagaggaagcuca

SEQ ID NO: 878764 - RNA, 19 nt, Artificial Sequence
  Description of Artificial Sequence: Synthetic oligonucleotide
  Sense strand starting at position 926 of SEQ ID NO: 588633
agaugccauccuugugauc

SEQ ID NO: 878765 - RNA, 19 nt, Artificial Sequence
  Description of Artificial Sequence: Synthetic oligonucleotide
  Antisense strand to SEQ ID NO: 878764
gaucacaaggauggcaucu

SEQ ID NO: 878766 - RNA, 19 nt, Artificial Sequence
  Description of Artificial Sequence: Synthetic oligonucleotide
  Sense strand starting at position 993 of SEQ ID NO: 588633
ccgcacaguccucaguuua

SEQ ID NO: 878767 - RNA, 19 nt, Artificial Sequence
  Description of Artificial Sequence: Synthetic oligonucleotide
  Antisense strand to SEQ ID NO: 878766
uaaacugaggacugugcgg

SEQ ID NO: 878768 - RNA, 19 nt, Artificial Sequence
  Description of Artificial Sequence: Synthetic oligonucleotide
  Sense strand starting at position 1035 of SEQ ID NO: 588633
aaggaagugacgugucuuu

SEQ ID NO: 878769 - RNA, 19 nt, Artificial Sequence
  Description of Artificial Sequence: Synthetic oligonucleotide
  Antisense strand to SEQ ID NO: 878768
aaagacacgucacuuccuu

SEQ ID NO: 878770 - RNA, 19 nt, Artificial Sequence
  Description of Artificial Sequence: Synthetic oligonucleotide
  Sense strand starting at position 1040 of SEQ ID NO: 588633
agugacgugucuuuaaaca

SEQ ID NO: 878771 - RNA, 19 nt, Artificial Sequence
  Description of Artificial Sequence: Synthetic oligonucleotide
  Antisense strand to SEQ ID NO: 878770
uguuuaaagacacgucacu

SEQ ID NO: 878772 - RNA, 19 nt, Artificial Sequence
  Description of Artificial Sequence: Synthetic oligonucleotide
  Sense strand starting at position 2077 of SEQ ID NO: 588633
gcgcgggcuccggauuuaa

SEQ ID NO: 878773 - RNA, 19 nt, Artificial Sequence
  Description of Artificial Sequence: Synthetic oligonucleotide
  Antisense strand to SEQ ID NO: 878772
uuaaauccggagcccgcgc

SEQ ID NO: 878774 - RNA, 19 nt, Artificial Sequence
  Description of Artificial Sequence: Synthetic oligonucleotide
  Sense strand starting at position 2148 of SEQ ID NO: 588633
agaaucuugcucugucaag

SEQ ID NO: 878775 - RNA, 19 nt, Artificial Sequence
  Description of Artificial Sequence: Synthetic oligonucleotide
  Antisense strand to SEQ ID NO: 878774
cuugacagagcaagauucu

SEQ ID NO: 878776 - RNA, 19 nt, Artificial Sequence
  Description of Artificial Sequence: Synthetic oligonucleotide
  Sense strand starting at position 2756 of SEQ ID NO: 588633
agccauugguccucaaauc

SEQ ID NO: 878777 - RNA, 19 nt, Artificial Sequence
  Description of Artificial Sequence: Synthetic oligonucleotide
  Antisense strand to SEQ ID NO: 878776
gauuugaggaccaauggcu

SEQ ID NO: 878778 - RNA, 19 nt, Artificial Sequence
  Description of Artificial Sequence: Synthetic oligonucleotide
  Sense strand starting at position 2949 of SEQ ID NO: 588633
uggagcuaucuccgaggca

SEQ ID NO: 878779 - RNA, 19 nt, Artificial Sequence
  Description of Artificial Sequence: Synthetic oligonucleotide
  Antisense strand to SEQ ID NO: 878778
ugccucggagauagcucca

SEQ ID NO: 878780 - RNA, 19 nt, Artificial Sequence
  Description of Artificial Sequence: Synthetic oligonucleotide
  Sense strand starting at position 2994 of SEQ ID NO: 588633
guggguagagccuguuaac

SEQ ID NO: 878781 - RNA, 19 nt, Artificial Sequence
  Description of Artificial Sequence: Synthetic oligonucleotide
  Antisense strand to SEQ ID NO: 878780
guuaacaggcucuacccac

SEQ ID NO: 878782 - RNA, 19 nt, Artificial Sequence
  Description of Artificial Sequence: Synthetic oligonucleotide
  Sense strand starting at position 3044 of SEQ ID NO: 588633
gaaguugagcaacguaaua

SEQ ID NO: 878783 - RNA, 19 nt, Artificial Sequence
  Description of Artificial Sequence: Synthetic oligonucleotide
  Antisense strand to SEQ ID NO: 878782
uauuacguugcucaacuuc

SEQ ID NO: 878784 - RNA, 19 nt, Artificial Sequence
  Description of Artificial Sequence: Synthetic oligonucleotide
  Sense strand starting at position 3046 of SEQ ID NO: 588633
aguugagcaacguaauaau

SEQ ID NO: 878785 - RNA, 19 nt, Artificial Sequence
  Description of Artificial Sequence: Synthetic oligonucleotide
  Antisense strand to SEQ ID NO: 878784
auuauuacguugcucaacu

SEQ ID NO: 878786 - RNA, 19 nt, Artificial Sequence
  Description of Artificial Sequence: Synthetic oligonucleotide
  Sense strand starting at position 3077 of SEQ ID NO: 588633
gaugcucugagaggguuaa

SEQ ID NO: 878787 - RNA, 19 nt, Artificial Sequence
  Description of Artificial Sequence: Synthetic oligonucleotide
  Antisense strand to SEQ ID NO: 878786
uuaacccucucagagcauc

SEQ ID NO: 878788 - RNA, 19 nt, Artificial Sequence
  Description of Artificial Sequence: Synthetic oligonucleotide
  Sense strand starting at position 3078 of SEQ ID NO: 588633
augcucugagaggguuaaa

SEQ ID NO: 878789 - RNA, 19 nt, Artificial Sequence
  Description of Artificial Sequence: Synthetic oligonucleotide
  Antisense strand to SEQ ID NO: 878788
uuuaacccucucagagcau

SEQ ID NO: 878790 - RNA, 19 nt, Artificial Sequence
  Description of Artificial Sequence: Synthetic oligonucleotide
  Sense strand starting at position 3087 of SEQ ID NO: 588633
gaggguuaaacuuguggga

SEQ ID NO: 878791 - RNA, 19 nt, Artificial Sequence
  Description of Artificial Sequence: Synthetic oligonucleotide
  Antisense strand to SEQ ID NO: 878790
ucccacaaguuuaacccuc

SEQ ID NO: 878792 - RNA, 19 nt, Artificial Sequence
  Description of Artificial Sequence: Synthetic oligonucleotide
  Sense strand starting at position 3091 of SEQ ID NO: 588633
guuaaacuugugggacauu

SEQ ID NO: 878793 - RNA, 19 nt, Artificial Sequence
  Description of Artificial Sequence: Synthetic oligonucleotide
  Antisense strand to SEQ ID NO: 878792
aaugucccacaaguuuaac

SEQ ID NO: 878794 - RNA, 19 nt, Artificial Sequence
  Description of Artificial Sequence: Synthetic oligonucleotide
  Sense strand starting at position 3101 of SEQ ID NO: 588633
ugggacauugcacgucaga

SEQ ID NO: 878795 - RNA, 19 nt, Artificial Sequence
  Description of Artificial Sequence: Synthetic oligonucleotide
  Antisense strand to SEQ ID NO: 878794
ucugacgugcaauguccca

SEQ ID NO: 878796 - RNA, 19 nt, Artificial Sequence
  Description of Artificial Sequence: Synthetic oligonucleotide
  Sense strand starting at position 3151 of SEQ ID NO: 588633
ggaaauggaagcuguuaua

SEQ ID NO: 878797 - RNA, 19 nt, Artificial Sequence
  Description of Artificial Sequence: Synthetic oligonucleotide
  Antisense strand to SEQ ID NO: 878796
uauaacagcuuccauuucc

SEQ ID NO: 878798 - RNA, 19 nt, Artificial Sequence
  Description of Artificial Sequence: Synthetic oligonucleotide
  Sense strand starting at position 3561 of SEQ ID NO: 588633
cacagaaggugcuuaaagu

SEQ ID NO: 878799 - RNA, 19 nt, Artificial Sequence
  Description of Artificial Sequence: Synthetic oligonucleotide
  Antisense strand to SEQ ID NO: 878798
acuuuaagcaccuucugug

SEQ ID NO: 878800 - RNA, 19 nt, Artificial Sequence
  Description of Artificial Sequence: Synthetic oligonucleotide
  Sense strand starting at position 3574 of SEQ ID NO: 588633
uaaaguguguuugcucuaa

SEQ ID NO: 878801 - RNA, 19 nt, Artificial Sequence
  Description of Artificial Sequence: Synthetic oligonucleotide
  Antisense strand to SEQ ID NO: 878800
uuagagcaaacacacuuua

SEQ ID NO: 878802 - RNA, 19 nt, Artificial Sequence
  Description of Artificial Sequence: Synthetic oligonucleotide
  Sense strand starting at position 3576 of SEQ ID NO: 588633
aaguguguuugcucuaaau

SEQ ID NO: 878803 - RNA, 19 nt, Artificial Sequence
  Description of Artificial Sequence: Synthetic oligonucleotide
  Antisense strand to SEQ ID NO: 878802
auuuagagcaaacacacuu

SEQ ID NO: 878804 - RNA, 19 nt, Artificial Sequence
  Description of Artificial Sequence: Synthetic oligonucleotide
  Sense strand starting at position 3585 of SEQ ID NO: 588633
ugcucuaaauguguugaaa

SEQ ID NO: 878805 - RNA, 19 nt, Artificial Sequence
  Description of Artificial Sequence: Synthetic oligonucleotide
  Antisense strand to SEQ ID NO: 878804
uuucaacacauuuagagca

SEQ ID NO: 878806 - RNA, 19 nt, Artificial Sequence
  Description of Artificial Sequence: Synthetic oligonucleotide
  Sense strand starting at position 3588 of SEQ ID NO: 588633
ucuaaauguguugaaagcu

SEQ ID NO: 878807 - RNA, 19 nt, Artificial Sequence
  Description of Artificial Sequence: Synthetic oligonucleotide
  Antisense strand to SEQ ID NO: 878806
agcuuucaacacauuuaga

SEQ ID NO: 878808 - RNA, 19 nt, Artificial Sequence
  Description of Artificial Sequence: Synthetic oligonucleotide
  Sense strand starting at position 3594 of SEQ ID NO: 588633
uguguugaaagcuacggua

SEQ ID NO: 878809 - RNA, 19 nt, Artificial Sequence
  Description of Artificial Sequence: Synthetic oligonucleotide
  Antisense strand to SEQ ID NO: 878808
uaccguagcuuucaacaca

SEQ ID NO: 878810 - RNA, 19 nt, Artificial Sequence
  Description of Artificial Sequence: Synthetic oligonucleotide
  Sense strand starting at position 3596 of SEQ ID NO: 588633
uguugaaagcuacgguaga

SEQ ID NO: 878811 - RNA, 19 nt, Artificial Sequence
  Description of Artificial Sequence: Synthetic oligonucleotide
  Antisense strand to SEQ ID NO: 878810
ucuaccguagcuuucaaca

SEQ ID NO: 878812 - RNA, 19 nt, Artificial Sequence
  Description of Artificial Sequence: Synthetic oligonucleotide
  Sense strand starting at position 3678 of SEQ ID NO: 588633
uggcauacccucuagacua

SEQ ID NO: 878813 - RNA, 19 nt, Artificial Sequence
  Description of Artificial Sequence: Synthetic oligonucleotide
  Antisense strand to SEQ ID NO: 878812
uagucuagaggguaugcca

SEQ ID NO: 878814 - RNA, 19 nt, Artificial Sequence
  Description of Artificial Sequence: Synthetic oligonucleotide
  Sense strand starting at position 3686 of SEQ ID NO: 588633
ccucuagacuauucuaggu

SEQ ID NO: 878815 - RNA, 19 nt, Artificial Sequence
  Description of Artificial Sequence: Synthetic oligonucleotide
  Antisense strand to SEQ ID NO: 878814
accuagaauagucuagagg

SEQ ID NO: 878816 - RNA, 19 nt, Artificial Sequence
  Description of Artificial Sequence: Synthetic oligonucleotide
  Sense strand starting at position 3691 of SEQ ID NO: 588633
agacuauucuaggucacaa

SEQ ID NO: 878817 - RNA, 19 nt, Artificial Sequence
  Description of Artificial Sequence: Synthetic oligonucleotide
  Antisense strand to SEQ ID NO: 878816
uugugaccuagaauagucu

SEQ ID NO: 878818 - RNA, 19 nt, Artificial Sequence
  Description of Artificial Sequence: Synthetic oligonucleotide
  Sense strand starting at position 3768 of SEQ ID NO: 588633
gggauugauccugggcaau

SEQ ID NO: 878819 - RNA, 19 nt, Artificial Sequence
  Description of Artificial Sequence: Synthetic oligonucleotide
  Antisense strand to SEQ ID NO: 878818
auugcccaggaucaauccc

SEQ ID NO: 878820 - RNA, 19 nt, Artificial Sequence
  Description of Artificial Sequence: Synthetic oligonucleotide
  Sense strand starting at position 3867 of SEQ ID NO: 588633
cugucuuauuuccugucaa

SEQ ID NO: 878821 - RNA, 19 nt, Artificial Sequence
  Description of Artificial Sequence: Synthetic oligonucleotide
  Antisense strand to SEQ ID NO: 878820
uugacaggaaauaagacag

SEQ ID NO: 878822 - RNA, 19 nt, Artificial Sequence
  Description of Artificial Sequence: Synthetic oligonucleotide
  Sense strand starting at position 63 of SEQ ID NO: 588634
acgcaaauucugggaacaa

SEQ ID NO: 878823 - RNA, 19 nt, Artificial Sequence
  Description of Artificial Sequence: Synthetic oligonucleotide
  Antisense strand to SEQ ID NO: 878822
uuguucccagaauuugcgu

SEQ ID NO: 878824 - RNA, 19 nt, Artificial Sequence
  Description of Artificial Sequence: Synthetic oligonucleotide
  Sense strand starting at position 94 of SEQ ID NO: 588634
acauccuggccgggaaaua

SEQ ID NO: 878825 - RNA, 19 nt, Artificial Sequence
  Description of Artificial Sequence: Synthetic oligonucleotide
  Antisense strand to SEQ ID NO: 878824
uauuucccggccaggaugu

SEQ ID NO: 878826 - RNA, 19 nt, Artificial Sequence
  Description of Artificial Sequence: Synthetic oligonucleotide
  Sense strand starting at position 227 of SEQ ID NO: 588634
ucccuaagagucugaggga

SEQ ID NO: 878827 - RNA, 19 nt, Artificial Sequence
  Description of Artificial Sequence: Synthetic oligonucleotide
  Antisense strand to SEQ ID NO: 878826
ucccucagacucuuaggga

SEQ ID NO: 878828 - RNA, 19 nt, Artificial Sequence
  Description of Artificial Sequence: Synthetic oligonucleotide
  Sense strand starting at position 228 of SEQ ID NO: 588634
cccuaagagucugagggaa

SEQ ID NO: 878829 - RNA, 19 nt, Artificial Sequence
  Description of Artificial Sequence: Synthetic oligonucleotide
  Antisense strand to SEQ ID NO: 878828
uucccucagacucuuaggg

SEQ ID NO: 878830 - RNA, 19 nt, Artificial Sequence
  Description of Artificial Sequence: Synthetic oligonucleotide
  Sense strand starting at position 585 of SEQ ID NO: 588634
ucacguaagucucuacgga

SEQ ID NO: 878831 - RNA, 19 nt, Artificial Sequence
  Description of Artificial Sequence: Synthetic oligonucleotide
  Antisense strand to SEQ ID NO: 878830
uccguagagacuuacguga

SEQ ID NO: 878832 - RNA, 19 nt, Artificial Sequence
  Description of Artificial Sequence: Synthetic oligonucleotide
  Sense strand starting at position 586 of SEQ ID NO: 588634
cacguaagucucuacggaa

SEQ ID NO: 878833 - RNA, 19 nt, Artificial Sequence
  Description of Artificial Sequence: Synthetic oligonucleotide
  Antisense strand to SEQ ID NO: 878832
uuccguagagacuuacgug

SEQ ID NO: 878834 - RNA, 19 nt, Artificial Sequence
  Description of Artificial Sequence: Synthetic oligonucleotide
  Sense strand starting at position 699 of SEQ ID NO: 588634
acggcagagugcucuaaga

SEQ ID NO: 878835 - RNA, 19 nt, Artificial Sequence
  Description of Artificial Sequence: Synthetic oligonucleotide
  Antisense strand to SEQ ID NO: 878834
ucuuagagcacucugccgu

SEQ ID NO: 878836 - RNA, 19 nt, Artificial Sequence
  Description of Artificial Sequence: Synthetic oligonucleotide
  Sense strand starting at position 701 of SEQ ID NO: 588634
ggcagagugcucuaagaaa

SEQ ID NO: 878837 - RNA, 19 nt, Artificial Sequence
  Description of Artificial Sequence: Synthetic oligonucleotide
  Antisense strand to SEQ ID NO: 878836
uuucuuagagcacucugcc

SEQ ID NO: 878838 - RNA, 19 nt, Artificial Sequence
  Description of Artificial Sequence: Synthetic oligonucleotide
  Sense strand starting at position 776 of SEQ ID NO: 588634
uaacaaaggcucugaugga

SEQ ID NO: 878839 - RNA, 19 nt, Artificial Sequence
  Description of Artificial Sequence: Synthetic oligonucleotide
  Antisense strand to SEQ ID NO: 878838
uccaucagagccuuuguua

SEQ ID NO: 878840 - RNA, 19 nt, Artificial Sequence
  Description of Artificial Sequence: Synthetic oligonucleotide
  Sense strand starting at position 912 of SEQ ID NO: 588634
acagaaaggcugugauuaa

SEQ ID NO: 878841 - RNA, 19 nt, Artificial Sequence
  Description of Artificial Sequence: Synthetic oligonucleotide
  Antisense strand to SEQ ID NO: 878840
uuaaucacagccuuucugu

SEQ ID NO: 878842 - RNA, 19 nt, Artificial Sequence
  Description of Artificial Sequence: Synthetic oligonucleotide
  Sense strand starting at position 971 of SEQ ID NO: 588634
ggcacauauucucucuuga

SEQ ID NO: 878843 - RNA, 19 nt, Artificial Sequence
  Description of Artificial Sequence: Synthetic oligonucleotide
  Antisense strand to SEQ ID NO: 878842
ucaagagagaauaugugcc

SEQ ID NO: 878844 - RNA, 19 nt, Artificial Sequence
  Description of Artificial Sequence: Synthetic oligonucleotide
  Sense strand starting at position 978 of SEQ ID NO: 588634
auucucucuugagcuuaga

SEQ ID NO: 878845 - RNA, 19 nt, Artificial Sequence
  Description of Artificial Sequence: Synthetic oligonucleotide
  Antisense strand to SEQ ID NO: 878844
ucuaagcucaagagagaau

SEQ ID NO: 878846 - RNA, 19 nt, Artificial Sequence
  Description of Artificial Sequence: Synthetic oligonucleotide
  Sense strand starting at position 981 of SEQ ID NO: 588634
cucucuugagcuuagaaau

SEQ ID NO: 878847 - RNA, 19 nt, Artificial Sequence
  Description of Artificial Sequence: Synthetic oligonucleotide
  Antisense strand to SEQ ID NO: 878846
auuucuaagcucaagagag

SEQ ID NO: 878848 - RNA, 19 nt, Artificial Sequence
  Description of Artificial Sequence: Synthetic oligonucleotide
  Sense strand starting at position 1009 of SEQ ID NO: 588634
augagauucuugucaacuc

SEQ ID NO: 878849 - RNA, 19 nt, Artificial Sequence
  Description of Artificial Sequence: Synthetic oligonucleotide
  Antisense strand to SEQ ID NO: 878848
gaguugacaagaaucucau

SEQ ID NO: 878850 - RNA, 19 nt, Artificial Sequence
  Description of Artificial Sequence: Synthetic oligonucleotide
  Sense strand starting at position 1171 of SEQ ID NO: 588634
ugagcuuccucugccuaua

SEQ ID NO: 878851 - RNA, 19 nt, Artificial Sequence
  Description of Artificial Sequence: Synthetic oligonucleotide
  Antisense strand to SEQ ID NO: 878850
uauaggcagaggaagcuca

SEQ ID NO: 878852 - RNA, 19 nt, Artificial Sequence
  Description of Artificial Sequence: Synthetic oligonucleotide
  Sense strand starting at position 1217 of SEQ ID NO: 588634
agaugccauccuugugauc

SEQ ID NO: 878853 - RNA, 19 nt, Artificial Sequence
  Description of Artificial Sequence: Synthetic oligonucleotide
  Antisense strand to SEQ ID NO: 878852
gaucacaaggauggcaucu

SEQ ID NO: 878854 - RNA, 19 nt, Artificial Sequence
  Description of Artificial Sequence: Synthetic oligonucleotide
  Sense strand starting at position 1284 of SEQ ID NO: 588634
ccgcacaguccucaguuua

SEQ ID NO: 878855 - RNA, 19 nt, Artificial Sequence
  Description of Artificial Sequence: Synthetic oligonucleotide
  Antisense strand to SEQ ID NO: 878854
uaaacugaggacugugcgg

SEQ ID NO: 878856 - RNA, 19 nt, Artificial Sequence
  Description of Artificial Sequence: Synthetic oligonucleotide
  Sense strand starting at position 1326 of SEQ ID NO: 588634
aaggaagugacgugucuuu

SEQ ID NO: 878857 - RNA, 19 nt, Artificial Sequence
  Description of Artificial Sequence: Synthetic oligonucleotide
  Antisense strand to SEQ ID NO: 878856
aaagacacgucacuuccuu

SEQ ID NO: 878858 - RNA, 19 nt, Artificial Sequence
  Description of Artificial Sequence: Synthetic oligonucleotide
  Sense strand starting at position 1331 of SEQ ID NO: 588634
agugacgugucuuuaaaca

SEQ ID NO: 878859 - RNA, 19 nt, Artificial Sequence
  Description of Artificial Sequence: Synthetic oligonucleotide
  Antisense strand to SEQ ID NO: 878858
uguuuaaagacacgucacu

SEQ ID NO: 878860 - RNA, 19 nt, Artificial Sequence
  Description of Artificial Sequence: Synthetic oligonucleotide
  Sense strand starting at position 2368 of SEQ ID NO: 588634
gcgcgggcuccggauuuaa

SEQ ID NO: 878861 - RNA, 19 nt, Artificial Sequence
  Description of Artificial Sequence: Synthetic oligonucleotide
  Antisense strand to SEQ ID NO: 878860
uuaaauccggagcccgcgc

SEQ ID NO: 878862 - RNA, 19 nt, Artificial Sequence
  Description of Artificial Sequence: Synthetic oligonucleotide
  Sense strand starting at position 2439 of SEQ ID NO: 588634
agaaucuugcucugucaag

SEQ ID NO: 878863 - RNA, 19 nt, Artificial Sequence
  Description of Artificial Sequence: Synthetic oligonucleotide
  Antisense strand to SEQ ID NO: 878862
cuugacagagcaagauucu

SEQ ID NO: 878864 - RNA, 19 nt, Artificial Sequence
  Description of Artificial Sequence: Synthetic oligonucleotide
  Sense strand starting at position 3047 of SEQ ID NO: 588634
agccauugguccucaaauc

SEQ ID NO: 878865 - RNA, 19 nt, Artificial Sequence
  Description of Artificial Sequence: Synthetic oligonucleotide
  Antisense strand to SEQ ID NO: 878864
gauuugaggaccaauggcu

SEQ ID NO: 878866 - RNA, 19 nt, Artificial Sequence
  Description of Artificial Sequence: Synthetic oligonucleotide
  Sense strand starting at position 3240 of SEQ ID NO: 588634
uggagcuaucuccgaggca

SEQ ID NO: 878867 - RNA, 19 nt, Artificial Sequence
  Description of Artificial Sequence: Synthetic oligonucleotide
  Antisense strand to SEQ ID NO: 878866
ugccucggagauagcucca

SEQ ID NO: 878868 - RNA, 19 nt, Artificial Sequence
  Description of Artificial Sequence: Synthetic oligonucleotide
  Sense strand starting at position 3285 of SEQ ID NO: 588634
guggguagagccuguuaac

SEQ ID NO: 878869 - RNA, 19 nt, Artificial Sequence
  Description of Artificial Sequence: Synthetic oligonucleotide
  Antisense strand to SEQ ID NO: 878868
guuaacaggcucuacccac

SEQ ID NO: 878870 - RNA, 19 nt, Artificial Sequence
  Description of Artificial Sequence: Synthetic oligonucleotide
  Sense strand starting at position 3335 of SEQ ID NO: 588634
gaaguugagcaacguaaua

SEQ ID NO: 878871 - RNA, 19 nt, Artificial Sequence
  Description of Artificial Sequence: Synthetic oligonucleotide
  Antisense strand to SEQ ID NO: 878870
uauuacguugcucaacuuc

SEQ ID NO: 878872 - RNA, 19 nt, Artificial Sequence
  Description of Artificial Sequence: Synthetic oligonucleotide
  Sense strand starting at position 3337 of SEQ ID NO: 588634
aguugagcaacguaauaau

SEQ ID NO: 878873 - RNA, 19 nt, Artificial Sequence
  Description of Artificial Sequence: Synthetic oligonucleotide
  Antisense strand to SEQ ID NO: 878872
auuauuacguugcucaacu

SEQ ID NO: 878874 - RNA, 19 nt, Artificial Sequence
  Description of Artificial Sequence: Synthetic oligonucleotide
  Sense strand starting at position 3368 of SEQ ID NO: 588634
gaugcucugagaggguuaa

SEQ ID NO: 878875 - RNA, 19 nt, Artificial Sequence
  Description of Artificial Sequence: Synthetic oligonucleotide
  Antisense strand to SEQ ID NO: 878874
uuaacccucucagagcauc

SEQ ID NO: 878876 - RNA, 19 nt, Artificial Sequence
  Description of Artificial Sequence: Synthetic oligonucleotide
  Sense strand starting at position 3369 of SEQ ID NO: 588634
augcucugagaggguuaaa

SEQ ID NO: 878877 - RNA, 19 nt, Artificial Sequence
  Description of Artificial Sequence: Synthetic oligonucleotide
  Antisense strand to SEQ ID NO: 878876
uuuaacccucucagagcau

SEQ ID NO: 878878 - RNA, 19 nt, Artificial Sequence
  Description of Artificial Sequence: Synthetic oligonucleotide
  Sense strand starting at position 3378 of SEQ ID NO: 588634
gaggguuaaacuuguggga

SEQ ID NO: 878879 - RNA, 19 nt, Artificial Sequence
  Description of Artificial Sequence: Synthetic oligonucleotide
  Antisense strand to SEQ ID NO: 878878
ucccacaaguuuaacccuc

SEQ ID NO: 878880 - RNA, 19 nt, Artificial Sequence
  Description of Artificial Sequence: Synthetic oligonucleotide
  Sense strand starting at position 3382 of SEQ ID NO: 588634
guuaaacuugugggacauu

SEQ ID NO: 878881 - RNA, 19 nt, Artificial Sequence
  Description of Artificial Sequence: Synthetic oligonucleotide
  Antisense strand to SEQ ID NO: 878880
aaugucccacaaguuuaac

SEQ ID NO: 878882 - RNA, 19 nt, Artificial Sequence
  Description of Artificial Sequence: Synthetic oligonucleotide
  Sense strand starting at position 3392 of SEQ ID NO: 588634
ugggacauugcacgucaga

SEQ ID NO: 878883 - RNA, 19 nt, Artificial Sequence
  Description of Artificial Sequence: Synthetic oligonucleotide
  Antisense strand to SEQ ID NO: 878882
ucugacgugcaauguccca

SEQ ID NO: 878884 - RNA, 19 nt, Artificial Sequence
  Description of Artificial Sequence: Synthetic oligonucleotide
  Sense strand starting at position 3442 of SEQ ID NO: 588634
ggaaauggaagcuguuaua

SEQ ID NO: 878885 - RNA, 19 nt, Artificial Sequence
  Description of Artificial Sequence: Synthetic oligonucleotide
  Antisense strand to SEQ ID NO: 878884
uauaacagcuuccauuucc

SEQ ID NO: 878886 - RNA, 19 nt, Artificial Sequence
  Description of Artificial Sequence: Synthetic oligonucleotide
  Sense strand starting at position 3852 of SEQ ID NO: 588634
cacagaaggugcuuaaagu

SEQ ID NO: 878887 - RNA, 19 nt, Artificial Sequence
  Description of Artificial Sequence: Synthetic oligonucleotide
  Antisense strand to SEQ ID NO: 878886
acuuuaagcaccuucugug

SEQ ID NO: 878888 - RNA, 19 nt, Artificial Sequence
  Description of Artificial Sequence: Synthetic oligonucleotide
  Sense strand starting at position 3876 of SEQ ID NO: 588634
ugcucuaaauguguugaaa

SEQ ID NO: 878889 - RNA, 19 nt, Artificial Sequence
  Description of Artificial Sequence: Synthetic oligonucleotide
  Antisense strand to SEQ ID NO: 878888
uuucaacacauuuagagca

SEQ ID NO: 878890 - RNA, 19 nt, Artificial Sequence
  Description of Artificial Sequence: Synthetic oligonucleotide
  Sense strand starting at position 3879 of SEQ ID NO: 588634
ucuaaauguguugaaagcu

SEQ ID NO: 878891 - RNA, 19 nt, Artificial Sequence
  Description of Artificial Sequence: Synthetic oligonucleotide
  Antisense strand to SEQ ID NO: 878890
agcuuucaacacauuuaga

SEQ ID NO: 878892 - RNA, 19 nt, Artificial Sequence
  Description of Artificial Sequence: Synthetic oligonucleotide
  Sense strand starting at position 3885 of SEQ ID NO: 588634
uguguugaaagcuacggua

SEQ ID NO: 878893 - RNA, 19 nt, Artificial Sequence
  Description of Artificial Sequence: Synthetic oligonucleotide
  Antisense strand to SEQ ID NO: 878892
uaccguagcuuucaacaca

SEQ ID NO: 878894 - RNA, 19 nt, Artificial Sequence
  Description of Artificial Sequence: Synthetic oligonucleotide
  Sense strand starting at position 3887 of SEQ ID NO: 588634
uguugaaagcuacgguaga

SEQ ID NO: 878895 - RNA, 19 nt, Artificial Sequence
  Description of Artificial Sequence: Synthetic oligonucleotide
  Antisense strand to SEQ ID NO: 878894
ucuaccguagcuuucaaca

SEQ ID NO: 878896 - RNA, 19 nt, Artificial Sequence
  Description of Artificial Sequence: Synthetic oligonucleotide
  Sense strand starting at position 3969 of SEQ ID NO: 588634
uggcauacccucuagacua

SEQ ID NO: 878897 - RNA, 19 nt, Artificial Sequence
  Description of Artificial Sequence: Synthetic oligonucleotide
  Antisense strand to SEQ ID NO: 878896
uagucuagaggguaugcca

SEQ ID NO: 878898 - RNA, 19 nt, Artificial Sequence
  Description of Artificial Sequence: Synthetic oligonucleotide
  Sense strand starting at position 3977 of SEQ ID NO: 588634
ccucuagacuauucuaggu

SEQ ID NO: 878899 - RNA, 19 nt, Artificial Sequence
  Description of Artificial Sequence: Synthetic oligonucleotide
  Antisense strand to SEQ ID NO: 878898
accuagaauagucuagagg

SEQ ID NO: 878900 - RNA, 19 nt, Artificial Sequence
  Description of Artificial Sequence: Synthetic oligonucleotide
  Sense strand starting at position 3982 of SEQ ID NO: 588634
agacuauucuaggucacaa

SEQ ID NO: 878901 - RNA, 19 nt, Artificial Sequence
  Description of Artificial Sequence: Synthetic oligonucleotide
  Antisense strand to SEQ ID NO: 878900
uugugaccuagaauagucu

SEQ ID NO: 878902 - RNA, 19 nt, Artificial Sequence
  Description of Artificial Sequence: Synthetic oligonucleotide
  Sense strand starting at position 90 of SEQ ID NO: 588635
ggcugauagccaggguauu

SEQ ID NO: 878903 - RNA, 19 nt, Artificial Sequence
  Description of Artificial Sequence: Synthetic oligonucleotide
  Antisense strand to SEQ ID NO: 878902
aauacccuggcuaucagcc

SEQ ID NO: 878904 - RNA, 19 nt, Artificial Sequence
  Description of Artificial Sequence: Synthetic oligonucleotide
  Sense strand starting at position 91 of SEQ ID NO: 588635
gcugauagccaggguauua

SEQ ID NO: 878905 - RNA, 19 nt, Artificial Sequence
  Description of Artificial Sequence: Synthetic oligonucleotide
  Antisense strand to SEQ ID NO: 878904
uaauacccuggcuaucagc

SEQ ID NO: 878906 - RNA, 19 nt, Artificial Sequence
  Description of Artificial Sequence: Synthetic oligonucleotide
  Sense strand starting at position 200 of SEQ ID NO: 588635
gcagguuccucuuggaguu

SEQ ID NO: 878907 - RNA, 19 nt, Artificial Sequence
  Description of Artificial Sequence: Synthetic oligonucleotide
  Antisense strand to SEQ ID NO: 878906
aacuccaagaggaaccugc

SEQ ID NO: 878908 - RNA, 19 nt, Artificial Sequence
  Description of Artificial Sequence: Synthetic oligonucleotide
  Sense strand starting at position 374 of SEQ ID NO: 588635
ggugaaaucugcuuucagg

SEQ ID NO: 878909 - RNA, 19 nt, Artificial Sequence
  Description of Artificial Sequence: Synthetic oligonucleotide
  Antisense strand to SEQ ID NO: 878908
ccugaaagcagauuucacc

SEQ ID NO: 878910 - RNA, 19 nt, Artificial Sequence
  Description of Artificial Sequence: Synthetic oligonucleotide
  Sense strand starting at position 581 of SEQ ID NO: 588635
gcgggagcccuggaaaguu

SEQ ID NO: 878911 - RNA, 19 nt, Artificial Sequence
  Description of Artificial Sequence: Synthetic oligonucleotide
  Antisense strand to SEQ ID NO: 878910
aacuuuccagggcucccgc

SEQ ID NO: 878912 - RNA, 19 nt, Artificial Sequence
  Description of Artificial Sequence: Synthetic oligonucleotide
  Sense strand starting at position 785 of SEQ ID NO: 588635
ggcagcaauuaauaauuaa

SEQ ID NO: 878913 - RNA, 19 nt, Artificial Sequence
  Description of Artificial Sequence: Synthetic oligonucleotide
  Antisense strand to SEQ ID NO: 878912
uuaauuauuaauugcugcc

SEQ ID NO: 878914 - RNA, 19 nt, Artificial Sequence
  Description of Artificial Sequence: Synthetic oligonucleotide
  Sense strand starting at position 848 of SEQ ID NO: 588635
ggcacugccucucuuaauu

SEQ ID NO: 878915 - RNA, 19 nt, Artificial Sequence
  Description of Artificial Sequence: Synthetic oligonucleotide
  Antisense strand to SEQ ID NO: 878914
aauuaagagaggcagugcc

SEQ ID NO: 878916 - RNA, 19 nt, Artificial Sequence
  Description of Artificial Sequence: Synthetic oligonucleotide
  Sense strand starting at position 1134 of SEQ ID NO: 588635
ggagaaguuuccagccgga

SEQ ID NO: 878917 - RNA, 19 nt, Artificial Sequence
  Description of Artificial Sequence: Synthetic oligonucleotide
  Antisense strand to SEQ ID NO: 878916
uccggcuggaaacuucucc

SEQ ID NO: 878918 - RNA, 19 nt, Artificial Sequence
  Description of Artificial Sequence: Synthetic oligonucleotide
  Sense strand starting at position 1157 of SEQ ID NO: 588635
ccgggaguuucucugugca

SEQ ID NO: 878919 - RNA, 19 nt, Artificial Sequence
  Description of Artificial Sequence: Synthetic oligonucleotide
  Antisense strand to SEQ ID NO: 878918
ugcacagagaaacucccgg

SEQ ID NO: 878920 - RNA, 19 nt, Artificial Sequence
  Description of Artificial Sequence: Synthetic oligonucleotide
  Sense strand starting at position 1159 of SEQ ID NO: 588635
gggaguuucucugugcaac

SEQ ID NO: 878921 - RNA, 19 nt, Artificial Sequence
  Description of Artificial Sequence: Synthetic oligonucleotide
  Antisense strand to SEQ ID NO: 878920
guugcacagagaaacuccc

SEQ ID NO: 878922 - RNA, 19 nt, Artificial Sequence
  Description of Artificial Sequence: Synthetic oligonucleotide
  Sense strand starting at position 1160 of SEQ ID NO: 588635
ggaguuucucugugcaacu

SEQ ID NO: 878923 - RNA, 19 nt, Artificial Sequence
  Description of Artificial Sequence: Synthetic oligonucleotide
  Antisense strand to SEQ ID NO: 878922
aguugcacagagaaacucc

SEQ ID NO: 878924 - RNA, 19 nt, Artificial Sequence
  Description of Artificial Sequence: Synthetic oligonucleotide
  Sense strand starting at position 1304 of SEQ ID NO: 588635
cgagcauccuugcaacauc

SEQ ID NO: 878925 - RNA, 19 nt, Artificial Sequence
  Description of Artificial Sequence: Synthetic oligonucleotide
  Antisense strand to SEQ ID NO: 878924
gauguugcaaggaugcucg

SEQ ID NO: 878926 - RNA, 19 nt, Artificial Sequence
  Description of Artificial Sequence: Synthetic oligonucleotide
  Sense strand starting at position 1472 of SEQ ID NO: 588635
uuaagaugcugcuaagaac

SEQ ID NO: 878927 - RNA, 19 nt, Artificial Sequence
  Description of Artificial Sequence: Synthetic oligonucleotide
  Antisense strand to SEQ ID NO: 878926
guucuuagcagcaucuuaa

SEQ ID NO: 878928 - RNA, 19 nt, Artificial Sequence
  Description of Artificial Sequence: Synthetic oligonucleotide
  Sense strand starting at position 2189 of SEQ ID NO: 588635
caaguuaaugccgaggcua

SEQ ID NO: 878929 - RNA, 19 nt, Artificial Sequence
  Description of Artificial Sequence: Synthetic oligonucleotide
  Antisense strand to SEQ ID NO: 878928
uagccucggcauuaacuug

SEQ ID NO: 878930 - RNA, 19 nt, Artificial Sequence
  Description of Artificial Sequence: Synthetic oligonucleotide
  Sense strand starting at position 2191 of SEQ ID NO: 588635
aguuaaugccgaggcuaaa

SEQ ID NO: 878931 - RNA, 19 nt, Artificial Sequence
  Description of Artificial Sequence: Synthetic oligonucleotide
  Antisense strand to SEQ ID NO: 878930
uuuagccucggcauuaacu

SEQ ID NO: 878932 - RNA, 19 nt, Artificial Sequence
  Description of Artificial Sequence: Synthetic oligonucleotide
  Sense strand starting at position 2313 of SEQ ID NO: 588635
gagcaacggucuucuuaaa

SEQ ID NO: 878933 - RNA, 19 nt, Artificial Sequence
  Description of Artificial Sequence: Synthetic oligonucleotide
  Antisense strand to SEQ ID NO: 878932
uuuaagaagaccguugcuc

SEQ ID NO: 878934 - RNA, 19 nt, Artificial Sequence
  Description of Artificial Sequence: Synthetic oligonucleotide
  Sense strand starting at position 2775 of SEQ ID NO: 588635
gagcgaucugagcgcacaa

SEQ ID NO: 878935 - RNA, 19 nt, Artificial Sequence
  Description of Artificial Sequence: Synthetic oligonucleotide
  Antisense strand to SEQ ID NO: 878934
uugugcgcucagaucgcuc

SEQ ID NO: 878936 - RNA, 19 nt, Artificial Sequence
  Description of Artificial Sequence: Synthetic oligonucleotide
  Sense strand starting at position 3068 of SEQ ID NO: 588635
cagggcuucugggagaguu

SEQ ID NO: 878937 - RNA, 19 nt, Artificial Sequence
  Description of Artificial Sequence: Synthetic oligonucleotide
  Antisense strand to SEQ ID NO: 878936
aacucucccagaagcccug

SEQ ID NO: 878938 - RNA, 19 nt, Artificial Sequence
  Description of Artificial Sequence: Synthetic oligonucleotide
  Sense strand starting at position 3076 of SEQ ID NO: 588635
cugggagaguuuccacauc

SEQ ID NO: 878939 - RNA, 19 nt, Artificial Sequence
  Description of Artificial Sequence: Synthetic oligonucleotide
  Antisense strand to SEQ ID NO: 878938
gauguggaaacucucccag

SEQ ID NO: 878940 - RNA, 19 nt, Artificial Sequence
  Description of Artificial Sequence: Synthetic oligonucleotide
  Sense strand starting at position 3168 of SEQ ID NO: 588635
cacugucauuuggaugcau

SEQ ID NO: 878941 - RNA, 19 nt, Artificial Sequence
  Description of Artificial Sequence: Synthetic oligonucleotide
  Antisense strand to SEQ ID NO: 878940
augcauccaaaugacagug

SEQ ID NO: 878942 - RNA, 19 nt, Artificial Sequence
  Description of Artificial Sequence: Synthetic oligonucleotide
  Sense strand starting at position 3337 of SEQ ID NO: 588635
guucucagcugcccugaaa

SEQ ID NO: 878943 - RNA, 19 nt, Artificial Sequence
  Description of Artificial Sequence: Synthetic oligonucleotide
  Antisense strand to SEQ ID NO: 878942
uuucagggcagcugagaac

SEQ ID NO: 878944 - RNA, 19 nt, Artificial Sequence
  Description of Artificial Sequence: Synthetic oligonucleotide
  Sense strand starting at position 3366 of SEQ ID NO: 588635
gaguuauacugcugaauaa

SEQ ID NO: 878945 - RNA, 19 nt, Artificial Sequence
  Description of Artificial Sequence: Synthetic oligonucleotide
  Antisense strand to SEQ ID NO: 878944
uuauucagcaguauaacuc

SEQ ID NO: 878946 - RNA, 19 nt, Artificial Sequence
  Description of Artificial Sequence: Synthetic oligonucleotide
  Sense strand starting at position 3367 of SEQ ID NO: 588635
aguuauacugcugaauaau

SEQ ID NO: 878947 - RNA, 19 nt, Artificial Sequence
  Description of Artificial Sequence: Synthetic oligonucleotide
  Antisense strand to SEQ ID NO: 878946
auuauucagcaguauaacu

SEQ ID NO: 878948 - RNA, 19 nt, Artificial Sequence
  Description of Artificial Sequence: Synthetic oligonucleotide
  Sense strand starting at position 3387 of SEQ ID NO: 588635
uuuggaaucuugugacaaa

SEQ ID NO: 878949 - RNA, 19 nt, Artificial Sequence
  Description of Artificial Sequence: Synthetic oligonucleotide
  Antisense strand to SEQ ID NO: 878948
uuugucacaagauuccaaa

SEQ ID NO: 878950 - RNA, 19 nt, Artificial Sequence
  Description of Artificial Sequence: Synthetic oligonucleotide
  Sense strand starting at position 3431 of SEQ ID NO: 588635
acugucaucugcuguaaua

SEQ ID NO: 878951 - RNA, 19 nt, Artificial Sequence
  Description of Artificial Sequence: Synthetic oligonucleotide
  Antisense strand to SEQ ID NO: 878950
uauuacagcagaugacagu

SEQ ID NO: 878952 - RNA, 19 nt, Artificial Sequence
  Description of Artificial Sequence: Synthetic oligonucleotide
  Sense strand starting at position 3433 of SEQ ID NO: 588635
ugucaucugcuguaauaau

SEQ ID NO: 878953 - RNA, 19 nt, Artificial Sequence
  Description of Artificial Sequence: Synthetic oligonucleotide
  Antisense strand to SEQ ID NO: 878952
auuauuacagcagaugaca

SEQ ID NO: 878954 - RNA, 19 nt, Artificial Sequence
  Description of Artificial Sequence: Synthetic oligonucleotide
  Sense strand starting at position 3499 of SEQ ID NO: 588635
aaaccaguuugugugcauu

SEQ ID NO: 878955 - RNA, 19 nt, Artificial Sequence
  Description of Artificial Sequence: Synthetic oligonucleotide
  Antisense strand to SEQ ID NO: 878954
aaugcacacaaacugguuu

SEQ ID NO: 878956 - RNA, 19 nt, Artificial Sequence
  Description of Artificial Sequence: Synthetic oligonucleotide
  Sense strand starting at position 3501 of SEQ ID NO: 588635
accaguuugugugcauuau

SEQ ID NO: 878957 - RNA, 19 nt, Artificial Sequence
  Description of Artificial Sequence: Synthetic oligonucleotide
  Antisense strand to SEQ ID NO: 878956
auaaugcacacaaacuggu

SEQ ID NO: 878958 - RNA, 19 nt, Artificial Sequence
  Description of Artificial Sequence: Synthetic oligonucleotide
  Sense strand starting at position 3502 of SEQ ID NO: 588635
ccaguuugugugcauuauu

SEQ ID NO: 878959 - RNA, 19 nt, Artificial Sequence
  Description of Artificial Sequence: Synthetic oligonucleotide
  Antisense strand to SEQ ID NO: 878958
aauaaugcacacaaacugg

SEQ ID NO: 878960 - RNA, 19 nt, Artificial Sequence
  Description of Artificial Sequence: Synthetic oligonucleotide
  Sense strand starting at position 3559 of SEQ ID NO: 588635
guagcaaagccucaaguua

SEQ ID NO: 878961 - RNA, 19 nt, Artificial Sequence
  Description of Artificial Sequence: Synthetic oligonucleotide
  Antisense strand to SEQ ID NO: 878960
uaacuugaggcuuugcuac

SEQ ID NO: 878962 - RNA, 19 nt, Artificial Sequence
  Description of Artificial Sequence: Synthetic oligonucleotide
  Sense strand starting at position 3570 of SEQ ID NO: 588635
ucaaguuagagauguuaag

SEQ ID NO: 878963 - RNA, 19 nt, Artificial Sequence
  Description of Artificial Sequence: Synthetic oligonucleotide
  Antisense strand to SEQ ID NO: 878962
cuuaacaucucuaacuuga

SEQ ID NO: 878964 - RNA, 19 nt, Artificial Sequence
  Description of Artificial Sequence: Synthetic oligonucleotide
  Sense strand starting at position 3733 of SEQ ID NO: 588635
gugagauaugaacgguaaa

SEQ ID NO: 878965 - RNA, 19 nt, Artificial Sequence
  Description of Artificial Sequence: Synthetic oligonucleotide
  Antisense strand to SEQ ID NO: 878964
uuuaccguucauaucucac

SEQ ID NO: 878966 - RNA, 19 nt, Artificial Sequence
  Description of Artificial Sequence: Synthetic oligonucleotide
  Sense strand starting at position 3734 of SEQ ID NO: 588635
ugagauaugaacgguaaau

SEQ ID NO: 878967 - RNA, 19 nt, Artificial Sequence
  Description of Artificial Sequence: Synthetic oligonucleotide
  Antisense strand to SEQ ID NO: 878966
auuuaccguucauaucuca

SEQ ID NO: 878968 - RNA, 19 nt, Artificial Sequence
  Description of Artificial Sequence: Synthetic oligonucleotide
  Sense strand starting at position 3831 of SEQ ID NO: 588635
uggagaugggccuaucuca

SEQ ID NO: 878969 - RNA, 19 nt, Artificial Sequence
  Description of Artificial Sequence: Synthetic oligonucleotide
  Antisense strand to SEQ ID NO: 878968
ugagauaggcccaucucca

SEQ ID NO: 878970 - RNA, 19 nt, Artificial Sequence
  Description of Artificial Sequence: Synthetic oligonucleotide
  Sense strand starting at position 3889 of SEQ ID NO: 588635
uuaccuguucuaugcagga

SEQ ID NO: 878971 - RNA, 19 nt, Artificial Sequence
  Description of Artificial Sequence: Synthetic oligonucleotide
  Antisense strand to SEQ ID NO: 878970
uccugcauagaacagguaa

SEQ ID NO: 878972 - RNA, 19 nt, Artificial Sequence
  Description of Artificial Sequence: Synthetic oligonucleotide
  Sense strand starting at position 3893 of SEQ ID NO: 588635
cuguucuaugcaggaggaa

SEQ ID NO: 878973 - RNA, 19 nt, Artificial Sequence
  Description of Artificial Sequence: Synthetic oligonucleotide
  Antisense strand to SEQ ID NO: 878972
uuccuccugcauagaacag

SEQ ID NO: 878974 - RNA, 19 nt, Artificial Sequence
  Description of Artificial Sequence: Synthetic oligonucleotide
  Sense strand starting at position 3906 of SEQ ID NO: 588635
gaggaagcuccuugggaga

SEQ ID NO: 878975 - RNA, 19 nt, Artificial Sequence
  Description of Artificial Sequence: Synthetic oligonucleotide
  Antisense strand to SEQ ID NO: 878974
ucucccaaggagcuuccuc

SEQ ID NO: 878976 - RNA, 19 nt, Artificial Sequence
  Description of Artificial Sequence: Synthetic oligonucleotide
  Sense strand starting at position 3927 of SEQ ID NO: 588635
agaacagaucuuggugguu

SEQ ID NO: 878977 - RNA, 19 nt, Artificial Sequence
  Description of Artificial Sequence: Synthetic oligonucleotide
  Antisense strand to SEQ ID NO: 878976
aaccaccaagaucuguucu

SEQ ID NO: 878978 - RNA, 19 nt, Artificial Sequence
  Description of Artificial Sequence: Synthetic oligonucleotide
  Sense strand starting at position 3932 of SEQ ID NO: 588635
agaucuuggugguuugauu

SEQ ID NO: 878979 - RNA, 19 nt, Artificial Sequence
  Description of Artificial Sequence: Synthetic oligonucleotide
  Antisense strand to SEQ ID NO: 878978
aaucaaaccaccaagaucu

SEQ ID NO: 878980 - RNA, 19 nt, Artificial Sequence
  Description of Artificial Sequence: Synthetic oligonucleotide
  Sense strand starting at position 6 of SEQ ID NO: 588636
augggcaauuaagaguuau

SEQ ID NO: 878981 - RNA, 19 nt, Artificial Sequence
  Description of Artificial Sequence: Synthetic oligonucleotide
  Antisense strand to SEQ ID NO: 878980
auaacucuuaauugcccau

SEQ ID NO: 878982 - RNA, 19 nt, Artificial Sequence
  Description of Artificial Sequence: Synthetic oligonucleotide
  Sense strand starting at position 43 of SEQ ID NO: 588636
aucauaucucugggaaguc

SEQ ID NO: 878983 - RNA, 19 nt, Artificial Sequence
  Description of Artificial Sequence: Synthetic oligonucleotide
  Antisense strand to SEQ ID NO: 878982
gacuucccagagauaugau

SEQ ID NO: 878984 - RNA, 19 nt, Artificial Sequence
  Description of Artificial Sequence: Synthetic oligonucleotide
  Sense strand starting at position 44 of SEQ ID NO: 588636
ucauaucucugggaaguca

SEQ ID NO: 878985 - RNA, 19 nt, Artificial Sequence
  Description of Artificial Sequence: Synthetic oligonucleotide
  Antisense strand to SEQ ID NO: 878984
ugacuucccagagauauga

SEQ ID NO: 878986 - RNA, 19 nt, Artificial Sequence
  Description of Artificial Sequence: Synthetic oligonucleotide
  Sense strand starting at position 283 of SEQ ID NO: 588636
ucaacagauuugggaaagu

SEQ ID NO: 878987 - RNA, 19 nt, Artificial Sequence
  Description of Artificial Sequence: Synthetic oligonucleotide
  Antisense strand to SEQ ID NO: 878986
acuuucccaaaucuguuga

SEQ ID NO: 878988 - RNA, 19 nt, Artificial Sequence
  Description of Artificial Sequence: Synthetic oligonucleotide
  Sense strand starting at position 321 of SEQ ID NO: 588636
ucuagugaauauuaaugga

SEQ ID NO: 878989 - RNA, 19 nt, Artificial Sequence
  Description of Artificial Sequence: Synthetic oligonucleotide
  Antisense strand to SEQ ID NO: 878988
uccauuaauauucacuaga

SEQ ID NO: 878990 - RNA, 19 nt, Artificial Sequence
  Description of Artificial Sequence: Synthetic oligonucleotide
  Sense strand starting at position 324 of SEQ ID NO: 588636
agugaauauuaauggaacu

SEQ ID NO: 878991 - RNA, 19 nt, Artificial Sequence
  Description of Artificial Sequence: Synthetic oligonucleotide
  Antisense strand to SEQ ID NO: 878990
aguuccauuaauauucacu

SEQ ID NO: 878992 - RNA, 19 nt, Artificial Sequence
  Description of Artificial Sequence: Synthetic oligonucleotide
  Sense strand starting at position 392 of SEQ ID NO: 588636
uaaguuagugcauacugaa

SEQ ID NO: 878993 - RNA, 19 nt, Artificial Sequence
  Description of Artificial Sequence: Synthetic oligonucleotide
  Antisense strand to SEQ ID NO: 878992
uucaguaugcacuaacuua

SEQ ID NO: 878994 - RNA, 19 nt, Artificial Sequence
  Description of Artificial Sequence: Synthetic oligonucleotide
  Sense strand starting at position 425 of SEQ ID NO: 588636
ccagcagagcuuugaaaua

SEQ ID NO: 878995 - RNA, 19 nt, Artificial Sequence
  Description of Artificial Sequence: Synthetic oligonucleotide
  Antisense strand to SEQ ID NO: 878994
uauuucaaagcucugcugg

SEQ ID NO: 878996 - RNA, 19 nt, Artificial Sequence
  Description of Artificial Sequence: Synthetic oligonucleotide
  Sense strand starting at position 458 of SEQ ID NO: 588636
aguuccuucccacgaggaa

SEQ ID NO: 878997 - RNA, 19 nt, Artificial Sequence
  Description of Artificial Sequence: Synthetic oligonucleotide
  Antisense strand to SEQ ID NO: 878996
uuccucgugggaaggaacu

SEQ ID NO: 878998 - RNA, 19 nt, Artificial Sequence
  Description of Artificial Sequence: Synthetic oligonucleotide
  Sense strand starting at position 459 of SEQ ID NO: 588636
guuccuucccacgaggaau

SEQ ID NO: 878999 - RNA, 19 nt, Artificial Sequence
  Description of Artificial Sequence: Synthetic oligonucleotide
  Antisense strand to SEQ ID NO: 878998
auuccucgugggaaggaac

SEQ ID NO: 879000 - RNA, 19 nt, Artificial Sequence
  Description of Artificial Sequence: Synthetic oligonucleotide
  Sense strand starting at position 480 of SEQ ID NO: 588636
auauauaaucggcauaugu

SEQ ID NO: 879001 - RNA, 19 nt, Artificial Sequence
  Description of Artificial Sequence: Synthetic oligonucleotide
  Antisense strand to SEQ ID NO: 879000
acauaugccgauuauauau

SEQ ID NO: 879002 - RNA, 19 nt, Artificial Sequence
  Description of Artificial Sequence: Synthetic oligonucleotide
  Sense strand starting at position 482 of SEQ ID NO: 588636
auauaaucggcauauguau

SEQ ID NO: 879003 - RNA, 19 nt, Artificial Sequence
  Description of Artificial Sequence: Synthetic oligonucleotide
  Antisense strand to SEQ ID NO: 879002
auacauaugccgauuauau

SEQ ID NO: 879004 - RNA, 19 nt, Artificial Sequence
  Description of Artificial Sequence: Synthetic oligonucleotide
  Sense strand starting at position 488 of SEQ ID NO: 588636
ucggcauauguauaucuau

SEQ ID NO: 879005 - RNA, 19 nt, Artificial Sequence
  Description of Artificial Sequence: Synthetic oligonucleotide
  Antisense strand to SEQ ID NO: 879004
auagauauacauaugccga

SEQ ID NO: 879006 - RNA, 19 nt, Artificial Sequence
  Description of Artificial Sequence: Synthetic oligonucleotide
  Sense strand starting at position 510 of SEQ ID NO: 588636
ugaaacuuauucuaaagug

SEQ ID NO: 879007 - RNA, 19 nt, Artificial Sequence
  Description of Artificial Sequence: Synthetic oligonucleotide
  Antisense strand to SEQ ID NO: 879006
cacuuuagaauaaguuuca

SEQ ID NO: 879008 - RNA, 19 nt, Artificial Sequence
  Description of Artificial Sequence: Synthetic oligonucleotide
  Sense strand starting at position 552 of SEQ ID NO: 588636
gucccaagccagugaaaca

SEQ ID NO: 879009 - RNA, 19 nt, Artificial Sequence
  Description of Artificial Sequence: Synthetic oligonucleotide
  Antisense strand to SEQ ID NO: 879008
uguuucacuggcuugggac

SEQ ID NO: 879010 - RNA, 19 nt, Artificial Sequence
  Description of Artificial Sequence: Synthetic oligonucleotide
  Sense strand starting at position 715 of SEQ ID NO: 588636
acucacauuucggugaugu

SEQ ID NO: 879011 - RNA, 19 nt, Artificial Sequence
  Description of Artificial Sequence: Synthetic oligonucleotide
  Antisense strand to SEQ ID NO: 879010
acaucaccgaaaugugagu

SEQ ID NO: 879012 - RNA, 19 nt, Artificial Sequence
  Description of Artificial Sequence: Synthetic oligonucleotide
  Sense strand starting at position 716 of SEQ ID NO: 588636
cucacauuucggugauguu

SEQ ID NO: 879013 - RNA, 19 nt, Artificial Sequence
  Description of Artificial Sequence: Synthetic oligonucleotide
  Antisense strand to SEQ ID NO: 879012
aacaucaccgaaaugugag

SEQ ID NO: 879014 - RNA, 19 nt, Artificial Sequence
  Description of Artificial Sequence: Synthetic oligonucleotide
  Sense strand starting at position 1321 of SEQ ID NO: 588636
acgcguaagacugagcgua

SEQ ID NO: 879015 - RNA, 19 nt, Artificial Sequence
  Description of Artificial Sequence: Synthetic oligonucleotide
  Antisense strand to SEQ ID NO: 879014
uacgcucagucuuacgcgu

SEQ ID NO: 879016 - RNA, 19 nt, Artificial Sequence
  Description of Artificial Sequence: Synthetic oligonucleotide
  Sense strand starting at position 1556 of SEQ ID NO: 588636
acaggauuccaugguacag

SEQ ID NO: 879017 - RNA, 19 nt, Artificial Sequence
  Description of Artificial Sequence: Synthetic oligonucleotide
  Antisense strand to SEQ ID NO: 879016
cuguaccauggaauccugu

SEQ ID NO: 879018 - RNA, 19 nt, Artificial Sequence
  Description of Artificial Sequence: Synthetic oligonucleotide
  Sense strand starting at position 2365 of SEQ ID NO: 588636
gugcuugguucagcucuga

SEQ ID NO: 879019 - RNA, 19 nt, Artificial Sequence
  Description of Artificial Sequence: Synthetic oligonucleotide
  Antisense strand to SEQ ID NO: 879018
ucagagcugaaccaagcac

SEQ ID NO: 879020 - RNA, 19 nt, Artificial Sequence
  Description of Artificial Sequence: Synthetic oligonucleotide
  Sense strand starting at position 2387 of SEQ ID NO: 588636
augcgcugauucuuauuau

SEQ ID NO: 879021 - RNA, 19 nt, Artificial Sequence
  Description of Artificial Sequence: Synthetic oligonucleotide
  Antisense strand to SEQ ID NO: 879020
auaauaagaaucagcgcau

SEQ ID NO: 879022 - RNA, 19 nt, Artificial Sequence
  Description of Artificial Sequence: Synthetic oligonucleotide
  Sense strand starting at position 2390 of SEQ ID NO: 588636
cgcugauucuuauuauagg

SEQ ID NO: 879023 - RNA, 19 nt, Artificial Sequence
  Description of Artificial Sequence: Synthetic oligonucleotide
  Antisense strand to SEQ ID NO: 879022
ccuauaauaagaaucagcg

SEQ ID NO: 879024 - RNA, 19 nt, Artificial Sequence
  Description of Artificial Sequence: Synthetic oligonucleotide
  Sense strand starting at position 2517 of SEQ ID NO: 588636
ugcauugguaaccaaggau

SEQ ID NO: 879025 - RNA, 19 nt, Artificial Sequence
  Description of Artificial Sequence: Synthetic oligonucleotide
  Antisense strand to SEQ ID NO: 879024
auccuugguuaccaaugca

SEQ ID NO: 879026 - RNA, 19 nt, Artificial Sequence
  Description of Artificial Sequence: Synthetic oligonucleotide
  Sense strand starting at position 2720 of SEQ ID NO: 588636
ccugaugcguauucuaaau

SEQ ID NO: 879027 - RNA, 19 nt, Artificial Sequence
  Description of Artificial Sequence: Synthetic oligonucleotide
  Antisense strand to SEQ ID NO: 879026
auuuagaauacgcaucagg

SEQ ID NO: 879028 - RNA, 19 nt, Artificial Sequence
  Description of Artificial Sequence: Synthetic oligonucleotide
  Sense strand starting at position 3481 of SEQ ID NO: 588636
cugaucuacccgcagaguu

SEQ ID NO: 879029 - RNA, 19 nt, Artificial Sequence
  Description of Artificial Sequence: Synthetic oligonucleotide
  Antisense strand to SEQ ID NO: 879028
aacucugcggguagaucag

SEQ ID NO: 879030 - RNA, 19 nt, Artificial Sequence
  Description of Artificial Sequence: Synthetic oligonucleotide
  Sense strand starting at position 3516 of SEQ ID NO: 588636
caagaaaccgaacguuaga

SEQ ID NO: 879031 - RNA, 19 nt, Artificial Sequence
  Description of Artificial Sequence: Synthetic oligonucleotide
  Antisense strand to SEQ ID NO: 879030
ucuaacguucgguuucuug

SEQ ID NO: 879032 - RNA, 19 nt, Artificial Sequence
  Description of Artificial Sequence: Synthetic oligonucleotide
  Sense strand starting at position 3525 of SEQ ID NO: 588636
gaacguuagagugaaugcu

SEQ ID NO: 879033 - RNA, 19 nt, Artificial Sequence
  Description of Artificial Sequence: Synthetic oligonucleotide
  Antisense strand to SEQ ID NO: 879032
agcauucacucuaacguuc

SEQ ID NO: 879034 - RNA, 19 nt, Artificial Sequence
  Description of Artificial Sequence: Synthetic oligonucleotide
  Sense strand starting at position 3533 of SEQ ID NO: 588636
gagugaaugcucggaucua

SEQ ID NO: 879035 - RNA, 19 nt, Artificial Sequence
  Description of Artificial Sequence: Synthetic oligonucleotide
  Antisense strand to SEQ ID NO: 879034
uagauccgagcauucacuc

SEQ ID NO: 879036 - RNA, 19 nt, Artificial Sequence
  Description of Artificial Sequence: Synthetic oligonucleotide
  Sense strand starting at position 3550 of SEQ ID NO: 588636
uaggccaagcguuaaauau

SEQ ID NO: 879037 - RNA, 19 nt, Artificial Sequence
  Description of Artificial Sequence: Synthetic oligonucleotide
  Antisense strand to SEQ ID NO: 879036
auauuuaacgcuuggccua

SEQ ID NO: 879038 - RNA, 19 nt, Artificial Sequence
  Description of Artificial Sequence: Synthetic oligonucleotide
  Sense strand starting at position 3560 of SEQ ID NO: 588636
guuaaauauuacgaaggga

SEQ ID NO: 879039 - RNA, 19 nt, Artificial Sequence
  Description of Artificial Sequence: Synthetic oligonucleotide
  Antisense strand to SEQ ID NO: 879038
ucccuucguaauauuuaac

SEQ ID NO: 879040 - RNA, 19 nt, Artificial Sequence
  Description of Artificial Sequence: Synthetic oligonucleotide
  Sense strand starting at position 3624 of SEQ ID NO: 588636
gaguguaaccgcgggaauu

SEQ ID NO: 879041 - RNA, 19 nt, Artificial Sequence
  Description of Artificial Sequence: Synthetic oligonucleotide
  Antisense strand to SEQ ID NO: 879040
aauucccgcgguuacacuc

SEQ ID NO: 879042 - RNA, 19 nt, Artificial Sequence
  Description of Artificial Sequence: Synthetic oligonucleotide
  Sense strand starting at position 3708 of SEQ ID NO: 588636
cugucacucggcuguaaca

SEQ ID NO: 879043 - RNA, 19 nt, Artificial Sequence
  Description of Artificial Sequence: Synthetic oligonucleotide
  Antisense strand to SEQ ID NO: 879042
uguuacagccgagugacag

SEQ ID NO: 879044 - RNA, 19 nt, Artificial Sequence
  Description of Artificial Sequence: Synthetic oligonucleotide
  Sense strand starting at position 3724 of SEQ ID NO: 588636
acacacaucgaguggugaa

SEQ ID NO: 879045 - RNA, 19 nt, Artificial Sequence
  Description of Artificial Sequence: Synthetic oligonucleotide
  Antisense strand to SEQ ID NO: 879044
uucaccacucgaugugugu

SEQ ID NO: 879046 - RNA, 19 nt, Artificial Sequence
  Description of Artificial Sequence: Synthetic oligonucleotide
  Sense strand starting at position 3749 of SEQ ID NO: 588636
ggcugaaguuuacuccuga

SEQ ID NO: 879047 - RNA, 19 nt, Artificial Sequence
  Description of Artificial Sequence: Synthetic oligonucleotide
  Antisense strand to SEQ ID NO: 879046
ucaggaguaaacuucagcc

SEQ ID NO: 879048 - RNA, 19 nt, Artificial Sequence
  Description of Artificial Sequence: Synthetic oligonucleotide
  Sense strand starting at position 3771 of SEQ ID NO: 588636
gcgccucuauucucuacua

SEQ ID NO: 879049 - RNA, 19 nt, Artificial Sequence
  Description of Artificial Sequence: Synthetic oligonucleotide
  Antisense strand to SEQ ID NO: 879048
uaguagagaauagaggcgc

SEQ ID NO: 879050 - RNA, 19 nt, Artificial Sequence
  Description of Artificial Sequence: Synthetic oligonucleotide
  Sense strand starting at position 3861 of SEQ ID NO: 588636
cugucuugucagugaaccu

SEQ ID NO: 879051 - RNA, 19 nt, Artificial Sequence
  Description of Artificial Sequence: Synthetic oligonucleotide
  Antisense strand to SEQ ID NO: 879050
agguucacugacaagacag

SEQ ID NO: 879052 - RNA, 19 nt, Artificial Sequence
  Description of Artificial Sequence: Synthetic oligonucleotide
  Sense strand starting at position 3862 of SEQ ID NO: 588636
ugucuugucagugaaccuu

SEQ ID NO: 879053 - RNA, 19 nt, Artificial Sequence
  Description of Artificial Sequence: Synthetic oligonucleotide
  Antisense strand to SEQ ID NO: 879052
aagguucacugacaagaca

SEQ ID NO: 879054 - RNA, 19 nt, Artificial Sequence
  Description of Artificial Sequence: Synthetic oligonucleotide
  Sense strand starting at position 3914 of SEQ ID NO: 588636
ggaaggagugugugcguaa

SEQ ID NO: 879055 - RNA, 19 nt, Artificial Sequence
  Description of Artificial Sequence: Synthetic oligonucleotide
  Antisense strand to SEQ ID NO: 879054
uuacgcacacacuccuucc

SEQ ID NO: 879056 - RNA, 19 nt, Artificial Sequence
  Description of Artificial Sequence: Synthetic oligonucleotide
  Sense strand starting at position 3915 of SEQ ID NO: 588636
gaaggagugugugcguaau

SEQ ID NO: 879057 - RNA, 19 nt, Artificial Sequence
  Description of Artificial Sequence: Synthetic oligonucleotide
  Antisense strand to SEQ ID NO: 879056
auuacgcacacacuccuuc

SEQ ID NO: 879058 - RNA, 19 nt, Artificial Sequence
  Description of Artificial Sequence: Synthetic oligonucleotide
  Sense strand starting at position 3917 of SEQ ID NO: 588636
aggagugugugcguaauca

SEQ ID NO: 879059 - RNA, 19 nt, Artificial Sequence
  Description of Artificial Sequence: Synthetic oligonucleotide
  Antisense strand to SEQ ID NO: 879058
ugauuacgcacacacuccu

SEQ ID NO: 879060 - RNA, 19 nt, Artificial Sequence
  Description of Artificial Sequence: Synthetic oligonucleotide
  Sense strand starting at position 334 of SEQ ID NO: 588638
acaggauuccaugguacag

SEQ ID NO: 879061 - RNA, 19 nt, Artificial Sequence
  Description of Artificial Sequence: Synthetic oligonucleotide
  Antisense strand to SEQ ID NO: 879060
cuguaccauggaauccugu

SEQ ID NO: 879062 - RNA, 19 nt, Artificial Sequence
  Description of Artificial Sequence: Synthetic oligonucleotide
  Sense strand starting at position 1165 of SEQ ID NO: 588638
augcgcugauucuuauuau

SEQ ID NO: 879063 - RNA, 19 nt, Artificial Sequence
  Description of Artificial Sequence: Synthetic oligonucleotide
  Antisense strand to SEQ ID NO: 879062
auaauaagaaucagcgcau

SEQ ID NO: 879064 - RNA, 19 nt, Artificial Sequence
  Description of Artificial Sequence: Synthetic oligonucleotide
  Sense strand starting at position 1168 of SEQ ID NO: 588638
cgcugauucuuauuauagg

SEQ ID NO: 879065 - RNA, 19 nt, Artificial Sequence
  Description of Artificial Sequence: Synthetic oligonucleotide
  Antisense strand to SEQ ID NO: 879064
ccuauaauaagaaucagcg

SEQ ID NO: 879066 - RNA, 19 nt, Artificial Sequence
  Description of Artificial Sequence: Synthetic oligonucleotide
  Sense strand starting at position 1295 of SEQ ID NO: 588638
ugcauugguaaccaaggau

SEQ ID NO: 879067 - RNA, 19 nt, Artificial Sequence
  Description of Artificial Sequence: Synthetic oligonucleotide
  Antisense strand to SEQ ID NO: 879066
auccuugguuaccaaugca

SEQ ID NO: 879068 - RNA, 19 nt, Artificial Sequence
  Description of Artificial Sequence: Synthetic oligonucleotide
  Sense strand starting at position 1498 of SEQ ID NO: 588638
ccugaugcguauucuaaau

SEQ ID NO: 879069 - RNA, 19 nt, Artificial Sequence
  Description of Artificial Sequence: Synthetic oligonucleotide
  Antisense strand to SEQ ID NO: 879068
auuuagaauacgcaucagg

SEQ ID NO: 879070 - RNA, 19 nt, Artificial Sequence
  Description of Artificial Sequence: Synthetic oligonucleotide
  Sense strand starting at position 2259 of SEQ ID NO: 588638
cugaucuacccgcagaguu

SEQ ID NO: 879071 - RNA, 19 nt, Artificial Sequence
  Description of Artificial Sequence: Synthetic oligonucleotide
  Antisense strand to SEQ ID NO: 879070
aacucugcggguagaucag

SEQ ID NO: 879072 - RNA, 19 nt, Artificial Sequence
  Description of Artificial Sequence: Synthetic oligonucleotide
  Sense strand starting at position 2294 of SEQ ID NO: 588638
caagaaaccgaacguuaga

SEQ ID NO: 879073 - RNA, 19 nt, Artificial Sequence
  Description of Artificial Sequence: Synthetic oligonucleotide
  Antisense strand to SEQ ID NO: 879072
ucuaacguucgguuucuug

SEQ ID NO: 879074 - RNA, 19 nt, Artificial Sequence
  Description of Artificial Sequence: Synthetic oligonucleotide
  Sense strand starting at position 2303 of SEQ ID NO: 588638
gaacguuagagugaaugcu

SEQ ID NO: 879075 - RNA, 19 nt, Artificial Sequence
  Description of Artificial Sequence: Synthetic oligonucleotide
  Antisense strand to SEQ ID NO: 879074
agcauucacucuaacguuc

SEQ ID NO: 879076 - RNA, 19 nt, Artificial Sequence
  Description of Artificial Sequence: Synthetic oligonucleotide
  Sense strand starting at position 2311 of SEQ ID NO: 588638
gagugaaugcucggaucua

SEQ ID NO: 879077 - RNA, 19 nt, Artificial Sequence
  Description of Artificial Sequence: Synthetic oligonucleotide
  Antisense strand to SEQ ID NO: 879076
uagauccgagcauucacuc

SEQ ID NO: 879078 - RNA, 19 nt, Artificial Sequence
  Description of Artificial Sequence: Synthetic oligonucleotide
  Sense strand starting at position 2328 of SEQ ID NO: 588638
uaggccaagcguuaaauau

SEQ ID NO: 879079 - RNA, 19 nt, Artificial Sequence
  Description of Artificial Sequence: Synthetic oligonucleotide
  Antisense strand to SEQ ID NO: 879078
auauuuaacgcuuggccua

SEQ ID NO: 879080 - RNA, 19 nt, Artificial Sequence
  Description of Artificial Sequence: Synthetic oligonucleotide
  Sense strand starting at position 2338 of SEQ ID NO: 588638
guuaaauauuacgaaggga

SEQ ID NO: 879081 - RNA, 19 nt, Artificial Sequence
  Description of Artificial Sequence: Synthetic oligonucleotide
  Antisense strand to SEQ ID NO: 879080
ucccuucguaauauuuaac

SEQ ID NO: 879082 - RNA, 19 nt, Artificial Sequence
  Description of Artificial Sequence: Synthetic oligonucleotide
  Sense strand starting at position 2402 of SEQ ID NO: 588638
gaguguaaccgcgggaauu

SEQ ID NO: 879083 - RNA, 19 nt, Artificial Sequence
  Description of Artificial Sequence: Synthetic oligonucleotide
  Antisense strand to SEQ ID NO: 879082
aauucccgcgguuacacuc

SEQ ID NO: 879084 - RNA, 19 nt, Artificial Sequence
  Description of Artificial Sequence: Synthetic oligonucleotide
  Sense strand starting at position 2502 of SEQ ID NO: 588638
acacacaucgaguggugaa

SEQ ID NO: 879085 - RNA, 19 nt, Artificial Sequence
  Description of Artificial Sequence: Synthetic oligonucleotide
  Antisense strand to SEQ ID NO: 879084
uucaccacucgaugugugu

SEQ ID NO: 879086 - RNA, 19 nt, Artificial Sequence
  Description of Artificial Sequence: Synthetic oligonucleotide
  Sense strand starting at position 2527 of SEQ ID NO: 588638
ggcugaaguuuacuccuga

SEQ ID NO: 879087 - RNA, 19 nt, Artificial Sequence
  Description of Artificial Sequence: Synthetic oligonucleotide
  Antisense strand to SEQ ID NO: 879086
ucaggaguaaacuucagcc

SEQ ID NO: 879088 - RNA, 19 nt, Artificial Sequence
  Description of Artificial Sequence: Synthetic oligonucleotide
  Sense strand starting at position 2639 of SEQ ID NO: 588638
cugucuugucagugaaccu

SEQ ID NO: 879089 - RNA, 19 nt, Artificial Sequence
  Description of Artificial Sequence: Synthetic oligonucleotide
  Antisense strand to SEQ ID NO: 879088
agguucacugacaagacag

SEQ ID NO: 879090 - RNA, 19 nt, Artificial Sequence
  Description of Artificial Sequence: Synthetic oligonucleotide
  Sense strand starting at position 2640 of SEQ ID NO: 588638
ugucuugucagugaaccuu

SEQ ID NO: 879091 - RNA, 19 nt, Artificial Sequence
  Description of Artificial Sequence: Synthetic oligonucleotide
  Antisense strand to SEQ ID NO: 879090
aagguucacugacaagaca

SEQ ID NO: 879092 - RNA, 19 nt, Artificial Sequence
  Description of Artificial Sequence: Synthetic oligonucleotide
  Sense strand starting at position 2794 of SEQ ID NO: 588638
gucaaugcgguauggagaa

SEQ ID NO: 879093 - RNA, 19 nt, Artificial Sequence
  Description of Artificial Sequence: Synthetic oligonucleotide
  Antisense strand to SEQ ID NO: 879092
uucuccauaccgcauugac

SEQ ID NO: 879094 - RNA, 19 nt, Artificial Sequence
  Description of Artificial Sequence: Synthetic oligonucleotide
  Sense strand starting at position 2796 of SEQ ID NO: 588638
caaugcgguauggagaaua

SEQ ID NO: 879095 - RNA, 19 nt, Artificial Sequence
  Description of Artificial Sequence: Synthetic oligonucleotide
  Antisense strand to SEQ ID NO: 879094
uauucuccauaccgcauug

SEQ ID NO: 879096 - RNA, 19 nt, Artificial Sequence
  Description of Artificial Sequence: Synthetic oligonucleotide
  Sense strand starting at position 2815 of SEQ ID NO: 588638
ggcagucuuacggugguuu

SEQ ID NO: 879097 - RNA, 19 nt, Artificial Sequence
  Description of Artificial Sequence: Synthetic oligonucleotide
  Antisense strand to SEQ ID NO: 879096
aaaccaccguaagacugcc

SEQ ID NO: 879098 - RNA, 19 nt, Artificial Sequence
  Description of Artificial Sequence: Synthetic oligonucleotide
  Sense strand starting at position 2830 of SEQ ID NO: 588638
guuuguacaccagaagagu

SEQ ID NO: 879099 - RNA, 19 nt, Artificial Sequence
  Description of Artificial Sequence: Synthetic oligonucleotide
  Antisense strand to SEQ ID NO: 879098
acucuucugguguacaaac

SEQ ID NO: 879100 - RNA, 19 nt, Artificial Sequence
  Description of Artificial Sequence: Synthetic oligonucleotide
  Sense strand starting at position 2841 of SEQ ID NO: 588638
agaagagucuaauuauguu

SEQ ID NO: 879101 - RNA, 19 nt, Artificial Sequence
  Description of Artificial Sequence: Synthetic oligonucleotide
  Antisense strand to SEQ ID NO: 879100
aacauaauuagacucuucu

SEQ ID NO: 879102 - RNA, 19 nt, Artificial Sequence
  Description of Artificial Sequence: Synthetic oligonucleotide
  Sense strand starting at position 2858 of SEQ ID NO: 588638
uuggaauauuuguagaguu

SEQ ID NO: 879103 - RNA, 19 nt, Artificial Sequence
  Description of Artificial Sequence: Synthetic oligonucleotide
  Antisense strand to SEQ ID NO: 879102
aacucuacaaauauuccaa

SEQ ID NO: 879104 - RNA, 19 nt, Artificial Sequence
  Description of Artificial Sequence: Synthetic oligonucleotide
  Sense strand starting at position 2866 of SEQ ID NO: 588638
uuuguagaguuucuauuag

SEQ ID NO: 879105 - RNA, 19 nt, Artificial Sequence
  Description of Artificial Sequence: Synthetic oligonucleotide
  Antisense strand to SEQ ID NO: 879104
cuaauagaaacucuacaaa

SEQ ID NO: 879106 - RNA, 19 nt, Artificial Sequence
  Description of Artificial Sequence: Synthetic oligonucleotide
  Sense strand starting at position 2897 of SEQ ID NO: 588638
cuacuauuauaguuggauu

SEQ ID NO: 879107 - RNA, 19 nt, Artificial Sequence
  Description of Artificial Sequence: Synthetic oligonucleotide
  Antisense strand to SEQ ID NO: 879106
aauccaacuauaauaguag

SEQ ID NO: 879108 - RNA, 19 nt, Artificial Sequence
  Description of Artificial Sequence: Synthetic oligonucleotide
  Sense strand starting at position 3111 of SEQ ID NO: 588638
auugauaucucucaaggac

SEQ ID NO: 879109 - RNA, 19 nt, Artificial Sequence
  Description of Artificial Sequence: Synthetic oligonucleotide
  Antisense strand to SEQ ID NO: 879108
guccuugagagauaucaau

SEQ ID NO: 879110 - RNA, 19 nt, Artificial Sequence
  Description of Artificial Sequence: Synthetic oligonucleotide
  Sense strand starting at position 3125 of SEQ ID NO: 588638
aggacauaguagguguuaa

SEQ ID NO: 879111 - RNA, 19 nt, Artificial Sequence
  Description of Artificial Sequence: Synthetic oligonucleotide
  Antisense strand to SEQ ID NO: 879110
uuaacaccuacuauguccu

SEQ ID NO: 879112 - RNA, 19 nt, Artificial Sequence
  Description of Artificial Sequence: Synthetic oligonucleotide
  Sense strand starting at position 3203 of SEQ ID NO: 588638
accucuaagucugcaagaa

SEQ ID NO: 879113 - RNA, 19 nt, Artificial Sequence
  Description of Artificial Sequence: Synthetic oligonucleotide
  Antisense strand to SEQ ID NO: 879112
uucuugcagacuuagaggu

SEQ ID NO: 879114 - RNA, 19 nt, Artificial Sequence
  Description of Artificial Sequence: Synthetic oligonucleotide
  Sense strand starting at position 3204 of SEQ ID NO: 588638
ccucuaagucugcaagaac

SEQ ID NO: 879115 - RNA, 19 nt, Artificial Sequence
  Description of Artificial Sequence: Synthetic oligonucleotide
  Antisense strand to SEQ ID NO: 879114
guucuugcagacuuagagg

SEQ ID NO: 879116 - RNA, 19 nt, Artificial Sequence
  Description of Artificial Sequence: Synthetic oligonucleotide
  Sense strand starting at position 3213 of SEQ ID NO: 588638
cugcaagaaccuggauaau

SEQ ID NO: 879117 - RNA, 19 nt, Artificial Sequence
  Description of Artificial Sequence: Synthetic oligonucleotide
  Antisense strand to SEQ ID NO: 879116
auuauccagguucuugcag

SEQ ID NO: 879118 - RNA, 19 nt, Artificial Sequence
  Description of Artificial Sequence: Synthetic oligonucleotide
  Sense strand starting at position 3278 of SEQ ID NO: 588638
ugcguucugagugcuccua

SEQ ID NO: 879119 - RNA, 19 nt, Artificial Sequence
  Description of Artificial Sequence: Synthetic oligonucleotide
  Antisense strand to SEQ ID NO: 879118
uaggagcacucagaacgca

SEQ ID NO: 879120 - RNA, 19 nt, Artificial Sequence
  Description of Artificial Sequence: Synthetic oligonucleotide
  Sense strand starting at position 3314 of SEQ ID NO: 588638
gccuuacuuucugucucau

SEQ ID NO: 879121 - RNA, 19 nt, Artificial Sequence
  Description of Artificial Sequence: Synthetic oligonucleotide
  Antisense strand to SEQ ID NO: 879120
augagacagaaaguaaggc

SEQ ID NO: 879122 - RNA, 19 nt, Artificial Sequence
  Description of Artificial Sequence: Synthetic oligonucleotide
  Sense strand starting at position 3320 of SEQ ID NO: 588638
cuuucugucucauuuagua

SEQ ID NO: 879123 - RNA, 19 nt, Artificial Sequence
  Description of Artificial Sequence: Synthetic oligonucleotide
  Antisense strand to SEQ ID NO: 879122
uacuaaaugagacagaaag

SEQ ID NO: 879124 - RNA, 19 nt, Artificial Sequence
  Description of Artificial Sequence: Synthetic oligonucleotide
  Sense strand starting at position 3428 of SEQ ID NO: 588638
acuggugaucaguagcuau

SEQ ID NO: 879125 - RNA, 19 nt, Artificial Sequence
  Description of Artificial Sequence: Synthetic oligonucleotide
  Antisense strand to SEQ ID NO: 879124
auagcuacugaucaccagu

SEQ ID NO: 879126 - RNA, 19 nt, Artificial Sequence
  Description of Artificial Sequence: Synthetic oligonucleotide
  Sense strand starting at position 3492 of SEQ ID NO: 588638
uaagauaugucccagagau

SEQ ID NO: 879127 - RNA, 19 nt, Artificial Sequence
  Description of Artificial Sequence: Synthetic oligonucleotide
  Antisense strand to SEQ ID NO: 879126
aucucugggacauaucuua

SEQ ID NO: 879128 - RNA, 19 nt, Artificial Sequence
  Description of Artificial Sequence: Synthetic oligonucleotide
  Sense strand starting at position 3527 of SEQ ID NO: 588638
agaucacaccuuuguaaga

SEQ ID NO: 879129 - RNA, 19 nt, Artificial Sequence
  Description of Artificial Sequence: Synthetic oligonucleotide
  Antisense strand to SEQ ID NO: 879128
ucuuacaaaggugugaucu

SEQ ID NO: 879130 - RNA, 19 nt, Artificial Sequence
  Description of Artificial Sequence: Synthetic oligonucleotide
  Sense strand starting at position 3532 of SEQ ID NO: 588638
acaccuuuguaagagauga

SEQ ID NO: 879131 - RNA, 19 nt, Artificial Sequence
  Description of Artificial Sequence: Synthetic oligonucleotide
  Antisense strand to SEQ ID NO: 879130
ucaucucuuacaaaggugu

SEQ ID NO: 879132 - RNA, 19 nt, Artificial Sequence
  Description of Artificial Sequence: Synthetic oligonucleotide
  Sense strand starting at position 3590 of SEQ ID NO: 588638
ucuagaucccuugaaugca

SEQ ID NO: 879133 - RNA, 19 nt, Artificial Sequence
  Description of Artificial Sequence: Synthetic oligonucleotide
  Antisense strand to SEQ ID NO: 879132
ugcauucaagggaucuaga

SEQ ID NO: 879134 - RNA, 19 nt, Artificial Sequence
  Description of Artificial Sequence: Synthetic oligonucleotide
  Sense strand starting at position 3641 of SEQ ID NO: 588638
ugcacugaaccaugaugua

SEQ ID NO: 879135 - RNA, 19 nt, Artificial Sequence
  Description of Artificial Sequence: Synthetic oligonucleotide
  Antisense strand to SEQ ID NO: 879134
uacaucaugguucagugca

SEQ ID NO: 879136 - RNA, 19 nt, Artificial Sequence
  Description of Artificial Sequence: Synthetic oligonucleotide
  Sense strand starting at position 3883 of SEQ ID NO: 588638
auccaauacugaguuguaa

SEQ ID NO: 879137 - RNA, 19 nt, Artificial Sequence
  Description of Artificial Sequence: Synthetic oligonucleotide
  Antisense strand to SEQ ID NO: 879136
uuacaacucaguauuggau

SEQ ID NO: 879138 - RNA, 19 nt, Artificial Sequence
  Description of Artificial Sequence: Synthetic oligonucleotide
  Sense strand starting at position 3954 of SEQ ID NO: 588638
cggauuuguucucucaauc

SEQ ID NO: 879139 - RNA, 19 nt, Artificial Sequence
  Description of Artificial Sequence: Synthetic oligonucleotide
  Antisense strand to SEQ ID NO: 879138
gauugagagaacaaauccg

SEQ ID NO: 879140 - RNA, 19 nt, Artificial Sequence
  Description of Artificial Sequence: Synthetic oligonucleotide
  Sense strand starting at position 30 of SEQ ID NO: 588639
ugucuaugcagucagaaag

SEQ ID NO: 879141 - RNA, 19 nt, Artificial Sequence
  Description of Artificial Sequence: Synthetic oligonucleotide
  Antisense strand to SEQ ID NO: 879140
cuuucugacugcauagaca

SEQ ID NO: 879142 - RNA, 19 nt, Artificial Sequence
  Description of Artificial Sequence: Synthetic oligonucleotide
  Sense strand starting at position 40 of SEQ ID NO: 588639
gucagaaaggccuagcuau

SEQ ID NO: 879143 - RNA, 19 nt, Artificial Sequence
  Description of Artificial Sequence: Synthetic oligonucleotide
  Antisense strand to SEQ ID NO: 879142
auagcuaggccuuucugac

SEQ ID NO: 879144 - RNA, 19 nt, Artificial Sequence
  Description of Artificial Sequence: Synthetic oligonucleotide
  Sense strand starting at position 48 of SEQ ID NO: 588639
ggccuagcuauugaaguua

SEQ ID NO: 879145 - RNA, 19 nt, Artificial Sequence
  Description of Artificial Sequence: Synthetic oligonucleotide
  Antisense strand to SEQ ID NO: 879144
uaacuucaauagcuaggcc

SEQ ID NO: 879146 - RNA, 19 nt, Artificial Sequence
  Description of Artificial Sequence: Synthetic oligonucleotide
  Sense strand starting at position 83 of SEQ ID NO: 588639
agagcaagauacuuaacuu

SEQ ID NO: 879147 - RNA, 19 nt, Artificial Sequence
  Description of Artificial Sequence: Synthetic oligonucleotide
  Antisense strand to SEQ ID NO: 879146
aaguuaaguaucuugcucu

SEQ ID NO: 879148 - RNA, 19 nt, Artificial Sequence
  Description of Artificial Sequence: Synthetic oligonucleotide
  Sense strand starting at position 137 of SEQ ID NO: 588639
augguuguuguggaguuua

SEQ ID NO: 879149 - RNA, 19 nt, Artificial Sequence
  Description of Artificial Sequence: Synthetic oligonucleotide
  Antisense strand to SEQ ID NO: 879148
uaaacuccacaacaaccau

SEQ ID NO: 879150 - RNA, 19 nt, Artificial Sequence
  Description of Artificial Sequence: Synthetic oligonucleotide
  Sense strand starting at position 142 of SEQ ID NO: 588639
uguuguggaguuuauaaau

SEQ ID NO: 879151 - RNA, 19 nt, Artificial Sequence
  Description of Artificial Sequence: Synthetic oligonucleotide
  Antisense strand to SEQ ID NO: 879150
auuuauaaacuccacaaca

SEQ ID NO: 879152 - RNA, 19 nt, Artificial Sequence
  Description of Artificial Sequence: Synthetic oligonucleotide
  Sense strand starting at position 210 of SEQ ID NO: 588639
acuguuacccgugugucau

SEQ ID NO: 879153 - RNA, 19 nt, Artificial Sequence
  Description of Artificial Sequence: Synthetic oligonucleotide
  Antisense strand to SEQ ID NO: 879152
augacacacggguaacagu

SEQ ID NO: 879154 - RNA, 19 nt, Artificial Sequence
  Description of Artificial Sequence: Synthetic oligonucleotide
  Sense strand starting at position 399 of SEQ ID NO: 588639
guuuccuuauuaguaagaa

SEQ ID NO: 879155 - RNA, 19 nt, Artificial Sequence
  Description of Artificial Sequence: Synthetic oligonucleotide
  Antisense strand to SEQ ID NO: 879154
uucuuacuaauaaggaaac

SEQ ID NO: 879156 - RNA, 19 nt, Artificial Sequence
  Description of Artificial Sequence: Synthetic oligonucleotide
  Sense strand starting at position 496 of SEQ ID NO: 588639
aguguauuugccuguucuu

SEQ ID NO: 879157 - RNA, 19 nt, Artificial Sequence
  Description of Artificial Sequence: Synthetic oligonucleotide
  Antisense strand to SEQ ID NO: 879156
aagaacaggcaaauacacu

SEQ ID NO: 879158 - RNA, 19 nt, Artificial Sequence
  Description of Artificial Sequence: Synthetic oligonucleotide
  Sense strand starting at position 499 of SEQ ID NO: 588639
guauuugccuguucuuauu

SEQ ID NO: 879159 - RNA, 19 nt, Artificial Sequence
  Description of Artificial Sequence: Synthetic oligonucleotide
  Antisense strand to SEQ ID NO: 879158
aauaagaacaggcaaauac

SEQ ID NO: 879160 - RNA, 19 nt, Artificial Sequence
  Description of Artificial Sequence: Synthetic oligonucleotide
  Sense strand starting at position 963 of SEQ ID NO: 588639
cucagagaugucuggguaa

SEQ ID NO: 879161 - RNA, 19 nt, Artificial Sequence
  Description of Artificial Sequence: Synthetic oligonucleotide
  Antisense strand to SEQ ID NO: 879160
uuacccagacaucucugag

SEQ ID NO: 879162 - RNA, 19 nt, Artificial Sequence
  Description of Artificial Sequence: Synthetic oligonucleotide
  Sense strand starting at position 965 of SEQ ID NO: 588639
cagagaugucuggguaagu

SEQ ID NO: 879163 - RNA, 19 nt, Artificial Sequence
  Description of Artificial Sequence: Synthetic oligonucleotide
  Antisense strand to SEQ ID NO: 879162
acuuacccagacaucucug

SEQ ID NO: 879164 - RNA, 19 nt, Artificial Sequence
  Description of Artificial Sequence: Synthetic oligonucleotide
  Sense strand starting at position 966 of SEQ ID NO: 588639
agagaugucuggguaagug

SEQ ID NO: 879165 - RNA, 19 nt, Artificial Sequence
  Description of Artificial Sequence: Synthetic oligonucleotide
  Antisense strand to SEQ ID NO: 879164
cacuuacccagacaucucu

SEQ ID NO: 879166 - RNA, 19 nt, Artificial Sequence
  Description of Artificial Sequence: Synthetic oligonucleotide
  Sense strand starting at position 974 of SEQ ID NO: 588639
cuggguaagugacucaaau

SEQ ID NO: 879167 - RNA, 19 nt, Artificial Sequence
  Description of Artificial Sequence: Synthetic oligonucleotide
  Antisense strand to SEQ ID NO: 879166
auuugagucacuuacccag

SEQ ID NO: 879168 - RNA, 19 nt, Artificial Sequence
  Description of Artificial Sequence: Synthetic oligonucleotide
  Sense strand starting at position 976 of SEQ ID NO: 588639
ggguaagugacucaaaugu

SEQ ID NO: 879169 - RNA, 19 nt, Artificial Sequence
  Description of Artificial Sequence: Synthetic oligonucleotide
  Antisense strand to SEQ ID NO: 879168
acauuugagucacuuaccc

SEQ ID NO: 879170 - RNA, 19 nt, Artificial Sequence
  Description of Artificial Sequence: Synthetic oligonucleotide
  Sense strand starting at position 1462 of SEQ ID NO: 588639
cuauaacugccacgauauu

SEQ ID NO: 879171 - RNA, 19 nt, Artificial Sequence
  Description of Artificial Sequence: Synthetic oligonucleotide
  Antisense strand to SEQ ID NO: 879170
aauaucguggcaguuauag

SEQ ID NO: 879172 - RNA, 19 nt, Artificial Sequence
  Description of Artificial Sequence: Synthetic oligonucleotide
  Sense strand starting at position 1538 of SEQ ID NO: 588639
ggguuuaauggguagcaac

SEQ ID NO: 879173 - RNA, 19 nt, Artificial Sequence
  Description of Artificial Sequence: Synthetic oligonucleotide
  Antisense strand to SEQ ID NO: 879172
guugcuacccauuaaaccc

SEQ ID NO: 879174 - RNA, 19 nt, Artificial Sequence
  Description of Artificial Sequence: Synthetic oligonucleotide
  Sense strand starting at position 1821 of SEQ ID NO: 588639
agguuugccagaggcagau

SEQ ID NO: 879175 - RNA, 19 nt, Artificial Sequence
  Description of Artificial Sequence: Synthetic oligonucleotide
  Antisense strand to SEQ ID NO: 879174
aucugccucuggcaaaccu

SEQ ID NO: 879176 - RNA, 19 nt, Artificial Sequence
  Description of Artificial Sequence: Synthetic oligonucleotide
  Sense strand starting at position 2051 of SEQ ID NO: 588639
ugaaacgucgcgagaucuu

SEQ ID NO: 879177 - RNA, 19 nt, Artificial Sequence
  Description of Artificial Sequence: Synthetic oligonucleotide
  Antisense strand to SEQ ID NO: 879176
aagaucucgcgacguuuca

SEQ ID NO: 879178 - RNA, 19 nt, Artificial Sequence
  Description of Artificial Sequence: Synthetic oligonucleotide
  Sense strand starting at position 2135 of SEQ ID NO: 588639
ucugauuggucuuccagag

SEQ ID NO: 879179 - RNA, 19 nt, Artificial Sequence
  Description of Artificial Sequence: Synthetic oligonucleotide
  Antisense strand to SEQ ID NO: 879178
cucuggaagaccaaucaga

SEQ ID NO: 879180 - RNA, 19 nt, Artificial Sequence
  Description of Artificial Sequence: Synthetic oligonucleotide
  Sense strand starting at position 2141 of SEQ ID NO: 588639
uggucuuccagaggagaag

SEQ ID NO: 879181 - RNA, 19 nt, Artificial Sequence
  Description of Artificial Sequence: Synthetic oligonucleotide
  Antisense strand to SEQ ID NO: 879180
cuucuccucuggaagacca

SEQ ID NO: 879182 - RNA, 19 nt, Artificial Sequence
  Description of Artificial Sequence: Synthetic oligonucleotide
  Sense strand starting at position 2152 of SEQ ID NO: 588639
aggagaagucaacgaacgu

SEQ ID NO: 879183 - RNA, 19 nt, Artificial Sequence
  Description of Artificial Sequence: Synthetic oligonucleotide
  Antisense strand to SEQ ID NO: 879182
acguucguugacuucuccu

SEQ ID NO: 879184 - RNA, 19 nt, Artificial Sequence
  Description of Artificial Sequence: Synthetic oligonucleotide
  Sense strand starting at position 2387 of SEQ ID NO: 588639
ggaguuuggaccgagguga

SEQ ID NO: 879185 - RNA, 19 nt, Artificial Sequence
  Description of Artificial Sequence: Synthetic oligonucleotide
  Antisense strand to SEQ ID NO: 879184
ucaccucgguccaaacucc

SEQ ID NO: 879186 - RNA, 19 nt, Artificial Sequence
  Description of Artificial Sequence: Synthetic oligonucleotide
  Sense strand starting at position 2625 of SEQ ID NO: 588639
cuucucucacuuugggaga

SEQ ID NO: 879187 - RNA, 19 nt, Artificial Sequence
  Description of Artificial Sequence: Synthetic oligonucleotide
  Antisense strand to SEQ ID NO: 879186
ucucccaaagugagagaag

SEQ ID NO: 879188 - RNA, 19 nt, Artificial Sequence
  Description of Artificial Sequence: Synthetic oligonucleotide
  Sense strand starting at position 3014 of SEQ ID NO: 588639
uuucuacucuuugugaaag

SEQ ID NO: 879189 - RNA, 19 nt, Artificial Sequence
  Description of Artificial Sequence: Synthetic oligonucleotide
  Antisense strand to SEQ ID NO: 879188
cuuucacaaagaguagaaa

SEQ ID NO: 879190 - RNA, 19 nt, Artificial Sequence
  Description of Artificial Sequence: Synthetic oligonucleotide
  Sense strand starting at position 3151 of SEQ ID NO: 588639
gcuguaugccaagauaauu

SEQ ID NO: 879191 - RNA, 19 nt, Artificial Sequence
  Description of Artificial Sequence: Synthetic oligonucleotide
  Antisense strand to SEQ ID NO: 879190
aauuaucuuggcauacagc

SEQ ID NO: 879192 - RNA, 19 nt, Artificial Sequence
  Description of Artificial Sequence: Synthetic oligonucleotide
  Sense strand starting at position 3251 of SEQ ID NO: 588639
uuguacuuguauucuacaa

SEQ ID NO: 879193 - RNA, 19 nt, Artificial Sequence
  Description of Artificial Sequence: Synthetic oligonucleotide
  Antisense strand to SEQ ID NO: 879192
uuguagaauacaaguacaa

SEQ ID NO: 879194 - RNA, 19 nt, Artificial Sequence
  Description of Artificial Sequence: Synthetic oligonucleotide
  Sense strand starting at position 3255 of SEQ ID NO: 588639
acuuguauucuacaaguag

SEQ ID NO: 879195 - RNA, 19 nt, Artificial Sequence
  Description of Artificial Sequence: Synthetic oligonucleotide
  Antisense strand to SEQ ID NO: 879194
cuacuuguagaauacaagu

SEQ ID NO: 879196 - RNA, 19 nt, Artificial Sequence
  Description of Artificial Sequence: Synthetic oligonucleotide
  Sense strand starting at position 3291 of SEQ ID NO: 588639
ucuauugaagugcauauaa

SEQ ID NO: 879197 - RNA, 19 nt, Artificial Sequence
  Description of Artificial Sequence: Synthetic oligonucleotide
  Antisense strand to SEQ ID NO: 879196
uuauaugcacuucaauaga

SEQ ID NO: 879198 - RNA, 19 nt, Artificial Sequence
  Description of Artificial Sequence: Synthetic oligonucleotide
  Sense strand starting at position 3317 of SEQ ID NO: 588639
ucaggugaacuccaucuau

SEQ ID NO: 879199 - RNA, 19 nt, Artificial Sequence
  Description of Artificial Sequence: Synthetic oligonucleotide
  Antisense strand to SEQ ID NO: 879198
auagauggaguucaccuga

SEQ ID NO: 879200 - RNA, 19 nt, Artificial Sequence
  Description of Artificial Sequence: Synthetic oligonucleotide
  Sense strand starting at position 3336 of SEQ ID NO: 588639
ucaucaggugucuaugaua

SEQ ID NO: 879201 - RNA, 19 nt, Artificial Sequence
  Description of Artificial Sequence: Synthetic oligonucleotide
  Antisense strand to SEQ ID NO: 879200
uaucauagacaccugauga

SEQ ID NO: 879202 - RNA, 19 nt, Artificial Sequence
  Description of Artificial Sequence: Synthetic oligonucleotide
  Sense strand starting at position 3354 of SEQ ID NO: 588639
agaauugcguuccuaagac

SEQ ID NO: 879203 - RNA, 19 nt, Artificial Sequence
  Description of Artificial Sequence: Synthetic oligonucleotide
  Antisense strand to SEQ ID NO: 879202
gucuuaggaacgcaauucu

SEQ ID NO: 879204 - RNA, 19 nt, Artificial Sequence
  Description of Artificial Sequence: Synthetic oligonucleotide
  Sense strand starting at position 3380 of SEQ ID NO: 588639
uuguuaacucauggauuau

SEQ ID NO: 879205 - RNA, 19 nt, Artificial Sequence
  Description of Artificial Sequence: Synthetic oligonucleotide
  Antisense strand to SEQ ID NO: 879204
auaauccaugaguuaacaa

SEQ ID NO: 879206 - RNA, 19 nt, Artificial Sequence
  Description of Artificial Sequence: Synthetic oligonucleotide
  Sense strand starting at position 3422 of SEQ ID NO: 588639
gugauugcuccuuauauca

SEQ ID NO: 879207 - RNA, 19 nt, Artificial Sequence
  Description of Artificial Sequence: Synthetic oligonucleotide
  Antisense strand to SEQ ID NO: 879206
ugauauaaggagcaaucac

SEQ ID NO: 879208 - RNA, 19 nt, Artificial Sequence
  Description of Artificial Sequence: Synthetic oligonucleotide
  Sense strand starting at position 3536 of SEQ ID NO: 588639
accuuauagcugugacaug

SEQ ID NO: 879209 - RNA, 19 nt, Artificial Sequence
  Description of Artificial Sequence: Synthetic oligonucleotide
  Antisense strand to SEQ ID NO: 879208
caugucacagcuauaaggu

SEQ ID NO: 879210 - RNA, 19 nt, Artificial Sequence
  Description of Artificial Sequence: Synthetic oligonucleotide
  Sense strand starting at position 3630 of SEQ ID NO: 588639
gucauuuagucccuuuauu

SEQ ID NO: 879211 - RNA, 19 nt, Artificial Sequence
  Description of Artificial Sequence: Synthetic oligonucleotide
  Antisense strand to SEQ ID NO: 879210
aauaaagggacuaaaugac

SEQ ID NO: 879212 - RNA, 19 nt, Artificial Sequence
  Description of Artificial Sequence: Synthetic oligonucleotide
  Sense strand starting at position 3706 of SEQ ID NO: 588639
gugcacuagcaugauaaua

SEQ ID NO: 879213 - RNA, 19 nt, Artificial Sequence
  Description of Artificial Sequence: Synthetic oligonucleotide
  Antisense strand to SEQ ID NO: 879212
uauuaucaugcuagugcac

SEQ ID NO: 879214 - RNA, 19 nt, Artificial Sequence
  Description of Artificial Sequence: Synthetic oligonucleotide
  Sense strand starting at position 3736 of SEQ ID NO: 588639
ccuugaacgccugaaucua

SEQ ID NO: 879215 - RNA, 19 nt, Artificial Sequence
  Description of Artificial Sequence: Synthetic oligonucleotide
  Antisense strand to SEQ ID NO: 879214
uagauucaggcguucaagg

SEQ ID NO: 879216 - RNA, 19 nt, Artificial Sequence
  Description of Artificial Sequence: Synthetic oligonucleotide
  Sense strand starting at position 3842 of SEQ ID NO: 588639
guugaugucagguagacca

SEQ ID NO: 879217 - RNA, 19 nt, Artificial Sequence
  Description of Artificial Sequence: Synthetic oligonucleotide
  Antisense strand to SEQ ID NO: 879216
uggucuaccugacaucaac

SEQ ID NO: 879218 - RNA, 19 nt, Artificial Sequence
  Description of Artificial Sequence: Synthetic oligonucleotide
  Sense strand starting at position 3963 of SEQ ID NO: 588639
agggcuuuauaugcauauu

SEQ ID NO: 879219 - RNA, 19 nt, Artificial Sequence
  Description of Artificial Sequence: Synthetic oligonucleotide
  Antisense strand to SEQ ID NO: 879218
aauaugcauauaaagcccu

SEQ ID NO: 879220 - RNA, 19 nt, Artificial Sequence
  Description of Artificial Sequence: Synthetic oligonucleotide
  Sense strand starting at position 34 of SEQ ID NO: 588641
aaauccuguugugaagaau

SEQ ID NO: 879221 - RNA, 19 nt, Artificial Sequence
  Description of Artificial Sequence: Synthetic oligonucleotide
  Antisense strand to SEQ ID NO: 879220
auucuucacaacaggauuu

SEQ ID NO: 879222 - RNA, 19 nt, Artificial Sequence
  Description of Artificial Sequence: Synthetic oligonucleotide
  Sense strand starting at position 37 of SEQ ID NO: 588641
uccuguugugaagaaucaa

SEQ ID NO: 879223 - RNA, 19 nt, Artificial Sequence
  Description of Artificial Sequence: Synthetic oligonucleotide
  Antisense strand to SEQ ID NO: 879222
uugauucuucacaacagga

SEQ ID NO: 879224 - RNA, 19 nt, Artificial Sequence
  Description of Artificial Sequence: Synthetic oligonucleotide
  Sense strand starting at position 131 of SEQ ID NO: 588641
auguauuacugagaccaag

SEQ ID NO: 879225 - RNA, 19 nt, Artificial Sequence
  Description of Artificial Sequence: Synthetic oligonucleotide
  Antisense strand to SEQ ID NO: 879224
cuuggucucaguaauacau

SEQ ID NO: 879226 - RNA, 19 nt, Artificial Sequence
  Description of Artificial Sequence: Synthetic oligonucleotide
  Sense strand starting at position 142 of SEQ ID NO: 588641
agaccaaggucugucucaa

SEQ ID NO: 879227 - RNA, 19 nt, Artificial Sequence
  Description of Artificial Sequence: Synthetic oligonucleotide
  Antisense strand to SEQ ID NO: 879226
uugagacagaccuuggucu

SEQ ID NO: 879228 - RNA, 19 nt, Artificial Sequence
  Description of Artificial Sequence: Synthetic oligonucleotide
  Sense strand starting at position 497 of SEQ ID NO: 588641
gucugucauccauguaaag

SEQ ID NO: 879229 - RNA, 19 nt, Artificial Sequence
  Description of Artificial Sequence: Synthetic oligonucleotide
  Antisense strand to SEQ ID NO: 879228
cuuuacauggaugacagac

SEQ ID NO: 879230 - RNA, 19 nt, Artificial Sequence
  Description of Artificial Sequence: Synthetic oligonucleotide
  Sense strand starting at position 524 of SEQ ID NO: 588641
auagucuucucugcaugau

SEQ ID NO: 879231 - RNA, 19 nt, Artificial Sequence
  Description of Artificial Sequence: Synthetic oligonucleotide
  Antisense strand to SEQ ID NO: 879230
aucaugcagagaagacuau

SEQ ID NO: 879232 - RNA, 19 nt, Artificial Sequence
  Description of Artificial Sequence: Synthetic oligonucleotide
  Sense strand starting at position 589 of SEQ ID NO: 588641
cuaagucugugguucuauu

SEQ ID NO: 879233 - RNA, 19 nt, Artificial Sequence
  Description of Artificial Sequence: Synthetic oligonucleotide
  Antisense strand to SEQ ID NO: 879232
aauagaaccacagacuuag

SEQ ID NO: 879234 - RNA, 19 nt, Artificial Sequence
  Description of Artificial Sequence: Synthetic oligonucleotide
  Sense strand starting at position 631 of SEQ ID NO: 588641
cccagcauaucugaggaau

SEQ ID NO: 879235 - RNA, 19 nt, Artificial Sequence
  Description of Artificial Sequence: Synthetic oligonucleotide
  Antisense strand to SEQ ID NO: 879234
auuccucagauaugcuggg

SEQ ID NO: 879236 - RNA, 19 nt, Artificial Sequence
  Description of Artificial Sequence: Synthetic oligonucleotide
  Sense strand starting at position 703 of SEQ ID NO: 588641
ucacuauucuaggacagca

SEQ ID NO: 879237 - RNA, 19 nt, Artificial Sequence
  Description of Artificial Sequence: Synthetic oligonucleotide
  Antisense strand to SEQ ID NO: 879236
ugcuguccuagaauaguga

SEQ ID NO: 879238 - RNA, 19 nt, Artificial Sequence
  Description of Artificial Sequence: Synthetic oligonucleotide
  Sense strand starting at position 1026 of SEQ ID NO: 588641
augguauuacuaugcccua

SEQ ID NO: 879239 - RNA, 19 nt, Artificial Sequence
  Description of Artificial Sequence: Synthetic oligonucleotide
  Antisense strand to SEQ ID NO: 879238
uagggcauaguaauaccau

SEQ ID NO: 879240 - RNA, 19 nt, Artificial Sequence
  Description of Artificial Sequence: Synthetic oligonucleotide
  Sense strand starting at position 1027 of SEQ ID NO: 588641
ugguauuacuaugcccuaa

SEQ ID NO: 879241 - RNA, 19 nt, Artificial Sequence
  Description of Artificial Sequence: Synthetic oligonucleotide
  Antisense strand to SEQ ID NO: 879240
uuagggcauaguaauacca

SEQ ID NO: 879242 - RNA, 19 nt, Artificial Sequence
  Description of Artificial Sequence: Synthetic oligonucleotide
  Sense strand starting at position 1216 of SEQ ID NO: 588641
guugcuaucacugggacca

SEQ ID NO: 879243 - RNA, 19 nt, Artificial Sequence
  Description of Artificial Sequence: Synthetic oligonucleotide
  Antisense strand to SEQ ID NO: 879242
uggucccagugauagcaac

SEQ ID NO: 879244 - RNA, 19 nt, Artificial Sequence
  Description of Artificial Sequence: Synthetic oligonucleotide
  Sense strand starting at position 1254 of SEQ ID NO: 588641
uccugacuuuaggcugaua

SEQ ID NO: 879245 - RNA, 19 nt, Artificial Sequence
  Description of Artificial Sequence: Synthetic oligonucleotide
  Antisense strand to SEQ ID NO: 879244
uaucagccuaaagucagga

SEQ ID NO: 879246 - RNA, 19 nt, Artificial Sequence
  Description of Artificial Sequence: Synthetic oligonucleotide
  Sense strand starting at position 1256 of SEQ ID NO: 588641
cugacuuuaggcugauaua

SEQ ID NO: 879247 - RNA, 19 nt, Artificial Sequence
  Description of Artificial Sequence: Synthetic oligonucleotide
  Antisense strand to SEQ ID NO: 879246
uauaucagccuaaagucag

SEQ ID NO: 879248 - RNA, 19 nt, Artificial Sequence
  Description of Artificial Sequence: Synthetic oligonucleotide
  Sense strand starting at position 1257 of SEQ ID NO: 588641
ugacuuuaggcugauauac

SEQ ID NO: 879249 - RNA, 19 nt, Artificial Sequence
  Description of Artificial Sequence: Synthetic oligonucleotide
  Antisense strand to SEQ ID NO: 879248
guauaucagccuaaaguca

SEQ ID NO: 879250 - RNA, 19 nt, Artificial Sequence
  Description of Artificial Sequence: Synthetic oligonucleotide
  Sense strand starting at position 1265 of SEQ ID NO: 588641
ggcugauauaccgagguca

SEQ ID NO: 879251 - RNA, 19 nt, Artificial Sequence
  Description of Artificial Sequence: Synthetic oligonucleotide
  Antisense strand to SEQ ID NO: 879250
ugaccucgguauaucagcc

SEQ ID NO: 879252 - RNA, 19 nt, Artificial Sequence
  Description of Artificial Sequence: Synthetic oligonucleotide
  Sense strand starting at position 1267 of SEQ ID NO: 588641
cugauauaccgaggucaaa

SEQ ID NO: 879253 - RNA, 19 nt, Artificial Sequence
  Description of Artificial Sequence: Synthetic oligonucleotide
  Antisense strand to SEQ ID NO: 879252
uuugaccucgguauaucag

SEQ ID NO: 879254 - RNA, 19 nt, Artificial Sequence
  Description of Artificial Sequence: Synthetic oligonucleotide
  Sense strand starting at position 1307 of SEQ ID NO: 588641
acuaaagguucugcaggau

SEQ ID NO: 879255 - RNA, 19 nt, Artificial Sequence
  Description of Artificial Sequence: Synthetic oligonucleotide
  Antisense strand to SEQ ID NO: 879254
auccugcagaaccuuuagu

SEQ ID NO: 879256 - RNA, 19 nt, Artificial Sequence
  Description of Artificial Sequence: Synthetic oligonucleotide
  Sense strand starting at position 1310 of SEQ ID NO: 588641
aaagguucugcaggaugga

SEQ ID NO: 879257 - RNA, 19 nt, Artificial Sequence
  Description of Artificial Sequence: Synthetic oligonucleotide
  Antisense strand to SEQ ID NO: 879256
uccauccugcagaaccuuu

SEQ ID NO: 879258 - RNA, 19 nt, Artificial Sequence
  Description of Artificial Sequence: Synthetic oligonucleotide
  Sense strand starting at position 1358 of SEQ ID NO: 588641
cccguaucaccuuacagaa

SEQ ID NO: 879259 - RNA, 19 nt, Artificial Sequence
  Description of Artificial Sequence: Synthetic oligonucleotide
  Antisense strand to SEQ ID NO: 879258
uucuguaaggugauacggg

SEQ ID NO: 879260 - RNA, 19 nt, Artificial Sequence
  Description of Artificial Sequence: Synthetic oligonucleotide
  Sense strand starting at position 1386 of SEQ ID NO: 588641
gagcaaaggucuuaaauga

SEQ ID NO: 879261 - RNA, 19 nt, Artificial Sequence
  Description of Artificial Sequence: Synthetic oligonucleotide
  Antisense strand to SEQ ID NO: 879260
ucauuuaagaccuuugcuc

SEQ ID NO: 879262 - RNA, 19 nt, Artificial Sequence
  Description of Artificial Sequence: Synthetic oligonucleotide
  Sense strand starting at position 1420 of SEQ ID NO: 588641
ccgcgucaaaugugacuuu

SEQ ID NO: 879263 - RNA, 19 nt, Artificial Sequence
  Description of Artificial Sequence: Synthetic oligonucleotide
  Antisense strand to SEQ ID NO: 879262
aaagucacauuugacgcgg

SEQ ID NO: 879264 - RNA, 19 nt, Artificial Sequence
  Description of Artificial Sequence: Synthetic oligonucleotide
  Sense strand starting at position 1438 of SEQ ID NO: 588641
uagggaaauuacuuuccga

SEQ ID NO: 879265 - RNA, 19 nt, Artificial Sequence
  Description of Artificial Sequence: Synthetic oligonucleotide
  Antisense strand to SEQ ID NO: 879264
ucggaaaguaauuucccua

SEQ ID NO: 879266 - RNA, 19 nt, Artificial Sequence
  Description of Artificial Sequence: Synthetic oligonucleotide
  Sense strand starting at position 1697 of SEQ ID NO: 588641
gcgguaaacuguucaagca

SEQ ID NO: 879267 - RNA, 19 nt, Artificial Sequence
  Description of Artificial Sequence: Synthetic oligonucleotide
  Antisense strand to SEQ ID NO: 879266
ugcuugaacaguuuaccgc

SEQ ID NO: 879268 - RNA, 19 nt, Artificial Sequence
  Description of Artificial Sequence: Synthetic oligonucleotide
  Sense strand starting at position 1797 of SEQ ID NO: 588641
ccgguuagucucugaccuu

SEQ ID NO: 879269 - RNA, 19 nt, Artificial Sequence
  Description of Artificial Sequence: Synthetic oligonucleotide
  Antisense strand to SEQ ID NO: 879268
aaggucagagacuaaccgg

SEQ ID NO: 879270 - RNA, 19 nt, Artificial Sequence
  Description of Artificial Sequence: Synthetic oligonucleotide
  Sense strand starting at position 1998 of SEQ ID NO: 588641
gacgucaagcuuggucaga

SEQ ID NO: 879271 - RNA, 19 nt, Artificial Sequence
  Description of Artificial Sequence: Synthetic oligonucleotide
  Antisense strand to SEQ ID NO: 879270
ucugaccaagcuugacguc

SEQ ID NO: 879272 - RNA, 19 nt, Artificial Sequence
  Description of Artificial Sequence: Synthetic oligonucleotide
  Sense strand starting at position 2174 of SEQ ID NO: 588641
aguguuaagucucucuucu

SEQ ID NO: 879273 - RNA, 19 nt, Artificial Sequence
  Description of Artificial Sequence: Synthetic oligonucleotide
  Antisense strand to SEQ ID NO: 879272
agaagagagacuuaacacu

SEQ ID NO: 879274 - RNA, 19 nt, Artificial Sequence
  Description of Artificial Sequence: Synthetic oligonucleotide
  Sense strand starting at position 2205 of SEQ ID NO: 588641
gccuaagcgaccuaugcuu

SEQ ID NO: 879275 - RNA, 19 nt, Artificial Sequence
  Description of Artificial Sequence: Synthetic oligonucleotide
  Antisense strand to SEQ ID NO: 879274
aagcauaggucgcuuaggc

SEQ ID NO: 879276 - RNA, 19 nt, Artificial Sequence
  Description of Artificial Sequence: Synthetic oligonucleotide
  Sense strand starting at position 2211 of SEQ ID NO: 588641
gcgaccuaugcuucuuguu

SEQ ID NO: 879277 - RNA, 19 nt, Artificial Sequence
  Description of Artificial Sequence: Synthetic oligonucleotide
  Antisense strand to SEQ ID NO: 879276
aacaagaagcauaggucgc

SEQ ID NO: 879278 - RNA, 19 nt, Artificial Sequence
  Description of Artificial Sequence: Synthetic oligonucleotide
  Sense strand starting at position 2220 of SEQ ID NO: 588641
gcuucuuguucuucugaaa

SEQ ID NO: 879279 - RNA, 19 nt, Artificial Sequence
  Description of Artificial Sequence: Synthetic oligonucleotide
  Antisense strand to SEQ ID NO: 879278
uuucagaagaacaagaagc

SEQ ID NO: 879280 - RNA, 19 nt, Artificial Sequence
  Description of Artificial Sequence: Synthetic oligonucleotide
  Sense strand starting at position 2295 of SEQ ID NO: 588641
uuuggaacuugacagaugu

SEQ ID NO: 879281 - RNA, 19 nt, Artificial Sequence
  Description of Artificial Sequence: Synthetic oligonucleotide
  Antisense strand to SEQ ID NO: 879280
acaucugucaaguuccaaa

SEQ ID NO: 879282 - RNA, 19 nt, Artificial Sequence
  Description of Artificial Sequence: Synthetic oligonucleotide
  Sense strand starting at position 2336 of SEQ ID NO: 588641
gaggcuuuggacuaugcaa

SEQ ID NO: 879283 - RNA, 19 nt, Artificial Sequence
  Description of Artificial Sequence: Synthetic oligonucleotide
  Antisense strand to SEQ ID NO: 879282
uugcauaguccaaagccuc

SEQ ID NO: 879284 - RNA, 19 nt, Artificial Sequence
  Description of Artificial Sequence: Synthetic oligonucleotide
  Sense strand starting at position 2403 of SEQ ID NO: 588641
cgacucuuaaaguguggaa

SEQ ID NO: 879285 - RNA, 19 nt, Artificial Sequence
  Description of Artificial Sequence: Synthetic oligonucleotide
  Antisense strand to SEQ ID NO: 879284
uuccacacuuuaagagucg

SEQ ID NO: 879286 - RNA, 19 nt, Artificial Sequence
  Description of Artificial Sequence: Synthetic oligonucleotide
  Sense strand starting at position 2504 of SEQ ID NO: 588641
gagccauauccaugucuag

SEQ ID NO: 879287 - RNA, 19 nt, Artificial Sequence
  Description of Artificial Sequence: Synthetic oligonucleotide
  Antisense strand to SEQ ID NO: 879286
cuagacauggauauggcuc

SEQ ID NO: 879288 - RNA, 19 nt, Artificial Sequence
  Description of Artificial Sequence: Synthetic oligonucleotide
  Sense strand starting at position 2534 of SEQ ID NO: 588641
ugugccaaguccuuugcaa

SEQ ID NO: 879289 - RNA, 19 nt, Artificial Sequence
  Description of Artificial Sequence: Synthetic oligonucleotide
  Antisense strand to SEQ ID NO: 879288
uugcaaaggacuuggcaca

SEQ ID NO: 879290 - RNA, 19 nt, Artificial Sequence
  Description of Artificial Sequence: Synthetic oligonucleotide
  Sense strand starting at position 2788 of SEQ ID NO: 588641
gcguauguagucucagcua

SEQ ID NO: 879291 - RNA, 19 nt, Artificial Sequence
  Description of Artificial Sequence: Synthetic oligonucleotide
  Antisense strand to SEQ ID NO: 879290
uagcugagacuacauacgc

SEQ ID NO: 879292 - RNA, 19 nt, Artificial Sequence
  Description of Artificial Sequence: Synthetic oligonucleotide
  Sense strand starting at position 3729 of SEQ ID NO: 588641
gugacaggauuagaauuga

SEQ ID NO: 879293 - RNA, 19 nt, Artificial Sequence
  Description of Artificial Sequence: Synthetic oligonucleotide
  Antisense strand to SEQ ID NO: 879292
ucaauucuaauccugucac

SEQ ID NO: 879294 - RNA, 19 nt, Artificial Sequence
  Description of Artificial Sequence: Synthetic oligonucleotide
  Sense strand starting at position 3766 of SEQ ID NO: 588641
gacugaugguauuaaaguc

SEQ ID NO: 879295 - RNA, 19 nt, Artificial Sequence
  Description of Artificial Sequence: Synthetic oligonucleotide
  Antisense strand to SEQ ID NO: 879294
gacuuuaauaccaucaguc

SEQ ID NO: 879296 - RNA, 19 nt, Artificial Sequence
  Description of Artificial Sequence: Synthetic oligonucleotide
  Sense strand starting at position 3796 of SEQ ID NO: 588641
acauuucuguagugaauua

SEQ ID NO: 879297 - RNA, 19 nt, Artificial Sequence
  Description of Artificial Sequence: Synthetic oligonucleotide
  Antisense strand to SEQ ID NO: 879296
uaauucacuacagaaaugu

SEQ ID NO: 879298 - RNA, 19 nt, Artificial Sequence
  Description of Artificial Sequence: Synthetic oligonucleotide
  Sense strand starting at position 3814 of SEQ ID NO: 588641
auaaaugcucuaggacaga

SEQ ID NO: 879299 - RNA, 19 nt, Artificial Sequence
  Description of Artificial Sequence: Synthetic oligonucleotide
  Antisense strand to SEQ ID NO: 879298
ucuguccuagagcauuuau

SEQ ID NO: 879300 - RNA, 19 nt, Artificial Sequence
  Description of Artificial Sequence: Synthetic oligonucleotide
  Sense strand starting at position 353 of SEQ ID NO: 588642
agauauugucauuguguag

SEQ ID NO: 879301 - RNA, 19 nt, Artificial Sequence
  Description of Artificial Sequence: Synthetic oligonucleotide
  Antisense strand to SEQ ID NO: 879300
cuacacaaugacaauaucu

SEQ ID NO: 879302 - RNA, 19 nt, Artificial Sequence
  Description of Artificial Sequence: Synthetic oligonucleotide
  Sense strand starting at position 830 of SEQ ID NO: 588642
uugagcucccaguaacuga

SEQ ID NO: 879303 - RNA, 19 nt, Artificial Sequence
  Description of Artificial Sequence: Synthetic oligonucleotide
  Antisense strand to SEQ ID NO: 879302
ucaguuacugggagcucaa

SEQ ID NO: 879304 - RNA, 19 nt, Artificial Sequence
  Description of Artificial Sequence: Synthetic oligonucleotide
  Sense strand starting at position 901 of SEQ ID NO: 588642
cagaguugucuggaacuca

SEQ ID NO: 879305 - RNA, 19 nt, Artificial Sequence
  Description of Artificial Sequence: Synthetic oligonucleotide
  Antisense strand to SEQ ID NO: 879304
ugaguuccagacaacucug

SEQ ID NO: 879306 - RNA, 19 nt, Artificial Sequence
  Description of Artificial Sequence: Synthetic oligonucleotide
  Sense strand starting at position 1027 of SEQ ID NO: 588642
auaggacugucuuccuauu

SEQ ID NO: 879307 - RNA, 19 nt, Artificial Sequence
  Description of Artificial Sequence: Synthetic oligonucleotide
  Antisense strand to SEQ ID NO: 879306
aauaggaagacaguccuau

SEQ ID NO: 879308 - RNA, 19 nt, Artificial Sequence
  Description of Artificial Sequence: Synthetic oligonucleotide
  Sense strand starting at position 1092 of SEQ ID NO: 588642
agagccuuccacugagaac

SEQ ID NO: 879309 - RNA, 19 nt, Artificial Sequence
  Description of Artificial Sequence: Synthetic oligonucleotide
  Antisense strand to SEQ ID NO: 879308
guucucaguggaaggcucu

SEQ ID NO: 879310 - RNA, 19 nt, Artificial Sequence
  Description of Artificial Sequence: Synthetic oligonucleotide
  Sense strand starting at position 1902 of SEQ ID NO: 588642
uugaauucccaaggaguug

SEQ ID NO: 879311 - RNA, 19 nt, Artificial Sequence
  Description of Artificial Sequence: Synthetic oligonucleotide
  Antisense strand to SEQ ID NO: 879310
caacuccuugggaauucaa

SEQ ID NO: 879312 - RNA, 19 nt, Artificial Sequence
  Description of Artificial Sequence: Synthetic oligonucleotide
  Sense strand starting at position 1924 of SEQ ID NO: 588642
caaggcagacucggauaau

SEQ ID NO: 879313 - RNA, 19 nt, Artificial Sequence
  Description of Artificial Sequence: Synthetic oligonucleotide
  Antisense strand to SEQ ID NO: 879312
auuauccgagucugccuug

SEQ ID NO: 879314 - RNA, 19 nt, Artificial Sequence
  Description of Artificial Sequence: Synthetic oligonucleotide
  Sense strand starting at position 2095 of SEQ ID NO: 588642
agggauaauuugcauauaa

SEQ ID NO: 879315 - RNA, 19 nt, Artificial Sequence
  Description of Artificial Sequence: Synthetic oligonucleotide
  Antisense strand to SEQ ID NO: 879314
uuauaugcaaauuaucccu

SEQ ID NO: 879316 - RNA, 19 nt, Artificial Sequence
  Description of Artificial Sequence: Synthetic oligonucleotide
  Sense strand starting at position 2282 of SEQ ID NO: 588642
gacagugugcgccucuuua

SEQ ID NO: 879317 - RNA, 19 nt, Artificial Sequence
  Description of Artificial Sequence: Synthetic oligonucleotide
  Antisense strand to SEQ ID NO: 879316
uaaagaggcgcacacuguc

SEQ ID NO: 879318 - RNA, 19 nt, Artificial Sequence
  Description of Artificial Sequence: Synthetic oligonucleotide
  Sense strand starting at position 2527 of SEQ ID NO: 588642
gggacugaguguuugaaau

SEQ ID NO: 879319 - RNA, 19 nt, Artificial Sequence
  Description of Artificial Sequence: Synthetic oligonucleotide
  Antisense strand to SEQ ID NO: 879318
auuucaaacacucaguccc

SEQ ID NO: 879320 - RNA, 19 nt, Artificial Sequence
  Description of Artificial Sequence: Synthetic oligonucleotide
  Sense strand starting at position 2586 of SEQ ID NO: 588642
ugcucaucauuguuuagga

SEQ ID NO: 879321 - RNA, 19 nt, Artificial Sequence
  Description of Artificial Sequence: Synthetic oligonucleotide
  Antisense strand to SEQ ID NO: 879320
uccuaaacaaugaugagca

SEQ ID NO: 879322 - RNA, 19 nt, Artificial Sequence
  Description of Artificial Sequence: Synthetic oligonucleotide
  Sense strand starting at position 2587 of SEQ ID NO: 588642
gcucaucauuguuuaggaa

SEQ ID NO: 879323 - RNA, 19 nt, Artificial Sequence
  Description of Artificial Sequence: Synthetic oligonucleotide
  Antisense strand to SEQ ID NO: 879322
uuccuaaacaaugaugagc

SEQ ID NO: 879324 - RNA, 19 nt, Artificial Sequence
  Description of Artificial Sequence: Synthetic oligonucleotide
  Sense strand starting at position 2640 of SEQ ID NO: 588642
ggaaucuguccacaccagu

SEQ ID NO: 879325 - RNA, 19 nt, Artificial Sequence
  Description of Artificial Sequence: Synthetic oligonucleotide
  Antisense strand to SEQ ID NO: 879324
acugguguggacagauucc

SEQ ID NO: 879326 - RNA, 19 nt, Artificial Sequence
  Description of Artificial Sequence: Synthetic oligonucleotide
  Sense strand starting at position 2855 of SEQ ID NO: 588642
aauugugcacaguggaaua

SEQ ID NO: 879327 - RNA, 19 nt, Artificial Sequence
  Description of Artificial Sequence: Synthetic oligonucleotide
  Antisense strand to SEQ ID NO: 879326
uauuccacugugcacaauu

SEQ ID NO: 879328 - RNA, 19 nt, Artificial Sequence
  Description of Artificial Sequence: Synthetic oligonucleotide
  Sense strand starting at position 2921 of SEQ ID NO: 588642
uucuuuccuggaggaaaua

SEQ ID NO: 879329 - RNA, 19 nt, Artificial Sequence
  Description of Artificial Sequence: Synthetic oligonucleotide
  Antisense strand to SEQ ID NO: 879328
uauuuccuccaggaaagaa

SEQ ID NO: 879330 - RNA, 19 nt, Artificial Sequence
  Description of Artificial Sequence: Synthetic oligonucleotide
  Sense strand starting at position 2930 of SEQ ID NO: 588642
ggaggaaauagguguuauc

SEQ ID NO: 879331 - RNA, 19 nt, Artificial Sequence
  Description of Artificial Sequence: Synthetic oligonucleotide
  Antisense strand to SEQ ID NO: 879330
gauaacaccuauuuccucc

SEQ ID NO: 879332 - RNA, 19 nt, Artificial Sequence
  Description of Artificial Sequence: Synthetic oligonucleotide
  Sense strand starting at position 3079 of SEQ ID NO: 588642
ugauauuugcagugacugu

SEQ ID NO: 879333 - RNA, 19 nt, Artificial Sequence
  Description of Artificial Sequence: Synthetic oligonucleotide
  Antisense strand to SEQ ID NO: 879332
acagucacugcaaauauca

SEQ ID NO: 879334 - RNA, 19 nt, Artificial Sequence
  Description of Artificial Sequence: Synthetic oligonucleotide
  Sense strand starting at position 3092 of SEQ ID NO: 588642
gacuguauuugucccagua

SEQ ID NO: 879335 - RNA, 19 nt, Artificial Sequence
  Description of Artificial Sequence: Synthetic oligonucleotide
  Antisense strand to SEQ ID NO: 879334
uacugggacaaauacaguc

SEQ ID NO: 879336 - RNA, 19 nt, Artificial Sequence
  Description of Artificial Sequence: Synthetic oligonucleotide
  Sense strand starting at position 3122 of SEQ ID NO: 588642
cucuuuauuucuguaggua

SEQ ID NO: 879337 - RNA, 19 nt, Artificial Sequence
  Description of Artificial Sequence: Synthetic oligonucleotide
  Antisense strand to SEQ ID NO: 879336
uaccuacagaaauaaagag

SEQ ID NO: 879338 - RNA, 19 nt, Artificial Sequence
  Description of Artificial Sequence: Synthetic oligonucleotide
  Sense strand starting at position 3134 of SEQ ID NO: 588642
guagguaaauugcuagaau

SEQ ID NO: 879339 - RNA, 19 nt, Artificial Sequence
  Description of Artificial Sequence: Synthetic oligonucleotide
  Antisense strand to SEQ ID NO: 879338
auucuagcaauuuaccuac

SEQ ID NO: 879340 - RNA, 19 nt, Artificial Sequence
  Description of Artificial Sequence: Synthetic oligonucleotide
  Sense strand starting at position 3145 of SEQ ID NO: 588642
gcuagaaugagauguugga

SEQ ID NO: 879341 - RNA, 19 nt, Artificial Sequence
  Description of Artificial Sequence: Synthetic oligonucleotide
  Antisense strand to SEQ ID NO: 879340
uccaacaucucauucuagc

SEQ ID NO: 879342 - RNA, 19 nt, Artificial Sequence
  Description of Artificial Sequence: Synthetic oligonucleotide
  Sense strand starting at position 3149 of SEQ ID NO: 588642
gaaugagauguuggacugu

SEQ ID NO: 879343 - RNA, 19 nt, Artificial Sequence
  Description of Artificial Sequence: Synthetic oligonucleotide
  Antisense strand to SEQ ID NO: 879342
acaguccaacaucucauuc

SEQ ID NO: 879344 - RNA, 19 nt, Artificial Sequence
  Description of Artificial Sequence: Synthetic oligonucleotide
  Sense strand starting at position 3192 of SEQ ID NO: 588642
agaacauaguggccagauu

SEQ ID NO: 879345 - RNA, 19 nt, Artificial Sequence
  Description of Artificial Sequence: Synthetic oligonucleotide
  Antisense strand to SEQ ID NO: 879344
aaucuggccacuauguucu

SEQ ID NO: 879346 - RNA, 19 nt, Artificial Sequence
  Description of Artificial Sequence: Synthetic oligonucleotide
  Sense strand starting at position 3292 of SEQ ID NO: 588642
auaugacauuuagaguaca

SEQ ID NO: 879347 - RNA, 19 nt, Artificial Sequence
  Description of Artificial Sequence: Synthetic oligonucleotide
  Antisense strand to SEQ ID NO: 879346
uguacucuaaaugucauau

SEQ ID NO: 879348 - RNA, 19 nt, Artificial Sequence
  Description of Artificial Sequence: Synthetic oligonucleotide
  Sense strand starting at position 3402 of SEQ ID NO: 588642
guaacauauuaggcaauua

SEQ ID NO: 879349 - RNA, 19 nt, Artificial Sequence
  Description of Artificial Sequence: Synthetic oligonucleotide
  Antisense strand to SEQ ID NO: 879348
uaauugccuaauauguuac

SEQ ID NO: 879350 - RNA, 19 nt, Artificial Sequence
  Description of Artificial Sequence: Synthetic oligonucleotide
  Sense strand starting at position 3412 of SEQ ID NO: 588642
aggcaauuauuguuaacuc

SEQ ID NO: 879351 - RNA, 19 nt, Artificial Sequence
  Description of Artificial Sequence: Synthetic oligonucleotide
  Antisense strand to SEQ ID NO: 879350
gaguuaacaauaauugccu

SEQ ID NO: 879352 - RNA, 19 nt, Artificial Sequence
  Description of Artificial Sequence: Synthetic oligonucleotide
  Sense strand starting at position 3424 of SEQ ID NO: 588642
uuaacucuccacugugaga

SEQ ID NO: 879353 - RNA, 19 nt, Artificial Sequence
  Description of Artificial Sequence: Synthetic oligonucleotide
  Antisense strand to SEQ ID NO: 879352
ucucacaguggagaguuaa

SEQ ID NO: 879354 - RNA, 19 nt, Artificial Sequence
  Description of Artificial Sequence: Synthetic oligonucleotide
  Sense strand starting at position 3459 of SEQ ID NO: 588642
aggagacucaagugugaau

SEQ ID NO: 879355 - RNA, 19 nt, Artificial Sequence
  Description of Artificial Sequence: Synthetic oligonucleotide
  Antisense strand to SEQ ID NO: 879354
auucacacuugagucuccu

SEQ ID NO: 879356 - RNA, 19 nt, Artificial Sequence
  Description of Artificial Sequence: Synthetic oligonucleotide
  Sense strand starting at position 3461 of SEQ ID NO: 588642
gagacucaagugugaaucu

SEQ ID NO: 879357 - RNA, 19 nt, Artificial Sequence
  Description of Artificial Sequence: Synthetic oligonucleotide
  Antisense strand to SEQ ID NO: 879356
agauucacacuugagucuc

SEQ ID NO: 879358 - RNA, 19 nt, Artificial Sequence
  Description of Artificial Sequence: Synthetic oligonucleotide
  Sense strand starting at position 3530 of SEQ ID NO: 588642
gcaggcugauuugaugaaa

SEQ ID NO: 879359 - RNA, 19 nt, Artificial Sequence
  Description of Artificial Sequence: Synthetic oligonucleotide
  Antisense strand to SEQ ID NO: 879358
uuucaucaaaucagccugc

SEQ ID NO: 879360 - RNA, 19 nt, Artificial Sequence
  Description of Artificial Sequence: Synthetic oligonucleotide
  Sense strand starting at position 3662 of SEQ ID NO: 588642
ggcuuacaauuccuagaac

SEQ ID NO: 879361 - RNA, 19 nt, Artificial Sequence
  Description of Artificial Sequence: Synthetic oligonucleotide
  Antisense strand to SEQ ID NO: 879360
guucuaggaauuguaagcc

SEQ ID NO: 879362 - RNA, 19 nt, Artificial Sequence
  Description of Artificial Sequence: Synthetic oligonucleotide
  Sense strand starting at position 3682 of SEQ ID NO: 588642
cugguuucuccaggaguua

SEQ ID NO: 879363 - RNA, 19 nt, Artificial Sequence
  Description of Artificial Sequence: Synthetic oligonucleotide
  Antisense strand to SEQ ID NO: 879362
uaacuccuggagaaaccag

SEQ ID NO: 879364 - RNA, 19 nt, Artificial Sequence
  Description of Artificial Sequence: Synthetic oligonucleotide
  Sense strand starting at position 3683 of SEQ ID NO: 588642
ugguuucuccaggaguuag

SEQ ID NO: 879365 - RNA, 19 nt, Artificial Sequence
  Description of Artificial Sequence: Synthetic oligonucleotide
  Antisense strand to SEQ ID NO: 879364
cuaacuccuggagaaacca

SEQ ID NO: 879366 - RNA, 19 nt, Artificial Sequence
  Description of Artificial Sequence: Synthetic oligonucleotide
  Sense strand starting at position 3788 of SEQ ID NO: 588642
ugugaauccugguuggagu

SEQ ID NO: 879367 - RNA, 19 nt, Artificial Sequence
  Description of Artificial Sequence: Synthetic oligonucleotide
  Antisense strand to SEQ ID NO: 879366
acuccaaccaggauucaca

SEQ ID NO: 879368 - RNA, 19 nt, Artificial Sequence
  Description of Artificial Sequence: Synthetic oligonucleotide
  Sense strand starting at position 3836 of SEQ ID NO: 588642
ucacaagugucaucacaug

SEQ ID NO: 879369 - RNA, 19 nt, Artificial Sequence
  Description of Artificial Sequence: Synthetic oligonucleotide
  Antisense strand to SEQ ID NO: 879368
caugugaugacacuuguga

SEQ ID NO: 879370 - RNA, 19 nt, Artificial Sequence
  Description of Artificial Sequence: Synthetic oligonucleotide
  Sense strand starting at position 3853 of SEQ ID NO: 588642
ugugguucucagcauggga

SEQ ID NO: 879371 - RNA, 19 nt, Artificial Sequence
  Description of Artificial Sequence: Synthetic oligonucleotide
  Antisense strand to SEQ ID NO: 879370
ucccaugcugagaaccaca

SEQ ID NO: 879372 - RNA, 19 nt, Artificial Sequence
  Description of Artificial Sequence: Synthetic oligonucleotide
  Sense strand starting at position 3855 of SEQ ID NO: 588642
ugguucucagcaugggaau

SEQ ID NO: 879373 - RNA, 19 nt, Artificial Sequence
  Description of Artificial Sequence: Synthetic oligonucleotide
  Antisense strand to SEQ ID NO: 879372
auucccaugcugagaacca

SEQ ID NO: 879374 - RNA, 19 nt, Artificial Sequence
  Description of Artificial Sequence: Synthetic oligonucleotide
  Sense strand starting at position 3856 of SEQ ID NO: 588642
gguucucagcaugggaauu

SEQ ID NO: 879375 - RNA, 19 nt, Artificial Sequence
  Description of Artificial Sequence: Synthetic oligonucleotide
  Antisense strand to SEQ ID NO: 879374
aauucccaugcugagaacc

SEQ ID NO: 879376 - RNA, 19 nt, Artificial Sequence
  Description of Artificial Sequence: Synthetic oligonucleotide
  Sense strand starting at position 3857 of SEQ ID NO: 588642
guucucagcaugggaauua

SEQ ID NO: 879377 - RNA, 19 nt, Artificial Sequence
  Description of Artificial Sequence: Synthetic oligonucleotide
  Antisense strand to SEQ ID NO: 879376
uaauucccaugcugagaac

SEQ ID NO: 879378 - RNA, 19 nt, Artificial Sequence
  Description of Artificial Sequence: Synthetic oligonucleotide
  Sense strand starting at position 3918 of SEQ ID NO: 588642
cagaauugcuguuuaucag

SEQ ID NO: 879379 - RNA, 19 nt, Artificial Sequence
  Description of Artificial Sequence: Synthetic oligonucleotide
  Antisense strand to SEQ ID NO: 879378
cugauaaacagcaauucug

SEQ ID NO: 879380 - RNA, 19 nt, Artificial Sequence
  Description of Artificial Sequence: Synthetic oligonucleotide
  Sense strand starting at position 356 of SEQ ID NO: 588643
gagauauugucauugugua

SEQ ID NO: 879381 - RNA, 19 nt, Artificial Sequence
  Description of Artificial Sequence: Synthetic oligonucleotide
  Antisense strand to SEQ ID NO: 879380
uacacaaugacaauaucuc

SEQ ID NO: 879382 - RNA, 19 nt, Artificial Sequence
  Description of Artificial Sequence: Synthetic oligonucleotide
  Sense strand starting at position 357 of SEQ ID NO: 588643
agauauugucauuguguag

SEQ ID NO: 879383 - RNA, 19 nt, Artificial Sequence
  Description of Artificial Sequence: Synthetic oligonucleotide
  Antisense strand to SEQ ID NO: 879382
cuacacaaugacaauaucu

SEQ ID NO: 879384 - RNA, 19 nt, Artificial Sequence
  Description of Artificial Sequence: Synthetic oligonucleotide
  Sense strand starting at position 835 of SEQ ID NO: 588643
uugagcucccaguaacuga

SEQ ID NO: 879385 - RNA, 19 nt, Artificial Sequence
  Description of Artificial Sequence: Synthetic oligonucleotide
  Antisense strand to SEQ ID NO: 879384
ucaguuacugggagcucaa

SEQ ID NO: 879386 - RNA, 19 nt, Artificial Sequence
  Description of Artificial Sequence: Synthetic oligonucleotide
  Sense strand starting at position 902 of SEQ ID NO: 588643
gaggcagaguugucuggaa

SEQ ID NO: 879387 - RNA, 19 nt, Artificial Sequence
  Description of Artificial Sequence: Synthetic oligonucleotide
  Antisense strand to SEQ ID NO: 879386
uuccagacaacucugccuc

SEQ ID NO: 879388 - RNA, 19 nt, Artificial Sequence
  Description of Artificial Sequence: Synthetic oligonucleotide
  Sense strand starting at position 904 of SEQ ID NO: 588643
ggcagaguugucuggaacu

SEQ ID NO: 879389 - RNA, 19 nt, Artificial Sequence
  Description of Artificial Sequence: Synthetic oligonucleotide
  Antisense strand to SEQ ID NO: 879388
aguuccagacaacucugcc

SEQ ID NO: 879390 - RNA, 19 nt, Artificial Sequence
  Description of Artificial Sequence: Synthetic oligonucleotide
  Sense strand starting at position 906 of SEQ ID NO: 588643
cagaguugucuggaacuca

SEQ ID NO: 879391 - RNA, 19 nt, Artificial Sequence
  Description of Artificial Sequence: Synthetic oligonucleotide
  Antisense strand to SEQ ID NO: 879390
ugaguuccagacaacucug

SEQ ID NO: 879392 - RNA, 19 nt, Artificial Sequence
  Description of Artificial Sequence: Synthetic oligonucleotide
  Sense strand starting at position 1032 of SEQ ID NO: 588643
auaggacugucuuccuauu

SEQ ID NO: 879393 - RNA, 19 nt, Artificial Sequence
  Description of Artificial Sequence: Synthetic oligonucleotide
  Antisense strand to SEQ ID NO: 879392
aauaggaagacaguccuau

SEQ ID NO: 879394 - RNA, 19 nt, Artificial Sequence
  Description of Artificial Sequence: Synthetic oligonucleotide
  Sense strand starting at position 1097 of SEQ ID NO: 588643
agagccuuccacugagaac

SEQ ID NO: 879395 - RNA, 19 nt, Artificial Sequence
  Description of Artificial Sequence: Synthetic oligonucleotide
  Antisense strand to SEQ ID NO: 879394
guucucaguggaaggcucu

SEQ ID NO: 879396 - RNA, 19 nt, Artificial Sequence
  Description of Artificial Sequence: Synthetic oligonucleotide
  Sense strand starting at position 1903 of SEQ ID NO: 588643
uugaauucccaaggaguug

SEQ ID NO: 879397 - RNA, 19 nt, Artificial Sequence
  Description of Artificial Sequence: Synthetic oligonucleotide
  Antisense strand to SEQ ID NO: 879396
caacuccuugggaauucaa

SEQ ID NO: 879398 - RNA, 19 nt, Artificial Sequence
  Description of Artificial Sequence: Synthetic oligonucleotide
  Sense strand starting at position 2096 of SEQ ID NO: 588643
agggauaauuugcauauaa

SEQ ID NO: 879399 - RNA, 19 nt, Artificial Sequence
  Description of Artificial Sequence: Synthetic oligonucleotide
  Antisense strand to SEQ ID NO: 879398
uuauaugcaaauuaucccu

SEQ ID NO: 879400 - RNA, 19 nt, Artificial Sequence
  Description of Artificial Sequence: Synthetic oligonucleotide
  Sense strand starting at position 2283 of SEQ ID NO: 588643
gacagugugcgccucuuua

SEQ ID NO: 879401 - RNA, 19 nt, Artificial Sequence
  Description of Artificial Sequence: Synthetic oligonucleotide
  Antisense strand to SEQ ID NO: 879400
uaaagaggcgcacacuguc

SEQ ID NO: 879402 - RNA, 19 nt, Artificial Sequence
  Description of Artificial Sequence: Synthetic oligonucleotide
  Sense strand starting at position 2641 of SEQ ID NO: 588643
ggaaucuguccacaccagu

SEQ ID NO: 879403 - RNA, 19 nt, Artificial Sequence
  Description of Artificial Sequence: Synthetic oligonucleotide
  Antisense strand to SEQ ID NO: 879402
acugguguggacagauucc

SEQ ID NO: 879404 - RNA, 19 nt, Artificial Sequence
  Description of Artificial Sequence: Synthetic oligonucleotide
  Sense strand starting at position 2856 of SEQ ID NO: 588643
aauugugcacaguggaaua

SEQ ID NO: 879405 - RNA, 19 nt, Artificial Sequence
  Description of Artificial Sequence: Synthetic oligonucleotide
  Antisense strand to SEQ ID NO: 879404
uauuccacugugcacaauu

SEQ ID NO: 879406 - RNA, 19 nt, Artificial Sequence
  Description of Artificial Sequence: Synthetic oligonucleotide
  Sense strand starting at position 2922 of SEQ ID NO: 588643
uucuuuccuggaggaaaua

SEQ ID NO: 879407 - RNA, 19 nt, Artificial Sequence
  Description of Artificial Sequence: Synthetic oligonucleotide
  Antisense strand to SEQ ID NO: 879406
uauuuccuccaggaaagaa

SEQ ID NO: 879408 - RNA, 19 nt, Artificial Sequence
  Description of Artificial Sequence: Synthetic oligonucleotide
  Sense strand starting at position 3080 of SEQ ID NO: 588643
ugauauuugcagugacugu

SEQ ID NO: 879409 - RNA, 19 nt, Artificial Sequence
  Description of Artificial Sequence: Synthetic oligonucleotide
  Antisense strand to SEQ ID NO: 879408
acagucacugcaaauauca

SEQ ID NO: 879410 - RNA, 19 nt, Artificial Sequence
  Description of Artificial Sequence: Synthetic oligonucleotide
  Sense strand starting at position 3093 of SEQ ID NO: 588643
gacuguauuugucccagua

SEQ ID NO: 879411 - RNA, 19 nt, Artificial Sequence
  Description of Artificial Sequence: Synthetic oligonucleotide
  Antisense strand to SEQ ID NO: 879410
uacugggacaaauacaguc

SEQ ID NO: 879412 - RNA, 19 nt, Artificial Sequence
  Description of Artificial Sequence: Synthetic oligonucleotide
  Sense strand starting at position 3123 of SEQ ID NO: 588643
cucuuuauuucuguaggua

SEQ ID NO: 879413 - RNA, 19 nt, Artificial Sequence
  Description of Artificial Sequence: Synthetic oligonucleotide
  Antisense strand to SEQ ID NO: 879412
uaccuacagaaauaaagag

SEQ ID NO: 879414 - RNA, 19 nt, Artificial Sequence
  Description of Artificial Sequence: Synthetic oligonucleotide
  Sense strand starting at position 3135 of SEQ ID NO: 588643
guagguaaauugcuagaau

SEQ ID NO: 879415 - RNA, 19 nt, Artificial Sequence
  Description of Artificial Sequence: Synthetic oligonucleotide
  Antisense strand to SEQ ID NO: 879414
auucuagcaauuuaccuac

SEQ ID NO: 879416 - RNA, 19 nt, Artificial Sequence
  Description of Artificial Sequence: Synthetic oligonucleotide
  Sense strand starting at position 3146 of SEQ ID NO: 588643
gcuagaaugagauguugga

SEQ ID NO: 879417 - RNA, 19 nt, Artificial Sequence
  Description of Artificial Sequence: Synthetic oligonucleotide
  Antisense strand to SEQ ID NO: 879416
uccaacaucucauucuagc

SEQ ID NO: 879418 - RNA, 19 nt, Artificial Sequence
  Description of Artificial Sequence: Synthetic oligonucleotide
  Sense strand starting at position 3150 of SEQ ID NO: 588643
gaaugagauguuggacugu

SEQ ID NO: 879419 - RNA, 19 nt, Artificial Sequence
  Description of Artificial Sequence: Synthetic oligonucleotide
  Antisense strand to SEQ ID NO: 879418
acaguccaacaucucauuc

SEQ ID NO: 879420 - RNA, 19 nt, Artificial Sequence
  Description of Artificial Sequence: Synthetic oligonucleotide
  Sense strand starting at position 3193 of SEQ ID NO: 588643
agaacauaguggccagauu

SEQ ID NO: 879421 - RNA, 19 nt, Artificial Sequence
  Description of Artificial Sequence: Synthetic oligonucleotide
  Antisense strand to SEQ ID NO: 879420
aaucuggccacuauguucu

SEQ ID NO: 879422 - RNA, 19 nt, Artificial Sequence
  Description of Artificial Sequence: Synthetic oligonucleotide
  Sense strand starting at position 3293 of SEQ ID NO: 588643
auaugacauuuacaguaca

SEQ ID NO: 879423 - RNA, 19 nt, Artificial Sequence
  Description of Artificial Sequence: Synthetic oligonucleotide
  Antisense strand to SEQ ID NO: 879422
uguacuguaaaugucauau

SEQ ID NO: 879424 - RNA, 19 nt, Artificial Sequence
  Description of Artificial Sequence: Synthetic oligonucleotide
  Sense strand starting at position 3365 of SEQ ID NO: 588643
cuugcacuuuaucugguaa

SEQ ID NO: 879425 - RNA, 19 nt, Artificial Sequence
  Description of Artificial Sequence: Synthetic oligonucleotide
  Antisense strand to SEQ ID NO: 879424
uuaccagauaaagugcaag

SEQ ID NO: 879426 - RNA, 19 nt, Artificial Sequence
  Description of Artificial Sequence: Synthetic oligonucleotide
  Sense strand starting at position 3400 of SEQ ID NO: 588643
guaacauauuaggcaauua

SEQ ID NO: 879427 - RNA, 19 nt, Artificial Sequence
  Description of Artificial Sequence: Synthetic oligonucleotide
  Antisense strand to SEQ ID NO: 879426
uaauugccuaauauguuac

SEQ ID NO: 879428 - RNA, 19 nt, Artificial Sequence
  Description of Artificial Sequence: Synthetic oligonucleotide
  Sense strand starting at position 3410 of SEQ ID NO: 588643
aggcaauuauuguuaacuc

SEQ ID NO: 879429 - RNA, 19 nt, Artificial Sequence
  Description of Artificial Sequence: Synthetic oligonucleotide
  Antisense strand to SEQ ID NO: 879428
gaguuaacaauaauugccu

SEQ ID NO: 879430 - RNA, 19 nt, Artificial Sequence
  Description of Artificial Sequence: Synthetic oligonucleotide
  Sense strand starting at position 3418 of SEQ ID NO: 588643
auuguuaacucuccacugu

SEQ ID NO: 879431 - RNA, 19 nt, Artificial Sequence
  Description of Artificial Sequence: Synthetic oligonucleotide
  Antisense strand to SEQ ID NO: 879430
acaguggagaguuaacaau

SEQ ID NO: 879432 - RNA, 19 nt, Artificial Sequence
  Description of Artificial Sequence: Synthetic oligonucleotide
  Sense strand starting at position 3422 of SEQ ID NO: 588643
uuaacucuccacugugaga

SEQ ID NO: 879433 - RNA, 19 nt, Artificial Sequence
  Description of Artificial Sequence: Synthetic oligonucleotide
  Antisense strand to SEQ ID NO: 879432
ucucacaguggagaguuaa

SEQ ID NO: 879434 - RNA, 19 nt, Artificial Sequence
  Description of Artificial Sequence: Synthetic oligonucleotide
  Sense strand starting at position 3457 of SEQ ID NO: 588643
aggagacucaagugugaau

SEQ ID NO: 879435 - RNA, 19 nt, Artificial Sequence
  Description of Artificial Sequence: Synthetic oligonucleotide
  Antisense strand to SEQ ID NO: 879434
auucacacuugagucuccu

SEQ ID NO: 879436 - RNA, 19 nt, Artificial Sequence
  Description of Artificial Sequence: Synthetic oligonucleotide
  Sense strand starting at position 3459 of SEQ ID NO: 588643
gagacucaagugugaaucu

SEQ ID NO: 879437 - RNA, 19 nt, Artificial Sequence
  Description of Artificial Sequence: Synthetic oligonucleotide
  Antisense strand to SEQ ID NO: 879436
agauucacacuugagucuc

SEQ ID NO: 879438 - RNA, 19 nt, Artificial Sequence
  Description of Artificial Sequence: Synthetic oligonucleotide
  Sense strand starting at position 3528 of SEQ ID NO: 588643
gcaggcugauuugaugaaa

SEQ ID NO: 879439 - RNA, 19 nt, Artificial Sequence
  Description of Artificial Sequence: Synthetic oligonucleotide
  Antisense strand to SEQ ID NO: 879438
uuucaucaaaucagccugc

SEQ ID NO: 879440 - RNA, 19 nt, Artificial Sequence
  Description of Artificial Sequence: Synthetic oligonucleotide
  Sense strand starting at position 3554 of SEQ ID NO: 588643
aggaguagccauuauacug

SEQ ID NO: 879441 - RNA, 19 nt, Artificial Sequence
  Description of Artificial Sequence: Synthetic oligonucleotide
  Antisense strand to SEQ ID NO: 879440
caguauaauggcuacuccu

SEQ ID NO: 879442 - RNA, 19 nt, Artificial Sequence
  Description of Artificial Sequence: Synthetic oligonucleotide
  Sense strand starting at position 3660 of SEQ ID NO: 588643
ggcuuacaauuccuagaac

SEQ ID NO: 879443 - RNA, 19 nt, Artificial Sequence
  Description of Artificial Sequence: Synthetic oligonucleotide
  Antisense strand to SEQ ID NO: 879442
guucuaggaauuguaagcc

SEQ ID NO: 879444 - RNA, 19 nt, Artificial Sequence
  Description of Artificial Sequence: Synthetic oligonucleotide
  Sense strand starting at position 3680 of SEQ ID NO: 588643
cugguuucuccaggaguua

SEQ ID NO: 879445 - RNA, 19 nt, Artificial Sequence
  Description of Artificial Sequence: Synthetic oligonucleotide
  Antisense strand to SEQ ID NO: 879444
uaacuccuggagaaaccag

SEQ ID NO: 879446 - RNA, 19 nt, Artificial Sequence
  Description of Artificial Sequence: Synthetic oligonucleotide
  Sense strand starting at position 3681 of SEQ ID NO: 588643
ugguuucuccaggaguuag

SEQ ID NO: 879447 - RNA, 19 nt, Artificial Sequence
  Description of Artificial Sequence: Synthetic oligonucleotide
  Antisense strand to SEQ ID NO: 879446
cuaacuccuggagaaacca

SEQ ID NO: 879448 - RNA, 19 nt, Artificial Sequence
  Description of Artificial Sequence: Synthetic oligonucleotide
  Sense strand starting at position 3834 of SEQ ID NO: 588643
ucacaagugucaucacaug

SEQ ID NO: 879449 - RNA, 19 nt, Artificial Sequence
  Description of Artificial Sequence: Synthetic oligonucleotide
  Antisense strand to SEQ ID NO: 879448
caugugaugacacuuguga

SEQ ID NO: 879450 - RNA, 19 nt, Artificial Sequence
  Description of Artificial Sequence: Synthetic oligonucleotide
  Sense strand starting at position 3853 of SEQ ID NO: 588643
ugguucucagcaugggaau

SEQ ID NO: 879451 - RNA, 19 nt, Artificial Sequence
  Description of Artificial Sequence: Synthetic oligonucleotide
  Antisense strand to SEQ ID NO: 879450
auucccaugcugagaacca

SEQ ID NO: 879452 - RNA, 19 nt, Artificial Sequence
  Description of Artificial Sequence: Synthetic oligonucleotide
  Sense strand starting at position 3854 of SEQ ID NO: 588643
gguucucagcaugggaauu

SEQ ID NO: 879453 - RNA, 19 nt, Artificial Sequence
  Description of Artificial Sequence: Synthetic oligonucleotide
  Antisense strand to SEQ ID NO: 879452
aauucccaugcugagaacc

SEQ ID NO: 879454 - RNA, 19 nt, Artificial Sequence
  Description of Artificial Sequence: Synthetic oligonucleotide
  Sense strand starting at position 3855 of SEQ ID NO: 588643
guucucagcaugggaauua

SEQ ID NO: 879455 - RNA, 19 nt, Artificial Sequence
  Description of Artificial Sequence: Synthetic oligonucleotide
  Antisense strand to SEQ ID NO: 879454
uaauucccaugcugagaac

SEQ ID NO: 879456 - RNA, 19 nt, Artificial Sequence
  Description of Artificial Sequence: Synthetic oligonucleotide
  Sense strand starting at position 3916 of SEQ ID NO: 588643
cagaauugcuguuuaucag

SEQ ID NO: 879457 - RNA, 19 nt, Artificial Sequence
  Description of Artificial Sequence: Synthetic oligonucleotide
  Antisense strand to SEQ ID NO: 879456
cugauaaacagcaauucug

SEQ ID NO: 879458 - RNA, 19 nt, Artificial Sequence
  Description of Artificial Sequence: Synthetic oligonucleotide
  Sense strand starting at position 3926 of SEQ ID NO: 588643
guuuaucagcgucagaaug

SEQ ID NO: 879459 - RNA, 19 nt, Artificial Sequence
  Description of Artificial Sequence: Synthetic oligonucleotide
  Antisense strand to SEQ ID NO: 879458
cauucugacgcugauaaac

SEQ ID NO: 879460 - RNA, 19 nt, Artificial Sequence
  Description of Artificial Sequence: Synthetic oligonucleotide
  Sense strand starting at position 10 of SEQ ID NO: 588644
gccaucaccuggcaaguaa

SEQ ID NO: 879461 - RNA, 19 nt, Artificial Sequence
  Description of Artificial Sequence: Synthetic oligonucleotide
  Antisense strand to SEQ ID NO: 879460
uuacuugccaggugauggc

SEQ ID NO: 879462 - RNA, 19 nt, Artificial Sequence
  Description of Artificial Sequence: Synthetic oligonucleotide
  Sense strand starting at position 21 of SEQ ID NO: 588644
gcaaguaaaucccagagcu

SEQ ID NO: 879463 - RNA, 19 nt, Artificial Sequence
  Description of Artificial Sequence: Synthetic oligonucleotide
  Antisense strand to SEQ ID NO: 879462
agcucugggauuuacuugc

SEQ ID NO: 879464 - RNA, 19 nt, Artificial Sequence
  Description of Artificial Sequence: Synthetic oligonucleotide
  Sense strand starting at position 42 of SEQ ID NO: 588644
gccagagcuuugugccuaa

SEQ ID NO: 879465 - RNA, 19 nt, Artificial Sequence
  Description of Artificial Sequence: Synthetic oligonucleotide
  Antisense strand to SEQ ID NO: 879464
uuaggcacaaagcucuggc

SEQ ID NO: 879466 - RNA, 19 nt, Artificial Sequence
  Description of Artificial Sequence: Synthetic oligonucleotide
  Sense strand starting at position 45 of SEQ ID NO: 588644
agagcuuugugccuaauua

SEQ ID NO: 879467 - RNA, 19 nt, Artificial Sequence
  Description of Artificial Sequence: Synthetic oligonucleotide
  Antisense strand to SEQ ID NO: 879466
uaauuaggcacaaagcucu

SEQ ID NO: 879468 - RNA, 19 nt, Artificial Sequence
  Description of Artificial Sequence: Synthetic oligonucleotide
  Sense strand starting at position 46 of SEQ ID NO: 588644
gagcuuugugccuaauuac

SEQ ID NO: 879469 - RNA, 19 nt, Artificial Sequence
  Description of Artificial Sequence: Synthetic oligonucleotide
  Antisense strand to SEQ ID NO: 879468
guaauuaggcacaaagcuc

SEQ ID NO: 879470 - RNA, 19 nt, Artificial Sequence
  Description of Artificial Sequence: Synthetic oligonucleotide
  Sense strand starting at position 53 of SEQ ID NO: 588644
gugccuaauuacuauaaug

SEQ ID NO: 879471 - RNA, 19 nt, Artificial Sequence
  Description of Artificial Sequence: Synthetic oligonucleotide
  Antisense strand to SEQ ID NO: 879470
cauuauaguaauuaggcac

SEQ ID NO: 879472 - RNA, 19 nt, Artificial Sequence
  Description of Artificial Sequence: Synthetic oligonucleotide
  Sense strand starting at position 171 of SEQ ID NO: 588644
uugaacugauucuguaaga

SEQ ID NO: 879473 - RNA, 19 nt, Artificial Sequence
  Description of Artificial Sequence: Synthetic oligonucleotide
  Antisense strand to SEQ ID NO: 879472
ucuuacagaaucaguucaa

SEQ ID NO: 879474 - RNA, 19 nt, Artificial Sequence
  Description of Artificial Sequence: Synthetic oligonucleotide
  Sense strand starting at position 172 of SEQ ID NO: 588644
ugaacugauucuguaagaa

SEQ ID NO: 879475 - RNA, 19 nt, Artificial Sequence
  Description of Artificial Sequence: Synthetic oligonucleotide
  Antisense strand to SEQ ID NO: 879474
uucuuacagaaucaguuca

SEQ ID NO: 879476 - RNA, 19 nt, Artificial Sequence
  Description of Artificial Sequence: Synthetic oligonucleotide
  Sense strand starting at position 434 of SEQ ID NO: 588644
gaaggaaugucaucucaug

SEQ ID NO: 879477 - RNA, 19 nt, Artificial Sequence
  Description of Artificial Sequence: Synthetic oligonucleotide
  Antisense strand to SEQ ID NO: 879476
caugagaugacauuccuuc

SEQ ID NO: 879478 - RNA, 19 nt, Artificial Sequence
  Description of Artificial Sequence: Synthetic oligonucleotide
  Sense strand starting at position 495 of SEQ ID NO: 588644
ccagaaaugugaggcugua

SEQ ID NO: 879479 - RNA, 19 nt, Artificial Sequence
  Description of Artificial Sequence: Synthetic oligonucleotide
  Antisense strand to SEQ ID NO: 879478
uacagccucacauuucugg

SEQ ID NO: 879480 - RNA, 19 nt, Artificial Sequence
  Description of Artificial Sequence: Synthetic oligonucleotide
  Sense strand starting at position 695 of SEQ ID NO: 588644
uugcaacaguuagaguaau

SEQ ID NO: 879481 - RNA, 19 nt, Artificial Sequence
  Description of Artificial Sequence: Synthetic oligonucleotide
  Antisense strand to SEQ ID NO: 879480
auuacucuaacuguugcaa

SEQ ID NO: 879482 - RNA, 19 nt, Artificial Sequence
  Description of Artificial Sequence: Synthetic oligonucleotide
  Sense strand starting at position 701 of SEQ ID NO: 588644
caguuagaguaauaaaguu

SEQ ID NO: 879483 - RNA, 19 nt, Artificial Sequence
  Description of Artificial Sequence: Synthetic oligonucleotide
  Antisense strand to SEQ ID NO: 879482
aacuuuauuacucuaacug

SEQ ID NO: 879484 - RNA, 19 nt, Artificial Sequence
  Description of Artificial Sequence: Synthetic oligonucleotide
  Sense strand starting at position 736 of SEQ ID NO: 588644
augcuucucuagugaugaa

SEQ ID NO: 879485 - RNA, 19 nt, Artificial Sequence
  Description of Artificial Sequence: Synthetic oligonucleotide
  Antisense strand to SEQ ID NO: 879484
uucaucacuagagaagcau

SEQ ID NO: 879486 - RNA, 19 nt, Artificial Sequence
  Description of Artificial Sequence: Synthetic oligonucleotide
  Sense strand starting at position 739 of SEQ ID NO: 588644
cuucucuagugaugaaauu

SEQ ID NO: 879487 - RNA, 19 nt, Artificial Sequence
  Description of Artificial Sequence: Synthetic oligonucleotide
  Antisense strand to SEQ ID NO: 879486
aauuucaucacuagagaag

SEQ ID NO: 879488 - RNA, 19 nt, Artificial Sequence
  Description of Artificial Sequence: Synthetic oligonucleotide
  Sense strand starting at position 756 of SEQ ID NO: 588644
uuccaucagugucgguaaa

SEQ ID NO: 879489 - RNA, 19 nt, Artificial Sequence
  Description of Artificial Sequence: Synthetic oligonucleotide
  Antisense strand to SEQ ID NO: 879488
uuuaccgacacugauggaa

SEQ ID NO: 879490 - RNA, 19 nt, Artificial Sequence
  Description of Artificial Sequence: Synthetic oligonucleotide
  Sense strand starting at position 929 of SEQ ID NO: 588644
gggucaugucccugugcuu

SEQ ID NO: 879491 - RNA, 19 nt, Artificial Sequence
  Description of Artificial Sequence: Synthetic oligonucleotide
  Antisense strand to SEQ ID NO: 879490
aagcacagggacaugaccc

SEQ ID NO: 879492 - RNA, 19 nt, Artificial Sequence
  Description of Artificial Sequence: Synthetic oligonucleotide
  Sense strand starting at position 1058 of SEQ ID NO: 588644
gcuccuucgcaaugcagau

SEQ ID NO: 879493 - RNA, 19 nt, Artificial Sequence
  Description of Artificial Sequence: Synthetic oligonucleotide
  Antisense strand to SEQ ID NO: 879492
aucugcauugcgaaggagc

SEQ ID NO: 879494 - RNA, 19 nt, Artificial Sequence
  Description of Artificial Sequence: Synthetic oligonucleotide
  Sense strand starting at position 1177 of SEQ ID NO: 588644
cucccuggucuccaagaga

SEQ ID NO: 879495 - RNA, 19 nt, Artificial Sequence
  Description of Artificial Sequence: Synthetic oligonucleotide
  Antisense strand to SEQ ID NO: 879494
ucucuuggagaccagggag

SEQ ID NO: 879496 - RNA, 19 nt, Artificial Sequence
  Description of Artificial Sequence: Synthetic oligonucleotide
  Sense strand starting at position 1212 of SEQ ID NO: 588644
gagugugauuuaccggagu

SEQ ID NO: 879497 - RNA, 19 nt, Artificial Sequence
  Description of Artificial Sequence: Synthetic oligonucleotide
  Antisense strand to SEQ ID NO: 879496
acuccgguaaaucacacuc

SEQ ID NO: 879498 - RNA, 19 nt, Artificial Sequence
  Description of Artificial Sequence: Synthetic oligonucleotide
  Sense strand starting at position 3180 of SEQ ID NO: 588644
cugggaggguucgugaagu

SEQ ID NO: 879499 - RNA, 19 nt, Artificial Sequence
  Description of Artificial Sequence: Synthetic oligonucleotide
  Antisense strand to SEQ ID NO: 879498
acuucacgaacccucccag

SEQ ID NO: 879500 - RNA, 19 nt, Artificial Sequence
  Description of Artificial Sequence: Synthetic oligonucleotide
  Sense strand starting at position 3181 of SEQ ID NO: 588644
ugggaggguucgugaaguu

SEQ ID NO: 879501 - RNA, 19 nt, Artificial Sequence
  Description of Artificial Sequence: Synthetic oligonucleotide
  Antisense strand to SEQ ID NO: 879500
aacuucacgaacccuccca

SEQ ID NO: 879502 - RNA, 19 nt, Artificial Sequence
  Description of Artificial Sequence: Synthetic oligonucleotide
  Sense strand starting at position 3190 of SEQ ID NO: 588644
ucgugaaguucaggaagaa

SEQ ID NO: 879503 - RNA, 19 nt, Artificial Sequence
  Description of Artificial Sequence: Synthetic oligonucleotide
  Antisense strand to SEQ ID NO: 879502
uucuuccugaacuucacga

SEQ ID NO: 879504 - RNA, 19 nt, Artificial Sequence
  Description of Artificial Sequence: Synthetic oligonucleotide
  Sense strand starting at position 3202 of SEQ ID NO: 588644
ggaagaaauugggagcagu

SEQ ID NO: 879505 - RNA, 19 nt, Artificial Sequence
  Description of Artificial Sequence: Synthetic oligonucleotide
  Antisense strand to SEQ ID NO: 879504
acugcucccaauuucuucc

SEQ ID NO: 879506 - RNA, 19 nt, Artificial Sequence
  Description of Artificial Sequence: Synthetic oligonucleotide
  Sense strand starting at position 3275 of SEQ ID NO: 588644
uguuguaggcccugggaau

SEQ ID NO: 879507 - RNA, 19 nt, Artificial Sequence
  Description of Artificial Sequence: Synthetic oligonucleotide
  Antisense strand to SEQ ID NO: 879506
auucccagggccuacaaca

SEQ ID NO: 879508 - RNA, 19 nt, Artificial Sequence
  Description of Artificial Sequence: Synthetic oligonucleotide
  Sense strand starting at position 3276 of SEQ ID NO: 588644
guuguaggcccugggaauu

SEQ ID NO: 879509 - RNA, 19 nt, Artificial Sequence
  Description of Artificial Sequence: Synthetic oligonucleotide
  Antisense strand to SEQ ID NO: 879508
aauucccagggccuacaac

SEQ ID NO: 879510 - RNA, 19 nt, Artificial Sequence
  Description of Artificial Sequence: Synthetic oligonucleotide
  Sense strand starting at position 3537 of SEQ ID NO: 588644
gccgcuuugguauauugau

SEQ ID NO: 879511 - RNA, 19 nt, Artificial Sequence
  Description of Artificial Sequence: Synthetic oligonucleotide
  Antisense strand to SEQ ID NO: 879510
aucaauauaccaaagcggc

SEQ ID NO: 879512 - RNA, 19 nt, Artificial Sequence
  Description of Artificial Sequence: Synthetic oligonucleotide
  Sense strand starting at position 3636 of SEQ ID NO: 588644
aaagaaacugauugucgua

SEQ ID NO: 879513 - RNA, 19 nt, Artificial Sequence
  Description of Artificial Sequence: Synthetic oligonucleotide
  Antisense strand to SEQ ID NO: 879512
uacgacaaucaguuucuuu

SEQ ID NO: 879514 - RNA, 19 nt, Artificial Sequence
  Description of Artificial Sequence: Synthetic oligonucleotide
  Sense strand starting at position 3638 of SEQ ID NO: 588644
agaaacugauugucguaaa

SEQ ID NO: 879515 - RNA, 19 nt, Artificial Sequence
  Description of Artificial Sequence: Synthetic oligonucleotide
  Antisense strand to SEQ ID NO: 879514
uuuacgacaaucaguuucu

SEQ ID NO: 879516 - RNA, 19 nt, Artificial Sequence
  Description of Artificial Sequence: Synthetic oligonucleotide
  Sense strand starting at position 3639 of SEQ ID NO: 588644
gaaacugauugucguaaau

SEQ ID NO: 879517 - RNA, 19 nt, Artificial Sequence
  Description of Artificial Sequence: Synthetic oligonucleotide
  Antisense strand to SEQ ID NO: 879516
auuuacgacaaucaguuuc

SEQ ID NO: 879518 - RNA, 19 nt, Artificial Sequence
  Description of Artificial Sequence: Synthetic oligonucleotide
  Sense strand starting at position 3641 of SEQ ID NO: 588644
aacugauugucguaaauuc

SEQ ID NO: 879519 - RNA, 19 nt, Artificial Sequence
  Description of Artificial Sequence: Synthetic oligonucleotide
  Antisense strand to SEQ ID NO: 879518
gaauuuacgacaaucaguu

SEQ ID NO: 879520 - RNA, 19 nt, Artificial Sequence
  Description of Artificial Sequence: Synthetic oligonucleotide
  Sense strand starting at position 3674 of SEQ ID NO: 588644
ggacucuuaucacagcaga

SEQ ID NO: 879521 - RNA, 19 nt, Artificial Sequence
  Description of Artificial Sequence: Synthetic oligonucleotide
  Antisense strand to SEQ ID NO: 879520
ucugcugugauaagagucc

SEQ ID NO: 879522 - RNA, 19 nt, Artificial Sequence
  Description of Artificial Sequence: Synthetic oligonucleotide
  Sense strand starting at position 3677 of SEQ ID NO: 588644
cucuuaucacagcagaagu

SEQ ID NO: 879523 - RNA, 19 nt, Artificial Sequence
  Description of Artificial Sequence: Synthetic oligonucleotide
  Antisense strand to SEQ ID NO: 879522
acuucugcugugauaagag

SEQ ID NO: 879524 - RNA, 19 nt, Artificial Sequence
  Description of Artificial Sequence: Synthetic oligonucleotide
  Sense strand starting at position 3807 of SEQ ID NO: 588644
uuuagaagcucucaaagcu

SEQ ID NO: 879525 - RNA, 19 nt, Artificial Sequence
  Description of Artificial Sequence: Synthetic oligonucleotide
  Antisense strand to SEQ ID NO: 879524
agcuuugagagcuucuaaa

SEQ ID NO: 879526 - RNA, 19 nt, Artificial Sequence
  Description of Artificial Sequence: Synthetic oligonucleotide
  Sense strand starting at position 3816 of SEQ ID NO: 588644
ucucaaagcucacugguuu

SEQ ID NO: 879527 - RNA, 19 nt, Artificial Sequence
  Description of Artificial Sequence: Synthetic oligonucleotide
  Antisense strand to SEQ ID NO: 879526
aaaccagugagcuuugaga

SEQ ID NO: 879528 - RNA, 19 nt, Artificial Sequence
  Description of Artificial Sequence: Synthetic oligonucleotide
  Sense strand starting at position 3867 of SEQ ID NO: 588644
ccaugcaggugauauuaaa

SEQ ID NO: 879529 - RNA, 19 nt, Artificial Sequence
  Description of Artificial Sequence: Synthetic oligonucleotide
  Antisense strand to SEQ ID NO: 879528
uuuaauaucaccugcaugg

SEQ ID NO: 879530 - RNA, 19 nt, Artificial Sequence
  Description of Artificial Sequence: Synthetic oligonucleotide
  Sense strand starting at position 3974 of SEQ ID NO: 588644
gagagaaggucuuugcucu

SEQ ID NO: 879531 - RNA, 19 nt, Artificial Sequence
  Description of Artificial Sequence: Synthetic oligonucleotide
  Antisense strand to SEQ ID NO: 879530
agagcaaagaccuucucuc

SEQ ID NO: 879532 - RNA, 19 nt, Artificial Sequence
  Description of Artificial Sequence: Synthetic oligonucleotide
  Sense strand starting at position 3978 of SEQ ID NO: 588644
gaaggucuuugcucuccua

SEQ ID NO: 879533 - RNA, 19 nt, Artificial Sequence
  Description of Artificial Sequence: Synthetic oligonucleotide
  Antisense strand to SEQ ID NO: 879532
uaggagagcaaagaccuuc

SEQ ID NO: 879534 - RNA, 19 nt, Artificial Sequence
  Description of Artificial Sequence: Synthetic oligonucleotide
  Sense strand starting at position 3981 of SEQ ID NO: 588644
ggucuuugcucuccuaaga

SEQ ID NO: 879535 - RNA, 19 nt, Artificial Sequence
  Description of Artificial Sequence: Synthetic oligonucleotide
  Antisense strand to SEQ ID NO: 879534
ucuuaggagagcaaagacc

SEQ ID NO: 879536 - RNA, 19 nt, Artificial Sequence
  Description of Artificial Sequence: Synthetic oligonucleotide
  Sense strand starting at position 301 of SEQ ID NO: 588645
gcccucauucccggagaga

SEQ ID NO: 879537 - RNA, 19 nt, Artificial Sequence
  Description of Artificial Sequence: Synthetic oligonucleotide
  Antisense strand to SEQ ID NO: 879536
ucucuccgggaaugagggc

SEQ ID NO: 879538 - RNA, 19 nt, Artificial Sequence
  Description of Artificial Sequence: Synthetic oligonucleotide
  Sense strand starting at position 346 of SEQ ID NO: 588645
ucaggaauguuucaguggu

SEQ ID NO: 879539 - RNA, 19 nt, Artificial Sequence
  Description of Artificial Sequence: Synthetic oligonucleotide
  Antisense strand to SEQ ID NO: 879538
accacugaaacauuccuga

SEQ ID NO: 879540 - RNA, 19 nt, Artificial Sequence
  Description of Artificial Sequence: Synthetic oligonucleotide
  Sense strand starting at position 561 of SEQ ID NO: 588645
ucggauuccugaucccaaa

SEQ ID NO: 879541 - RNA, 19 nt, Artificial Sequence
  Description of Artificial Sequence: Synthetic oligonucleotide
  Antisense strand to SEQ ID NO: 879540
uuugggaucaggaauccga

SEQ ID NO: 879542 - RNA, 19 nt, Artificial Sequence
  Description of Artificial Sequence: Synthetic oligonucleotide
  Sense strand starting at position 633 of SEQ ID NO: 588645
cggauuccucaauguguca

SEQ ID NO: 879543 - RNA, 19 nt, Artificial Sequence
  Description of Artificial Sequence: Synthetic oligonucleotide
  Antisense strand to SEQ ID NO: 879542
ugacacauugaggaauccg

SEQ ID NO: 879544 - RNA, 19 nt, Artificial Sequence
  Description of Artificial Sequence: Synthetic oligonucleotide
  Sense strand starting at position 689 of SEQ ID NO: 588645
ccaucucuacuguggacaa

SEQ ID NO: 879545 - RNA, 19 nt, Artificial Sequence
  Description of Artificial Sequence: Synthetic oligonucleotide
  Antisense strand to SEQ ID NO: 879544
uuguccacaguagagaugg

SEQ ID NO: 879546 - RNA, 19 nt, Artificial Sequence
  Description of Artificial Sequence: Synthetic oligonucleotide
  Sense strand starting at position 1121 of SEQ ID NO: 588645
gggugacucuucccaacac

SEQ ID NO: 879547 - RNA, 19 nt, Artificial Sequence
  Description of Artificial Sequence: Synthetic oligonucleotide
  Antisense strand to SEQ ID NO: 879546
guguugggaagagucaccc

SEQ ID NO: 879548 - RNA, 19 nt, Artificial Sequence
  Description of Artificial Sequence: Synthetic oligonucleotide
  Sense strand starting at position 1392 of SEQ ID NO: 588645
auggguggcccagauucua

SEQ ID NO: 879549 - RNA, 19 nt, Artificial Sequence
  Description of Artificial Sequence: Synthetic oligonucleotide
  Antisense strand to SEQ ID NO: 879548
uagaaucugggccacccau

SEQ ID NO: 879550 - RNA, 19 nt, Artificial Sequence
  Description of Artificial Sequence: Synthetic oligonucleotide
  Sense strand starting at position 1495 of SEQ ID NO: 588645
gcaccuuaguuagagcuca

SEQ ID NO: 879551 - RNA, 19 nt, Artificial Sequence
  Description of Artificial Sequence: Synthetic oligonucleotide
  Antisense strand to SEQ ID NO: 879550
ugagcucuaacuaaggugc

SEQ ID NO: 879552 - RNA, 19 nt, Artificial Sequence
  Description of Artificial Sequence: Synthetic oligonucleotide
  Sense strand starting at position 1720 of SEQ ID NO: 588645
gccgugucugcuggaggaa

SEQ ID NO: 879553 - RNA, 19 nt, Artificial Sequence
  Description of Artificial Sequence: Synthetic oligonucleotide
  Antisense strand to SEQ ID NO: 879552
uuccuccagcagacacggc

SEQ ID NO: 879554 - RNA, 19 nt, Artificial Sequence
  Description of Artificial Sequence: Synthetic oligonucleotide
  Sense strand starting at position 1722 of SEQ ID NO: 588645
cgugucugcuggaggaaca

SEQ ID NO: 879555 - RNA, 19 nt, Artificial Sequence
  Description of Artificial Sequence: Synthetic oligonucleotide
  Antisense strand to SEQ ID NO: 879554
uguuccuccagcagacacg

SEQ ID NO: 879556 - RNA, 19 nt, Artificial Sequence
  Description of Artificial Sequence: Synthetic oligonucleotide
  Sense strand starting at position 2028 of SEQ ID NO: 588645
ucgagauguucuuuauagc

SEQ ID NO: 879557 - RNA, 19 nt, Artificial Sequence
  Description of Artificial Sequence: Synthetic oligonucleotide
  Antisense strand to SEQ ID NO: 879556
gcuauaaagaacaucucga

SEQ ID NO: 879558 - RNA, 19 nt, Artificial Sequence
  Description of Artificial Sequence: Synthetic oligonucleotide
  Sense strand starting at position 2310 of SEQ ID NO: 588645
cggaauucuuccucccuca

SEQ ID NO: 879559 - RNA, 19 nt, Artificial Sequence
  Description of Artificial Sequence: Synthetic oligonucleotide
  Antisense strand to SEQ ID NO: 879558
ugagggaggaagaauuccg

SEQ ID NO: 879560 - RNA, 19 nt, Artificial Sequence
  Description of Artificial Sequence: Synthetic oligonucleotide
  Sense strand starting at position 2391 of SEQ ID NO: 588645
cucccugcugagcagaaau

SEQ ID NO: 879561 - RNA, 19 nt, Artificial Sequence
  Description of Artificial Sequence: Synthetic oligonucleotide
  Antisense strand to SEQ ID NO: 879560
auuucugcucagcagggag

SEQ ID NO: 879562 - RNA, 19 nt, Artificial Sequence
  Description of Artificial Sequence: Synthetic oligonucleotide
  Sense strand starting at position 2402 of SEQ ID NO: 588645
gcagaaauggacugggcuu

SEQ ID NO: 879563 - RNA, 19 nt, Artificial Sequence
  Description of Artificial Sequence: Synthetic oligonucleotide
  Antisense strand to SEQ ID NO: 879562
aagcccaguccauuucugc

SEQ ID NO: 879564 - RNA, 19 nt, Artificial Sequence
  Description of Artificial Sequence: Synthetic oligonucleotide
  Sense strand starting at position 2495 of SEQ ID NO: 588645
ggacccacucugcauugau

SEQ ID NO: 879565 - RNA, 19 nt, Artificial Sequence
  Description of Artificial Sequence: Synthetic oligonucleotide
  Antisense strand to SEQ ID NO: 879564
aucaaugcagagugggucc

SEQ ID NO: 879566 - RNA, 19 nt, Artificial Sequence
  Description of Artificial Sequence: Synthetic oligonucleotide
  Sense strand starting at position 2560 of SEQ ID NO: 588645
ggcacuauugugugguuca

SEQ ID NO: 879567 - RNA, 19 nt, Artificial Sequence
  Description of Artificial Sequence: Synthetic oligonucleotide
  Antisense strand to SEQ ID NO: 879566
ugaaccacacaauagugcc

SEQ ID NO: 879568 - RNA, 19 nt, Artificial Sequence
  Description of Artificial Sequence: Synthetic oligonucleotide
  Sense strand starting at position 2571 of SEQ ID NO: 588645
gugguucaaggucaguaua

SEQ ID NO: 879569 - RNA, 19 nt, Artificial Sequence
  Description of Artificial Sequence: Synthetic oligonucleotide
  Antisense strand to SEQ ID NO: 879568
uauacugaccuugaaccac

SEQ ID NO: 879570 - RNA, 19 nt, Artificial Sequence
  Description of Artificial Sequence: Synthetic oligonucleotide
  Sense strand starting at position 2664 of SEQ ID NO: 588645
cugugcuguccucagaaca

SEQ ID NO: 879571 - RNA, 19 nt, Artificial Sequence
  Description of Artificial Sequence: Synthetic oligonucleotide
  Antisense strand to SEQ ID NO: 879570
uguucugaggacagcacag

SEQ ID NO: 879572 - RNA, 19 nt, Artificial Sequence
  Description of Artificial Sequence: Synthetic oligonucleotide
  Sense strand starting at position 2682 of SEQ ID NO: 588645
acgugaucucucuggauug

SEQ ID NO: 879573 - RNA, 19 nt, Artificial Sequence
  Description of Artificial Sequence: Synthetic oligonucleotide
  Antisense strand to SEQ ID NO: 879572
caauccagagagaucacgu

SEQ ID NO: 879574 - RNA, 19 nt, Artificial Sequence
  Description of Artificial Sequence: Synthetic oligonucleotide
  Sense strand starting at position 2683 of SEQ ID NO: 588645
cgugaucucucuggauugu

SEQ ID NO: 879575 - RNA, 19 nt, Artificial Sequence
  Description of Artificial Sequence: Synthetic oligonucleotide
  Antisense strand to SEQ ID NO: 879574
acaauccagagagaucacg

SEQ ID NO: 879576 - RNA, 19 nt, Artificial Sequence
  Description of Artificial Sequence: Synthetic oligonucleotide
  Sense strand starting at position 2744 of SEQ ID NO: 588645
guuaaauacaagugguaga

SEQ ID NO: 879577 - RNA, 19 nt, Artificial Sequence
  Description of Artificial Sequence: Synthetic oligonucleotide
  Antisense strand to SEQ ID NO: 879576
ucuaccacuuguauuuaac

SEQ ID NO: 879578 - RNA, 19 nt, Artificial Sequence
  Description of Artificial Sequence: Synthetic oligonucleotide
  Sense strand starting at position 3103 of SEQ ID NO: 588645
acccucaagugcuugcuaa

SEQ ID NO: 879579 - RNA, 19 nt, Artificial Sequence
  Description of Artificial Sequence: Synthetic oligonucleotide
  Antisense strand to SEQ ID NO: 879578
uuagcaagcacuugagggu

SEQ ID NO: 879580 - RNA, 19 nt, Artificial Sequence
  Description of Artificial Sequence: Synthetic oligonucleotide
  Sense strand starting at position 3104 of SEQ ID NO: 588645
cccucaagugcuugcuaaa

SEQ ID NO: 879581 - RNA, 19 nt, Artificial Sequence
  Description of Artificial Sequence: Synthetic oligonucleotide
  Antisense strand to SEQ ID NO: 879580
uuuagcaagcacuugaggg

SEQ ID NO: 879582 - RNA, 19 nt, Artificial Sequence
  Description of Artificial Sequence: Synthetic oligonucleotide
  Sense strand starting at position 3107 of SEQ ID NO: 588645
ucaagugcuugcuaaauaa

SEQ ID NO: 879583 - RNA, 19 nt, Artificial Sequence
  Description of Artificial Sequence: Synthetic oligonucleotide
  Antisense strand to SEQ ID NO: 879582
uuauuuagcaagcacuuga

SEQ ID NO: 879584 - RNA, 19 nt, Artificial Sequence
  Description of Artificial Sequence: Synthetic oligonucleotide
  Sense strand starting at position 3203 of SEQ ID NO: 588645
gcaagugcugccgagcaga

SEQ ID NO: 879585 - RNA, 19 nt, Artificial Sequence
  Description of Artificial Sequence: Synthetic oligonucleotide
  Antisense strand to SEQ ID NO: 879584
ucugcucggcagcacuugc

SEQ ID NO: 879586 - RNA, 19 nt, Artificial Sequence
  Description of Artificial Sequence: Synthetic oligonucleotide
  Sense strand starting at position 3296 of SEQ ID NO: 588645
cgggaagauuucuccguuc

SEQ ID NO: 879587 - RNA, 19 nt, Artificial Sequence
  Description of Artificial Sequence: Synthetic oligonucleotide
  Antisense strand to SEQ ID NO: 879586
gaacggagaaaucuucccg

SEQ ID NO: 879588 - RNA, 19 nt, Artificial Sequence
  Description of Artificial Sequence: Synthetic oligonucleotide
  Sense strand starting at position 3675 of SEQ ID NO: 588645
uucauugguugguugugaa

SEQ ID NO: 879589 - RNA, 19 nt, Artificial Sequence
  Description of Artificial Sequence: Synthetic oligonucleotide
  Antisense strand to SEQ ID NO: 879588
uucacaaccaaccaaugaa

SEQ ID NO: 879590 - RNA, 19 nt, Artificial Sequence
  Description of Artificial Sequence: Synthetic oligonucleotide
  Sense strand starting at position 3678 of SEQ ID NO: 588645
auugguugguugugaauca

SEQ ID NO: 879591 - RNA, 19 nt, Artificial Sequence
  Description of Artificial Sequence: Synthetic oligonucleotide
  Antisense strand to SEQ ID NO: 879590
ugauucacaaccaaccaau

SEQ ID NO: 879592 - RNA, 19 nt, Artificial Sequence
  Description of Artificial Sequence: Synthetic oligonucleotide
  Sense strand starting at position 3679 of SEQ ID NO: 588645
uugguugguugugaaucau

SEQ ID NO: 879593 - RNA, 19 nt, Artificial Sequence
  Description of Artificial Sequence: Synthetic oligonucleotide
  Antisense strand to SEQ ID NO: 879592
augauucacaaccaaccaa

SEQ ID NO: 879594 - RNA, 19 nt, Artificial Sequence
  Description of Artificial Sequence: Synthetic oligonucleotide
  Sense strand starting at position 3683 of SEQ ID NO: 588645
uugguugugaaucauugau

SEQ ID NO: 879595 - RNA, 19 nt, Artificial Sequence
  Description of Artificial Sequence: Synthetic oligonucleotide
  Antisense strand to SEQ ID NO: 879594
aucaaugauucacaaccaa

SEQ ID NO: 879596 - RNA, 19 nt, Artificial Sequence
  Description of Artificial Sequence: Synthetic oligonucleotide
  Sense strand starting at position 3728 of SEQ ID NO: 588645
cuggcucaauccuugaaga

SEQ ID NO: 879597 - RNA, 19 nt, Artificial Sequence
  Description of Artificial Sequence: Synthetic oligonucleotide
  Antisense strand to SEQ ID NO: 879596
ucuucaaggauugagccag

SEQ ID NO: 879598 - RNA, 19 nt, Artificial Sequence
  Description of Artificial Sequence: Synthetic oligonucleotide
  Sense strand starting at position 3729 of SEQ ID NO: 588645
uggcucaauccuugaagaa

SEQ ID NO: 879599 - RNA, 19 nt, Artificial Sequence
  Description of Artificial Sequence: Synthetic oligonucleotide
  Antisense strand to SEQ ID NO: 879598
uucuucaaggauugagcca

SEQ ID NO: 879600 - RNA, 19 nt, Artificial Sequence
  Description of Artificial Sequence: Synthetic oligonucleotide
  Sense strand starting at position 9 of SEQ ID NO: 588646
ggugcuggucuuugcagua

SEQ ID NO: 879601 - RNA, 19 nt, Artificial Sequence
  Description of Artificial Sequence: Synthetic oligonucleotide
  Antisense strand to SEQ ID NO: 879600
uacugcaaagaccagcacc

SEQ ID NO: 879602 - RNA, 19 nt, Artificial Sequence
  Description of Artificial Sequence: Synthetic oligonucleotide
  Sense strand starting at position 153 of SEQ ID NO: 588646
gggaauguuucagcgguca

SEQ ID NO: 879603 - RNA, 19 nt, Artificial Sequence
  Description of Artificial Sequence: Synthetic oligonucleotide
  Antisense strand to SEQ ID NO: 879602
ugaccgcugaaacauuccc

SEQ ID NO: 879604 - RNA, 19 nt, Artificial Sequence
  Description of Artificial Sequence: Synthetic oligonucleotide
  Sense strand starting at position 1111 of SEQ ID NO: 588646
gggugacucuucccaacac

SEQ ID NO: 879605 - RNA, 19 nt, Artificial Sequence
  Description of Artificial Sequence: Synthetic oligonucleotide
  Antisense strand to SEQ ID NO: 879604
guguugggaagagucaccc

SEQ ID NO: 879606 - RNA, 19 nt, Artificial Sequence
  Description of Artificial Sequence: Synthetic oligonucleotide
  Sense strand starting at position 1300 of SEQ ID NO: 588646
uccggaaaguccuuaucga

SEQ ID NO: 879607 - RNA, 19 nt, Artificial Sequence
  Description of Artificial Sequence: Synthetic oligonucleotide
  Antisense strand to SEQ ID NO: 879606
ucgauaaggacuuuccgga

SEQ ID NO: 879608 - RNA, 19 nt, Artificial Sequence
  Description of Artificial Sequence: Synthetic oligonucleotide
  Sense strand starting at position 1301 of SEQ ID NO: 588646
ccggaaaguccuuaucgac

SEQ ID NO: 879609 - RNA, 19 nt, Artificial Sequence
  Description of Artificial Sequence: Synthetic oligonucleotide
  Antisense strand to SEQ ID NO: 879608
gucgauaaggacuuuccgg

SEQ ID NO: 879610 - RNA, 19 nt, Artificial Sequence
  Description of Artificial Sequence: Synthetic oligonucleotide
  Sense strand starting at position 1335 of SEQ ID NO: 588646
guaccaggucccugugauc

SEQ ID NO: 879611 - RNA, 19 nt, Artificial Sequence
  Description of Artificial Sequence: Synthetic oligonucleotide
  Antisense strand to SEQ ID NO: 879610
gaucacagggaccugguac

SEQ ID NO: 879612 - RNA, 19 nt, Artificial Sequence
  Description of Artificial Sequence: Synthetic oligonucleotide
  Sense strand starting at position 1382 of SEQ ID NO: 588646
auggguggcccagauucua

SEQ ID NO: 879613 - RNA, 19 nt, Artificial Sequence
  Description of Artificial Sequence: Synthetic oligonucleotide
  Antisense strand to SEQ ID NO: 879612
uagaaucugggccacccau

SEQ ID NO: 879614 - RNA, 19 nt, Artificial Sequence
  Description of Artificial Sequence: Synthetic oligonucleotide
  Sense strand starting at position 1473 of SEQ ID NO: 588646
ggcuguguuccugcaccuu

SEQ ID NO: 879615 - RNA, 19 nt, Artificial Sequence
  Description of Artificial Sequence: Synthetic oligonucleotide
  Antisense strand to SEQ ID NO: 879614
aaggugcaggaacacagcc

SEQ ID NO: 879616 - RNA, 19 nt, Artificial Sequence
  Description of Artificial Sequence: Synthetic oligonucleotide
  Sense strand starting at position 1485 of SEQ ID NO: 588646
gcaccuuaguuagagcuca

SEQ ID NO: 879617 - RNA, 19 nt, Artificial Sequence
  Description of Artificial Sequence: Synthetic oligonucleotide
  Antisense strand to SEQ ID NO: 879616
ugagcucuaacuaaggugc

SEQ ID NO: 879618 - RNA, 19 nt, Artificial Sequence
  Description of Artificial Sequence: Synthetic oligonucleotide
  Sense strand starting at position 1710 of SEQ ID NO: 588646
gccgugucugcuggaggaa

SEQ ID NO: 879619 - RNA, 19 nt, Artificial Sequence
  Description of Artificial Sequence: Synthetic oligonucleotide
  Antisense strand to SEQ ID NO: 879618
uuccuccagcagacacggc

SEQ ID NO: 879620 - RNA, 19 nt, Artificial Sequence
  Description of Artificial Sequence: Synthetic oligonucleotide
  Sense strand starting at position 1712 of SEQ ID NO: 588646
cgugucugcuggaggaaca

SEQ ID NO: 879621 - RNA, 19 nt, Artificial Sequence
  Description of Artificial Sequence: Synthetic oligonucleotide
  Antisense strand to SEQ ID NO: 879620
uguuccuccagcagacacg

SEQ ID NO: 879622 - RNA, 19 nt, Artificial Sequence
  Description of Artificial Sequence: Synthetic oligonucleotide
  Sense strand starting at position 2018 of SEQ ID NO: 588646
ucgagauguucuuuauagc

SEQ ID NO: 879623 - RNA, 19 nt, Artificial Sequence
  Description of Artificial Sequence: Synthetic oligonucleotide
  Antisense strand to SEQ ID NO: 879622
gcuauaaagaacaucucga

SEQ ID NO: 879624 - RNA, 19 nt, Artificial Sequence
  Description of Artificial Sequence: Synthetic oligonucleotide
  Sense strand starting at position 2385 of SEQ ID NO: 588646
cucccugcugagcagaaau

SEQ ID NO: 879625 - RNA, 19 nt, Artificial Sequence
  Description of Artificial Sequence: Synthetic oligonucleotide
  Antisense strand to SEQ ID NO: 879624
auuucugcucagcagggag

SEQ ID NO: 879626 - RNA, 19 nt, Artificial Sequence
  Description of Artificial Sequence: Synthetic oligonucleotide
  Sense strand starting at position 2396 of SEQ ID NO: 588646
gcagaaauggacugggcuu

SEQ ID NO: 879627 - RNA, 19 nt, Artificial Sequence
  Description of Artificial Sequence: Synthetic oligonucleotide
  Antisense strand to SEQ ID NO: 879626
aagcccaguccauuucugc

SEQ ID NO: 879628 - RNA, 19 nt, Artificial Sequence
  Description of Artificial Sequence: Synthetic oligonucleotide
  Sense strand starting at position 2489 of SEQ ID NO: 588646
ggacccacucugcauugau

SEQ ID NO: 879629 - RNA, 19 nt, Artificial Sequence
  Description of Artificial Sequence: Synthetic oligonucleotide
  Antisense strand to SEQ ID NO: 879628
aucaaugcagagugggucc

SEQ ID NO: 879630 - RNA, 19 nt, Artificial Sequence
  Description of Artificial Sequence: Synthetic oligonucleotide
  Sense strand starting at position 2554 of SEQ ID NO: 588646
ggcacuauuguguggcuca

SEQ ID NO: 879631 - RNA, 19 nt, Artificial Sequence
  Description of Artificial Sequence: Synthetic oligonucleotide
  Antisense strand to SEQ ID NO: 879630
ugagccacacaauagugcc

SEQ ID NO: 879632 - RNA, 19 nt, Artificial Sequence
  Description of Artificial Sequence: Synthetic oligonucleotide
  Sense strand starting at position 2567 of SEQ ID NO: 588646
ggcucagggucaguuuaua

SEQ ID NO: 879633 - RNA, 19 nt, Artificial Sequence
  Description of Artificial Sequence: Synthetic oligonucleotide
  Antisense strand to SEQ ID NO: 879632
uauaaacugacccugagcc

SEQ ID NO: 879634 - RNA, 19 nt, Artificial Sequence
  Description of Artificial Sequence: Synthetic oligonucleotide
  Sense strand starting at position 2658 of SEQ ID NO: 588646
cugugcuguccucagaaca

SEQ ID NO: 879635 - RNA, 19 nt, Artificial Sequence
  Description of Artificial Sequence: Synthetic oligonucleotide
  Antisense strand to SEQ ID NO: 879634
uguucugaggacagcacag

SEQ ID NO: 879636 - RNA, 19 nt, Artificial Sequence
  Description of Artificial Sequence: Synthetic oligonucleotide
  Sense strand starting at position 2676 of SEQ ID NO: 588646
acgcgaucucucuggauug

SEQ ID NO: 879637 - RNA, 19 nt, Artificial Sequence
  Description of Artificial Sequence: Synthetic oligonucleotide
  Antisense strand to SEQ ID NO: 879636
caauccagagagaucgcgu

SEQ ID NO: 879638 - RNA, 19 nt, Artificial Sequence
  Description of Artificial Sequence: Synthetic oligonucleotide
  Sense strand starting at position 2725 of SEQ ID NO: 588646
cgaccaucucccuguuaga

SEQ ID NO: 879639 - RNA, 19 nt, Artificial Sequence
  Description of Artificial Sequence: Synthetic oligonucleotide
  Antisense strand to SEQ ID NO: 879638
ucuaacagggagauggucg

SEQ ID NO: 879640 - RNA, 19 nt, Artificial Sequence
  Description of Artificial Sequence: Synthetic oligonucleotide
  Sense strand starting at position 2959 of SEQ ID NO: 588646
cugcauuucccaggugugu

SEQ ID NO: 879641 - RNA, 19 nt, Artificial Sequence
  Description of Artificial Sequence: Synthetic oligonucleotide
  Antisense strand to SEQ ID NO: 879640
acacaccugggaaaugcag

SEQ ID NO: 879642 - RNA, 19 nt, Artificial Sequence
  Description of Artificial Sequence: Synthetic oligonucleotide
  Sense strand starting at position 3174 of SEQ ID NO: 588646
gcaagugcugccgagcaga

SEQ ID NO: 879643 - RNA, 19 nt, Artificial Sequence
  Description of Artificial Sequence: Synthetic oligonucleotide
  Antisense strand to SEQ ID NO: 879642
ucugcucggcagcacuugc

SEQ ID NO: 879644 - RNA, 19 nt, Artificial Sequence
  Description of Artificial Sequence: Synthetic oligonucleotide
  Sense strand starting at position 3289 of SEQ ID NO: 588646
gaagguuucucuguucucu

SEQ ID NO: 879645 - RNA, 19 nt, Artificial Sequence
  Description of Artificial Sequence: Synthetic oligonucleotide
  Antisense strand to SEQ ID NO: 879644
agagaacagagaaaccuuc

SEQ ID NO: 879646 - RNA, 19 nt, Artificial Sequence
  Description of Artificial Sequence: Synthetic oligonucleotide
  Sense strand starting at position 3298 of SEQ ID NO: 588646
ucuguucucuguguuuguu

SEQ ID NO: 879647 - RNA, 19 nt, Artificial Sequence
  Description of Artificial Sequence: Synthetic oligonucleotide
  Antisense strand to SEQ ID NO: 879646
aacaaacacagagaacaga

SEQ ID NO: 879648 - RNA, 19 nt, Artificial Sequence
  Description of Artificial Sequence: Synthetic oligonucleotide
  Sense strand starting at position 3334 of SEQ ID NO: 588646
cucguauuucauugguugu

SEQ ID NO: 879649 - RNA, 19 nt, Artificial Sequence
  Description of Artificial Sequence: Synthetic oligonucleotide
  Antisense strand to SEQ ID NO: 879648
acaaccaaugaaauacgag

SEQ ID NO: 879650 - RNA, 19 nt, Artificial Sequence
  Description of Artificial Sequence: Synthetic oligonucleotide
  Sense strand starting at position 3336 of SEQ ID NO: 588646
cguauuucauugguuguuu

SEQ ID NO: 879651 - RNA, 19 nt, Artificial Sequence
  Description of Artificial Sequence: Synthetic oligonucleotide
  Antisense strand to SEQ ID NO: 879650
aaacaaccaaugaaauacg

SEQ ID NO: 879652 - RNA, 19 nt, Artificial Sequence
  Description of Artificial Sequence: Synthetic oligonucleotide
  Sense strand starting at position 3344 of SEQ ID NO: 588646
auugguuguuugugaauca

SEQ ID NO: 879653 - RNA, 19 nt, Artificial Sequence
  Description of Artificial Sequence: Synthetic oligonucleotide
  Antisense strand to SEQ ID NO: 879652
ugauucacaaacaaccaau

SEQ ID NO: 879654 - RNA, 19 nt, Artificial Sequence
  Description of Artificial Sequence: Synthetic oligonucleotide
  Sense strand starting at position 3345 of SEQ ID NO: 588646
uugguuguuugugaaucau

SEQ ID NO: 879655 - RNA, 19 nt, Artificial Sequence
  Description of Artificial Sequence: Synthetic oligonucleotide
  Antisense strand to SEQ ID NO: 879654
augauucacaaacaaccaa

SEQ ID NO: 879656 - RNA, 19 nt, Artificial Sequence
  Description of Artificial Sequence: Synthetic oligonucleotide
  Sense strand starting at position 3355 of SEQ ID NO: 588646
gugaaucauugaucuaagc

SEQ ID NO: 879657 - RNA, 19 nt, Artificial Sequence
  Description of Artificial Sequence: Synthetic oligonucleotide
  Antisense strand to SEQ ID NO: 879656
gcuuagaucaaugauucac

SEQ ID NO: 879658 - RNA, 19 nt, Artificial Sequence
  Description of Artificial Sequence: Synthetic oligonucleotide
  Sense strand starting at position 3394 of SEQ ID NO: 588646
cuggcucaauccuugaaga

SEQ ID NO: 879659 - RNA, 19 nt, Artificial Sequence
  Description of Artificial Sequence: Synthetic oligonucleotide
  Antisense strand to SEQ ID NO: 879658
ucuucaaggauugagccag

SEQ ID NO: 879660 - RNA, 19 nt, Artificial Sequence
  Description of Artificial Sequence: Synthetic oligonucleotide
  Sense strand starting at position 3395 of SEQ ID NO: 588646
uggcucaauccuugaagaa

SEQ ID NO: 879661 - RNA, 19 nt, Artificial Sequence
  Description of Artificial Sequence: Synthetic oligonucleotide
  Antisense strand to SEQ ID NO: 879660
uucuucaaggauugagcca

SEQ ID NO: 879662 - RNA, 19 nt, Artificial Sequence
  Description of Artificial Sequence: Synthetic oligonucleotide
  Sense strand starting at position 3484 of SEQ ID NO: 588646
gggugcucuccaggagucu

SEQ ID NO: 879663 - RNA, 19 nt, Artificial Sequence
  Description of Artificial Sequence: Synthetic oligonucleotide
  Antisense strand to SEQ ID NO: 879662
agacuccuggagagcaccc

SEQ ID NO: 879664 - RNA, 19 nt, Artificial Sequence
  Description of Artificial Sequence: Synthetic oligonucleotide
  Sense strand starting at position 3493 of SEQ ID NO: 588646
ccaggagucucccaucauc

SEQ ID NO: 879665 - RNA, 19 nt, Artificial Sequence
  Description of Artificial Sequence: Synthetic oligonucleotide
  Antisense strand to SEQ ID NO: 879664
gaugaugggagacuccugg

SEQ ID NO: 879666 - RNA, 19 nt, Artificial Sequence
  Description of Artificial Sequence: Synthetic oligonucleotide
  Sense strand starting at position 3558 of SEQ ID NO: 588646
uuuagauacugguuggguu

SEQ ID NO: 879667 - RNA, 19 nt, Artificial Sequence
  Description of Artificial Sequence: Synthetic oligonucleotide
  Antisense strand to SEQ ID NO: 879666
aacccaaccaguaucuaaa

SEQ ID NO: 879668 - RNA, 19 nt, Artificial Sequence
  Description of Artificial Sequence: Synthetic oligonucleotide
  Sense strand starting at position 3783 of SEQ ID NO: 588646
cuuugaaucucacagugau

SEQ ID NO: 879669 - RNA, 19 nt, Artificial Sequence
  Description of Artificial Sequence: Synthetic oligonucleotide
  Antisense strand to SEQ ID NO: 879668
aucacugugagauucaaag

SEQ ID NO: 879670 - RNA, 19 nt, Artificial Sequence
  Description of Artificial Sequence: Synthetic oligonucleotide
  Sense strand starting at position 3818 of SEQ ID NO: 588646
ugcuaauuccuaggugcuu

SEQ ID NO: 879671 - RNA, 19 nt, Artificial Sequence
  Description of Artificial Sequence: Synthetic oligonucleotide
  Antisense strand to SEQ ID NO: 879670
aagcaccuaggaauuagca

SEQ ID NO: 879672 - RNA, 19 nt, Artificial Sequence
  Description of Artificial Sequence: Synthetic oligonucleotide
  Sense strand starting at position 3966 of SEQ ID NO: 588646
gugggagcuuacgaugaau

SEQ ID NO: 879673 - RNA, 19 nt, Artificial Sequence
  Description of Artificial Sequence: Synthetic oligonucleotide
  Antisense strand to SEQ ID NO: 879672
auucaucguaagcucccac

SEQ ID NO: 879674 - RNA, 19 nt, Artificial Sequence
  Description of Artificial Sequence: Synthetic oligonucleotide
  Sense strand starting at position 3968 of SEQ ID NO: 588646
gggagcuuacgaugaaucu

SEQ ID NO: 879675 - RNA, 19 nt, Artificial Sequence
  Description of Artificial Sequence: Synthetic oligonucleotide
  Antisense strand to SEQ ID NO: 879674
agauucaucguaagcuccc

SEQ ID NO: 879676 - RNA, 19 nt, Artificial Sequence
  Description of Artificial Sequence: Synthetic oligonucleotide
  Sense strand starting at position 3975 of SEQ ID NO: 588646
uacgaugaaucucaguuaa

SEQ ID NO: 879677 - RNA, 19 nt, Artificial Sequence
  Description of Artificial Sequence: Synthetic oligonucleotide
  Antisense strand to SEQ ID NO: 879676
uuaacugagauucaucgua

SEQ ID NO: 879678 - RNA, 19 nt, Artificial Sequence
  Description of Artificial Sequence: Synthetic oligonucleotide
  Sense strand starting at position 3977 of SEQ ID NO: 588646
cgaugaaucucaguuaagg

SEQ ID NO: 879679 - RNA, 19 nt, Artificial Sequence
  Description of Artificial Sequence: Synthetic oligonucleotide
  Antisense strand to SEQ ID NO: 879678
ccuuaacugagauucaucg

SEQ ID NO: 879680 - RNA, 19 nt, Artificial Sequence
  Description of Artificial Sequence: Synthetic oligonucleotide
  Sense strand starting at position 20 of SEQ ID NO: 588647
uauguauuacaucgugauu

SEQ ID NO: 879681 - RNA, 19 nt, Artificial Sequence
  Description of Artificial Sequence: Synthetic oligonucleotide
  Antisense strand to SEQ ID NO: 879680
aaucacgauguaauacaua

SEQ ID NO: 879682 - RNA, 19 nt, Artificial Sequence
  Description of Artificial Sequence: Synthetic oligonucleotide
  Sense strand starting at position 166 of SEQ ID NO: 588647
agccaauagcuuugggaaa

SEQ ID NO: 879683 - RNA, 19 nt, Artificial Sequence
  Description of Artificial Sequence: Synthetic oligonucleotide
  Antisense strand to SEQ ID NO: 879682
uuucccaaagcuauuggcu

SEQ ID NO: 879684 - RNA, 19 nt, Artificial Sequence
  Description of Artificial Sequence: Synthetic oligonucleotide
  Sense strand starting at position 167 of SEQ ID NO: 588647
gccaauagcuuugggaaau

SEQ ID NO: 879685 - RNA, 19 nt, Artificial Sequence
  Description of Artificial Sequence: Synthetic oligonucleotide
  Antisense strand to SEQ ID NO: 879684
auuucccaaagcuauuggc

SEQ ID NO: 879686 - RNA, 19 nt, Artificial Sequence
  Description of Artificial Sequence: Synthetic oligonucleotide
  Sense strand starting at position 168 of SEQ ID NO: 588647
ccaauagcuuugggaaauc

SEQ ID NO: 879687 - RNA, 19 nt, Artificial Sequence
  Description of Artificial Sequence: Synthetic oligonucleotide
  Antisense strand to SEQ ID NO: 879686
gauuucccaaagcuauugg

SEQ ID NO: 879688 - RNA, 19 nt, Artificial Sequence
  Description of Artificial Sequence: Synthetic oligonucleotide
  Sense strand starting at position 180 of SEQ ID NO: 588647
ggaaaucucucaguggguu

SEQ ID NO: 879689 - RNA, 19 nt, Artificial Sequence
  Description of Artificial Sequence: Synthetic oligonucleotide
  Antisense strand to SEQ ID NO: 879688
aacccacugagagauuucc

SEQ ID NO: 879690 - RNA, 19 nt, Artificial Sequence
  Description of Artificial Sequence: Synthetic oligonucleotide
  Sense strand starting at position 181 of SEQ ID NO: 588647
gaaaucucucaguggguuu

SEQ ID NO: 879691 - RNA, 19 nt, Artificial Sequence
  Description of Artificial Sequence: Synthetic oligonucleotide
  Antisense strand to SEQ ID NO: 879690
aaacccacugagagauuuc

SEQ ID NO: 879692 - RNA, 19 nt, Artificial Sequence
  Description of Artificial Sequence: Synthetic oligonucleotide
  Sense strand starting at position 192 of SEQ ID NO: 588647
guggguuucuugucaaacc

SEQ ID NO: 879693 - RNA, 19 nt, Artificial Sequence
  Description of Artificial Sequence: Synthetic oligonucleotide
  Antisense strand to SEQ ID NO: 879692
gguuugacaagaaacccac

SEQ ID NO: 879694 - RNA, 19 nt, Artificial Sequence
  Description of Artificial Sequence: Synthetic oligonucleotide
  Sense strand starting at position 193 of SEQ ID NO: 588647
uggguuucuugucaaacca

SEQ ID NO: 879695 - RNA, 19 nt, Artificial Sequence
  Description of Artificial Sequence: Synthetic oligonucleotide
  Antisense strand to SEQ ID NO: 879694
ugguuugacaagaaaccca

SEQ ID NO: 879696 - RNA, 19 nt, Artificial Sequence
  Description of Artificial Sequence: Synthetic oligonucleotide
  Sense strand starting at position 212 of SEQ ID NO: 588647
ccuggauuccauuaucuug

SEQ ID NO: 879697 - RNA, 19 nt, Artificial Sequence
  Description of Artificial Sequence: Synthetic oligonucleotide
  Antisense strand to SEQ ID NO: 879696
caagauaauggaauccagg

SEQ ID NO: 879698 - RNA, 19 nt, Artificial Sequence
  Description of Artificial Sequence: Synthetic oligonucleotide
  Sense strand starting at position 215 of SEQ ID NO: 588647
ggauuccauuaucuugcua

SEQ ID NO: 879699 - RNA, 19 nt, Artificial Sequence
  Description of Artificial Sequence: Synthetic oligonucleotide
  Antisense strand to SEQ ID NO: 879698
uagcaagauaauggaaucc

SEQ ID NO: 879700 - RNA, 19 nt, Artificial Sequence
  Description of Artificial Sequence: Synthetic oligonucleotide
  Sense strand starting at position 247 of SEQ ID NO: 588647
ccuccuacguguuauuuau

SEQ ID NO: 879701 - RNA, 19 nt, Artificial Sequence
  Description of Artificial Sequence: Synthetic oligonucleotide
  Antisense strand to SEQ ID NO: 879700
auaaauaacacguaggagg

SEQ ID NO: 879702 - RNA, 19 nt, Artificial Sequence
  Description of Artificial Sequence: Synthetic oligonucleotide
  Sense strand starting at position 388 of SEQ ID NO: 588647
uagagcuaggauuguguau

SEQ ID NO: 879703 - RNA, 19 nt, Artificial Sequence
  Description of Artificial Sequence: Synthetic oligonucleotide
  Antisense strand to SEQ ID NO: 879702
auacacaauccuagcucua

SEQ ID NO: 879704 - RNA, 19 nt, Artificial Sequence
  Description of Artificial Sequence: Synthetic oligonucleotide
  Sense strand starting at position 390 of SEQ ID NO: 588647
gagcuaggauuguguauac

SEQ ID NO: 879705 - RNA, 19 nt, Artificial Sequence
  Description of Artificial Sequence: Synthetic oligonucleotide
  Antisense strand to SEQ ID NO: 879704
guauacacaauccuagcuc

SEQ ID NO: 879706 - RNA, 19 nt, Artificial Sequence
  Description of Artificial Sequence: Synthetic oligonucleotide
  Sense strand starting at position 1114 of SEQ ID NO: 588647
gaggaccaauaguguuuaa

SEQ ID NO: 879707 - RNA, 19 nt, Artificial Sequence
  Description of Artificial Sequence: Synthetic oligonucleotide
  Antisense strand to SEQ ID NO: 879706
uuaaacacuauugguccuc

SEQ ID NO: 879708 - RNA, 19 nt, Artificial Sequence
  Description of Artificial Sequence: Synthetic oligonucleotide
  Sense strand starting at position 1117 of SEQ ID NO: 588647
gaccaauaguguuuaaagg

SEQ ID NO: 879709 - RNA, 19 nt, Artificial Sequence
  Description of Artificial Sequence: Synthetic oligonucleotide
  Antisense strand to SEQ ID NO: 879708
ccuuuaaacacuauugguc

SEQ ID NO: 879710 - RNA, 19 nt, Artificial Sequence
  Description of Artificial Sequence: Synthetic oligonucleotide
  Sense strand starting at position 1194 of SEQ ID NO: 588647
gaguucugagcaggauaga

SEQ ID NO: 879711 - RNA, 19 nt, Artificial Sequence
  Description of Artificial Sequence: Synthetic oligonucleotide
  Antisense strand to SEQ ID NO: 879710
ucuauccugcucagaacuc

SEQ ID NO: 879712 - RNA, 19 nt, Artificial Sequence
  Description of Artificial Sequence: Synthetic oligonucleotide
  Sense strand starting at position 2278 of SEQ ID NO: 588647
ccacuauuaaugcggagau

SEQ ID NO: 879713 - RNA, 19 nt, Artificial Sequence
  Description of Artificial Sequence: Synthetic oligonucleotide
  Antisense strand to SEQ ID NO: 879712
aucuccgcauuaauagugg

SEQ ID NO: 879714 - RNA, 19 nt, Artificial Sequence
  Description of Artificial Sequence: Synthetic oligonucleotide
  Sense strand starting at position 2279 of SEQ ID NO: 588647
cacuauuaaugcggagaug

SEQ ID NO: 879715 - RNA, 19 nt, Artificial Sequence
  Description of Artificial Sequence: Synthetic oligonucleotide
  Antisense strand to SEQ ID NO: 879714
caucuccgcauuaauagug

SEQ ID NO: 879716 - RNA, 19 nt, Artificial Sequence
  Description of Artificial Sequence: Synthetic oligonucleotide
  Sense strand starting at position 2362 of SEQ ID NO: 588647
aggagaaagggucggcauu

SEQ ID NO: 879717 - RNA, 19 nt, Artificial Sequence
  Description of Artificial Sequence: Synthetic oligonucleotide
  Antisense strand to SEQ ID NO: 879716
aaugccgacccuuucuccu

SEQ ID NO: 879718 - RNA, 19 nt, Artificial Sequence
  Description of Artificial Sequence: Synthetic oligonucleotide
  Sense strand starting at position 2849 of SEQ ID NO: 588647
gucugucacguggcucaua

SEQ ID NO: 879719 - RNA, 19 nt, Artificial Sequence
  Description of Artificial Sequence: Synthetic oligonucleotide
  Antisense strand to SEQ ID NO: 879718
uaugagccacgugacagac

SEQ ID NO: 879720 - RNA, 19 nt, Artificial Sequence
  Description of Artificial Sequence: Synthetic oligonucleotide
  Sense strand starting at position 3063 of SEQ ID NO: 588647
cugaauuuguucuguaaug

SEQ ID NO: 879721 - RNA, 19 nt, Artificial Sequence
  Description of Artificial Sequence: Synthetic oligonucleotide
  Antisense strand to SEQ ID NO: 879720
cauuacagaacaaauucag

SEQ ID NO: 879722 - RNA, 19 nt, Artificial Sequence
  Description of Artificial Sequence: Synthetic oligonucleotide
  Sense strand starting at position 3064 of SEQ ID NO: 588647
ugaauuuguucuguaaugu

SEQ ID NO: 879723 - RNA, 19 nt, Artificial Sequence
  Description of Artificial Sequence: Synthetic oligonucleotide
  Antisense strand to SEQ ID NO: 879722
acauuacagaacaaauuca

SEQ ID NO: 879724 - RNA, 19 nt, Artificial Sequence
  Description of Artificial Sequence: Synthetic oligonucleotide
  Sense strand starting at position 3073 of SEQ ID NO: 588647
ucuguaaugucagggagcu

SEQ ID NO: 879725 - RNA, 19 nt, Artificial Sequence
  Description of Artificial Sequence: Synthetic oligonucleotide
  Antisense strand to SEQ ID NO: 879724
agcucccugacauuacaga

SEQ ID NO: 879726 - RNA, 19 nt, Artificial Sequence
  Description of Artificial Sequence: Synthetic oligonucleotide
  Sense strand starting at position 3114 of SEQ ID NO: 588647
uugucucucuguugaauaa

SEQ ID NO: 879727 - RNA, 19 nt, Artificial Sequence
  Description of Artificial Sequence: Synthetic oligonucleotide
  Antisense strand to SEQ ID NO: 879726
uuauucaacagagagacaa

SEQ ID NO: 879728 - RNA, 19 nt, Artificial Sequence
  Description of Artificial Sequence: Synthetic oligonucleotide
  Sense strand starting at position 3115 of SEQ ID NO: 588647
ugucucucuguugaauaau

SEQ ID NO: 879729 - RNA, 19 nt, Artificial Sequence
  Description of Artificial Sequence: Synthetic oligonucleotide
  Antisense strand to SEQ ID NO: 879728
auuauucaacagagagaca

SEQ ID NO: 879730 - RNA, 19 nt, Artificial Sequence
  Description of Artificial Sequence: Synthetic oligonucleotide
  Sense strand starting at position 3118 of SEQ ID NO: 588647
cucucuguugaauaauuga

SEQ ID NO: 879731 - RNA, 19 nt, Artificial Sequence
  Description of Artificial Sequence: Synthetic oligonucleotide
  Antisense strand to SEQ ID NO: 879730
ucaauuauucaacagagag

SEQ ID NO: 879732 - RNA, 19 nt, Artificial Sequence
  Description of Artificial Sequence: Synthetic oligonucleotide
  Sense strand starting at position 3532 of SEQ ID NO: 588647
ggagaugguucccagaggu

SEQ ID NO: 879733 - RNA, 19 nt, Artificial Sequence
  Description of Artificial Sequence: Synthetic oligonucleotide
  Antisense strand to SEQ ID NO: 879732
accucugggaaccaucucc

SEQ ID NO: 879734 - RNA, 19 nt, Artificial Sequence
  Description of Artificial Sequence: Synthetic oligonucleotide
  Sense strand starting at position 3547 of SEQ ID NO: 588647
aggugaugguauuggaacu

SEQ ID NO: 879735 - RNA, 19 nt, Artificial Sequence
  Description of Artificial Sequence: Synthetic oligonucleotide
  Antisense strand to SEQ ID NO: 879734
aguuccaauaccaucaccu

SEQ ID NO: 879736 - RNA, 19 nt, Artificial Sequence
  Description of Artificial Sequence: Synthetic oligonucleotide
  Sense strand starting at position 3581 of SEQ ID NO: 588647
aguggaaguucgccaaaca

SEQ ID NO: 879737 - RNA, 19 nt, Artificial Sequence
  Description of Artificial Sequence: Synthetic oligonucleotide
  Antisense strand to SEQ ID NO: 879736
uguuuggcgaacuuccacu

SEQ ID NO: 879738 - RNA, 19 nt, Artificial Sequence
  Description of Artificial Sequence: Synthetic oligonucleotide
  Sense strand starting at position 3582 of SEQ ID NO: 588647
guggaaguucgccaaacaa

SEQ ID NO: 879739 - RNA, 19 nt, Artificial Sequence
  Description of Artificial Sequence: Synthetic oligonucleotide
  Antisense strand to SEQ ID NO: 879738
uuguuuggcgaacuuccac

SEQ ID NO: 879740 - RNA, 19 nt, Artificial Sequence
  Description of Artificial Sequence: Synthetic oligonucleotide
  Sense strand starting at position 3657 of SEQ ID NO: 588647
acaagagaauacugcauau

SEQ ID NO: 879741 - RNA, 19 nt, Artificial Sequence
  Description of Artificial Sequence: Synthetic oligonucleotide
  Antisense strand to SEQ ID NO: 879740
auaugcaguauucucuugu

SEQ ID NO: 879742 - RNA, 19 nt, Artificial Sequence
  Description of Artificial Sequence: Synthetic oligonucleotide
  Sense strand starting at position 3668 of SEQ ID NO: 588647
cugcauauucuaugaagca

SEQ ID NO: 879743 - RNA, 19 nt, Artificial Sequence
  Description of Artificial Sequence: Synthetic oligonucleotide
  Antisense strand to SEQ ID NO: 879742
ugcuucauagaauaugcag

SEQ ID NO: 879744 - RNA, 19 nt, Artificial Sequence
  Description of Artificial Sequence: Synthetic oligonucleotide
  Sense strand starting at position 3669 of SEQ ID NO: 588647
ugcauauucuaugaagcau

SEQ ID NO: 879745 - RNA, 19 nt, Artificial Sequence
  Description of Artificial Sequence: Synthetic oligonucleotide
  Antisense strand to SEQ ID NO: 879744
augcuucauagaauaugca

SEQ ID NO: 879746 - RNA, 19 nt, Artificial Sequence
  Description of Artificial Sequence: Synthetic oligonucleotide
  Sense strand starting at position 3681 of SEQ ID NO: 588647
gaagcaucaucacugcagu

SEQ ID NO: 879747 - RNA, 19 nt, Artificial Sequence
  Description of Artificial Sequence: Synthetic oligonucleotide
  Antisense strand to SEQ ID NO: 879746
acugcagugaugaugcuuc

SEQ ID NO: 879748 - RNA, 19 nt, Artificial Sequence
  Description of Artificial Sequence: Synthetic oligonucleotide
  Sense strand starting at position 3697 of SEQ ID NO: 588647
agucccuugaaguguuaca

SEQ ID NO: 879749 - RNA, 19 nt, Artificial Sequence
  Description of Artificial Sequence: Synthetic oligonucleotide
  Antisense strand to SEQ ID NO: 879748
uguaacacuucaagggacu

SEQ ID NO: 879750 - RNA, 19 nt, Artificial Sequence
  Description of Artificial Sequence: Synthetic oligonucleotide
  Sense strand starting at position 3729 of SEQ ID NO: 588647
gagaaauccugccaaaguc

SEQ ID NO: 879751 - RNA, 19 nt, Artificial Sequence
  Description of Artificial Sequence: Synthetic oligonucleotide
  Antisense strand to SEQ ID NO: 879750
gacuuuggcaggauuucuc

SEQ ID NO: 879752 - RNA, 19 nt, Artificial Sequence
  Description of Artificial Sequence: Synthetic oligonucleotide
  Sense strand starting at position 101 of SEQ ID NO: 588648
uuauguuucuaguaaagac

SEQ ID NO: 879753 - RNA, 19 nt, Artificial Sequence
  Description of Artificial Sequence: Synthetic oligonucleotide
  Antisense strand to SEQ ID NO: 879752
gucuuuacuagaaacauaa

SEQ ID NO: 879754 - RNA, 19 nt, Artificial Sequence
  Description of Artificial Sequence: Synthetic oligonucleotide
  Sense strand starting at position 414 of SEQ ID NO: 588648
uauguauuacaucgugauu

SEQ ID NO: 879755 - RNA, 19 nt, Artificial Sequence
  Description of Artificial Sequence: Synthetic oligonucleotide
  Antisense strand to SEQ ID NO: 879754
aaucacgauguaauacaua

SEQ ID NO: 879756 - RNA, 19 nt, Artificial Sequence
  Description of Artificial Sequence: Synthetic oligonucleotide
  Sense strand starting at position 560 of SEQ ID NO: 588648
agccaauagcuuugggaaa

SEQ ID NO: 879757 - RNA, 19 nt, Artificial Sequence
  Description of Artificial Sequence: Synthetic oligonucleotide
  Antisense strand to SEQ ID NO: 879756
uuucccaaagcuauuggcu

SEQ ID NO: 879758 - RNA, 19 nt, Artificial Sequence
  Description of Artificial Sequence: Synthetic oligonucleotide
  Sense strand starting at position 561 of SEQ ID NO: 588648
gccaauagcuuugggaaau

SEQ ID NO: 879759 - RNA, 19 nt, Artificial Sequence
  Description of Artificial Sequence: Synthetic oligonucleotide
  Antisense strand to SEQ ID NO: 879758
auuucccaaagcuauuggc

SEQ ID NO: 879760 - RNA, 19 nt, Artificial Sequence
  Description of Artificial Sequence: Synthetic oligonucleotide
  Sense strand starting at position 562 of SEQ ID NO: 588648
ccaauagcuuugggaaauc

SEQ ID NO: 879761 - RNA, 19 nt, Artificial Sequence
  Description of Artificial Sequence: Synthetic oligonucleotide
  Antisense strand to SEQ ID NO: 879760
gauuucccaaagcuauugg

SEQ ID NO: 879762 - RNA, 19 nt, Artificial Sequence
  Description of Artificial Sequence: Synthetic oligonucleotide
  Sense strand starting at position 574 of SEQ ID NO: 588648
ggaaaucucucaguggguu

SEQ ID NO: 879763 - RNA, 19 nt, Artificial Sequence
  Description of Artificial Sequence: Synthetic oligonucleotide
  Antisense strand to SEQ ID NO: 879762
aacccacugagagauuucc

SEQ ID NO: 879764 - RNA, 19 nt, Artificial Sequence
  Description of Artificial Sequence: Synthetic oligonucleotide
  Sense strand starting at position 575 of SEQ ID NO: 588648
gaaaucucucaguggguuu

SEQ ID NO: 879765 - RNA, 19 nt, Artificial Sequence
  Description of Artificial Sequence: Synthetic oligonucleotide
  Antisense strand to SEQ ID NO: 879764
aaacccacugagagauuuc

SEQ ID NO: 879766 - RNA, 19 nt, Artificial Sequence
  Description of Artificial Sequence: Synthetic oligonucleotide
  Sense strand starting at position 586 of SEQ ID NO: 588648
guggguuucuugucaaacc

SEQ ID NO: 879767 - RNA, 19 nt, Artificial Sequence
  Description of Artificial Sequence: Synthetic oligonucleotide
  Antisense strand to SEQ ID NO: 879766
gguuugacaagaaacccac

SEQ ID NO: 879768 - RNA, 19 nt, Artificial Sequence
  Description of Artificial Sequence: Synthetic oligonucleotide
  Sense strand starting at position 587 of SEQ ID NO: 588648
uggguuucuugucaaacca

SEQ ID NO: 879769 - RNA, 19 nt, Artificial Sequence
  Description of Artificial Sequence: Synthetic oligonucleotide
  Antisense strand to SEQ ID NO: 879768
ugguuugacaagaaaccca

SEQ ID NO: 879770 - RNA, 19 nt, Artificial Sequence
  Description of Artificial Sequence: Synthetic oligonucleotide
  Sense strand starting at position 606 of SEQ ID NO: 588648
ccuggauuccauuaucuug

SEQ ID NO: 879771 - RNA, 19 nt, Artificial Sequence
  Description of Artificial Sequence: Synthetic oligonucleotide
  Antisense strand to SEQ ID NO: 879770
caagauaauggaauccagg

SEQ ID NO: 879772 - RNA, 19 nt, Artificial Sequence
  Description of Artificial Sequence: Synthetic oligonucleotide
  Sense strand starting at position 609 of SEQ ID NO: 588648
ggauuccauuaucuugcua

SEQ ID NO: 879773 - RNA, 19 nt, Artificial Sequence
  Description of Artificial Sequence: Synthetic oligonucleotide
  Antisense strand to SEQ ID NO: 879772
uagcaagauaauggaaucc

SEQ ID NO: 879774 - RNA, 19 nt, Artificial Sequence
  Description of Artificial Sequence: Synthetic oligonucleotide
  Sense strand starting at position 641 of SEQ ID NO: 588648
ccuccuacguguuauuuau

SEQ ID NO: 879775 - RNA, 19 nt, Artificial Sequence
  Description of Artificial Sequence: Synthetic oligonucleotide
  Antisense strand to SEQ ID NO: 879774
auaaauaacacguaggagg

SEQ ID NO: 879776 - RNA, 19 nt, Artificial Sequence
  Description of Artificial Sequence: Synthetic oligonucleotide
  Sense strand starting at position 782 of SEQ ID NO: 588648
uagagcuaggauuguguau

SEQ ID NO: 879777 - RNA, 19 nt, Artificial Sequence
  Description of Artificial Sequence: Synthetic oligonucleotide
  Antisense strand to SEQ ID NO: 879776
auacacaauccuagcucua

SEQ ID NO: 879778 - RNA, 19 nt, Artificial Sequence
  Description of Artificial Sequence: Synthetic oligonucleotide
  Sense strand starting at position 784 of SEQ ID NO: 588648
gagcuaggauuguguauac

SEQ ID NO: 879779 - RNA, 19 nt, Artificial Sequence
  Description of Artificial Sequence: Synthetic oligonucleotide
  Antisense strand to SEQ ID NO: 879778
guauacacaauccuagcuc

SEQ ID NO: 879780 - RNA, 19 nt, Artificial Sequence
  Description of Artificial Sequence: Synthetic oligonucleotide
  Sense strand starting at position 1508 of SEQ ID NO: 588648
gaggaccaauaguguuuaa

SEQ ID NO: 879781 - RNA, 19 nt, Artificial Sequence
  Description of Artificial Sequence: Synthetic oligonucleotide
  Antisense strand to SEQ ID NO: 879780
uuaaacacuauugguccuc

SEQ ID NO: 879782 - RNA, 19 nt, Artificial Sequence
  Description of Artificial Sequence: Synthetic oligonucleotide
  Sense strand starting at position 1511 of SEQ ID NO: 588648
gaccaauaguguuuaaagg

SEQ ID NO: 879783 - RNA, 19 nt, Artificial Sequence
  Description of Artificial Sequence: Synthetic oligonucleotide
  Antisense strand to SEQ ID NO: 879782
ccuuuaaacacuauugguc

SEQ ID NO: 879784 - RNA, 19 nt, Artificial Sequence
  Description of Artificial Sequence: Synthetic oligonucleotide
  Sense strand starting at position 1588 of SEQ ID NO: 588648
gaguucugagcaggauaga

SEQ ID NO: 879785 - RNA, 19 nt, Artificial Sequence
  Description of Artificial Sequence: Synthetic oligonucleotide
  Antisense strand to SEQ ID NO: 879784
ucuauccugcucagaacuc

SEQ ID NO: 879786 - RNA, 19 nt, Artificial Sequence
  Description of Artificial Sequence: Synthetic oligonucleotide
  Sense strand starting at position 2672 of SEQ ID NO: 588648
ccacuauuaaugcggagau

SEQ ID NO: 879787 - RNA, 19 nt, Artificial Sequence
  Description of Artificial Sequence: Synthetic oligonucleotide
  Antisense strand to SEQ ID NO: 879786
aucuccgcauuaauagugg

SEQ ID NO: 879788 - RNA, 19 nt, Artificial Sequence
  Description of Artificial Sequence: Synthetic oligonucleotide
  Sense strand starting at position 2673 of SEQ ID NO: 588648
cacuauuaaugcggagaug

SEQ ID NO: 879789 - RNA, 19 nt, Artificial Sequence
  Description of Artificial Sequence: Synthetic oligonucleotide
  Antisense strand to SEQ ID NO: 879788
caucuccgcauuaauagug

SEQ ID NO: 879790 - RNA, 19 nt, Artificial Sequence
  Description of Artificial Sequence: Synthetic oligonucleotide
  Sense strand starting at position 2756 of SEQ ID NO: 588648
aggagaaagggucggcauu

SEQ ID NO: 879791 - RNA, 19 nt, Artificial Sequence
  Description of Artificial Sequence: Synthetic oligonucleotide
  Antisense strand to SEQ ID NO: 879790
aaugccgacccuuucuccu

SEQ ID NO: 879792 - RNA, 19 nt, Artificial Sequence
  Description of Artificial Sequence: Synthetic oligonucleotide
  Sense strand starting at position 3243 of SEQ ID NO: 588648
gucugucacguggcucaua

SEQ ID NO: 879793 - RNA, 19 nt, Artificial Sequence
  Description of Artificial Sequence: Synthetic oligonucleotide
  Antisense strand to SEQ ID NO: 879792
uaugagccacgugacagac

SEQ ID NO: 879794 - RNA, 19 nt, Artificial Sequence
  Description of Artificial Sequence: Synthetic oligonucleotide
  Sense strand starting at position 3457 of SEQ ID NO: 588648
cugaauuuguucuguaaug

SEQ ID NO: 879795 - RNA, 19 nt, Artificial Sequence
  Description of Artificial Sequence: Synthetic oligonucleotide
  Antisense strand to SEQ ID NO: 879794
cauuacagaacaaauucag

SEQ ID NO: 879796 - RNA, 19 nt, Artificial Sequence
  Description of Artificial Sequence: Synthetic oligonucleotide
  Sense strand starting at position 3458 of SEQ ID NO: 588648
ugaauuuguucuguaaugu

SEQ ID NO: 879797 - RNA, 19 nt, Artificial Sequence
  Description of Artificial Sequence: Synthetic oligonucleotide
  Antisense strand to SEQ ID NO: 879796
acauuacagaacaaauuca

SEQ ID NO: 879798 - RNA, 19 nt, Artificial Sequence
  Description of Artificial Sequence: Synthetic oligonucleotide
  Sense strand starting at position 3467 of SEQ ID NO: 588648
ucuguaaugucagggagcu

SEQ ID NO: 879799 - RNA, 19 nt, Artificial Sequence
  Description of Artificial Sequence: Synthetic oligonucleotide
  Antisense strand to SEQ ID NO: 879798
agcucccugacauuacaga

SEQ ID NO: 879800 - RNA, 19 nt, Artificial Sequence
  Description of Artificial Sequence: Synthetic oligonucleotide
  Sense strand starting at position 3508 of SEQ ID NO: 588648
uugucucucuguugaauaa

SEQ ID NO: 879801 - RNA, 19 nt, Artificial Sequence
  Description of Artificial Sequence: Synthetic oligonucleotide
  Antisense strand to SEQ ID NO: 879800
uuauucaacagagagacaa

SEQ ID NO: 879802 - RNA, 19 nt, Artificial Sequence
  Description of Artificial Sequence: Synthetic oligonucleotide
  Sense strand starting at position 3509 of SEQ ID NO: 588648
ugucucucuguugaauaau

SEQ ID NO: 879803 - RNA, 19 nt, Artificial Sequence
  Description of Artificial Sequence: Synthetic oligonucleotide
  Antisense strand to SEQ ID NO: 879802
auuauucaacagagagaca

SEQ ID NO: 879804 - RNA, 19 nt, Artificial Sequence
  Description of Artificial Sequence: Synthetic oligonucleotide
  Sense strand starting at position 3512 of SEQ ID NO: 588648
cucucuguugaauaauuga

SEQ ID NO: 879805 - RNA, 19 nt, Artificial Sequence
  Description of Artificial Sequence: Synthetic oligonucleotide
  Antisense strand to SEQ ID NO: 879804
ucaauuauucaacagagag

SEQ ID NO: 879806 - RNA, 19 nt, Artificial Sequence
  Description of Artificial Sequence: Synthetic oligonucleotide
  Sense strand starting at position 3926 of SEQ ID NO: 588648
ggagaugguucccagaggu

SEQ ID NO: 879807 - RNA, 19 nt, Artificial Sequence
  Description of Artificial Sequence: Synthetic oligonucleotide
  Antisense strand to SEQ ID NO: 879806
accucugggaaccaucucc

SEQ ID NO: 879808 - RNA, 19 nt, Artificial Sequence
  Description of Artificial Sequence: Synthetic oligonucleotide
  Sense strand starting at position 3941 of SEQ ID NO: 588648
aggugaugguauuggaacu

SEQ ID NO: 879809 - RNA, 19 nt, Artificial Sequence
  Description of Artificial Sequence: Synthetic oligonucleotide
  Antisense strand to SEQ ID NO: 879808
aguuccaauaccaucaccu

SEQ ID NO: 879810 - RNA, 19 nt, Artificial Sequence
  Description of Artificial Sequence: Synthetic oligonucleotide
  Sense strand starting at position 3975 of SEQ ID NO: 588648
aguggaaguucgccaaaca

SEQ ID NO: 879811 - RNA, 19 nt, Artificial Sequence
  Description of Artificial Sequence: Synthetic oligonucleotide
  Antisense strand to SEQ ID NO: 879810
uguuuggcgaacuuccacu

SEQ ID NO: 879812 - RNA, 19 nt, Artificial Sequence
  Description of Artificial Sequence: Synthetic oligonucleotide
  Sense strand starting at position 3976 of SEQ ID NO: 588648
guggaaguucgccaaacaa

SEQ ID NO: 879813 - RNA, 19 nt, Artificial Sequence
  Description of Artificial Sequence: Synthetic oligonucleotide
  Antisense strand to SEQ ID NO: 879812
uuguuuggcgaacuuccac

SEQ ID NO: 879814 - RNA, 19 nt, Artificial Sequence
  Description of Artificial Sequence: Synthetic oligonucleotide
  Sense strand starting at position 263 of SEQ ID NO: 588649
gaggaccaauaguguuuaa

SEQ ID NO: 879815 - RNA, 19 nt, Artificial Sequence
  Description of Artificial Sequence: Synthetic oligonucleotide
  Antisense strand to SEQ ID NO: 879814
uuaaacacuauugguccuc

SEQ ID NO: 879816 - RNA, 19 nt, Artificial Sequence
  Description of Artificial Sequence: Synthetic oligonucleotide
  Sense strand starting at position 266 of SEQ ID NO: 588649
gaccaauaguguuuaaagg

SEQ ID NO: 879817 - RNA, 19 nt, Artificial Sequence
  Description of Artificial Sequence: Synthetic oligonucleotide
  Antisense strand to SEQ ID NO: 879816
ccuuuaaacacuauugguc

SEQ ID NO: 879818 - RNA, 19 nt, Artificial Sequence
  Description of Artificial Sequence: Synthetic oligonucleotide
  Sense strand starting at position 343 of SEQ ID NO: 588649
gaguucugagcaggauaga

SEQ ID NO: 879819 - RNA, 19 nt, Artificial Sequence
  Description of Artificial Sequence: Synthetic oligonucleotide
  Antisense strand to SEQ ID NO: 879818
ucuauccugcucagaacuc

SEQ ID NO: 879820 - RNA, 19 nt, Artificial Sequence
  Description of Artificial Sequence: Synthetic oligonucleotide
  Sense strand starting at position 1427 of SEQ ID NO: 588649
ccacuauuaaugcggagau

SEQ ID NO: 879821 - RNA, 19 nt, Artificial Sequence
  Description of Artificial Sequence: Synthetic oligonucleotide
  Antisense strand to SEQ ID NO: 879820
aucuccgcauuaauagugg

SEQ ID NO: 879822 - RNA, 19 nt, Artificial Sequence
  Description of Artificial Sequence: Synthetic oligonucleotide
  Sense strand starting at position 1428 of SEQ ID NO: 588649
cacuauuaaugcggagaug

SEQ ID NO: 879823 - RNA, 19 nt, Artificial Sequence
  Description of Artificial Sequence: Synthetic oligonucleotide
  Antisense strand to SEQ ID NO: 879822
caucuccgcauuaauagug

SEQ ID NO: 879824 - RNA, 19 nt, Artificial Sequence
  Description of Artificial Sequence: Synthetic oligonucleotide
  Sense strand starting at position 1511 of SEQ ID NO: 588649
aggagaaagggucggcauu

SEQ ID NO: 879825 - RNA, 19 nt, Artificial Sequence
  Description of Artificial Sequence: Synthetic oligonucleotide
  Antisense strand to SEQ ID NO: 879824
aaugccgacccuuucuccu

SEQ ID NO: 879826 - RNA, 19 nt, Artificial Sequence
  Description of Artificial Sequence: Synthetic oligonucleotide
  Sense strand starting at position 1998 of SEQ ID NO: 588649
gucugucacguggcucaua

SEQ ID NO: 879827 - RNA, 19 nt, Artificial Sequence
  Description of Artificial Sequence: Synthetic oligonucleotide
  Antisense strand to SEQ ID NO: 879826
uaugagccacgugacagac

SEQ ID NO: 879828 - RNA, 19 nt, Artificial Sequence
  Description of Artificial Sequence: Synthetic oligonucleotide
  Sense strand starting at position 2212 of SEQ ID NO: 588649
cugaauuuguucuguaaug

SEQ ID NO: 879829 - RNA, 19 nt, Artificial Sequence
  Description of Artificial Sequence: Synthetic oligonucleotide
  Antisense strand to SEQ ID NO: 879828
cauuacagaacaaauucag

SEQ ID NO: 879830 - RNA, 19 nt, Artificial Sequence
  Description of Artificial Sequence: Synthetic oligonucleotide
  Sense strand starting at position 2213 of SEQ ID NO: 588649
ugaauuuguucuguaaugu

SEQ ID NO: 879831 - RNA, 19 nt, Artificial Sequence
  Description of Artificial Sequence: Synthetic oligonucleotide
  Antisense strand to SEQ ID NO: 879830
acauuacagaacaaauuca

SEQ ID NO: 879832 - RNA, 19 nt, Artificial Sequence
  Description of Artificial Sequence: Synthetic oligonucleotide
  Sense strand starting at position 2222 of SEQ ID NO: 588649
ucuguaaugucagggagcu

SEQ ID NO: 879833 - RNA, 19 nt, Artificial Sequence
  Description of Artificial Sequence: Synthetic oligonucleotide
  Antisense strand to SEQ ID NO: 879832
agcucccugacauuacaga

SEQ ID NO: 879834 - RNA, 19 nt, Artificial Sequence
  Description of Artificial Sequence: Synthetic oligonucleotide
  Sense strand starting at position 2263 of SEQ ID NO: 588649
uugucucucuguugaauaa

SEQ ID NO: 879835 - RNA, 19 nt, Artificial Sequence
  Description of Artificial Sequence: Synthetic oligonucleotide
  Antisense strand to SEQ ID NO: 879834
uuauucaacagagagacaa

SEQ ID NO: 879836 - RNA, 19 nt, Artificial Sequence
  Description of Artificial Sequence: Synthetic oligonucleotide
  Sense strand starting at position 2264 of SEQ ID NO: 588649
ugucucucuguugaauaau

SEQ ID NO: 879837 - RNA, 19 nt, Artificial Sequence
  Description of Artificial Sequence: Synthetic oligonucleotide
  Antisense strand to SEQ ID NO: 879836
auuauucaacagagagaca

SEQ ID NO: 879838 - RNA, 19 nt, Artificial Sequence
  Description of Artificial Sequence: Synthetic oligonucleotide
  Sense strand starting at position 2267 of SEQ ID NO: 588649
cucucuguugaauaauuga

SEQ ID NO: 879839 - RNA, 19 nt, Artificial Sequence
  Description of Artificial Sequence: Synthetic oligonucleotide
  Antisense strand to SEQ ID NO: 879838
ucaauuauucaacagagag

SEQ ID NO: 879840 - RNA, 19 nt, Artificial Sequence
  Description of Artificial Sequence: Synthetic oligonucleotide
  Sense strand starting at position 2681 of SEQ ID NO: 588649
ggagaugguucccagaggu

SEQ ID NO: 879841 - RNA, 19 nt, Artificial Sequence
  Description of Artificial Sequence: Synthetic oligonucleotide
  Antisense strand to SEQ ID NO: 879840
accucugggaaccaucucc

SEQ ID NO: 879842 - RNA, 19 nt, Artificial Sequence
  Description of Artificial Sequence: Synthetic oligonucleotide
  Sense strand starting at position 2696 of SEQ ID NO: 588649
aggugaugguauuggaacu

SEQ ID NO: 879843 - RNA, 19 nt, Artificial Sequence
  Description of Artificial Sequence: Synthetic oligonucleotide
  Antisense strand to SEQ ID NO: 879842
aguuccaauaccaucaccu

SEQ ID NO: 879844 - RNA, 19 nt, Artificial Sequence
  Description of Artificial Sequence: Synthetic oligonucleotide
  Sense strand starting at position 2730 of SEQ ID NO: 588649
aguggaaguucgccaaaca

SEQ ID NO: 879845 - RNA, 19 nt, Artificial Sequence
  Description of Artificial Sequence: Synthetic oligonucleotide
  Antisense strand to SEQ ID NO: 879844
uguuuggcgaacuuccacu

SEQ ID NO: 879846 - RNA, 19 nt, Artificial Sequence
  Description of Artificial Sequence: Synthetic oligonucleotide
  Sense strand starting at position 2731 of SEQ ID NO: 588649
guggaaguucgccaaacaa

SEQ ID NO: 879847 - RNA, 19 nt, Artificial Sequence
  Description of Artificial Sequence: Synthetic oligonucleotide
  Antisense strand to SEQ ID NO: 879846
uuguuuggcgaacuuccac

SEQ ID NO: 879848 - RNA, 19 nt, Artificial Sequence
  Description of Artificial Sequence: Synthetic oligonucleotide
  Sense strand starting at position 2806 of SEQ ID NO: 588649
acaagagaauacugcauau

SEQ ID NO: 879849 - RNA, 19 nt, Artificial Sequence
  Description of Artificial Sequence: Synthetic oligonucleotide
  Antisense strand to SEQ ID NO: 879848
auaugcaguauucucuugu

SEQ ID NO: 879850 - RNA, 19 nt, Artificial Sequence
  Description of Artificial Sequence: Synthetic oligonucleotide
  Sense strand starting at position 2817 of SEQ ID NO: 588649
cugcauauucuaugaagca

SEQ ID NO: 879851 - RNA, 19 nt, Artificial Sequence
  Description of Artificial Sequence: Synthetic oligonucleotide
  Antisense strand to SEQ ID NO: 879850
ugcuucauagaauaugcag

SEQ ID NO: 879852 - RNA, 19 nt, Artificial Sequence
  Description of Artificial Sequence: Synthetic oligonucleotide
  Sense strand starting at position 2818 of SEQ ID NO: 588649
ugcauauucuaugaagcau

SEQ ID NO: 879853 - RNA, 19 nt, Artificial Sequence
  Description of Artificial Sequence: Synthetic oligonucleotide
  Antisense strand to SEQ ID NO: 879852
augcuucauagaauaugca

SEQ ID NO: 879854 - RNA, 19 nt, Artificial Sequence
  Description of Artificial Sequence: Synthetic oligonucleotide
  Sense strand starting at position 2830 of SEQ ID NO: 588649
gaagcaucaucacugcagu

SEQ ID NO: 879855 - RNA, 19 nt, Artificial Sequence
  Description of Artificial Sequence: Synthetic oligonucleotide
  Antisense strand to SEQ ID NO: 879854
acugcagugaugaugcuuc

SEQ ID NO: 879856 - RNA, 19 nt, Artificial Sequence
  Description of Artificial Sequence: Synthetic oligonucleotide
  Sense strand starting at position 2846 of SEQ ID NO: 588649
agucccuugaaguguuaca

SEQ ID NO: 879857 - RNA, 19 nt, Artificial Sequence
  Description of Artificial Sequence: Synthetic oligonucleotide
  Antisense strand to SEQ ID NO: 879856
uguaacacuucaagggacu

SEQ ID NO: 879858 - RNA, 19 nt, Artificial Sequence
  Description of Artificial Sequence: Synthetic oligonucleotide
  Sense strand starting at position 2878 of SEQ ID NO: 588649
gagaaauccugccaaaguc

SEQ ID NO: 879859 - RNA, 19 nt, Artificial Sequence
  Description of Artificial Sequence: Synthetic oligonucleotide
  Antisense strand to SEQ ID NO: 879858
gacuuuggcaggauuucuc

SEQ ID NO: 879860 - RNA, 19 nt, Artificial Sequence
  Description of Artificial Sequence: Synthetic oligonucleotide
  Sense strand starting at position 3634 of SEQ ID NO: 588649
agaggaggccuuugcaaua

SEQ ID NO: 879861 - RNA, 19 nt, Artificial Sequence
  Description of Artificial Sequence: Synthetic oligonucleotide
  Antisense strand to SEQ ID NO: 879860
uauugcaaaggccuccucu

SEQ ID NO: 879862 - RNA, 19 nt, Artificial Sequence
  Description of Artificial Sequence: Synthetic oligonucleotide
  Sense strand starting at position 3639 of SEQ ID NO: 588649
aggccuuugcaauauuaac

SEQ ID NO: 879863 - RNA, 19 nt, Artificial Sequence
  Description of Artificial Sequence: Synthetic oligonucleotide
  Antisense strand to SEQ ID NO: 879862
guuaauauugcaaaggccu

SEQ ID NO: 879864 - RNA, 19 nt, Artificial Sequence
  Description of Artificial Sequence: Synthetic oligonucleotide
  Sense strand starting at position 385 of SEQ ID NO: 588650
ugggaagggccuuggaaua

SEQ ID NO: 879865 - RNA, 19 nt, Artificial Sequence
  Description of Artificial Sequence: Synthetic oligonucleotide
  Antisense strand to SEQ ID NO: 879864
uauuccaaggcccuuccca

SEQ ID NO: 879866 - RNA, 19 nt, Artificial Sequence
  Description of Artificial Sequence: Synthetic oligonucleotide
  Sense strand starting at position 608 of SEQ ID NO: 588650
uuauguuucuaguaaagac

SEQ ID NO: 879867 - RNA, 19 nt, Artificial Sequence
  Description of Artificial Sequence: Synthetic oligonucleotide
  Antisense strand to SEQ ID NO: 879866
gucuuuacuagaaacauaa

SEQ ID NO: 879868 - RNA, 19 nt, Artificial Sequence
  Description of Artificial Sequence: Synthetic oligonucleotide
  Sense strand starting at position 921 of SEQ ID NO: 588650
uauguauuacaucgugauu

SEQ ID NO: 879869 - RNA, 19 nt, Artificial Sequence
  Description of Artificial Sequence: Synthetic oligonucleotide
  Antisense strand to SEQ ID NO: 879868
aaucacgauguaauacaua

SEQ ID NO: 879870 - RNA, 19 nt, Artificial Sequence
  Description of Artificial Sequence: Synthetic oligonucleotide
  Sense strand starting at position 1067 of SEQ ID NO: 588650
agccaauagcuuugggaaa

SEQ ID NO: 879871 - RNA, 19 nt, Artificial Sequence
  Description of Artificial Sequence: Synthetic oligonucleotide
  Antisense strand to SEQ ID NO: 879870
uuucccaaagcuauuggcu

SEQ ID NO: 879872 - RNA, 19 nt, Artificial Sequence
  Description of Artificial Sequence: Synthetic oligonucleotide
  Sense strand starting at position 1068 of SEQ ID NO: 588650
gccaauagcuuugggaaau

SEQ ID NO: 879873 - RNA, 19 nt, Artificial Sequence
  Description of Artificial Sequence: Synthetic oligonucleotide
  Antisense strand to SEQ ID NO: 879872
auuucccaaagcuauuggc

SEQ ID NO: 879874 - RNA, 19 nt, Artificial Sequence
  Description of Artificial Sequence: Synthetic oligonucleotide
  Sense strand starting at position 1069 of SEQ ID NO: 588650
ccaauagcuuugggaaauc

SEQ ID NO: 879875 - RNA, 19 nt, Artificial Sequence
  Description of Artificial Sequence: Synthetic oligonucleotide
  Antisense strand to SEQ ID NO: 879874
gauuucccaaagcuauugg

SEQ ID NO: 879876 - RNA, 19 nt, Artificial Sequence
  Description of Artificial Sequence: Synthetic oligonucleotide
  Sense strand starting at position 1081 of SEQ ID NO: 588650
ggaaaucucucaguggguu

SEQ ID NO: 879877 - RNA, 19 nt, Artificial Sequence
  Description of Artificial Sequence: Synthetic oligonucleotide
  Antisense strand to SEQ ID NO: 879876
aacccacugagagauuucc

SEQ ID NO: 879878 - RNA, 19 nt, Artificial Sequence
  Description of Artificial Sequence: Synthetic oligonucleotide
  Sense strand starting at position 1082 of SEQ ID NO: 588650
gaaaucucucaguggguuu

SEQ ID NO: 879879 - RNA, 19 nt, Artificial Sequence
  Description of Artificial Sequence: Synthetic oligonucleotide
  Antisense strand to SEQ ID NO: 879878
aaacccacugagagauuuc

SEQ ID NO: 879880 - RNA, 19 nt, Artificial Sequence
  Description of Artificial Sequence: Synthetic oligonucleotide
  Sense strand starting at position 1093 of SEQ ID NO: 588650
guggguuucuugucaaacc

SEQ ID NO: 879881 - RNA, 19 nt, Artificial Sequence
  Description of Artificial Sequence: Synthetic oligonucleotide
  Antisense strand to SEQ ID NO: 879880
gguuugacaagaaacccac

SEQ ID NO: 879882 - RNA, 19 nt, Artificial Sequence
  Description of Artificial Sequence: Synthetic oligonucleotide
  Sense strand starting at position 1094 of SEQ ID NO: 588650
uggguuucuugucaaacca

SEQ ID NO: 879883 - RNA, 19 nt, Artificial Sequence
  Description of Artificial Sequence: Synthetic oligonucleotide
  Antisense strand to SEQ ID NO: 879882
ugguuugacaagaaaccca

SEQ ID NO: 879884 - RNA, 19 nt, Artificial Sequence
  Description of Artificial Sequence: Synthetic oligonucleotide
  Sense strand starting at position 1113 of SEQ ID NO: 588650
ccuggauuccauuaucuug

SEQ ID NO: 879885 - RNA, 19 nt, Artificial Sequence
  Description of Artificial Sequence: Synthetic oligonucleotide
  Antisense strand to SEQ ID NO: 879884
caagauaauggaauccagg

SEQ ID NO: 879886 - RNA, 19 nt, Artificial Sequence
  Description of Artificial Sequence: Synthetic oligonucleotide
  Sense strand starting at position 1116 of SEQ ID NO: 588650
ggauuccauuaucuugcua

SEQ ID NO: 879887 - RNA, 19 nt, Artificial Sequence
  Description of Artificial Sequence: Synthetic oligonucleotide
  Antisense strand to SEQ ID NO: 879886
uagcaagauaauggaaucc

SEQ ID NO: 879888 - RNA, 19 nt, Artificial Sequence
  Description of Artificial Sequence: Synthetic oligonucleotide
  Sense strand starting at position 1148 of SEQ ID NO: 588650
ccuccuacguguuauuuau

SEQ ID NO: 879889 - RNA, 19 nt, Artificial Sequence
  Description of Artificial Sequence: Synthetic oligonucleotide
  Antisense strand to SEQ ID NO: 879888
auaaauaacacguaggagg

SEQ ID NO: 879890 - RNA, 19 nt, Artificial Sequence
  Description of Artificial Sequence: Synthetic oligonucleotide
  Sense strand starting at position 1289 of SEQ ID NO: 588650
uagagcuaggauuguguau

SEQ ID NO: 879891 - RNA, 19 nt, Artificial Sequence
  Description of Artificial Sequence: Synthetic oligonucleotide
  Antisense strand to SEQ ID NO: 879890
auacacaauccuagcucua

SEQ ID NO: 879892 - RNA, 19 nt, Artificial Sequence
  Description of Artificial Sequence: Synthetic oligonucleotide
  Sense strand starting at position 1291 of SEQ ID NO: 588650
gagcuaggauuguguauac

SEQ ID NO: 879893 - RNA, 19 nt, Artificial Sequence
  Description of Artificial Sequence: Synthetic oligonucleotide
  Antisense strand to SEQ ID NO: 879892
guauacacaauccuagcuc

SEQ ID NO: 879894 - RNA, 19 nt, Artificial Sequence
  Description of Artificial Sequence: Synthetic oligonucleotide
  Sense strand starting at position 2015 of SEQ ID NO: 588650
gaggaccaauaguguuuaa

SEQ ID NO: 879895 - RNA, 19 nt, Artificial Sequence
  Description of Artificial Sequence: Synthetic oligonucleotide
  Antisense strand to SEQ ID NO: 879894
uuaaacacuauugguccuc

SEQ ID NO: 879896 - RNA, 19 nt, Artificial Sequence
  Description of Artificial Sequence: Synthetic oligonucleotide
  Sense strand starting at position 2018 of SEQ ID NO: 588650
gaccaauaguguuuaaagg

SEQ ID NO: 879897 - RNA, 19 nt, Artificial Sequence
  Description of Artificial Sequence: Synthetic oligonucleotide
  Antisense strand to SEQ ID NO: 879896
ccuuuaaacacuauugguc

SEQ ID NO: 879898 - RNA, 19 nt, Artificial Sequence
  Description of Artificial Sequence: Synthetic oligonucleotide
  Sense strand starting at position 2095 of SEQ ID NO: 588650
gaguucugagcaggauaga

SEQ ID NO: 879899 - RNA, 19 nt, Artificial Sequence
  Description of Artificial Sequence: Synthetic oligonucleotide
  Antisense strand to SEQ ID NO: 879898
ucuauccugcucagaacuc

SEQ ID NO: 879900 - RNA, 19 nt, Artificial Sequence
  Description of Artificial Sequence: Synthetic oligonucleotide
  Sense strand starting at position 3179 of SEQ ID NO: 588650
ccacuauuaaugcggagau

SEQ ID NO: 879901 - RNA, 19 nt, Artificial Sequence
  Description of Artificial Sequence: Synthetic oligonucleotide
  Antisense strand to SEQ ID NO: 879900
aucuccgcauuaauagugg

SEQ ID NO: 879902 - RNA, 19 nt, Artificial Sequence
  Description of Artificial Sequence: Synthetic oligonucleotide
  Sense strand starting at position 3180 of SEQ ID NO: 588650
cacuauuaaugcggagaug

SEQ ID NO: 879903 - RNA, 19 nt, Artificial Sequence
  Description of Artificial Sequence: Synthetic oligonucleotide
  Antisense strand to SEQ ID NO: 879902
caucuccgcauuaauagug

SEQ ID NO: 879904 - RNA, 19 nt, Artificial Sequence
  Description of Artificial Sequence: Synthetic oligonucleotide
  Sense strand starting at position 3263 of SEQ ID NO: 588650
aggagaaagggucggcauu

SEQ ID NO: 879905 - RNA, 19 nt, Artificial Sequence
  Description of Artificial Sequence: Synthetic oligonucleotide
  Antisense strand to SEQ ID NO: 879904
aaugccgacccuuucuccu

SEQ ID NO: 879906 - RNA, 19 nt, Artificial Sequence
  Description of Artificial Sequence: Synthetic oligonucleotide
  Sense strand starting at position 3750 of SEQ ID NO: 588650
gucugucacguggcucaua

SEQ ID NO: 879907 - RNA, 19 nt, Artificial Sequence
  Description of Artificial Sequence: Synthetic oligonucleotide
  Antisense strand to SEQ ID NO: 879906
uaugagccacgugacagac

SEQ ID NO: 879908 - RNA, 19 nt, Artificial Sequence
  Description of Artificial Sequence: Synthetic oligonucleotide
  Sense strand starting at position 3964 of SEQ ID NO: 588650
cugaauuuguucuguaaug

SEQ ID NO: 879909 - RNA, 19 nt, Artificial Sequence
  Description of Artificial Sequence: Synthetic oligonucleotide
  Antisense strand to SEQ ID NO: 879908
cauuacagaacaaauucag

SEQ ID NO: 879910 - RNA, 19 nt, Artificial Sequence
  Description of Artificial Sequence: Synthetic oligonucleotide
  Sense strand starting at position 3965 of SEQ ID NO: 588650
ugaauuuguucuguaaugu

SEQ ID NO: 879911 - RNA, 19 nt, Artificial Sequence
  Description of Artificial Sequence: Synthetic oligonucleotide
  Antisense strand to SEQ ID NO: 879910
acauuacagaacaaauuca

SEQ ID NO: 879912 - RNA, 19 nt, Artificial Sequence
  Description of Artificial Sequence: Synthetic oligonucleotide
  Sense strand starting at position 3974 of SEQ ID NO: 588650
ucuguaaugucagggagcu

SEQ ID NO: 879913 - RNA, 19 nt, Artificial Sequence
  Description of Artificial Sequence: Synthetic oligonucleotide
  Antisense strand to SEQ ID NO: 879912
agcucccugacauuacaga

SEQ ID NO: 879914 - RNA, 19 nt, Artificial Sequence
  Description of Artificial Sequence: Synthetic oligonucleotide
  Sense strand starting at position 3 of SEQ ID NO: 588651
ccaauugauagagggucua

SEQ ID NO: 879915 - RNA, 19 nt, Artificial Sequence
  Description of Artificial Sequence: Synthetic oligonucleotide
  Antisense strand to SEQ ID NO: 879914
uagacccucuaucaauugg

SEQ ID NO: 879916 - RNA, 19 nt, Artificial Sequence
  Description of Artificial Sequence: Synthetic oligonucleotide
  Sense strand starting at position 50 of SEQ ID NO: 588651
uccuauauugacuagguuu

SEQ ID NO: 879917 - RNA, 19 nt, Artificial Sequence
  Description of Artificial Sequence: Synthetic oligonucleotide
  Antisense strand to SEQ ID NO: 879916
aaaccuagucaauauagga

SEQ ID NO: 879918 - RNA, 19 nt, Artificial Sequence
  Description of Artificial Sequence: Synthetic oligonucleotide
  Sense strand starting at position 102 of SEQ ID NO: 588651
uaaauuauuguggaaugcu

SEQ ID NO: 879919 - RNA, 19 nt, Artificial Sequence
  Description of Artificial Sequence: Synthetic oligonucleotide
  Antisense strand to SEQ ID NO: 879918
agcauuccacaauaauuua

SEQ ID NO: 879920 - RNA, 19 nt, Artificial Sequence
  Description of Artificial Sequence: Synthetic oligonucleotide
  Sense strand starting at position 139 of SEQ ID NO: 588651
aguacucuucuauguauuu

SEQ ID NO: 879921 - RNA, 19 nt, Artificial Sequence
  Description of Artificial Sequence: Synthetic oligonucleotide
  Antisense strand to SEQ ID NO: 879920
aaauacauagaagaguacu

SEQ ID NO: 879922 - RNA, 19 nt, Artificial Sequence
  Description of Artificial Sequence: Synthetic oligonucleotide
  Sense strand starting at position 267 of SEQ ID NO: 588651
uagggcauuguguaacauu

SEQ ID NO: 879923 - RNA, 19 nt, Artificial Sequence
  Description of Artificial Sequence: Synthetic oligonucleotide
  Antisense strand to SEQ ID NO: 879922
aauguuacacaaugcccua

SEQ ID NO: 879924 - RNA, 19 nt, Artificial Sequence
  Description of Artificial Sequence: Synthetic oligonucleotide
  Sense strand starting at position 361 of SEQ ID NO: 588651
uauagauacuguuugguua

SEQ ID NO: 879925 - RNA, 19 nt, Artificial Sequence
  Description of Artificial Sequence: Synthetic oligonucleotide
  Antisense strand to SEQ ID NO: 879924
uaaccaaacaguaucuaua

SEQ ID NO: 879926 - RNA, 19 nt, Artificial Sequence
  Description of Artificial Sequence: Synthetic oligonucleotide
  Sense strand starting at position 365 of SEQ ID NO: 588651
gauacuguuugguuaccau

SEQ ID NO: 879927 - RNA, 19 nt, Artificial Sequence
  Description of Artificial Sequence: Synthetic oligonucleotide
  Antisense strand to SEQ ID NO: 879926
augguaaccaaacaguauc

SEQ ID NO: 879928 - RNA, 19 nt, Artificial Sequence
  Description of Artificial Sequence: Synthetic oligonucleotide
  Sense strand starting at position 368 of SEQ ID NO: 588651
acuguuugguuaccauaga

SEQ ID NO: 879929 - RNA, 19 nt, Artificial Sequence
  Description of Artificial Sequence: Synthetic oligonucleotide
  Antisense strand to SEQ ID NO: 879928
ucuaugguaaccaaacagu

SEQ ID NO: 879930 - RNA, 19 nt, Artificial Sequence
  Description of Artificial Sequence: Synthetic oligonucleotide
  Sense strand starting at position 447 of SEQ ID NO: 588651
uaugaauucguuugaauca

SEQ ID NO: 879931 - RNA, 19 nt, Artificial Sequence
  Description of Artificial Sequence: Synthetic oligonucleotide
  Antisense strand to SEQ ID NO: 879930
ugauucaaacgaauucaua

SEQ ID NO: 879932 - RNA, 19 nt, Artificial Sequence
  Description of Artificial Sequence: Synthetic oligonucleotide
  Sense strand starting at position 697 of SEQ ID NO: 588651
ggcuuuaucagaggcacaa

SEQ ID NO: 879933 - RNA, 19 nt, Artificial Sequence
  Description of Artificial Sequence: Synthetic oligonucleotide
  Antisense strand to SEQ ID NO: 879932
uugugccucugauaaagcc

SEQ ID NO: 879934 - RNA, 19 nt, Artificial Sequence
  Description of Artificial Sequence: Synthetic oligonucleotide
  Sense strand starting at position 926 of SEQ ID NO: 588651
cuuagugaucuuuaauuag

SEQ ID NO: 879935 - RNA, 19 nt, Artificial Sequence
  Description of Artificial Sequence: Synthetic oligonucleotide
  Antisense strand to SEQ ID NO: 879934
cuaauuaaagaucacuaag

SEQ ID NO: 879936 - RNA, 19 nt, Artificial Sequence
  Description of Artificial Sequence: Synthetic oligonucleotide
  Sense strand starting at position 929 of SEQ ID NO: 588651
agugaucuuuaauuagaug

SEQ ID NO: 879937 - RNA, 19 nt, Artificial Sequence
  Description of Artificial Sequence: Synthetic oligonucleotide
  Antisense strand to SEQ ID NO: 879936
caucuaauuaaagaucacu

SEQ ID NO: 879938 - RNA, 19 nt, Artificial Sequence
  Description of Artificial Sequence: Synthetic oligonucleotide
  Sense strand starting at position 1101 of SEQ ID NO: 588651
uuaggauaccuguaguaua

SEQ ID NO: 879939 - RNA, 19 nt, Artificial Sequence
  Description of Artificial Sequence: Synthetic oligonucleotide
  Antisense strand to SEQ ID NO: 879938
uauacuacagguauccuaa

SEQ ID NO: 879940 - RNA, 19 nt, Artificial Sequence
  Description of Artificial Sequence: Synthetic oligonucleotide
  Sense strand starting at position 1204 of SEQ ID NO: 588651
gauuuauauugguaugaac

SEQ ID NO: 879941 - RNA, 19 nt, Artificial Sequence
  Description of Artificial Sequence: Synthetic oligonucleotide
  Antisense strand to SEQ ID NO: 879940
guucauaccaauauaaauc

SEQ ID NO: 879942 - RNA, 19 nt, Artificial Sequence
  Description of Artificial Sequence: Synthetic oligonucleotide
  Sense strand starting at position 1206 of SEQ ID NO: 588651
uuuauauugguaugaacag

SEQ ID NO: 879943 - RNA, 19 nt, Artificial Sequence
  Description of Artificial Sequence: Synthetic oligonucleotide
  Antisense strand to SEQ ID NO: 879942
cuguucauaccaauauaaa

SEQ ID NO: 879944 - RNA, 19 nt, Artificial Sequence
  Description of Artificial Sequence: Synthetic oligonucleotide
  Sense strand starting at position 1691 of SEQ ID NO: 588651
ugcgaugauauacauaagu

SEQ ID NO: 879945 - RNA, 19 nt, Artificial Sequence
  Description of Artificial Sequence: Synthetic oligonucleotide
  Antisense strand to SEQ ID NO: 879944
acuuauguauaucaucgca

SEQ ID NO: 879946 - RNA, 19 nt, Artificial Sequence
  Description of Artificial Sequence: Synthetic oligonucleotide
  Sense strand starting at position 1787 of SEQ ID NO: 588651
ucagucgcacuuuaacaaa

SEQ ID NO: 879947 - RNA, 19 nt, Artificial Sequence
  Description of Artificial Sequence: Synthetic oligonucleotide
  Antisense strand to SEQ ID NO: 879946
uuuguuaaagugcgacuga

SEQ ID NO: 879948 - RNA, 19 nt, Artificial Sequence
  Description of Artificial Sequence: Synthetic oligonucleotide
  Sense strand starting at position 1994 of SEQ ID NO: 588651
ccaugugguagagaucuuu

SEQ ID NO: 879949 - RNA, 19 nt, Artificial Sequence
  Description of Artificial Sequence: Synthetic oligonucleotide
  Antisense strand to SEQ ID NO: 879948
aaagaucucuaccacaugg

SEQ ID NO: 879950 - RNA, 19 nt, Artificial Sequence
  Description of Artificial Sequence: Synthetic oligonucleotide
  Sense strand starting at position 2019 of SEQ ID NO: 588651
auucuuucucuagggugaa

SEQ ID NO: 879951 - RNA, 19 nt, Artificial Sequence
  Description of Artificial Sequence: Synthetic oligonucleotide
  Antisense strand to SEQ ID NO: 879950
uucacccuagagaaagaau

SEQ ID NO: 879952 - RNA, 19 nt, Artificial Sequence
  Description of Artificial Sequence: Synthetic oligonucleotide
  Sense strand starting at position 2022 of SEQ ID NO: 588651
cuuucucuagggugaaaug

SEQ ID NO: 879953 - RNA, 19 nt, Artificial Sequence
  Description of Artificial Sequence: Synthetic oligonucleotide
  Antisense strand to SEQ ID NO: 879952
cauuucacccuagagaaag

SEQ ID NO: 879954 - RNA, 19 nt, Artificial Sequence
  Description of Artificial Sequence: Synthetic oligonucleotide
  Sense strand starting at position 2033 of SEQ ID NO: 588651
gugaaaugcaguguguugu

SEQ ID NO: 879955 - RNA, 19 nt, Artificial Sequence
  Description of Artificial Sequence: Synthetic oligonucleotide
  Antisense strand to SEQ ID NO: 879954
acaacacacugcauuucac

SEQ ID NO: 879956 - RNA, 19 nt, Artificial Sequence
  Description of Artificial Sequence: Synthetic oligonucleotide
  Sense strand starting at position 2044 of SEQ ID NO: 588651
uguguuguacuagagaacu

SEQ ID NO: 879957 - RNA, 19 nt, Artificial Sequence
  Description of Artificial Sequence: Synthetic oligonucleotide
  Antisense strand to SEQ ID NO: 879956
aguucucuaguacaacaca

SEQ ID NO: 879958 - RNA, 19 nt, Artificial Sequence
  Description of Artificial Sequence: Synthetic oligonucleotide
  Sense strand starting at position 2046 of SEQ ID NO: 588651
uguuguacuagagaacugu

SEQ ID NO: 879959 - RNA, 19 nt, Artificial Sequence
  Description of Artificial Sequence: Synthetic oligonucleotide
  Antisense strand to SEQ ID NO: 879958
acaguucucuaguacaaca

SEQ ID NO: 879960 - RNA, 19 nt, Artificial Sequence
  Description of Artificial Sequence: Synthetic oligonucleotide
  Sense strand starting at position 2052 of SEQ ID NO: 588651
acuagagaacugugcuuaa

SEQ ID NO: 879961 - RNA, 19 nt, Artificial Sequence
  Description of Artificial Sequence: Synthetic oligonucleotide
  Antisense strand to SEQ ID NO: 879960
uuaagcacaguucucuagu

SEQ ID NO: 879962 - RNA, 19 nt, Artificial Sequence
  Description of Artificial Sequence: Synthetic oligonucleotide
  Sense strand starting at position 2056 of SEQ ID NO: 588651
gagaacugugcuuaaguua

SEQ ID NO: 879963 - RNA, 19 nt, Artificial Sequence
  Description of Artificial Sequence: Synthetic oligonucleotide
  Antisense strand to SEQ ID NO: 879962
uaacuuaagcacaguucuc

SEQ ID NO: 879964 - RNA, 19 nt, Artificial Sequence
  Description of Artificial Sequence: Synthetic oligonucleotide
  Sense strand starting at position 2065 of SEQ ID NO: 588651
gcuuaaguuauuuguugua

SEQ ID NO: 879965 - RNA, 19 nt, Artificial Sequence
  Description of Artificial Sequence: Synthetic oligonucleotide
  Antisense strand to SEQ ID NO: 879964
uacaacaaauaacuuaagc

SEQ ID NO: 879966 - RNA, 19 nt, Artificial Sequence
  Description of Artificial Sequence: Synthetic oligonucleotide
  Sense strand starting at position 2164 of SEQ ID NO: 588651
uggugaauauuaguuuaug

SEQ ID NO: 879967 - RNA, 19 nt, Artificial Sequence
  Description of Artificial Sequence: Synthetic oligonucleotide
  Antisense strand to SEQ ID NO: 879966
cauaaacuaauauucacca

SEQ ID NO: 879968 - RNA, 19 nt, Artificial Sequence
  Description of Artificial Sequence: Synthetic oligonucleotide
  Sense strand starting at position 2165 of SEQ ID NO: 588651
ggugaauauuaguuuauga

SEQ ID NO: 879969 - RNA, 19 nt, Artificial Sequence
  Description of Artificial Sequence: Synthetic oligonucleotide
  Antisense strand to SEQ ID NO: 879968
ucauaaacuaauauucacc

SEQ ID NO: 879970 - RNA, 19 nt, Artificial Sequence
  Description of Artificial Sequence: Synthetic oligonucleotide
  Sense strand starting at position 2339 of SEQ ID NO: 588651
auauauagccaguguaaua

SEQ ID NO: 879971 - RNA, 19 nt, Artificial Sequence
  Description of Artificial Sequence: Synthetic oligonucleotide
  Antisense strand to SEQ ID NO: 879970
uauuacacuggcuauauau

SEQ ID NO: 879972 - RNA, 19 nt, Artificial Sequence
  Description of Artificial Sequence: Synthetic oligonucleotide
  Sense strand starting at position 2529 of SEQ ID NO: 588651
uuguuugcugaaugaagga

SEQ ID NO: 879973 - RNA, 19 nt, Artificial Sequence
  Description of Artificial Sequence: Synthetic oligonucleotide
  Antisense strand to SEQ ID NO: 879972
uccuucauucagcaaacaa

SEQ ID NO: 879974 - RNA, 19 nt, Artificial Sequence
  Description of Artificial Sequence: Synthetic oligonucleotide
  Sense strand starting at position 2828 of SEQ ID NO: 588651
agacuugagcacugaaguu

SEQ ID NO: 879975 - RNA, 19 nt, Artificial Sequence
  Description of Artificial Sequence: Synthetic oligonucleotide
  Antisense strand to SEQ ID NO: 879974
aacuucagugcucaagucu

SEQ ID NO: 879976 - RNA, 19 nt, Artificial Sequence
  Description of Artificial Sequence: Synthetic oligonucleotide
  Sense strand starting at position 2890 of SEQ ID NO: 588651
cuggcuugaguugauauaa

SEQ ID NO: 879977 - RNA, 19 nt, Artificial Sequence
  Description of Artificial Sequence: Synthetic oligonucleotide
  Antisense strand to SEQ ID NO: 879976
uuauaucaacucaagccag

SEQ ID NO: 879978 - RNA, 19 nt, Artificial Sequence
  Description of Artificial Sequence: Synthetic oligonucleotide
  Sense strand starting at position 3054 of SEQ ID NO: 588651
uguccaaauuuagagaauc

SEQ ID NO: 879979 - RNA, 19 nt, Artificial Sequence
  Description of Artificial Sequence: Synthetic oligonucleotide
  Antisense strand to SEQ ID NO: 879978
gauucucuaaauuuggaca

SEQ ID NO: 879980 - RNA, 19 nt, Artificial Sequence
  Description of Artificial Sequence: Synthetic oligonucleotide
  Sense strand starting at position 3158 of SEQ ID NO: 588651
aguuaugaccagugaauac

SEQ ID NO: 879981 - RNA, 19 nt, Artificial Sequence
  Description of Artificial Sequence: Synthetic oligonucleotide
  Antisense strand to SEQ ID NO: 879980
guauucacuggucauaacu

SEQ ID NO: 879982 - RNA, 19 nt, Artificial Sequence
  Description of Artificial Sequence: Synthetic oligonucleotide
  Sense strand starting at position 3270 of SEQ ID NO: 588651
aguuucuucccucaaggaa

SEQ ID NO: 879983 - RNA, 19 nt, Artificial Sequence
  Description of Artificial Sequence: Synthetic oligonucleotide
  Antisense strand to SEQ ID NO: 879982
uuccuugagggaagaaacu

SEQ ID NO: 879984 - RNA, 19 nt, Artificial Sequence
  Description of Artificial Sequence: Synthetic oligonucleotide
  Sense strand starting at position 3298 of SEQ ID NO: 588651
ccucuaagucagcaggaaa

SEQ ID NO: 879985 - RNA, 19 nt, Artificial Sequence
  Description of Artificial Sequence: Synthetic oligonucleotide
  Antisense strand to SEQ ID NO: 879984
uuuccugcugacuuagagg

SEQ ID NO: 879986 - RNA, 19 nt, Artificial Sequence
  Description of Artificial Sequence: Synthetic oligonucleotide
  Sense strand starting at position 3348 of SEQ ID NO: 588651
gggcuugcuacacagaaau

SEQ ID NO: 879987 - RNA, 19 nt, Artificial Sequence
  Description of Artificial Sequence: Synthetic oligonucleotide
  Antisense strand to SEQ ID NO: 879986
auuucuguguagcaagccc

SEQ ID NO: 879988 - RNA, 19 nt, Artificial Sequence
  Description of Artificial Sequence: Synthetic oligonucleotide
  Sense strand starting at position 3793 of SEQ ID NO: 588651
uguugcauugcugaagaau

SEQ ID NO: 879989 - RNA, 19 nt, Artificial Sequence
  Description of Artificial Sequence: Synthetic oligonucleotide
  Antisense strand to SEQ ID NO: 879988
auucuucagcaaugcaaca

SEQ ID NO: 879990 - RNA, 19 nt, Artificial Sequence
  Description of Artificial Sequence: Synthetic oligonucleotide
  Sense strand starting at position 3825 of SEQ ID NO: 588651
uauuguagugguuaucuau

SEQ ID NO: 879991 - RNA, 19 nt, Artificial Sequence
  Description of Artificial Sequence: Synthetic oligonucleotide
  Antisense strand to SEQ ID NO: 879990
auagauaaccacuacaaua

SEQ ID NO: 879992 - RNA, 19 nt, Artificial Sequence
  Description of Artificial Sequence: Synthetic oligonucleotide
  Sense strand starting at position 3922 of SEQ ID NO: 588651
aggaauuuggcgugucuuu

SEQ ID NO: 879993 - RNA, 19 nt, Artificial Sequence
  Description of Artificial Sequence: Synthetic oligonucleotide
  Antisense strand to SEQ ID NO: 879992
aaagacacgccaaauuccu

SEQ ID NO: 879994 - RNA, 19 nt, Artificial Sequence
  Description of Artificial Sequence: Synthetic oligonucleotide
  Sense strand starting at position 128 of SEQ ID NO: 588652
cgccaaauugcuggugaca

SEQ ID NO: 879995 - RNA, 19 nt, Artificial Sequence
  Description of Artificial Sequence: Synthetic oligonucleotide
  Antisense strand to SEQ ID NO: 879994
ugucaccagcaauuuggcg

SEQ ID NO: 879996 - RNA, 19 nt, Artificial Sequence
  Description of Artificial Sequence: Synthetic oligonucleotide
  Sense strand starting at position 130 of SEQ ID NO: 588652
ccaaauugcuggugacaug

SEQ ID NO: 879997 - RNA, 19 nt, Artificial Sequence
  Description of Artificial Sequence: Synthetic oligonucleotide
  Antisense strand to SEQ ID NO: 879996
caugucaccagcaauuugg

SEQ ID NO: 879998 - RNA, 19 nt, Artificial Sequence
  Description of Artificial Sequence: Synthetic oligonucleotide
  Sense strand starting at position 167 of SEQ ID NO: 588652
caaccucaguccugagguu

SEQ ID NO: 879999 - RNA, 19 nt, Artificial Sequence
  Description of Artificial Sequence: Synthetic oligonucleotide
  Antisense strand to SEQ ID NO: 879998
aaccucaggacugagguug

SEQ ID NO: 880000 - RNA, 19 nt, Artificial Sequence
  Description of Artificial Sequence: Synthetic oligonucleotide
  Sense strand starting at position 168 of SEQ ID NO: 588652
aaccucaguccugagguuu

SEQ ID NO: 880001 - RNA, 19 nt, Artificial Sequence
  Description of Artificial Sequence: Synthetic oligonucleotide
  Antisense strand to SEQ ID NO: 880000
aaaccucaggacugagguu

SEQ ID NO: 880002 - RNA, 19 nt, Artificial Sequence
  Description of Artificial Sequence: Synthetic oligonucleotide
  Sense strand starting at position 218 of SEQ ID NO: 588652
ccaugucuggucuaaccuu

SEQ ID NO: 880003 - RNA, 19 nt, Artificial Sequence
  Description of Artificial Sequence: Synthetic oligonucleotide
  Antisense strand to SEQ ID NO: 880002
aagguuagaccagacaugg

SEQ ID NO: 880004 - RNA, 19 nt, Artificial Sequence
  Description of Artificial Sequence: Synthetic oligonucleotide
  Sense strand starting at position 342 of SEQ ID NO: 588652
aggucaucucucugcuauu

SEQ ID NO: 880005 - RNA, 19 nt, Artificial Sequence
  Description of Artificial Sequence: Synthetic oligonucleotide
  Antisense strand to SEQ ID NO: 880004
aauagcagagagaugaccu

SEQ ID NO: 880006 - RNA, 19 nt, Artificial Sequence
  Description of Artificial Sequence: Synthetic oligonucleotide
  Sense strand starting at position 343 of SEQ ID NO: 588652
ggucaucucucugcuauuu

SEQ ID NO: 880007 - RNA, 19 nt, Artificial Sequence
  Description of Artificial Sequence: Synthetic oligonucleotide
  Antisense strand to SEQ ID NO: 880006
aaauagcagagagaugacc

SEQ ID NO: 880008 - RNA, 19 nt, Artificial Sequence
  Description of Artificial Sequence: Synthetic oligonucleotide
  Sense strand starting at position 382 of SEQ ID NO: 588652
agaaguugggcggguagaa

SEQ ID NO: 880009 - RNA, 19 nt, Artificial Sequence
  Description of Artificial Sequence: Synthetic oligonucleotide
  Antisense strand to SEQ ID NO: 880008
uucuacccgcccaacuucu

SEQ ID NO: 880010 - RNA, 19 nt, Artificial Sequence
  Description of Artificial Sequence: Synthetic oligonucleotide
  Sense strand starting at position 391 of SEQ ID NO: 588652
gcggguagaaucuauagua

SEQ ID NO: 880011 - RNA, 19 nt, Artificial Sequence
  Description of Artificial Sequence: Synthetic oligonucleotide
  Antisense strand to SEQ ID NO: 880010
uacuauagauucuacccgc

SEQ ID NO: 880012 - RNA, 19 nt, Artificial Sequence
  Description of Artificial Sequence: Synthetic oligonucleotide
  Sense strand starting at position 407 of SEQ ID NO: 588652
guagucauaucuuuaaucu

SEQ ID NO: 880013 - RNA, 19 nt, Artificial Sequence
  Description of Artificial Sequence: Synthetic oligonucleotide
  Antisense strand to SEQ ID NO: 880012
agauuaaagauaugacuac

SEQ ID NO: 880014 - RNA, 19 nt, Artificial Sequence
  Description of Artificial Sequence: Synthetic oligonucleotide
  Sense strand starting at position 491 of SEQ ID NO: 588652
cccuccgauuccugaagga

SEQ ID NO: 880015 - RNA, 19 nt, Artificial Sequence
  Description of Artificial Sequence: Synthetic oligonucleotide
  Antisense strand to SEQ ID NO: 880014
uccuucaggaaucggaggg

SEQ ID NO: 880016 - RNA, 19 nt, Artificial Sequence
  Description of Artificial Sequence: Synthetic oligonucleotide
  Sense strand starting at position 1207 of SEQ ID NO: 588652
gcucaugauuacugaccca

SEQ ID NO: 880017 - RNA, 19 nt, Artificial Sequence
  Description of Artificial Sequence: Synthetic oligonucleotide
  Antisense strand to SEQ ID NO: 880016
ugggucaguaaucaugagc

SEQ ID NO: 880018 - RNA, 19 nt, Artificial Sequence
  Description of Artificial Sequence: Synthetic oligonucleotide
  Sense strand starting at position 2066 of SEQ ID NO: 588652
acgcaauccgcccaggaaa

SEQ ID NO: 880019 - RNA, 19 nt, Artificial Sequence
  Description of Artificial Sequence: Synthetic oligonucleotide
  Antisense strand to SEQ ID NO: 880018
uuuccugggcggauugcgu

SEQ ID NO: 880020 - RNA, 19 nt, Artificial Sequence
  Description of Artificial Sequence: Synthetic oligonucleotide
  Sense strand starting at position 2828 of SEQ ID NO: 588652
ggguguccuuacugacuca

SEQ ID NO: 880021 - RNA, 19 nt, Artificial Sequence
  Description of Artificial Sequence: Synthetic oligonucleotide
  Antisense strand to SEQ ID NO: 880020
ugagucaguaaggacaccc

SEQ ID NO: 880022 - RNA, 19 nt, Artificial Sequence
  Description of Artificial Sequence: Synthetic oligonucleotide
  Sense strand starting at position 2979 of SEQ ID NO: 588652
cugggucaaacacguuaau

SEQ ID NO: 880023 - RNA, 19 nt, Artificial Sequence
  Description of Artificial Sequence: Synthetic oligonucleotide
  Antisense strand to SEQ ID NO: 880022
auuaacguguuugacccag

SEQ ID NO: 880024 - RNA, 19 nt, Artificial Sequence
  Description of Artificial Sequence: Synthetic oligonucleotide
  Sense strand starting at position 3016 of SEQ ID NO: 588652
gaaggcuucuaaucggaga

SEQ ID NO: 880025 - RNA, 19 nt, Artificial Sequence
  Description of Artificial Sequence: Synthetic oligonucleotide
  Antisense strand to SEQ ID NO: 880024
ucuccgauuagaagccuuc

SEQ ID NO: 880026 - RNA, 19 nt, Artificial Sequence
  Description of Artificial Sequence: Synthetic oligonucleotide
  Sense strand starting at position 3018 of SEQ ID NO: 588652
aggcuucuaaucggagaug

SEQ ID NO: 880027 - RNA, 19 nt, Artificial Sequence
  Description of Artificial Sequence: Synthetic oligonucleotide
  Antisense strand to SEQ ID NO: 880026
caucuccgauuagaagccu

SEQ ID NO: 880028 - RNA, 19 nt, Artificial Sequence
  Description of Artificial Sequence: Synthetic oligonucleotide
  Sense strand starting at position 3019 of SEQ ID NO: 588652
ggcuucuaaucggagauga

SEQ ID NO: 880029 - RNA, 19 nt, Artificial Sequence
  Description of Artificial Sequence: Synthetic oligonucleotide
  Antisense strand to SEQ ID NO: 880028
ucaucuccgauuagaagcc

SEQ ID NO: 880030 - RNA, 19 nt, Artificial Sequence
  Description of Artificial Sequence: Synthetic oligonucleotide
  Sense strand starting at position 3119 of SEQ ID NO: 588652
cuucucugccugggcgaaa

SEQ ID NO: 880031 - RNA, 19 nt, Artificial Sequence
  Description of Artificial Sequence: Synthetic oligonucleotide
  Antisense strand to SEQ ID NO: 880030
uuucgcccaggcagagaag

SEQ ID NO: 880032 - RNA, 19 nt, Artificial Sequence
  Description of Artificial Sequence: Synthetic oligonucleotide
  Sense strand starting at position 3256 of SEQ ID NO: 588652
caguccucggcugaagaga

SEQ ID NO: 880033 - RNA, 19 nt, Artificial Sequence
  Description of Artificial Sequence: Synthetic oligonucleotide
  Antisense strand to SEQ ID NO: 880032
ucucuucagccgaggacug

SEQ ID NO: 880034 - RNA, 19 nt, Artificial Sequence
  Description of Artificial Sequence: Synthetic oligonucleotide
  Sense strand starting at position 3290 of SEQ ID NO: 588652
agaugauccuggccugagu

SEQ ID NO: 880035 - RNA, 19 nt, Artificial Sequence
  Description of Artificial Sequence: Synthetic oligonucleotide
  Antisense strand to SEQ ID NO: 880034
acucaggccaggaucaucu

SEQ ID NO: 880036 - RNA, 19 nt, Artificial Sequence
  Description of Artificial Sequence: Synthetic oligonucleotide
  Sense strand starting at position 3303 of SEQ ID NO: 588652
cugagugcugggugugaga

SEQ ID NO: 880037 - RNA, 19 nt, Artificial Sequence
  Description of Artificial Sequence: Synthetic oligonucleotide
  Antisense strand to SEQ ID NO: 880036
ucucacacccagcacucag

SEQ ID NO: 880038 - RNA, 19 nt, Artificial Sequence
  Description of Artificial Sequence: Synthetic oligonucleotide
  Sense strand starting at position 3356 of SEQ ID NO: 588652
ucugauuaaugcuguaauc

SEQ ID NO: 880039 - RNA, 19 nt, Artificial Sequence
  Description of Artificial Sequence: Synthetic oligonucleotide
  Antisense strand to SEQ ID NO: 880038
gauuacagcauuaaucaga

SEQ ID NO: 880040 - RNA, 19 nt, Artificial Sequence
  Description of Artificial Sequence: Synthetic oligonucleotide
  Sense strand starting at position 3358 of SEQ ID NO: 588652
ugauuaaugcuguaaucuc

SEQ ID NO: 880041 - RNA, 19 nt, Artificial Sequence
  Description of Artificial Sequence: Synthetic oligonucleotide
  Antisense strand to SEQ ID NO: 880040
gagauuacagcauuaauca

SEQ ID NO: 880042 - RNA, 19 nt, Artificial Sequence
  Description of Artificial Sequence: Synthetic oligonucleotide
  Sense strand starting at position 3392 of SEQ ID NO: 588652
gucggaugccaggaaauuc

SEQ ID NO: 880043 - RNA, 19 nt, Artificial Sequence
  Description of Artificial Sequence: Synthetic oligonucleotide
  Antisense strand to SEQ ID NO: 880042
gaauuuccuggcauccgac

SEQ ID NO: 880044 - RNA, 19 nt, Artificial Sequence
  Description of Artificial Sequence: Synthetic oligonucleotide
  Sense strand starting at position 3524 of SEQ ID NO: 588652
ucuggccaugcauguuuaa

SEQ ID NO: 880045 - RNA, 19 nt, Artificial Sequence
  Description of Artificial Sequence: Synthetic oligonucleotide
  Antisense strand to SEQ ID NO: 880044
uuaaacaugcauggccaga

SEQ ID NO: 880046 - RNA, 19 nt, Artificial Sequence
  Description of Artificial Sequence: Synthetic oligonucleotide
  Sense strand starting at position 3564 of SEQ ID NO: 588652
cgugucuguccagaucacu

SEQ ID NO: 880047 - RNA, 19 nt, Artificial Sequence
  Description of Artificial Sequence: Synthetic oligonucleotide
  Antisense strand to SEQ ID NO: 880046
agugaucuggacagacacg

SEQ ID NO: 880048 - RNA, 19 nt, Artificial Sequence
  Description of Artificial Sequence: Synthetic oligonucleotide
  Sense strand starting at position 3613 of SEQ ID NO: 588652
accacuuguucugcgggaa

SEQ ID NO: 880049 - RNA, 19 nt, Artificial Sequence
  Description of Artificial Sequence: Synthetic oligonucleotide
  Antisense strand to SEQ ID NO: 880048
uucccgcagaacaaguggu

SEQ ID NO: 880050 - RNA, 19 nt, Artificial Sequence
  Description of Artificial Sequence: Synthetic oligonucleotide
  Sense strand starting at position 3614 of SEQ ID NO: 588652
ccacuuguucugcgggaac

SEQ ID NO: 880051 - RNA, 19 nt, Artificial Sequence
  Description of Artificial Sequence: Synthetic oligonucleotide
  Antisense strand to SEQ ID NO: 880050
guucccgcagaacaagugg

SEQ ID NO: 880052 - RNA, 19 nt, Artificial Sequence
  Description of Artificial Sequence: Synthetic oligonucleotide
  Sense strand starting at position 3616 of SEQ ID NO: 588652
acuuguucugcgggaacaa

SEQ ID NO: 880053 - RNA, 19 nt, Artificial Sequence
  Description of Artificial Sequence: Synthetic oligonucleotide
  Antisense strand to SEQ ID NO: 880052
uuguucccgcagaacaagu

SEQ ID NO: 880054 - RNA, 19 nt, Artificial Sequence
  Description of Artificial Sequence: Synthetic oligonucleotide
  Sense strand starting at position 3617 of SEQ ID NO: 588652
cuuguucugcgggaacaaa

SEQ ID NO: 880055 - RNA, 19 nt, Artificial Sequence
  Description of Artificial Sequence: Synthetic oligonucleotide
  Antisense strand to SEQ ID NO: 880054
uuuguucccgcagaacaag

SEQ ID NO: 880056 - RNA, 19 nt, Artificial Sequence
  Description of Artificial Sequence: Synthetic oligonucleotide
  Sense strand starting at position 3825 of SEQ ID NO: 588652
aucugugauucagugggca

SEQ ID NO: 880057 - RNA, 19 nt, Artificial Sequence
  Description of Artificial Sequence: Synthetic oligonucleotide
  Antisense strand to SEQ ID NO: 880056
ugcccacugaaucacagau

SEQ ID NO: 880058 - RNA, 19 nt, Artificial Sequence
  Description of Artificial Sequence: Synthetic oligonucleotide
  Sense strand starting at position 3828 of SEQ ID NO: 588652
ugugauucagugggcauaa

SEQ ID NO: 880059 - RNA, 19 nt, Artificial Sequence
  Description of Artificial Sequence: Synthetic oligonucleotide
  Antisense strand to SEQ ID NO: 880058
uuaugcccacugaaucaca

SEQ ID NO: 880060 - RNA, 19 nt, Artificial Sequence
  Description of Artificial Sequence: Synthetic oligonucleotide
  Sense strand starting at position 3829 of SEQ ID NO: 588652
gugauucagugggcauaau

SEQ ID NO: 880061 - RNA, 19 nt, Artificial Sequence
  Description of Artificial Sequence: Synthetic oligonucleotide
  Antisense strand to SEQ ID NO: 880060
auuaugcccacugaaucac

SEQ ID NO: 880062 - RNA, 19 nt, Artificial Sequence
  Description of Artificial Sequence: Synthetic oligonucleotide
  Sense strand starting at position 3852 of SEQ ID NO: 588652
uugaaagggucgucagaua

SEQ ID NO: 880063 - RNA, 19 nt, Artificial Sequence
  Description of Artificial Sequence: Synthetic oligonucleotide
  Antisense strand to SEQ ID NO: 880062
uaucugacgacccuuucaa

SEQ ID NO: 880064 - RNA, 19 nt, Artificial Sequence
  Description of Artificial Sequence: Synthetic oligonucleotide
  Sense strand starting at position 3864 of SEQ ID NO: 588652
ucagauaaggcuugaguaa

SEQ ID NO: 880065 - RNA, 19 nt, Artificial Sequence
  Description of Artificial Sequence: Synthetic oligonucleotide
  Antisense strand to SEQ ID NO: 880064
uuacucaagccuuaucuga

SEQ ID NO: 880066 - RNA, 19 nt, Artificial Sequence
  Description of Artificial Sequence: Synthetic oligonucleotide
  Sense strand starting at position 3871 of SEQ ID NO: 588652
aggcuugaguaaguguaau

SEQ ID NO: 880067 - RNA, 19 nt, Artificial Sequence
  Description of Artificial Sequence: Synthetic oligonucleotide
  Antisense strand to SEQ ID NO: 880066
auuacacuuacucaagccu

SEQ ID NO: 880068 - RNA, 19 nt, Artificial Sequence
  Description of Artificial Sequence: Synthetic oligonucleotide
  Sense strand starting at position 3877 of SEQ ID NO: 588652
gaguaaguguaauuggauu

SEQ ID NO: 880069 - RNA, 19 nt, Artificial Sequence
  Description of Artificial Sequence: Synthetic oligonucleotide
  Antisense strand to SEQ ID NO: 880068
aauccaauuacacuuacuc

SEQ ID NO: 880070 - RNA, 19 nt, Artificial Sequence
  Description of Artificial Sequence: Synthetic oligonucleotide
  Sense strand starting at position 3922 of SEQ ID NO: 588652
gaaaguauggaucguugaa

SEQ ID NO: 880071 - RNA, 19 nt, Artificial Sequence
  Description of Artificial Sequence: Synthetic oligonucleotide
  Antisense strand to SEQ ID NO: 880070
uucaacgauccauacuuuc

SEQ ID NO: 880072 - RNA, 19 nt, Artificial Sequence
  Description of Artificial Sequence: Synthetic oligonucleotide
  Sense strand starting at position 3924 of SEQ ID NO: 588652
aaguauggaucguugaaga

SEQ ID NO: 880073 - RNA, 19 nt, Artificial Sequence
  Description of Artificial Sequence: Synthetic oligonucleotide
  Antisense strand to SEQ ID NO: 880072
ucuucaacgauccauacuu

SEQ ID NO: 880074 - RNA, 19 nt, Artificial Sequence
  Description of Artificial Sequence: Synthetic oligonucleotide
  Sense strand starting at position 83 of SEQ ID NO: 588653
cccuccgauuccugaagga

SEQ ID NO: 880075 - RNA, 19 nt, Artificial Sequence
  Description of Artificial Sequence: Synthetic oligonucleotide
  Antisense strand to SEQ ID NO: 880074
uccuucaggaaucggaggg

SEQ ID NO: 880076 - RNA, 19 nt, Artificial Sequence
  Description of Artificial Sequence: Synthetic oligonucleotide
  Sense strand starting at position 799 of SEQ ID NO: 588653
gcucaugauuacugaccca

SEQ ID NO: 880077 - RNA, 19 nt, Artificial Sequence
  Description of Artificial Sequence: Synthetic oligonucleotide
  Antisense strand to SEQ ID NO: 880076
ugggucaguaaucaugagc

SEQ ID NO: 880078 - RNA, 19 nt, Artificial Sequence
  Description of Artificial Sequence: Synthetic oligonucleotide
  Sense strand starting at position 1658 of SEQ ID NO: 588653
acgcaauccgcccaggaaa

SEQ ID NO: 880079 - RNA, 19 nt, Artificial Sequence
  Description of Artificial Sequence: Synthetic oligonucleotide
  Antisense strand to SEQ ID NO: 880078
uuuccugggcggauugcgu

SEQ ID NO: 880080 - RNA, 19 nt, Artificial Sequence
  Description of Artificial Sequence: Synthetic oligonucleotide
  Sense strand starting at position 2571 of SEQ ID NO: 588653
cugggucaaacacguuaau

SEQ ID NO: 880081 - RNA, 19 nt, Artificial Sequence
  Description of Artificial Sequence: Synthetic oligonucleotide
  Antisense strand to SEQ ID NO: 880080
auuaacguguuugacccag

SEQ ID NO: 880082 - RNA, 19 nt, Artificial Sequence
  Description of Artificial Sequence: Synthetic oligonucleotide
  Sense strand starting at position 2608 of SEQ ID NO: 588653
gaaggcuucuaaucggaga

SEQ ID NO: 880083 - RNA, 19 nt, Artificial Sequence
  Description of Artificial Sequence: Synthetic oligonucleotide
  Antisense strand to SEQ ID NO: 880082
ucuccgauuagaagccuuc

SEQ ID NO: 880084 - RNA, 19 nt, Artificial Sequence
  Description of Artificial Sequence: Synthetic oligonucleotide
  Sense strand starting at position 2610 of SEQ ID NO: 588653
aggcuucuaaucggagaug

SEQ ID NO: 880085 - RNA, 19 nt, Artificial Sequence
  Description of Artificial Sequence: Synthetic oligonucleotide
  Antisense strand to SEQ ID NO: 880084
caucuccgauuagaagccu

SEQ ID NO: 880086 - RNA, 19 nt, Artificial Sequence
  Description of Artificial Sequence: Synthetic oligonucleotide
  Sense strand starting at position 2611 of SEQ ID NO: 588653
ggcuucuaaucggagauga

SEQ ID NO: 880087 - RNA, 19 nt, Artificial Sequence
  Description of Artificial Sequence: Synthetic oligonucleotide
  Antisense strand to SEQ ID NO: 880086
ucaucuccgauuagaagcc

SEQ ID NO: 880088 - RNA, 19 nt, Artificial Sequence
  Description of Artificial Sequence: Synthetic oligonucleotide
  Sense strand starting at position 2711 of SEQ ID NO: 588653
cuucucugccugggcgaaa

SEQ ID NO: 880089 - RNA, 19 nt, Artificial Sequence
  Description of Artificial Sequence: Synthetic oligonucleotide
  Antisense strand to SEQ ID NO: 880088
uuucgcccaggcagagaag

SEQ ID NO: 880090 - RNA, 19 nt, Artificial Sequence
  Description of Artificial Sequence: Synthetic oligonucleotide
  Sense strand starting at position 2848 of SEQ ID NO: 588653
caguccucggcugaagaga

SEQ ID NO: 880091 - RNA, 19 nt, Artificial Sequence
  Description of Artificial Sequence: Synthetic oligonucleotide
  Antisense strand to SEQ ID NO: 880090
ucucuucagccgaggacug

SEQ ID NO: 880092 - RNA, 19 nt, Artificial Sequence
  Description of Artificial Sequence: Synthetic oligonucleotide
  Sense strand starting at position 2882 of SEQ ID NO: 588653
agaugauccuggccugagu

SEQ ID NO: 880093 - RNA, 19 nt, Artificial Sequence
  Description of Artificial Sequence: Synthetic oligonucleotide
  Antisense strand to SEQ ID NO: 880092
acucaggccaggaucaucu

SEQ ID NO: 880094 - RNA, 19 nt, Artificial Sequence
  Description of Artificial Sequence: Synthetic oligonucleotide
  Sense strand starting at position 2895 of SEQ ID NO: 588653
cugagugcugggugugaga

SEQ ID NO: 880095 - RNA, 19 nt, Artificial Sequence
  Description of Artificial Sequence: Synthetic oligonucleotide
  Antisense strand to SEQ ID NO: 880094
ucucacacccagcacucag

SEQ ID NO: 880096 - RNA, 19 nt, Artificial Sequence
  Description of Artificial Sequence: Synthetic oligonucleotide
  Sense strand starting at position 2950 of SEQ ID NO: 588653
ugauuaaugcuguaaucuc

SEQ ID NO: 880097 - RNA, 19 nt, Artificial Sequence
  Description of Artificial Sequence: Synthetic oligonucleotide
  Antisense strand to SEQ ID NO: 880096
gagauuacagcauuaauca

SEQ ID NO: 880098 - RNA, 19 nt, Artificial Sequence
  Description of Artificial Sequence: Synthetic oligonucleotide
  Sense strand starting at position 2984 of SEQ ID NO: 588653
gucggaugccaggaaauuc

SEQ ID NO: 880099 - RNA, 19 nt, Artificial Sequence
  Description of Artificial Sequence: Synthetic oligonucleotide
  Antisense strand to SEQ ID NO: 880098
gaauuuccuggcauccgac

SEQ ID NO: 880100 - RNA, 19 nt, Artificial Sequence
  Description of Artificial Sequence: Synthetic oligonucleotide
  Sense strand starting at position 3116 of SEQ ID NO: 588653
ucuggccaugcauguuuaa

SEQ ID NO: 880101 - RNA, 19 nt, Artificial Sequence
  Description of Artificial Sequence: Synthetic oligonucleotide
  Antisense strand to SEQ ID NO: 880100
uuaaacaugcauggccaga

SEQ ID NO: 880102 - RNA, 19 nt, Artificial Sequence
  Description of Artificial Sequence: Synthetic oligonucleotide
  Sense strand starting at position 3156 of SEQ ID NO: 588653
cgugucuguccagaucacu

SEQ ID NO: 880103 - RNA, 19 nt, Artificial Sequence
  Description of Artificial Sequence: Synthetic oligonucleotide
  Antisense strand to SEQ ID NO: 880102
agugaucuggacagacacg

SEQ ID NO: 880104 - RNA, 19 nt, Artificial Sequence
  Description of Artificial Sequence: Synthetic oligonucleotide
  Sense strand starting at position 3205 of SEQ ID NO: 588653
accacuuguucugcgggaa

SEQ ID NO: 880105 - RNA, 19 nt, Artificial Sequence
  Description of Artificial Sequence: Synthetic oligonucleotide
  Antisense strand to SEQ ID NO: 880104
uucccgcagaacaaguggu

SEQ ID NO: 880106 - RNA, 19 nt, Artificial Sequence
  Description of Artificial Sequence: Synthetic oligonucleotide
  Sense strand starting at position 3206 of SEQ ID NO: 588653
ccacuuguucugcgggaac

SEQ ID NO: 880107 - RNA, 19 nt, Artificial Sequence
  Description of Artificial Sequence: Synthetic oligonucleotide
  Antisense strand to SEQ ID NO: 880106
guucccgcagaacaagugg

SEQ ID NO: 880108 - RNA, 19 nt, Artificial Sequence
  Description of Artificial Sequence: Synthetic oligonucleotide
  Sense strand starting at position 3208 of SEQ ID NO: 588653
acuuguucugcgggaacaa

SEQ ID NO: 880109 - RNA, 19 nt, Artificial Sequence
  Description of Artificial Sequence: Synthetic oligonucleotide
  Antisense strand to SEQ ID NO: 880108
uuguucccgcagaacaagu

SEQ ID NO: 880110 - RNA, 19 nt, Artificial Sequence
  Description of Artificial Sequence: Synthetic oligonucleotide
  Sense strand starting at position 3209 of SEQ ID NO: 588653
cuuguucugcgggaacaaa

SEQ ID NO: 880111 - RNA, 19 nt, Artificial Sequence
  Description of Artificial Sequence: Synthetic oligonucleotide
  Antisense strand to SEQ ID NO: 880110
uuuguucccgcagaacaag

SEQ ID NO: 880112 - RNA, 19 nt, Artificial Sequence
  Description of Artificial Sequence: Synthetic oligonucleotide
  Sense strand starting at position 3417 of SEQ ID NO: 588653
aucugugauucagugggca

SEQ ID NO: 880113 - RNA, 19 nt, Artificial Sequence
  Description of Artificial Sequence: Synthetic oligonucleotide
  Antisense strand to SEQ ID NO: 880112
ugcccacugaaucacagau

SEQ ID NO: 880114 - RNA, 19 nt, Artificial Sequence
  Description of Artificial Sequence: Synthetic oligonucleotide
  Sense strand starting at position 3420 of SEQ ID NO: 588653
ugugauucagugggcauaa

SEQ ID NO: 880115 - RNA, 19 nt, Artificial Sequence
  Description of Artificial Sequence: Synthetic oligonucleotide
  Antisense strand to SEQ ID NO: 880114
uuaugcccacugaaucaca

SEQ ID NO: 880116 - RNA, 19 nt, Artificial Sequence
  Description of Artificial Sequence: Synthetic oligonucleotide
  Sense strand starting at position 3421 of SEQ ID NO: 588653
gugauucagugggcauaau

SEQ ID NO: 880117 - RNA, 19 nt, Artificial Sequence
  Description of Artificial Sequence: Synthetic oligonucleotide
  Antisense strand to SEQ ID NO: 880116
auuaugcccacugaaucac

SEQ ID NO: 880118 - RNA, 19 nt, Artificial Sequence
  Description of Artificial Sequence: Synthetic oligonucleotide
  Sense strand starting at position 3444 of SEQ ID NO: 588653
uugaaagggucgucagaua

SEQ ID NO: 880119 - RNA, 19 nt, Artificial Sequence
  Description of Artificial Sequence: Synthetic oligonucleotide
  Antisense strand to SEQ ID NO: 880118
uaucugacgacccuuucaa

SEQ ID NO: 880120 - RNA, 19 nt, Artificial Sequence
  Description of Artificial Sequence: Synthetic oligonucleotide
  Sense strand starting at position 3456 of SEQ ID NO: 588653
ucagauaaggcuugaguaa

SEQ ID NO: 880121 - RNA, 19 nt, Artificial Sequence
  Description of Artificial Sequence: Synthetic oligonucleotide
  Antisense strand to SEQ ID NO: 880120
uuacucaagccuuaucuga

SEQ ID NO: 880122 - RNA, 19 nt, Artificial Sequence
  Description of Artificial Sequence: Synthetic oligonucleotide
  Sense strand starting at position 3463 of SEQ ID NO: 588653
aggcuugaguaaguguaau

SEQ ID NO: 880123 - RNA, 19 nt, Artificial Sequence
  Description of Artificial Sequence: Synthetic oligonucleotide
  Antisense strand to SEQ ID NO: 880122
auuacacuuacucaagccu

SEQ ID NO: 880124 - RNA, 19 nt, Artificial Sequence
  Description of Artificial Sequence: Synthetic oligonucleotide
  Sense strand starting at position 3469 of SEQ ID NO: 588653
gaguaaguguaauuggauu

SEQ ID NO: 880125 - RNA, 19 nt, Artificial Sequence
  Description of Artificial Sequence: Synthetic oligonucleotide
  Antisense strand to SEQ ID NO: 880124
aauccaauuacacuuacuc

SEQ ID NO: 880126 - RNA, 19 nt, Artificial Sequence
  Description of Artificial Sequence: Synthetic oligonucleotide
  Sense strand starting at position 3514 of SEQ ID NO: 588653
gaaaguauggaucguugaa

SEQ ID NO: 880127 - RNA, 19 nt, Artificial Sequence
  Description of Artificial Sequence: Synthetic oligonucleotide
  Antisense strand to SEQ ID NO: 880126
uucaacgauccauacuuuc

SEQ ID NO: 880128 - RNA, 19 nt, Artificial Sequence
  Description of Artificial Sequence: Synthetic oligonucleotide
  Sense strand starting at position 3516 of SEQ ID NO: 588653
aaguauggaucguugaaga

SEQ ID NO: 880129 - RNA, 19 nt, Artificial Sequence
  Description of Artificial Sequence: Synthetic oligonucleotide
  Antisense strand to SEQ ID NO: 880128
ucuucaacgauccauacuu

SEQ ID NO: 880130 - RNA, 19 nt, Artificial Sequence
  Description of Artificial Sequence: Synthetic oligonucleotide
  Sense strand starting at position 3647 of SEQ ID NO: 588653
accugcagcucugaacaau

SEQ ID NO: 880131 - RNA, 19 nt, Artificial Sequence
  Description of Artificial Sequence: Synthetic oligonucleotide
  Antisense strand to SEQ ID NO: 880130
auuguucagagcugcaggu

SEQ ID NO: 880132 - RNA, 19 nt, Artificial Sequence
  Description of Artificial Sequence: Synthetic oligonucleotide
  Sense strand starting at position 3656 of SEQ ID NO: 588653
ucugaacaaucauacggau

SEQ ID NO: 880133 - RNA, 19 nt, Artificial Sequence
  Description of Artificial Sequence: Synthetic oligonucleotide
  Antisense strand to SEQ ID NO: 880132
auccguaugauuguucaga

SEQ ID NO: 880134 - RNA, 19 nt, Artificial Sequence
  Description of Artificial Sequence: Synthetic oligonucleotide
  Sense strand starting at position 3662 of SEQ ID NO: 588653
caaucauacggaugcugau

SEQ ID NO: 880135 - RNA, 19 nt, Artificial Sequence
  Description of Artificial Sequence: Synthetic oligonucleotide
  Antisense strand to SEQ ID NO: 880134
aucagcauccguaugauug

SEQ ID NO: 880136 - RNA, 19 nt, Artificial Sequence
  Description of Artificial Sequence: Synthetic oligonucleotide
  Sense strand starting at position 3765 of SEQ ID NO: 588653
uugacuccacuguauagau

SEQ ID NO: 880137 - RNA, 19 nt, Artificial Sequence
  Description of Artificial Sequence: Synthetic oligonucleotide
  Antisense strand to SEQ ID NO: 880136
aucuauacaguggagucaa

SEQ ID NO: 880138 - RNA, 19 nt, Artificial Sequence
  Description of Artificial Sequence: Synthetic oligonucleotide
  Sense strand starting at position 3774 of SEQ ID NO: 588653
cuguauagaugaggaaucu

SEQ ID NO: 880139 - RNA, 19 nt, Artificial Sequence
  Description of Artificial Sequence: Synthetic oligonucleotide
  Antisense strand to SEQ ID NO: 880138
agauuccucaucuauacag

SEQ ID NO: 880140 - RNA, 19 nt, Artificial Sequence
  Description of Artificial Sequence: Synthetic oligonucleotide
  Sense strand starting at position 3812 of SEQ ID NO: 588653
agaccuguccaaggucaua

SEQ ID NO: 880141 - RNA, 19 nt, Artificial Sequence
  Description of Artificial Sequence: Synthetic oligonucleotide
  Antisense strand to SEQ ID NO: 880140
uaugaccuuggacaggucu

SEQ ID NO: 880142 - RNA, 19 nt, Artificial Sequence
  Description of Artificial Sequence: Synthetic oligonucleotide
  Sense strand starting at position 3850 of SEQ ID NO: 588653
gggcuaagcccauacacau

SEQ ID NO: 880143 - RNA, 19 nt, Artificial Sequence
  Description of Artificial Sequence: Synthetic oligonucleotide
  Antisense strand to SEQ ID NO: 880142
auguguaugggcuuagccc

SEQ ID NO: 880144 - RNA, 19 nt, Artificial Sequence
  Description of Artificial Sequence: Synthetic oligonucleotide
  Sense strand starting at position 3870 of SEQ ID NO: 588653
guggcauccucgucuuaua

SEQ ID NO: 880145 - RNA, 19 nt, Artificial Sequence
  Description of Artificial Sequence: Synthetic oligonucleotide
  Antisense strand to SEQ ID NO: 880144
uauaagacgaggaugccac

SEQ ID NO: 880146 - RNA, 19 nt, Artificial Sequence
  Description of Artificial Sequence: Synthetic oligonucleotide
  Sense strand starting at position 3884 of SEQ ID NO: 588653
uuauaaaugucauggccau

SEQ ID NO: 880147 - RNA, 19 nt, Artificial Sequence
  Description of Artificial Sequence: Synthetic oligonucleotide
  Antisense strand to SEQ ID NO: 880146
auggccaugacauuuauaa

SEQ ID NO: 880148 - RNA, 19 nt, Artificial Sequence
  Description of Artificial Sequence: Synthetic oligonucleotide
  Sense strand starting at position 3888 of SEQ ID NO: 588653
aaaugucauggccauaguu

SEQ ID NO: 880149 - RNA, 19 nt, Artificial Sequence
  Description of Artificial Sequence: Synthetic oligonucleotide
  Antisense strand to SEQ ID NO: 880148
aacuauggccaugacauuu

SEQ ID NO: 880150 - RNA, 19 nt, Artificial Sequence
  Description of Artificial Sequence: Synthetic oligonucleotide
  Sense strand starting at position 3890 of SEQ ID NO: 588653
augucauggccauaguuaa

SEQ ID NO: 880151 - RNA, 19 nt, Artificial Sequence
  Description of Artificial Sequence: Synthetic oligonucleotide
  Antisense strand to SEQ ID NO: 880150
uuaacuauggccaugacau

SEQ ID NO: 880152 - RNA, 19 nt, Artificial Sequence
  Description of Artificial Sequence: Synthetic oligonucleotide
  Sense strand starting at position 3921 of SEQ ID NO: 588653
ccagaaguggcaugaguug

SEQ ID NO: 880153 - RNA, 19 nt, Artificial Sequence
  Description of Artificial Sequence: Synthetic oligonucleotide
  Antisense strand to SEQ ID NO: 880152
caacucaugccacuucugg

SEQ ID NO: 880154 - RNA, 19 nt, Artificial Sequence
  Description of Artificial Sequence: Synthetic oligonucleotide
  Sense strand starting at position 51 of SEQ ID NO: 588654
uggcucuucucugcaggua

SEQ ID NO: 880155 - RNA, 19 nt, Artificial Sequence
  Description of Artificial Sequence: Synthetic oligonucleotide
  Antisense strand to SEQ ID NO: 880154
uaccugcagagaagagcca

SEQ ID NO: 880156 - RNA, 19 nt, Artificial Sequence
  Description of Artificial Sequence: Synthetic oligonucleotide
  Sense strand starting at position 52 of SEQ ID NO: 588654
ggcucuucucugcagguau

SEQ ID NO: 880157 - RNA, 19 nt, Artificial Sequence
  Description of Artificial Sequence: Synthetic oligonucleotide
  Antisense strand to SEQ ID NO: 880156
auaccugcagagaagagcc

SEQ ID NO: 880158 - RNA, 19 nt, Artificial Sequence
  Description of Artificial Sequence: Synthetic oligonucleotide
  Sense strand starting at position 101 of SEQ ID NO: 588654
gugugugcacaugaaugaa

SEQ ID NO: 880159 - RNA, 19 nt, Artificial Sequence
  Description of Artificial Sequence: Synthetic oligonucleotide
  Antisense strand to SEQ ID NO: 880158
uucauucaugugcacacac

SEQ ID NO: 880160 - RNA, 19 nt, Artificial Sequence
  Description of Artificial Sequence: Synthetic oligonucleotide
  Sense strand starting at position 117 of SEQ ID NO: 588654
gaaugcaucuguccagcaa

SEQ ID NO: 880161 - RNA, 19 nt, Artificial Sequence
  Description of Artificial Sequence: Synthetic oligonucleotide
  Antisense strand to SEQ ID NO: 880160
uugcuggacagaugcauuc

SEQ ID NO: 880162 - RNA, 19 nt, Artificial Sequence
  Description of Artificial Sequence: Synthetic oligonucleotide
  Sense strand starting at position 121 of SEQ ID NO: 588654
gcaucuguccagcaacagu

SEQ ID NO: 880163 - RNA, 19 nt, Artificial Sequence
  Description of Artificial Sequence: Synthetic oligonucleotide
  Antisense strand to SEQ ID NO: 880162
acuguugcuggacagaugc

SEQ ID NO: 880164 - RNA, 19 nt, Artificial Sequence
  Description of Artificial Sequence: Synthetic oligonucleotide
  Sense strand starting at position 588 of SEQ ID NO: 588654
gcaucauugaaagggcauu

SEQ ID NO: 880165 - RNA, 19 nt, Artificial Sequence
  Description of Artificial Sequence: Synthetic oligonucleotide
  Antisense strand to SEQ ID NO: 880164
aaugcccuuucaaugaugc

SEQ ID NO: 880166 - RNA, 19 nt, Artificial Sequence
  Description of Artificial Sequence: Synthetic oligonucleotide
  Sense strand starting at position 647 of SEQ ID NO: 588654
ggcucuuccgagcaccaua

SEQ ID NO: 880167 - RNA, 19 nt, Artificial Sequence
  Description of Artificial Sequence: Synthetic oligonucleotide
  Antisense strand to SEQ ID NO: 880166
uauggugcucggaagagcc

SEQ ID NO: 880168 - RNA, 19 nt, Artificial Sequence
  Description of Artificial Sequence: Synthetic oligonucleotide
  Sense strand starting at position 768 of SEQ ID NO: 588654
agagaccuuucucuauuga

SEQ ID NO: 880169 - RNA, 19 nt, Artificial Sequence
  Description of Artificial Sequence: Synthetic oligonucleotide
  Antisense strand to SEQ ID NO: 880168
ucaauagagaaaggucucu

SEQ ID NO: 880170 - RNA, 19 nt, Artificial Sequence
  Description of Artificial Sequence: Synthetic oligonucleotide
  Sense strand starting at position 813 of SEQ ID NO: 588654
guuugaaaugcccacgauc

SEQ ID NO: 880171 - RNA, 19 nt, Artificial Sequence
  Description of Artificial Sequence: Synthetic oligonucleotide
  Antisense strand to SEQ ID NO: 880170
gaucgugggcauuucaaac

SEQ ID NO: 880172 - RNA, 19 nt, Artificial Sequence
  Description of Artificial Sequence: Synthetic oligonucleotide
  Sense strand starting at position 2150 of SEQ ID NO: 588654
agggagugggccgaagauu

SEQ ID NO: 880173 - RNA, 19 nt, Artificial Sequence
  Description of Artificial Sequence: Synthetic oligonucleotide
  Antisense strand to SEQ ID NO: 880172
aaucuucggcccacucccu

SEQ ID NO: 880174 - RNA, 19 nt, Artificial Sequence
  Description of Artificial Sequence: Synthetic oligonucleotide
  Sense strand starting at position 2202 of SEQ ID NO: 588654
augggauguuaagucuuga

SEQ ID NO: 880175 - RNA, 19 nt, Artificial Sequence
  Description of Artificial Sequence: Synthetic oligonucleotide
  Antisense strand to SEQ ID NO: 880174
ucaagacuuaacaucccau

SEQ ID NO: 880176 - RNA, 19 nt, Artificial Sequence
  Description of Artificial Sequence: Synthetic oligonucleotide
  Sense strand starting at position 2207 of SEQ ID NO: 588654
auguuaagucuugaugucu

SEQ ID NO: 880177 - RNA, 19 nt, Artificial Sequence
  Description of Artificial Sequence: Synthetic oligonucleotide
  Antisense strand to SEQ ID NO: 880176
agacaucaagacuuaacau

SEQ ID NO: 880178 - RNA, 19 nt, Artificial Sequence
  Description of Artificial Sequence: Synthetic oligonucleotide
  Sense strand starting at position 2212 of SEQ ID NO: 588654
aagucuugaugucuaugga

SEQ ID NO: 880179 - RNA, 19 nt, Artificial Sequence
  Description of Artificial Sequence: Synthetic oligonucleotide
  Antisense strand to SEQ ID NO: 880178
uccauagacaucaagacuu

SEQ ID NO: 880180 - RNA, 19 nt, Artificial Sequence
  Description of Artificial Sequence: Synthetic oligonucleotide
  Sense strand starting at position 2215 of SEQ ID NO: 588654
ucuugaugucuauggagug

SEQ ID NO: 880181 - RNA, 19 nt, Artificial Sequence
  Description of Artificial Sequence: Synthetic oligonucleotide
  Antisense strand to SEQ ID NO: 880180
cacuccauagacaucaaga

SEQ ID NO: 880182 - RNA, 19 nt, Artificial Sequence
  Description of Artificial Sequence: Synthetic oligonucleotide
  Sense strand starting at position 2330 of SEQ ID NO: 588654
ggaggaagccaggguuaga

SEQ ID NO: 880183 - RNA, 19 nt, Artificial Sequence
  Description of Artificial Sequence: Synthetic oligonucleotide
  Antisense strand to SEQ ID NO: 880182
ucuaacccuggcuuccucc

SEQ ID NO: 880184 - RNA, 19 nt, Artificial Sequence
  Description of Artificial Sequence: Synthetic oligonucleotide
  Sense strand starting at position 2508 of SEQ ID NO: 588654
ggcccugucaucguguguu

SEQ ID NO: 880185 - RNA, 19 nt, Artificial Sequence
  Description of Artificial Sequence: Synthetic oligonucleotide
  Antisense strand to SEQ ID NO: 880184
aacacacgaugacagggcc

SEQ ID NO: 880186 - RNA, 19 nt, Artificial Sequence
  Description of Artificial Sequence: Synthetic oligonucleotide
  Sense strand starting at position 2513 of SEQ ID NO: 588654
ugucaucguguguuagguu

SEQ ID NO: 880187 - RNA, 19 nt, Artificial Sequence
  Description of Artificial Sequence: Synthetic oligonucleotide
  Antisense strand to SEQ ID NO: 880186
aaccuaacacacgaugaca

SEQ ID NO: 880188 - RNA, 19 nt, Artificial Sequence
  Description of Artificial Sequence: Synthetic oligonucleotide
  Sense strand starting at position 2888 of SEQ ID NO: 588654
cuccuuuaauguguacuca

SEQ ID NO: 880189 - RNA, 19 nt, Artificial Sequence
  Description of Artificial Sequence: Synthetic oligonucleotide
  Antisense strand to SEQ ID NO: 880188
ugaguacacauuaaaggag

SEQ ID NO: 880190 - RNA, 19 nt, Artificial Sequence
  Description of Artificial Sequence: Synthetic oligonucleotide
  Sense strand starting at position 2903 of SEQ ID NO: 588654
cucagacccguugacuaaa

SEQ ID NO: 880191 - RNA, 19 nt, Artificial Sequence
  Description of Artificial Sequence: Synthetic oligonucleotide
  Antisense strand to SEQ ID NO: 880190
uuuagucaacgggucugag

SEQ ID NO: 880192 - RNA, 19 nt, Artificial Sequence
  Description of Artificial Sequence: Synthetic oligonucleotide
  Sense strand starting at position 3032 of SEQ ID NO: 588654
cucucuguucucuauuguu

SEQ ID NO: 880193 - RNA, 19 nt, Artificial Sequence
  Description of Artificial Sequence: Synthetic oligonucleotide
  Antisense strand to SEQ ID NO: 880192
aacaauagagaacagagag

SEQ ID NO: 880194 - RNA, 19 nt, Artificial Sequence
  Description of Artificial Sequence: Synthetic oligonucleotide
  Sense strand starting at position 3041 of SEQ ID NO: 588654
cucuauuguuuagucuuua

SEQ ID NO: 880195 - RNA, 19 nt, Artificial Sequence
  Description of Artificial Sequence: Synthetic oligonucleotide
  Antisense strand to SEQ ID NO: 880194
uaaagacuaaacaauagag

SEQ ID NO: 880196 - RNA, 19 nt, Artificial Sequence
  Description of Artificial Sequence: Synthetic oligonucleotide
  Sense strand starting at position 3045 of SEQ ID NO: 588654
auuguuuagucuuuagucu

SEQ ID NO: 880197 - RNA, 19 nt, Artificial Sequence
  Description of Artificial Sequence: Synthetic oligonucleotide
  Antisense strand to SEQ ID NO: 880196
agacuaaagacuaaacaau

SEQ ID NO: 880198 - RNA, 19 nt, Artificial Sequence
  Description of Artificial Sequence: Synthetic oligonucleotide
  Sense strand starting at position 3046 of SEQ ID NO: 588654
uuguuuagucuuuagucua

SEQ ID NO: 880199 - RNA, 19 nt, Artificial Sequence
  Description of Artificial Sequence: Synthetic oligonucleotide
  Antisense strand to SEQ ID NO: 880198
uagacuaaagacuaaacaa

SEQ ID NO: 880200 - RNA, 19 nt, Artificial Sequence
  Description of Artificial Sequence: Synthetic oligonucleotide
  Sense strand starting at position 3051 of SEQ ID NO: 588654
uagucuuuagucuauggaa

SEQ ID NO: 880201 - RNA, 19 nt, Artificial Sequence
  Description of Artificial Sequence: Synthetic oligonucleotide
  Antisense strand to SEQ ID NO: 880200
uuccauagacuaaagacua

SEQ ID NO: 880202 - RNA, 19 nt, Artificial Sequence
  Description of Artificial Sequence: Synthetic oligonucleotide
  Sense strand starting at position 3085 of SEQ ID NO: 588654
gagaaucucugacaagaag

SEQ ID NO: 880203 - RNA, 19 nt, Artificial Sequence
  Description of Artificial Sequence: Synthetic oligonucleotide
  Antisense strand to SEQ ID NO: 880202
cuucuugucagagauucuc

SEQ ID NO: 880204 - RNA, 19 nt, Artificial Sequence
  Description of Artificial Sequence: Synthetic oligonucleotide
  Sense strand starting at position 3115 of SEQ ID NO: 588654
ucaauaauugcagagagca

SEQ ID NO: 880205 - RNA, 19 nt, Artificial Sequence
  Description of Artificial Sequence: Synthetic oligonucleotide
  Antisense strand to SEQ ID NO: 880204
ugcucucugcaauuauuga

SEQ ID NO: 880206 - RNA, 19 nt, Artificial Sequence
  Description of Artificial Sequence: Synthetic oligonucleotide
  Sense strand starting at position 3391 of SEQ ID NO: 588654
gggacucuguucucugagu

SEQ ID NO: 880207 - RNA, 19 nt, Artificial Sequence
  Description of Artificial Sequence: Synthetic oligonucleotide
  Antisense strand to SEQ ID NO: 880206
acucagagaacagaguccc

SEQ ID NO: 880208 - RNA, 19 nt, Artificial Sequence
  Description of Artificial Sequence: Synthetic oligonucleotide
  Sense strand starting at position 3484 of SEQ ID NO: 588654
gaguuuaagcaguggcauu

SEQ ID NO: 880209 - RNA, 19 nt, Artificial Sequence
  Description of Artificial Sequence: Synthetic oligonucleotide
  Antisense strand to SEQ ID NO: 880208
aaugccacugcuuaaacuc

SEQ ID NO: 880210 - RNA, 19 nt, Artificial Sequence
  Description of Artificial Sequence: Synthetic oligonucleotide
  Sense strand starting at position 3494 of SEQ ID NO: 588654
aguggcauuccuggugaua

SEQ ID NO: 880211 - RNA, 19 nt, Artificial Sequence
  Description of Artificial Sequence: Synthetic oligonucleotide
  Antisense strand to SEQ ID NO: 880210
uaucaccaggaaugccacu

SEQ ID NO: 880212 - RNA, 19 nt, Artificial Sequence
  Description of Artificial Sequence: Synthetic oligonucleotide
  Sense strand starting at position 3541 of SEQ ID NO: 588654
ccaagacucugugaggaga

SEQ ID NO: 880213 - RNA, 19 nt, Artificial Sequence
  Description of Artificial Sequence: Synthetic oligonucleotide
  Antisense strand to SEQ ID NO: 880212
ucuccucacagagucuugg

SEQ ID NO: 880214 - RNA, 19 nt, Artificial Sequence
  Description of Artificial Sequence: Synthetic oligonucleotide
  Sense strand starting at position 3641 of SEQ ID NO: 588654
ugucuuuguuguccuagaa

SEQ ID NO: 880215 - RNA, 19 nt, Artificial Sequence
  Description of Artificial Sequence: Synthetic oligonucleotide
  Antisense strand to SEQ ID NO: 880214
uucuaggacaacaaagaca

SEQ ID NO: 880216 - RNA, 19 nt, Artificial Sequence
  Description of Artificial Sequence: Synthetic oligonucleotide
  Sense strand starting at position 3645 of SEQ ID NO: 588654
uuuguuguccuagaaugga

SEQ ID NO: 880217 - RNA, 19 nt, Artificial Sequence
  Description of Artificial Sequence: Synthetic oligonucleotide
  Antisense strand to SEQ ID NO: 880216
uccauucuaggacaacaaa

SEQ ID NO: 880218 - RNA, 19 nt, Artificial Sequence
  Description of Artificial Sequence: Synthetic oligonucleotide
  Sense strand starting at position 3662 of SEQ ID NO: 588654
gaggaaagcuguuuguaag

SEQ ID NO: 880219 - RNA, 19 nt, Artificial Sequence
  Description of Artificial Sequence: Synthetic oligonucleotide
  Antisense strand to SEQ ID NO: 880218
cuuacaaacagcuuuccuc

SEQ ID NO: 880220 - RNA, 19 nt, Artificial Sequence
  Description of Artificial Sequence: Synthetic oligonucleotide
  Sense strand starting at position 3716 of SEQ ID NO: 588654
cggaguggacccuguguuu

SEQ ID NO: 880221 - RNA, 19 nt, Artificial Sequence
  Description of Artificial Sequence: Synthetic oligonucleotide
  Antisense strand to SEQ ID NO: 880220
aaacacaggguccacuccg

SEQ ID NO: 880222 - RNA, 19 nt, Artificial Sequence
  Description of Artificial Sequence: Synthetic oligonucleotide
  Sense strand starting at position 3742 of SEQ ID NO: 588654
aagggaucuccggguagug

SEQ ID NO: 880223 - RNA, 19 nt, Artificial Sequence
  Description of Artificial Sequence: Synthetic oligonucleotide
  Antisense strand to SEQ ID NO: 880222
cacuacccggagaucccuu

SEQ ID NO: 880224 - RNA, 19 nt, Artificial Sequence
  Description of Artificial Sequence: Synthetic oligonucleotide
  Sense strand starting at position 3782 of SEQ ID NO: 588654
acaucugucgaaugggaau

SEQ ID NO: 880225 - RNA, 19 nt, Artificial Sequence
  Description of Artificial Sequence: Synthetic oligonucleotide
  Antisense strand to SEQ ID NO: 880224
auucccauucgacagaugu

SEQ ID NO: 880226 - RNA, 19 nt, Artificial Sequence
  Description of Artificial Sequence: Synthetic oligonucleotide
  Sense strand starting at position 3873 of SEQ ID NO: 588654
uuaagaacucuacgugcau

SEQ ID NO: 880227 - RNA, 19 nt, Artificial Sequence
  Description of Artificial Sequence: Synthetic oligonucleotide
  Antisense strand to SEQ ID NO: 880226
augcacguagaguucuuaa

SEQ ID NO: 880228 - RNA, 19 nt, Artificial Sequence
  Description of Artificial Sequence: Synthetic oligonucleotide
  Sense strand starting at position 3941 of SEQ ID NO: 588654
ucacauugaugcuccaagu

SEQ ID NO: 880229 - RNA, 19 nt, Artificial Sequence
  Description of Artificial Sequence: Synthetic oligonucleotide
  Antisense strand to SEQ ID NO: 880228
acuuggagcaucaauguga

SEQ ID NO: 880230 - RNA, 19 nt, Artificial Sequence
  Description of Artificial Sequence: Synthetic oligonucleotide
  Sense strand starting at position 3954 of SEQ ID NO: 588654
ccaaguggccgcuaauaaa

SEQ ID NO: 880231 - RNA, 19 nt, Artificial Sequence
  Description of Artificial Sequence: Synthetic oligonucleotide
  Antisense strand to SEQ ID NO: 880230
uuuauuagcggccacuugg

SEQ ID NO: 880232 - RNA, 19 nt, Artificial Sequence
  Description of Artificial Sequence: Synthetic oligonucleotide
  Sense strand starting at position 3983 of SEQ ID NO: 588654
cugggagaccugugacaug

SEQ ID NO: 880233 - RNA, 19 nt, Artificial Sequence
  Description of Artificial Sequence: Synthetic oligonucleotide
  Antisense strand to SEQ ID NO: 880232
caugucacaggucucccag

SEQ ID NO: 880234 - RNA, 19 nt, Artificial Sequence
  Description of Artificial Sequence: Synthetic oligonucleotide
  Sense strand starting at position 38 of SEQ ID NO: 588655
ggcucuucucugcagguau

SEQ ID NO: 880235 - RNA, 19 nt, Artificial Sequence
  Description of Artificial Sequence: Synthetic oligonucleotide
  Antisense strand to SEQ ID NO: 880234
auaccugcagagaagagcc

SEQ ID NO: 880236 - RNA, 19 nt, Artificial Sequence
  Description of Artificial Sequence: Synthetic oligonucleotide
  Sense strand starting at position 87 of SEQ ID NO: 588655
gugugugcacaugaaugaa

SEQ ID NO: 880237 - RNA, 19 nt, Artificial Sequence
  Description of Artificial Sequence: Synthetic oligonucleotide
  Antisense strand to SEQ ID NO: 880236
uucauucaugugcacacac

SEQ ID NO: 880238 - RNA, 19 nt, Artificial Sequence
  Description of Artificial Sequence: Synthetic oligonucleotide
  Sense strand starting at position 103 of SEQ ID NO: 588655
gaaugcaucuguccagcaa

SEQ ID NO: 880239 - RNA, 19 nt, Artificial Sequence
  Description of Artificial Sequence: Synthetic oligonucleotide
  Antisense strand to SEQ ID NO: 880238
uugcuggacagaugcauuc

SEQ ID NO: 880240 - RNA, 19 nt, Artificial Sequence
  Description of Artificial Sequence: Synthetic oligonucleotide
  Sense strand starting at position 107 of SEQ ID NO: 588655
gcaucuguccagcaacagu

SEQ ID NO: 880241 - RNA, 19 nt, Artificial Sequence
  Description of Artificial Sequence: Synthetic oligonucleotide
  Antisense strand to SEQ ID NO: 880240
acuguugcuggacagaugc

SEQ ID NO: 880242 - RNA, 19 nt, Artificial Sequence
  Description of Artificial Sequence: Synthetic oligonucleotide
  Sense strand starting at position 574 of SEQ ID NO: 588655
gcaucauugaaagggcauu

SEQ ID NO: 880243 - RNA, 19 nt, Artificial Sequence
  Description of Artificial Sequence: Synthetic oligonucleotide
  Antisense strand to SEQ ID NO: 880242
aaugcccuuucaaugaugc

SEQ ID NO: 880244 - RNA, 19 nt, Artificial Sequence
  Description of Artificial Sequence: Synthetic oligonucleotide
  Sense strand starting at position 633 of SEQ ID NO: 588655
ggcucuuccgagcaccaua

SEQ ID NO: 880245 - RNA, 19 nt, Artificial Sequence
  Description of Artificial Sequence: Synthetic oligonucleotide
  Antisense strand to SEQ ID NO: 880244
uauggugcucggaagagcc

SEQ ID NO: 880246 - RNA, 19 nt, Artificial Sequence
  Description of Artificial Sequence: Synthetic oligonucleotide
  Sense strand starting at position 754 of SEQ ID NO: 588655
agagaccuuucucuauuga

SEQ ID NO: 880247 - RNA, 19 nt, Artificial Sequence
  Description of Artificial Sequence: Synthetic oligonucleotide
  Antisense strand to SEQ ID NO: 880246
ucaauagagaaaggucucu

SEQ ID NO: 880248 - RNA, 19 nt, Artificial Sequence
  Description of Artificial Sequence: Synthetic oligonucleotide
  Sense strand starting at position 799 of SEQ ID NO: 588655
guuugaaaugcccacgauc

SEQ ID NO: 880249 - RNA, 19 nt, Artificial Sequence
  Description of Artificial Sequence: Synthetic oligonucleotide
  Antisense strand to SEQ ID NO: 880248
gaucgugggcauuucaaac

SEQ ID NO: 880250 - RNA, 19 nt, Artificial Sequence
  Description of Artificial Sequence: Synthetic oligonucleotide
  Sense strand starting at position 2136 of SEQ ID NO: 588655
agggagugggccgaagauu

SEQ ID NO: 880251 - RNA, 19 nt, Artificial Sequence
  Description of Artificial Sequence: Synthetic oligonucleotide
  Antisense strand to SEQ ID NO: 880250
aaucuucggcccacucccu

SEQ ID NO: 880252 - RNA, 19 nt, Artificial Sequence
  Description of Artificial Sequence: Synthetic oligonucleotide
  Sense strand starting at position 2188 of SEQ ID NO: 588655
augggauguuaagucuuga

SEQ ID NO: 880253 - RNA, 19 nt, Artificial Sequence
  Description of Artificial Sequence: Synthetic oligonucleotide
  Antisense strand to SEQ ID NO: 880252
ucaagacuuaacaucccau

SEQ ID NO: 880254 - RNA, 19 nt, Artificial Sequence
  Description of Artificial Sequence: Synthetic oligonucleotide
  Sense strand starting at position 2193 of SEQ ID NO: 588655
auguuaagucuugaugucu

SEQ ID NO: 880255 - RNA, 19 nt, Artificial Sequence
  Description of Artificial Sequence: Synthetic oligonucleotide
  Antisense strand to SEQ ID NO: 880254
agacaucaagacuuaacau

SEQ ID NO: 880256 - RNA, 19 nt, Artificial Sequence
  Description of Artificial Sequence: Synthetic oligonucleotide
  Sense strand starting at position 2198 of SEQ ID NO: 588655
aagucuugaugucuaugga

SEQ ID NO: 880257 - RNA, 19 nt, Artificial Sequence
  Description of Artificial Sequence: Synthetic oligonucleotide
  Antisense strand to SEQ ID NO: 880256
uccauagacaucaagacuu

SEQ ID NO: 880258 - RNA, 19 nt, Artificial Sequence
  Description of Artificial Sequence: Synthetic oligonucleotide
  Sense strand starting at position 2201 of SEQ ID NO: 588655
ucuugaugucuauggagug

SEQ ID NO: 880259 - RNA, 19 nt, Artificial Sequence
  Description of Artificial Sequence: Synthetic oligonucleotide
  Antisense strand to SEQ ID NO: 880258
cacuccauagacaucaaga

SEQ ID NO: 880260 - RNA, 19 nt, Artificial Sequence
  Description of Artificial Sequence: Synthetic oligonucleotide
  Sense strand starting at position 2316 of SEQ ID NO: 588655
ggaggaagccaggguuaga

SEQ ID NO: 880261 - RNA, 19 nt, Artificial Sequence
  Description of Artificial Sequence: Synthetic oligonucleotide
  Antisense strand to SEQ ID NO: 880260
ucuaacccuggcuuccucc

SEQ ID NO: 880262 - RNA, 19 nt, Artificial Sequence
  Description of Artificial Sequence: Synthetic oligonucleotide
  Sense strand starting at position 2494 of SEQ ID NO: 588655
ggcccugucaucguguguu

SEQ ID NO: 880263 - RNA, 19 nt, Artificial Sequence
  Description of Artificial Sequence: Synthetic oligonucleotide
  Antisense strand to SEQ ID NO: 880262
aacacacgaugacagggcc

SEQ ID NO: 880264 - RNA, 19 nt, Artificial Sequence
  Description of Artificial Sequence: Synthetic oligonucleotide
  Sense strand starting at position 2499 of SEQ ID NO: 588655
ugucaucguguguuagguu

SEQ ID NO: 880265 - RNA, 19 nt, Artificial Sequence
  Description of Artificial Sequence: Synthetic oligonucleotide
  Antisense strand to SEQ ID NO: 880264
aaccuaacacacgaugaca

SEQ ID NO: 880266 - RNA, 19 nt, Artificial Sequence
  Description of Artificial Sequence: Synthetic oligonucleotide
  Sense strand starting at position 2874 of SEQ ID NO: 588655
cuccuuuaauguguacuca

SEQ ID NO: 880267 - RNA, 19 nt, Artificial Sequence
  Description of Artificial Sequence: Synthetic oligonucleotide
  Antisense strand to SEQ ID NO: 880266
ugaguacacauuaaaggag

SEQ ID NO: 880268 - RNA, 19 nt, Artificial Sequence
  Description of Artificial Sequence: Synthetic oligonucleotide
  Sense strand starting at position 2889 of SEQ ID NO: 588655
cucagacccguugacuaaa

SEQ ID NO: 880269 - RNA, 19 nt, Artificial Sequence
  Description of Artificial Sequence: Synthetic oligonucleotide
  Antisense strand to SEQ ID NO: 880268
uuuagucaacgggucugag

SEQ ID NO: 880270 - RNA, 19 nt, Artificial Sequence
  Description of Artificial Sequence: Synthetic oligonucleotide
  Sense strand starting at position 3018 of SEQ ID NO: 588655
cucucuguucucuauuguu

SEQ ID NO: 880271 - RNA, 19 nt, Artificial Sequence
  Description of Artificial Sequence: Synthetic oligonucleotide
  Antisense strand to SEQ ID NO: 880270
aacaauagagaacagagag

SEQ ID NO: 880272 - RNA, 19 nt, Artificial Sequence
  Description of Artificial Sequence: Synthetic oligonucleotide
  Sense strand starting at position 3027 of SEQ ID NO: 588655
cucuauuguuuagucuuua

SEQ ID NO: 880273 - RNA, 19 nt, Artificial Sequence
  Description of Artificial Sequence: Synthetic oligonucleotide
  Antisense strand to SEQ ID NO: 880272
uaaagacuaaacaauagag

SEQ ID NO: 880274 - RNA, 19 nt, Artificial Sequence
  Description of Artificial Sequence: Synthetic oligonucleotide
  Sense strand starting at position 3031 of SEQ ID NO: 588655
auuguuuagucuuuagucu

SEQ ID NO: 880275 - RNA, 19 nt, Artificial Sequence
  Description of Artificial Sequence: Synthetic oligonucleotide
  Antisense strand to SEQ ID NO: 880274
agacuaaagacuaaacaau

SEQ ID NO: 880276 - RNA, 19 nt, Artificial Sequence
  Description of Artificial Sequence: Synthetic oligonucleotide
  Sense strand starting at position 3032 of SEQ ID NO: 588655
uuguuuagucuuuagucua

SEQ ID NO: 880277 - RNA, 19 nt, Artificial Sequence
  Description of Artificial Sequence: Synthetic oligonucleotide
  Antisense strand to SEQ ID NO: 880276
uagacuaaagacuaaacaa

SEQ ID NO: 880278 - RNA, 19 nt, Artificial Sequence
  Description of Artificial Sequence: Synthetic oligonucleotide
  Sense strand starting at position 3037 of SEQ ID NO: 588655
uagucuuuagucuauggaa

SEQ ID NO: 880279 - RNA, 19 nt, Artificial Sequence
  Description of Artificial Sequence: Synthetic oligonucleotide
  Antisense strand to SEQ ID NO: 880278
uuccauagacuaaagacua

SEQ ID NO: 880280 - RNA, 19 nt, Artificial Sequence
  Description of Artificial Sequence: Synthetic oligonucleotide
  Sense strand starting at position 3071 of SEQ ID NO: 588655
gagaaucucugacaagaag

SEQ ID NO: 880281 - RNA, 19 nt, Artificial Sequence
  Description of Artificial Sequence: Synthetic oligonucleotide
  Antisense strand to SEQ ID NO: 880280
cuucuugucagagauucuc

SEQ ID NO: 880282 - RNA, 19 nt, Artificial Sequence
  Description of Artificial Sequence: Synthetic oligonucleotide
  Sense strand starting at position 3101 of SEQ ID NO: 588655
ucaauaauugcagagagca

SEQ ID NO: 880283 - RNA, 19 nt, Artificial Sequence
  Description of Artificial Sequence: Synthetic oligonucleotide
  Antisense strand to SEQ ID NO: 880282
ugcucucugcaauuauuga

SEQ ID NO: 880284 - RNA, 19 nt, Artificial Sequence
  Description of Artificial Sequence: Synthetic oligonucleotide
  Sense strand starting at position 3377 of SEQ ID NO: 588655
gggacucuguucucugagu

SEQ ID NO: 880285 - RNA, 19 nt, Artificial Sequence
  Description of Artificial Sequence: Synthetic oligonucleotide
  Antisense strand to SEQ ID NO: 880284
acucagagaacagaguccc

SEQ ID NO: 880286 - RNA, 19 nt, Artificial Sequence
  Description of Artificial Sequence: Synthetic oligonucleotide
  Sense strand starting at position 3470 of SEQ ID NO: 588655
gaguuuaagcaguggcauu

SEQ ID NO: 880287 - RNA, 19 nt, Artificial Sequence
  Description of Artificial Sequence: Synthetic oligonucleotide
  Antisense strand to SEQ ID NO: 880286
aaugccacugcuuaaacuc

SEQ ID NO: 880288 - RNA, 19 nt, Artificial Sequence
  Description of Artificial Sequence: Synthetic oligonucleotide
  Sense strand starting at position 3480 of SEQ ID NO: 588655
aguggcauuccuggugaua

SEQ ID NO: 880289 - RNA, 19 nt, Artificial Sequence
  Description of Artificial Sequence: Synthetic oligonucleotide
  Antisense strand to SEQ ID NO: 880288
uaucaccaggaaugccacu

SEQ ID NO: 880290 - RNA, 19 nt, Artificial Sequence
  Description of Artificial Sequence: Synthetic oligonucleotide
  Sense strand starting at position 3527 of SEQ ID NO: 588655
ccaagacucugugaggaga

SEQ ID NO: 880291 - RNA, 19 nt, Artificial Sequence
  Description of Artificial Sequence: Synthetic oligonucleotide
  Antisense strand to SEQ ID NO: 880290
ucuccucacagagucuugg

SEQ ID NO: 880292 - RNA, 19 nt, Artificial Sequence
  Description of Artificial Sequence: Synthetic oligonucleotide
  Sense strand starting at position 3627 of SEQ ID NO: 588655
ugucuuuguuguccuagaa

SEQ ID NO: 880293 - RNA, 19 nt, Artificial Sequence
  Description of Artificial Sequence: Synthetic oligonucleotide
  Antisense strand to SEQ ID NO: 880292
uucuaggacaacaaagaca

SEQ ID NO: 880294 - RNA, 19 nt, Artificial Sequence
  Description of Artificial Sequence: Synthetic oligonucleotide
  Sense strand starting at position 3631 of SEQ ID NO: 588655
uuuguuguccuagaaugga

SEQ ID NO: 880295 - RNA, 19 nt, Artificial Sequence
  Description of Artificial Sequence: Synthetic oligonucleotide
  Antisense strand to SEQ ID NO: 880294
uccauucuaggacaacaaa

SEQ ID NO: 880296 - RNA, 19 nt, Artificial Sequence
  Description of Artificial Sequence: Synthetic oligonucleotide
  Sense strand starting at position 3648 of SEQ ID NO: 588655
gaggaaagcuguuuguaag

SEQ ID NO: 880297 - RNA, 19 nt, Artificial Sequence
  Description of Artificial Sequence: Synthetic oligonucleotide
  Antisense strand to SEQ ID NO: 880296
cuuacaaacagcuuuccuc

SEQ ID NO: 880298 - RNA, 19 nt, Artificial Sequence
  Description of Artificial Sequence: Synthetic oligonucleotide
  Sense strand starting at position 3702 of SEQ ID NO: 588655
cggaguggacccuguguuu

SEQ ID NO: 880299 - RNA, 19 nt, Artificial Sequence
  Description of Artificial Sequence: Synthetic oligonucleotide
  Antisense strand to SEQ ID NO: 880298
aaacacaggguccacuccg

SEQ ID NO: 880300 - RNA, 19 nt, Artificial Sequence
  Description of Artificial Sequence: Synthetic oligonucleotide
  Sense strand starting at position 3728 of SEQ ID NO: 588655
aagggaucuccggguagug

SEQ ID NO: 880301 - RNA, 19 nt, Artificial Sequence
  Description of Artificial Sequence: Synthetic oligonucleotide
  Antisense strand to SEQ ID NO: 880300
cacuacccggagaucccuu

SEQ ID NO: 880302 - RNA, 19 nt, Artificial Sequence
  Description of Artificial Sequence: Synthetic oligonucleotide
  Sense strand starting at position 3768 of SEQ ID NO: 588655
acaucugucgaaugggaau

SEQ ID NO: 880303 - RNA, 19 nt, Artificial Sequence
  Description of Artificial Sequence: Synthetic oligonucleotide
  Antisense strand to SEQ ID NO: 880302
auucccauucgacagaugu

SEQ ID NO: 880304 - RNA, 19 nt, Artificial Sequence
  Description of Artificial Sequence: Synthetic oligonucleotide
  Sense strand starting at position 3859 of SEQ ID NO: 588655
uuaagaacucuacgugcau

SEQ ID NO: 880305 - RNA, 19 nt, Artificial Sequence
  Description of Artificial Sequence: Synthetic oligonucleotide
  Antisense strand to SEQ ID NO: 880304
augcacguagaguucuuaa

SEQ ID NO: 880306 - RNA, 19 nt, Artificial Sequence
  Description of Artificial Sequence: Synthetic oligonucleotide
  Sense strand starting at position 3927 of SEQ ID NO: 588655
ucacauugaugcuccaagu

SEQ ID NO: 880307 - RNA, 19 nt, Artificial Sequence
  Description of Artificial Sequence: Synthetic oligonucleotide
  Antisense strand to SEQ ID NO: 880306
acuuggagcaucaauguga

SEQ ID NO: 880308 - RNA, 19 nt, Artificial Sequence
  Description of Artificial Sequence: Synthetic oligonucleotide
  Sense strand starting at position 3940 of SEQ ID NO: 588655
ccaaguggccgcuaauaaa

SEQ ID NO: 880309 - RNA, 19 nt, Artificial Sequence
  Description of Artificial Sequence: Synthetic oligonucleotide
  Antisense strand to SEQ ID NO: 880308
uuuauuagcggccacuugg

SEQ ID NO: 880310 - RNA, 19 nt, Artificial Sequence
  Description of Artificial Sequence: Synthetic oligonucleotide
  Sense strand starting at position 3969 of SEQ ID NO: 588655
cugggagaccugugacaug

SEQ ID NO: 880311 - RNA, 19 nt, Artificial Sequence
  Description of Artificial Sequence: Synthetic oligonucleotide
  Antisense strand to SEQ ID NO: 880310
caugucacaggucucccag

SEQ ID NO: 880312 - RNA, 19 nt, Artificial Sequence
  Description of Artificial Sequence: Synthetic oligonucleotide
  Sense strand starting at position 3980 of SEQ ID NO: 588655
gugacauggccauagagcu

SEQ ID NO: 880313 - RNA, 19 nt, Artificial Sequence
  Description of Artificial Sequence: Synthetic oligonucleotide
  Antisense strand to SEQ ID NO: 880312
agcucuauggccaugucac

SEQ ID NO: 880314 - RNA, 19 nt, Artificial Sequence
  Description of Artificial Sequence: Synthetic oligonucleotide
  Sense strand starting at position 603 of SEQ ID NO: 588656
agagauggcucagaaauuu

SEQ ID NO: 880315 - RNA, 19 nt, Artificial Sequence
  Description of Artificial Sequence: Synthetic oligonucleotide
  Antisense strand to SEQ ID NO: 880314
aaauuucugagccaucucu

SEQ ID NO: 880316 - RNA, 19 nt, Artificial Sequence
  Description of Artificial Sequence: Synthetic oligonucleotide
  Sense strand starting at position 624 of SEQ ID NO: 588656
gguaucuugaaacgugugu

SEQ ID NO: 880317 - RNA, 19 nt, Artificial Sequence
  Description of Artificial Sequence: Synthetic oligonucleotide
  Antisense strand to SEQ ID NO: 880316
acacacguuucaagauacc

SEQ ID NO: 880318 - RNA, 19 nt, Artificial Sequence
  Description of Artificial Sequence: Synthetic oligonucleotide
  Sense strand starting at position 628 of SEQ ID NO: 588656
ucuugaaacgugugucucu

SEQ ID NO: 880319 - RNA, 19 nt, Artificial Sequence
  Description of Artificial Sequence: Synthetic oligonucleotide
  Antisense strand to SEQ ID NO: 880318
agagacacacguuucaaga

SEQ ID NO: 880320 - RNA, 19 nt, Artificial Sequence
  Description of Artificial Sequence: Synthetic oligonucleotide
  Sense strand starting at position 629 of SEQ ID NO: 588656
cuugaaacgugugucucuu

SEQ ID NO: 880321 - RNA, 19 nt, Artificial Sequence
  Description of Artificial Sequence: Synthetic oligonucleotide
  Antisense strand to SEQ ID NO: 880320
aagagacacacguuucaag

SEQ ID NO: 880322 - RNA, 19 nt, Artificial Sequence
  Description of Artificial Sequence: Synthetic oligonucleotide
  Sense strand starting at position 641 of SEQ ID NO: 588656
gucucuuguuugccaauua

SEQ ID NO: 880323 - RNA, 19 nt, Artificial Sequence
  Description of Artificial Sequence: Synthetic oligonucleotide
  Antisense strand to SEQ ID NO: 880322
uaauuggcaaacaagagac

SEQ ID NO: 880324 - RNA, 19 nt, Artificial Sequence
  Description of Artificial Sequence: Synthetic oligonucleotide
  Sense strand starting at position 775 of SEQ ID NO: 588656
ccugaaagcccuugucacu

SEQ ID NO: 880325 - RNA, 19 nt, Artificial Sequence
  Description of Artificial Sequence: Synthetic oligonucleotide
  Antisense strand to SEQ ID NO: 880324
agugacaagggcuuucagg

SEQ ID NO: 880326 - RNA, 19 nt, Artificial Sequence
  Description of Artificial Sequence: Synthetic oligonucleotide
  Sense strand starting at position 855 of SEQ ID NO: 588656
uucucacuagacugugaga

SEQ ID NO: 880327 - RNA, 19 nt, Artificial Sequence
  Description of Artificial Sequence: Synthetic oligonucleotide
  Antisense strand to SEQ ID NO: 880326
ucucacagucuagugagaa

SEQ ID NO: 880328 - RNA, 19 nt, Artificial Sequence
  Description of Artificial Sequence: Synthetic oligonucleotide
  Sense strand starting at position 858 of SEQ ID NO: 588656
ucacuagacugugagaucu

SEQ ID NO: 880329 - RNA, 19 nt, Artificial Sequence
  Description of Artificial Sequence: Synthetic oligonucleotide
  Antisense strand to SEQ ID NO: 880328
agaucucacagucuaguga

SEQ ID NO: 880330 - RNA, 19 nt, Artificial Sequence
  Description of Artificial Sequence: Synthetic oligonucleotide
  Sense strand starting at position 886 of SEQ ID NO: 588656
gggacugugucucuaccau

SEQ ID NO: 880331 - RNA, 19 nt, Artificial Sequence
  Description of Artificial Sequence: Synthetic oligonucleotide
  Antisense strand to SEQ ID NO: 880330
augguagagacacaguccc

SEQ ID NO: 880332 - RNA, 19 nt, Artificial Sequence
  Description of Artificial Sequence: Synthetic oligonucleotide
  Sense strand starting at position 971 of SEQ ID NO: 588656
ggugaagacagcuguaaau

SEQ ID NO: 880333 - RNA, 19 nt, Artificial Sequence
  Description of Artificial Sequence: Synthetic oligonucleotide
  Antisense strand to SEQ ID NO: 880332
auuuacagcugucuucacc

SEQ ID NO: 880334 - RNA, 19 nt, Artificial Sequence
  Description of Artificial Sequence: Synthetic oligonucleotide
  Sense strand starting at position 1056 of SEQ ID NO: 588656
ggguguuauccucauaugu

SEQ ID NO: 880335 - RNA, 19 nt, Artificial Sequence
  Description of Artificial Sequence: Synthetic oligonucleotide
  Antisense strand to SEQ ID NO: 880334
acauaugaggauaacaccc

SEQ ID NO: 880336 - RNA, 19 nt, Artificial Sequence
  Description of Artificial Sequence: Synthetic oligonucleotide
  Sense strand starting at position 1066 of SEQ ID NO: 588656
cucauaugugaaugagcag

SEQ ID NO: 880337 - RNA, 19 nt, Artificial Sequence
  Description of Artificial Sequence: Synthetic oligonucleotide
  Antisense strand to SEQ ID NO: 880336
cugcucauucacauaugag

SEQ ID NO: 880338 - RNA, 19 nt, Artificial Sequence
  Description of Artificial Sequence: Synthetic oligonucleotide
  Sense strand starting at position 1097 of SEQ ID NO: 588656
agguaaucaauggguggaa

SEQ ID NO: 880339 - RNA, 19 nt, Artificial Sequence
  Description of Artificial Sequence: Synthetic oligonucleotide
  Antisense strand to SEQ ID NO: 880338
uuccacccauugauuaccu

SEQ ID NO: 880340 - RNA, 19 nt, Artificial Sequence
  Description of Artificial Sequence: Synthetic oligonucleotide
  Sense strand starting at position 1099 of SEQ ID NO: 588656
guaaucaauggguggaacu

SEQ ID NO: 880341 - RNA, 19 nt, Artificial Sequence
  Description of Artificial Sequence: Synthetic oligonucleotide
  Antisense strand to SEQ ID NO: 880340
aguuccacccauugauuac

SEQ ID NO: 880342 - RNA, 19 nt, Artificial Sequence
  Description of Artificial Sequence: Synthetic oligonucleotide
  Sense strand starting at position 1453 of SEQ ID NO: 588656
agcuguguccugggaggga

SEQ ID NO: 880343 - RNA, 19 nt, Artificial Sequence
  Description of Artificial Sequence: Synthetic oligonucleotide
  Antisense strand to SEQ ID NO: 880342
ucccucccaggacacagcu

SEQ ID NO: 880344 - RNA, 19 nt, Artificial Sequence
  Description of Artificial Sequence: Synthetic oligonucleotide
  Sense strand starting at position 1472 of SEQ ID NO: 588656
agagaagucucagacuuga

SEQ ID NO: 880345 - RNA, 19 nt, Artificial Sequence
  Description of Artificial Sequence: Synthetic oligonucleotide
  Antisense strand to SEQ ID NO: 880344
ucaagucugagacuucucu

SEQ ID NO: 880346 - RNA, 19 nt, Artificial Sequence
  Description of Artificial Sequence: Synthetic oligonucleotide
  Sense strand starting at position 1690 of SEQ ID NO: 588656
ccaaccugauagguuagau

SEQ ID NO: 880347 - RNA, 19 nt, Artificial Sequence
  Description of Artificial Sequence: Synthetic oligonucleotide
  Antisense strand to SEQ ID NO: 880346
aucuaaccuaucagguugg

SEQ ID NO: 880348 - RNA, 19 nt, Artificial Sequence
  Description of Artificial Sequence: Synthetic oligonucleotide
  Sense strand starting at position 1703 of SEQ ID NO: 588656
uuagauuccugucccacuu

SEQ ID NO: 880349 - RNA, 19 nt, Artificial Sequence
  Description of Artificial Sequence: Synthetic oligonucleotide
  Antisense strand to SEQ ID NO: 880348
aagugggacaggaaucuaa

SEQ ID NO: 880350 - RNA, 19 nt, Artificial Sequence
  Description of Artificial Sequence: Synthetic oligonucleotide
  Sense strand starting at position 2174 of SEQ ID NO: 588656
ucauucucgccugcggaau

SEQ ID NO: 880351 - RNA, 19 nt, Artificial Sequence
  Description of Artificial Sequence: Synthetic oligonucleotide
  Antisense strand to SEQ ID NO: 880350
auuccgcaggcgagaauga

SEQ ID NO: 880352 - RNA, 19 nt, Artificial Sequence
  Description of Artificial Sequence: Synthetic oligonucleotide
  Sense strand starting at position 2186 of SEQ ID NO: 588656
gcggaauuggcacgggaau

SEQ ID NO: 880353 - RNA, 19 nt, Artificial Sequence
  Description of Artificial Sequence: Synthetic oligonucleotide
  Antisense strand to SEQ ID NO: 880352
auucccgugccaauuccgc

SEQ ID NO: 880354 - RNA, 19 nt, Artificial Sequence
  Description of Artificial Sequence: Synthetic oligonucleotide
  Sense strand starting at position 2188 of SEQ ID NO: 588656
ggaauuggcacgggaauga

SEQ ID NO: 880355 - RNA, 19 nt, Artificial Sequence
  Description of Artificial Sequence: Synthetic oligonucleotide
  Antisense strand to SEQ ID NO: 880354
ucauucccgugccaauucc

SEQ ID NO: 880356 - RNA, 19 nt, Artificial Sequence
  Description of Artificial Sequence: Synthetic oligonucleotide
  Sense strand starting at position 2280 of SEQ ID NO: 588656
gacacaaauggccgcauua

SEQ ID NO: 880357 - RNA, 19 nt, Artificial Sequence
  Description of Artificial Sequence: Synthetic oligonucleotide
  Antisense strand to SEQ ID NO: 880356
uaaugcggccauuuguguc

SEQ ID NO: 880358 - RNA, 19 nt, Artificial Sequence
  Description of Artificial Sequence: Synthetic oligonucleotide
  Sense strand starting at position 2481 of SEQ ID NO: 588656
acugacaaugucugugaga

SEQ ID NO: 880359 - RNA, 19 nt, Artificial Sequence
  Description of Artificial Sequence: Synthetic oligonucleotide
  Antisense strand to SEQ ID NO: 880358
ucucacagacauugucagu

SEQ ID NO: 880360 - RNA, 19 nt, Artificial Sequence
  Description of Artificial Sequence: Synthetic oligonucleotide
  Sense strand starting at position 2482 of SEQ ID NO: 588656
cugacaaugucugugagaa

SEQ ID NO: 880361 - RNA, 19 nt, Artificial Sequence
  Description of Artificial Sequence: Synthetic oligonucleotide
  Antisense strand to SEQ ID NO: 880360
uucucacagacauugucag

SEQ ID NO: 880362 - RNA, 19 nt, Artificial Sequence
  Description of Artificial Sequence: Synthetic oligonucleotide
  Sense strand starting at position 2483 of SEQ ID NO: 588656
ugacaaugucugugagaaa

SEQ ID NO: 880363 - RNA, 19 nt, Artificial Sequence
  Description of Artificial Sequence: Synthetic oligonucleotide
  Antisense strand to SEQ ID NO: 880362
uuucucacagacauuguca

SEQ ID NO: 880364 - RNA, 19 nt, Artificial Sequence
  Description of Artificial Sequence: Synthetic oligonucleotide
  Sense strand starting at position 2484 of SEQ ID NO: 588656
gacaaugucugugagaaag

SEQ ID NO: 880365 - RNA, 19 nt, Artificial Sequence
  Description of Artificial Sequence: Synthetic oligonucleotide
  Antisense strand to SEQ ID NO: 880364
cuuucucacagacauuguc

SEQ ID NO: 880366 - RNA, 19 nt, Artificial Sequence
  Description of Artificial Sequence: Synthetic oligonucleotide
  Sense strand starting at position 2492 of SEQ ID NO: 588656
cugugagaaagucaaguuu

SEQ ID NO: 880367 - RNA, 19 nt, Artificial Sequence
  Description of Artificial Sequence: Synthetic oligonucleotide
  Antisense strand to SEQ ID NO: 880366
aaacuugacuuucucacag

SEQ ID NO: 880368 - RNA, 19 nt, Artificial Sequence
  Description of Artificial Sequence: Synthetic oligonucleotide
  Sense strand starting at position 2715 of SEQ ID NO: 588656
agugguuguuccuucuaau

SEQ ID NO: 880369 - RNA, 19 nt, Artificial Sequence
  Description of Artificial Sequence: Synthetic oligonucleotide
  Antisense strand to SEQ ID NO: 880368
auuagaaggaacaaccacu

SEQ ID NO: 880370 - RNA, 19 nt, Artificial Sequence
  Description of Artificial Sequence: Synthetic oligonucleotide
  Sense strand starting at position 2728 of SEQ ID NO: 588656
ucuaauugaucugcucaga

SEQ ID NO: 880371 - RNA, 19 nt, Artificial Sequence
  Description of Artificial Sequence: Synthetic oligonucleotide
  Antisense strand to SEQ ID NO: 880370
ucugagcagaucaauuaga

SEQ ID NO: 880372 - RNA, 19 nt, Artificial Sequence
  Description of Artificial Sequence: Synthetic oligonucleotide
  Sense strand starting at position 2781 of SEQ ID NO: 588656
agaggacguuuaucacauu

SEQ ID NO: 880373 - RNA, 19 nt, Artificial Sequence
  Description of Artificial Sequence: Synthetic oligonucleotide
  Antisense strand to SEQ ID NO: 880372
aaugugauaaacguccucu

SEQ ID NO: 880374 - RNA, 19 nt, Artificial Sequence
  Description of Artificial Sequence: Synthetic oligonucleotide
  Sense strand starting at position 2782 of SEQ ID NO: 588656
gaggacguuuaucacauuu

SEQ ID NO: 880375 - RNA, 19 nt, Artificial Sequence
  Description of Artificial Sequence: Synthetic oligonucleotide
  Antisense strand to SEQ ID NO: 880374
aaaugugauaaacguccuc

SEQ ID NO: 880376 - RNA, 19 nt, Artificial Sequence
  Description of Artificial Sequence: Synthetic oligonucleotide
  Sense strand starting at position 2807 of SEQ ID NO: 588656
agguguguuaucugucaug

SEQ ID NO: 880377 - RNA, 19 nt, Artificial Sequence
  Description of Artificial Sequence: Synthetic oligonucleotide
  Antisense strand to SEQ ID NO: 880376
caugacagauaacacaccu

SEQ ID NO: 880378 - RNA, 19 nt, Artificial Sequence
  Description of Artificial Sequence: Synthetic oligonucleotide
  Sense strand starting at position 2883 of SEQ ID NO: 588656
ggucgagugccuggguauu

SEQ ID NO: 880379 - RNA, 19 nt, Artificial Sequence
  Description of Artificial Sequence: Synthetic oligonucleotide
  Antisense strand to SEQ ID NO: 880378
aauacccaggcacucgacc

SEQ ID NO: 880380 - RNA, 19 nt, Artificial Sequence
  Description of Artificial Sequence: Synthetic oligonucleotide
  Sense strand starting at position 2923 of SEQ ID NO: 588656
caggguggguuggaugaau

SEQ ID NO: 880381 - RNA, 19 nt, Artificial Sequence
  Description of Artificial Sequence: Synthetic oligonucleotide
  Antisense strand to SEQ ID NO: 880380
auucauccaacccacccug

SEQ ID NO: 880382 - RNA, 19 nt, Artificial Sequence
  Description of Artificial Sequence: Synthetic oligonucleotide
  Sense strand starting at position 3749 of SEQ ID NO: 588656
aagagacccuguguuuaug

SEQ ID NO: 880383 - RNA, 19 nt, Artificial Sequence
  Description of Artificial Sequence: Synthetic oligonucleotide
  Antisense strand to SEQ ID NO: 880382
cauaaacacagggucucuu

SEQ ID NO: 880384 - RNA, 19 nt, Artificial Sequence
  Description of Artificial Sequence: Synthetic oligonucleotide
  Sense strand starting at position 3896 of SEQ ID NO: 588656
auuauagguuccuuguaua

SEQ ID NO: 880385 - RNA, 19 nt, Artificial Sequence
  Description of Artificial Sequence: Synthetic oligonucleotide
  Antisense strand to SEQ ID NO: 880384
uauacaaggaaccuauaau

SEQ ID NO: 880386 - RNA, 19 nt, Artificial Sequence
  Description of Artificial Sequence: Synthetic oligonucleotide
  Sense strand starting at position 3909 of SEQ ID NO: 588656
uguauauccuucuaaagag

SEQ ID NO: 880387 - RNA, 19 nt, Artificial Sequence
  Description of Artificial Sequence: Synthetic oligonucleotide
  Antisense strand to SEQ ID NO: 880386
cucuuuagaaggauauaca

SEQ ID NO: 880388 - RNA, 19 nt, Artificial Sequence
  Description of Artificial Sequence: Synthetic oligonucleotide
  Sense strand starting at position 3921 of SEQ ID NO: 588656
uaaagagagucuguauauu

SEQ ID NO: 880389 - RNA, 19 nt, Artificial Sequence
  Description of Artificial Sequence: Synthetic oligonucleotide
  Antisense strand to SEQ ID NO: 880388
aauauacagacucucuuua

SEQ ID NO: 880390 - RNA, 19 nt, Artificial Sequence
  Description of Artificial Sequence: Synthetic oligonucleotide
  Sense strand starting at position 3930 of SEQ ID NO: 588656
ucuguauauuuacgggaac

SEQ ID NO: 880391 - RNA, 19 nt, Artificial Sequence
  Description of Artificial Sequence: Synthetic oligonucleotide
  Antisense strand to SEQ ID NO: 880390
guucccguaaauauacaga

SEQ ID NO: 880392 - RNA, 19 nt, Artificial Sequence
  Description of Artificial Sequence: Synthetic oligonucleotide
  Sense strand starting at position 3931 of SEQ ID NO: 588656
cuguauauuuacgggaaca

SEQ ID NO: 880393 - RNA, 19 nt, Artificial Sequence
  Description of Artificial Sequence: Synthetic oligonucleotide
  Antisense strand to SEQ ID NO: 880392
uguucccguaaauauacag

SEQ ID NO: 880394 - RNA, 19 nt, Artificial Sequence
  Description of Artificial Sequence: Synthetic oligonucleotide
  Sense strand starting at position 10 of SEQ ID NO: 588658
agaagaaagucuuuccuug

SEQ ID NO: 880395 - RNA, 19 nt, Artificial Sequence
  Description of Artificial Sequence: Synthetic oligonucleotide
  Antisense strand to SEQ ID NO: 880394
caaggaaagacuuucuucu

SEQ ID NO: 880396 - RNA, 19 nt, Artificial Sequence
  Description of Artificial Sequence: Synthetic oligonucleotide
  Sense strand starting at position 12 of SEQ ID NO: 588658
aagaaagucuuuccuugag

SEQ ID NO: 880397 - RNA, 19 nt, Artificial Sequence
  Description of Artificial Sequence: Synthetic oligonucleotide
  Antisense strand to SEQ ID NO: 880396
cucaaggaaagacuuucuu

SEQ ID NO: 880398 - RNA, 19 nt, Artificial Sequence
  Description of Artificial Sequence: Synthetic oligonucleotide
  Sense strand starting at position 14 of SEQ ID NO: 588658
gaaagucuuuccuugagga

SEQ ID NO: 880399 - RNA, 19 nt, Artificial Sequence
  Description of Artificial Sequence: Synthetic oligonucleotide
  Antisense strand to SEQ ID NO: 880398
uccucaaggaaagacuuuc

SEQ ID NO: 880400 - RNA, 19 nt, Artificial Sequence
  Description of Artificial Sequence: Synthetic oligonucleotide
  Sense strand starting at position 15 of SEQ ID NO: 588658
aaagucuuuccuugaggaa

SEQ ID NO: 880401 - RNA, 19 nt, Artificial Sequence
  Description of Artificial Sequence: Synthetic oligonucleotide
  Antisense strand to SEQ ID NO: 880400
uuccucaaggaaagacuuu

SEQ ID NO: 880402 - RNA, 19 nt, Artificial Sequence
  Description of Artificial Sequence: Synthetic oligonucleotide
  Sense strand starting at position 104 of SEQ ID NO: 588658
aguacaaucuugucccacu

SEQ ID NO: 880403 - RNA, 19 nt, Artificial Sequence
  Description of Artificial Sequence: Synthetic oligonucleotide
  Antisense strand to SEQ ID NO: 880402
agugggacaagauuguacu

SEQ ID NO: 880404 - RNA, 19 nt, Artificial Sequence
  Description of Artificial Sequence: Synthetic oligonucleotide
  Sense strand starting at position 276 of SEQ ID NO: 588658
ucuucugagucauuugcua

SEQ ID NO: 880405 - RNA, 19 nt, Artificial Sequence
  Description of Artificial Sequence: Synthetic oligonucleotide
  Antisense strand to SEQ ID NO: 880404
uagcaaaugacucagaaga

SEQ ID NO: 880406 - RNA, 19 nt, Artificial Sequence
  Description of Artificial Sequence: Synthetic oligonucleotide
  Sense strand starting at position 280 of SEQ ID NO: 588658
cugagucauuugcuaagca

SEQ ID NO: 880407 - RNA, 19 nt, Artificial Sequence
  Description of Artificial Sequence: Synthetic oligonucleotide
  Antisense strand to SEQ ID NO: 880406
ugcuuagcaaaugacucag

SEQ ID NO: 880408 - RNA, 19 nt, Artificial Sequence
  Description of Artificial Sequence: Synthetic oligonucleotide
  Sense strand starting at position 284 of SEQ ID NO: 588658
gucauuugcuaagcauauu

SEQ ID NO: 880409 - RNA, 19 nt, Artificial Sequence
  Description of Artificial Sequence: Synthetic oligonucleotide
  Antisense strand to SEQ ID NO: 880408
aauaugcuuagcaaaugac

SEQ ID NO: 880410 - RNA, 19 nt, Artificial Sequence
  Description of Artificial Sequence: Synthetic oligonucleotide
  Sense strand starting at position 337 of SEQ ID NO: 588658
ugccuuguucucuauagga

SEQ ID NO: 880411 - RNA, 19 nt, Artificial Sequence
  Description of Artificial Sequence: Synthetic oligonucleotide
  Antisense strand to SEQ ID NO: 880410
uccuauagagaacaaggca

SEQ ID NO: 880412 - RNA, 19 nt, Artificial Sequence
  Description of Artificial Sequence: Synthetic oligonucleotide
  Sense strand starting at position 339 of SEQ ID NO: 588658
ccuuguucucuauaggaua

SEQ ID NO: 880413 - RNA, 19 nt, Artificial Sequence
  Description of Artificial Sequence: Synthetic oligonucleotide
  Antisense strand to SEQ ID NO: 880412
uauccuauagagaacaagg

SEQ ID NO: 880414 - RNA, 19 nt, Artificial Sequence
  Description of Artificial Sequence: Synthetic oligonucleotide
  Sense strand starting at position 436 of SEQ ID NO: 588658
uguuauaagugcucaaagg

SEQ ID NO: 880415 - RNA, 19 nt, Artificial Sequence
  Description of Artificial Sequence: Synthetic oligonucleotide
  Antisense strand to SEQ ID NO: 880414
ccuuugagcacuuauaaca

SEQ ID NO: 880416 - RNA, 19 nt, Artificial Sequence
  Description of Artificial Sequence: Synthetic oligonucleotide
  Sense strand starting at position 437 of SEQ ID NO: 588658
guuauaagugcucaaaggu

SEQ ID NO: 880417 - RNA, 19 nt, Artificial Sequence
  Description of Artificial Sequence: Synthetic oligonucleotide
  Antisense strand to SEQ ID NO: 880416
accuuugagcacuuauaac

SEQ ID NO: 880418 - RNA, 19 nt, Artificial Sequence
  Description of Artificial Sequence: Synthetic oligonucleotide
  Sense strand starting at position 452 of SEQ ID NO: 588658
agguguguugaaugaauaa

SEQ ID NO: 880419 - RNA, 19 nt, Artificial Sequence
  Description of Artificial Sequence: Synthetic oligonucleotide
  Antisense strand to SEQ ID NO: 880418
uuauucauucaacacaccu

SEQ ID NO: 880420 - RNA, 19 nt, Artificial Sequence
  Description of Artificial Sequence: Synthetic oligonucleotide
  Sense strand starting at position 577 of SEQ ID NO: 588658
ucaugagagcuugacuguu

SEQ ID NO: 880421 - RNA, 19 nt, Artificial Sequence
  Description of Artificial Sequence: Synthetic oligonucleotide
  Antisense strand to SEQ ID NO: 880420
aacagucaagcucucauga

SEQ ID NO: 880422 - RNA, 19 nt, Artificial Sequence
  Description of Artificial Sequence: Synthetic oligonucleotide
  Sense strand starting at position 688 of SEQ ID NO: 588658
gaauguuuggagcaaagua

SEQ ID NO: 880423 - RNA, 19 nt, Artificial Sequence
  Description of Artificial Sequence: Synthetic oligonucleotide
  Antisense strand to SEQ ID NO: 880422
uacuuugcuccaaacauuc

SEQ ID NO: 880424 - RNA, 19 nt, Artificial Sequence
  Description of Artificial Sequence: Synthetic oligonucleotide
  Sense strand starting at position 778 of SEQ ID NO: 588658
uuucucuuacuuggagaaa

SEQ ID NO: 880425 - RNA, 19 nt, Artificial Sequence
  Description of Artificial Sequence: Synthetic oligonucleotide
  Antisense strand to SEQ ID NO: 880424
uuucuccaaguaagagaaa

SEQ ID NO: 880426 - RNA, 19 nt, Artificial Sequence
  Description of Artificial Sequence: Synthetic oligonucleotide
  Sense strand starting at position 1217 of SEQ ID NO: 588658
gagugaaauuuguacaaau

SEQ ID NO: 880427 - RNA, 19 nt, Artificial Sequence
  Description of Artificial Sequence: Synthetic oligonucleotide
  Antisense strand to SEQ ID NO: 880426
auuuguacaaauuucacuc

SEQ ID NO: 880428 - RNA, 19 nt, Artificial Sequence
  Description of Artificial Sequence: Synthetic oligonucleotide
  Sense strand starting at position 1300 of SEQ ID NO: 588658
gguucuuuguuacuuauaa

SEQ ID NO: 880429 - RNA, 19 nt, Artificial Sequence
  Description of Artificial Sequence: Synthetic oligonucleotide
  Antisense strand to SEQ ID NO: 880428
uuauaaguaacaaagaacc

SEQ ID NO: 880430 - RNA, 19 nt, Artificial Sequence
  Description of Artificial Sequence: Synthetic oligonucleotide
  Sense strand starting at position 1357 of SEQ ID NO: 588658
ugauuccuuuaaccugaga

SEQ ID NO: 880431 - RNA, 19 nt, Artificial Sequence
  Description of Artificial Sequence: Synthetic oligonucleotide
  Antisense strand to SEQ ID NO: 880430
ucucagguuaaaggaauca

SEQ ID NO: 880432 - RNA, 19 nt, Artificial Sequence
  Description of Artificial Sequence: Synthetic oligonucleotide
  Sense strand starting at position 1778 of SEQ ID NO: 588658
cuugaauuacuguagcaau

SEQ ID NO: 880433 - RNA, 19 nt, Artificial Sequence
  Description of Artificial Sequence: Synthetic oligonucleotide
  Antisense strand to SEQ ID NO: 880432
auugcuacaguaauucaag

SEQ ID NO: 880434 - RNA, 19 nt, Artificial Sequence
  Description of Artificial Sequence: Synthetic oligonucleotide
  Sense strand starting at position 1821 of SEQ ID NO: 588658
aaacacucggguugaauua

SEQ ID NO: 880435 - RNA, 19 nt, Artificial Sequence
  Description of Artificial Sequence: Synthetic oligonucleotide
  Antisense strand to SEQ ID NO: 880434
uaauucaacccgaguguuu

SEQ ID NO: 880436 - RNA, 19 nt, Artificial Sequence
  Description of Artificial Sequence: Synthetic oligonucleotide
  Sense strand starting at position 1862 of SEQ ID NO: 588658
acaugaaacuuuguggauu

SEQ ID NO: 880437 - RNA, 19 nt, Artificial Sequence
  Description of Artificial Sequence: Synthetic oligonucleotide
  Antisense strand to SEQ ID NO: 880436
aauccacaaaguuucaugu

SEQ ID NO: 880438 - RNA, 19 nt, Artificial Sequence
  Description of Artificial Sequence: Synthetic oligonucleotide
  Sense strand starting at position 1905 of SEQ ID NO: 588658
gucagauuuauguggcuua

SEQ ID NO: 880439 - RNA, 19 nt, Artificial Sequence
  Description of Artificial Sequence: Synthetic oligonucleotide
  Antisense strand to SEQ ID NO: 880438
uaagccacauaaaucugac

SEQ ID NO: 880440 - RNA, 19 nt, Artificial Sequence
  Description of Artificial Sequence: Synthetic oligonucleotide
  Sense strand starting at position 2008 of SEQ ID NO: 588658
gcauguacugauuacuguu

SEQ ID NO: 880441 - RNA, 19 nt, Artificial Sequence
  Description of Artificial Sequence: Synthetic oligonucleotide
  Antisense strand to SEQ ID NO: 880440
aacaguaaucaguacaugc

SEQ ID NO: 880442 - RNA, 19 nt, Artificial Sequence
  Description of Artificial Sequence: Synthetic oligonucleotide
  Sense strand starting at position 2086 of SEQ ID NO: 588658
uccagagucucagcaacuu

SEQ ID NO: 880443 - RNA, 19 nt, Artificial Sequence
  Description of Artificial Sequence: Synthetic oligonucleotide
  Antisense strand to SEQ ID NO: 880442
aaguugcugagacucugga

SEQ ID NO: 880444 - RNA, 19 nt, Artificial Sequence
  Description of Artificial Sequence: Synthetic oligonucleotide
  Sense strand starting at position 2657 of SEQ ID NO: 588658
ggcagauguacccacuaga

SEQ ID NO: 880445 - RNA, 19 nt, Artificial Sequence
  Description of Artificial Sequence: Synthetic oligonucleotide
  Antisense strand to SEQ ID NO: 880444
ucuaguggguacaucugcc

SEQ ID NO: 880446 - RNA, 19 nt, Artificial Sequence
  Description of Artificial Sequence: Synthetic oligonucleotide
  Sense strand starting at position 2801 of SEQ ID NO: 588658
agcuuauguuacucaauag

SEQ ID NO: 880447 - RNA, 19 nt, Artificial Sequence
  Description of Artificial Sequence: Synthetic oligonucleotide
  Antisense strand to SEQ ID NO: 880446
cuauugaguaacauaagcu

SEQ ID NO: 880448 - RNA, 19 nt, Artificial Sequence
  Description of Artificial Sequence: Synthetic oligonucleotide
  Sense strand starting at position 2864 of SEQ ID NO: 588658
agagcuaucucuccugaau

SEQ ID NO: 880449 - RNA, 19 nt, Artificial Sequence
  Description of Artificial Sequence: Synthetic oligonucleotide
  Antisense strand to SEQ ID NO: 880448
auucaggagagauagcucu

SEQ ID NO: 880450 - RNA, 19 nt, Artificial Sequence
  Description of Artificial Sequence: Synthetic oligonucleotide
  Sense strand starting at position 2867 of SEQ ID NO: 588658
gcuaucucuccugaauagu

SEQ ID NO: 880451 - RNA, 19 nt, Artificial Sequence
  Description of Artificial Sequence: Synthetic oligonucleotide
  Antisense strand to SEQ ID NO: 880450
acuauucaggagagauagc

SEQ ID NO: 880452 - RNA, 19 nt, Artificial Sequence
  Description of Artificial Sequence: Synthetic oligonucleotide
  Sense strand starting at position 3172 of SEQ ID NO: 588658
agucuauuauuugagacau

SEQ ID NO: 880453 - RNA, 19 nt, Artificial Sequence
  Description of Artificial Sequence: Synthetic oligonucleotide
  Antisense strand to SEQ ID NO: 880452
augucucaaauaauagacu

SEQ ID NO: 880454 - RNA, 19 nt, Artificial Sequence
  Description of Artificial Sequence: Synthetic oligonucleotide
  Sense strand starting at position 3174 of SEQ ID NO: 588658
ucuauuauuugagacauug

SEQ ID NO: 880455 - RNA, 19 nt, Artificial Sequence
  Description of Artificial Sequence: Synthetic oligonucleotide
  Antisense strand to SEQ ID NO: 880454
caaugucucaaauaauaga

SEQ ID NO: 880456 - RNA, 19 nt, Artificial Sequence
  Description of Artificial Sequence: Synthetic oligonucleotide
  Sense strand starting at position 3309 of SEQ ID NO: 588658
gagagcaaaucuguguacu

SEQ ID NO: 880457 - RNA, 19 nt, Artificial Sequence
  Description of Artificial Sequence: Synthetic oligonucleotide
  Antisense strand to SEQ ID NO: 880456
aguacacagauuugcucuc

SEQ ID NO: 880458 - RNA, 19 nt, Artificial Sequence
  Description of Artificial Sequence: Synthetic oligonucleotide
  Sense strand starting at position 3418 of SEQ ID NO: 588658
cucugugauuuggauuuau

SEQ ID NO: 880459 - RNA, 19 nt, Artificial Sequence
  Description of Artificial Sequence: Synthetic oligonucleotide
  Antisense strand to SEQ ID NO: 880458
auaaauccaaaucacagag

SEQ ID NO: 880460 - RNA, 19 nt, Artificial Sequence
  Description of Artificial Sequence: Synthetic oligonucleotide
  Sense strand starting at position 3544 of SEQ ID NO: 588658
gucuaucuaggagguuuaa

SEQ ID NO: 880461 - RNA, 19 nt, Artificial Sequence
  Description of Artificial Sequence: Synthetic oligonucleotide
  Antisense strand to SEQ ID NO: 880460
uuaaaccuccuagauagac

SEQ ID NO: 880462 - RNA, 19 nt, Artificial Sequence
  Description of Artificial Sequence: Synthetic oligonucleotide
  Sense strand starting at position 3630 of SEQ ID NO: 588658
ggaugugaguuuguaauag

SEQ ID NO: 880463 - RNA, 19 nt, Artificial Sequence
  Description of Artificial Sequence: Synthetic oligonucleotide
  Antisense strand to SEQ ID NO: 880462
cuauuacaaacucacaucc

SEQ ID NO: 880464 - RNA, 19 nt, Artificial Sequence
  Description of Artificial Sequence: Synthetic oligonucleotide
  Sense strand starting at position 3761 of SEQ ID NO: 588658
guaucucaaagcugaguga

SEQ ID NO: 880465 - RNA, 19 nt, Artificial Sequence
  Description of Artificial Sequence: Synthetic oligonucleotide
  Antisense strand to SEQ ID NO: 880464
ucacucagcuuugagauac

SEQ ID NO: 880466 - RNA, 19 nt, Artificial Sequence
  Description of Artificial Sequence: Synthetic oligonucleotide
  Sense strand starting at position 3806 of SEQ ID NO: 588658
cugagaccugcuuaauuaa

SEQ ID NO: 880467 - RNA, 19 nt, Artificial Sequence
  Description of Artificial Sequence: Synthetic oligonucleotide
  Antisense strand to SEQ ID NO: 880466
uuaauuaagcaggucucag

SEQ ID NO: 880468 - RNA, 19 nt, Artificial Sequence
  Description of Artificial Sequence: Synthetic oligonucleotide
  Sense strand starting at position 3905 of SEQ ID NO: 588658
gggacucagcagugaaagu

SEQ ID NO: 880469 - RNA, 19 nt, Artificial Sequence
  Description of Artificial Sequence: Synthetic oligonucleotide
  Antisense strand to SEQ ID NO: 880468
acuuucacugcugaguccc

SEQ ID NO: 880470 - RNA, 19 nt, Artificial Sequence
  Description of Artificial Sequence: Synthetic oligonucleotide
  Sense strand starting at position 3915 of SEQ ID NO: 588658
agugaaagucucuguuaua

SEQ ID NO: 880471 - RNA, 19 nt, Artificial Sequence
  Description of Artificial Sequence: Synthetic oligonucleotide
  Antisense strand to SEQ ID NO: 880470
uauaacagagacuuucacu

SEQ ID NO: 880472 - RNA, 19 nt, Artificial Sequence
  Description of Artificial Sequence: Synthetic oligonucleotide
  Sense strand starting at position 3916 of SEQ ID NO: 588658
gugaaagucucuguuauag

SEQ ID NO: 880473 - RNA, 19 nt, Artificial Sequence
  Description of Artificial Sequence: Synthetic oligonucleotide
  Antisense strand to SEQ ID NO: 880472
cuauaacagagacuuucac

SEQ ID NO: 880474 - RNA, 19 nt, Artificial Sequence
  Description of Artificial Sequence: Synthetic oligonucleotide
  Sense strand starting at position 206 of SEQ ID NO: 588659
uggacauucuucuaagauu

SEQ ID NO: 880475 - RNA, 19 nt, Artificial Sequence
  Description of Artificial Sequence: Synthetic oligonucleotide
  Antisense strand to SEQ ID NO: 880474
aaucuuagaagaaugucca

SEQ ID NO: 880476 - RNA, 19 nt, Artificial Sequence
  Description of Artificial Sequence: Synthetic oligonucleotide
  Sense strand starting at position 235 of SEQ ID NO: 588659
uuggaauucccucgggaca

SEQ ID NO: 880477 - RNA, 19 nt, Artificial Sequence
  Description of Artificial Sequence: Synthetic oligonucleotide
  Antisense strand to SEQ ID NO: 880476
ugucccgagggaauuccaa

SEQ ID NO: 880478 - RNA, 19 nt, Artificial Sequence
  Description of Artificial Sequence: Synthetic oligonucleotide
  Sense strand starting at position 274 of SEQ ID NO: 588659
cuaaaugggcauugauaug

SEQ ID NO: 880479 - RNA, 19 nt, Artificial Sequence
  Description of Artificial Sequence: Synthetic oligonucleotide
  Antisense strand to SEQ ID NO: 880478
cauaucaaugcccauuuag

SEQ ID NO: 880480 - RNA, 19 nt, Artificial Sequence
  Description of Artificial Sequence: Synthetic oligonucleotide
  Sense strand starting at position 279 of SEQ ID NO: 588659
ugggcauugauaugacacu

SEQ ID NO: 880481 - RNA, 19 nt, Artificial Sequence
  Description of Artificial Sequence: Synthetic oligonucleotide
  Antisense strand to SEQ ID NO: 880480
agugucauaucaaugccca

SEQ ID NO: 880482 - RNA, 19 nt, Artificial Sequence
  Description of Artificial Sequence: Synthetic oligonucleotide
  Sense strand starting at position 472 of SEQ ID NO: 588659
ucuacugcccuuugauagu

SEQ ID NO: 880483 - RNA, 19 nt, Artificial Sequence
  Description of Artificial Sequence: Synthetic oligonucleotide
  Antisense strand to SEQ ID NO: 880482
acuaucaaagggcaguaga

SEQ ID NO: 880484 - RNA, 19 nt, Artificial Sequence
  Description of Artificial Sequence: Synthetic oligonucleotide
  Sense strand starting at position 478 of SEQ ID NO: 588659
gcccuuugauagucccaga

SEQ ID NO: 880485 - RNA, 19 nt, Artificial Sequence
  Description of Artificial Sequence: Synthetic oligonucleotide
  Antisense strand to SEQ ID NO: 880484
ucugggacuaucaaagggc

SEQ ID NO: 880486 - RNA, 19 nt, Artificial Sequence
  Description of Artificial Sequence: Synthetic oligonucleotide
  Sense strand starting at position 483 of SEQ ID NO: 588659
uugauagucccagauacuc

SEQ ID NO: 880487 - RNA, 19 nt, Artificial Sequence
  Description of Artificial Sequence: Synthetic oligonucleotide
  Antisense strand to SEQ ID NO: 880486
gaguaucugggacuaucaa

SEQ ID NO: 880488 - RNA, 19 nt, Artificial Sequence
  Description of Artificial Sequence: Synthetic oligonucleotide
  Sense strand starting at position 541 of SEQ ID NO: 588659
cugguauuuaguggcuuaa

SEQ ID NO: 880489 - RNA, 19 nt, Artificial Sequence
  Description of Artificial Sequence: Synthetic oligonucleotide
  Antisense strand to SEQ ID NO: 880488
uuaagccacuaaauaccag

SEQ ID NO: 880490 - RNA, 19 nt, Artificial Sequence
  Description of Artificial Sequence: Synthetic oligonucleotide
  Sense strand starting at position 567 of SEQ ID NO: 588659
uggagauuaacgugaaacu

SEQ ID NO: 880491 - RNA, 19 nt, Artificial Sequence
  Description of Artificial Sequence: Synthetic oligonucleotide
  Antisense strand to SEQ ID NO: 880490
aguuucacguuaaucucca

SEQ ID NO: 880492 - RNA, 19 nt, Artificial Sequence
  Description of Artificial Sequence: Synthetic oligonucleotide
  Sense strand starting at position 687 of SEQ ID NO: 588659
uaugaaauguugccuauga

SEQ ID NO: 880493 - RNA, 19 nt, Artificial Sequence
  Description of Artificial Sequence: Synthetic oligonucleotide
  Antisense strand to SEQ ID NO: 880492
ucauaggcaacauuucaua

SEQ ID NO: 880494 - RNA, 19 nt, Artificial Sequence
  Description of Artificial Sequence: Synthetic oligonucleotide
  Sense strand starting at position 819 of SEQ ID NO: 588659
uucccacuaguagaguaau

SEQ ID NO: 880495 - RNA, 19 nt, Artificial Sequence
  Description of Artificial Sequence: Synthetic oligonucleotide
  Antisense strand to SEQ ID NO: 880494
auuacucuacuagugggaa

SEQ ID NO: 880496 - RNA, 19 nt, Artificial Sequence
  Description of Artificial Sequence: Synthetic oligonucleotide
  Sense strand starting at position 1039 of SEQ ID NO: 588659
ugcacucacuugcuaaaga

SEQ ID NO: 880497 - RNA, 19 nt, Artificial Sequence
  Description of Artificial Sequence: Synthetic oligonucleotide
  Antisense strand to SEQ ID NO: 880496
ucuuuagcaagugagugca

SEQ ID NO: 880498 - RNA, 19 nt, Artificial Sequence
  Description of Artificial Sequence: Synthetic oligonucleotide
  Sense strand starting at position 1177 of SEQ ID NO: 588659
gcauccaagucauccgaau

SEQ ID NO: 880499 - RNA, 19 nt, Artificial Sequence
  Description of Artificial Sequence: Synthetic oligonucleotide
  Antisense strand to SEQ ID NO: 880498
auucggaugacuuggaugc

SEQ ID NO: 880500 - RNA, 19 nt, Artificial Sequence
  Description of Artificial Sequence: Synthetic oligonucleotide
  Sense strand starting at position 1191 of SEQ ID NO: 588659
cgaauuaagugucucuuua

SEQ ID NO: 880501 - RNA, 19 nt, Artificial Sequence
  Description of Artificial Sequence: Synthetic oligonucleotide
  Antisense strand to SEQ ID NO: 880500
uaaagagacacuuaauucg

SEQ ID NO: 880502 - RNA, 19 nt, Artificial Sequence
  Description of Artificial Sequence: Synthetic oligonucleotide
  Sense strand starting at position 1322 of SEQ ID NO: 588659
ugaagaugcucacaaugau

SEQ ID NO: 880503 - RNA, 19 nt, Artificial Sequence
  Description of Artificial Sequence: Synthetic oligonucleotide
  Antisense strand to SEQ ID NO: 880502
aucauugugagcaucuuca

SEQ ID NO: 880504 - RNA, 19 nt, Artificial Sequence
  Description of Artificial Sequence: Synthetic oligonucleotide
  Sense strand starting at position 1325 of SEQ ID NO: 588659
agaugcucacaaugauuaa

SEQ ID NO: 880505 - RNA, 19 nt, Artificial Sequence
  Description of Artificial Sequence: Synthetic oligonucleotide
  Antisense strand to SEQ ID NO: 880504
uuaaucauugugagcaucu

SEQ ID NO: 880506 - RNA, 19 nt, Artificial Sequence
  Description of Artificial Sequence: Synthetic oligonucleotide
  Sense strand starting at position 1374 of SEQ ID NO: 588659
ugucaauaugaacaauguu

SEQ ID NO: 880507 - RNA, 19 nt, Artificial Sequence
  Description of Artificial Sequence: Synthetic oligonucleotide
  Antisense strand to SEQ ID NO: 880506
aacauuguucauauugaca

SEQ ID NO: 880508 - RNA, 19 nt, Artificial Sequence
  Description of Artificial Sequence: Synthetic oligonucleotide
  Sense strand starting at position 1406 of SEQ ID NO: 588659
ugaugaacucauugucuga

SEQ ID NO: 880509 - RNA, 19 nt, Artificial Sequence
  Description of Artificial Sequence: Synthetic oligonucleotide
  Antisense strand to SEQ ID NO: 880508
ucagacaaugaguucauca

SEQ ID NO: 880510 - RNA, 19 nt, Artificial Sequence
  Description of Artificial Sequence: Synthetic oligonucleotide
  Sense strand starting at position 1408 of SEQ ID NO: 588659
augaacucauugucugaga

SEQ ID NO: 880511 - RNA, 19 nt, Artificial Sequence
  Description of Artificial Sequence: Synthetic oligonucleotide
  Antisense strand to SEQ ID NO: 880510
ucucagacaaugaguucau

SEQ ID NO: 880512 - RNA, 19 nt, Artificial Sequence
  Description of Artificial Sequence: Synthetic oligonucleotide
  Sense strand starting at position 1409 of SEQ ID NO: 588659
ugaacucauugucugagau

SEQ ID NO: 880513 - RNA, 19 nt, Artificial Sequence
  Description of Artificial Sequence: Synthetic oligonucleotide
  Antisense strand to SEQ ID NO: 880512
aucucagacaaugaguuca

SEQ ID NO: 880514 - RNA, 19 nt, Artificial Sequence
  Description of Artificial Sequence: Synthetic oligonucleotide
  Sense strand starting at position 1410 of SEQ ID NO: 588659
gaacucauugucugagaug

SEQ ID NO: 880515 - RNA, 19 nt, Artificial Sequence
  Description of Artificial Sequence: Synthetic oligonucleotide
  Antisense strand to SEQ ID NO: 880514
caucucagacaaugaguuc

SEQ ID NO: 880516 - RNA, 19 nt, Artificial Sequence
  Description of Artificial Sequence: Synthetic oligonucleotide
  Sense strand starting at position 1520 of SEQ ID NO: 588659
cugauuguacugcagaauu

SEQ ID NO: 880517 - RNA, 19 nt, Artificial Sequence
  Description of Artificial Sequence: Synthetic oligonucleotide
  Antisense strand to SEQ ID NO: 880516
aauucugcaguacaaucag

SEQ ID NO: 880518 - RNA, 19 nt, Artificial Sequence
  Description of Artificial Sequence: Synthetic oligonucleotide
  Sense strand starting at position 1522 of SEQ ID NO: 588659
gauuguacugcagaauuga

SEQ ID NO: 880519 - RNA, 19 nt, Artificial Sequence
  Description of Artificial Sequence: Synthetic oligonucleotide
  Antisense strand to SEQ ID NO: 880518
ucaauucugcaguacaauc

SEQ ID NO: 880520 - RNA, 19 nt, Artificial Sequence
  Description of Artificial Sequence: Synthetic oligonucleotide
  Sense strand starting at position 2024 of SEQ ID NO: 588659
gagagagcauguuaagaca

SEQ ID NO: 880521 - RNA, 19 nt, Artificial Sequence
  Description of Artificial Sequence: Synthetic oligonucleotide
  Antisense strand to SEQ ID NO: 880520
ugucuuaacaugcucucuc

SEQ ID NO: 880522 - RNA, 19 nt, Artificial Sequence
  Description of Artificial Sequence: Synthetic oligonucleotide
  Sense strand starting at position 2299 of SEQ ID NO: 588659
cuaggagaggcguauuagu

SEQ ID NO: 880523 - RNA, 19 nt, Artificial Sequence
  Description of Artificial Sequence: Synthetic oligonucleotide
  Antisense strand to SEQ ID NO: 880522
acuaauacgccucuccuag

SEQ ID NO: 880524 - RNA, 19 nt, Artificial Sequence
  Description of Artificial Sequence: Synthetic oligonucleotide
  Sense strand starting at position 2308 of SEQ ID NO: 588659
gcguauuaguauccauauu

SEQ ID NO: 880525 - RNA, 19 nt, Artificial Sequence
  Description of Artificial Sequence: Synthetic oligonucleotide
  Antisense strand to SEQ ID NO: 880524
aauauggauacuaauacgc

SEQ ID NO: 880526 - RNA, 19 nt, Artificial Sequence
  Description of Artificial Sequence: Synthetic oligonucleotide
  Sense strand starting at position 2459 of SEQ ID NO: 588659
acauaaacuguagguuaua

SEQ ID NO: 880527 - RNA, 19 nt, Artificial Sequence
  Description of Artificial Sequence: Synthetic oligonucleotide
  Antisense strand to SEQ ID NO: 880526
uauaaccuacaguuuaugu

SEQ ID NO: 880528 - RNA, 19 nt, Artificial Sequence
  Description of Artificial Sequence: Synthetic oligonucleotide
  Sense strand starting at position 2545 of SEQ ID NO: 588659
acaauagaucgaugcucuu

SEQ ID NO: 880529 - RNA, 19 nt, Artificial Sequence
  Description of Artificial Sequence: Synthetic oligonucleotide
  Antisense strand to SEQ ID NO: 880528
aagagcaucgaucuauugu

SEQ ID NO: 880530 - RNA, 19 nt, Artificial Sequence
  Description of Artificial Sequence: Synthetic oligonucleotide
  Sense strand starting at position 2580 of SEQ ID NO: 588659
auacuauguuacguauguu

SEQ ID NO: 880531 - RNA, 19 nt, Artificial Sequence
  Description of Artificial Sequence: Synthetic oligonucleotide
  Antisense strand to SEQ ID NO: 880530
aacauacguaacauaguau

SEQ ID NO: 880532 - RNA, 19 nt, Artificial Sequence
  Description of Artificial Sequence: Synthetic oligonucleotide
  Sense strand starting at position 2602 of SEQ ID NO: 588659
ucucuuucccaguagaaug

SEQ ID NO: 880533 - RNA, 19 nt, Artificial Sequence
  Description of Artificial Sequence: Synthetic oligonucleotide
  Antisense strand to SEQ ID NO: 880532
cauucuacugggaaagaga

SEQ ID NO: 880534 - RNA, 19 nt, Artificial Sequence
  Description of Artificial Sequence: Synthetic oligonucleotide
  Sense strand starting at position 2637 of SEQ ID NO: 588659
ugguacuuauucuugcuua

SEQ ID NO: 880535 - RNA, 19 nt, Artificial Sequence
  Description of Artificial Sequence: Synthetic oligonucleotide
  Antisense strand to SEQ ID NO: 880534
uaagcaagaauaaguacca

SEQ ID NO: 880536 - RNA, 19 nt, Artificial Sequence
  Description of Artificial Sequence: Synthetic oligonucleotide
  Sense strand starting at position 2757 of SEQ ID NO: 588659
auuucuuacugugugccaa

SEQ ID NO: 880537 - RNA, 19 nt, Artificial Sequence
  Description of Artificial Sequence: Synthetic oligonucleotide
  Antisense strand to SEQ ID NO: 880536
uuggcacacaguaagaaau

SEQ ID NO: 880538 - RNA, 19 nt, Artificial Sequence
  Description of Artificial Sequence: Synthetic oligonucleotide
  Sense strand starting at position 2758 of SEQ ID NO: 588659
uuucuuacugugugccaau

SEQ ID NO: 880539 - RNA, 19 nt, Artificial Sequence
  Description of Artificial Sequence: Synthetic oligonucleotide
  Antisense strand to SEQ ID NO: 880538
auuggcacacaguaagaaa

SEQ ID NO: 880540 - RNA, 19 nt, Artificial Sequence
  Description of Artificial Sequence: Synthetic oligonucleotide
  Sense strand starting at position 2767 of SEQ ID NO: 588659
gugugccaauccucuauua

SEQ ID NO: 880541 - RNA, 19 nt, Artificial Sequence
  Description of Artificial Sequence: Synthetic oligonucleotide
  Antisense strand to SEQ ID NO: 880540
uaauagaggauuggcacac

SEQ ID NO: 880542 - RNA, 19 nt, Artificial Sequence
  Description of Artificial Sequence: Synthetic oligonucleotide
  Sense strand starting at position 2821 of SEQ ID NO: 588659
auagcaagccuaugaggua

SEQ ID NO: 880543 - RNA, 19 nt, Artificial Sequence
  Description of Artificial Sequence: Synthetic oligonucleotide
  Antisense strand to SEQ ID NO: 880542
uaccucauaggcuugcuau

SEQ ID NO: 880544 - RNA, 19 nt, Artificial Sequence
  Description of Artificial Sequence: Synthetic oligonucleotide
  Sense strand starting at position 3029 of SEQ ID NO: 588659
agacuagaauaccuuguau

SEQ ID NO: 880545 - RNA, 19 nt, Artificial Sequence
  Description of Artificial Sequence: Synthetic oligonucleotide
  Antisense strand to SEQ ID NO: 880544
auacaagguauucuagucu

SEQ ID NO: 880546 - RNA, 19 nt, Artificial Sequence
  Description of Artificial Sequence: Synthetic oligonucleotide
  Sense strand starting at position 3265 of SEQ ID NO: 588659
cauuaugaugccuguuuga

SEQ ID NO: 880547 - RNA, 19 nt, Artificial Sequence
  Description of Artificial Sequence: Synthetic oligonucleotide
  Antisense strand to SEQ ID NO: 880546
ucaaacaggcaucauaaug

SEQ ID NO: 880548 - RNA, 19 nt, Artificial Sequence
  Description of Artificial Sequence: Synthetic oligonucleotide
  Sense strand starting at position 3268 of SEQ ID NO: 588659
uaugaugccuguuugacuu

SEQ ID NO: 880549 - RNA, 19 nt, Artificial Sequence
  Description of Artificial Sequence: Synthetic oligonucleotide
  Antisense strand to SEQ ID NO: 880548
aagucaaacaggcaucaua

SEQ ID NO: 880550 - RNA, 19 nt, Artificial Sequence
  Description of Artificial Sequence: Synthetic oligonucleotide
  Sense strand starting at position 3355 of SEQ ID NO: 588659
agcuuuagguuagauuuau

SEQ ID NO: 880551 - RNA, 19 nt, Artificial Sequence
  Description of Artificial Sequence: Synthetic oligonucleotide
  Antisense strand to SEQ ID NO: 880550
auaaaucuaaccuaaagcu

SEQ ID NO: 880552 - RNA, 19 nt, Artificial Sequence
  Description of Artificial Sequence: Synthetic oligonucleotide
  Sense strand starting at position 3361 of SEQ ID NO: 588659
agguuagauuuauccucgu

SEQ ID NO: 880553 - RNA, 19 nt, Artificial Sequence
  Description of Artificial Sequence: Synthetic oligonucleotide
  Antisense strand to SEQ ID NO: 880552
acgaggauaaaucuaaccu

SEQ ID NO: 880554 - RNA, 19 nt, Artificial Sequence
  Description of Artificial Sequence: Synthetic oligonucleotide
  Sense strand starting at position 48 of SEQ ID NO: 588660
uaaguuagccaggaacuuu

SEQ ID NO: 880555 - RNA, 19 nt, Artificial Sequence
  Description of Artificial Sequence: Synthetic oligonucleotide
  Antisense strand to SEQ ID NO: 880554
aaaguuccuggcuaacuua

SEQ ID NO: 880556 - RNA, 19 nt, Artificial Sequence
  Description of Artificial Sequence: Synthetic oligonucleotide
  Sense strand starting at position 345 of SEQ ID NO: 588660
gggugacuuucagugagac

SEQ ID NO: 880557 - RNA, 19 nt, Artificial Sequence
  Description of Artificial Sequence: Synthetic oligonucleotide
  Antisense strand to SEQ ID NO: 880556
gucucacugaaagucaccc

SEQ ID NO: 880558 - RNA, 19 nt, Artificial Sequence
  Description of Artificial Sequence: Synthetic oligonucleotide
  Sense strand starting at position 346 of SEQ ID NO: 588660
ggugacuuucagugagaca

SEQ ID NO: 880559 - RNA, 19 nt, Artificial Sequence
  Description of Artificial Sequence: Synthetic oligonucleotide
  Antisense strand to SEQ ID NO: 880558
ugucucacugaaagucacc

SEQ ID NO: 880560 - RNA, 19 nt, Artificial Sequence
  Description of Artificial Sequence: Synthetic oligonucleotide
  Sense strand starting at position 361 of SEQ ID NO: 588660
gacaucuggcucuaguaau

SEQ ID NO: 880561 - RNA, 19 nt, Artificial Sequence
  Description of Artificial Sequence: Synthetic oligonucleotide
  Antisense strand to SEQ ID NO: 880560
auuacuagagccagauguc

SEQ ID NO: 880562 - RNA, 19 nt, Artificial Sequence
  Description of Artificial Sequence: Synthetic oligonucleotide
  Sense strand starting at position 373 of SEQ ID NO: 588660
uaguaauuauuagcugaga

SEQ ID NO: 880563 - RNA, 19 nt, Artificial Sequence
  Description of Artificial Sequence: Synthetic oligonucleotide
  Antisense strand to SEQ ID NO: 880562
ucucagcuaauaauuacua

SEQ ID NO: 880564 - RNA, 19 nt, Artificial Sequence
  Description of Artificial Sequence: Synthetic oligonucleotide
  Sense strand starting at position 374 of SEQ ID NO: 588660
aguaauuauuagcugagag

SEQ ID NO: 880565 - RNA, 19 nt, Artificial Sequence
  Description of Artificial Sequence: Synthetic oligonucleotide
  Antisense strand to SEQ ID NO: 880564
cucucagcuaauaauuacu

SEQ ID NO: 880566 - RNA, 19 nt, Artificial Sequence
  Description of Artificial Sequence: Synthetic oligonucleotide
  Sense strand starting at position 376 of SEQ ID NO: 588660
uaauuauuagcugagagua

SEQ ID NO: 880567 - RNA, 19 nt, Artificial Sequence
  Description of Artificial Sequence: Synthetic oligonucleotide
  Antisense strand to SEQ ID NO: 880566
uacucucagcuaauaauua

SEQ ID NO: 880568 - RNA, 19 nt, Artificial Sequence
  Description of Artificial Sequence: Synthetic oligonucleotide
  Sense strand starting at position 449 of SEQ ID NO: 588660
ucugaaauucuuggacacu

SEQ ID NO: 880569 - RNA, 19 nt, Artificial Sequence
  Description of Artificial Sequence: Synthetic oligonucleotide
  Antisense strand to SEQ ID NO: 880568
aguguccaagaauuucaga

SEQ ID NO: 880570 - RNA, 19 nt, Artificial Sequence
  Description of Artificial Sequence: Synthetic oligonucleotide
  Sense strand starting at position 569 of SEQ ID NO: 588660
agguaacuaugucuuagaa

SEQ ID NO: 880571 - RNA, 19 nt, Artificial Sequence
  Description of Artificial Sequence: Synthetic oligonucleotide
  Antisense strand to SEQ ID NO: 880570
uucuaagacauaguuaccu

SEQ ID NO: 880572 - RNA, 19 nt, Artificial Sequence
  Description of Artificial Sequence: Synthetic oligonucleotide
  Sense strand starting at position 791 of SEQ ID NO: 588660
uguagcaaacuauaguuau

SEQ ID NO: 880573 - RNA, 19 nt, Artificial Sequence
  Description of Artificial Sequence: Synthetic oligonucleotide
  Antisense strand to SEQ ID NO: 880572
auaacuauaguuugcuaca

SEQ ID NO: 880574 - RNA, 19 nt, Artificial Sequence
  Description of Artificial Sequence: Synthetic oligonucleotide
  Sense strand starting at position 804 of SEQ ID NO: 588660
aguuaucagugauucuaga

SEQ ID NO: 880575 - RNA, 19 nt, Artificial Sequence
  Description of Artificial Sequence: Synthetic oligonucleotide
  Antisense strand to SEQ ID NO: 880574
ucuagaaucacugauaacu

SEQ ID NO: 880576 - RNA, 19 nt, Artificial Sequence
  Description of Artificial Sequence: Synthetic oligonucleotide
  Sense strand starting at position 811 of SEQ ID NO: 588660
agugauucuagaugagcag

SEQ ID NO: 880577 - RNA, 19 nt, Artificial Sequence
  Description of Artificial Sequence: Synthetic oligonucleotide
  Antisense strand to SEQ ID NO: 880576
cugcucaucuagaaucacu

SEQ ID NO: 880578 - RNA, 19 nt, Artificial Sequence
  Description of Artificial Sequence: Synthetic oligonucleotide
  Sense strand starting at position 1012 of SEQ ID NO: 588660
uuucucaagcuauagagua

SEQ ID NO: 880579 - RNA, 19 nt, Artificial Sequence
  Description of Artificial Sequence: Synthetic oligonucleotide
  Antisense strand to SEQ ID NO: 880578
uacucuauagcuugagaaa

SEQ ID NO: 880580 - RNA, 19 nt, Artificial Sequence
  Description of Artificial Sequence: Synthetic oligonucleotide
  Sense strand starting at position 1067 of SEQ ID NO: 588660
gagaaaugagcuugucuaa

SEQ ID NO: 880581 - RNA, 19 nt, Artificial Sequence
  Description of Artificial Sequence: Synthetic oligonucleotide
  Antisense strand to SEQ ID NO: 880580
uuagacaagcucauuucuc

SEQ ID NO: 880582 - RNA, 19 nt, Artificial Sequence
  Description of Artificial Sequence: Synthetic oligonucleotide
  Sense strand starting at position 1304 of SEQ ID NO: 588660
uugauaucaccauggugau

SEQ ID NO: 880583 - RNA, 19 nt, Artificial Sequence
  Description of Artificial Sequence: Synthetic oligonucleotide
  Antisense strand to SEQ ID NO: 880582
aucaccauggugauaucaa

SEQ ID NO: 880584 - RNA, 19 nt, Artificial Sequence
  Description of Artificial Sequence: Synthetic oligonucleotide
  Sense strand starting at position 1305 of SEQ ID NO: 588660
ugauaucaccauggugaua

SEQ ID NO: 880585 - RNA, 19 nt, Artificial Sequence
  Description of Artificial Sequence: Synthetic oligonucleotide
  Antisense strand to SEQ ID NO: 880584
uaucaccauggugauauca

SEQ ID NO: 880586 - RNA, 19 nt, Artificial Sequence
  Description of Artificial Sequence: Synthetic oligonucleotide
  Sense strand starting at position 1372 of SEQ ID NO: 588660
ucacaugcgaaaugauuga

SEQ ID NO: 880587 - RNA, 19 nt, Artificial Sequence
  Description of Artificial Sequence: Synthetic oligonucleotide
  Antisense strand to SEQ ID NO: 880586
ucaaucauuucgcauguga

SEQ ID NO: 880588 - RNA, 19 nt, Artificial Sequence
  Description of Artificial Sequence: Synthetic oligonucleotide
  Sense strand starting at position 1376 of SEQ ID NO: 588660
augcgaaaugauugauaau

SEQ ID NO: 880589 - RNA, 19 nt, Artificial Sequence
  Description of Artificial Sequence: Synthetic oligonucleotide
  Antisense strand to SEQ ID NO: 880588
auuaucaaucauuucgcau

SEQ ID NO: 880590 - RNA, 19 nt, Artificial Sequence
  Description of Artificial Sequence: Synthetic oligonucleotide
  Sense strand starting at position 1758 of SEQ ID NO: 588660
aaagaugcuggcuaugauu

SEQ ID NO: 880591 - RNA, 19 nt, Artificial Sequence
  Description of Artificial Sequence: Synthetic oligonucleotide
  Antisense strand to SEQ ID NO: 880590
aaucauagccagcaucuuu

SEQ ID NO: 880592 - RNA, 19 nt, Artificial Sequence
  Description of Artificial Sequence: Synthetic oligonucleotide
  Sense strand starting at position 1764 of SEQ ID NO: 588660
gcuggcuaugauuagaaca

SEQ ID NO: 880593 - RNA, 19 nt, Artificial Sequence
  Description of Artificial Sequence: Synthetic oligonucleotide
  Antisense strand to SEQ ID NO: 880592
uguucuaaucauagccagc

SEQ ID NO: 880594 - RNA, 19 nt, Artificial Sequence
  Description of Artificial Sequence: Synthetic oligonucleotide
  Sense strand starting at position 1793 of SEQ ID NO: 588660
uuagaaucacuagguacau

SEQ ID NO: 880595 - RNA, 19 nt, Artificial Sequence
  Description of Artificial Sequence: Synthetic oligonucleotide
  Antisense strand to SEQ ID NO: 880594
auguaccuagugauucuaa

SEQ ID NO: 880596 - RNA, 19 nt, Artificial Sequence
  Description of Artificial Sequence: Synthetic oligonucleotide
  Sense strand starting at position 1843 of SEQ ID NO: 588660
aucuuuggguauccagaaa

SEQ ID NO: 880597 - RNA, 19 nt, Artificial Sequence
  Description of Artificial Sequence: Synthetic oligonucleotide
  Antisense strand to SEQ ID NO: 880596
uuucuggauacccaaagau

SEQ ID NO: 880598 - RNA, 19 nt, Artificial Sequence
  Description of Artificial Sequence: Synthetic oligonucleotide
  Sense strand starting at position 2184 of SEQ ID NO: 588660
ggacauguuccugaguuga

SEQ ID NO: 880599 - RNA, 19 nt, Artificial Sequence
  Description of Artificial Sequence: Synthetic oligonucleotide
  Antisense strand to SEQ ID NO: 880598
ucaacucaggaacaugucc

SEQ ID NO: 880600 - RNA, 19 nt, Artificial Sequence
  Description of Artificial Sequence: Synthetic oligonucleotide
  Sense strand starting at position 2504 of SEQ ID NO: 588660
uguuuaaaggcauaguuag

SEQ ID NO: 880601 - RNA, 19 nt, Artificial Sequence
  Description of Artificial Sequence: Synthetic oligonucleotide
  Antisense strand to SEQ ID NO: 880600
cuaacuaugccuuuaaaca

SEQ ID NO: 880602 - RNA, 19 nt, Artificial Sequence
  Description of Artificial Sequence: Synthetic oligonucleotide
  Sense strand starting at position 2594 of SEQ ID NO: 588660
augugauagucuuuggaga

SEQ ID NO: 880603 - RNA, 19 nt, Artificial Sequence
  Description of Artificial Sequence: Synthetic oligonucleotide
  Antisense strand to SEQ ID NO: 880602
ucuccaaagacuaucacau

SEQ ID NO: 880604 - RNA, 19 nt, Artificial Sequence
  Description of Artificial Sequence: Synthetic oligonucleotide
  Sense strand starting at position 2595 of SEQ ID NO: 588660
ugugauagucuuuggagaa

SEQ ID NO: 880605 - RNA, 19 nt, Artificial Sequence
  Description of Artificial Sequence: Synthetic oligonucleotide
  Antisense strand to SEQ ID NO: 880604
uucuccaaagacuaucaca

SEQ ID NO: 880606 - RNA, 19 nt, Artificial Sequence
  Description of Artificial Sequence: Synthetic oligonucleotide
  Sense strand starting at position 2653 of SEQ ID NO: 588660
agagucugucuugauaauu

SEQ ID NO: 880607 - RNA, 19 nt, Artificial Sequence
  Description of Artificial Sequence: Synthetic oligonucleotide
  Antisense strand to SEQ ID NO: 880606
aauuaucaagacagacucu

SEQ ID NO: 880608 - RNA, 19 nt, Artificial Sequence
  Description of Artificial Sequence: Synthetic oligonucleotide
  Sense strand starting at position 2811 of SEQ ID NO: 588660
uauggaacuuggccaagau

SEQ ID NO: 880609 - RNA, 19 nt, Artificial Sequence
  Description of Artificial Sequence: Synthetic oligonucleotide
  Antisense strand to SEQ ID NO: 880608
aucuuggccaaguuccaua

SEQ ID NO: 880610 - RNA, 19 nt, Artificial Sequence
  Description of Artificial Sequence: Synthetic oligonucleotide
  Sense strand starting at position 2821 of SEQ ID NO: 588660
ggccaagauuaacuaggua

SEQ ID NO: 880611 - RNA, 19 nt, Artificial Sequence
  Description of Artificial Sequence: Synthetic oligonucleotide
  Antisense strand to SEQ ID NO: 880610
uaccuaguuaaucuuggcc

SEQ ID NO: 880612 - RNA, 19 nt, Artificial Sequence
  Description of Artificial Sequence: Synthetic oligonucleotide
  Sense strand starting at position 2824 of SEQ ID NO: 588660
caagauuaacuagguagua

SEQ ID NO: 880613 - RNA, 19 nt, Artificial Sequence
  Description of Artificial Sequence: Synthetic oligonucleotide
  Antisense strand to SEQ ID NO: 880612
uacuaccuaguuaaucuug

SEQ ID NO: 880614 - RNA, 19 nt, Artificial Sequence
  Description of Artificial Sequence: Synthetic oligonucleotide
  Sense strand starting at position 2917 of SEQ ID NO: 588660
acguaaagcaucuaggaau

SEQ ID NO: 880615 - RNA, 19 nt, Artificial Sequence
  Description of Artificial Sequence: Synthetic oligonucleotide
  Antisense strand to SEQ ID NO: 880614
auuccuagaugcuuuacgu

SEQ ID NO: 880616 - RNA, 19 nt, Artificial Sequence
  Description of Artificial Sequence: Synthetic oligonucleotide
  Sense strand starting at position 3175 of SEQ ID NO: 588660
ccggcaaacaucugggaaa

SEQ ID NO: 880617 - RNA, 19 nt, Artificial Sequence
  Description of Artificial Sequence: Synthetic oligonucleotide
  Antisense strand to SEQ ID NO: 880616
uuucccagauguuugccgg

SEQ ID NO: 880618 - RNA, 19 nt, Artificial Sequence
  Description of Artificial Sequence: Synthetic oligonucleotide
  Sense strand starting at position 3307 of SEQ ID NO: 588660
aggcuuagucuauacuaag

SEQ ID NO: 880619 - RNA, 19 nt, Artificial Sequence
  Description of Artificial Sequence: Synthetic oligonucleotide
  Antisense strand to SEQ ID NO: 880618
cuuaguauagacuaagccu

SEQ ID NO: 880620 - RNA, 19 nt, Artificial Sequence
  Description of Artificial Sequence: Synthetic oligonucleotide
  Sense strand starting at position 3329 of SEQ ID NO: 588660
gccaauuaucuagauguuu

SEQ ID NO: 880621 - RNA, 19 nt, Artificial Sequence
  Description of Artificial Sequence: Synthetic oligonucleotide
  Antisense strand to SEQ ID NO: 880620
aaacaucuagauaauuggc

SEQ ID NO: 880622 - RNA, 19 nt, Artificial Sequence
  Description of Artificial Sequence: Synthetic oligonucleotide
  Sense strand starting at position 3406 of SEQ ID NO: 588660
augucaagagcauaauucu

SEQ ID NO: 880623 - RNA, 19 nt, Artificial Sequence
  Description of Artificial Sequence: Synthetic oligonucleotide
  Antisense strand to SEQ ID NO: 880622
agaauuaugcucuugacau

SEQ ID NO: 880624 - RNA, 19 nt, Artificial Sequence
  Description of Artificial Sequence: Synthetic oligonucleotide
  Sense strand starting at position 3412 of SEQ ID NO: 588660
agagcauaauucuuugaug

SEQ ID NO: 880625 - RNA, 19 nt, Artificial Sequence
  Description of Artificial Sequence: Synthetic oligonucleotide
  Antisense strand to SEQ ID NO: 880624
caucaaagaauuaugcucu

SEQ ID NO: 880626 - RNA, 19 nt, Artificial Sequence
  Description of Artificial Sequence: Synthetic oligonucleotide
  Sense strand starting at position 3664 of SEQ ID NO: 588660
caaggagaacuccggaguu

SEQ ID NO: 880627 - RNA, 19 nt, Artificial Sequence
  Description of Artificial Sequence: Synthetic oligonucleotide
  Antisense strand to SEQ ID NO: 880626
aacuccggaguucuccuug

SEQ ID NO: 880628 - RNA, 19 nt, Artificial Sequence
  Description of Artificial Sequence: Synthetic oligonucleotide
  Sense strand starting at position 3666 of SEQ ID NO: 588660
aggagaacuccggaguuuc

SEQ ID NO: 880629 - RNA, 19 nt, Artificial Sequence
  Description of Artificial Sequence: Synthetic oligonucleotide
  Antisense strand to SEQ ID NO: 880628
gaaacuccggaguucuccu

SEQ ID NO: 880630 - RNA, 19 nt, Artificial Sequence
  Description of Artificial Sequence: Synthetic oligonucleotide
  Sense strand starting at position 3800 of SEQ ID NO: 588660
aagggaguuucugugaaag

SEQ ID NO: 880631 - RNA, 19 nt, Artificial Sequence
  Description of Artificial Sequence: Synthetic oligonucleotide
  Antisense strand to SEQ ID NO: 880630
cuuucacagaaacucccuu

SEQ ID NO: 880632 - RNA, 19 nt, Artificial Sequence
  Description of Artificial Sequence: Synthetic oligonucleotide
  Sense strand starting at position 3960 of SEQ ID NO: 588660
cccauuagacuuuagcagu

SEQ ID NO: 880633 - RNA, 19 nt, Artificial Sequence
  Description of Artificial Sequence: Synthetic oligonucleotide
  Antisense strand to SEQ ID NO: 880632
acugcuaaagucuaauggg

SEQ ID NO: 880634 - RNA, 19 nt, Artificial Sequence
  Description of Artificial Sequence: Synthetic oligonucleotide
  Sense strand starting at position 84 of SEQ ID NO: 588661
cugucuuggcaauaacauu

SEQ ID NO: 880635 - RNA, 19 nt, Artificial Sequence
  Description of Artificial Sequence: Synthetic oligonucleotide
  Antisense strand to SEQ ID NO: 880634
aauguuauugccaagacag

SEQ ID NO: 880636 - RNA, 19 nt, Artificial Sequence
  Description of Artificial Sequence: Synthetic oligonucleotide
  Sense strand starting at position 975 of SEQ ID NO: 588661
ucauauguacauugucaaa

SEQ ID NO: 880637 - RNA, 19 nt, Artificial Sequence
  Description of Artificial Sequence: Synthetic oligonucleotide
  Antisense strand to SEQ ID NO: 880636
uuugacaauguacauauga

SEQ ID NO: 880638 - RNA, 19 nt, Artificial Sequence
  Description of Artificial Sequence: Synthetic oligonucleotide
  Sense strand starting at position 977 of SEQ ID NO: 588661
auauguacauugucaaaug

SEQ ID NO: 880639 - RNA, 19 nt, Artificial Sequence
  Description of Artificial Sequence: Synthetic oligonucleotide
  Antisense strand to SEQ ID NO: 880638
cauuugacaauguacauau

SEQ ID NO: 880640 - RNA, 19 nt, Artificial Sequence
  Description of Artificial Sequence: Synthetic oligonucleotide
  Sense strand starting at position 1039 of SEQ ID NO: 588661
ugaucuuacugguuaauag

SEQ ID NO: 880641 - RNA, 19 nt, Artificial Sequence
  Description of Artificial Sequence: Synthetic oligonucleotide
  Antisense strand to SEQ ID NO: 880640
cuauuaaccaguaagauca

SEQ ID NO: 880642 - RNA, 19 nt, Artificial Sequence
  Description of Artificial Sequence: Synthetic oligonucleotide
  Sense strand starting at position 1308 of SEQ ID NO: 588661
ggccgaguucguucgcaag

SEQ ID NO: 880643 - RNA, 19 nt, Artificial Sequence
  Description of Artificial Sequence: Synthetic oligonucleotide
  Antisense strand to SEQ ID NO: 880642
cuugcgaacgaacucggcc

SEQ ID NO: 880644 - RNA, 19 nt, Artificial Sequence
  Description of Artificial Sequence: Synthetic oligonucleotide
  Sense strand starting at position 1740 of SEQ ID NO: 588661
ugagauuaagcucaccagu

SEQ ID NO: 880645 - RNA, 19 nt, Artificial Sequence
  Description of Artificial Sequence: Synthetic oligonucleotide
  Antisense strand to SEQ ID NO: 880644
acuggugagcuuaaucuca

SEQ ID NO: 880646 - RNA, 19 nt, Artificial Sequence
  Description of Artificial Sequence: Synthetic oligonucleotide
  Sense strand starting at position 1743 of SEQ ID NO: 588661
gauuaagcucaccaguguu

SEQ ID NO: 880647 - RNA, 19 nt, Artificial Sequence
  Description of Artificial Sequence: Synthetic oligonucleotide
  Antisense strand to SEQ ID NO: 880646
aacacuggugagcuuaauc

SEQ ID NO: 880648 - RNA, 19 nt, Artificial Sequence
  Description of Artificial Sequence: Synthetic oligonucleotide
  Sense strand starting at position 1839 of SEQ ID NO: 588661
acgagaauccaagaugcuu

SEQ ID NO: 880649 - RNA, 19 nt, Artificial Sequence
  Description of Artificial Sequence: Synthetic oligonucleotide
  Antisense strand to SEQ ID NO: 880648
aagcaucuuggauucucgu

SEQ ID NO: 880650 - RNA, 19 nt, Artificial Sequence
  Description of Artificial Sequence: Synthetic oligonucleotide
  Sense strand starting at position 1854 of SEQ ID NO: 588661
gcuugcuaugaucagaaca

SEQ ID NO: 880651 - RNA, 19 nt, Artificial Sequence
  Description of Artificial Sequence: Synthetic oligonucleotide
  Antisense strand to SEQ ID NO: 880650
uguucugaucauagcaagc

SEQ ID NO: 880652 - RNA, 19 nt, Artificial Sequence
  Description of Artificial Sequence: Synthetic oligonucleotide
  Sense strand starting at position 1883 of SEQ ID NO: 588661
uuagaaucacuacguacau

SEQ ID NO: 880653 - RNA, 19 nt, Artificial Sequence
  Description of Artificial Sequence: Synthetic oligonucleotide
  Antisense strand to SEQ ID NO: 880652
auguacguagugauucuaa

SEQ ID NO: 880654 - RNA, 19 nt, Artificial Sequence
  Description of Artificial Sequence: Synthetic oligonucleotide
  Sense strand starting at position 1892 of SEQ ID NO: 588661
cuacguacauaacuagaau

SEQ ID NO: 880655 - RNA, 19 nt, Artificial Sequence
  Description of Artificial Sequence: Synthetic oligonucleotide
  Antisense strand to SEQ ID NO: 880654
auucuaguuauguacguag

SEQ ID NO: 880656 - RNA, 19 nt, Artificial Sequence
  Description of Artificial Sequence: Synthetic oligonucleotide
  Sense strand starting at position 2085 of SEQ ID NO: 588661
aacauuacucuagggugaa

SEQ ID NO: 880657 - RNA, 19 nt, Artificial Sequence
  Description of Artificial Sequence: Synthetic oligonucleotide
  Antisense strand to SEQ ID NO: 880656
uucacccuagaguaauguu

SEQ ID NO: 880658 - RNA, 19 nt, Artificial Sequence
  Description of Artificial Sequence: Synthetic oligonucleotide
  Sense strand starting at position 2088 of SEQ ID NO: 588661
auuacucuagggugaaaua

SEQ ID NO: 880659 - RNA, 19 nt, Artificial Sequence
  Description of Artificial Sequence: Synthetic oligonucleotide
  Antisense strand to SEQ ID NO: 880658
uauuucacccuagaguaau

SEQ ID NO: 880660 - RNA, 19 nt, Artificial Sequence
  Description of Artificial Sequence: Synthetic oligonucleotide
  Sense strand starting at position 2145 of SEQ ID NO: 588661
ucaauaguauuugugccua

SEQ ID NO: 880661 - RNA, 19 nt, Artificial Sequence
  Description of Artificial Sequence: Synthetic oligonucleotide
  Antisense strand to SEQ ID NO: 880660
uaggcacaaauacuauuga

SEQ ID NO: 880662 - RNA, 19 nt, Artificial Sequence
  Description of Artificial Sequence: Synthetic oligonucleotide
  Sense strand starting at position 2149 of SEQ ID NO: 588661
uaguauuugugccuagaau

SEQ ID NO: 880663 - RNA, 19 nt, Artificial Sequence
  Description of Artificial Sequence: Synthetic oligonucleotide
  Antisense strand to SEQ ID NO: 880662
auucuaggcacaaauacua

SEQ ID NO: 880664 - RNA, 19 nt, Artificial Sequence
  Description of Artificial Sequence: Synthetic oligonucleotide
  Sense strand starting at position 2174 of SEQ ID NO: 588661
acacuaggauguuuagagu

SEQ ID NO: 880665 - RNA, 19 nt, Artificial Sequence
  Description of Artificial Sequence: Synthetic oligonucleotide
  Antisense strand to SEQ ID NO: 880664
acucuaaacauccuagugu

SEQ ID NO: 880666 - RNA, 19 nt, Artificial Sequence
  Description of Artificial Sequence: Synthetic oligonucleotide
  Sense strand starting at position 2203 of SEQ ID NO: 588661
uguaucuaauaugugaaga

SEQ ID NO: 880667 - RNA, 19 nt, Artificial Sequence
  Description of Artificial Sequence: Synthetic oligonucleotide
  Antisense strand to SEQ ID NO: 880666
ucuucacauauuagauaca

SEQ ID NO: 880668 - RNA, 19 nt, Artificial Sequence
  Description of Artificial Sequence: Synthetic oligonucleotide
  Sense strand starting at position 2257 of SEQ ID NO: 588661
uuucuuauuguugaggaca

SEQ ID NO: 880669 - RNA, 19 nt, Artificial Sequence
  Description of Artificial Sequence: Synthetic oligonucleotide
  Antisense strand to SEQ ID NO: 880668
uguccucaacaauaagaaa

SEQ ID NO: 880670 - RNA, 19 nt, Artificial Sequence
  Description of Artificial Sequence: Synthetic oligonucleotide
  Sense strand starting at position 2350 of SEQ ID NO: 588661
gugagagagcugcaaagaa

SEQ ID NO: 880671 - RNA, 19 nt, Artificial Sequence
  Description of Artificial Sequence: Synthetic oligonucleotide
  Antisense strand to SEQ ID NO: 880670
uucuuugcagcucucucac

SEQ ID NO: 880672 - RNA, 19 nt, Artificial Sequence
  Description of Artificial Sequence: Synthetic oligonucleotide
  Sense strand starting at position 2401 of SEQ ID NO: 588661
ugacccagcguuuaauaga

SEQ ID NO: 880673 - RNA, 19 nt, Artificial Sequence
  Description of Artificial Sequence: Synthetic oligonucleotide
  Antisense strand to SEQ ID NO: 880672
ucuauuaaacgcuggguca

SEQ ID NO: 880674 - RNA, 19 nt, Artificial Sequence
  Description of Artificial Sequence: Synthetic oligonucleotide
  Sense strand starting at position 2457 of SEQ ID NO: 588661
acauuuguuugucugccua

SEQ ID NO: 880675 - RNA, 19 nt, Artificial Sequence
  Description of Artificial Sequence: Synthetic oligonucleotide
  Antisense strand to SEQ ID NO: 880674
uaggcagacaaacaaaugu

SEQ ID NO: 880676 - RNA, 19 nt, Artificial Sequence
  Description of Artificial Sequence: Synthetic oligonucleotide
  Sense strand starting at position 2459 of SEQ ID NO: 588661
auuuguuugucugccuaaa

SEQ ID NO: 880677 - RNA, 19 nt, Artificial Sequence
  Description of Artificial Sequence: Synthetic oligonucleotide
  Antisense strand to SEQ ID NO: 880676
uuuaggcagacaaacaaau

SEQ ID NO: 880678 - RNA, 19 nt, Artificial Sequence
  Description of Artificial Sequence: Synthetic oligonucleotide
  Sense strand starting at position 2587 of SEQ ID NO: 588661
guuauuuguugaucucauu

SEQ ID NO: 880679 - RNA, 19 nt, Artificial Sequence
  Description of Artificial Sequence: Synthetic oligonucleotide
  Antisense strand to SEQ ID NO: 880678
aaugagaucaacaaauaac

SEQ ID NO: 880680 - RNA, 19 nt, Artificial Sequence
  Description of Artificial Sequence: Synthetic oligonucleotide
  Sense strand starting at position 2627 of SEQ ID NO: 588661
uuuguuauucccuaugaca

SEQ ID NO: 880681 - RNA, 19 nt, Artificial Sequence
  Description of Artificial Sequence: Synthetic oligonucleotide
  Antisense strand to SEQ ID NO: 880680
ugucauagggaauaacaaa

SEQ ID NO: 880682 - RNA, 19 nt, Artificial Sequence
  Description of Artificial Sequence: Synthetic oligonucleotide
  Sense strand starting at position 2629 of SEQ ID NO: 588661
uguuauucccuaugacaag

SEQ ID NO: 880683 - RNA, 19 nt, Artificial Sequence
  Description of Artificial Sequence: Synthetic oligonucleotide
  Antisense strand to SEQ ID NO: 880682
cuugucauagggaauaaca

SEQ ID NO: 880684 - RNA, 19 nt, Artificial Sequence
  Description of Artificial Sequence: Synthetic oligonucleotide
  Sense strand starting at position 2658 of SEQ ID NO: 588661
agaccagcucuacaaguau

SEQ ID NO: 880685 - RNA, 19 nt, Artificial Sequence
  Description of Artificial Sequence: Synthetic oligonucleotide
  Antisense strand to SEQ ID NO: 880684
auacuuguagagcuggucu

SEQ ID NO: 880686 - RNA, 19 nt, Artificial Sequence
  Description of Artificial Sequence: Synthetic oligonucleotide
  Sense strand starting at position 2878 of SEQ ID NO: 588661
gacagaauguggccuauau

SEQ ID NO: 880687 - RNA, 19 nt, Artificial Sequence
  Description of Artificial Sequence: Synthetic oligonucleotide
  Antisense strand to SEQ ID NO: 880686
auauaggccacauucuguc

SEQ ID NO: 880688 - RNA, 19 nt, Artificial Sequence
  Description of Artificial Sequence: Synthetic oligonucleotide
  Sense strand starting at position 2880 of SEQ ID NO: 588661
cagaauguggccuauaugu

SEQ ID NO: 880689 - RNA, 19 nt, Artificial Sequence
  Description of Artificial Sequence: Synthetic oligonucleotide
  Antisense strand to SEQ ID NO: 880688
acauauaggccacauucug

SEQ ID NO: 880690 - RNA, 19 nt, Artificial Sequence
  Description of Artificial Sequence: Synthetic oligonucleotide
  Sense strand starting at position 2882 of SEQ ID NO: 588661
gaauguggccuauauguac

SEQ ID NO: 880691 - RNA, 19 nt, Artificial Sequence
  Description of Artificial Sequence: Synthetic oligonucleotide
  Antisense strand to SEQ ID NO: 880690
guacauauaggccacauuc

SEQ ID NO: 880692 - RNA, 19 nt, Artificial Sequence
  Description of Artificial Sequence: Synthetic oligonucleotide
  Sense strand starting at position 3162 of SEQ ID NO: 588661
gacauugguuuaucuauag

SEQ ID NO: 880693 - RNA, 19 nt, Artificial Sequence
  Description of Artificial Sequence: Synthetic oligonucleotide
  Antisense strand to SEQ ID NO: 880692
cuauagauaaaccaauguc

SEQ ID NO: 880694 - RNA, 19 nt, Artificial Sequence
  Description of Artificial Sequence: Synthetic oligonucleotide
  Sense strand starting at position 3166 of SEQ ID NO: 588661
uugguuuaucuauagugau

SEQ ID NO: 880695 - RNA, 19 nt, Artificial Sequence
  Description of Artificial Sequence: Synthetic oligonucleotide
  Antisense strand to SEQ ID NO: 880694
aucacuauagauaaaccaa

SEQ ID NO: 880696 - RNA, 19 nt, Artificial Sequence
  Description of Artificial Sequence: Synthetic oligonucleotide
  Sense strand starting at position 3185 of SEQ ID NO: 588661
uuaguagaguauccagaga

SEQ ID NO: 880697 - RNA, 19 nt, Artificial Sequence
  Description of Artificial Sequence: Synthetic oligonucleotide
  Antisense strand to SEQ ID NO: 880696
ucucuggauacucuacuaa

SEQ ID NO: 880698 - RNA, 19 nt, Artificial Sequence
  Description of Artificial Sequence: Synthetic oligonucleotide
  Sense strand starting at position 3234 of SEQ ID NO: 588661
uauuauauggacuggcuua

SEQ ID NO: 880699 - RNA, 19 nt, Artificial Sequence
  Description of Artificial Sequence: Synthetic oligonucleotide
  Antisense strand to SEQ ID NO: 880698
uaagccaguccauauaaua

SEQ ID NO: 880700 - RNA, 19 nt, Artificial Sequence
  Description of Artificial Sequence: Synthetic oligonucleotide
  Sense strand starting at position 3286 of SEQ ID NO: 588661
uuguguuugccagcauacu

SEQ ID NO: 880701 - RNA, 19 nt, Artificial Sequence
  Description of Artificial Sequence: Synthetic oligonucleotide
  Antisense strand to SEQ ID NO: 880700
aguaugcuggcaaacacaa

SEQ ID NO: 880702 - RNA, 19 nt, Artificial Sequence
  Description of Artificial Sequence: Synthetic oligonucleotide
  Sense strand starting at position 3385 of SEQ ID NO: 588661
gcuggacugcuauaauaug

SEQ ID NO: 880703 - RNA, 19 nt, Artificial Sequence
  Description of Artificial Sequence: Synthetic oligonucleotide
  Antisense strand to SEQ ID NO: 880702
cauauuauagcaguccagc

SEQ ID NO: 880704 - RNA, 19 nt, Artificial Sequence
  Description of Artificial Sequence: Synthetic oligonucleotide
  Sense strand starting at position 3392 of SEQ ID NO: 588661
ugcuauaauauggguauga

SEQ ID NO: 880705 - RNA, 19 nt, Artificial Sequence
  Description of Artificial Sequence: Synthetic oligonucleotide
  Antisense strand to SEQ ID NO: 880704
ucauacccauauuauagca

SEQ ID NO: 880706 - RNA, 19 nt, Artificial Sequence
  Description of Artificial Sequence: Synthetic oligonucleotide
  Sense strand starting at position 3393 of SEQ ID NO: 588661
gcuauaauauggguaugau

SEQ ID NO: 880707 - RNA, 19 nt, Artificial Sequence
  Description of Artificial Sequence: Synthetic oligonucleotide
  Antisense strand to SEQ ID NO: 880706
aucauacccauauuauagc

SEQ ID NO: 880708 - RNA, 19 nt, Artificial Sequence
  Description of Artificial Sequence: Synthetic oligonucleotide
  Sense strand starting at position 3735 of SEQ ID NO: 588661
gggagagcagcuuaauguu

SEQ ID NO: 880709 - RNA, 19 nt, Artificial Sequence
  Description of Artificial Sequence: Synthetic oligonucleotide
  Antisense strand to SEQ ID NO: 880708
aacauuaagcugcucuccc

SEQ ID NO: 880710 - RNA, 19 nt, Artificial Sequence
  Description of Artificial Sequence: Synthetic oligonucleotide
  Sense strand starting at position 3870 of SEQ ID NO: 588661
uuuguauguaagggacuua

SEQ ID NO: 880711 - RNA, 19 nt, Artificial Sequence
  Description of Artificial Sequence: Synthetic oligonucleotide
  Antisense strand to SEQ ID NO: 880710
uaagucccuuacauacaaa

SEQ ID NO: 880712 - RNA, 19 nt, Artificial Sequence
  Description of Artificial Sequence: Synthetic oligonucleotide
  Sense strand starting at position 3871 of SEQ ID NO: 588661
uuguauguaagggacuuau

SEQ ID NO: 880713 - RNA, 19 nt, Artificial Sequence
  Description of Artificial Sequence: Synthetic oligonucleotide
  Antisense strand to SEQ ID NO: 880712
auaagucccuuacauacaa

SEQ ID NO: 880714 - RNA, 19 nt, Artificial Sequence
  Description of Artificial Sequence: Synthetic oligonucleotide
  Sense strand starting at position 43 of SEQ ID NO: 588662
aaaguauaucaaggauguc

SEQ ID NO: 880715 - RNA, 19 nt, Artificial Sequence
  Description of Artificial Sequence: Synthetic oligonucleotide
  Antisense strand to SEQ ID NO: 880714
gacauccuugauauacuuu

SEQ ID NO: 880716 - RNA, 19 nt, Artificial Sequence
  Description of Artificial Sequence: Synthetic oligonucleotide
  Sense strand starting at position 46 of SEQ ID NO: 588662
guauaucaaggaugucuua

SEQ ID NO: 880717 - RNA, 19 nt, Artificial Sequence
  Description of Artificial Sequence: Synthetic oligonucleotide
  Antisense strand to SEQ ID NO: 880716
uaagacauccuugauauac

SEQ ID NO: 880718 - RNA, 19 nt, Artificial Sequence
  Description of Artificial Sequence: Synthetic oligonucleotide
  Sense strand starting at position 61 of SEQ ID NO: 588662
cuuauaaagcaauggcaua

SEQ ID NO: 880719 - RNA, 19 nt, Artificial Sequence
  Description of Artificial Sequence: Synthetic oligonucleotide
  Antisense strand to SEQ ID NO: 880718
uaugccauugcuuuauaag

SEQ ID NO: 880720 - RNA, 19 nt, Artificial Sequence
  Description of Artificial Sequence: Synthetic oligonucleotide
  Sense strand starting at position 98 of SEQ ID NO: 588662
aaagaaguauaugugcaaa

SEQ ID NO: 880721 - RNA, 19 nt, Artificial Sequence
  Description of Artificial Sequence: Synthetic oligonucleotide
  Antisense strand to SEQ ID NO: 880720
uuugcacauauacuucuuu

SEQ ID NO: 880722 - RNA, 19 nt, Artificial Sequence
  Description of Artificial Sequence: Synthetic oligonucleotide
  Sense strand starting at position 100 of SEQ ID NO: 588662
agaaguauaugugcaaaug

SEQ ID NO: 880723 - RNA, 19 nt, Artificial Sequence
  Description of Artificial Sequence: Synthetic oligonucleotide
  Antisense strand to SEQ ID NO: 880722
cauuugcacauauacuucu

SEQ ID NO: 880724 - RNA, 19 nt, Artificial Sequence
  Description of Artificial Sequence: Synthetic oligonucleotide
  Sense strand starting at position 101 of SEQ ID NO: 588662
gaaguauaugugcaaaugu

SEQ ID NO: 880725 - RNA, 19 nt, Artificial Sequence
  Description of Artificial Sequence: Synthetic oligonucleotide
  Antisense strand to SEQ ID NO: 880724
acauuugcacauauacuuc

SEQ ID NO: 880726 - RNA, 19 nt, Artificial Sequence
  Description of Artificial Sequence: Synthetic oligonucleotide
  Sense strand starting at position 115 of SEQ ID NO: 588662
aauguauagcuaugaggca

SEQ ID NO: 880727 - RNA, 19 nt, Artificial Sequence
  Description of Artificial Sequence: Synthetic oligonucleotide
  Antisense strand to SEQ ID NO: 880726
ugccucauagcuauacauu

SEQ ID NO: 880728 - RNA, 19 nt, Artificial Sequence
  Description of Artificial Sequence: Synthetic oligonucleotide
  Sense strand starting at position 428 of SEQ ID NO: 588662
agaugaguugguugccaau

SEQ ID NO: 880729 - RNA, 19 nt, Artificial Sequence
  Description of Artificial Sequence: Synthetic oligonucleotide
  Antisense strand to SEQ ID NO: 880728
auuggcaaccaacucaucu

SEQ ID NO: 880730 - RNA, 19 nt, Artificial Sequence
  Description of Artificial Sequence: Synthetic oligonucleotide
  Sense strand starting at position 437 of SEQ ID NO: 588662
gguugccaaucucuccaaa

SEQ ID NO: 880731 - RNA, 19 nt, Artificial Sequence
  Description of Artificial Sequence: Synthetic oligonucleotide
  Antisense strand to SEQ ID NO: 880730
uuuggagagauuggcaacc

SEQ ID NO: 880732 - RNA, 19 nt, Artificial Sequence
  Description of Artificial Sequence: Synthetic oligonucleotide
  Sense strand starting at position 582 of SEQ ID NO: 588662
uugugaaauguccauauua

SEQ ID NO: 880733 - RNA, 19 nt, Artificial Sequence
  Description of Artificial Sequence: Synthetic oligonucleotide
  Antisense strand to SEQ ID NO: 880732
uaauauggacauuucacaa

SEQ ID NO: 880734 - RNA, 19 nt, Artificial Sequence
  Description of Artificial Sequence: Synthetic oligonucleotide
  Sense strand starting at position 584 of SEQ ID NO: 588662
gugaaauguccauauuacc

SEQ ID NO: 880735 - RNA, 19 nt, Artificial Sequence
  Description of Artificial Sequence: Synthetic oligonucleotide
  Antisense strand to SEQ ID NO: 880734
gguaauauggacauuucac

SEQ ID NO: 880736 - RNA, 19 nt, Artificial Sequence
  Description of Artificial Sequence: Synthetic oligonucleotide
  Sense strand starting at position 799 of SEQ ID NO: 588662
agagcaugguacucagaua

SEQ ID NO: 880737 - RNA, 19 nt, Artificial Sequence
  Description of Artificial Sequence: Synthetic oligonucleotide
  Antisense strand to SEQ ID NO: 880736
uaucugaguaccaugcucu

SEQ ID NO: 880738 - RNA, 19 nt, Artificial Sequence
  Description of Artificial Sequence: Synthetic oligonucleotide
  Sense strand starting at position 898 of SEQ ID NO: 588662
auguaucgcaaucagagaa

SEQ ID NO: 880739 - RNA, 19 nt, Artificial Sequence
  Description of Artificial Sequence: Synthetic oligonucleotide
  Antisense strand to SEQ ID NO: 880738
uucucugauugcgauacau

SEQ ID NO: 880740 - RNA, 19 nt, Artificial Sequence
  Description of Artificial Sequence: Synthetic oligonucleotide
  Sense strand starting at position 902 of SEQ ID NO: 588662
aucgcaaucagagaagugu

SEQ ID NO: 880741 - RNA, 19 nt, Artificial Sequence
  Description of Artificial Sequence: Synthetic oligonucleotide
  Antisense strand to SEQ ID NO: 880740
acacuucucugauugcgau

SEQ ID NO: 880742 - RNA, 19 nt, Artificial Sequence
  Description of Artificial Sequence: Synthetic oligonucleotide
  Sense strand starting at position 929 of SEQ ID NO: 588662
gcuuuagaacuucgagaga

SEQ ID NO: 880743 - RNA, 19 nt, Artificial Sequence
  Description of Artificial Sequence: Synthetic oligonucleotide
  Antisense strand to SEQ ID NO: 880742
ucucucgaaguucuaaagc

SEQ ID NO: 880744 - RNA, 19 nt, Artificial Sequence
  Description of Artificial Sequence: Synthetic oligonucleotide
  Sense strand starting at position 964 of SEQ ID NO: 588662
acgagaaccuaucuguuua

SEQ ID NO: 880745 - RNA, 19 nt, Artificial Sequence
  Description of Artificial Sequence: Synthetic oligonucleotide
  Antisense strand to SEQ ID NO: 880744
uaaacagauagguucucgu

SEQ ID NO: 880746 - RNA, 19 nt, Artificial Sequence
  Description of Artificial Sequence: Synthetic oligonucleotide
  Sense strand starting at position 1136 of SEQ ID NO: 588662
gagucaucacccuguagaa

SEQ ID NO: 880747 - RNA, 19 nt, Artificial Sequence
  Description of Artificial Sequence: Synthetic oligonucleotide
  Antisense strand to SEQ ID NO: 880746
uucuacagggugaugacuc

SEQ ID NO: 880748 - RNA, 19 nt, Artificial Sequence
  Description of Artificial Sequence: Synthetic oligonucleotide
  Sense strand starting at position 1138 of SEQ ID NO: 588662
gucaucacccuguagaaua

SEQ ID NO: 880749 - RNA, 19 nt, Artificial Sequence
  Description of Artificial Sequence: Synthetic oligonucleotide
  Antisense strand to SEQ ID NO: 880748
uauucuacagggugaugac

SEQ ID NO: 880750 - RNA, 19 nt, Artificial Sequence
  Description of Artificial Sequence: Synthetic oligonucleotide
  Sense strand starting at position 1157 of SEQ ID NO: 588662
ugaauauaaguuugucagu

SEQ ID NO: 880751 - RNA, 19 nt, Artificial Sequence
  Description of Artificial Sequence: Synthetic oligonucleotide
  Antisense strand to SEQ ID NO: 880750
acugacaaacuuauauuca

SEQ ID NO: 880752 - RNA, 19 nt, Artificial Sequence
  Description of Artificial Sequence: Synthetic oligonucleotide
  Sense strand starting at position 1191 of SEQ ID NO: 588662
ugaauuaagugucucuuga

SEQ ID NO: 880753 - RNA, 19 nt, Artificial Sequence
  Description of Artificial Sequence: Synthetic oligonucleotide
  Antisense strand to SEQ ID NO: 880752
ucaagagacacuuaauuca

SEQ ID NO: 880754 - RNA, 19 nt, Artificial Sequence
  Description of Artificial Sequence: Synthetic oligonucleotide
  Sense strand starting at position 1193 of SEQ ID NO: 588662
aauuaagugucucuugaga

SEQ ID NO: 880755 - RNA, 19 nt, Artificial Sequence
  Description of Artificial Sequence: Synthetic oligonucleotide
  Antisense strand to SEQ ID NO: 880754
ucucaagagacacuuaauu

SEQ ID NO: 880756 - RNA, 19 nt, Artificial Sequence
  Description of Artificial Sequence: Synthetic oligonucleotide
  Sense strand starting at position 1406 of SEQ ID NO: 588662
ggaugaacucauugccuga

SEQ ID NO: 880757 - RNA, 19 nt, Artificial Sequence
  Description of Artificial Sequence: Synthetic oligonucleotide
  Antisense strand to SEQ ID NO: 880756
ucaggcaaugaguucaucc

SEQ ID NO: 880758 - RNA, 19 nt, Artificial Sequence
  Description of Artificial Sequence: Synthetic oligonucleotide
  Sense strand starting at position 1408 of SEQ ID NO: 588662
augaacucauugccugaga

SEQ ID NO: 880759 - RNA, 19 nt, Artificial Sequence
  Description of Artificial Sequence: Synthetic oligonucleotide
  Antisense strand to SEQ ID NO: 880758
ucucaggcaaugaguucau

SEQ ID NO: 880760 - RNA, 19 nt, Artificial Sequence
  Description of Artificial Sequence: Synthetic oligonucleotide
  Sense strand starting at position 1409 of SEQ ID NO: 588662
ugaacucauugccugagau

SEQ ID NO: 880761 - RNA, 19 nt, Artificial Sequence
  Description of Artificial Sequence: Synthetic oligonucleotide
  Antisense strand to SEQ ID NO: 880760
aucucaggcaaugaguuca

SEQ ID NO: 880762 - RNA, 19 nt, Artificial Sequence
  Description of Artificial Sequence: Synthetic oligonucleotide
  Sense strand starting at position 1520 of SEQ ID NO: 588662
cuguuuguacugcagaauu

SEQ ID NO: 880763 - RNA, 19 nt, Artificial Sequence
  Description of Artificial Sequence: Synthetic oligonucleotide
  Antisense strand to SEQ ID NO: 880762
aauucugcaguacaaacag

SEQ ID NO: 880764 - RNA, 19 nt, Artificial Sequence
  Description of Artificial Sequence: Synthetic oligonucleotide
  Sense strand starting at position 1522 of SEQ ID NO: 588662
guuuguacugcagaauuga

SEQ ID NO: 880765 - RNA, 19 nt, Artificial Sequence
  Description of Artificial Sequence: Synthetic oligonucleotide
  Antisense strand to SEQ ID NO: 880764
ucaauucugcaguacaaac

SEQ ID NO: 880766 - RNA, 19 nt, Artificial Sequence
  Description of Artificial Sequence: Synthetic oligonucleotide
  Sense strand starting at position 2072 of SEQ ID NO: 588662
gcaugugucaaugaauaug

SEQ ID NO: 880767 - RNA, 19 nt, Artificial Sequence
  Description of Artificial Sequence: Synthetic oligonucleotide
  Antisense strand to SEQ ID NO: 880766
cauauucauugacacaugc

SEQ ID NO: 880768 - RNA, 19 nt, Artificial Sequence
  Description of Artificial Sequence: Synthetic oligonucleotide
  Sense strand starting at position 2090 of SEQ ID NO: 588662
gugccauaauucccaagga

SEQ ID NO: 880769 - RNA, 19 nt, Artificial Sequence
  Description of Artificial Sequence: Synthetic oligonucleotide
  Antisense strand to SEQ ID NO: 880768
uccuugggaauuauggcac

SEQ ID NO: 880770 - RNA, 19 nt, Artificial Sequence
  Description of Artificial Sequence: Synthetic oligonucleotide
  Sense strand starting at position 2313 of SEQ ID NO: 588662
ggguauuaguauccauauu

SEQ ID NO: 880771 - RNA, 19 nt, Artificial Sequence
  Description of Artificial Sequence: Synthetic oligonucleotide
  Antisense strand to SEQ ID NO: 880770
aauauggauacuaauaccc

SEQ ID NO: 880772 - RNA, 19 nt, Artificial Sequence
  Description of Artificial Sequence: Synthetic oligonucleotide
  Sense strand starting at position 2345 of SEQ ID NO: 588662
aaucaaagcggauauguua

SEQ ID NO: 880773 - RNA, 19 nt, Artificial Sequence
  Description of Artificial Sequence: Synthetic oligonucleotide
  Antisense strand to SEQ ID NO: 880772
uaacauauccgcuuugauu

SEQ ID NO: 880774 - RNA, 19 nt, Artificial Sequence
  Description of Artificial Sequence: Synthetic oligonucleotide
  Sense strand starting at position 2353 of SEQ ID NO: 588662
cggauauguuaaguaaacu

SEQ ID NO: 880775 - RNA, 19 nt, Artificial Sequence
  Description of Artificial Sequence: Synthetic oligonucleotide
  Antisense strand to SEQ ID NO: 880774
aguuuacuuaacauauccg

SEQ ID NO: 880776 - RNA, 19 nt, Artificial Sequence
  Description of Artificial Sequence: Synthetic oligonucleotide
  Sense strand starting at position 2412 of SEQ ID NO: 588662
accgaaauauuccuguuga

SEQ ID NO: 880777 - RNA, 19 nt, Artificial Sequence
  Description of Artificial Sequence: Synthetic oligonucleotide
  Antisense strand to SEQ ID NO: 880776
ucaacaggaauauuucggu

SEQ ID NO: 880778 - RNA, 19 nt, Artificial Sequence
  Description of Artificial Sequence: Synthetic oligonucleotide
  Sense strand starting at position 2686 of SEQ ID NO: 588662
aacagacaccgagguaaau

SEQ ID NO: 880779 - RNA, 19 nt, Artificial Sequence
  Description of Artificial Sequence: Synthetic oligonucleotide
  Antisense strand to SEQ ID NO: 880778
auuuaccucggugucuguu

SEQ ID NO: 880780 - RNA, 19 nt, Artificial Sequence
  Description of Artificial Sequence: Synthetic oligonucleotide
  Sense strand starting at position 2824 of SEQ ID NO: 588662
aaagcaagccuaugaggua

SEQ ID NO: 880781 - RNA, 19 nt, Artificial Sequence
  Description of Artificial Sequence: Synthetic oligonucleotide
  Antisense strand to SEQ ID NO: 880780
uaccucauaggcuugcuuu

SEQ ID NO: 880782 - RNA, 19 nt, Artificial Sequence
  Description of Artificial Sequence: Synthetic oligonucleotide
  Sense strand starting at position 3066 of SEQ ID NO: 588662
uggcucaugggcuagaaua

SEQ ID NO: 880783 - RNA, 19 nt, Artificial Sequence
  Description of Artificial Sequence: Synthetic oligonucleotide
  Antisense strand to SEQ ID NO: 880782
uauucuagcccaugagcca

SEQ ID NO: 880784 - RNA, 19 nt, Artificial Sequence
  Description of Artificial Sequence: Synthetic oligonucleotide
  Sense strand starting at position 3074 of SEQ ID NO: 588662
gggcuagaauaucuugcaa

SEQ ID NO: 880785 - RNA, 19 nt, Artificial Sequence
  Description of Artificial Sequence: Synthetic oligonucleotide
  Antisense strand to SEQ ID NO: 880784
uugcaagauauucuagccc

SEQ ID NO: 880786 - RNA, 19 nt, Artificial Sequence
  Description of Artificial Sequence: Synthetic oligonucleotide
  Sense strand starting at position 3135 of SEQ ID NO: 588662
aaaugugauuggucaguaa

SEQ ID NO: 880787 - RNA, 19 nt, Artificial Sequence
  Description of Artificial Sequence: Synthetic oligonucleotide
  Antisense strand to SEQ ID NO: 880786
uuacugaccaaucacauuu

SEQ ID NO: 880788 - RNA, 19 nt, Artificial Sequence
  Description of Artificial Sequence: Synthetic oligonucleotide
  Sense strand starting at position 3562 of SEQ ID NO: 588662
ccuucuuacucgucuauuu

SEQ ID NO: 880789 - RNA, 19 nt, Artificial Sequence
  Description of Artificial Sequence: Synthetic oligonucleotide
  Antisense strand to SEQ ID NO: 880788
aaauagacgaguaagaagg

SEQ ID NO: 880790 - RNA, 19 nt, Artificial Sequence
  Description of Artificial Sequence: Synthetic oligonucleotide
  Sense strand starting at position 3676 of SEQ ID NO: 588662
uuuguaaaguuccucugaa

SEQ ID NO: 880791 - RNA, 19 nt, Artificial Sequence
  Description of Artificial Sequence: Synthetic oligonucleotide
  Antisense strand to SEQ ID NO: 880790
uucagaggaacuuuacaaa

SEQ ID NO: 880792 - RNA, 19 nt, Artificial Sequence
  Description of Artificial Sequence: Synthetic oligonucleotide
  Sense strand starting at position 3677 of SEQ ID NO: 588662
uuguaaaguuccucugaaa

SEQ ID NO: 880793 - RNA, 19 nt, Artificial Sequence
  Description of Artificial Sequence: Synthetic oligonucleotide
  Antisense strand to SEQ ID NO: 880792
uuucagaggaacuuuacaa

SEQ ID NO: 880794 - RNA, 19 nt, Artificial Sequence
  Description of Artificial Sequence: Synthetic oligonucleotide
  Sense strand starting at position 57 of SEQ ID NO: 588663
uuagcuauuaaggagugua

SEQ ID NO: 880795 - RNA, 19 nt, Artificial Sequence
  Description of Artificial Sequence: Synthetic oligonucleotide
  Antisense strand to SEQ ID NO: 880794
uacacuccuuaauagcuaa

SEQ ID NO: 880796 - RNA, 19 nt, Artificial Sequence
  Description of Artificial Sequence: Synthetic oligonucleotide
  Sense strand starting at position 60 of SEQ ID NO: 588663
gcuauuaaggaguguauau

SEQ ID NO: 880797 - RNA, 19 nt, Artificial Sequence
  Description of Artificial Sequence: Synthetic oligonucleotide
  Antisense strand to SEQ ID NO: 880796
auauacacuccuuaauagc

SEQ ID NO: 880798 - RNA, 19 nt, Artificial Sequence
  Description of Artificial Sequence: Synthetic oligonucleotide
  Sense strand starting at position 69 of SEQ ID NO: 588663
gaguguauaugacuaaaug

SEQ ID NO: 880799 - RNA, 19 nt, Artificial Sequence
  Description of Artificial Sequence: Synthetic oligonucleotide
  Antisense strand to SEQ ID NO: 880798
cauuuagucauauacacuc

SEQ ID NO: 880800 - RNA, 19 nt, Artificial Sequence
  Description of Artificial Sequence: Synthetic oligonucleotide
  Sense strand starting at position 70 of SEQ ID NO: 588663
aguguauaugacuaaaugu

SEQ ID NO: 880801 - RNA, 19 nt, Artificial Sequence
  Description of Artificial Sequence: Synthetic oligonucleotide
  Antisense strand to SEQ ID NO: 880800
acauuuagucauauacacu

SEQ ID NO: 880802 - RNA, 19 nt, Artificial Sequence
  Description of Artificial Sequence: Synthetic oligonucleotide
  Sense strand starting at position 234 of SEQ ID NO: 588663
ugugucaggcucuauuaca

SEQ ID NO: 880803 - RNA, 19 nt, Artificial Sequence
  Description of Artificial Sequence: Synthetic oligonucleotide
  Antisense strand to SEQ ID NO: 880802
uguaauagagccugacaca

SEQ ID NO: 880804 - RNA, 19 nt, Artificial Sequence
  Description of Artificial Sequence: Synthetic oligonucleotide
  Sense strand starting at position 260 of SEQ ID NO: 588663
uuggauguuguaggguaau

SEQ ID NO: 880805 - RNA, 19 nt, Artificial Sequence
  Description of Artificial Sequence: Synthetic oligonucleotide
  Antisense strand to SEQ ID NO: 880804
auuacccuacaacauccaa

SEQ ID NO: 880806 - RNA, 19 nt, Artificial Sequence
  Description of Artificial Sequence: Synthetic oligonucleotide
  Sense strand starting at position 263 of SEQ ID NO: 588663
gauguuguaggguaauaaa

SEQ ID NO: 880807 - RNA, 19 nt, Artificial Sequence
  Description of Artificial Sequence: Synthetic oligonucleotide
  Antisense strand to SEQ ID NO: 880806
uuuauuacccuacaacauc

SEQ ID NO: 880808 - RNA, 19 nt, Artificial Sequence
  Description of Artificial Sequence: Synthetic oligonucleotide
  Sense strand starting at position 305 of SEQ ID NO: 588663
agcuuauauguguagugga

SEQ ID NO: 880809 - RNA, 19 nt, Artificial Sequence
  Description of Artificial Sequence: Synthetic oligonucleotide
  Antisense strand to SEQ ID NO: 880808
uccacuacacauauaagcu

SEQ ID NO: 880810 - RNA, 19 nt, Artificial Sequence
  Description of Artificial Sequence: Synthetic oligonucleotide
  Sense strand starting at position 312 of SEQ ID NO: 588663
auguguaguggacaaugua

SEQ ID NO: 880811 - RNA, 19 nt, Artificial Sequence
  Description of Artificial Sequence: Synthetic oligonucleotide
  Antisense strand to SEQ ID NO: 880810
uacauuguccacuacacau

SEQ ID NO: 880812 - RNA, 19 nt, Artificial Sequence
  Description of Artificial Sequence: Synthetic oligonucleotide
  Sense strand starting at position 368 of SEQ ID NO: 588663
acaucauguggugauuaau

SEQ ID NO: 880813 - RNA, 19 nt, Artificial Sequence
  Description of Artificial Sequence: Synthetic oligonucleotide
  Antisense strand to SEQ ID NO: 880812
auuaaucaccacaugaugu

SEQ ID NO: 880814 - RNA, 19 nt, Artificial Sequence
  Description of Artificial Sequence: Synthetic oligonucleotide
  Sense strand starting at position 371 of SEQ ID NO: 588663
ucauguggugauuaauauu

SEQ ID NO: 880815 - RNA, 19 nt, Artificial Sequence
  Description of Artificial Sequence: Synthetic oligonucleotide
  Antisense strand to SEQ ID NO: 880814
aauauuaaucaccacauga

SEQ ID NO: 880816 - RNA, 19 nt, Artificial Sequence
  Description of Artificial Sequence: Synthetic oligonucleotide
  Sense strand starting at position 523 of SEQ ID NO: 588663
auuuauccaugauaguaug

SEQ ID NO: 880817 - RNA, 19 nt, Artificial Sequence
  Description of Artificial Sequence: Synthetic oligonucleotide
  Antisense strand to SEQ ID NO: 880816
cauacuaucauggauaaau

SEQ ID NO: 880818 - RNA, 19 nt, Artificial Sequence
  Description of Artificial Sequence: Synthetic oligonucleotide
  Sense strand starting at position 1016 of SEQ ID NO: 588663
agucauguaguauaaauca

SEQ ID NO: 880819 - RNA, 19 nt, Artificial Sequence
  Description of Artificial Sequence: Synthetic oligonucleotide
  Antisense strand to SEQ ID NO: 880818
ugauuuauacuacaugacu

SEQ ID NO: 880820 - RNA, 19 nt, Artificial Sequence
  Description of Artificial Sequence: Synthetic oligonucleotide
  Sense strand starting at position 1989 of SEQ ID NO: 588663
ugguccuuuccauauuaca

SEQ ID NO: 880821 - RNA, 19 nt, Artificial Sequence
  Description of Artificial Sequence: Synthetic oligonucleotide
  Antisense strand to SEQ ID NO: 880820
uguaauauggaaaggacca

SEQ ID NO: 880822 - RNA, 19 nt, Artificial Sequence
  Description of Artificial Sequence: Synthetic oligonucleotide
  Sense strand starting at position 2019 of SEQ ID NO: 588663
ccaacagaacucugugaau

SEQ ID NO: 880823 - RNA, 19 nt, Artificial Sequence
  Description of Artificial Sequence: Synthetic oligonucleotide
  Antisense strand to SEQ ID NO: 880822
auucacagaguucuguugg

SEQ ID NO: 880824 - RNA, 19 nt, Artificial Sequence
  Description of Artificial Sequence: Synthetic oligonucleotide
  Sense strand starting at position 2056 of SEQ ID NO: 588663
uaauacagugucugugaga

SEQ ID NO: 880825 - RNA, 19 nt, Artificial Sequence
  Description of Artificial Sequence: Synthetic oligonucleotide
  Antisense strand to SEQ ID NO: 880824
ucucacagacacuguauua

SEQ ID NO: 880826 - RNA, 19 nt, Artificial Sequence
  Description of Artificial Sequence: Synthetic oligonucleotide
  Sense strand starting at position 2685 of SEQ ID NO: 588663
cggccuagagaucaacauu

SEQ ID NO: 880827 - RNA, 19 nt, Artificial Sequence
  Description of Artificial Sequence: Synthetic oligonucleotide
  Antisense strand to SEQ ID NO: 880826
aauguugaucucuaggccg

SEQ ID NO: 880828 - RNA, 19 nt, Artificial Sequence
  Description of Artificial Sequence: Synthetic oligonucleotide
  Sense strand starting at position 2784 of SEQ ID NO: 588663
guuucugucauggagcuua

SEQ ID NO: 880829 - RNA, 19 nt, Artificial Sequence
  Description of Artificial Sequence: Synthetic oligonucleotide
  Antisense strand to SEQ ID NO: 880828
uaagcuccaugacagaaac

SEQ ID NO: 880830 - RNA, 19 nt, Artificial Sequence
  Description of Artificial Sequence: Synthetic oligonucleotide
  Sense strand starting at position 2789 of SEQ ID NO: 588663
ugucauggagcuuaguuau

SEQ ID NO: 880831 - RNA, 19 nt, Artificial Sequence
  Description of Artificial Sequence: Synthetic oligonucleotide
  Antisense strand to SEQ ID NO: 880830
auaacuaagcuccaugaca

SEQ ID NO: 880832 - RNA, 19 nt, Artificial Sequence
  Description of Artificial Sequence: Synthetic oligonucleotide
  Sense strand starting at position 2792 of SEQ ID NO: 588663
cauggagcuuaguuauauu

SEQ ID NO: 880833 - RNA, 19 nt, Artificial Sequence
  Description of Artificial Sequence: Synthetic oligonucleotide
  Antisense strand to SEQ ID NO: 880832
aauauaacuaagcuccaug

SEQ ID NO: 880834 - RNA, 19 nt, Artificial Sequence
  Description of Artificial Sequence: Synthetic oligonucleotide
  Sense strand starting at position 2876 of SEQ ID NO: 588663
ugucacuggaggugaauau

SEQ ID NO: 880835 - RNA, 19 nt, Artificial Sequence
  Description of Artificial Sequence: Synthetic oligonucleotide
  Antisense strand to SEQ ID NO: 880834
auauucaccuccagugaca

SEQ ID NO: 880836 - RNA, 19 nt, Artificial Sequence
  Description of Artificial Sequence: Synthetic oligonucleotide
  Sense strand starting at position 2885 of SEQ ID NO: 588663
aggugaauauaaguuauca

SEQ ID NO: 880837 - RNA, 19 nt, Artificial Sequence
  Description of Artificial Sequence: Synthetic oligonucleotide
  Antisense strand to SEQ ID NO: 880836
ugauaacuuauauucaccu

SEQ ID NO: 880838 - RNA, 19 nt, Artificial Sequence
  Description of Artificial Sequence: Synthetic oligonucleotide
  Sense strand starting at position 2905 of SEQ ID NO: 588663
uuaacauguuagucucaug

SEQ ID NO: 880839 - RNA, 19 nt, Artificial Sequence
  Description of Artificial Sequence: Synthetic oligonucleotide
  Antisense strand to SEQ ID NO: 880838
caugagacuaacauguuaa

SEQ ID NO: 880840 - RNA, 19 nt, Artificial Sequence
  Description of Artificial Sequence: Synthetic oligonucleotide
  Sense strand starting at position 2915 of SEQ ID NO: 588663
agucucauguuauucucaa

SEQ ID NO: 880841 - RNA, 19 nt, Artificial Sequence
  Description of Artificial Sequence: Synthetic oligonucleotide
  Antisense strand to SEQ ID NO: 880840
uugagaauaacaugagacu

SEQ ID NO: 880842 - RNA, 19 nt, Artificial Sequence
  Description of Artificial Sequence: Synthetic oligonucleotide
  Sense strand starting at position 2928 of SEQ ID NO: 588663
ucucaauuguuggucucaa

SEQ ID NO: 880843 - RNA, 19 nt, Artificial Sequence
  Description of Artificial Sequence: Synthetic oligonucleotide
  Antisense strand to SEQ ID NO: 880842
uugagaccaacaauugaga

SEQ ID NO: 880844 - RNA, 19 nt, Artificial Sequence
  Description of Artificial Sequence: Synthetic oligonucleotide
  Sense strand starting at position 2929 of SEQ ID NO: 588663
cucaauuguuggucucaau

SEQ ID NO: 880845 - RNA, 19 nt, Artificial Sequence
  Description of Artificial Sequence: Synthetic oligonucleotide
  Antisense strand to SEQ ID NO: 880844
auugagaccaacaauugag

SEQ ID NO: 880846 - RNA, 19 nt, Artificial Sequence
  Description of Artificial Sequence: Synthetic oligonucleotide
  Sense strand starting at position 2938 of SEQ ID NO: 588663
uggucucaauuguuuauau

SEQ ID NO: 880847 - RNA, 19 nt, Artificial Sequence
  Description of Artificial Sequence: Synthetic oligonucleotide
  Antisense strand to SEQ ID NO: 880846
auauaaacaauugagacca

SEQ ID NO: 880848 - RNA, 19 nt, Artificial Sequence
  Description of Artificial Sequence: Synthetic oligonucleotide
  Sense strand starting at position 2939 of SEQ ID NO: 588663
ggucucaauuguuuauauu

SEQ ID NO: 880849 - RNA, 19 nt, Artificial Sequence
  Description of Artificial Sequence: Synthetic oligonucleotide
  Antisense strand to SEQ ID NO: 880848
aauauaaacaauugagacc

SEQ ID NO: 880850 - RNA, 19 nt, Artificial Sequence
  Description of Artificial Sequence: Synthetic oligonucleotide
  Sense strand starting at position 2950 of SEQ ID NO: 588663
uuuauauuaccuggcagga

SEQ ID NO: 880851 - RNA, 19 nt, Artificial Sequence
  Description of Artificial Sequence: Synthetic oligonucleotide
  Antisense strand to SEQ ID NO: 880850
uccugccagguaauauaaa

SEQ ID NO: 880852 - RNA, 19 nt, Artificial Sequence
  Description of Artificial Sequence: Synthetic oligonucleotide
  Sense strand starting at position 2983 of SEQ ID NO: 588663
ggaaucuugacuuauggcu

SEQ ID NO: 880853 - RNA, 19 nt, Artificial Sequence
  Description of Artificial Sequence: Synthetic oligonucleotide
  Antisense strand to SEQ ID NO: 880852
agccauaagucaagauucc

SEQ ID NO: 880854 - RNA, 19 nt, Artificial Sequence
  Description of Artificial Sequence: Synthetic oligonucleotide
  Sense strand starting at position 3134 of SEQ ID NO: 588663
uguaacaaugcagaaguaa

SEQ ID NO: 880855 - RNA, 19 nt, Artificial Sequence
  Description of Artificial Sequence: Synthetic oligonucleotide
  Antisense strand to SEQ ID NO: 880854
uuacuucugcauuguuaca

SEQ ID NO: 880856 - RNA, 19 nt, Artificial Sequence
  Description of Artificial Sequence: Synthetic oligonucleotide
  Sense strand starting at position 3298 of SEQ ID NO: 588663
uauaguagugguuauguau

SEQ ID NO: 880857 - RNA, 19 nt, Artificial Sequence
  Description of Artificial Sequence: Synthetic oligonucleotide
  Antisense strand to SEQ ID NO: 880856
auacauaaccacuacuaua

SEQ ID NO: 880858 - RNA, 19 nt, Artificial Sequence
  Description of Artificial Sequence: Synthetic oligonucleotide
  Sense strand starting at position 3338 of SEQ ID NO: 588663
agaguaaccucguugagaa

SEQ ID NO: 880859 - RNA, 19 nt, Artificial Sequence
  Description of Artificial Sequence: Synthetic oligonucleotide
  Antisense strand to SEQ ID NO: 880858
uucucaacgagguuacucu

SEQ ID NO: 880860 - RNA, 19 nt, Artificial Sequence
  Description of Artificial Sequence: Synthetic oligonucleotide
  Sense strand starting at position 3339 of SEQ ID NO: 588663
gaguaaccucguugagaaa

SEQ ID NO: 880861 - RNA, 19 nt, Artificial Sequence
  Description of Artificial Sequence: Synthetic oligonucleotide
  Antisense strand to SEQ ID NO: 880860
uuucucaacgagguuacuc

SEQ ID NO: 880862 - RNA, 19 nt, Artificial Sequence
  Description of Artificial Sequence: Synthetic oligonucleotide
  Sense strand starting at position 3774 of SEQ ID NO: 588663
agaggauuccagggagcau

SEQ ID NO: 880863 - RNA, 19 nt, Artificial Sequence
  Description of Artificial Sequence: Synthetic oligonucleotide
  Antisense strand to SEQ ID NO: 880862
augcucccuggaauccucu

SEQ ID NO: 880864 - RNA, 19 nt, Artificial Sequence
  Description of Artificial Sequence: Synthetic oligonucleotide
  Sense strand starting at position 3803 of SEQ ID NO: 588663
ucgucaaugcaauacauaa

SEQ ID NO: 880865 - RNA, 19 nt, Artificial Sequence
  Description of Artificial Sequence: Synthetic oligonucleotide
  Antisense strand to SEQ ID NO: 880864
uuauguauugcauugacga

SEQ ID NO: 880866 - RNA, 19 nt, Artificial Sequence
  Description of Artificial Sequence: Synthetic oligonucleotide
  Sense strand starting at position 3860 of SEQ ID NO: 588663
uuauguauugauuaugcca

SEQ ID NO: 880867 - RNA, 19 nt, Artificial Sequence
  Description of Artificial Sequence: Synthetic oligonucleotide
  Antisense strand to SEQ ID NO: 880866
uggcauaaucaauacauaa

SEQ ID NO: 880868 - RNA, 19 nt, Artificial Sequence
  Description of Artificial Sequence: Synthetic oligonucleotide
  Sense strand starting at position 3863 of SEQ ID NO: 588663
uguauugauuaugccagau

SEQ ID NO: 880869 - RNA, 19 nt, Artificial Sequence
  Description of Artificial Sequence: Synthetic oligonucleotide
  Antisense strand to SEQ ID NO: 880868
aucuggcauaaucaauaca

SEQ ID NO: 880870 - RNA, 19 nt, Artificial Sequence
  Description of Artificial Sequence: Synthetic oligonucleotide
  Sense strand starting at position 3867 of SEQ ID NO: 588663
uugauuaugccagauacau

SEQ ID NO: 880871 - RNA, 19 nt, Artificial Sequence
  Description of Artificial Sequence: Synthetic oligonucleotide
  Antisense strand to SEQ ID NO: 880870
auguaucuggcauaaucaa

SEQ ID NO: 880872 - RNA, 19 nt, Artificial Sequence
  Description of Artificial Sequence: Synthetic oligonucleotide
  Sense strand starting at position 3925 of SEQ ID NO: 588663
acuauuauuguaggagaua

SEQ ID NO: 880873 - RNA, 19 nt, Artificial Sequence
  Description of Artificial Sequence: Synthetic oligonucleotide
  Antisense strand to SEQ ID NO: 880872
uaucuccuacaauaauagu

SEQ ID NO: 880874 - RNA, 19 nt, Artificial Sequence
  Description of Artificial Sequence: Synthetic oligonucleotide
  Sense strand starting at position 95 of SEQ ID NO: 588664
gcaagauaaugucugacau

SEQ ID NO: 880875 - RNA, 19 nt, Artificial Sequence
  Description of Artificial Sequence: Synthetic oligonucleotide
  Antisense strand to SEQ ID NO: 880874
augucagacauuaucuugc

SEQ ID NO: 880876 - RNA, 19 nt, Artificial Sequence
  Description of Artificial Sequence: Synthetic oligonucleotide
  Sense strand starting at position 135 of SEQ ID NO: 588664
aaauuaagcugguuaguaa

SEQ ID NO: 880877 - RNA, 19 nt, Artificial Sequence
  Description of Artificial Sequence: Synthetic oligonucleotide
  Antisense strand to SEQ ID NO: 880876
uuacuaaccagcuuaauuu

SEQ ID NO: 880878 - RNA, 19 nt, Artificial Sequence
  Description of Artificial Sequence: Synthetic oligonucleotide
  Sense strand starting at position 227 of SEQ ID NO: 588664
uuggaauucccucgggaua

SEQ ID NO: 880879 - RNA, 19 nt, Artificial Sequence
  Description of Artificial Sequence: Synthetic oligonucleotide
  Antisense strand to SEQ ID NO: 880878
uaucccgagggaauuccaa

SEQ ID NO: 880880 - RNA, 19 nt, Artificial Sequence
  Description of Artificial Sequence: Synthetic oligonucleotide
  Sense strand starting at position 228 of SEQ ID NO: 588664
uggaauucccucgggauag

SEQ ID NO: 880881 - RNA, 19 nt, Artificial Sequence
  Description of Artificial Sequence: Synthetic oligonucleotide
  Antisense strand to SEQ ID NO: 880880
cuaucccgagggaauucca

SEQ ID NO: 880882 - RNA, 19 nt, Artificial Sequence
  Description of Artificial Sequence: Synthetic oligonucleotide
  Sense strand starting at position 271 of SEQ ID NO: 588664
ugggcauugauaggacacu

SEQ ID NO: 880883 - RNA, 19 nt, Artificial Sequence
  Description of Artificial Sequence: Synthetic oligonucleotide
  Antisense strand to SEQ ID NO: 880882
aguguccuaucaaugccca

SEQ ID NO: 880884 - RNA, 19 nt, Artificial Sequence
  Description of Artificial Sequence: Synthetic oligonucleotide
  Sense strand starting at position 420 of SEQ ID NO: 588664
gcaggauaucccgauugau

SEQ ID NO: 880885 - RNA, 19 nt, Artificial Sequence
  Description of Artificial Sequence: Synthetic oligonucleotide
  Antisense strand to SEQ ID NO: 880884
aucaaucgggauauccugc

SEQ ID NO: 880886 - RNA, 19 nt, Artificial Sequence
  Description of Artificial Sequence: Synthetic oligonucleotide
  Sense strand starting at position 606 of SEQ ID NO: 588664
augugagugcaguauauug

SEQ ID NO: 880887 - RNA, 19 nt, Artificial Sequence
  Description of Artificial Sequence: Synthetic oligonucleotide
  Antisense strand to SEQ ID NO: 880886
caauauacugcacucacau

SEQ ID NO: 880888 - RNA, 19 nt, Artificial Sequence
  Description of Artificial Sequence: Synthetic oligonucleotide
  Sense strand starting at position 683 of SEQ ID NO: 588664
aaugaaauguugccuauga

SEQ ID NO: 880889 - RNA, 19 nt, Artificial Sequence
  Description of Artificial Sequence: Synthetic oligonucleotide
  Antisense strand to SEQ ID NO: 880888
ucauaggcaacauuucauu

SEQ ID NO: 880890 - RNA, 19 nt, Artificial Sequence
  Description of Artificial Sequence: Synthetic oligonucleotide
  Sense strand starting at position 817 of SEQ ID NO: 588664
auuucccacuauuagagua

SEQ ID NO: 880891 - RNA, 19 nt, Artificial Sequence
  Description of Artificial Sequence: Synthetic oligonucleotide
  Antisense strand to SEQ ID NO: 880890
uacucuaauagugggaaau

SEQ ID NO: 880892 - RNA, 19 nt, Artificial Sequence
  Description of Artificial Sequence: Synthetic oligonucleotide
  Sense strand starting at position 1370 of SEQ ID NO: 588664
guggcaucaaugugaacaa

SEQ ID NO: 880893 - RNA, 19 nt, Artificial Sequence
  Description of Artificial Sequence: Synthetic oligonucleotide
  Antisense strand to SEQ ID NO: 880892
uuguucacauugaugccac

SEQ ID NO: 880894 - RNA, 19 nt, Artificial Sequence
  Description of Artificial Sequence: Synthetic oligonucleotide
  Sense strand starting at position 1385 of SEQ ID NO: 588664
acaauauuguggccacaag

SEQ ID NO: 880895 - RNA, 19 nt, Artificial Sequence
  Description of Artificial Sequence: Synthetic oligonucleotide
  Antisense strand to SEQ ID NO: 880894
cuuguggccacaauauugu

SEQ ID NO: 880896 - RNA, 19 nt, Artificial Sequence
  Description of Artificial Sequence: Synthetic oligonucleotide
  Sense strand starting at position 1406 of SEQ ID NO: 588664
ugaggaacucauugccuga

SEQ ID NO: 880897 - RNA, 19 nt, Artificial Sequence
  Description of Artificial Sequence: Synthetic oligonucleotide
  Antisense strand to SEQ ID NO: 880896
ucaggcaaugaguuccuca

SEQ ID NO: 880898 - RNA, 19 nt, Artificial Sequence
  Description of Artificial Sequence: Synthetic oligonucleotide
  Sense strand starting at position 1408 of SEQ ID NO: 588664
aggaacucauugccugaga

SEQ ID NO: 880899 - RNA, 19 nt, Artificial Sequence
  Description of Artificial Sequence: Synthetic oligonucleotide
  Antisense strand to SEQ ID NO: 880898
ucucaggcaaugaguuccu

SEQ ID NO: 880900 - RNA, 19 nt, Artificial Sequence
  Description of Artificial Sequence: Synthetic oligonucleotide
  Sense strand starting at position 1409 of SEQ ID NO: 588664
ggaacucauugccugagau

SEQ ID NO: 880901 - RNA, 19 nt, Artificial Sequence
  Description of Artificial Sequence: Synthetic oligonucleotide
  Antisense strand to SEQ ID NO: 880900
aucucaggcaaugaguucc

SEQ ID NO: 880902 - RNA, 19 nt, Artificial Sequence
  Description of Artificial Sequence: Synthetic oligonucleotide
  Sense strand starting at position 1480 of SEQ ID NO: 588664
augacauucuuccugcaga

SEQ ID NO: 880903 - RNA, 19 nt, Artificial Sequence
  Description of Artificial Sequence: Synthetic oligonucleotide
  Antisense strand to SEQ ID NO: 880902
ucugcaggaagaaugucau

SEQ ID NO: 880904 - RNA, 19 nt, Artificial Sequence
  Description of Artificial Sequence: Synthetic oligonucleotide
  Sense strand starting at position 1483 of SEQ ID NO: 588664
acauucuuccugcagaaag

SEQ ID NO: 880905 - RNA, 19 nt, Artificial Sequence
  Description of Artificial Sequence: Synthetic oligonucleotide
  Antisense strand to SEQ ID NO: 880904
cuuucugcaggaagaaugu

SEQ ID NO: 880906 - RNA, 19 nt, Artificial Sequence
  Description of Artificial Sequence: Synthetic oligonucleotide
  Sense strand starting at position 1502 of SEQ ID NO: 588664
gcaauuguacuacaaaugu

SEQ ID NO: 880907 - RNA, 19 nt, Artificial Sequence
  Description of Artificial Sequence: Synthetic oligonucleotide
  Antisense strand to SEQ ID NO: 880906
acauuuguaguacaauugc

SEQ ID NO: 880908 - RNA, 19 nt, Artificial Sequence
  Description of Artificial Sequence: Synthetic oligonucleotide
  Sense strand starting at position 1535 of SEQ ID NO: 588664
aguugacaaucccugcaaa

SEQ ID NO: 880909 - RNA, 19 nt, Artificial Sequence
  Description of Artificial Sequence: Synthetic oligonucleotide
  Antisense strand to SEQ ID NO: 880908
uuugcagggauugucaacu

SEQ ID NO: 880910 - RNA, 19 nt, Artificial Sequence
  Description of Artificial Sequence: Synthetic oligonucleotide
  Sense strand starting at position 1581 of SEQ ID NO: 588664
ggcauucuugcucaugaug

SEQ ID NO: 880911 - RNA, 19 nt, Artificial Sequence
  Description of Artificial Sequence: Synthetic oligonucleotide
  Antisense strand to SEQ ID NO: 880910
caucaugagcaagaaugcc

SEQ ID NO: 880912 - RNA, 19 nt, Artificial Sequence
  Description of Artificial Sequence: Synthetic oligonucleotide
  Sense strand starting at position 1590 of SEQ ID NO: 588664
gcucaugaugaugggauau

SEQ ID NO: 880913 - RNA, 19 nt, Artificial Sequence
  Description of Artificial Sequence: Synthetic oligonucleotide
  Antisense strand to SEQ ID NO: 880912
auaucccaucaucaugagc

SEQ ID NO: 880914 - RNA, 19 nt, Artificial Sequence
  Description of Artificial Sequence: Synthetic oligonucleotide
  Sense strand starting at position 1721 of SEQ ID NO: 588664
aggaaauggucuuucuuuc

SEQ ID NO: 880915 - RNA, 19 nt, Artificial Sequence
  Description of Artificial Sequence: Synthetic oligonucleotide
  Antisense strand to SEQ ID NO: 880914
gaaagaaagaccauuuccu

SEQ ID NO: 880916 - RNA, 19 nt, Artificial Sequence
  Description of Artificial Sequence: Synthetic oligonucleotide
  Sense strand starting at position 1742 of SEQ ID NO: 588664
aaaggaagcucacuagugu

SEQ ID NO: 880917 - RNA, 19 nt, Artificial Sequence
  Description of Artificial Sequence: Synthetic oligonucleotide
  Antisense strand to SEQ ID NO: 880916
acacuagugagcuuccuuu

SEQ ID NO: 880918 - RNA, 19 nt, Artificial Sequence
  Description of Artificial Sequence: Synthetic oligonucleotide
  Sense strand starting at position 2227 of SEQ ID NO: 588664
acucauucuuggccaggaa

SEQ ID NO: 880919 - RNA, 19 nt, Artificial Sequence
  Description of Artificial Sequence: Synthetic oligonucleotide
  Antisense strand to SEQ ID NO: 880918
uuccuggccaagaaugagu

SEQ ID NO: 880920 - RNA, 19 nt, Artificial Sequence
  Description of Artificial Sequence: Synthetic oligonucleotide
  Sense strand starting at position 2390 of SEQ ID NO: 588664
ccauacuugccugagguuu

SEQ ID NO: 880921 - RNA, 19 nt, Artificial Sequence
  Description of Artificial Sequence: Synthetic oligonucleotide
  Antisense strand to SEQ ID NO: 880920
aaaccucaggcaaguaugg

SEQ ID NO: 880922 - RNA, 19 nt, Artificial Sequence
  Description of Artificial Sequence: Synthetic oligonucleotide
  Sense strand starting at position 2434 of SEQ ID NO: 588664
gaguguauugcauaagaga

SEQ ID NO: 880923 - RNA, 19 nt, Artificial Sequence
  Description of Artificial Sequence: Synthetic oligonucleotide
  Antisense strand to SEQ ID NO: 880922
ucucuuaugcaauacacuc

SEQ ID NO: 880924 - RNA, 19 nt, Artificial Sequence
  Description of Artificial Sequence: Synthetic oligonucleotide
  Sense strand starting at position 2524 of SEQ ID NO: 588664
cugaaagaagugugucaau

SEQ ID NO: 880925 - RNA, 19 nt, Artificial Sequence
  Description of Artificial Sequence: Synthetic oligonucleotide
  Antisense strand to SEQ ID NO: 880924
auugacacacuucuuucag

SEQ ID NO: 880926 - RNA, 19 nt, Artificial Sequence
  Description of Artificial Sequence: Synthetic oligonucleotide
  Sense strand starting at position 2535 of SEQ ID NO: 588664
gugucaaucuggagggaga

SEQ ID NO: 880927 - RNA, 19 nt, Artificial Sequence
  Description of Artificial Sequence: Synthetic oligonucleotide
  Antisense strand to SEQ ID NO: 880926
ucucccuccagauugacac

SEQ ID NO: 880928 - RNA, 19 nt, Artificial Sequence
  Description of Artificial Sequence: Synthetic oligonucleotide
  Sense strand starting at position 2621 of SEQ ID NO: 588664
uguaaagcccaauaauaug

SEQ ID NO: 880929 - RNA, 19 nt, Artificial Sequence
  Description of Artificial Sequence: Synthetic oligonucleotide
  Antisense strand to SEQ ID NO: 880928
cauauuauugggcuuuaca

SEQ ID NO: 880930 - RNA, 19 nt, Artificial Sequence
  Description of Artificial Sequence: Synthetic oligonucleotide
  Sense strand starting at position 2934 of SEQ ID NO: 588664
uuacguuuaccauaauguc

SEQ ID NO: 880931 - RNA, 19 nt, Artificial Sequence
  Description of Artificial Sequence: Synthetic oligonucleotide
  Antisense strand to SEQ ID NO: 880930
gacauuaugguaaacguaa

SEQ ID NO: 880932 - RNA, 19 nt, Artificial Sequence
  Description of Artificial Sequence: Synthetic oligonucleotide
  Sense strand starting at position 3010 of SEQ ID NO: 588664
agauaaagccucugagauc

SEQ ID NO: 880933 - RNA, 19 nt, Artificial Sequence
  Description of Artificial Sequence: Synthetic oligonucleotide
  Antisense strand to SEQ ID NO: 880932
gaucucagaggcuuuaucu

SEQ ID NO: 880934 - RNA, 19 nt, Artificial Sequence
  Description of Artificial Sequence: Synthetic oligonucleotide
  Sense strand starting at position 3053 of SEQ ID NO: 588664
guauucuauugaguagauu

SEQ ID NO: 880935 - RNA, 19 nt, Artificial Sequence
  Description of Artificial Sequence: Synthetic oligonucleotide
  Antisense strand to SEQ ID NO: 880934
aaucuacucaauagaauac

SEQ ID NO: 880936 - RNA, 19 nt, Artificial Sequence
  Description of Artificial Sequence: Synthetic oligonucleotide
  Sense strand starting at position 3056 of SEQ ID NO: 588664
uucuauugaguagauuacu

SEQ ID NO: 880937 - RNA, 19 nt, Artificial Sequence
  Description of Artificial Sequence: Synthetic oligonucleotide
  Antisense strand to SEQ ID NO: 880936
aguaaucuacucaauagaa

SEQ ID NO: 880938 - RNA, 19 nt, Artificial Sequence
  Description of Artificial Sequence: Synthetic oligonucleotide
  Sense strand starting at position 3059 of SEQ ID NO: 588664
uauugaguagauuacugua

SEQ ID NO: 880939 - RNA, 19 nt, Artificial Sequence
  Description of Artificial Sequence: Synthetic oligonucleotide
  Antisense strand to SEQ ID NO: 880938
uacaguaaucuacucaaua

SEQ ID NO: 880940 - RNA, 19 nt, Artificial Sequence
  Description of Artificial Sequence: Synthetic oligonucleotide
  Sense strand starting at position 3061 of SEQ ID NO: 588664
uugaguagauuacuguauu

SEQ ID NO: 880941 - RNA, 19 nt, Artificial Sequence
  Description of Artificial Sequence: Synthetic oligonucleotide
  Antisense strand to SEQ ID NO: 880940
aauacaguaaucuacucaa

SEQ ID NO: 880942 - RNA, 19 nt, Artificial Sequence
  Description of Artificial Sequence: Synthetic oligonucleotide
  Sense strand starting at position 3218 of SEQ ID NO: 588664
agacaauaagcauguuuaa

SEQ ID NO: 880943 - RNA, 19 nt, Artificial Sequence
  Description of Artificial Sequence: Synthetic oligonucleotide
  Antisense strand to SEQ ID NO: 880942
uuaaacaugcuuauugucu

SEQ ID NO: 880944 - RNA, 19 nt, Artificial Sequence
  Description of Artificial Sequence: Synthetic oligonucleotide
  Sense strand starting at position 3405 of SEQ ID NO: 588664
uuuccuugaugacugauga

SEQ ID NO: 880945 - RNA, 19 nt, Artificial Sequence
  Description of Artificial Sequence: Synthetic oligonucleotide
  Antisense strand to SEQ ID NO: 880944
ucaucagucaucaaggaaa

SEQ ID NO: 880946 - RNA, 19 nt, Artificial Sequence
  Description of Artificial Sequence: Synthetic oligonucleotide
  Sense strand starting at position 3429 of SEQ ID NO: 588664
uuccauucuuuaguaaagu

SEQ ID NO: 880947 - RNA, 19 nt, Artificial Sequence
  Description of Artificial Sequence: Synthetic oligonucleotide
  Antisense strand to SEQ ID NO: 880946
acuuuacuaaagaauggaa

SEQ ID NO: 880948 - RNA, 19 nt, Artificial Sequence
  Description of Artificial Sequence: Synthetic oligonucleotide
  Sense strand starting at position 3699 of SEQ ID NO: 588664
uuuaucaugugauuugcau

SEQ ID NO: 880949 - RNA, 19 nt, Artificial Sequence
  Description of Artificial Sequence: Synthetic oligonucleotide
  Antisense strand to SEQ ID NO: 880948
augcaaaucacaugauaaa

SEQ ID NO: 880950 - RNA, 19 nt, Artificial Sequence
  Description of Artificial Sequence: Synthetic oligonucleotide
  Sense strand starting at position 3903 of SEQ ID NO: 588664
auagccauucccugggaau

SEQ ID NO: 880951 - RNA, 19 nt, Artificial Sequence
  Description of Artificial Sequence: Synthetic oligonucleotide
  Antisense strand to SEQ ID NO: 880950
auucccagggaauggcuau

SEQ ID NO: 880952 - RNA, 19 nt, Artificial Sequence
  Description of Artificial Sequence: Synthetic oligonucleotide
  Sense strand starting at position 3939 of SEQ ID NO: 588664
gcuuaaacuugccucagaa

SEQ ID NO: 880953 - RNA, 19 nt, Artificial Sequence
  Description of Artificial Sequence: Synthetic oligonucleotide
  Antisense strand to SEQ ID NO: 880952
uucugaggcaaguuuaagc

SEQ ID NO: 880954 - RNA, 19 nt, Artificial Sequence
  Description of Artificial Sequence: Synthetic oligonucleotide
  Sense strand starting at position 63 of SEQ ID NO: 588665
ucaugcuguccucacauau

SEQ ID NO: 880955 - RNA, 19 nt, Artificial Sequence
  Description of Artificial Sequence: Synthetic oligonucleotide
  Antisense strand to SEQ ID NO: 880954
auaugugaggacagcauga

SEQ ID NO: 880956 - RNA, 19 nt, Artificial Sequence
  Description of Artificial Sequence: Synthetic oligonucleotide
  Sense strand starting at position 86 of SEQ ID NO: 588665
aaugguugccaguaggaau

SEQ ID NO: 880957 - RNA, 19 nt, Artificial Sequence
  Description of Artificial Sequence: Synthetic oligonucleotide
  Antisense strand to SEQ ID NO: 880956
auuccuacuggcaaccauu

SEQ ID NO: 880958 - RNA, 19 nt, Artificial Sequence
  Description of Artificial Sequence: Synthetic oligonucleotide
  Sense strand starting at position 98 of SEQ ID NO: 588665
uaggaauucugaguuaaca

SEQ ID NO: 880959 - RNA, 19 nt, Artificial Sequence
  Description of Artificial Sequence: Synthetic oligonucleotide
  Antisense strand to SEQ ID NO: 880958
uguuaacucagaauuccua

SEQ ID NO: 880960 - RNA, 19 nt, Artificial Sequence
  Description of Artificial Sequence: Synthetic oligonucleotide
  Sense strand starting at position 168 of SEQ ID NO: 588665
gcagcauuccugggaugga

SEQ ID NO: 880961 - RNA, 19 nt, Artificial Sequence
  Description of Artificial Sequence: Synthetic oligonucleotide
  Antisense strand to SEQ ID NO: 880960
uccaucccaggaaugcugc

SEQ ID NO: 880962 - RNA, 19 nt, Artificial Sequence
  Description of Artificial Sequence: Synthetic oligonucleotide
  Sense strand starting at position 181 of SEQ ID NO: 588665
gauggagucuaauuaguau

SEQ ID NO: 880963 - RNA, 19 nt, Artificial Sequence
  Description of Artificial Sequence: Synthetic oligonucleotide
  Antisense strand to SEQ ID NO: 880962
auacuaauuagacuccauc

SEQ ID NO: 880964 - RNA, 19 nt, Artificial Sequence
  Description of Artificial Sequence: Synthetic oligonucleotide
  Sense strand starting at position 206 of SEQ ID NO: 588665
ggucacauccugcacuaua

SEQ ID NO: 880965 - RNA, 19 nt, Artificial Sequence
  Description of Artificial Sequence: Synthetic oligonucleotide
  Antisense strand to SEQ ID NO: 880964
uauagugcaggaugugacc

SEQ ID NO: 880966 - RNA, 19 nt, Artificial Sequence
  Description of Artificial Sequence: Synthetic oligonucleotide
  Sense strand starting at position 455 of SEQ ID NO: 588665
auauauuaugcagaucugu

SEQ ID NO: 880967 - RNA, 19 nt, Artificial Sequence
  Description of Artificial Sequence: Synthetic oligonucleotide
  Antisense strand to SEQ ID NO: 880966
acagaucugcauaauauau

SEQ ID NO: 880968 - RNA, 19 nt, Artificial Sequence
  Description of Artificial Sequence: Synthetic oligonucleotide
  Sense strand starting at position 460 of SEQ ID NO: 588665
uuaugcagaucugucaauu

SEQ ID NO: 880969 - RNA, 19 nt, Artificial Sequence
  Description of Artificial Sequence: Synthetic oligonucleotide
  Antisense strand to SEQ ID NO: 880968
aauugacagaucugcauaa

SEQ ID NO: 880970 - RNA, 19 nt, Artificial Sequence
  Description of Artificial Sequence: Synthetic oligonucleotide
  Sense strand starting at position 470 of SEQ ID NO: 588665
cugucaauuggguggcaau

SEQ ID NO: 880971 - RNA, 19 nt, Artificial Sequence
  Description of Artificial Sequence: Synthetic oligonucleotide
  Antisense strand to SEQ ID NO: 880970
auugccacccaauugacag

SEQ ID NO: 880972 - RNA, 19 nt, Artificial Sequence
  Description of Artificial Sequence: Synthetic oligonucleotide
  Sense strand starting at position 471 of SEQ ID NO: 588665
ugucaauuggguggcaaua

SEQ ID NO: 880973 - RNA, 19 nt, Artificial Sequence
  Description of Artificial Sequence: Synthetic oligonucleotide
  Antisense strand to SEQ ID NO: 880972
uauugccacccaauugaca

SEQ ID NO: 880974 - RNA, 19 nt, Artificial Sequence
  Description of Artificial Sequence: Synthetic oligonucleotide
  Sense strand starting at position 483 of SEQ ID NO: 588665
ggcaauauugugcagggau

SEQ ID NO: 880975 - RNA, 19 nt, Artificial Sequence
  Description of Artificial Sequence: Synthetic oligonucleotide
  Antisense strand to SEQ ID NO: 880974
aucccugcacaauauugcc

SEQ ID NO: 880976 - RNA, 19 nt, Artificial Sequence
  Description of Artificial Sequence: Synthetic oligonucleotide
  Sense strand starting at position 528 of SEQ ID NO: 588665
caaagugacugagaaagga

SEQ ID NO: 880977 - RNA, 19 nt, Artificial Sequence
  Description of Artificial Sequence: Synthetic oligonucleotide
  Antisense strand to SEQ ID NO: 880976
uccuuucucagucacuuug

SEQ ID NO: 880978 - RNA, 19 nt, Artificial Sequence
  Description of Artificial Sequence: Synthetic oligonucleotide
  Sense strand starting at position 803 of SEQ ID NO: 588665
aagguuacaugagcaugaa

SEQ ID NO: 880979 - RNA, 19 nt, Artificial Sequence
  Description of Artificial Sequence: Synthetic oligonucleotide
  Antisense strand to SEQ ID NO: 880978
uucaugcucauguaaccuu

SEQ ID NO: 880980 - RNA, 19 nt, Artificial Sequence
  Description of Artificial Sequence: Synthetic oligonucleotide
  Sense strand starting at position 843 of SEQ ID NO: 588665
ggaaucuaauaguugguuu

SEQ ID NO: 880981 - RNA, 19 nt, Artificial Sequence
  Description of Artificial Sequence: Synthetic oligonucleotide
  Antisense strand to SEQ ID NO: 880980
aaaccaacuauuagauucc

SEQ ID NO: 880982 - RNA, 19 nt, Artificial Sequence
  Description of Artificial Sequence: Synthetic oligonucleotide
  Sense strand starting at position 871 of SEQ ID NO: 588665
acaagcucucgugacagua

SEQ ID NO: 880983 - RNA, 19 nt, Artificial Sequence
  Description of Artificial Sequence: Synthetic oligonucleotide
  Antisense strand to SEQ ID NO: 880982
uacugucacgagagcuugu

SEQ ID NO: 880984 - RNA, 19 nt, Artificial Sequence
  Description of Artificial Sequence: Synthetic oligonucleotide
  Sense strand starting at position 936 of SEQ ID NO: 588665
gaggauaucgcaugcccaa

SEQ ID NO: 880985 - RNA, 19 nt, Artificial Sequence
  Description of Artificial Sequence: Synthetic oligonucleotide
  Antisense strand to SEQ ID NO: 880984
uugggcaugcgauauccuc

SEQ ID NO: 880986 - RNA, 19 nt, Artificial Sequence
  Description of Artificial Sequence: Synthetic oligonucleotide
  Sense strand starting at position 2033 of SEQ ID NO: 588665
uauuguguuugauucuuag

SEQ ID NO: 880987 - RNA, 19 nt, Artificial Sequence
  Description of Artificial Sequence: Synthetic oligonucleotide
  Antisense strand to SEQ ID NO: 880986
cuaagaaucaaacacaaua

SEQ ID NO: 880988 - RNA, 19 nt, Artificial Sequence
  Description of Artificial Sequence: Synthetic oligonucleotide
  Sense strand starting at position 2036 of SEQ ID NO: 588665
uguguuugauucuuagaau

SEQ ID NO: 880989 - RNA, 19 nt, Artificial Sequence
  Description of Artificial Sequence: Synthetic oligonucleotide
  Antisense strand to SEQ ID NO: 880988
auucuaagaaucaaacaca

SEQ ID NO: 880990 - RNA, 19 nt, Artificial Sequence
  Description of Artificial Sequence: Synthetic oligonucleotide
  Sense strand starting at position 2050 of SEQ ID NO: 588665
agaauacucucaguaagca

SEQ ID NO: 880991 - RNA, 19 nt, Artificial Sequence
  Description of Artificial Sequence: Synthetic oligonucleotide
  Antisense strand to SEQ ID NO: 880990
ugcuuacugagaguauucu

SEQ ID NO: 880992 - RNA, 19 nt, Artificial Sequence
  Description of Artificial Sequence: Synthetic oligonucleotide
  Sense strand starting at position 2266 of SEQ ID NO: 588665
ugaugaagcuggccucuau

SEQ ID NO: 880993 - RNA, 19 nt, Artificial Sequence
  Description of Artificial Sequence: Synthetic oligonucleotide
  Antisense strand to SEQ ID NO: 880992
auagaggccagcuucauca

SEQ ID NO: 880994 - RNA, 19 nt, Artificial Sequence
  Description of Artificial Sequence: Synthetic oligonucleotide
  Sense strand starting at position 2297 of SEQ ID NO: 588665
auagacugccagugacaua

SEQ ID NO: 880995 - RNA, 19 nt, Artificial Sequence
  Description of Artificial Sequence: Synthetic oligonucleotide
  Antisense strand to SEQ ID NO: 880994
uaugucacuggcagucuau

SEQ ID NO: 880996 - RNA, 19 nt, Artificial Sequence
  Description of Artificial Sequence: Synthetic oligonucleotide
  Sense strand starting at position 2355 of SEQ ID NO: 588665
uucugaguugcagauaguu

SEQ ID NO: 880997 - RNA, 19 nt, Artificial Sequence
  Description of Artificial Sequence: Synthetic oligonucleotide
  Antisense strand to SEQ ID NO: 880996
aacuaucugcaacucagaa

SEQ ID NO: 880998 - RNA, 19 nt, Artificial Sequence
  Description of Artificial Sequence: Synthetic oligonucleotide
  Sense strand starting at position 2406 of SEQ ID NO: 588665
cuuagaguauaguuagaau

SEQ ID NO: 880999 - RNA, 19 nt, Artificial Sequence
  Description of Artificial Sequence: Synthetic oligonucleotide
  Antisense strand to SEQ ID NO: 880998
auucuaacuauacucuaag

SEQ ID NO: 881000 - RNA, 19 nt, Artificial Sequence
  Description of Artificial Sequence: Synthetic oligonucleotide
  Sense strand starting at position 2682 of SEQ ID NO: 588665
uuuguucucagugggauau

SEQ ID NO: 881001 - RNA, 19 nt, Artificial Sequence
  Description of Artificial Sequence: Synthetic oligonucleotide
  Antisense strand to SEQ ID NO: 881000
auaucccacugagaacaaa

SEQ ID NO: 881002 - RNA, 19 nt, Artificial Sequence
  Description of Artificial Sequence: Synthetic oligonucleotide
  Sense strand starting at position 2683 of SEQ ID NO: 588665
uuguucucagugggauauu

SEQ ID NO: 881003 - RNA, 19 nt, Artificial Sequence
  Description of Artificial Sequence: Synthetic oligonucleotide
  Antisense strand to SEQ ID NO: 881002
aauaucccacugagaacaa

SEQ ID NO: 881004 - RNA, 19 nt, Artificial Sequence
  Description of Artificial Sequence: Synthetic oligonucleotide
  Sense strand starting at position 2724 of SEQ ID NO: 588665
cuguuaggagucugagaau

SEQ ID NO: 881005 - RNA, 19 nt, Artificial Sequence
  Description of Artificial Sequence: Synthetic oligonucleotide
  Antisense strand to SEQ ID NO: 881004
auucucagacuccuaacag

SEQ ID NO: 881006 - RNA, 19 nt, Artificial Sequence
  Description of Artificial Sequence: Synthetic oligonucleotide
  Sense strand starting at position 2736 of SEQ ID NO: 588665
ugagaaucauuggaggacu

SEQ ID NO: 881007 - RNA, 19 nt, Artificial Sequence
  Description of Artificial Sequence: Synthetic oligonucleotide
  Antisense strand to SEQ ID NO: 881006
aguccuccaaugauucuca

SEQ ID NO: 881008 - RNA, 19 nt, Artificial Sequence
  Description of Artificial Sequence: Synthetic oligonucleotide
  Sense strand starting at position 2749 of SEQ ID NO: 588665
aggacuguucuagaagcuu

SEQ ID NO: 881009 - RNA, 19 nt, Artificial Sequence
  Description of Artificial Sequence: Synthetic oligonucleotide
  Antisense strand to SEQ ID NO: 881008
aagcuucuagaacaguccu

SEQ ID NO: 881010 - RNA, 19 nt, Artificial Sequence
  Description of Artificial Sequence: Synthetic oligonucleotide
  Sense strand starting at position 2819 of SEQ ID NO: 588665
cugggauucucucuucuua

SEQ ID NO: 881011 - RNA, 19 nt, Artificial Sequence
  Description of Artificial Sequence: Synthetic oligonucleotide
  Antisense strand to SEQ ID NO: 881010
uaagaagagagaaucccag

SEQ ID NO: 881012 - RNA, 19 nt, Artificial Sequence
  Description of Artificial Sequence: Synthetic oligonucleotide
  Sense strand starting at position 2821 of SEQ ID NO: 588665
gggauucucucuucuuaag

SEQ ID NO: 881013 - RNA, 19 nt, Artificial Sequence
  Description of Artificial Sequence: Synthetic oligonucleotide
  Antisense strand to SEQ ID NO: 881012
cuuaagaagagagaauccc

SEQ ID NO: 881014 - RNA, 19 nt, Artificial Sequence
  Description of Artificial Sequence: Synthetic oligonucleotide
  Sense strand starting at position 2830 of SEQ ID NO: 588665
ucuucuuaaguguaguauu

SEQ ID NO: 881015 - RNA, 19 nt, Artificial Sequence
  Description of Artificial Sequence: Synthetic oligonucleotide
  Antisense strand to SEQ ID NO: 881014
aauacuacacuuaagaaga

SEQ ID NO: 881016 - RNA, 19 nt, Artificial Sequence
  Description of Artificial Sequence: Synthetic oligonucleotide
  Sense strand starting at position 2947 of SEQ ID NO: 588665
cuagccaucuggcuauaga

SEQ ID NO: 881017 - RNA, 19 nt, Artificial Sequence
  Description of Artificial Sequence: Synthetic oligonucleotide
  Antisense strand to SEQ ID NO: 881016
ucuauagccagauggcuag

SEQ ID NO: 881018 - RNA, 19 nt, Artificial Sequence
  Description of Artificial Sequence: Synthetic oligonucleotide
  Sense strand starting at position 2950 of SEQ ID NO: 588665
gccaucuggcuauagaauc

SEQ ID NO: 881019 - RNA, 19 nt, Artificial Sequence
  Description of Artificial Sequence: Synthetic oligonucleotide
  Antisense strand to SEQ ID NO: 881018
gauucuauagccagauggc

SEQ ID NO: 881020 - RNA, 19 nt, Artificial Sequence
  Description of Artificial Sequence: Synthetic oligonucleotide
  Sense strand starting at position 2958 of SEQ ID NO: 588665
gcuauagaaucagcccuuu

SEQ ID NO: 881021 - RNA, 19 nt, Artificial Sequence
  Description of Artificial Sequence: Synthetic oligonucleotide
  Antisense strand to SEQ ID NO: 881020
aaagggcugauucuauagc

SEQ ID NO: 881022 - RNA, 19 nt, Artificial Sequence
  Description of Artificial Sequence: Synthetic oligonucleotide
  Sense strand starting at position 3092 of SEQ ID NO: 588665
uugugauucugaucauaug

SEQ ID NO: 881023 - RNA, 19 nt, Artificial Sequence
  Description of Artificial Sequence: Synthetic oligonucleotide
  Antisense strand to SEQ ID NO: 881022
cauaugaucagaaucacaa

SEQ ID NO: 881024 - RNA, 19 nt, Artificial Sequence
  Description of Artificial Sequence: Synthetic oligonucleotide
  Sense strand starting at position 3093 of SEQ ID NO: 588665
ugugauucugaucauaugu

SEQ ID NO: 881025 - RNA, 19 nt, Artificial Sequence
  Description of Artificial Sequence: Synthetic oligonucleotide
  Antisense strand to SEQ ID NO: 881024
acauaugaucagaaucaca

SEQ ID NO: 881026 - RNA, 19 nt, Artificial Sequence
  Description of Artificial Sequence: Synthetic oligonucleotide
  Sense strand starting at position 3098 of SEQ ID NO: 588665
uucugaucauaugugaugu

SEQ ID NO: 881027 - RNA, 19 nt, Artificial Sequence
  Description of Artificial Sequence: Synthetic oligonucleotide
  Antisense strand to SEQ ID NO: 881026
acaucacauaugaucagaa

SEQ ID NO: 881028 - RNA, 19 nt, Artificial Sequence
  Description of Artificial Sequence: Synthetic oligonucleotide
  Sense strand starting at position 3104 of SEQ ID NO: 588665
ucauaugugaugugaugga

SEQ ID NO: 881029 - RNA, 19 nt, Artificial Sequence
  Description of Artificial Sequence: Synthetic oligonucleotide
  Antisense strand to SEQ ID NO: 881028
uccaucacaucacauauga

SEQ ID NO: 881030 - RNA, 19 nt, Artificial Sequence
  Description of Artificial Sequence: Synthetic oligonucleotide
  Sense strand starting at position 3108 of SEQ ID NO: 588665
augugaugugauggagaac

SEQ ID NO: 881031 - RNA, 19 nt, Artificial Sequence
  Description of Artificial Sequence: Synthetic oligonucleotide
  Antisense strand to SEQ ID NO: 881030
guucuccaucacaucacau

SEQ ID NO: 881032 - RNA, 19 nt, Artificial Sequence
  Description of Artificial Sequence: Synthetic oligonucleotide
  Sense strand starting at position 3523 of SEQ ID NO: 588665
cuauguguagaaggcgauu

SEQ ID NO: 881033 - RNA, 19 nt, Artificial Sequence
  Description of Artificial Sequence: Synthetic oligonucleotide
  Antisense strand to SEQ ID NO: 881032
aaucgccuucuacacauag

SEQ ID NO: 881034 - RNA, 19 nt, Artificial Sequence
  Description of Artificial Sequence: Synthetic oligonucleotide
  Sense strand starting at position 511 of SEQ ID NO: 588666
cuuuaacauguuggaaacu

SEQ ID NO: 881035 - RNA, 19 nt, Artificial Sequence
  Description of Artificial Sequence: Synthetic oligonucleotide
  Antisense strand to SEQ ID NO: 881034
aguuuccaacauguuaaag

SEQ ID NO: 881036 - RNA, 19 nt, Artificial Sequence
  Description of Artificial Sequence: Synthetic oligonucleotide
  Sense strand starting at position 672 of SEQ ID NO: 588666
gugaauuauuuggaguaaa

SEQ ID NO: 881037 - RNA, 19 nt, Artificial Sequence
  Description of Artificial Sequence: Synthetic oligonucleotide
  Antisense strand to SEQ ID NO: 881036
uuuacuccaaauaauucac

SEQ ID NO: 881038 - RNA, 19 nt, Artificial Sequence
  Description of Artificial Sequence: Synthetic oligonucleotide
  Sense strand starting at position 764 of SEQ ID NO: 588666
uggacacugagaugcuaua

SEQ ID NO: 881039 - RNA, 19 nt, Artificial Sequence
  Description of Artificial Sequence: Synthetic oligonucleotide
  Antisense strand to SEQ ID NO: 881038
uauagcaucucagugucca

SEQ ID NO: 881040 - RNA, 19 nt, Artificial Sequence
  Description of Artificial Sequence: Synthetic oligonucleotide
  Sense strand starting at position 847 of SEQ ID NO: 588666
cuaauugcuuucuuggaaa

SEQ ID NO: 881041 - RNA, 19 nt, Artificial Sequence
  Description of Artificial Sequence: Synthetic oligonucleotide
  Antisense strand to SEQ ID NO: 881040
uuuccaagaaagcaauuag

SEQ ID NO: 881042 - RNA, 19 nt, Artificial Sequence
  Description of Artificial Sequence: Synthetic oligonucleotide
  Sense strand starting at position 1007 of SEQ ID NO: 588666
cuggguaauguugauuauc

SEQ ID NO: 881043 - RNA, 19 nt, Artificial Sequence
  Description of Artificial Sequence: Synthetic oligonucleotide
  Antisense strand to SEQ ID NO: 881042
gauaaucaacauuacccag

SEQ ID NO: 881044 - RNA, 19 nt, Artificial Sequence
  Description of Artificial Sequence: Synthetic oligonucleotide
  Sense strand starting at position 1009 of SEQ ID NO: 588666
ggguaauguugauuaucua

SEQ ID NO: 881045 - RNA, 19 nt, Artificial Sequence
  Description of Artificial Sequence: Synthetic oligonucleotide
  Antisense strand to SEQ ID NO: 881044
uagauaaucaacauuaccc

SEQ ID NO: 881046 - RNA, 19 nt, Artificial Sequence
  Description of Artificial Sequence: Synthetic oligonucleotide
  Sense strand starting at position 1010 of SEQ ID NO: 588666
gguaauguugauuaucuau

SEQ ID NO: 881047 - RNA, 19 nt, Artificial Sequence
  Description of Artificial Sequence: Synthetic oligonucleotide
  Antisense strand to SEQ ID NO: 881046
auagauaaucaacauuacc

SEQ ID NO: 881048 - RNA, 19 nt, Artificial Sequence
  Description of Artificial Sequence: Synthetic oligonucleotide
  Sense strand starting at position 1016 of SEQ ID NO: 588666
guugauuaucuauaugagu

SEQ ID NO: 881049 - RNA, 19 nt, Artificial Sequence
  Description of Artificial Sequence: Synthetic oligonucleotide
  Antisense strand to SEQ ID NO: 881048
acucauauagauaaucaac

SEQ ID NO: 881050 - RNA, 19 nt, Artificial Sequence
  Description of Artificial Sequence: Synthetic oligonucleotide
  Sense strand starting at position 1021 of SEQ ID NO: 588666
uuaucuauaugagugugau

SEQ ID NO: 881051 - RNA, 19 nt, Artificial Sequence
  Description of Artificial Sequence: Synthetic oligonucleotide
  Antisense strand to SEQ ID NO: 881050
aucacacucauauagauaa

SEQ ID NO: 881052 - RNA, 19 nt, Artificial Sequence
  Description of Artificial Sequence: Synthetic oligonucleotide
  Sense strand starting at position 2027 of SEQ ID NO: 588666
guaugcauagaaggauuaa

SEQ ID NO: 881053 - RNA, 19 nt, Artificial Sequence
  Description of Artificial Sequence: Synthetic oligonucleotide
  Antisense strand to SEQ ID NO: 881052
uuaauccuucuaugcauac

SEQ ID NO: 881054 - RNA, 19 nt, Artificial Sequence
  Description of Artificial Sequence: Synthetic oligonucleotide
  Sense strand starting at position 2271 of SEQ ID NO: 588666
ugguguauuuaaucgguau

SEQ ID NO: 881055 - RNA, 19 nt, Artificial Sequence
  Description of Artificial Sequence: Synthetic oligonucleotide
  Antisense strand to SEQ ID NO: 881054
auaccgauuaaauacacca

SEQ ID NO: 881056 - RNA, 19 nt, Artificial Sequence
  Description of Artificial Sequence: Synthetic oligonucleotide
  Sense strand starting at position 2272 of SEQ ID NO: 588666
gguguauuuaaucgguauc

SEQ ID NO: 881057 - RNA, 19 nt, Artificial Sequence
  Description of Artificial Sequence: Synthetic oligonucleotide
  Antisense strand to SEQ ID NO: 881056
gauaccgauuaaauacacc

SEQ ID NO: 881058 - RNA, 19 nt, Artificial Sequence
  Description of Artificial Sequence: Synthetic oligonucleotide
  Sense strand starting at position 2273 of SEQ ID NO: 588666
guguauuuaaucgguauca

SEQ ID NO: 881059 - RNA, 19 nt, Artificial Sequence
  Description of Artificial Sequence: Synthetic oligonucleotide
  Antisense strand to SEQ ID NO: 881058
ugauaccgauuaaauacac

SEQ ID NO: 881060 - RNA, 19 nt, Artificial Sequence
  Description of Artificial Sequence: Synthetic oligonucleotide
  Sense strand starting at position 2274 of SEQ ID NO: 588666
uguauuuaaucgguaucac

SEQ ID NO: 881061 - RNA, 19 nt, Artificial Sequence
  Description of Artificial Sequence: Synthetic oligonucleotide
  Antisense strand to SEQ ID NO: 881060
gugauaccgauuaaauaca

SEQ ID NO: 881062 - RNA, 19 nt, Artificial Sequence
  Description of Artificial Sequence: Synthetic oligonucleotide
  Sense strand starting at position 2456 of SEQ ID NO: 588666
cugccauuccuagagauau

SEQ ID NO: 881063 - RNA, 19 nt, Artificial Sequence
  Description of Artificial Sequence: Synthetic oligonucleotide
  Antisense strand to SEQ ID NO: 881062
auaucucuaggaauggcag

SEQ ID NO: 881064 - RNA, 19 nt, Artificial Sequence
  Description of Artificial Sequence: Synthetic oligonucleotide
  Sense strand starting at position 2902 of SEQ ID NO: 588666
ucuacauugucuuugggaa

SEQ ID NO: 881065 - RNA, 19 nt, Artificial Sequence
  Description of Artificial Sequence: Synthetic oligonucleotide
  Antisense strand to SEQ ID NO: 881064
uucccaaagacaauguaga

SEQ ID NO: 881066 - RNA, 19 nt, Artificial Sequence
  Description of Artificial Sequence: Synthetic oligonucleotide
  Sense strand starting at position 2903 of SEQ ID NO: 588666
cuacauugucuuugggaag

SEQ ID NO: 881067 - RNA, 19 nt, Artificial Sequence
  Description of Artificial Sequence: Synthetic oligonucleotide
  Antisense strand to SEQ ID NO: 881066
cuucccaaagacaauguag

SEQ ID NO: 881068 - RNA, 19 nt, Artificial Sequence
  Description of Artificial Sequence: Synthetic oligonucleotide
  Sense strand starting at position 2954 of SEQ ID NO: 588666
aagucaggcuuguugauuu

SEQ ID NO: 881069 - RNA, 19 nt, Artificial Sequence
  Description of Artificial Sequence: Synthetic oligonucleotide
  Antisense strand to SEQ ID NO: 881068
aaaucaacaagccugacuu

SEQ ID NO: 881070 - RNA, 19 nt, Artificial Sequence
  Description of Artificial Sequence: Synthetic oligonucleotide
  Sense strand starting at position 3057 of SEQ ID NO: 588666
guacuugauauggagccua

SEQ ID NO: 881071 - RNA, 19 nt, Artificial Sequence
  Description of Artificial Sequence: Synthetic oligonucleotide
  Antisense strand to SEQ ID NO: 881070
uaggcuccauaucaaguac

SEQ ID NO: 881072 - RNA, 19 nt, Artificial Sequence
  Description of Artificial Sequence: Synthetic oligonucleotide
  Sense strand starting at position 3138 of SEQ ID NO: 588666
ggccauugagggcagauau

SEQ ID NO: 881073 - RNA, 19 nt, Artificial Sequence
  Description of Artificial Sequence: Synthetic oligonucleotide
  Antisense strand to SEQ ID NO: 881072
auaucugcccucaauggcc

SEQ ID NO: 881074 - RNA, 19 nt, Artificial Sequence
  Description of Artificial Sequence: Synthetic oligonucleotide
  Sense strand starting at position 3320 of SEQ ID NO: 588666
gugagagaugaaugguuaa

SEQ ID NO: 881075 - RNA, 19 nt, Artificial Sequence
  Description of Artificial Sequence: Synthetic oligonucleotide
  Antisense strand to SEQ ID NO: 881074
uuaaccauucaucucucac

SEQ ID NO: 881076 - RNA, 19 nt, Artificial Sequence
  Description of Artificial Sequence: Synthetic oligonucleotide
  Sense strand starting at position 3373 of SEQ ID NO: 588666
augucaccacuguacaaua

SEQ ID NO: 881077 - RNA, 19 nt, Artificial Sequence
  Description of Artificial Sequence: Synthetic oligonucleotide
  Antisense strand to SEQ ID NO: 881076
uauuguacaguggugacau

SEQ ID NO: 881078 - RNA, 19 nt, Artificial Sequence
  Description of Artificial Sequence: Synthetic oligonucleotide
  Sense strand starting at position 3382 of SEQ ID NO: 588666
cuguacaauagugauugua

SEQ ID NO: 881079 - RNA, 19 nt, Artificial Sequence
  Description of Artificial Sequence: Synthetic oligonucleotide
  Antisense strand to SEQ ID NO: 881078
uacaaucacuauuguacag

SEQ ID NO: 881080 - RNA, 19 nt, Artificial Sequence
  Description of Artificial Sequence: Synthetic oligonucleotide
  Sense strand starting at position 3384 of SEQ ID NO: 588666
guacaauagugauuguaua

SEQ ID NO: 881081 - RNA, 19 nt, Artificial Sequence
  Description of Artificial Sequence: Synthetic oligonucleotide
  Antisense strand to SEQ ID NO: 881080
uauacaaucacuauuguac

SEQ ID NO: 881082 - RNA, 19 nt, Artificial Sequence
  Description of Artificial Sequence: Synthetic oligonucleotide
  Sense strand starting at position 3424 of SEQ ID NO: 588666
uguaaucauggccauuacu

SEQ ID NO: 881083 - RNA, 19 nt, Artificial Sequence
  Description of Artificial Sequence: Synthetic oligonucleotide
  Antisense strand to SEQ ID NO: 881082
aguaauggccaugauuaca

SEQ ID NO: 881084 - RNA, 19 nt, Artificial Sequence
  Description of Artificial Sequence: Synthetic oligonucleotide
  Sense strand starting at position 3474 of SEQ ID NO: 588666
auucucagagaaggucaua

SEQ ID NO: 881085 - RNA, 19 nt, Artificial Sequence
  Description of Artificial Sequence: Synthetic oligonucleotide
  Antisense strand to SEQ ID NO: 881084
uaugaccuucucugagaau

SEQ ID NO: 881086 - RNA, 19 nt, Artificial Sequence
  Description of Artificial Sequence: Synthetic oligonucleotide
  Sense strand starting at position 3479 of SEQ ID NO: 588666
cagagaaggucauaaauuu

SEQ ID NO: 881087 - RNA, 19 nt, Artificial Sequence
  Description of Artificial Sequence: Synthetic oligonucleotide
  Antisense strand to SEQ ID NO: 881086
aaauuuaugaccuucucug

SEQ ID NO: 881088 - RNA, 19 nt, Artificial Sequence
  Description of Artificial Sequence: Synthetic oligonucleotide
  Sense strand starting at position 3486 of SEQ ID NO: 588666
ggucauaaauuugaaugau

SEQ ID NO: 881089 - RNA, 19 nt, Artificial Sequence
  Description of Artificial Sequence: Synthetic oligonucleotide
  Antisense strand to SEQ ID NO: 881088
aucauucaaauuuaugacc

SEQ ID NO: 881090 - RNA, 19 nt, Artificial Sequence
  Description of Artificial Sequence: Synthetic oligonucleotide
  Sense strand starting at position 3495 of SEQ ID NO: 588666
uuugaaugauugccaagau

SEQ ID NO: 881091 - RNA, 19 nt, Artificial Sequence
  Description of Artificial Sequence: Synthetic oligonucleotide
  Antisense strand to SEQ ID NO: 881090
aucuuggcaaucauucaaa

SEQ ID NO: 881092 - RNA, 19 nt, Artificial Sequence
  Description of Artificial Sequence: Synthetic oligonucleotide
  Sense strand starting at position 3545 of SEQ ID NO: 588666
gcuaguuaguauuugcaau

SEQ ID NO: 881093 - RNA, 19 nt, Artificial Sequence
  Description of Artificial Sequence: Synthetic oligonucleotide
  Antisense strand to SEQ ID NO: 881092
auugcaaauacuaacuagc

SEQ ID NO: 881094 - RNA, 19 nt, Artificial Sequence
  Description of Artificial Sequence: Synthetic oligonucleotide
  Sense strand starting at position 3626 of SEQ ID NO: 588666
uaggaucaugcauaugguu

SEQ ID NO: 881095 - RNA, 19 nt, Artificial Sequence
  Description of Artificial Sequence: Synthetic oligonucleotide
  Antisense strand to SEQ ID NO: 881094
aaccauaugcaugauccua

SEQ ID NO: 881096 - RNA, 19 nt, Artificial Sequence
  Description of Artificial Sequence: Synthetic oligonucleotide
  Sense strand starting at position 3664 of SEQ ID NO: 588666
aagcuuggugcacaggaaa

SEQ ID NO: 881097 - RNA, 19 nt, Artificial Sequence
  Description of Artificial Sequence: Synthetic oligonucleotide
  Antisense strand to SEQ ID NO: 881096
uuuccugugcaccaagcuu

SEQ ID NO: 881098 - RNA, 19 nt, Artificial Sequence
  Description of Artificial Sequence: Synthetic oligonucleotide
  Sense strand starting at position 3687 of SEQ ID NO: 588666
agggucuuugugcaauaaa

SEQ ID NO: 881099 - RNA, 19 nt, Artificial Sequence
  Description of Artificial Sequence: Synthetic oligonucleotide
  Antisense strand to SEQ ID NO: 881098
uuuauugcacaaagacccu

SEQ ID NO: 881100 - RNA, 19 nt, Artificial Sequence
  Description of Artificial Sequence: Synthetic oligonucleotide
  Sense strand starting at position 3690 of SEQ ID NO: 588666
gucuuugugcaauaaacac

SEQ ID NO: 881101 - RNA, 19 nt, Artificial Sequence
  Description of Artificial Sequence: Synthetic oligonucleotide
  Antisense strand to SEQ ID NO: 881100
guguuuauugcacaaagac

SEQ ID NO: 881102 - RNA, 19 nt, Artificial Sequence
  Description of Artificial Sequence: Synthetic oligonucleotide
  Sense strand starting at position 3737 of SEQ ID NO: 588666
ccuagagcaaguugaugau

SEQ ID NO: 881103 - RNA, 19 nt, Artificial Sequence
  Description of Artificial Sequence: Synthetic oligonucleotide
  Antisense strand to SEQ ID NO: 881102
aucaucaacuugcucuagg

SEQ ID NO: 881104 - RNA, 19 nt, Artificial Sequence
  Description of Artificial Sequence: Synthetic oligonucleotide
  Sense strand starting at position 3746 of SEQ ID NO: 588666
aguugaugauccucacuga

SEQ ID NO: 881105 - RNA, 19 nt, Artificial Sequence
  Description of Artificial Sequence: Synthetic oligonucleotide
  Antisense strand to SEQ ID NO: 881104
ucagugaggaucaucaacu

SEQ ID NO: 881106 - RNA, 19 nt, Artificial Sequence
  Description of Artificial Sequence: Synthetic oligonucleotide
  Sense strand starting at position 3749 of SEQ ID NO: 588666
ugaugauccucacugagau

SEQ ID NO: 881107 - RNA, 19 nt, Artificial Sequence
  Description of Artificial Sequence: Synthetic oligonucleotide
  Antisense strand to SEQ ID NO: 881106
aucucagugaggaucauca

SEQ ID NO: 881108 - RNA, 19 nt, Artificial Sequence
  Description of Artificial Sequence: Synthetic oligonucleotide
  Sense strand starting at position 3750 of SEQ ID NO: 588666
gaugauccucacugagauu

SEQ ID NO: 881109 - RNA, 19 nt, Artificial Sequence
  Description of Artificial Sequence: Synthetic oligonucleotide
  Antisense strand to SEQ ID NO: 881108
aaucucagugaggaucauc

SEQ ID NO: 881110 - RNA, 19 nt, Artificial Sequence
  Description of Artificial Sequence: Synthetic oligonucleotide
  Sense strand starting at position 3860 of SEQ ID NO: 588666
guugauguacaguagguaa

SEQ ID NO: 881111 - RNA, 19 nt, Artificial Sequence
  Description of Artificial Sequence: Synthetic oligonucleotide
  Antisense strand to SEQ ID NO: 881110
uuaccuacuguacaucaac

SEQ ID NO: 881112 - RNA, 19 nt, Artificial Sequence
  Description of Artificial Sequence: Synthetic oligonucleotide
  Sense strand starting at position 3863 of SEQ ID NO: 588666
gauguacaguagguaauua

SEQ ID NO: 881113 - RNA, 19 nt, Artificial Sequence
  Description of Artificial Sequence: Synthetic oligonucleotide
  Antisense strand to SEQ ID NO: 881112
uaauuaccuacuguacauc

SEQ ID NO: 881114 - RNA, 19 nt, Artificial Sequence
  Description of Artificial Sequence: Synthetic oligonucleotide
  Sense strand starting at position 372 of SEQ ID NO: 588667
cucccugcucuuggaguaa

SEQ ID NO: 881115 - RNA, 19 nt, Artificial Sequence
  Description of Artificial Sequence: Synthetic oligonucleotide
  Antisense strand to SEQ ID NO: 881114
uuacuccaagagcagggag

SEQ ID NO: 881116 - RNA, 19 nt, Artificial Sequence
  Description of Artificial Sequence: Synthetic oligonucleotide
  Sense strand starting at position 709 of SEQ ID NO: 588667
cuuccacuuuguucugaga

SEQ ID NO: 881117 - RNA, 19 nt, Artificial Sequence
  Description of Artificial Sequence: Synthetic oligonucleotide
  Antisense strand to SEQ ID NO: 881116
ucucagaacaaaguggaag

SEQ ID NO: 881118 - RNA, 19 nt, Artificial Sequence
  Description of Artificial Sequence: Synthetic oligonucleotide
  Sense strand starting at position 747 of SEQ ID NO: 588667
ggauuucagugagaagagu

SEQ ID NO: 881119 - RNA, 19 nt, Artificial Sequence
  Description of Artificial Sequence: Synthetic oligonucleotide
  Antisense strand to SEQ ID NO: 881118
acucuucucacugaaaucc

SEQ ID NO: 881120 - RNA, 19 nt, Artificial Sequence
  Description of Artificial Sequence: Synthetic oligonucleotide
  Sense strand starting at position 829 of SEQ ID NO: 588667
gacugaagucuugggacca

SEQ ID NO: 881121 - RNA, 19 nt, Artificial Sequence
  Description of Artificial Sequence: Synthetic oligonucleotide
  Antisense strand to SEQ ID NO: 881120
uggucccaagacuucaguc

SEQ ID NO: 881122 - RNA, 19 nt, Artificial Sequence
  Description of Artificial Sequence: Synthetic oligonucleotide
  Sense strand starting at position 1186 of SEQ ID NO: 588667
ucaucagagaugugggcuu

SEQ ID NO: 881123 - RNA, 19 nt, Artificial Sequence
  Description of Artificial Sequence: Synthetic oligonucleotide
  Antisense strand to SEQ ID NO: 881122
aagcccacaucucugauga

SEQ ID NO: 881124 - RNA, 19 nt, Artificial Sequence
  Description of Artificial Sequence: Synthetic oligonucleotide
  Sense strand starting at position 1457 of SEQ ID NO: 588667
ggaucuugcaggugaagug

SEQ ID NO: 881125 - RNA, 19 nt, Artificial Sequence
  Description of Artificial Sequence: Synthetic oligonucleotide
  Antisense strand to SEQ ID NO: 881124
cacuucaccugcaagaucc

SEQ ID NO: 881126 - RNA, 19 nt, Artificial Sequence
  Description of Artificial Sequence: Synthetic oligonucleotide
  Sense strand starting at position 1505 of SEQ ID NO: 588667
gccucauggagaugaccau

SEQ ID NO: 881127 - RNA, 19 nt, Artificial Sequence
  Description of Artificial Sequence: Synthetic oligonucleotide
  Antisense strand to SEQ ID NO: 881126
auggucaucuccaugaggc

SEQ ID NO: 881128 - RNA, 19 nt, Artificial Sequence
  Description of Artificial Sequence: Synthetic oligonucleotide
  Sense strand starting at position 1721 of SEQ ID NO: 588667
aggagauggucuuccggga

SEQ ID NO: 881129 - RNA, 19 nt, Artificial Sequence
  Description of Artificial Sequence: Synthetic oligonucleotide
  Antisense strand to SEQ ID NO: 881128
ucccggaagaccaucuccu

SEQ ID NO: 881130 - RNA, 19 nt, Artificial Sequence
  Description of Artificial Sequence: Synthetic oligonucleotide
  Sense strand starting at position 1725 of SEQ ID NO: 588667
gauggucuuccgggaugac

SEQ ID NO: 881131 - RNA, 19 nt, Artificial Sequence
  Description of Artificial Sequence: Synthetic oligonucleotide
  Antisense strand to SEQ ID NO: 881130
gucaucccggaagaccauc

SEQ ID NO: 881132 - RNA, 19 nt, Artificial Sequence
  Description of Artificial Sequence: Synthetic oligonucleotide
  Sense strand starting at position 1726 of SEQ ID NO: 588667
auggucuuccgggaugaca

SEQ ID NO: 881133 - RNA, 19 nt, Artificial Sequence
  Description of Artificial Sequence: Synthetic oligonucleotide
  Antisense strand to SEQ ID NO: 881132
ugucaucccggaagaccau

SEQ ID NO: 881134 - RNA, 19 nt, Artificial Sequence
  Description of Artificial Sequence: Synthetic oligonucleotide
  Sense strand starting at position 1785 of SEQ ID NO: 588667
gcagauguccaggguagag

SEQ ID NO: 881135 - RNA, 19 nt, Artificial Sequence
  Description of Artificial Sequence: Synthetic oligonucleotide
  Antisense strand to SEQ ID NO: 881134
cucuacccuggacaucugc

SEQ ID NO: 881136 - RNA, 19 nt, Artificial Sequence
  Description of Artificial Sequence: Synthetic oligonucleotide
  Sense strand starting at position 2094 of SEQ ID NO: 588667
guggacugucaggaucuuu

SEQ ID NO: 881137 - RNA, 19 nt, Artificial Sequence
  Description of Artificial Sequence: Synthetic oligonucleotide
  Antisense strand to SEQ ID NO: 881136
aaagauccugacaguccac

SEQ ID NO: 881138 - RNA, 19 nt, Artificial Sequence
  Description of Artificial Sequence: Synthetic oligonucleotide
  Sense strand starting at position 2146 of SEQ ID NO: 588667
gggcaaucccuuuauccuc

SEQ ID NO: 881139 - RNA, 19 nt, Artificial Sequence
  Description of Artificial Sequence: Synthetic oligonucleotide
  Antisense strand to SEQ ID NO: 881138
gaggauaaagggauugccc

SEQ ID NO: 881140 - RNA, 19 nt, Artificial Sequence
  Description of Artificial Sequence: Synthetic oligonucleotide
  Sense strand starting at position 2173 of SEQ ID NO: 588667
ucaguuuauccaugugaaa

SEQ ID NO: 881141 - RNA, 19 nt, Artificial Sequence
  Description of Artificial Sequence: Synthetic oligonucleotide
  Antisense strand to SEQ ID NO: 881140
uuucacauggauaaacuga

SEQ ID NO: 881142 - RNA, 19 nt, Artificial Sequence
  Description of Artificial Sequence: Synthetic oligonucleotide
  Sense strand starting at position 2207 of SEQ ID NO: 588667
agaucagcauucccugaga

SEQ ID NO: 881143 - RNA, 19 nt, Artificial Sequence
  Description of Artificial Sequence: Synthetic oligonucleotide
  Antisense strand to SEQ ID NO: 881142
ucucagggaaugcugaucu

SEQ ID NO: 881144 - RNA, 19 nt, Artificial Sequence
  Description of Artificial Sequence: Synthetic oligonucleotide
  Sense strand starting at position 2209 of SEQ ID NO: 588667
aucagcauucccugagaga

SEQ ID NO: 881145 - RNA, 19 nt, Artificial Sequence
  Description of Artificial Sequence: Synthetic oligonucleotide
  Antisense strand to SEQ ID NO: 881144
ucucucagggaaugcugau

SEQ ID NO: 881146 - RNA, 19 nt, Artificial Sequence
  Description of Artificial Sequence: Synthetic oligonucleotide
  Sense strand starting at position 2234 of SEQ ID NO: 588667
augagaacauuaguaagca

SEQ ID NO: 881147 - RNA, 19 nt, Artificial Sequence
  Description of Artificial Sequence: Synthetic oligonucleotide
  Antisense strand to SEQ ID NO: 881146
ugcuuacuaauguucucau

SEQ ID NO: 881148 - RNA, 19 nt, Artificial Sequence
  Description of Artificial Sequence: Synthetic oligonucleotide
  Sense strand starting at position 2324 of SEQ ID NO: 588667
gcguuuacuacgcuaaugu

SEQ ID NO: 881149 - RNA, 19 nt, Artificial Sequence
  Description of Artificial Sequence: Synthetic oligonucleotide
  Antisense strand to SEQ ID NO: 881148
acauuagcguaguaaacgc

SEQ ID NO: 881150 - RNA, 19 nt, Artificial Sequence
  Description of Artificial Sequence: Synthetic oligonucleotide
  Sense strand starting at position 2333 of SEQ ID NO: 588667
acgcuaaugugaucuauga

SEQ ID NO: 881151 - RNA, 19 nt, Artificial Sequence
  Description of Artificial Sequence: Synthetic oligonucleotide
  Antisense strand to SEQ ID NO: 881150
ucauagaucacauuagcgu

SEQ ID NO: 881152 - RNA, 19 nt, Artificial Sequence
  Description of Artificial Sequence: Synthetic oligonucleotide
  Sense strand starting at position 2346 of SEQ ID NO: 588667
cuaugacuccugcaaagca

SEQ ID NO: 881153 - RNA, 19 nt, Artificial Sequence
  Description of Artificial Sequence: Synthetic oligonucleotide
  Antisense strand to SEQ ID NO: 881152
ugcuuugcaggagucauag

SEQ ID NO: 881154 - RNA, 19 nt, Artificial Sequence
  Description of Artificial Sequence: Synthetic oligonucleotide
  Sense strand starting at position 2354 of SEQ ID NO: 588667
ccugcaaagcaauguagaa

SEQ ID NO: 881155 - RNA, 19 nt, Artificial Sequence
  Description of Artificial Sequence: Synthetic oligonucleotide
  Antisense strand to SEQ ID NO: 881154
uucuacauugcuuugcagg

SEQ ID NO: 881156 - RNA, 19 nt, Artificial Sequence
  Description of Artificial Sequence: Synthetic oligonucleotide
  Sense strand starting at position 2435 of SEQ ID NO: 588667
gcagauaaguguucuauga

SEQ ID NO: 881157 - RNA, 19 nt, Artificial Sequence
  Description of Artificial Sequence: Synthetic oligonucleotide
  Antisense strand to SEQ ID NO: 881156
ucauagaacacuuaucugc

SEQ ID NO: 881158 - RNA, 19 nt, Artificial Sequence
  Description of Artificial Sequence: Synthetic oligonucleotide
  Sense strand starting at position 2439 of SEQ ID NO: 588667
auaaguguucuaugagcau

SEQ ID NO: 881159 - RNA, 19 nt, Artificial Sequence
  Description of Artificial Sequence: Synthetic oligonucleotide
  Antisense strand to SEQ ID NO: 881158
augcucauagaacacuuau

SEQ ID NO: 881160 - RNA, 19 nt, Artificial Sequence
  Description of Artificial Sequence: Synthetic oligonucleotide
  Sense strand starting at position 2450 of SEQ ID NO: 588667
augagcauagucugggaaa

SEQ ID NO: 881161 - RNA, 19 nt, Artificial Sequence
  Description of Artificial Sequence: Synthetic oligonucleotide
  Antisense strand to SEQ ID NO: 881160
uuucccagacuaugcucau

SEQ ID NO: 881162 - RNA, 19 nt, Artificial Sequence
  Description of Artificial Sequence: Synthetic oligonucleotide
  Sense strand starting at position 2452 of SEQ ID NO: 588667
gagcauagucugggaaaca

SEQ ID NO: 881163 - RNA, 19 nt, Artificial Sequence
  Description of Artificial Sequence: Synthetic oligonucleotide
  Antisense strand to SEQ ID NO: 881162
uguuucccagacuaugcuc

SEQ ID NO: 881164 - RNA, 19 nt, Artificial Sequence
  Description of Artificial Sequence: Synthetic oligonucleotide
  Sense strand starting at position 2508 of SEQ ID NO: 588667
ccagaaucaccuggaaagu

SEQ ID NO: 881165 - RNA, 19 nt, Artificial Sequence
  Description of Artificial Sequence: Synthetic oligonucleotide
  Antisense strand to SEQ ID NO: 881164
acuuuccaggugauucugg

SEQ ID NO: 881166 - RNA, 19 nt, Artificial Sequence
  Description of Artificial Sequence: Synthetic oligonucleotide
  Sense strand starting at position 2604 of SEQ ID NO: 588667
gguaccacacuuugaggaa

SEQ ID NO: 881167 - RNA, 19 nt, Artificial Sequence
  Description of Artificial Sequence: Synthetic oligonucleotide
  Antisense strand to SEQ ID NO: 881166
uuccucaaagugugguacc

SEQ ID NO: 881168 - RNA, 19 nt, Artificial Sequence
  Description of Artificial Sequence: Synthetic oligonucleotide
  Sense strand starting at position 2652 of SEQ ID NO: 588667
ggagauucuccuggcuuua

SEQ ID NO: 881169 - RNA, 19 nt, Artificial Sequence
  Description of Artificial Sequence: Synthetic oligonucleotide
  Antisense strand to SEQ ID NO: 881168
uaaagccaggagaaucucc

SEQ ID NO: 881170 - RNA, 19 nt, Artificial Sequence
  Description of Artificial Sequence: Synthetic oligonucleotide
  Sense strand starting at position 2676 of SEQ ID NO: 588667
gccucugagccaucgcauu

SEQ ID NO: 881171 - RNA, 19 nt, Artificial Sequence
  Description of Artificial Sequence: Synthetic oligonucleotide
  Antisense strand to SEQ ID NO: 881170
aaugcgauggcucagaggc

SEQ ID NO: 881172 - RNA, 19 nt, Artificial Sequence
  Description of Artificial Sequence: Synthetic oligonucleotide
  Sense strand starting at position 2999 of SEQ ID NO: 588667
caugaacuccuaggguauu

SEQ ID NO: 881173 - RNA, 19 nt, Artificial Sequence
  Description of Artificial Sequence: Synthetic oligonucleotide
  Antisense strand to SEQ ID NO: 881172
aauacccuaggaguucaug

SEQ ID NO: 881174 - RNA, 19 nt, Artificial Sequence
  Description of Artificial Sequence: Synthetic oligonucleotide
  Sense strand starting at position 3010 of SEQ ID NO: 588667
aggguauuagcauggaaca

SEQ ID NO: 881175 - RNA, 19 nt, Artificial Sequence
  Description of Artificial Sequence: Synthetic oligonucleotide
  Antisense strand to SEQ ID NO: 881174
uguuccaugcuaauacccu

SEQ ID NO: 881176 - RNA, 19 nt, Artificial Sequence
  Description of Artificial Sequence: Synthetic oligonucleotide
  Sense strand starting at position 3011 of SEQ ID NO: 588667
ggguauuagcauggaacau

SEQ ID NO: 881177 - RNA, 19 nt, Artificial Sequence
  Description of Artificial Sequence: Synthetic oligonucleotide
  Antisense strand to SEQ ID NO: 881176
auguuccaugcuaauaccc

SEQ ID NO: 881178 - RNA, 19 nt, Artificial Sequence
  Description of Artificial Sequence: Synthetic oligonucleotide
  Sense strand starting at position 3203 of SEQ ID NO: 588667
accauucuagauggauauc

SEQ ID NO: 881179 - RNA, 19 nt, Artificial Sequence
  Description of Artificial Sequence: Synthetic oligonucleotide
  Antisense strand to SEQ ID NO: 881178
gauauccaucuagaauggu

SEQ ID NO: 881180 - RNA, 19 nt, Artificial Sequence
  Description of Artificial Sequence: Synthetic oligonucleotide
  Sense strand starting at position 3269 of SEQ ID NO: 588667
gucaccucuccuuaguguu

SEQ ID NO: 881181 - RNA, 19 nt, Artificial Sequence
  Description of Artificial Sequence: Synthetic oligonucleotide
  Antisense strand to SEQ ID NO: 881180
aacacuaaggagaggugac

SEQ ID NO: 881182 - RNA, 19 nt, Artificial Sequence
  Description of Artificial Sequence: Synthetic oligonucleotide
  Sense strand starting at position 3279 of SEQ ID NO: 588667
cuuaguguuccaggguauc

SEQ ID NO: 881183 - RNA, 19 nt, Artificial Sequence
  Description of Artificial Sequence: Synthetic oligonucleotide
  Antisense strand to SEQ ID NO: 881182
gauacccuggaacacuaag

SEQ ID NO: 881184 - RNA, 19 nt, Artificial Sequence
  Description of Artificial Sequence: Synthetic oligonucleotide
  Sense strand starting at position 3308 of SEQ ID NO: 588667
ucauuaaucccaugggaca

SEQ ID NO: 881185 - RNA, 19 nt, Artificial Sequence
  Description of Artificial Sequence: Synthetic oligonucleotide
  Antisense strand to SEQ ID NO: 881184
ugucccaugggauuaauga

SEQ ID NO: 881186 - RNA, 19 nt, Artificial Sequence
  Description of Artificial Sequence: Synthetic oligonucleotide
  Sense strand starting at position 3877 of SEQ ID NO: 588667
guguauaucuauccagaua

SEQ ID NO: 881187 - RNA, 19 nt, Artificial Sequence
  Description of Artificial Sequence: Synthetic oligonucleotide
  Antisense strand to SEQ ID NO: 881186
uaucuggauagauauacac

SEQ ID NO: 881188 - RNA, 19 nt, Artificial Sequence
  Description of Artificial Sequence: Synthetic oligonucleotide
  Sense strand starting at position 3969 of SEQ ID NO: 588667
ugcagcuuuauugaaggau

SEQ ID NO: 881189 - RNA, 19 nt, Artificial Sequence
  Description of Artificial Sequence: Synthetic oligonucleotide
  Antisense strand to SEQ ID NO: 881188
auccuucaauaaagcugca

SEQ ID NO: 881190 - RNA, 19 nt, Artificial Sequence
  Description of Artificial Sequence: Synthetic oligonucleotide
  Sense strand starting at position 3972 of SEQ ID NO: 588667
agcuuuauugaaggauggu

SEQ ID NO: 881191 - RNA, 19 nt, Artificial Sequence
  Description of Artificial Sequence: Synthetic oligonucleotide
  Antisense strand to SEQ ID NO: 881190
accauccuucaauaaagcu

SEQ ID NO: 881192 - RNA, 19 nt, Artificial Sequence
  Description of Artificial Sequence: Synthetic oligonucleotide
  Sense strand starting at position 3973 of SEQ ID NO: 588667
gcuuuauugaaggaugguu

SEQ ID NO: 881193 - RNA, 19 nt, Artificial Sequence
  Description of Artificial Sequence: Synthetic oligonucleotide
  Antisense strand to SEQ ID NO: 881192
aaccauccuucaauaaagc

SEQ ID NO: 881194 - RNA, 19 nt, Artificial Sequence
  Description of Artificial Sequence: Synthetic oligonucleotide
  Sense strand starting at position 461 of SEQ ID NO: 588668
agaguuagaugcucacacu

SEQ ID NO: 881195 - RNA, 19 nt, Artificial Sequence
  Description of Artificial Sequence: Synthetic oligonucleotide
  Antisense strand to SEQ ID NO: 881194
agugugagcaucuaacucu

SEQ ID NO: 881196 - RNA, 19 nt, Artificial Sequence
  Description of Artificial Sequence: Synthetic oligonucleotide
  Sense strand starting at position 462 of SEQ ID NO: 588668
gaguuagaugcucacacua

SEQ ID NO: 881197 - RNA, 19 nt, Artificial Sequence
  Description of Artificial Sequence: Synthetic oligonucleotide
  Antisense strand to SEQ ID NO: 881196
uagugugagcaucuaacuc

SEQ ID NO: 881198 - RNA, 19 nt, Artificial Sequence
  Description of Artificial Sequence: Synthetic oligonucleotide
  Sense strand starting at position 519 of SEQ ID NO: 588668
guagaaucaugauuaucau

SEQ ID NO: 881199 - RNA, 19 nt, Artificial Sequence
  Description of Artificial Sequence: Synthetic oligonucleotide
  Antisense strand to SEQ ID NO: 881198
augauaaucaugauucuac

SEQ ID NO: 881200 - RNA, 19 nt, Artificial Sequence
  Description of Artificial Sequence: Synthetic oligonucleotide
  Sense strand starting at position 541 of SEQ ID NO: 588668
auacucacucugggacaua

SEQ ID NO: 881201 - RNA, 19 nt, Artificial Sequence
  Description of Artificial Sequence: Synthetic oligonucleotide
  Antisense strand to SEQ ID NO: 881200
uaugucccagagugaguau

SEQ ID NO: 881202 - RNA, 19 nt, Artificial Sequence
  Description of Artificial Sequence: Synthetic oligonucleotide
  Sense strand starting at position 768 of SEQ ID NO: 588668
cuacccagacuugguaauu

SEQ ID NO: 881203 - RNA, 19 nt, Artificial Sequence
  Description of Artificial Sequence: Synthetic oligonucleotide
  Antisense strand to SEQ ID NO: 881202
aauuaccaagucuggguag

SEQ ID NO: 881204 - RNA, 19 nt, Artificial Sequence
  Description of Artificial Sequence: Synthetic oligonucleotide
  Sense strand starting at position 823 of SEQ ID NO: 588668
ggagggugcccagagguau

SEQ ID NO: 881205 - RNA, 19 nt, Artificial Sequence
  Description of Artificial Sequence: Synthetic oligonucleotide
  Antisense strand to SEQ ID NO: 881204
auaccucugggcacccucc

SEQ ID NO: 881206 - RNA, 19 nt, Artificial Sequence
  Description of Artificial Sequence: Synthetic oligonucleotide
  Sense strand starting at position 859 of SEQ ID NO: 588668
gaucuuaugugucuaugaa

SEQ ID NO: 881207 - RNA, 19 nt, Artificial Sequence
  Description of Artificial Sequence: Synthetic oligonucleotide
  Antisense strand to SEQ ID NO: 881206
uucauagacacauaagauc

SEQ ID NO: 881208 - RNA, 19 nt, Artificial Sequence
  Description of Artificial Sequence: Synthetic oligonucleotide
  Sense strand starting at position 860 of SEQ ID NO: 588668
aucuuaugugucuaugaau

SEQ ID NO: 881209 - RNA, 19 nt, Artificial Sequence
  Description of Artificial Sequence: Synthetic oligonucleotide
  Antisense strand to SEQ ID NO: 881208
auucauagacacauaagau

SEQ ID NO: 881210 - RNA, 19 nt, Artificial Sequence
  Description of Artificial Sequence: Synthetic oligonucleotide
  Sense strand starting at position 868 of SEQ ID NO: 588668
ugucuaugaauguggaaug

SEQ ID NO: 881211 - RNA, 19 nt, Artificial Sequence
  Description of Artificial Sequence: Synthetic oligonucleotide
  Antisense strand to SEQ ID NO: 881210
cauuccacauucauagaca

SEQ ID NO: 881212 - RNA, 19 nt, Artificial Sequence
  Description of Artificial Sequence: Synthetic oligonucleotide
  Sense strand starting at position 927 of SEQ ID NO: 588668
ucuggaguuccuuaaguua

SEQ ID NO: 881213 - RNA, 19 nt, Artificial Sequence
  Description of Artificial Sequence: Synthetic oligonucleotide
  Antisense strand to SEQ ID NO: 881212
uaacuuaaggaacuccaga

SEQ ID NO: 881214 - RNA, 19 nt, Artificial Sequence
  Description of Artificial Sequence: Synthetic oligonucleotide
  Sense strand starting at position 991 of SEQ ID NO: 588668
agaauaugcccaugacuuu

SEQ ID NO: 881215 - RNA, 19 nt, Artificial Sequence
  Description of Artificial Sequence: Synthetic oligonucleotide
  Antisense strand to SEQ ID NO: 881214
aaagucaugggcauauucu

SEQ ID NO: 881216 - RNA, 19 nt, Artificial Sequence
  Description of Artificial Sequence: Synthetic oligonucleotide
  Sense strand starting at position 1090 of SEQ ID NO: 588668
uugacauccuuauugugga

SEQ ID NO: 881217 - RNA, 19 nt, Artificial Sequence
  Description of Artificial Sequence: Synthetic oligonucleotide
  Antisense strand to SEQ ID NO: 881216
uccacaauaaggaugucaa

SEQ ID NO: 881218 - RNA, 19 nt, Artificial Sequence
  Description of Artificial Sequence: Synthetic oligonucleotide
  Sense strand starting at position 1136 of SEQ ID NO: 588668
guguaauggcaguauacau

SEQ ID NO: 881219 - RNA, 19 nt, Artificial Sequence
  Description of Artificial Sequence: Synthetic oligonucleotide
  Antisense strand to SEQ ID NO: 881218
auguauacugccauuacac

SEQ ID NO: 881220 - RNA, 19 nt, Artificial Sequence
  Description of Artificial Sequence: Synthetic oligonucleotide
  Sense strand starting at position 1143 of SEQ ID NO: 588668
ggcaguauacauuacugaa

SEQ ID NO: 881221 - RNA, 19 nt, Artificial Sequence
  Description of Artificial Sequence: Synthetic oligonucleotide
  Antisense strand to SEQ ID NO: 881220
uucaguaauguauacugcc

SEQ ID NO: 881222 - RNA, 19 nt, Artificial Sequence
  Description of Artificial Sequence: Synthetic oligonucleotide
  Sense strand starting at position 1169 of SEQ ID NO: 588668
uguccugauacugagaguu

SEQ ID NO: 881223 - RNA, 19 nt, Artificial Sequence
  Description of Artificial Sequence: Synthetic oligonucleotide
  Antisense strand to SEQ ID NO: 881222
aacucucaguaucaggaca

SEQ ID NO: 881224 - RNA, 19 nt, Artificial Sequence
  Description of Artificial Sequence: Synthetic oligonucleotide
  Sense strand starting at position 1387 of SEQ ID NO: 588668
auggccagcucauuagaau

SEQ ID NO: 881225 - RNA, 19 nt, Artificial Sequence
  Description of Artificial Sequence: Synthetic oligonucleotide
  Antisense strand to SEQ ID NO: 881224
auucuaaugagcuggccau

SEQ ID NO: 881226 - RNA, 19 nt, Artificial Sequence
  Description of Artificial Sequence: Synthetic oligonucleotide
  Sense strand starting at position 1388 of SEQ ID NO: 588668
uggccagcucauuagaaug

SEQ ID NO: 881227 - RNA, 19 nt, Artificial Sequence
  Description of Artificial Sequence: Synthetic oligonucleotide
  Antisense strand to SEQ ID NO: 881226
cauucuaaugagcuggcca

SEQ ID NO: 881228 - RNA, 19 nt, Artificial Sequence
  Description of Artificial Sequence: Synthetic oligonucleotide
  Sense strand starting at position 1398 of SEQ ID NO: 588668
auuagaauguaugucagaa

SEQ ID NO: 881229 - RNA, 19 nt, Artificial Sequence
  Description of Artificial Sequence: Synthetic oligonucleotide
  Antisense strand to SEQ ID NO: 881228
uucugacauacauucuaau

SEQ ID NO: 881230 - RNA, 19 nt, Artificial Sequence
  Description of Artificial Sequence: Synthetic oligonucleotide
  Sense strand starting at position 1505 of SEQ ID NO: 588668
ggacgagucccacacgcaa

SEQ ID NO: 881231 - RNA, 19 nt, Artificial Sequence
  Description of Artificial Sequence: Synthetic oligonucleotide
  Antisense strand to SEQ ID NO: 881230
uugcgugugggacucgucc

SEQ ID NO: 881232 - RNA, 19 nt, Artificial Sequence
  Description of Artificial Sequence: Synthetic oligonucleotide
  Sense strand starting at position 1714 of SEQ ID NO: 588668
gcaggaaugguuggguaau

SEQ ID NO: 881233 - RNA, 19 nt, Artificial Sequence
  Description of Artificial Sequence: Synthetic oligonucleotide
  Antisense strand to SEQ ID NO: 881232
auuacccaaccauuccugc

SEQ ID NO: 881234 - RNA, 19 nt, Artificial Sequence
  Description of Artificial Sequence: Synthetic oligonucleotide
  Sense strand starting at position 1716 of SEQ ID NO: 588668
aggaaugguuggguaauga

SEQ ID NO: 881235 - RNA, 19 nt, Artificial Sequence
  Description of Artificial Sequence: Synthetic oligonucleotide
  Antisense strand to SEQ ID NO: 881234
ucauuacccaaccauuccu

SEQ ID NO: 881236 - RNA, 19 nt, Artificial Sequence
  Description of Artificial Sequence: Synthetic oligonucleotide
  Sense strand starting at position 1808 of SEQ ID NO: 588668
gcagauaauacauggguga

SEQ ID NO: 881237 - RNA, 19 nt, Artificial Sequence
  Description of Artificial Sequence: Synthetic oligonucleotide
  Antisense strand to SEQ ID NO: 881236
ucacccauguauuaucugc

SEQ ID NO: 881238 - RNA, 19 nt, Artificial Sequence
  Description of Artificial Sequence: Synthetic oligonucleotide
  Sense strand starting at position 1875 of SEQ ID NO: 588668
caguaugguggucagguaa

SEQ ID NO: 881239 - RNA, 19 nt, Artificial Sequence
  Description of Artificial Sequence: Synthetic oligonucleotide
  Antisense strand to SEQ ID NO: 881238
uuaccugaccaccauacug

SEQ ID NO: 881240 - RNA, 19 nt, Artificial Sequence
  Description of Artificial Sequence: Synthetic oligonucleotide
  Sense strand starting at position 1932 of SEQ ID NO: 588668
guuagcucucgagaaccca

SEQ ID NO: 881241 - RNA, 19 nt, Artificial Sequence
  Description of Artificial Sequence: Synthetic oligonucleotide
  Antisense strand to SEQ ID NO: 881240
uggguucucgagagcuaac

SEQ ID NO: 881242 - RNA, 19 nt, Artificial Sequence
  Description of Artificial Sequence: Synthetic oligonucleotide
  Sense strand starting at position 1985 of SEQ ID NO: 588668
gggcaaagcucaucaugag

SEQ ID NO: 881243 - RNA, 19 nt, Artificial Sequence
  Description of Artificial Sequence: Synthetic oligonucleotide
  Antisense strand to SEQ ID NO: 881242
cucaugaugagcuuugccc

SEQ ID NO: 881244 - RNA, 19 nt, Artificial Sequence
  Description of Artificial Sequence: Synthetic oligonucleotide
  Sense strand starting at position 1986 of SEQ ID NO: 588668
ggcaaagcucaucaugagu

SEQ ID NO: 881245 - RNA, 19 nt, Artificial Sequence
  Description of Artificial Sequence: Synthetic oligonucleotide
  Antisense strand to SEQ ID NO: 881244
acucaugaugagcuuugcc

SEQ ID NO: 881246 - RNA, 19 nt, Artificial Sequence
  Description of Artificial Sequence: Synthetic oligonucleotide
  Sense strand starting at position 2097 of SEQ ID NO: 588668
guuacuaaagaucguuaaa

SEQ ID NO: 881247 - RNA, 19 nt, Artificial Sequence
  Description of Artificial Sequence: Synthetic oligonucleotide
  Antisense strand to SEQ ID NO: 881246
uuuaacgaucuuuaguaac

SEQ ID NO: 881248 - RNA, 19 nt, Artificial Sequence
  Description of Artificial Sequence: Synthetic oligonucleotide
  Sense strand starting at position 2099 of SEQ ID NO: 588668
uacuaaagaucguuaaaga

SEQ ID NO: 881249 - RNA, 19 nt, Artificial Sequence
  Description of Artificial Sequence: Synthetic oligonucleotide
  Antisense strand to SEQ ID NO: 881248
ucuuuaacgaucuuuagua

SEQ ID NO: 881250 - RNA, 19 nt, Artificial Sequence
  Description of Artificial Sequence: Synthetic oligonucleotide
  Sense strand starting at position 2148 of SEQ ID NO: 588668
cucccuaaggucuaggauu

SEQ ID NO: 881251 - RNA, 19 nt, Artificial Sequence
  Description of Artificial Sequence: Synthetic oligonucleotide
  Antisense strand to SEQ ID NO: 881250
aauccuagaccuuagggag

SEQ ID NO: 881252 - RNA, 19 nt, Artificial Sequence
  Description of Artificial Sequence: Synthetic oligonucleotide
  Sense strand starting at position 2162 of SEQ ID NO: 588668
ggauuucgcuuccuuaaua

SEQ ID NO: 881253 - RNA, 19 nt, Artificial Sequence
  Description of Artificial Sequence: Synthetic oligonucleotide
  Antisense strand to SEQ ID NO: 881252
uauuaaggaagcgaaaucc

SEQ ID NO: 881254 - RNA, 19 nt, Artificial Sequence
  Description of Artificial Sequence: Synthetic oligonucleotide
  Sense strand starting at position 2477 of SEQ ID NO: 588668
agaaacaauucuuucgaca

SEQ ID NO: 881255 - RNA, 19 nt, Artificial Sequence
  Description of Artificial Sequence: Synthetic oligonucleotide
  Antisense strand to SEQ ID NO: 881254
ugucgaaagaauuguuucu

SEQ ID NO: 881256 - RNA, 19 nt, Artificial Sequence
  Description of Artificial Sequence: Synthetic oligonucleotide
  Sense strand starting at position 2659 of SEQ ID NO: 588668
ugcugauaacgugaucuua

SEQ ID NO: 881257 - RNA, 19 nt, Artificial Sequence
  Description of Artificial Sequence: Synthetic oligonucleotide
  Antisense strand to SEQ ID NO: 881256
uaagaucacguuaucagca

SEQ ID NO: 881258 - RNA, 19 nt, Artificial Sequence
  Description of Artificial Sequence: Synthetic oligonucleotide
  Sense strand starting at position 2661 of SEQ ID NO: 588668
cugauaacgugaucuuaua

SEQ ID NO: 881259 - RNA, 19 nt, Artificial Sequence
  Description of Artificial Sequence: Synthetic oligonucleotide
  Antisense strand to SEQ ID NO: 881258
uauaagaucacguuaucag

SEQ ID NO: 881260 - RNA, 19 nt, Artificial Sequence
  Description of Artificial Sequence: Synthetic oligonucleotide
  Sense strand starting at position 2718 of SEQ ID NO: 588668
augagauacugcuuuagaa

SEQ ID NO: 881261 - RNA, 19 nt, Artificial Sequence
  Description of Artificial Sequence: Synthetic oligonucleotide
  Antisense strand to SEQ ID NO: 881260
uucuaaagcaguaucucau

SEQ ID NO: 881262 - RNA, 19 nt, Artificial Sequence
  Description of Artificial Sequence: Synthetic oligonucleotide
  Sense strand starting at position 2901 of SEQ ID NO: 588668
cuguuaguccacuaugacu

SEQ ID NO: 881263 - RNA, 19 nt, Artificial Sequence
  Description of Artificial Sequence: Synthetic oligonucleotide
  Antisense strand to SEQ ID NO: 881262
agucauaguggacuaacag

SEQ ID NO: 881264 - RNA, 19 nt, Artificial Sequence
  Description of Artificial Sequence: Synthetic oligonucleotide
  Sense strand starting at position 2981 of SEQ ID NO: 588668
cuugacucuccugauaggu

SEQ ID NO: 881265 - RNA, 19 nt, Artificial Sequence
  Description of Artificial Sequence: Synthetic oligonucleotide
  Antisense strand to SEQ ID NO: 881264
accuaucaggagagucaag

SEQ ID NO: 881266 - RNA, 19 nt, Artificial Sequence
  Description of Artificial Sequence: Synthetic oligonucleotide
  Sense strand starting at position 2990 of SEQ ID NO: 588668
ccugauaggucuuccauac

SEQ ID NO: 881267 - RNA, 19 nt, Artificial Sequence
  Description of Artificial Sequence: Synthetic oligonucleotide
  Antisense strand to SEQ ID NO: 881266
guauggaagaccuaucagg

SEQ ID NO: 881268 - RNA, 19 nt, Artificial Sequence
  Description of Artificial Sequence: Synthetic oligonucleotide
  Sense strand starting at position 2994 of SEQ ID NO: 588668
auaggucuuccauacugau

SEQ ID NO: 881269 - RNA, 19 nt, Artificial Sequence
  Description of Artificial Sequence: Synthetic oligonucleotide
  Antisense strand to SEQ ID NO: 881268
aucaguauggaagaccuau

SEQ ID NO: 881270 - RNA, 19 nt, Artificial Sequence
  Description of Artificial Sequence: Synthetic oligonucleotide
  Sense strand starting at position 3035 of SEQ ID NO: 588668
gugacuccuuguuuaaaua

SEQ ID NO: 881271 - RNA, 19 nt, Artificial Sequence
  Description of Artificial Sequence: Synthetic oligonucleotide
  Antisense strand to SEQ ID NO: 881270
uauuuaaacaaggagucac

SEQ ID NO: 881272 - RNA, 19 nt, Artificial Sequence
  Description of Artificial Sequence: Synthetic oligonucleotide
  Sense strand starting at position 3043 of SEQ ID NO: 588668
uuguuuaaauagucaggga

SEQ ID NO: 881273 - RNA, 19 nt, Artificial Sequence
  Description of Artificial Sequence: Synthetic oligonucleotide
  Antisense strand to SEQ ID NO: 881272
ucccugacuauuuaaacaa

SEQ ID NO: 881274 - RNA, 19 nt, Artificial Sequence
  Description of Artificial Sequence: Synthetic oligonucleotide
  Sense strand starting at position 165 of SEQ ID NO: 588669
uagaucagucccugagaga

SEQ ID NO: 881275 - RNA, 19 nt, Artificial Sequence
  Description of Artificial Sequence: Synthetic oligonucleotide
  Antisense strand to SEQ ID NO: 881274
ucucucagggacugaucua

SEQ ID NO: 881276 - RNA, 19 nt, Artificial Sequence
  Description of Artificial Sequence: Synthetic oligonucleotide
  Sense strand starting at position 234 of SEQ ID NO: 588669
aaaggaagugugggcuaua

SEQ ID NO: 881277 - RNA, 19 nt, Artificial Sequence
  Description of Artificial Sequence: Synthetic oligonucleotide
  Antisense strand to SEQ ID NO: 881276
uauagcccacacuuccuuu

SEQ ID NO: 881278 - RNA, 19 nt, Artificial Sequence
  Description of Artificial Sequence: Synthetic oligonucleotide
  Sense strand starting at position 235 of SEQ ID NO: 588669
aaggaagugugggcuauau

SEQ ID NO: 881279 - RNA, 19 nt, Artificial Sequence
  Description of Artificial Sequence: Synthetic oligonucleotide
  Antisense strand to SEQ ID NO: 881278
auauagcccacacuuccuu

SEQ ID NO: 881280 - RNA, 19 nt, Artificial Sequence
  Description of Artificial Sequence: Synthetic oligonucleotide
  Sense strand starting at position 237 of SEQ ID NO: 588669
ggaagugugggcuauauuc

SEQ ID NO: 881281 - RNA, 19 nt, Artificial Sequence
  Description of Artificial Sequence: Synthetic oligonucleotide
  Antisense strand to SEQ ID NO: 881280
gaauauagcccacacuucc

SEQ ID NO: 881282 - RNA, 19 nt, Artificial Sequence
  Description of Artificial Sequence: Synthetic oligonucleotide
  Sense strand starting at position 633 of SEQ ID NO: 588669
gagugacagcuguggaaga

SEQ ID NO: 881283 - RNA, 19 nt, Artificial Sequence
  Description of Artificial Sequence: Synthetic oligonucleotide
  Antisense strand to SEQ ID NO: 881282
ucuuccacagcugucacuc

SEQ ID NO: 881284 - RNA, 19 nt, Artificial Sequence
  Description of Artificial Sequence: Synthetic oligonucleotide
  Sense strand starting at position 1229 of SEQ ID NO: 588669
gaccaauaauuguccgaua

SEQ ID NO: 881285 - RNA, 19 nt, Artificial Sequence
  Description of Artificial Sequence: Synthetic oligonucleotide
  Antisense strand to SEQ ID NO: 881284
uaucggacaauuauugguc

SEQ ID NO: 881286 - RNA, 19 nt, Artificial Sequence
  Description of Artificial Sequence: Synthetic oligonucleotide
  Sense strand starting at position 1230 of SEQ ID NO: 588669
accaauaauuguccgauaa

SEQ ID NO: 881287 - RNA, 19 nt, Artificial Sequence
  Description of Artificial Sequence: Synthetic oligonucleotide
  Antisense strand to SEQ ID NO: 881286
uuaucggacaauuauuggu

SEQ ID NO: 881288 - RNA, 19 nt, Artificial Sequence
  Description of Artificial Sequence: Synthetic oligonucleotide
  Sense strand starting at position 1231 of SEQ ID NO: 588669
ccaauaauuguccgauaau

SEQ ID NO: 881289 - RNA, 19 nt, Artificial Sequence
  Description of Artificial Sequence: Synthetic oligonucleotide
  Antisense strand to SEQ ID NO: 881288
auuaucggacaauuauugg

SEQ ID NO: 881290 - RNA, 19 nt, Artificial Sequence
  Description of Artificial Sequence: Synthetic oligonucleotide
  Sense strand starting at position 1284 of SEQ ID NO: 588669
ggacaaggcuuugcauaug

SEQ ID NO: 881291 - RNA, 19 nt, Artificial Sequence
  Description of Artificial Sequence: Synthetic oligonucleotide
  Antisense strand to SEQ ID NO: 881290
cauaugcaaagccuugucc

SEQ ID NO: 881292 - RNA, 19 nt, Artificial Sequence
  Description of Artificial Sequence: Synthetic oligonucleotide
  Sense strand starting at position 1384 of SEQ ID NO: 588669
gcugucaaugcugcuguaa

SEQ ID NO: 881293 - RNA, 19 nt, Artificial Sequence
  Description of Artificial Sequence: Synthetic oligonucleotide
  Antisense strand to SEQ ID NO: 881292
uuacagcagcauugacagc

SEQ ID NO: 881294 - RNA, 19 nt, Artificial Sequence
  Description of Artificial Sequence: Synthetic oligonucleotide
  Sense strand starting at position 1406 of SEQ ID NO: 588669
uugcuaacugauugaggga

SEQ ID NO: 881295 - RNA, 19 nt, Artificial Sequence
  Description of Artificial Sequence: Synthetic oligonucleotide
  Antisense strand to SEQ ID NO: 881294
ucccucaaucaguuagcaa

SEQ ID NO: 881296 - RNA, 19 nt, Artificial Sequence
  Description of Artificial Sequence: Synthetic oligonucleotide
  Sense strand starting at position 1481 of SEQ ID NO: 588669
ugauguggucagcacagaa

SEQ ID NO: 881297 - RNA, 19 nt, Artificial Sequence
  Description of Artificial Sequence: Synthetic oligonucleotide
  Antisense strand to SEQ ID NO: 881296
uucugugcugaccacauca

SEQ ID NO: 881298 - RNA, 19 nt, Artificial Sequence
  Description of Artificial Sequence: Synthetic oligonucleotide
  Sense strand starting at position 1643 of SEQ ID NO: 588669
augccauugaagugauaag

SEQ ID NO: 881299 - RNA, 19 nt, Artificial Sequence
  Description of Artificial Sequence: Synthetic oligonucleotide
  Antisense strand to SEQ ID NO: 881298
cuuaucacuucaauggcau

SEQ ID NO: 881300 - RNA, 19 nt, Artificial Sequence
  Description of Artificial Sequence: Synthetic oligonucleotide
  Sense strand starting at position 1658 of SEQ ID NO: 588669
uaaggaaacugucuaaguc

SEQ ID NO: 881301 - RNA, 19 nt, Artificial Sequence
  Description of Artificial Sequence: Synthetic oligonucleotide
  Antisense strand to SEQ ID NO: 881300
gacuuagacaguuuccuua

SEQ ID NO: 881302 - RNA, 19 nt, Artificial Sequence
  Description of Artificial Sequence: Synthetic oligonucleotide
  Sense strand starting at position 1704 of SEQ ID NO: 588669
ugaaaugcaucccuuguaa

SEQ ID NO: 881303 - RNA, 19 nt, Artificial Sequence
  Description of Artificial Sequence: Synthetic oligonucleotide
  Antisense strand to SEQ ID NO: 881302
uuacaagggaugcauuuca

SEQ ID NO: 881304 - RNA, 19 nt, Artificial Sequence
  Description of Artificial Sequence: Synthetic oligonucleotide
  Sense strand starting at position 1992 of SEQ ID NO: 588669
agggcucauguuuauauca

SEQ ID NO: 881305 - RNA, 19 nt, Artificial Sequence
  Description of Artificial Sequence: Synthetic oligonucleotide
  Antisense strand to SEQ ID NO: 881304
ugauauaaacaugagcccu

SEQ ID NO: 881306 - RNA, 19 nt, Artificial Sequence
  Description of Artificial Sequence: Synthetic oligonucleotide
  Sense strand starting at position 2045 of SEQ ID NO: 588669
augguaugucuuggaauaa

SEQ ID NO: 881307 - RNA, 19 nt, Artificial Sequence
  Description of Artificial Sequence: Synthetic oligonucleotide
  Antisense strand to SEQ ID NO: 881306
uuauuccaagacauaccau

SEQ ID NO: 881308 - RNA, 19 nt, Artificial Sequence
  Description of Artificial Sequence: Synthetic oligonucleotide
  Sense strand starting at position 2063 of SEQ ID NO: 588669
agaaaugauaacuguggca

SEQ ID NO: 881309 - RNA, 19 nt, Artificial Sequence
  Description of Artificial Sequence: Synthetic oligonucleotide
  Antisense strand to SEQ ID NO: 881308
ugccacaguuaucauuucu

SEQ ID NO: 881310 - RNA, 19 nt, Artificial Sequence
  Description of Artificial Sequence: Synthetic oligonucleotide
  Sense strand starting at position 2065 of SEQ ID NO: 588669
aaaugauaacuguggcaua

SEQ ID NO: 881311 - RNA, 19 nt, Artificial Sequence
  Description of Artificial Sequence: Synthetic oligonucleotide
  Antisense strand to SEQ ID NO: 881310
uaugccacaguuaucauuu

SEQ ID NO: 881312 - RNA, 19 nt, Artificial Sequence
  Description of Artificial Sequence: Synthetic oligonucleotide
  Sense strand starting at position 2070 of SEQ ID NO: 588669
auaacuguggcauaguaua

SEQ ID NO: 881313 - RNA, 19 nt, Artificial Sequence
  Description of Artificial Sequence: Synthetic oligonucleotide
  Antisense strand to SEQ ID NO: 881312
uauacuaugccacaguuau

SEQ ID NO: 881314 - RNA, 19 nt, Artificial Sequence
  Description of Artificial Sequence: Synthetic oligonucleotide
  Sense strand starting at position 2075 of SEQ ID NO: 588669
uguggcauaguauaauaga

SEQ ID NO: 881315 - RNA, 19 nt, Artificial Sequence
  Description of Artificial Sequence: Synthetic oligonucleotide
  Antisense strand to SEQ ID NO: 881314
ucuauuauacuaugccaca

SEQ ID NO: 881316 - RNA, 19 nt, Artificial Sequence
  Description of Artificial Sequence: Synthetic oligonucleotide
  Sense strand starting at position 2173 of SEQ ID NO: 588669
aaugaagguuuagucgaua

SEQ ID NO: 881317 - RNA, 19 nt, Artificial Sequence
  Description of Artificial Sequence: Synthetic oligonucleotide
  Antisense strand to SEQ ID NO: 881316
uaucgacuaaaccuucauu

SEQ ID NO: 881318 - RNA, 19 nt, Artificial Sequence
  Description of Artificial Sequence: Synthetic oligonucleotide
  Sense strand starting at position 2176 of SEQ ID NO: 588669
gaagguuuagucgauauag

SEQ ID NO: 881319 - RNA, 19 nt, Artificial Sequence
  Description of Artificial Sequence: Synthetic oligonucleotide
  Antisense strand to SEQ ID NO: 881318
cuauaucgacuaaaccuuc

SEQ ID NO: 881320 - RNA, 19 nt, Artificial Sequence
  Description of Artificial Sequence: Synthetic oligonucleotide
  Sense strand starting at position 2207 of SEQ ID NO: 588669
ugaaucuggucucuguaaa

SEQ ID NO: 881321 - RNA, 19 nt, Artificial Sequence
  Description of Artificial Sequence: Synthetic oligonucleotide
  Antisense strand to SEQ ID NO: 881320
uuuacagagaccagauuca

SEQ ID NO: 881322 - RNA, 19 nt, Artificial Sequence
  Description of Artificial Sequence: Synthetic oligonucleotide
  Sense strand starting at position 2208 of SEQ ID NO: 588669
gaaucuggucucuguaaau

SEQ ID NO: 881323 - RNA, 19 nt, Artificial Sequence
  Description of Artificial Sequence: Synthetic oligonucleotide
  Antisense strand to SEQ ID NO: 881322
auuuacagagaccagauuc

SEQ ID NO: 881324 - RNA, 19 nt, Artificial Sequence
  Description of Artificial Sequence: Synthetic oligonucleotide
  Sense strand starting at position 2215 of SEQ ID NO: 588669
gucucuguaaaugauagua

SEQ ID NO: 881325 - RNA, 19 nt, Artificial Sequence
  Description of Artificial Sequence: Synthetic oligonucleotide
  Antisense strand to SEQ ID NO: 881324
uacuaucauuuacagagac

SEQ ID NO: 881326 - RNA, 19 nt, Artificial Sequence
  Description of Artificial Sequence: Synthetic oligonucleotide
  Sense strand starting at position 2269 of SEQ ID NO: 588669
guuccaauagcugauguau

SEQ ID NO: 881327 - RNA, 19 nt, Artificial Sequence
  Description of Artificial Sequence: Synthetic oligonucleotide
  Antisense strand to SEQ ID NO: 881326
auacaucagcuauuggaac

SEQ ID NO: 881328 - RNA, 19 nt, Artificial Sequence
  Description of Artificial Sequence: Synthetic oligonucleotide
  Sense strand starting at position 2424 of SEQ ID NO: 588669
guaucuugacuccauaguu

SEQ ID NO: 881329 - RNA, 19 nt, Artificial Sequence
  Description of Artificial Sequence: Synthetic oligonucleotide
  Antisense strand to SEQ ID NO: 881328
aacuauggagucaagauac

SEQ ID NO: 881330 - RNA, 19 nt, Artificial Sequence
  Description of Artificial Sequence: Synthetic oligonucleotide
  Sense strand starting at position 2437 of SEQ ID NO: 588669
auaguuucuucuguggaaa

SEQ ID NO: 881331 - RNA, 19 nt, Artificial Sequence
  Description of Artificial Sequence: Synthetic oligonucleotide
  Antisense strand to SEQ ID NO: 881330
uuuccacagaagaaacuau

SEQ ID NO: 881332 - RNA, 19 nt, Artificial Sequence
  Description of Artificial Sequence: Synthetic oligonucleotide
  Sense strand starting at position 2440 of SEQ ID NO: 588669
guuucuucuguggaaacaa

SEQ ID NO: 881333 - RNA, 19 nt, Artificial Sequence
  Description of Artificial Sequence: Synthetic oligonucleotide
  Antisense strand to SEQ ID NO: 881332
uuguuuccacagaagaaac

SEQ ID NO: 881334 - RNA, 19 nt, Artificial Sequence
  Description of Artificial Sequence: Synthetic oligonucleotide
  Sense strand starting at position 2460 of SEQ ID NO: 588669
gcaauuauuugacauugga

SEQ ID NO: 881335 - RNA, 19 nt, Artificial Sequence
  Description of Artificial Sequence: Synthetic oligonucleotide
  Antisense strand to SEQ ID NO: 881334
uccaaugucaaauaauugc

SEQ ID NO: 881336 - RNA, 19 nt, Artificial Sequence
  Description of Artificial Sequence: Synthetic oligonucleotide
  Sense strand starting at position 2474 of SEQ ID NO: 588669
uuggaaaucucauugccuu

SEQ ID NO: 881337 - RNA, 19 nt, Artificial Sequence
  Description of Artificial Sequence: Synthetic oligonucleotide
  Antisense strand to SEQ ID NO: 881336
aaggcaaugagauuuccaa

SEQ ID NO: 881338 - RNA, 19 nt, Artificial Sequence
  Description of Artificial Sequence: Synthetic oligonucleotide
  Sense strand starting at position 2475 of SEQ ID NO: 588669
uggaaaucucauugccuua

SEQ ID NO: 881339 - RNA, 19 nt, Artificial Sequence
  Description of Artificial Sequence: Synthetic oligonucleotide
  Antisense strand to SEQ ID NO: 881338
uaaggcaaugagauuucca

SEQ ID NO: 881340 - RNA, 19 nt, Artificial Sequence
  Description of Artificial Sequence: Synthetic oligonucleotide
  Sense strand starting at position 3123 of SEQ ID NO: 588669
aguuuaagauaaguguaag

SEQ ID NO: 881341 - RNA, 19 nt, Artificial Sequence
  Description of Artificial Sequence: Synthetic oligonucleotide
  Antisense strand to SEQ ID NO: 881340
cuuacacuuaucuuaaacu

SEQ ID NO: 881342 - RNA, 19 nt, Artificial Sequence
  Description of Artificial Sequence: Synthetic oligonucleotide
  Sense strand starting at position 3124 of SEQ ID NO: 588669
guuuaagauaaguguaaga

SEQ ID NO: 881343 - RNA, 19 nt, Artificial Sequence
  Description of Artificial Sequence: Synthetic oligonucleotide
  Antisense strand to SEQ ID NO: 881342
ucuuacacuuaucuuaaac

SEQ ID NO: 881344 - RNA, 19 nt, Artificial Sequence
  Description of Artificial Sequence: Synthetic oligonucleotide
  Sense strand starting at position 3157 of SEQ ID NO: 588669
uuugaauaucaauguguag

SEQ ID NO: 881345 - RNA, 19 nt, Artificial Sequence
  Description of Artificial Sequence: Synthetic oligonucleotide
  Antisense strand to SEQ ID NO: 881344
cuacacauugauauucaaa

SEQ ID NO: 881346 - RNA, 19 nt, Artificial Sequence
  Description of Artificial Sequence: Synthetic oligonucleotide
  Sense strand starting at position 3270 of SEQ ID NO: 588669
ggagcauuggcucagugag

SEQ ID NO: 881347 - RNA, 19 nt, Artificial Sequence
  Description of Artificial Sequence: Synthetic oligonucleotide
  Antisense strand to SEQ ID NO: 881346
cucacugagccaaugcucc

SEQ ID NO: 881348 - RNA, 19 nt, Artificial Sequence
  Description of Artificial Sequence: Synthetic oligonucleotide
  Sense strand starting at position 3525 of SEQ ID NO: 588669
auuccugcuugaucuugaa

SEQ ID NO: 881349 - RNA, 19 nt, Artificial Sequence
  Description of Artificial Sequence: Synthetic oligonucleotide
  Antisense strand to SEQ ID NO: 881348
uucaagaucaagcaggaau

SEQ ID NO: 881350 - RNA, 19 nt, Artificial Sequence
  Description of Artificial Sequence: Synthetic oligonucleotide
  Sense strand starting at position 3529 of SEQ ID NO: 588669
cugcuugaucuugaaauau

SEQ ID NO: 881351 - RNA, 19 nt, Artificial Sequence
  Description of Artificial Sequence: Synthetic oligonucleotide
  Antisense strand to SEQ ID NO: 881350
auauuucaagaucaagcag

SEQ ID NO: 881352 - RNA, 19 nt, Artificial Sequence
  Description of Artificial Sequence: Synthetic oligonucleotide
  Sense strand starting at position 3786 of SEQ ID NO: 588669
auaugagcuggaugucuua

SEQ ID NO: 881353 - RNA, 19 nt, Artificial Sequence
  Description of Artificial Sequence: Synthetic oligonucleotide
  Antisense strand to SEQ ID NO: 881352
uaagacauccagcucauau

SEQ ID NO: 881354 - RNA, 19 nt, Artificial Sequence
  Description of Artificial Sequence: Synthetic oligonucleotide
  Sense strand starting at position 26 of SEQ ID NO: 588670
auggacacuggauguuaau

SEQ ID NO: 881355 - RNA, 19 nt, Artificial Sequence
  Description of Artificial Sequence: Synthetic oligonucleotide
  Antisense strand to SEQ ID NO: 881354
auuaacauccaguguccau

SEQ ID NO: 881356 - RNA, 19 nt, Artificial Sequence
  Description of Artificial Sequence: Synthetic oligonucleotide
  Sense strand starting at position 81 of SEQ ID NO: 588670
auagguuggcgugaugaua

SEQ ID NO: 881357 - RNA, 19 nt, Artificial Sequence
  Description of Artificial Sequence: Synthetic oligonucleotide
  Antisense strand to SEQ ID NO: 881356
uaucaucacgccaaccuau

SEQ ID NO: 881358 - RNA, 19 nt, Artificial Sequence
  Description of Artificial Sequence: Synthetic oligonucleotide
  Sense strand starting at position 116 of SEQ ID NO: 588670
guagcuggguauuucuaua

SEQ ID NO: 881359 - RNA, 19 nt, Artificial Sequence
  Description of Artificial Sequence: Synthetic oligonucleotide
  Antisense strand to SEQ ID NO: 881358
uauagaaauacccagcuac

SEQ ID NO: 881360 - RNA, 19 nt, Artificial Sequence
  Description of Artificial Sequence: Synthetic oligonucleotide
  Sense strand starting at position 168 of SEQ ID NO: 588670
agaggaauuuaccacagcu

SEQ ID NO: 881361 - RNA, 19 nt, Artificial Sequence
  Description of Artificial Sequence: Synthetic oligonucleotide
  Antisense strand to SEQ ID NO: 881360
agcugugguaaauuccucu

SEQ ID NO: 881362 - RNA, 19 nt, Artificial Sequence
  Description of Artificial Sequence: Synthetic oligonucleotide
  Sense strand starting at position 176 of SEQ ID NO: 588670
uuaccacagcuagaguuaa

SEQ ID NO: 881363 - RNA, 19 nt, Artificial Sequence
  Description of Artificial Sequence: Synthetic oligonucleotide
  Antisense strand to SEQ ID NO: 881362
uuaacucuagcugugguaa

SEQ ID NO: 881364 - RNA, 19 nt, Artificial Sequence
  Description of Artificial Sequence: Synthetic oligonucleotide
  Sense strand starting at position 296 of SEQ ID NO: 588670
auaaaugugugucccacaa

SEQ ID NO: 881365 - RNA, 19 nt, Artificial Sequence
  Description of Artificial Sequence: Synthetic oligonucleotide
  Antisense strand to SEQ ID NO: 881364
uugugggacacacauuuau

SEQ ID NO: 881366 - RNA, 19 nt, Artificial Sequence
  Description of Artificial Sequence: Synthetic oligonucleotide
  Sense strand starting at position 414 of SEQ ID NO: 588670
uuuguagugguagaucaaa

SEQ ID NO: 881367 - RNA, 19 nt, Artificial Sequence
  Description of Artificial Sequence: Synthetic oligonucleotide
  Antisense strand to SEQ ID NO: 881366
uuugaucuaccacuacaaa

SEQ ID NO: 881368 - RNA, 19 nt, Artificial Sequence
  Description of Artificial Sequence: Synthetic oligonucleotide
  Sense strand starting at position 473 of SEQ ID NO: 588670
acccuaacauuugagaagu

SEQ ID NO: 881369 - RNA, 19 nt, Artificial Sequence
  Description of Artificial Sequence: Synthetic oligonucleotide
  Antisense strand to SEQ ID NO: 881368
acuucucaaauguuagggu

SEQ ID NO: 881370 - RNA, 19 nt, Artificial Sequence
  Description of Artificial Sequence: Synthetic oligonucleotide
  Sense strand starting at position 536 of SEQ ID NO: 588670
aaagacagucagugcugaa

SEQ ID NO: 881371 - RNA, 19 nt, Artificial Sequence
  Description of Artificial Sequence: Synthetic oligonucleotide
  Antisense strand to SEQ ID NO: 881370
uucagcacugacugucuuu

SEQ ID NO: 881372 - RNA, 19 nt, Artificial Sequence
  Description of Artificial Sequence: Synthetic oligonucleotide
  Sense strand starting at position 609 of SEQ ID NO: 588670
ugguuauauuuccaaggag

SEQ ID NO: 881373 - RNA, 19 nt, Artificial Sequence
  Description of Artificial Sequence: Synthetic oligonucleotide
  Antisense strand to SEQ ID NO: 881372
cuccuuggaaauauaacca

SEQ ID NO: 881374 - RNA, 19 nt, Artificial Sequence
  Description of Artificial Sequence: Synthetic oligonucleotide
  Sense strand starting at position 722 of SEQ ID NO: 588670
uguuaaagccugggauuau

SEQ ID NO: 881375 - RNA, 19 nt, Artificial Sequence
  Description of Artificial Sequence: Synthetic oligonucleotide
  Antisense strand to SEQ ID NO: 881374
auaaucccaggcuuuaaca

SEQ ID NO: 881376 - RNA, 19 nt, Artificial Sequence
  Description of Artificial Sequence: Synthetic oligonucleotide
  Sense strand starting at position 823 of SEQ ID NO: 588670
cuccaaguugcagaaauaa

SEQ ID NO: 881377 - RNA, 19 nt, Artificial Sequence
  Description of Artificial Sequence: Synthetic oligonucleotide
  Antisense strand to SEQ ID NO: 881376
uuauuucugcaacuuggag

SEQ ID NO: 881378 - RNA, 19 nt, Artificial Sequence
  Description of Artificial Sequence: Synthetic oligonucleotide
  Sense strand starting at position 902 of SEQ ID NO: 588670
auggaauucuggccaacaa

SEQ ID NO: 881379 - RNA, 19 nt, Artificial Sequence
  Description of Artificial Sequence: Synthetic oligonucleotide
  Antisense strand to SEQ ID NO: 881378
uuguuggccagaauuccau

SEQ ID NO: 881380 - RNA, 19 nt, Artificial Sequence
  Description of Artificial Sequence: Synthetic oligonucleotide
  Sense strand starting at position 2190 of SEQ ID NO: 588670
gggcuuaaugccuagacga

SEQ ID NO: 881381 - RNA, 19 nt, Artificial Sequence
  Description of Artificial Sequence: Synthetic oligonucleotide
  Antisense strand to SEQ ID NO: 881380
ucgucuaggcauuaagccc

SEQ ID NO: 881382 - RNA, 19 nt, Artificial Sequence
  Description of Artificial Sequence: Synthetic oligonucleotide
  Sense strand starting at position 2192 of SEQ ID NO: 588670
gcuuaaugccuagacgaug

SEQ ID NO: 881383 - RNA, 19 nt, Artificial Sequence
  Description of Artificial Sequence: Synthetic oligonucleotide
  Antisense strand to SEQ ID NO: 881382
caucgucuaggcauuaagc

SEQ ID NO: 881384 - RNA, 19 nt, Artificial Sequence
  Description of Artificial Sequence: Synthetic oligonucleotide
  Sense strand starting at position 2400 of SEQ ID NO: 588670
gcaaauguuacugagaguc

SEQ ID NO: 881385 - RNA, 19 nt, Artificial Sequence
  Description of Artificial Sequence: Synthetic oligonucleotide
  Antisense strand to SEQ ID NO: 881384
gacucucaguaacauuugc

SEQ ID NO: 881386 - RNA, 19 nt, Artificial Sequence
  Description of Artificial Sequence: Synthetic oligonucleotide
  Sense strand starting at position 2414 of SEQ ID NO: 588670
gagucaguauuucuugguu

SEQ ID NO: 881387 - RNA, 19 nt, Artificial Sequence
  Description of Artificial Sequence: Synthetic oligonucleotide
  Antisense strand to SEQ ID NO: 881386
aaccaagaaauacugacuc

SEQ ID NO: 881388 - RNA, 19 nt, Artificial Sequence
  Description of Artificial Sequence: Synthetic oligonucleotide
  Sense strand starting at position 2417 of SEQ ID NO: 588670
ucaguauuucuugguucga

SEQ ID NO: 881389 - RNA, 19 nt, Artificial Sequence
  Description of Artificial Sequence: Synthetic oligonucleotide
  Antisense strand to SEQ ID NO: 881388
ucgaaccaagaaauacuga

SEQ ID NO: 881390 - RNA, 19 nt, Artificial Sequence
  Description of Artificial Sequence: Synthetic oligonucleotide
  Sense strand starting at position 2418 of SEQ ID NO: 588670
caguauuucuugguucgau

SEQ ID NO: 881391 - RNA, 19 nt, Artificial Sequence
  Description of Artificial Sequence: Synthetic oligonucleotide
  Antisense strand to SEQ ID NO: 881390
aucgaaccaagaaauacug

SEQ ID NO: 881392 - RNA, 19 nt, Artificial Sequence
  Description of Artificial Sequence: Synthetic oligonucleotide
  Sense strand starting at position 2419 of SEQ ID NO: 588670
aguauuucuugguucgaua

SEQ ID NO: 881393 - RNA, 19 nt, Artificial Sequence
  Description of Artificial Sequence: Synthetic oligonucleotide
  Antisense strand to SEQ ID NO: 881392
uaucgaaccaagaaauacu

SEQ ID NO: 881394 - RNA, 19 nt, Artificial Sequence
  Description of Artificial Sequence: Synthetic oligonucleotide
  Sense strand starting at position 2865 of SEQ ID NO: 588670
aguuaucauuaugcauaca

SEQ ID NO: 881395 - RNA, 19 nt, Artificial Sequence
  Description of Artificial Sequence: Synthetic oligonucleotide
  Antisense strand to SEQ ID NO: 881394
uguaugcauaaugauaacu

SEQ ID NO: 881396 - RNA, 19 nt, Artificial Sequence
  Description of Artificial Sequence: Synthetic oligonucleotide
  Sense strand starting at position 2903 of SEQ ID NO: 588670
uguagaggguuccuaagaa

SEQ ID NO: 881397 - RNA, 19 nt, Artificial Sequence
  Description of Artificial Sequence: Synthetic oligonucleotide
  Antisense strand to SEQ ID NO: 881396
uucuuaggaacccucuaca

SEQ ID NO: 881398 - RNA, 19 nt, Artificial Sequence
  Description of Artificial Sequence: Synthetic oligonucleotide
  Sense strand starting at position 3035 of SEQ ID NO: 588670
uuaagauuagaguguaaca

SEQ ID NO: 881399 - RNA, 19 nt, Artificial Sequence
  Description of Artificial Sequence: Synthetic oligonucleotide
  Antisense strand to SEQ ID NO: 881398
uguuacacucuaaucuuaa

SEQ ID NO: 881400 - RNA, 19 nt, Artificial Sequence
  Description of Artificial Sequence: Synthetic oligonucleotide
  Sense strand starting at position 3046 of SEQ ID NO: 588670
guguaacaaccuuaauaug

SEQ ID NO: 881401 - RNA, 19 nt, Artificial Sequence
  Description of Artificial Sequence: Synthetic oligonucleotide
  Antisense strand to SEQ ID NO: 881400
cauauuaagguuguuacac

SEQ ID NO: 881402 - RNA, 19 nt, Artificial Sequence
  Description of Artificial Sequence: Synthetic oligonucleotide
  Sense strand starting at position 3054 of SEQ ID NO: 588670
accuuaauauggcuuaaag

SEQ ID NO: 881403 - RNA, 19 nt, Artificial Sequence
  Description of Artificial Sequence: Synthetic oligonucleotide
  Antisense strand to SEQ ID NO: 881402
cuuuaagccauauuaaggu

SEQ ID NO: 881404 - RNA, 19 nt, Artificial Sequence
  Description of Artificial Sequence: Synthetic oligonucleotide
  Sense strand starting at position 3214 of SEQ ID NO: 588670
gguuguggauuucuuguga

SEQ ID NO: 881405 - RNA, 19 nt, Artificial Sequence
  Description of Artificial Sequence: Synthetic oligonucleotide
  Antisense strand to SEQ ID NO: 881404
ucacaagaaauccacaacc

SEQ ID NO: 881406 - RNA, 19 nt, Artificial Sequence
  Description of Artificial Sequence: Synthetic oligonucleotide
  Sense strand starting at position 3260 of SEQ ID NO: 588670
ucagacuggcuaugagaaa

SEQ ID NO: 881407 - RNA, 19 nt, Artificial Sequence
  Description of Artificial Sequence: Synthetic oligonucleotide
  Antisense strand to SEQ ID NO: 881406
uuucucauagccagucuga

SEQ ID NO: 881408 - RNA, 19 nt, Artificial Sequence
  Description of Artificial Sequence: Synthetic oligonucleotide
  Sense strand starting at position 3325 of SEQ ID NO: 588670
aaagcaguuuaagugacau

SEQ ID NO: 881409 - RNA, 19 nt, Artificial Sequence
  Description of Artificial Sequence: Synthetic oligonucleotide
  Antisense strand to SEQ ID NO: 881408
augucacuuaaacugcuuu

SEQ ID NO: 881410 - RNA, 19 nt, Artificial Sequence
  Description of Artificial Sequence: Synthetic oligonucleotide
  Sense strand starting at position 3480 of SEQ ID NO: 588670
uuaaguguacuccaaguuu

SEQ ID NO: 881411 - RNA, 19 nt, Artificial Sequence
  Description of Artificial Sequence: Synthetic oligonucleotide
  Antisense strand to SEQ ID NO: 881410
aaacuuggaguacacuuaa

SEQ ID NO: 881412 - RNA, 19 nt, Artificial Sequence
  Description of Artificial Sequence: Synthetic oligonucleotide
  Sense strand starting at position 3551 of SEQ ID NO: 588670
agcugugguaagcagaaua

SEQ ID NO: 881413 - RNA, 19 nt, Artificial Sequence
  Description of Artificial Sequence: Synthetic oligonucleotide
  Antisense strand to SEQ ID NO: 881412
uauucugcuuaccacagcu

SEQ ID NO: 881414 - RNA, 19 nt, Artificial Sequence
  Description of Artificial Sequence: Synthetic oligonucleotide
  Sense strand starting at position 3711 of SEQ ID NO: 588670
cuggguuggcccaguguga

SEQ ID NO: 881415 - RNA, 19 nt, Artificial Sequence
  Description of Artificial Sequence: Synthetic oligonucleotide
  Antisense strand to SEQ ID NO: 881414
ucacacugggccaacccag

SEQ ID NO: 881416 - RNA, 19 nt, Artificial Sequence
  Description of Artificial Sequence: Synthetic oligonucleotide
  Sense strand starting at position 3728 of SEQ ID NO: 588670
gauaaugagugccuuaaau

SEQ ID NO: 881417 - RNA, 19 nt, Artificial Sequence
  Description of Artificial Sequence: Synthetic oligonucleotide
  Antisense strand to SEQ ID NO: 881416
auuuaaggcacucauuauc

SEQ ID NO: 881418 - RNA, 19 nt, Artificial Sequence
  Description of Artificial Sequence: Synthetic oligonucleotide
  Sense strand starting at position 3730 of SEQ ID NO: 588670
uaaugagugccuuaaaugu

SEQ ID NO: 881419 - RNA, 19 nt, Artificial Sequence
  Description of Artificial Sequence: Synthetic oligonucleotide
  Antisense strand to SEQ ID NO: 881418
acauuuaaggcacucauua

SEQ ID NO: 881420 - RNA, 19 nt, Artificial Sequence
  Description of Artificial Sequence: Synthetic oligonucleotide
  Sense strand starting at position 3767 of SEQ ID NO: 588670
gucugaaucagagacguau

SEQ ID NO: 881421 - RNA, 19 nt, Artificial Sequence
  Description of Artificial Sequence: Synthetic oligonucleotide
  Antisense strand to SEQ ID NO: 881420
auacgucucugauucagac

SEQ ID NO: 881422 - RNA, 19 nt, Artificial Sequence
  Description of Artificial Sequence: Synthetic oligonucleotide
  Sense strand starting at position 3769 of SEQ ID NO: 588670
cugaaucagagacguauuc

SEQ ID NO: 881423 - RNA, 19 nt, Artificial Sequence
  Description of Artificial Sequence: Synthetic oligonucleotide
  Antisense strand to SEQ ID NO: 881422
gaauacgucucugauucag

SEQ ID NO: 881424 - RNA, 19 nt, Artificial Sequence
  Description of Artificial Sequence: Synthetic oligonucleotide
  Sense strand starting at position 3771 of SEQ ID NO: 588670
gaaucagagacguauucga

SEQ ID NO: 881425 - RNA, 19 nt, Artificial Sequence
  Description of Artificial Sequence: Synthetic oligonucleotide
  Antisense strand to SEQ ID NO: 881424
ucgaauacgucucugauuc

SEQ ID NO: 881426 - RNA, 19 nt, Artificial Sequence
  Description of Artificial Sequence: Synthetic oligonucleotide
  Sense strand starting at position 3775 of SEQ ID NO: 588670
cagagacguauucgaagau

SEQ ID NO: 881427 - RNA, 19 nt, Artificial Sequence
  Description of Artificial Sequence: Synthetic oligonucleotide
  Antisense strand to SEQ ID NO: 881426
aucuucgaauacgucucug

SEQ ID NO: 881428 - RNA, 19 nt, Artificial Sequence
  Description of Artificial Sequence: Synthetic oligonucleotide
  Sense strand starting at position 3779 of SEQ ID NO: 588670
gacguauucgaagauguua

SEQ ID NO: 881429 - RNA, 19 nt, Artificial Sequence
  Description of Artificial Sequence: Synthetic oligonucleotide
  Antisense strand to SEQ ID NO: 881428
uaacaucuucgaauacguc

SEQ ID NO: 881430 - RNA, 19 nt, Artificial Sequence
  Description of Artificial Sequence: Synthetic oligonucleotide
  Sense strand starting at position 3831 of SEQ ID NO: 588670
ugagauaaggaaugcaagu

SEQ ID NO: 881431 - RNA, 19 nt, Artificial Sequence
  Description of Artificial Sequence: Synthetic oligonucleotide
  Antisense strand to SEQ ID NO: 881430
acuugcauuccuuaucuca

SEQ ID NO: 881432 - RNA, 19 nt, Artificial Sequence
  Description of Artificial Sequence: Synthetic oligonucleotide
  Sense strand starting at position 3880 of SEQ ID NO: 588670
acaagauuaugcucuagaa

SEQ ID NO: 881433 - RNA, 19 nt, Artificial Sequence
  Description of Artificial Sequence: Synthetic oligonucleotide
  Antisense strand to SEQ ID NO: 881432
uucuagagcauaaucuugu

SEQ ID NO: 881434 - RNA, 19 nt, Artificial Sequence
  Description of Artificial Sequence: Synthetic oligonucleotide
  Sense strand starting at position 179 of SEQ ID NO: 588671
auuuguaguucuguuuauc

SEQ ID NO: 881435 - RNA, 19 nt, Artificial Sequence
  Description of Artificial Sequence: Synthetic oligonucleotide
  Antisense strand to SEQ ID NO: 881434
gauaaacagaacuacaaau

SEQ ID NO: 881436 - RNA, 19 nt, Artificial Sequence
  Description of Artificial Sequence: Synthetic oligonucleotide
  Sense strand starting at position 188 of SEQ ID NO: 588671
ucuguuuaucuuuaaguag

SEQ ID NO: 881437 - RNA, 19 nt, Artificial Sequence
  Description of Artificial Sequence: Synthetic oligonucleotide
  Antisense strand to SEQ ID NO: 881436
cuacuuaaagauaaacaga

SEQ ID NO: 881438 - RNA, 19 nt, Artificial Sequence
  Description of Artificial Sequence: Synthetic oligonucleotide
  Sense strand starting at position 310 of SEQ ID NO: 588671
ggccauuaagcugaguaga

SEQ ID NO: 881439 - RNA, 19 nt, Artificial Sequence
  Description of Artificial Sequence: Synthetic oligonucleotide
  Antisense strand to SEQ ID NO: 881438
ucuacucagcuuaauggcc

SEQ ID NO: 881440 - RNA, 19 nt, Artificial Sequence
  Description of Artificial Sequence: Synthetic oligonucleotide
  Sense strand starting at position 312 of SEQ ID NO: 588671
ccauuaagcugaguagaaa

SEQ ID NO: 881441 - RNA, 19 nt, Artificial Sequence
  Description of Artificial Sequence: Synthetic oligonucleotide
  Antisense strand to SEQ ID NO: 881440
uuucuacucagcuuaaugg

SEQ ID NO: 881442 - RNA, 19 nt, Artificial Sequence
  Description of Artificial Sequence: Synthetic oligonucleotide
  Sense strand starting at position 398 of SEQ ID NO: 588671
gaaggcuccugacugugaa

SEQ ID NO: 881443 - RNA, 19 nt, Artificial Sequence
  Description of Artificial Sequence: Synthetic oligonucleotide
  Antisense strand to SEQ ID NO: 881442
uucacagucaggagccuuc

SEQ ID NO: 881444 - RNA, 19 nt, Artificial Sequence
  Description of Artificial Sequence: Synthetic oligonucleotide
  Sense strand starting at position 462 of SEQ ID NO: 588671
gugauugaagcucacaugu

SEQ ID NO: 881445 - RNA, 19 nt, Artificial Sequence
  Description of Artificial Sequence: Synthetic oligonucleotide
  Antisense strand to SEQ ID NO: 881444
acaugugagcuucaaucac

SEQ ID NO: 881446 - RNA, 19 nt, Artificial Sequence
  Description of Artificial Sequence: Synthetic oligonucleotide
  Sense strand starting at position 473 of SEQ ID NO: 588671
ucacauguguagucagaaa

SEQ ID NO: 881447 - RNA, 19 nt, Artificial Sequence
  Description of Artificial Sequence: Synthetic oligonucleotide
  Antisense strand to SEQ ID NO: 881446
uuucugacuacacauguga

SEQ ID NO: 881448 - RNA, 19 nt, Artificial Sequence
  Description of Artificial Sequence: Synthetic oligonucleotide
  Sense strand starting at position 498 of SEQ ID NO: 588671
uaaacauuggucugaaagu

SEQ ID NO: 881449 - RNA, 19 nt, Artificial Sequence
  Description of Artificial Sequence: Synthetic oligonucleotide
  Antisense strand to SEQ ID NO: 881448
acuuucagaccaauguuua

SEQ ID NO: 881450 - RNA, 19 nt, Artificial Sequence
  Description of Artificial Sequence: Synthetic oligonucleotide
  Sense strand starting at position 509 of SEQ ID NO: 588671
cugaaagugaacuguugaa

SEQ ID NO: 881451 - RNA, 19 nt, Artificial Sequence
  Description of Artificial Sequence: Synthetic oligonucleotide
  Antisense strand to SEQ ID NO: 881450
uucaacaguucacuuucag

SEQ ID NO: 881452 - RNA, 19 nt, Artificial Sequence
  Description of Artificial Sequence: Synthetic oligonucleotide
  Sense strand starting at position 525 of SEQ ID NO: 588671
gaaugaaaguuauuguagu

SEQ ID NO: 881453 - RNA, 19 nt, Artificial Sequence
  Description of Artificial Sequence: Synthetic oligonucleotide
  Antisense strand to SEQ ID NO: 881452
acuacaauaacuuucauuc

SEQ ID NO: 881454 - RNA, 19 nt, Artificial Sequence
  Description of Artificial Sequence: Synthetic oligonucleotide
  Sense strand starting at position 531 of SEQ ID NO: 588671
aaguuauuguagucuagaa

SEQ ID NO: 881455 - RNA, 19 nt, Artificial Sequence
  Description of Artificial Sequence: Synthetic oligonucleotide
  Antisense strand to SEQ ID NO: 881454
uucuagacuacaauaacuu

SEQ ID NO: 881456 - RNA, 19 nt, Artificial Sequence
  Description of Artificial Sequence: Synthetic oligonucleotide
  Sense strand starting at position 533 of SEQ ID NO: 588671
guuauuguagucuagaaga

SEQ ID NO: 881457 - RNA, 19 nt, Artificial Sequence
  Description of Artificial Sequence: Synthetic oligonucleotide
  Antisense strand to SEQ ID NO: 881456
ucuucuagacuacaauaac

SEQ ID NO: 881458 - RNA, 19 nt, Artificial Sequence
  Description of Artificial Sequence: Synthetic oligonucleotide
  Sense strand starting at position 607 of SEQ ID NO: 588671
ggaucuguaaaggguacua

SEQ ID NO: 881459 - RNA, 19 nt, Artificial Sequence
  Description of Artificial Sequence: Synthetic oligonucleotide
  Antisense strand to SEQ ID NO: 881458
uaguacccuuuacagaucc

SEQ ID NO: 881460 - RNA, 19 nt, Artificial Sequence
  Description of Artificial Sequence: Synthetic oligonucleotide
  Sense strand starting at position 706 of SEQ ID NO: 588671
gggaaaugccuuuacaagu

SEQ ID NO: 881461 - RNA, 19 nt, Artificial Sequence
  Description of Artificial Sequence: Synthetic oligonucleotide
  Antisense strand to SEQ ID NO: 881460
acuuguaaaggcauuuccc

SEQ ID NO: 881462 - RNA, 19 nt, Artificial Sequence
  Description of Artificial Sequence: Synthetic oligonucleotide
  Sense strand starting at position 754 of SEQ ID NO: 588671
ggaauccuguuagucaaca

SEQ ID NO: 881463 - RNA, 19 nt, Artificial Sequence
  Description of Artificial Sequence: Synthetic oligonucleotide
  Antisense strand to SEQ ID NO: 881462
uguugacuaacaggauucc

SEQ ID NO: 881464 - RNA, 19 nt, Artificial Sequence
  Description of Artificial Sequence: Synthetic oligonucleotide
  Sense strand starting at position 961 of SEQ ID NO: 588671
gagaguuacugagcacuua

SEQ ID NO: 881465 - RNA, 19 nt, Artificial Sequence
  Description of Artificial Sequence: Synthetic oligonucleotide
  Antisense strand to SEQ ID NO: 881464
uaagugcucaguaacucuc

SEQ ID NO: 881466 - RNA, 19 nt, Artificial Sequence
  Description of Artificial Sequence: Synthetic oligonucleotide
  Sense strand starting at position 962 of SEQ ID NO: 588671
agaguuacugagcacuuau

SEQ ID NO: 881467 - RNA, 19 nt, Artificial Sequence
  Description of Artificial Sequence: Synthetic oligonucleotide
  Antisense strand to SEQ ID NO: 881466
auaagugcucaguaacucu

SEQ ID NO: 881468 - RNA, 19 nt, Artificial Sequence
  Description of Artificial Sequence: Synthetic oligonucleotide
  Sense strand starting at position 1016 of SEQ ID NO: 588671
ggaaauaggucaguacaua

SEQ ID NO: 881469 - RNA, 19 nt, Artificial Sequence
  Description of Artificial Sequence: Synthetic oligonucleotide
  Antisense strand to SEQ ID NO: 881468
uauguacugaccuauuucc

SEQ ID NO: 881470 - RNA, 19 nt, Artificial Sequence
  Description of Artificial Sequence: Synthetic oligonucleotide
  Sense strand starting at position 1036 of SEQ ID NO: 588671
gucuguuauaaagaagagu

SEQ ID NO: 881471 - RNA, 19 nt, Artificial Sequence
  Description of Artificial Sequence: Synthetic oligonucleotide
  Antisense strand to SEQ ID NO: 881470
acucuucuuuauaacagac

SEQ ID NO: 881472 - RNA, 19 nt, Artificial Sequence
  Description of Artificial Sequence: Synthetic oligonucleotide
  Sense strand starting at position 1052 of SEQ ID NO: 588671
aguaaaugucauugagaua

SEQ ID NO: 881473 - RNA, 19 nt, Artificial Sequence
  Description of Artificial Sequence: Synthetic oligonucleotide
  Antisense strand to SEQ ID NO: 881472
uaucucaaugacauuuacu

SEQ ID NO: 881474 - RNA, 19 nt, Artificial Sequence
  Description of Artificial Sequence: Synthetic oligonucleotide
  Sense strand starting at position 2084 of SEQ ID NO: 588671
agaauaagauccuugcuac

SEQ ID NO: 881475 - RNA, 19 nt, Artificial Sequence
  Description of Artificial Sequence: Synthetic oligonucleotide
  Antisense strand to SEQ ID NO: 881474
guagcaaggaucuuauucu

SEQ ID NO: 881476 - RNA, 19 nt, Artificial Sequence
  Description of Artificial Sequence: Synthetic oligonucleotide
  Sense strand starting at position 2087 of SEQ ID NO: 588671
auaagauccuugcuacuga

SEQ ID NO: 881477 - RNA, 19 nt, Artificial Sequence
  Description of Artificial Sequence: Synthetic oligonucleotide
  Antisense strand to SEQ ID NO: 881476
ucaguagcaaggaucuuau

SEQ ID NO: 881478 - RNA, 19 nt, Artificial Sequence
  Description of Artificial Sequence: Synthetic oligonucleotide
  Sense strand starting at position 2182 of SEQ ID NO: 588671
augggauaauucgccaaga

SEQ ID NO: 881479 - RNA, 19 nt, Artificial Sequence
  Description of Artificial Sequence: Synthetic oligonucleotide
  Antisense strand to SEQ ID NO: 881478
ucuuggcgaauuaucccau

SEQ ID NO: 881480 - RNA, 19 nt, Artificial Sequence
  Description of Artificial Sequence: Synthetic oligonucleotide
  Sense strand starting at position 2183 of SEQ ID NO: 588671
ugggauaauucgccaagag

SEQ ID NO: 881481 - RNA, 19 nt, Artificial Sequence
  Description of Artificial Sequence: Synthetic oligonucleotide
  Antisense strand to SEQ ID NO: 881480
cucuuggcgaauuauccca

SEQ ID NO: 881482 - RNA, 19 nt, Artificial Sequence
  Description of Artificial Sequence: Synthetic oligonucleotide
  Sense strand starting at position 2187 of SEQ ID NO: 588671
auaauucgccaagagagua

SEQ ID NO: 881483 - RNA, 19 nt, Artificial Sequence
  Description of Artificial Sequence: Synthetic oligonucleotide
  Antisense strand to SEQ ID NO: 881482
uacucucuuggcgaauuau

SEQ ID NO: 881484 - RNA, 19 nt, Artificial Sequence
  Description of Artificial Sequence: Synthetic oligonucleotide
  Sense strand starting at position 2235 of SEQ ID NO: 588671
caugucuagucaguaaaga

SEQ ID NO: 881485 - RNA, 19 nt, Artificial Sequence
  Description of Artificial Sequence: Synthetic oligonucleotide
  Antisense strand to SEQ ID NO: 881484
ucuuuacugacuagacaug

SEQ ID NO: 881486 - RNA, 19 nt, Artificial Sequence
  Description of Artificial Sequence: Synthetic oligonucleotide
  Sense strand starting at position 2236 of SEQ ID NO: 588671
augucuagucaguaaagag

SEQ ID NO: 881487 - RNA, 19 nt, Artificial Sequence
  Description of Artificial Sequence: Synthetic oligonucleotide
  Antisense strand to SEQ ID NO: 881486
cucuuuacugacuagacau

SEQ ID NO: 881488 - RNA, 19 nt, Artificial Sequence
  Description of Artificial Sequence: Synthetic oligonucleotide
  Sense strand starting at position 2265 of SEQ ID NO: 588671
accguauuagcagauggau

SEQ ID NO: 881489 - RNA, 19 nt, Artificial Sequence
  Description of Artificial Sequence: Synthetic oligonucleotide
  Antisense strand to SEQ ID NO: 881488
auccaucugcuaauacggu

SEQ ID NO: 881490 - RNA, 19 nt, Artificial Sequence
  Description of Artificial Sequence: Synthetic oligonucleotide
  Sense strand starting at position 2581 of SEQ ID NO: 588671
agagcuucaggagguaauu

SEQ ID NO: 881491 - RNA, 19 nt, Artificial Sequence
  Description of Artificial Sequence: Synthetic oligonucleotide
  Antisense strand to SEQ ID NO: 881490
aauuaccuccugaagcucu

SEQ ID NO: 881492 - RNA, 19 nt, Artificial Sequence
  Description of Artificial Sequence: Synthetic oligonucleotide
  Sense strand starting at position 2701 of SEQ ID NO: 588671
gccaucugcuaaccagaaa

SEQ ID NO: 881493 - RNA, 19 nt, Artificial Sequence
  Description of Artificial Sequence: Synthetic oligonucleotide
  Antisense strand to SEQ ID NO: 881492
uuucugguuagcagauggc

SEQ ID NO: 881494 - RNA, 19 nt, Artificial Sequence
  Description of Artificial Sequence: Synthetic oligonucleotide
  Sense strand starting at position 3470 of SEQ ID NO: 588671
gccaguaggaaugaguuua

SEQ ID NO: 881495 - RNA, 19 nt, Artificial Sequence
  Description of Artificial Sequence: Synthetic oligonucleotide
  Antisense strand to SEQ ID NO: 881494
uaaacucauuccuacuggc

SEQ ID NO: 881496 - RNA, 19 nt, Artificial Sequence
  Description of Artificial Sequence: Synthetic oligonucleotide
  Sense strand starting at position 3604 of SEQ ID NO: 588671
acaguucuuaauugggaga

SEQ ID NO: 881497 - RNA, 19 nt, Artificial Sequence
  Description of Artificial Sequence: Synthetic oligonucleotide
  Antisense strand to SEQ ID NO: 881496
ucucccaauuaagaacugu

SEQ ID NO: 881498 - RNA, 19 nt, Artificial Sequence
  Description of Artificial Sequence: Synthetic oligonucleotide
  Sense strand starting at position 3628 of SEQ ID NO: 588671
ucagaagagcuuuguacag

SEQ ID NO: 881499 - RNA, 19 nt, Artificial Sequence
  Description of Artificial Sequence: Synthetic oligonucleotide
  Antisense strand to SEQ ID NO: 881498
cuguacaaagcucuucuga

SEQ ID NO: 881500 - RNA, 19 nt, Artificial Sequence
  Description of Artificial Sequence: Synthetic oligonucleotide
  Sense strand starting at position 3632 of SEQ ID NO: 588671
aagagcuuuguacagguua

SEQ ID NO: 881501 - RNA, 19 nt, Artificial Sequence
  Description of Artificial Sequence: Synthetic oligonucleotide
  Antisense strand to SEQ ID NO: 881500
uaaccuguacaaagcucuu

SEQ ID NO: 881502 - RNA, 19 nt, Artificial Sequence
  Description of Artificial Sequence: Synthetic oligonucleotide
  Sense strand starting at position 3637 of SEQ ID NO: 588671
cuuuguacagguuaaggau

SEQ ID NO: 881503 - RNA, 19 nt, Artificial Sequence
  Description of Artificial Sequence: Synthetic oligonucleotide
  Antisense strand to SEQ ID NO: 881502
auccuuaaccuguacaaag

SEQ ID NO: 881504 - RNA, 19 nt, Artificial Sequence
  Description of Artificial Sequence: Synthetic oligonucleotide
  Sense strand starting at position 3645 of SEQ ID NO: 588671
agguuaaggauaggcuuaa

SEQ ID NO: 881505 - RNA, 19 nt, Artificial Sequence
  Description of Artificial Sequence: Synthetic oligonucleotide
  Antisense strand to SEQ ID NO: 881504
uuaagccuauccuuaaccu

SEQ ID NO: 881506 - RNA, 19 nt, Artificial Sequence
  Description of Artificial Sequence: Synthetic oligonucleotide
  Sense strand starting at position 3646 of SEQ ID NO: 588671
gguuaaggauaggcuuaaa

SEQ ID NO: 881507 - RNA, 19 nt, Artificial Sequence
  Description of Artificial Sequence: Synthetic oligonucleotide
  Antisense strand to SEQ ID NO: 881506
uuuaagccuauccuuaacc

SEQ ID NO: 881508 - RNA, 19 nt, Artificial Sequence
  Description of Artificial Sequence: Synthetic oligonucleotide
  Sense strand starting at position 3921 of SEQ ID NO: 588671
ugcaauuagcccuagauuc

SEQ ID NO: 881509 - RNA, 19 nt, Artificial Sequence
  Description of Artificial Sequence: Synthetic oligonucleotide
  Antisense strand to SEQ ID NO: 881508
gaaucuagggcuaauugca

SEQ ID NO: 881510 - RNA, 19 nt, Artificial Sequence
  Description of Artificial Sequence: Synthetic oligonucleotide
  Sense strand starting at position 3973 of SEQ ID NO: 588671
uugugaguucuggagaagu

SEQ ID NO: 881511 - RNA, 19 nt, Artificial Sequence
  Description of Artificial Sequence: Synthetic oligonucleotide
  Antisense strand to SEQ ID NO: 881510
acuucuccagaacucacaa

SEQ ID NO: 881512 - RNA, 19 nt, Artificial Sequence
  Description of Artificial Sequence: Synthetic oligonucleotide
  Sense strand starting at position 3975 of SEQ ID NO: 588671
gugaguucuggagaaguga

SEQ ID NO: 881513 - RNA, 19 nt, Artificial Sequence
  Description of Artificial Sequence: Synthetic oligonucleotide
  Antisense strand to SEQ ID NO: 881512
ucacuucuccagaacucac

SEQ ID NO: 881514 - RNA, 19 nt, Artificial Sequence
  Description of Artificial Sequence: Synthetic oligonucleotide
  Sense strand starting at position 154 of SEQ ID NO: 588672
aaaugcauguuaguaugaa

SEQ ID NO: 881515 - RNA, 19 nt, Artificial Sequence
  Description of Artificial Sequence: Synthetic oligonucleotide
  Antisense strand to SEQ ID NO: 881514
uucauacuaacaugcauuu

SEQ ID NO: 881516 - RNA, 19 nt, Artificial Sequence
  Description of Artificial Sequence: Synthetic oligonucleotide
  Sense strand starting at position 188 of SEQ ID NO: 588672
ucauauuagaugugcagag

SEQ ID NO: 881517 - RNA, 19 nt, Artificial Sequence
  Description of Artificial Sequence: Synthetic oligonucleotide
  Antisense strand to SEQ ID NO: 881516
cucugcacaucuaauauga

SEQ ID NO: 881518 - RNA, 19 nt, Artificial Sequence
  Description of Artificial Sequence: Synthetic oligonucleotide
  Sense strand starting at position 253 of SEQ ID NO: 588672
cacacaugagugugugaau

SEQ ID NO: 881519 - RNA, 19 nt, Artificial Sequence
  Description of Artificial Sequence: Synthetic oligonucleotide
  Antisense strand to SEQ ID NO: 881518
auucacacacucaugugug

SEQ ID NO: 881520 - RNA, 19 nt, Artificial Sequence
  Description of Artificial Sequence: Synthetic oligonucleotide
  Sense strand starting at position 254 of SEQ ID NO: 588672
acacaugagugugugaauu

SEQ ID NO: 881521 - RNA, 19 nt, Artificial Sequence
  Description of Artificial Sequence: Synthetic oligonucleotide
  Antisense strand to SEQ ID NO: 881520
aauucacacacucaugugu

SEQ ID NO: 881522 - RNA, 19 nt, Artificial Sequence
  Description of Artificial Sequence: Synthetic oligonucleotide
  Sense strand starting at position 262 of SEQ ID NO: 588672
gugugugaauuucucuauu

SEQ ID NO: 881523 - RNA, 19 nt, Artificial Sequence
  Description of Artificial Sequence: Synthetic oligonucleotide
  Antisense strand to SEQ ID NO: 881522
aauagagaaauucacacac

SEQ ID NO: 881524 - RNA, 19 nt, Artificial Sequence
  Description of Artificial Sequence: Synthetic oligonucleotide
  Sense strand starting at position 264 of SEQ ID NO: 588672
gugugaauuucucuauucc

SEQ ID NO: 881525 - RNA, 19 nt, Artificial Sequence
  Description of Artificial Sequence: Synthetic oligonucleotide
  Antisense strand to SEQ ID NO: 881524
ggaauagagaaauucacac

SEQ ID NO: 881526 - RNA, 19 nt, Artificial Sequence
  Description of Artificial Sequence: Synthetic oligonucleotide
  Sense strand starting at position 308 of SEQ ID NO: 588672
uugagaacacauggccaua

SEQ ID NO: 881527 - RNA, 19 nt, Artificial Sequence
  Description of Artificial Sequence: Synthetic oligonucleotide
  Antisense strand to SEQ ID NO: 881526
uauggccauguguucucaa

SEQ ID NO: 881528 - RNA, 19 nt, Artificial Sequence
  Description of Artificial Sequence: Synthetic oligonucleotide
  Sense strand starting at position 333 of SEQ ID NO: 588672
aagagaaagugcucaucca

SEQ ID NO: 881529 - RNA, 19 nt, Artificial Sequence
  Description of Artificial Sequence: Synthetic oligonucleotide
  Antisense strand to SEQ ID NO: 881528
uggaugagcacuuucucuu

SEQ ID NO: 881530 - RNA, 19 nt, Artificial Sequence
  Description of Artificial Sequence: Synthetic oligonucleotide
  Sense strand starting at position 421 of SEQ ID NO: 588672
auucuaaaugccuaagagu

SEQ ID NO: 881531 - RNA, 19 nt, Artificial Sequence
  Description of Artificial Sequence: Synthetic oligonucleotide
  Antisense strand to SEQ ID NO: 881530
acucuuaggcauuuagaau

SEQ ID NO: 881532 - RNA, 19 nt, Artificial Sequence
  Description of Artificial Sequence: Synthetic oligonucleotide
  Sense strand starting at position 427 of SEQ ID NO: 588672
aaugccuaagagugaucau

SEQ ID NO: 881533 - RNA, 19 nt, Artificial Sequence
  Description of Artificial Sequence: Synthetic oligonucleotide
  Antisense strand to SEQ ID NO: 881532
augaucacucuuaggcauu

SEQ ID NO: 881534 - RNA, 19 nt, Artificial Sequence
  Description of Artificial Sequence: Synthetic oligonucleotide
  Sense strand starting at position 430 of SEQ ID NO: 588672
gccuaagagugaucaucag

SEQ ID NO: 881535 - RNA, 19 nt, Artificial Sequence
  Description of Artificial Sequence: Synthetic oligonucleotide
  Antisense strand to SEQ ID NO: 881534
cugaugaucacucuuaggc

SEQ ID NO: 881536 - RNA, 19 nt, Artificial Sequence
  Description of Artificial Sequence: Synthetic oligonucleotide
  Sense strand starting at position 486 of SEQ ID NO: 588672
uucuaagaacugugugaau

SEQ ID NO: 881537 - RNA, 19 nt, Artificial Sequence
  Description of Artificial Sequence: Synthetic oligonucleotide
  Antisense strand to SEQ ID NO: 881536
auucacacaguucuuagaa

SEQ ID NO: 881538 - RNA, 19 nt, Artificial Sequence
  Description of Artificial Sequence: Synthetic oligonucleotide
  Sense strand starting at position 935 of SEQ ID NO: 588672
gcaggugcucaggaaauga

SEQ ID NO: 881539 - RNA, 19 nt, Artificial Sequence
  Description of Artificial Sequence: Synthetic oligonucleotide
  Antisense strand to SEQ ID NO: 881538
ucauuuccugagcaccugc

SEQ ID NO: 881540 - RNA, 19 nt, Artificial Sequence
  Description of Artificial Sequence: Synthetic oligonucleotide
  Sense strand starting at position 946 of SEQ ID NO: 588672
ggaaaugacagcuguuaug

SEQ ID NO: 881541 - RNA, 19 nt, Artificial Sequence
  Description of Artificial Sequence: Synthetic oligonucleotide
  Antisense strand to SEQ ID NO: 881540
cauaacagcugucauuucc

SEQ ID NO: 881542 - RNA, 19 nt, Artificial Sequence
  Description of Artificial Sequence: Synthetic oligonucleotide
  Sense strand starting at position 988 of SEQ ID NO: 588672
gagggucacguucaacagu

SEQ ID NO: 881543 - RNA, 19 nt, Artificial Sequence
  Description of Artificial Sequence: Synthetic oligonucleotide
  Antisense strand to SEQ ID NO: 881542
acuguugaacgugacccuc

SEQ ID NO: 881544 - RNA, 19 nt, Artificial Sequence
  Description of Artificial Sequence: Synthetic oligonucleotide
  Sense strand starting at position 2102 of SEQ ID NO: 588672
gcuuccuggccaugggaaa

SEQ ID NO: 881545 - RNA, 19 nt, Artificial Sequence
  Description of Artificial Sequence: Synthetic oligonucleotide
  Antisense strand to SEQ ID NO: 881544
uuucccauggccaggaagc

SEQ ID NO: 881546 - RNA, 19 nt, Artificial Sequence
  Description of Artificial Sequence: Synthetic oligonucleotide
  Sense strand starting at position 2161 of SEQ ID NO: 588672
cagguaugacuaugggcaa

SEQ ID NO: 881547 - RNA, 19 nt, Artificial Sequence
  Description of Artificial Sequence: Synthetic oligonucleotide
  Antisense strand to SEQ ID NO: 881546
uugcccauagucauaccug

SEQ ID NO: 881548 - RNA, 19 nt, Artificial Sequence
  Description of Artificial Sequence: Synthetic oligonucleotide
  Sense strand starting at position 2510 of SEQ ID NO: 588672
ugaaguaacucaucugcaa

SEQ ID NO: 881549 - RNA, 19 nt, Artificial Sequence
  Description of Artificial Sequence: Synthetic oligonucleotide
  Antisense strand to SEQ ID NO: 881548
uugcagaugaguuacuuca

SEQ ID NO: 881550 - RNA, 19 nt, Artificial Sequence
  Description of Artificial Sequence: Synthetic oligonucleotide
  Sense strand starting at position 2538 of SEQ ID NO: 588672
caacuuugauaguuuguga

SEQ ID NO: 881551 - RNA, 19 nt, Artificial Sequence
  Description of Artificial Sequence: Synthetic oligonucleotide
  Antisense strand to SEQ ID NO: 881550
ucacaaacuaucaaaguug

SEQ ID NO: 881552 - RNA, 19 nt, Artificial Sequence
  Description of Artificial Sequence: Synthetic oligonucleotide
  Sense strand starting at position 2628 of SEQ ID NO: 588672
gaugaaacagagugagguu

SEQ ID NO: 881553 - RNA, 19 nt, Artificial Sequence
  Description of Artificial Sequence: Synthetic oligonucleotide
  Antisense strand to SEQ ID NO: 881552
aaccucacucuguuucauc

SEQ ID NO: 881554 - RNA, 19 nt, Artificial Sequence
  Description of Artificial Sequence: Synthetic oligonucleotide
  Sense strand starting at position 2635 of SEQ ID NO: 588672
cagagugagguucgacaca

SEQ ID NO: 881555 - RNA, 19 nt, Artificial Sequence
  Description of Artificial Sequence: Synthetic oligonucleotide
  Antisense strand to SEQ ID NO: 881554
ugugucgaaccucacucug

SEQ ID NO: 881556 - RNA, 19 nt, Artificial Sequence
  Description of Artificial Sequence: Synthetic oligonucleotide
  Sense strand starting at position 2657 of SEQ ID NO: 588672
agaucuggccaauggacau

SEQ ID NO: 881557 - RNA, 19 nt, Artificial Sequence
  Description of Artificial Sequence: Synthetic oligonucleotide
  Antisense strand to SEQ ID NO: 881556
auguccauuggccagaucu

SEQ ID NO: 881558 - RNA, 19 nt, Artificial Sequence
  Description of Artificial Sequence: Synthetic oligonucleotide
  Sense strand starting at position 2872 of SEQ ID NO: 588672
ggugcaaugaacugaugau

SEQ ID NO: 881559 - RNA, 19 nt, Artificial Sequence
  Description of Artificial Sequence: Synthetic oligonucleotide
  Antisense strand to SEQ ID NO: 881558
aucaucaguucauugcacc

SEQ ID NO: 881560 - RNA, 19 nt, Artificial Sequence
  Description of Artificial Sequence: Synthetic oligonucleotide
  Sense strand starting at position 2884 of SEQ ID NO: 588672
ugaugauauccauguaauu

SEQ ID NO: 881561 - RNA, 19 nt, Artificial Sequence
  Description of Artificial Sequence: Synthetic oligonucleotide
  Antisense strand to SEQ ID NO: 881560
aauuacauggauaucauca

SEQ ID NO: 881562 - RNA, 19 nt, Artificial Sequence
  Description of Artificial Sequence: Synthetic oligonucleotide
  Sense strand starting at position 2895 of SEQ ID NO: 588672
auguaauuagauugccauc

SEQ ID NO: 881563 - RNA, 19 nt, Artificial Sequence
  Description of Artificial Sequence: Synthetic oligonucleotide
  Antisense strand to SEQ ID NO: 881562
gauggcaaucuaauuacau

SEQ ID NO: 881564 - RNA, 19 nt, Artificial Sequence
  Description of Artificial Sequence: Synthetic oligonucleotide
  Sense strand starting at position 2897 of SEQ ID NO: 588672
guaauuagauugccaucaa

SEQ ID NO: 881565 - RNA, 19 nt, Artificial Sequence
  Description of Artificial Sequence: Synthetic oligonucleotide
  Antisense strand to SEQ ID NO: 881564
uugauggcaaucuaauuac

SEQ ID NO: 881566 - RNA, 19 nt, Artificial Sequence
  Description of Artificial Sequence: Synthetic oligonucleotide
  Sense strand starting at position 2901 of SEQ ID NO: 588672
uuagauugccaucaaaugu

SEQ ID NO: 881567 - RNA, 19 nt, Artificial Sequence
  Description of Artificial Sequence: Synthetic oligonucleotide
  Antisense strand to SEQ ID NO: 881566
acauuugauggcaaucuaa

SEQ ID NO: 881568 - RNA, 19 nt, Artificial Sequence
  Description of Artificial Sequence: Synthetic oligonucleotide
  Sense strand starting at position 3010 of SEQ ID NO: 588672
auacuacucaagugugagu

SEQ ID NO: 881569 - RNA, 19 nt, Artificial Sequence
  Description of Artificial Sequence: Synthetic oligonucleotide
  Antisense strand to SEQ ID NO: 881568
acucacacuugaguaguau

SEQ ID NO: 881570 - RNA, 19 nt, Artificial Sequence
  Description of Artificial Sequence: Synthetic oligonucleotide
  Sense strand starting at position 3012 of SEQ ID NO: 588672
acuacucaagugugaguaa

SEQ ID NO: 881571 - RNA, 19 nt, Artificial Sequence
  Description of Artificial Sequence: Synthetic oligonucleotide
  Antisense strand to SEQ ID NO: 881570
uuacucacacuugaguagu

SEQ ID NO: 881572 - RNA, 19 nt, Artificial Sequence
  Description of Artificial Sequence: Synthetic oligonucleotide
  Sense strand starting at position 3015 of SEQ ID NO: 588672
acucaagugugaguaaaga

SEQ ID NO: 881573 - RNA, 19 nt, Artificial Sequence
  Description of Artificial Sequence: Synthetic oligonucleotide
  Antisense strand to SEQ ID NO: 881572
ucuuuacucacacuugagu

SEQ ID NO: 881574 - RNA, 19 nt, Artificial Sequence
  Description of Artificial Sequence: Synthetic oligonucleotide
  Sense strand starting at position 3490 of SEQ ID NO: 588672
gacacaucugcccaggcau

SEQ ID NO: 881575 - RNA, 19 nt, Artificial Sequence
  Description of Artificial Sequence: Synthetic oligonucleotide
  Antisense strand to SEQ ID NO: 881574
augccugggcagauguguc

SEQ ID NO: 881576 - RNA, 19 nt, Artificial Sequence
  Description of Artificial Sequence: Synthetic oligonucleotide
  Sense strand starting at position 3580 of SEQ ID NO: 588672
ugcagaaaucuugggcaau

SEQ ID NO: 881577 - RNA, 19 nt, Artificial Sequence
  Description of Artificial Sequence: Synthetic oligonucleotide
  Antisense strand to SEQ ID NO: 881576
auugcccaagauuucugca

SEQ ID NO: 881578 - RNA, 19 nt, Artificial Sequence
  Description of Artificial Sequence: Synthetic oligonucleotide
  Sense strand starting at position 3590 of SEQ ID NO: 588672
uugggcaauucuguaagaa

SEQ ID NO: 881579 - RNA, 19 nt, Artificial Sequence
  Description of Artificial Sequence: Synthetic oligonucleotide
  Antisense strand to SEQ ID NO: 881578
uucuuacagaauugcccaa

SEQ ID NO: 881580 - RNA, 19 nt, Artificial Sequence
  Description of Artificial Sequence: Synthetic oligonucleotide
  Sense strand starting at position 3639 of SEQ ID NO: 588672
ggcacagguuugcugaaga

SEQ ID NO: 881581 - RNA, 19 nt, Artificial Sequence
  Description of Artificial Sequence: Synthetic oligonucleotide
  Antisense strand to SEQ ID NO: 881580
ucuucagcaaaccugugcc

SEQ ID NO: 881582 - RNA, 19 nt, Artificial Sequence
  Description of Artificial Sequence: Synthetic oligonucleotide
  Sense strand starting at position 3650 of SEQ ID NO: 588672
gcugaagacugugcugaaa

SEQ ID NO: 881583 - RNA, 19 nt, Artificial Sequence
  Description of Artificial Sequence: Synthetic oligonucleotide
  Antisense strand to SEQ ID NO: 881582
uuucagcacagucuucagc

SEQ ID NO: 881584 - RNA, 19 nt, Artificial Sequence
  Description of Artificial Sequence: Synthetic oligonucleotide
  Sense strand starting at position 3766 of SEQ ID NO: 588672
uuuccuccauugguuaaga

SEQ ID NO: 881585 - RNA, 19 nt, Artificial Sequence
  Description of Artificial Sequence: Synthetic oligonucleotide
  Antisense strand to SEQ ID NO: 881584
ucuuaaccaauggaggaaa

SEQ ID NO: 881586 - RNA, 19 nt, Artificial Sequence
  Description of Artificial Sequence: Synthetic oligonucleotide
  Sense strand starting at position 3767 of SEQ ID NO: 588672
uuccuccauugguuaagaa

SEQ ID NO: 881587 - RNA, 19 nt, Artificial Sequence
  Description of Artificial Sequence: Synthetic oligonucleotide
  Antisense strand to SEQ ID NO: 881586
uucuuaaccaauggaggaa

SEQ ID NO: 881588 - RNA, 19 nt, Artificial Sequence
  Description of Artificial Sequence: Synthetic oligonucleotide
  Sense strand starting at position 3793 of SEQ ID NO: 588672
uggcguuagcuuccucuaa

SEQ ID NO: 881589 - RNA, 19 nt, Artificial Sequence
  Description of Artificial Sequence: Synthetic oligonucleotide
  Antisense strand to SEQ ID NO: 881588
uuagaggaagcuaacgcca

SEQ ID NO: 881590 - RNA, 19 nt, Artificial Sequence
  Description of Artificial Sequence: Synthetic oligonucleotide
  Sense strand starting at position 3973 of SEQ ID NO: 588672
auacaaagauguuuguaga

SEQ ID NO: 881591 - RNA, 19 nt, Artificial Sequence
  Description of Artificial Sequence: Synthetic oligonucleotide
  Antisense strand to SEQ ID NO: 881590
ucuacaaacaucuuuguau

SEQ ID NO: 881592 - RNA, 19 nt, Artificial Sequence
  Description of Artificial Sequence: Synthetic oligonucleotide
  Sense strand starting at position 3974 of SEQ ID NO: 588672
uacaaagauguuuguagaa

SEQ ID NO: 881593 - RNA, 19 nt, Artificial Sequence
  Description of Artificial Sequence: Synthetic oligonucleotide
  Antisense strand to SEQ ID NO: 881592
uucuacaaacaucuuugua

SEQ ID NO: 881594 - RNA, 19 nt, Artificial Sequence
  Description of Artificial Sequence: Synthetic oligonucleotide
  Sense strand starting at position 42 of SEQ ID NO: 588673
acaggaaauugcccuccaa

SEQ ID NO: 881595 - RNA, 19 nt, Artificial Sequence
  Description of Artificial Sequence: Synthetic oligonucleotide
  Antisense strand to SEQ ID NO: 881594
uuggagggcaauuuccugu

SEQ ID NO: 881596 - RNA, 19 nt, Artificial Sequence
  Description of Artificial Sequence: Synthetic oligonucleotide
  Sense strand starting at position 64 of SEQ ID NO: 588673
cuuguauugccuguguuau

SEQ ID NO: 881597 - RNA, 19 nt, Artificial Sequence
  Description of Artificial Sequence: Synthetic oligonucleotide
  Antisense strand to SEQ ID NO: 881596
auaacacaggcaauacaag

SEQ ID NO: 881598 - RNA, 19 nt, Artificial Sequence
  Description of Artificial Sequence: Synthetic oligonucleotide
  Sense strand starting at position 116 of SEQ ID NO: 588673
ucagauuguugacuuaaau

SEQ ID NO: 881599 - RNA, 19 nt, Artificial Sequence
  Description of Artificial Sequence: Synthetic oligonucleotide
  Antisense strand to SEQ ID NO: 881598
auuuaagucaacaaucuga

SEQ ID NO: 881600 - RNA, 19 nt, Artificial Sequence
  Description of Artificial Sequence: Synthetic oligonucleotide
  Sense strand starting at position 173 of SEQ ID NO: 588673
ugguucaugguguaucaga

SEQ ID NO: 881601 - RNA, 19 nt, Artificial Sequence
  Description of Artificial Sequence: Synthetic oligonucleotide
  Antisense strand to SEQ ID NO: 881600
ucugauacaccaugaacca

SEQ ID NO: 881602 - RNA, 19 nt, Artificial Sequence
  Description of Artificial Sequence: Synthetic oligonucleotide
  Sense strand starting at position 224 of SEQ ID NO: 588673
auaaaucucugaguugcaa

SEQ ID NO: 881603 - RNA, 19 nt, Artificial Sequence
  Description of Artificial Sequence: Synthetic oligonucleotide
  Antisense strand to SEQ ID NO: 881602
uugcaacucagagauuuau

SEQ ID NO: 881604 - RNA, 19 nt, Artificial Sequence
  Description of Artificial Sequence: Synthetic oligonucleotide
  Sense strand starting at position 252 of SEQ ID NO: 588673
uggacuagcagugacuaau

SEQ ID NO: 881605 - RNA, 19 nt, Artificial Sequence
  Description of Artificial Sequence: Synthetic oligonucleotide
  Antisense strand to SEQ ID NO: 881604
auuagucacugcuagucca

SEQ ID NO: 881606 - RNA, 19 nt, Artificial Sequence
  Description of Artificial Sequence: Synthetic oligonucleotide
  Sense strand starting at position 255 of SEQ ID NO: 588673
acuagcagugacuaauauu

SEQ ID NO: 881607 - RNA, 19 nt, Artificial Sequence
  Description of Artificial Sequence: Synthetic oligonucleotide
  Antisense strand to SEQ ID NO: 881606
aauauuagucacugcuagu

SEQ ID NO: 881608 - RNA, 19 nt, Artificial Sequence
  Description of Artificial Sequence: Synthetic oligonucleotide
  Sense strand starting at position 441 of SEQ ID NO: 588673
aguugaguuugggucaaau

SEQ ID NO: 881609 - RNA, 19 nt, Artificial Sequence
  Description of Artificial Sequence: Synthetic oligonucleotide
  Antisense strand to SEQ ID NO: 881608
auuugacccaaacucaacu

SEQ ID NO: 881610 - RNA, 19 nt, Artificial Sequence
  Description of Artificial Sequence: Synthetic oligonucleotide
  Sense strand starting at position 443 of SEQ ID NO: 588673
uugaguuugggucaaauga

SEQ ID NO: 881611 - RNA, 19 nt, Artificial Sequence
  Description of Artificial Sequence: Synthetic oligonucleotide
  Antisense strand to SEQ ID NO: 881610
ucauuugacccaaacucaa

SEQ ID NO: 881612 - RNA, 19 nt, Artificial Sequence
  Description of Artificial Sequence: Synthetic oligonucleotide
  Sense strand starting at position 560 of SEQ ID NO: 588673
cacuaagaguuaucuagug

SEQ ID NO: 881613 - RNA, 19 nt, Artificial Sequence
  Description of Artificial Sequence: Synthetic oligonucleotide
  Antisense strand to SEQ ID NO: 881612
cacuagauaacucuuagug

SEQ ID NO: 881614 - RNA, 19 nt, Artificial Sequence
  Description of Artificial Sequence: Synthetic oligonucleotide
  Sense strand starting at position 566 of SEQ ID NO: 588673
gaguuaucuagugggauga

SEQ ID NO: 881615 - RNA, 19 nt, Artificial Sequence
  Description of Artificial Sequence: Synthetic oligonucleotide
  Antisense strand to SEQ ID NO: 881614
ucaucccacuagauaacuc

SEQ ID NO: 881616 - RNA, 19 nt, Artificial Sequence
  Description of Artificial Sequence: Synthetic oligonucleotide
  Sense strand starting at position 567 of SEQ ID NO: 588673
aguuaucuagugggaugau

SEQ ID NO: 881617 - RNA, 19 nt, Artificial Sequence
  Description of Artificial Sequence: Synthetic oligonucleotide
  Antisense strand to SEQ ID NO: 881616
aucaucccacuagauaacu

SEQ ID NO: 881618 - RNA, 19 nt, Artificial Sequence
  Description of Artificial Sequence: Synthetic oligonucleotide
  Sense strand starting at position 620 of SEQ ID NO: 588673
aggcuuuaaucuuugagga

SEQ ID NO: 881619 - RNA, 19 nt, Artificial Sequence
  Description of Artificial Sequence: Synthetic oligonucleotide
  Antisense strand to SEQ ID NO: 881618
uccucaaagauuaaagccu

SEQ ID NO: 881620 - RNA, 19 nt, Artificial Sequence
  Description of Artificial Sequence: Synthetic oligonucleotide
  Sense strand starting at position 621 of SEQ ID NO: 588673
ggcuuuaaucuuugaggaa

SEQ ID NO: 881621 - RNA, 19 nt, Artificial Sequence
  Description of Artificial Sequence: Synthetic oligonucleotide
  Antisense strand to SEQ ID NO: 881620
uuccucaaagauuaaagcc

SEQ ID NO: 881622 - RNA, 19 nt, Artificial Sequence
  Description of Artificial Sequence: Synthetic oligonucleotide
  Sense strand starting at position 664 of SEQ ID NO: 588673
ugacauuuauaaugggaga

SEQ ID NO: 881623 - RNA, 19 nt, Artificial Sequence
  Description of Artificial Sequence: Synthetic oligonucleotide
  Antisense strand to SEQ ID NO: 881622
ucucccauuauaaauguca

SEQ ID NO: 881624 - RNA, 19 nt, Artificial Sequence
  Description of Artificial Sequence: Synthetic oligonucleotide
  Sense strand starting at position 687 of SEQ ID NO: 588673
gagagaccucguuauugag

SEQ ID NO: 881625 - RNA, 19 nt, Artificial Sequence
  Description of Artificial Sequence: Synthetic oligonucleotide
  Antisense strand to SEQ ID NO: 881624
cucaauaacgaggucucuc

SEQ ID NO: 881626 - RNA, 19 nt, Artificial Sequence
  Description of Artificial Sequence: Synthetic oligonucleotide
  Sense strand starting at position 689 of SEQ ID NO: 588673
gagaccucguuauugagga

SEQ ID NO: 881627 - RNA, 19 nt, Artificial Sequence
  Description of Artificial Sequence: Synthetic oligonucleotide
  Antisense strand to SEQ ID NO: 881626
uccucaauaacgaggucuc

SEQ ID NO: 881628 - RNA, 19 nt, Artificial Sequence
  Description of Artificial Sequence: Synthetic oligonucleotide
  Sense strand starting at position 715 of SEQ ID NO: 588673
ggcuaauaugaugaagcga

SEQ ID NO: 881629 - RNA, 19 nt, Artificial Sequence
  Description of Artificial Sequence: Synthetic oligonucleotide
  Antisense strand to SEQ ID NO: 881628
ucgcuucaucauauuagcc

SEQ ID NO: 881630 - RNA, 19 nt, Artificial Sequence
  Description of Artificial Sequence: Synthetic oligonucleotide
  Sense strand starting at position 860 of SEQ ID NO: 588673
agauuacagugauccaacu

SEQ ID NO: 881631 - RNA, 19 nt, Artificial Sequence
  Description of Artificial Sequence: Synthetic oligonucleotide
  Antisense strand to SEQ ID NO: 881630
aguuggaucacuguaaucu

SEQ ID NO: 881632 - RNA, 19 nt, Artificial Sequence
  Description of Artificial Sequence: Synthetic oligonucleotide
  Sense strand starting at position 1017 of SEQ ID NO: 588673
ccuauaguccagggcaaga

SEQ ID NO: 881633 - RNA, 19 nt, Artificial Sequence
  Description of Artificial Sequence: Synthetic oligonucleotide
  Antisense strand to SEQ ID NO: 881632
ucuugcccuggacuauagg

SEQ ID NO: 881634 - RNA, 19 nt, Artificial Sequence
  Description of Artificial Sequence: Synthetic oligonucleotide
  Sense strand starting at position 1028 of SEQ ID NO: 588673
gggcaagagaucuguggua

SEQ ID NO: 881635 - RNA, 19 nt, Artificial Sequence
  Description of Artificial Sequence: Synthetic oligonucleotide
  Antisense strand to SEQ ID NO: 881634
uaccacagaucucuugccc

SEQ ID NO: 881636 - RNA, 19 nt, Artificial Sequence
  Description of Artificial Sequence: Synthetic oligonucleotide
  Sense strand starting at position 1986 of SEQ ID NO: 588673
gguuauuucuucccauagu

SEQ ID NO: 881637 - RNA, 19 nt, Artificial Sequence
  Description of Artificial Sequence: Synthetic oligonucleotide
  Antisense strand to SEQ ID NO: 881636
acuaugggaagaaauaacc

SEQ ID NO: 881638 - RNA, 19 nt, Artificial Sequence
  Description of Artificial Sequence: Synthetic oligonucleotide
  Sense strand starting at position 2147 of SEQ ID NO: 588673
uccauuaaugugggauauu

SEQ ID NO: 881639 - RNA, 19 nt, Artificial Sequence
  Description of Artificial Sequence: Synthetic oligonucleotide
  Antisense strand to SEQ ID NO: 881638
aauaucccacauuaaugga

SEQ ID NO: 881640 - RNA, 19 nt, Artificial Sequence
  Description of Artificial Sequence: Synthetic oligonucleotide
  Sense strand starting at position 2148 of SEQ ID NO: 588673
ccauuaaugugggauauuu

SEQ ID NO: 881641 - RNA, 19 nt, Artificial Sequence
  Description of Artificial Sequence: Synthetic oligonucleotide
  Antisense strand to SEQ ID NO: 881640
aaauaucccacauuaaugg

SEQ ID NO: 881642 - RNA, 19 nt, Artificial Sequence
  Description of Artificial Sequence: Synthetic oligonucleotide
  Sense strand starting at position 2192 of SEQ ID NO: 588673
aguugccugcuauaaagaa

SEQ ID NO: 881643 - RNA, 19 nt, Artificial Sequence
  Description of Artificial Sequence: Synthetic oligonucleotide
  Antisense strand to SEQ ID NO: 881642
uucuuuauagcaggcaacu

SEQ ID NO: 881644 - RNA, 19 nt, Artificial Sequence
  Description of Artificial Sequence: Synthetic oligonucleotide
  Sense strand starting at position 2271 of SEQ ID NO: 588673
aggagugagugcaagagaa

SEQ ID NO: 881645 - RNA, 19 nt, Artificial Sequence
  Description of Artificial Sequence: Synthetic oligonucleotide
  Antisense strand to SEQ ID NO: 881644
uucucuugcacucacuccu

SEQ ID NO: 881646 - RNA, 19 nt, Artificial Sequence
  Description of Artificial Sequence: Synthetic oligonucleotide
  Sense strand starting at position 2273 of SEQ ID NO: 588673
gagugagugcaagagaauu

SEQ ID NO: 881647 - RNA, 19 nt, Artificial Sequence
  Description of Artificial Sequence: Synthetic oligonucleotide
  Antisense strand to SEQ ID NO: 881646
aauucucuugcacucacuc

SEQ ID NO: 881648 - RNA, 19 nt, Artificial Sequence
  Description of Artificial Sequence: Synthetic oligonucleotide
  Sense strand starting at position 2316 of SEQ ID NO: 588673
uggagaaauuauucucuuc

SEQ ID NO: 881649 - RNA, 19 nt, Artificial Sequence
  Description of Artificial Sequence: Synthetic oligonucleotide
  Antisense strand to SEQ ID NO: 881648
gaagagaauaauuucucca

SEQ ID NO: 881650 - RNA, 19 nt, Artificial Sequence
  Description of Artificial Sequence: Synthetic oligonucleotide
  Sense strand starting at position 2553 of SEQ ID NO: 588673
gaaaccuuauuugagugaa

SEQ ID NO: 881651 - RNA, 19 nt, Artificial Sequence
  Description of Artificial Sequence: Synthetic oligonucleotide
  Antisense strand to SEQ ID NO: 881650
uucacucaaauaagguuuc

SEQ ID NO: 881652 - RNA, 19 nt, Artificial Sequence
  Description of Artificial Sequence: Synthetic oligonucleotide
  Sense strand starting at position 3016 of SEQ ID NO: 588673
gucuguguugguguaauuc

SEQ ID NO: 881653 - RNA, 19 nt, Artificial Sequence
  Description of Artificial Sequence: Synthetic oligonucleotide
  Antisense strand to SEQ ID NO: 881652
gaauuacaccaacacagac

SEQ ID NO: 881654 - RNA, 19 nt, Artificial Sequence
  Description of Artificial Sequence: Synthetic oligonucleotide
  Sense strand starting at position 3089 of SEQ ID NO: 588673
gaaggcaccugauucuaga

SEQ ID NO: 881655 - RNA, 19 nt, Artificial Sequence
  Description of Artificial Sequence: Synthetic oligonucleotide
  Antisense strand to SEQ ID NO: 881654
ucuagaaucaggugccuuc

SEQ ID NO: 881656 - RNA, 19 nt, Artificial Sequence
  Description of Artificial Sequence: Synthetic oligonucleotide
  Sense strand starting at position 3211 of SEQ ID NO: 588673
aagggagcauccuuugaga

SEQ ID NO: 881657 - RNA, 19 nt, Artificial Sequence
  Description of Artificial Sequence: Synthetic oligonucleotide
  Antisense strand to SEQ ID NO: 881656
ucucaaaggaugcucccuu

SEQ ID NO: 881658 - RNA, 19 nt, Artificial Sequence
  Description of Artificial Sequence: Synthetic oligonucleotide
  Sense strand starting at position 3213 of SEQ ID NO: 588673
gggagcauccuuugagauc

SEQ ID NO: 881659 - RNA, 19 nt, Artificial Sequence
  Description of Artificial Sequence: Synthetic oligonucleotide
  Antisense strand to SEQ ID NO: 881658
gaucucaaaggaugcuccc

SEQ ID NO: 881660 - RNA, 19 nt, Artificial Sequence
  Description of Artificial Sequence: Synthetic oligonucleotide
  Sense strand starting at position 3234 of SEQ ID NO: 588673
caagaagucccuggaguuc

SEQ ID NO: 881661 - RNA, 19 nt, Artificial Sequence
  Description of Artificial Sequence: Synthetic oligonucleotide
  Antisense strand to SEQ ID NO: 881660
gaacuccagggacuucuug

SEQ ID NO: 881662 - RNA, 19 nt, Artificial Sequence
  Description of Artificial Sequence: Synthetic oligonucleotide
  Sense strand starting at position 3445 of SEQ ID NO: 588673
ugcugcuuacauugaaaga

SEQ ID NO: 881663 - RNA, 19 nt, Artificial Sequence
  Description of Artificial Sequence: Synthetic oligonucleotide
  Antisense strand to SEQ ID NO: 881662
ucuuucaauguaagcagca

SEQ ID NO: 881664 - RNA, 19 nt, Artificial Sequence
  Description of Artificial Sequence: Synthetic oligonucleotide
  Sense strand starting at position 3491 of SEQ ID NO: 588673
ucggaauucguugaucauc

SEQ ID NO: 881665 - RNA, 19 nt, Artificial Sequence
  Description of Artificial Sequence: Synthetic oligonucleotide
  Antisense strand to SEQ ID NO: 881664
gaugaucaacgaauuccga

SEQ ID NO: 881666 - RNA, 19 nt, Artificial Sequence
  Description of Artificial Sequence: Synthetic oligonucleotide
  Sense strand starting at position 3493 of SEQ ID NO: 588673
ggaauucguugaucaucaa

SEQ ID NO: 881667 - RNA, 19 nt, Artificial Sequence
  Description of Artificial Sequence: Synthetic oligonucleotide
  Antisense strand to SEQ ID NO: 881666
uugaugaucaacgaauucc

SEQ ID NO: 881668 - RNA, 19 nt, Artificial Sequence
  Description of Artificial Sequence: Synthetic oligonucleotide
  Sense strand starting at position 3497 of SEQ ID NO: 588673
uucguugaucaucaagcua

SEQ ID NO: 881669 - RNA, 19 nt, Artificial Sequence
  Description of Artificial Sequence: Synthetic oligonucleotide
  Antisense strand to SEQ ID NO: 881668
uagcuugaugaucaacgaa

SEQ ID NO: 881670 - RNA, 19 nt, Artificial Sequence
  Description of Artificial Sequence: Synthetic oligonucleotide
  Sense strand starting at position 3581 of SEQ ID NO: 588673
gcuagacacuguucuuaga

SEQ ID NO: 881671 - RNA, 19 nt, Artificial Sequence
  Description of Artificial Sequence: Synthetic oligonucleotide
  Antisense strand to SEQ ID NO: 881670
ucuaagaacagugucuagc

SEQ ID NO: 881672 - RNA, 19 nt, Artificial Sequence
  Description of Artificial Sequence: Synthetic oligonucleotide
  Sense strand starting at position 3787 of SEQ ID NO: 588673
agcaaaccagaucgauauu

SEQ ID NO: 881673 - RNA, 19 nt, Artificial Sequence
  Description of Artificial Sequence: Synthetic oligonucleotide
  Antisense strand to SEQ ID NO: 881672
aauaucgaucugguuugcu

SEQ ID NO: 881674 - RNA, 19 nt, Artificial Sequence
  Description of Artificial Sequence: Synthetic oligonucleotide
  Sense strand starting at position 590 of SEQ ID NO: 588674
gugagacuuguacauacau

SEQ ID NO: 881675 - RNA, 19 nt, Artificial Sequence
  Description of Artificial Sequence: Synthetic oligonucleotide
  Antisense strand to SEQ ID NO: 881674
auguauguacaagucucac

SEQ ID NO: 881676 - RNA, 19 nt, Artificial Sequence
  Description of Artificial Sequence: Synthetic oligonucleotide
  Sense strand starting at position 630 of SEQ ID NO: 588674
uccugacagcuuuaaauag

SEQ ID NO: 881677 - RNA, 19 nt, Artificial Sequence
  Description of Artificial Sequence: Synthetic oligonucleotide
  Antisense strand to SEQ ID NO: 881676
cuauuuaaagcugucagga

SEQ ID NO: 881678 - RNA, 19 nt, Artificial Sequence
  Description of Artificial Sequence: Synthetic oligonucleotide
  Sense strand starting at position 656 of SEQ ID NO: 588674
ugacuaugugugcauaaua

SEQ ID NO: 881679 - RNA, 19 nt, Artificial Sequence
  Description of Artificial Sequence: Synthetic oligonucleotide
  Antisense strand to SEQ ID NO: 881678
uauuaugcacacauaguca

SEQ ID NO: 881680 - RNA, 19 nt, Artificial Sequence
  Description of Artificial Sequence: Synthetic oligonucleotide
  Sense strand starting at position 797 of SEQ ID NO: 588674
gaguaaagggaaugugauu

SEQ ID NO: 881681 - RNA, 19 nt, Artificial Sequence
  Description of Artificial Sequence: Synthetic oligonucleotide
  Antisense strand to SEQ ID NO: 881680
aaucacauucccuuuacuc

SEQ ID NO: 881682 - RNA, 19 nt, Artificial Sequence
  Description of Artificial Sequence: Synthetic oligonucleotide
  Sense strand starting at position 1989 of SEQ ID NO: 588674
uggacauucccauggacuu

SEQ ID NO: 881683 - RNA, 19 nt, Artificial Sequence
  Description of Artificial Sequence: Synthetic oligonucleotide
  Antisense strand to SEQ ID NO: 881682
aaguccaugggaaugucca

SEQ ID NO: 881684 - RNA, 19 nt, Artificial Sequence
  Description of Artificial Sequence: Synthetic oligonucleotide
  Sense strand starting at position 2086 of SEQ ID NO: 588674
uguucuuacacugaguagu

SEQ ID NO: 881685 - RNA, 19 nt, Artificial Sequence
  Description of Artificial Sequence: Synthetic oligonucleotide
  Antisense strand to SEQ ID NO: 881684
acuacucaguguaagaaca

SEQ ID NO: 881686 - RNA, 19 nt, Artificial Sequence
  Description of Artificial Sequence: Synthetic oligonucleotide
  Sense strand starting at position 2088 of SEQ ID NO: 588674
uucuuacacugaguaguua

SEQ ID NO: 881687 - RNA, 19 nt, Artificial Sequence
  Description of Artificial Sequence: Synthetic oligonucleotide
  Antisense strand to SEQ ID NO: 881686
uaacuacucaguguaagaa

SEQ ID NO: 881688 - RNA, 19 nt, Artificial Sequence
  Description of Artificial Sequence: Synthetic oligonucleotide
  Sense strand starting at position 2089 of SEQ ID NO: 588674
ucuuacacugaguaguuau

SEQ ID NO: 881689 - RNA, 19 nt, Artificial Sequence
  Description of Artificial Sequence: Synthetic oligonucleotide
  Antisense strand to SEQ ID NO: 881688
auaacuacucaguguaaga

SEQ ID NO: 881690 - RNA, 19 nt, Artificial Sequence
  Description of Artificial Sequence: Synthetic oligonucleotide
  Sense strand starting at position 2113 of SEQ ID NO: 588674
gagcauuuacucuguaguu

SEQ ID NO: 881691 - RNA, 19 nt, Artificial Sequence
  Description of Artificial Sequence: Synthetic oligonucleotide
  Antisense strand to SEQ ID NO: 881690
aacuacagaguaaaugcuc

SEQ ID NO: 881692 - RNA, 19 nt, Artificial Sequence
  Description of Artificial Sequence: Synthetic oligonucleotide
  Sense strand starting at position 2139 of SEQ ID NO: 588674
cuuccugagcauggagaau

SEQ ID NO: 881693 - RNA, 19 nt, Artificial Sequence
  Description of Artificial Sequence: Synthetic oligonucleotide
  Antisense strand to SEQ ID NO: 881692
auucuccaugcucaggaag

SEQ ID NO: 881694 - RNA, 19 nt, Artificial Sequence
  Description of Artificial Sequence: Synthetic oligonucleotide
  Sense strand starting at position 2200 of SEQ ID NO: 588674
guagauaccugucuuaauc

SEQ ID NO: 881695 - RNA, 19 nt, Artificial Sequence
  Description of Artificial Sequence: Synthetic oligonucleotide
  Antisense strand to SEQ ID NO: 881694
gauuaagacagguaucuac

SEQ ID NO: 881696 - RNA, 19 nt, Artificial Sequence
  Description of Artificial Sequence: Synthetic oligonucleotide
  Sense strand starting at position 2240 of SEQ ID NO: 588674
uuaccauagccaggucaga

SEQ ID NO: 881697 - RNA, 19 nt, Artificial Sequence
  Description of Artificial Sequence: Synthetic oligonucleotide
  Antisense strand to SEQ ID NO: 881696
ucugaccuggcuaugguaa

SEQ ID NO: 881698 - RNA, 19 nt, Artificial Sequence
  Description of Artificial Sequence: Synthetic oligonucleotide
  Sense strand starting at position 2943 of SEQ ID NO: 588674
gagcgaauggcugauaagu

SEQ ID NO: 881699 - RNA, 19 nt, Artificial Sequence
  Description of Artificial Sequence: Synthetic oligonucleotide
  Antisense strand to SEQ ID NO: 881698
acuuaucagccauucgcuc

SEQ ID NO: 881700 - RNA, 19 nt, Artificial Sequence
  Description of Artificial Sequence: Synthetic oligonucleotide
  Sense strand starting at position 3031 of SEQ ID NO: 588674
gccaucuucugauuaagga

SEQ ID NO: 881701 - RNA, 19 nt, Artificial Sequence
  Description of Artificial Sequence: Synthetic oligonucleotide
  Antisense strand to SEQ ID NO: 881700
uccuuaaucagaagauggc

SEQ ID NO: 881702 - RNA, 19 nt, Artificial Sequence
  Description of Artificial Sequence: Synthetic oligonucleotide
  Sense strand starting at position 3044 of SEQ ID NO: 588674
uaaggauucugaguggcua

SEQ ID NO: 881703 - RNA, 19 nt, Artificial Sequence
  Description of Artificial Sequence: Synthetic oligonucleotide
  Antisense strand to SEQ ID NO: 881702
uagccacucagaauccuua

SEQ ID NO: 881704 - RNA, 19 nt, Artificial Sequence
  Description of Artificial Sequence: Synthetic oligonucleotide
  Sense strand starting at position 3045 of SEQ ID NO: 588674
aaggauucugaguggcuaa

SEQ ID NO: 881705 - RNA, 19 nt, Artificial Sequence
  Description of Artificial Sequence: Synthetic oligonucleotide
  Antisense strand to SEQ ID NO: 881704
uuagccacucagaauccuu

SEQ ID NO: 881706 - RNA, 19 nt, Artificial Sequence
  Description of Artificial Sequence: Synthetic oligonucleotide
  Sense strand starting at position 3046 of SEQ ID NO: 588674
aggauucugaguggcuaaa

SEQ ID NO: 881707 - RNA, 19 nt, Artificial Sequence
  Description of Artificial Sequence: Synthetic oligonucleotide
  Antisense strand to SEQ ID NO: 881706
uuuagccacucagaauccu

SEQ ID NO: 881708 - RNA, 19 nt, Artificial Sequence
  Description of Artificial Sequence: Synthetic oligonucleotide
  Sense strand starting at position 3075 of SEQ ID NO: 588674
guaacaagauaguuaucuc

SEQ ID NO: 881709 - RNA, 19 nt, Artificial Sequence
  Description of Artificial Sequence: Synthetic oligonucleotide
  Antisense strand to SEQ ID NO: 881708
gagauaacuaucuuguuac

SEQ ID NO: 881710 - RNA, 19 nt, Artificial Sequence
  Description of Artificial Sequence: Synthetic oligonucleotide
  Sense strand starting at position 3134 of SEQ ID NO: 588674
agauguuucuuuccacauc

SEQ ID NO: 881711 - RNA, 19 nt, Artificial Sequence
  Description of Artificial Sequence: Synthetic oligonucleotide
  Antisense strand to SEQ ID NO: 881710
gauguggaaagaaacaucu

SEQ ID NO: 881712 - RNA, 19 nt, Artificial Sequence
  Description of Artificial Sequence: Synthetic oligonucleotide
  Sense strand starting at position 3183 of SEQ ID NO: 588674
agaacacugaguugaaugu

SEQ ID NO: 881713 - RNA, 19 nt, Artificial Sequence
  Description of Artificial Sequence: Synthetic oligonucleotide
  Antisense strand to SEQ ID NO: 881712
acauucaacucaguguucu

SEQ ID NO: 881714 - RNA, 19 nt, Artificial Sequence
  Description of Artificial Sequence: Synthetic oligonucleotide
  Sense strand starting at position 3187 of SEQ ID NO: 588674
cacugaguugaauguaaac

SEQ ID NO: 881715 - RNA, 19 nt, Artificial Sequence
  Description of Artificial Sequence: Synthetic oligonucleotide
  Antisense strand to SEQ ID NO: 881714
guuuacauucaacucagug

SEQ ID NO: 881716 - RNA, 19 nt, Artificial Sequence
  Description of Artificial Sequence: Synthetic oligonucleotide
  Sense strand starting at position 3287 of SEQ ID NO: 588674
ccuacucucuggcugauaa

SEQ ID NO: 881717 - RNA, 19 nt, Artificial Sequence
  Description of Artificial Sequence: Synthetic oligonucleotide
  Antisense strand to SEQ ID NO: 881716
uuaucagccagagaguagg

SEQ ID NO: 881718 - RNA, 19 nt, Artificial Sequence
  Description of Artificial Sequence: Synthetic oligonucleotide
  Sense strand starting at position 3294 of SEQ ID NO: 588674
ucuggcugauaauccauau

SEQ ID NO: 881719 - RNA, 19 nt, Artificial Sequence
  Description of Artificial Sequence: Synthetic oligonucleotide
  Antisense strand to SEQ ID NO: 881718
auauggauuaucagccaga

SEQ ID NO: 881720 - RNA, 19 nt, Artificial Sequence
  Description of Artificial Sequence: Synthetic oligonucleotide
  Sense strand starting at position 3298 of SEQ ID NO: 588674
gcugauaauccauauucug

SEQ ID NO: 881721 - RNA, 19 nt, Artificial Sequence
  Description of Artificial Sequence: Synthetic oligonucleotide
  Antisense strand to SEQ ID NO: 881720
cagaauauggauuaucagc

SEQ ID NO: 881722 - RNA, 19 nt, Artificial Sequence
  Description of Artificial Sequence: Synthetic oligonucleotide
  Sense strand starting at position 3337 of SEQ ID NO: 588674
uggaguuggcuaggguaaa

SEQ ID NO: 881723 - RNA, 19 nt, Artificial Sequence
  Description of Artificial Sequence: Synthetic oligonucleotide
  Antisense strand to SEQ ID NO: 881722
uuuacccuagccaacucca

SEQ ID NO: 881724 - RNA, 19 nt, Artificial Sequence
  Description of Artificial Sequence: Synthetic oligonucleotide
  Sense strand starting at position 3391 of SEQ ID NO: 588674
cuacacuuagggugaacau

SEQ ID NO: 881725 - RNA, 19 nt, Artificial Sequence
  Description of Artificial Sequence: Synthetic oligonucleotide
  Antisense strand to SEQ ID NO: 881724
auguucacccuaaguguag

SEQ ID NO: 881726 - RNA, 19 nt, Artificial Sequence
  Description of Artificial Sequence: Synthetic oligonucleotide
  Sense strand starting at position 3425 of SEQ ID NO: 588674
uuuaauguccaguaaggac

SEQ ID NO: 881727 - RNA, 19 nt, Artificial Sequence
  Description of Artificial Sequence: Synthetic oligonucleotide
  Antisense strand to SEQ ID NO: 881726
guccuuacuggacauuaaa

SEQ ID NO: 881728 - RNA, 19 nt, Artificial Sequence
  Description of Artificial Sequence: Synthetic oligonucleotide
  Sense strand starting at position 3488 of SEQ ID NO: 588674
acucgcuagguugauuaau

SEQ ID NO: 881729 - RNA, 19 nt, Artificial Sequence
  Description of Artificial Sequence: Synthetic oligonucleotide
  Antisense strand to SEQ ID NO: 881728
auuaaucaaccuagcgagu

SEQ ID NO: 881730 - RNA, 19 nt, Artificial Sequence
  Description of Artificial Sequence: Synthetic oligonucleotide
  Sense strand starting at position 3541 of SEQ ID NO: 588674
caaugagcagauggauuau

SEQ ID NO: 881731 - RNA, 19 nt, Artificial Sequence
  Description of Artificial Sequence: Synthetic oligonucleotide
  Antisense strand to SEQ ID NO: 881730
auaauccaucugcucauug

SEQ ID NO: 881732 - RNA, 19 nt, Artificial Sequence
  Description of Artificial Sequence: Synthetic oligonucleotide
  Sense strand starting at position 3547 of SEQ ID NO: 588674
gcagauggauuaucuuaaa

SEQ ID NO: 881733 - RNA, 19 nt, Artificial Sequence
  Description of Artificial Sequence: Synthetic oligonucleotide
  Antisense strand to SEQ ID NO: 881732
uuuaagauaauccaucugc

SEQ ID NO: 881734 - RNA, 19 nt, Artificial Sequence
  Description of Artificial Sequence: Synthetic oligonucleotide
  Sense strand starting at position 3637 of SEQ ID NO: 588674
guacucuugggucagagua

SEQ ID NO: 881735 - RNA, 19 nt, Artificial Sequence
  Description of Artificial Sequence: Synthetic oligonucleotide
  Antisense strand to SEQ ID NO: 881734
uacucugacccaagaguac

SEQ ID NO: 881736 - RNA, 19 nt, Artificial Sequence
  Description of Artificial Sequence: Synthetic oligonucleotide
  Sense strand starting at position 3649 of SEQ ID NO: 588674
cagaguaccuuuccaggua

SEQ ID NO: 881737 - RNA, 19 nt, Artificial Sequence
  Description of Artificial Sequence: Synthetic oligonucleotide
  Antisense strand to SEQ ID NO: 881736
uaccuggaaagguacucug

SEQ ID NO: 881738 - RNA, 19 nt, Artificial Sequence
  Description of Artificial Sequence: Synthetic oligonucleotide
  Sense strand starting at position 3748 of SEQ ID NO: 588674
agauaaaucugugccaaga

SEQ ID NO: 881739 - RNA, 19 nt, Artificial Sequence
  Description of Artificial Sequence: Synthetic oligonucleotide
  Antisense strand to SEQ ID NO: 881738
ucuuggcacagauuuaucu

SEQ ID NO: 881740 - RNA, 19 nt, Artificial Sequence
  Description of Artificial Sequence: Synthetic oligonucleotide
  Sense strand starting at position 3779 of SEQ ID NO: 588674
aaagguaucuaauugucga

SEQ ID NO: 881741 - RNA, 19 nt, Artificial Sequence
  Description of Artificial Sequence: Synthetic oligonucleotide
  Antisense strand to SEQ ID NO: 881740
ucgacaauuagauaccuuu

SEQ ID NO: 881742 - RNA, 19 nt, Artificial Sequence
  Description of Artificial Sequence: Synthetic oligonucleotide
  Sense strand starting at position 3855 of SEQ ID NO: 588674
ucacaaguuguagauacuu

SEQ ID NO: 881743 - RNA, 19 nt, Artificial Sequence
  Description of Artificial Sequence: Synthetic oligonucleotide
  Antisense strand to SEQ ID NO: 881742
aaguaucuacaacuuguga

SEQ ID NO: 881744 - RNA, 19 nt, Artificial Sequence
  Description of Artificial Sequence: Synthetic oligonucleotide
  Sense strand starting at position 3892 of SEQ ID NO: 588674
augggaguaucuucugaga

SEQ ID NO: 881745 - RNA, 19 nt, Artificial Sequence
  Description of Artificial Sequence: Synthetic oligonucleotide
  Antisense strand to SEQ ID NO: 881744
ucucagaagauacucccau

SEQ ID NO: 881746 - RNA, 19 nt, Artificial Sequence
  Description of Artificial Sequence: Synthetic oligonucleotide
  Sense strand starting at position 3967 of SEQ ID NO: 588674
auuaacuuugugcagaauu

SEQ ID NO: 881747 - RNA, 19 nt, Artificial Sequence
  Description of Artificial Sequence: Synthetic oligonucleotide
  Antisense strand to SEQ ID NO: 881746
aauucugcacaaaguuaau

SEQ ID NO: 881748 - RNA, 19 nt, Artificial Sequence
  Description of Artificial Sequence: Synthetic oligonucleotide
  Sense strand starting at position 3969 of SEQ ID NO: 588674
uaacuuugugcagaauugu

SEQ ID NO: 881749 - RNA, 19 nt, Artificial Sequence
  Description of Artificial Sequence: Synthetic oligonucleotide
  Antisense strand to SEQ ID NO: 881748
acaauucugcacaaaguua

SEQ ID NO: 881750 - RNA, 19 nt, Artificial Sequence
  Description of Artificial Sequence: Synthetic oligonucleotide
  Sense strand starting at position 3978 of SEQ ID NO: 588674
gcagaauugucuccaggga

SEQ ID NO: 881751 - RNA, 19 nt, Artificial Sequence
  Description of Artificial Sequence: Synthetic oligonucleotide
  Antisense strand to SEQ ID NO: 881750
ucccuggagacaauucugc

SEQ ID NO: 881752 - RNA, 19 nt, Artificial Sequence
  Description of Artificial Sequence: Synthetic oligonucleotide
  Sense strand starting at position 3982 of SEQ ID NO: 588674
aauugucuccagggaucca

SEQ ID NO: 881753 - RNA, 19 nt, Artificial Sequence
  Description of Artificial Sequence: Synthetic oligonucleotide
  Antisense strand to SEQ ID NO: 881752
uggaucccuggagacaauu

SEQ ID NO: 881754 - RNA, 19 nt, Artificial Sequence
  Description of Artificial Sequence: Synthetic oligonucleotide
  Sense strand starting at position 835 of SEQ ID NO: 588675
aacuuaaaguaugugugua

SEQ ID NO: 881755 - RNA, 19 nt, Artificial Sequence
  Description of Artificial Sequence: Synthetic oligonucleotide
  Antisense strand to SEQ ID NO: 881754
uacacacauacuuuaaguu

SEQ ID NO: 881756 - RNA, 19 nt, Artificial Sequence
  Description of Artificial Sequence: Synthetic oligonucleotide
  Sense strand starting at position 837 of SEQ ID NO: 588675
cuuaaaguauguguguaua

SEQ ID NO: 881757 - RNA, 19 nt, Artificial Sequence
  Description of Artificial Sequence: Synthetic oligonucleotide
  Antisense strand to SEQ ID NO: 881756
uauacacacauacuuuaag

SEQ ID NO: 881758 - RNA, 19 nt, Artificial Sequence
  Description of Artificial Sequence: Synthetic oligonucleotide
  Sense strand starting at position 1057 of SEQ ID NO: 588675
uuguucuuucuaugaguaa

SEQ ID NO: 881759 - RNA, 19 nt, Artificial Sequence
  Description of Artificial Sequence: Synthetic oligonucleotide
  Antisense strand to SEQ ID NO: 881758
uuacucauagaaagaacaa

SEQ ID NO: 881760 - RNA, 19 nt, Artificial Sequence
  Description of Artificial Sequence: Synthetic oligonucleotide
  Sense strand starting at position 2016 of SEQ ID NO: 588675
uggauaggguuuagagaag

SEQ ID NO: 881761 - RNA, 19 nt, Artificial Sequence
  Description of Artificial Sequence: Synthetic oligonucleotide
  Antisense strand to SEQ ID NO: 881760
cuucucuaaacccuaucca

SEQ ID NO: 881762 - RNA, 19 nt, Artificial Sequence
  Description of Artificial Sequence: Synthetic oligonucleotide
  Sense strand starting at position 2109 of SEQ ID NO: 588675
cugcuauuauacuucgaaa

SEQ ID NO: 881763 - RNA, 19 nt, Artificial Sequence
  Description of Artificial Sequence: Synthetic oligonucleotide
  Antisense strand to SEQ ID NO: 881762
uuucgaaguauaauagcag

SEQ ID NO: 881764 - RNA, 19 nt, Artificial Sequence
  Description of Artificial Sequence: Synthetic oligonucleotide
  Sense strand starting at position 2111 of SEQ ID NO: 588675
gcuauuauacuucgaaaga

SEQ ID NO: 881765 - RNA, 19 nt, Artificial Sequence
  Description of Artificial Sequence: Synthetic oligonucleotide
  Antisense strand to SEQ ID NO: 881764
ucuuucgaaguauaauagc

SEQ ID NO: 881766 - RNA, 19 nt, Artificial Sequence
  Description of Artificial Sequence: Synthetic oligonucleotide
  Sense strand starting at position 2227 of SEQ ID NO: 588675
uuuccaugugcucauagga

SEQ ID NO: 881767 - RNA, 19 nt, Artificial Sequence
  Description of Artificial Sequence: Synthetic oligonucleotide
  Antisense strand to SEQ ID NO: 881766
uccuaugagcacauggaaa

SEQ ID NO: 881768 - RNA, 19 nt, Artificial Sequence
  Description of Artificial Sequence: Synthetic oligonucleotide
  Sense strand starting at position 2243 of SEQ ID NO: 588675
ggaacuucuauguggccua

SEQ ID NO: 881769 - RNA, 19 nt, Artificial Sequence
  Description of Artificial Sequence: Synthetic oligonucleotide
  Antisense strand to SEQ ID NO: 881768
uaggccacauagaaguucc

SEQ ID NO: 881770 - RNA, 19 nt, Artificial Sequence
  Description of Artificial Sequence: Synthetic oligonucleotide
  Sense strand starting at position 2246 of SEQ ID NO: 588675
acuucuauguggccuaauu

SEQ ID NO: 881771 - RNA, 19 nt, Artificial Sequence
  Description of Artificial Sequence: Synthetic oligonucleotide
  Antisense strand to SEQ ID NO: 881770
aauuaggccacauagaagu

SEQ ID NO: 881772 - RNA, 19 nt, Artificial Sequence
  Description of Artificial Sequence: Synthetic oligonucleotide
  Sense strand starting at position 2255 of SEQ ID NO: 588675
uggccuaauuuguuugagu

SEQ ID NO: 881773 - RNA, 19 nt, Artificial Sequence
  Description of Artificial Sequence: Synthetic oligonucleotide
  Antisense strand to SEQ ID NO: 881772
acucaaacaaauuaggcca

SEQ ID NO: 881774 - RNA, 19 nt, Artificial Sequence
  Description of Artificial Sequence: Synthetic oligonucleotide
  Sense strand starting at position 2256 of SEQ ID NO: 588675
ggccuaauuuguuugaguu

SEQ ID NO: 881775 - RNA, 19 nt, Artificial Sequence
  Description of Artificial Sequence: Synthetic oligonucleotide
  Antisense strand to SEQ ID NO: 881774
aacucaaacaaauuaggcc

SEQ ID NO: 881776 - RNA, 19 nt, Artificial Sequence
  Description of Artificial Sequence: Synthetic oligonucleotide
  Sense strand starting at position 2257 of SEQ ID NO: 588675
gccuaauuuguuugaguuc

SEQ ID NO: 881777 - RNA, 19 nt, Artificial Sequence
  Description of Artificial Sequence: Synthetic oligonucleotide
  Antisense strand to SEQ ID NO: 881776
gaacucaaacaaauuaggc

SEQ ID NO: 881778 - RNA, 19 nt, Artificial Sequence
  Description of Artificial Sequence: Synthetic oligonucleotide
  Sense strand starting at position 2301 of SEQ ID NO: 588675
uucugagguuguuucuuga

SEQ ID NO: 881779 - RNA, 19 nt, Artificial Sequence
  Description of Artificial Sequence: Synthetic oligonucleotide
  Antisense strand to SEQ ID NO: 881778
ucaagaaacaaccucagaa

SEQ ID NO: 881780 - RNA, 19 nt, Artificial Sequence
  Description of Artificial Sequence: Synthetic oligonucleotide
  Sense strand starting at position 2304 of SEQ ID NO: 588675
ugagguuguuucuugacca

SEQ ID NO: 881781 - RNA, 19 nt, Artificial Sequence
  Description of Artificial Sequence: Synthetic oligonucleotide
  Antisense strand to SEQ ID NO: 881780
uggucaagaaacaaccuca

SEQ ID NO: 881782 - RNA, 19 nt, Artificial Sequence
  Description of Artificial Sequence: Synthetic oligonucleotide
  Sense strand starting at position 2317 of SEQ ID NO: 588675
ugaccaucuccuuagucuu

SEQ ID NO: 881783 - RNA, 19 nt, Artificial Sequence
  Description of Artificial Sequence: Synthetic oligonucleotide
  Antisense strand to SEQ ID NO: 881782
aagacuaaggagaugguca

SEQ ID NO: 881784 - RNA, 19 nt, Artificial Sequence
  Description of Artificial Sequence: Synthetic oligonucleotide
  Sense strand starting at position 2368 of SEQ ID NO: 588675
gcuggauucuacuuagaau

SEQ ID NO: 881785 - RNA, 19 nt, Artificial Sequence
  Description of Artificial Sequence: Synthetic oligonucleotide
  Antisense strand to SEQ ID NO: 881784
auucuaaguagaauccagc

SEQ ID NO: 881786 - RNA, 19 nt, Artificial Sequence
  Description of Artificial Sequence: Synthetic oligonucleotide
  Sense strand starting at position 2404 of SEQ ID NO: 588675
aggaaucccuaugaaugaa

SEQ ID NO: 881787 - RNA, 19 nt, Artificial Sequence
  Description of Artificial Sequence: Synthetic oligonucleotide
  Antisense strand to SEQ ID NO: 881786
uucauucauagggauuccu

SEQ ID NO: 881788 - RNA, 19 nt, Artificial Sequence
  Description of Artificial Sequence: Synthetic oligonucleotide
  Sense strand starting at position 2466 of SEQ ID NO: 588675
gguaguaguaguugggaua

SEQ ID NO: 881789 - RNA, 19 nt, Artificial Sequence
  Description of Artificial Sequence: Synthetic oligonucleotide
  Antisense strand to SEQ ID NO: 881788
uaucccaacuacuacuacc

SEQ ID NO: 881790 - RNA, 19 nt, Artificial Sequence
  Description of Artificial Sequence: Synthetic oligonucleotide
  Sense strand starting at position 2587 of SEQ ID NO: 588675
agcauuucucuuuggcuaa

SEQ ID NO: 881791 - RNA, 19 nt, Artificial Sequence
  Description of Artificial Sequence: Synthetic oligonucleotide
  Antisense strand to SEQ ID NO: 881790
uuagccaaagagaaaugcu

SEQ ID NO: 881792 - RNA, 19 nt, Artificial Sequence
  Description of Artificial Sequence: Synthetic oligonucleotide
  Sense strand starting at position 2599 of SEQ ID NO: 588675
uggcuaauaugaucugaug

SEQ ID NO: 881793 - RNA, 19 nt, Artificial Sequence
  Description of Artificial Sequence: Synthetic oligonucleotide
  Antisense strand to SEQ ID NO: 881792
caucagaucauauuagcca

SEQ ID NO: 881794 - RNA, 19 nt, Artificial Sequence
  Description of Artificial Sequence: Synthetic oligonucleotide
  Sense strand starting at position 2607 of SEQ ID NO: 588675
augaucugaugcuuuauca

SEQ ID NO: 881795 - RNA, 19 nt, Artificial Sequence
  Description of Artificial Sequence: Synthetic oligonucleotide
  Antisense strand to SEQ ID NO: 881794
ugauaaagcaucagaucau

SEQ ID NO: 881796 - RNA, 19 nt, Artificial Sequence
  Description of Artificial Sequence: Synthetic oligonucleotide
  Sense strand starting at position 2665 of SEQ ID NO: 588675
ccagaaauagccuauguaa

SEQ ID NO: 881797 - RNA, 19 nt, Artificial Sequence
  Description of Artificial Sequence: Synthetic oligonucleotide
  Antisense strand to SEQ ID NO: 881796
uuacauaggcuauuucugg

SEQ ID NO: 881798 - RNA, 19 nt, Artificial Sequence
  Description of Artificial Sequence: Synthetic oligonucleotide
  Sense strand starting at position 2668 of SEQ ID NO: 588675
gaaauagccuauguaagca

SEQ ID NO: 881799 - RNA, 19 nt, Artificial Sequence
  Description of Artificial Sequence: Synthetic oligonucleotide
  Antisense strand to SEQ ID NO: 881798
ugcuuacauaggcuauuuc

SEQ ID NO: 881800 - RNA, 19 nt, Artificial Sequence
  Description of Artificial Sequence: Synthetic oligonucleotide
  Sense strand starting at position 2672 of SEQ ID NO: 588675
uagccuauguaagcaagau

SEQ ID NO: 881801 - RNA, 19 nt, Artificial Sequence
  Description of Artificial Sequence: Synthetic oligonucleotide
  Antisense strand to SEQ ID NO: 881800
aucuugcuuacauaggcua

SEQ ID NO: 881802 - RNA, 19 nt, Artificial Sequence
  Description of Artificial Sequence: Synthetic oligonucleotide
  Sense strand starting at position 2676 of SEQ ID NO: 588675
cuauguaagcaagauuagu

SEQ ID NO: 881803 - RNA, 19 nt, Artificial Sequence
  Description of Artificial Sequence: Synthetic oligonucleotide
  Antisense strand to SEQ ID NO: 881802
acuaaucuugcuuacauag

SEQ ID NO: 881804 - RNA, 19 nt, Artificial Sequence
  Description of Artificial Sequence: Synthetic oligonucleotide
  Sense strand starting at position 2752 of SEQ ID NO: 588675
ucaaauauugcaggacuau

SEQ ID NO: 881805 - RNA, 19 nt, Artificial Sequence
  Description of Artificial Sequence: Synthetic oligonucleotide
  Antisense strand to SEQ ID NO: 881804
auaguccugcaauauuuga

SEQ ID NO: 881806 - RNA, 19 nt, Artificial Sequence
  Description of Artificial Sequence: Synthetic oligonucleotide
  Sense strand starting at position 2864 of SEQ ID NO: 588675
augguugacugagugagua

SEQ ID NO: 881807 - RNA, 19 nt, Artificial Sequence
  Description of Artificial Sequence: Synthetic oligonucleotide
  Antisense strand to SEQ ID NO: 881806
uacucacucagucaaccau

SEQ ID NO: 881808 - RNA, 19 nt, Artificial Sequence
  Description of Artificial Sequence: Synthetic oligonucleotide
  Sense strand starting at position 3351 of SEQ ID NO: 588675
agaguauuacauggcuaga

SEQ ID NO: 881809 - RNA, 19 nt, Artificial Sequence
  Description of Artificial Sequence: Synthetic oligonucleotide
  Antisense strand to SEQ ID NO: 881808
ucuagccauguaauacucu

SEQ ID NO: 881810 - RNA, 19 nt, Artificial Sequence
  Description of Artificial Sequence: Synthetic oligonucleotide
  Sense strand starting at position 3353 of SEQ ID NO: 588675
aguauuacauggcuagaga

SEQ ID NO: 881811 - RNA, 19 nt, Artificial Sequence
  Description of Artificial Sequence: Synthetic oligonucleotide
  Antisense strand to SEQ ID NO: 881810
ucucuagccauguaauacu

SEQ ID NO: 881812 - RNA, 19 nt, Artificial Sequence
  Description of Artificial Sequence: Synthetic oligonucleotide
  Sense strand starting at position 3354 of SEQ ID NO: 588675
guauuacauggcuagagac

SEQ ID NO: 881813 - RNA, 19 nt, Artificial Sequence
  Description of Artificial Sequence: Synthetic oligonucleotide
  Antisense strand to SEQ ID NO: 881812
gucucuagccauguaauac

SEQ ID NO: 881814 - RNA, 19 nt, Artificial Sequence
  Description of Artificial Sequence: Synthetic oligonucleotide
  Sense strand starting at position 3398 of SEQ ID NO: 588675
gaauaaugaugggaaacuu

SEQ ID NO: 881815 - RNA, 19 nt, Artificial Sequence
  Description of Artificial Sequence: Synthetic oligonucleotide
  Antisense strand to SEQ ID NO: 881814
aaguuucccaucauuauuc

SEQ ID NO: 881816 - RNA, 19 nt, Artificial Sequence
  Description of Artificial Sequence: Synthetic oligonucleotide
  Sense strand starting at position 3511 of SEQ ID NO: 588675
guauaucuauaugccuaua

SEQ ID NO: 881817 - RNA, 19 nt, Artificial Sequence
  Description of Artificial Sequence: Synthetic oligonucleotide
  Antisense strand to SEQ ID NO: 881816
uauaggcauauagauauac

SEQ ID NO: 881818 - RNA, 19 nt, Artificial Sequence
  Description of Artificial Sequence: Synthetic oligonucleotide
  Sense strand starting at position 3744 of SEQ ID NO: 588675
auaugcugaaagugugaau

SEQ ID NO: 881819 - RNA, 19 nt, Artificial Sequence
  Description of Artificial Sequence: Synthetic oligonucleotide
  Antisense strand to SEQ ID NO: 881818
auucacacuuucagcauau

SEQ ID NO: 881820 - RNA, 19 nt, Artificial Sequence
  Description of Artificial Sequence: Synthetic oligonucleotide
  Sense strand starting at position 3751 of SEQ ID NO: 588675
gaaagugugaaucagugua

SEQ ID NO: 881821 - RNA, 19 nt, Artificial Sequence
  Description of Artificial Sequence: Synthetic oligonucleotide
  Antisense strand to SEQ ID NO: 881820
uacacugauucacacuuuc

SEQ ID NO: 881822 - RNA, 19 nt, Artificial Sequence
  Description of Artificial Sequence: Synthetic oligonucleotide
  Sense strand starting at position 3776 of SEQ ID NO: 588675
uuggccaucucugucaaga

SEQ ID NO: 881823 - RNA, 19 nt, Artificial Sequence
  Description of Artificial Sequence: Synthetic oligonucleotide
  Antisense strand to SEQ ID NO: 881822
ucuugacagagauggccaa

SEQ ID NO: 881824 - RNA, 19 nt, Artificial Sequence
  Description of Artificial Sequence: Synthetic oligonucleotide
  Sense strand starting at position 3785 of SEQ ID NO: 588675
ucugucaagaguuggaaau

SEQ ID NO: 881825 - RNA, 19 nt, Artificial Sequence
  Description of Artificial Sequence: Synthetic oligonucleotide
  Antisense strand to SEQ ID NO: 881824
auuuccaacucuugacaga

SEQ ID NO: 881826 - RNA, 19 nt, Artificial Sequence
  Description of Artificial Sequence: Synthetic oligonucleotide
  Sense strand starting at position 3786 of SEQ ID NO: 588675
cugucaagaguuggaaauc

SEQ ID NO: 881827 - RNA, 19 nt, Artificial Sequence
  Description of Artificial Sequence: Synthetic oligonucleotide
  Antisense strand to SEQ ID NO: 881826
gauuuccaacucuugacag

SEQ ID NO: 881828 - RNA, 19 nt, Artificial Sequence
  Description of Artificial Sequence: Synthetic oligonucleotide
  Sense strand starting at position 3795 of SEQ ID NO: 588675
guuggaaaucugcaucucu

SEQ ID NO: 881829 - RNA, 19 nt, Artificial Sequence
  Description of Artificial Sequence: Synthetic oligonucleotide
  Antisense strand to SEQ ID NO: 881828
agagaugcagauuuccaac

SEQ ID NO: 881830 - RNA, 19 nt, Artificial Sequence
  Description of Artificial Sequence: Synthetic oligonucleotide
  Sense strand starting at position 3934 of SEQ ID NO: 588675
agggaacaaucucaauaug

SEQ ID NO: 881831 - RNA, 19 nt, Artificial Sequence
  Description of Artificial Sequence: Synthetic oligonucleotide
  Antisense strand to SEQ ID NO: 881830
cauauugagauuguucccu

SEQ ID NO: 881832 - RNA, 19 nt, Artificial Sequence
  Description of Artificial Sequence: Synthetic oligonucleotide
  Sense strand starting at position 3951 of SEQ ID NO: 588675
ugcacauguaggugaaaga

SEQ ID NO: 881833 - RNA, 19 nt, Artificial Sequence
  Description of Artificial Sequence: Synthetic oligonucleotide
  Antisense strand to SEQ ID NO: 881832
ucuuucaccuacaugugca

SEQ ID NO: 881834 - RNA, 19 nt, Artificial Sequence
  Description of Artificial Sequence: Synthetic oligonucleotide
  Sense strand starting at position 89 of SEQ ID NO: 588676
uuuguagauucuucuaucu

SEQ ID NO: 881835 - RNA, 19 nt, Artificial Sequence
  Description of Artificial Sequence: Synthetic oligonucleotide
  Antisense strand to SEQ ID NO: 881834
agauagaagaaucuacaaa

SEQ ID NO: 881836 - RNA, 19 nt, Artificial Sequence
  Description of Artificial Sequence: Synthetic oligonucleotide
  Sense strand starting at position 319 of SEQ ID NO: 588676
cuaucaaacccauguaguu

SEQ ID NO: 881837 - RNA, 19 nt, Artificial Sequence
  Description of Artificial Sequence: Synthetic oligonucleotide
  Antisense strand to SEQ ID NO: 881836
aacuacauggguuugauag

SEQ ID NO: 881838 - RNA, 19 nt, Artificial Sequence
  Description of Artificial Sequence: Synthetic oligonucleotide
  Sense strand starting at position 332 of SEQ ID NO: 588676
guaguuucuucuucuuaaa

SEQ ID NO: 881839 - RNA, 19 nt, Artificial Sequence
  Description of Artificial Sequence: Synthetic oligonucleotide
  Antisense strand to SEQ ID NO: 881838
uuuaagaagaagaaacuac

SEQ ID NO: 881840 - RNA, 19 nt, Artificial Sequence
  Description of Artificial Sequence: Synthetic oligonucleotide
  Sense strand starting at position 591 of SEQ ID NO: 588676
cuauaaucgcaccauugua

SEQ ID NO: 881841 - RNA, 19 nt, Artificial Sequence
  Description of Artificial Sequence: Synthetic oligonucleotide
  Antisense strand to SEQ ID NO: 881840
uacaauggugcgauuauag

SEQ ID NO: 881842 - RNA, 19 nt, Artificial Sequence
  Description of Artificial Sequence: Synthetic oligonucleotide
  Sense strand starting at position 627 of SEQ ID NO: 588676
cagugagauuauguuucua

SEQ ID NO: 881843 - RNA, 19 nt, Artificial Sequence
  Description of Artificial Sequence: Synthetic oligonucleotide
  Antisense strand to SEQ ID NO: 881842
uagaaacauaaucucacug

SEQ ID NO: 881844 - RNA, 19 nt, Artificial Sequence
  Description of Artificial Sequence: Synthetic oligonucleotide
  Sense strand starting at position 629 of SEQ ID NO: 588676
gugagauuauguuucuaaa

SEQ ID NO: 881845 - RNA, 19 nt, Artificial Sequence
  Description of Artificial Sequence: Synthetic oligonucleotide
  Antisense strand to SEQ ID NO: 881844
uuuagaaacauaaucucac

SEQ ID NO: 881846 - RNA, 19 nt, Artificial Sequence
  Description of Artificial Sequence: Synthetic oligonucleotide
  Sense strand starting at position 731 of SEQ ID NO: 588676
cauugucaggcuuauagac

SEQ ID NO: 881847 - RNA, 19 nt, Artificial Sequence
  Description of Artificial Sequence: Synthetic oligonucleotide
  Antisense strand to SEQ ID NO: 881846
gucuauaagccugacaaug

SEQ ID NO: 881848 - RNA, 19 nt, Artificial Sequence
  Description of Artificial Sequence: Synthetic oligonucleotide
  Sense strand starting at position 748 of SEQ ID NO: 588676
acaaguuauuuggagauag

SEQ ID NO: 881849 - RNA, 19 nt, Artificial Sequence
  Description of Artificial Sequence: Synthetic oligonucleotide
  Antisense strand to SEQ ID NO: 881848
cuaucuccaaauaacuugu

SEQ ID NO: 881850 - RNA, 19 nt, Artificial Sequence
  Description of Artificial Sequence: Synthetic oligonucleotide
  Sense strand starting at position 791 of SEQ ID NO: 588676
aucuauugaggaugcaaua

SEQ ID NO: 881851 - RNA, 19 nt, Artificial Sequence
  Description of Artificial Sequence: Synthetic oligonucleotide
  Antisense strand to SEQ ID NO: 881850
uauugcauccucaauagau

SEQ ID NO: 881852 - RNA, 19 nt, Artificial Sequence
  Description of Artificial Sequence: Synthetic oligonucleotide
  Sense strand starting at position 863 of SEQ ID NO: 588676
cuagccugagacugaauau

SEQ ID NO: 881853 - RNA, 19 nt, Artificial Sequence
  Description of Artificial Sequence: Synthetic oligonucleotide
  Antisense strand to SEQ ID NO: 881852
auauucagucucaggcuag

SEQ ID NO: 881854 - RNA, 19 nt, Artificial Sequence
  Description of Artificial Sequence: Synthetic oligonucleotide
  Sense strand starting at position 882 of SEQ ID NO: 588676
guauuugguuaagaucaug

SEQ ID NO: 881855 - RNA, 19 nt, Artificial Sequence
  Description of Artificial Sequence: Synthetic oligonucleotide
  Antisense strand to SEQ ID NO: 881854
caugaucuuaaccaaauac

SEQ ID NO: 881856 - RNA, 19 nt, Artificial Sequence
  Description of Artificial Sequence: Synthetic oligonucleotide
  Sense strand starting at position 885 of SEQ ID NO: 588676
uuugguuaagaucaugcau

SEQ ID NO: 881857 - RNA, 19 nt, Artificial Sequence
  Description of Artificial Sequence: Synthetic oligonucleotide
  Antisense strand to SEQ ID NO: 881856
augcaugaucuuaaccaaa

SEQ ID NO: 881858 - RNA, 19 nt, Artificial Sequence
  Description of Artificial Sequence: Synthetic oligonucleotide
  Sense strand starting at position 1010 of SEQ ID NO: 588676
accugauaaucucuucgau

SEQ ID NO: 881859 - RNA, 19 nt, Artificial Sequence
  Description of Artificial Sequence: Synthetic oligonucleotide
  Antisense strand to SEQ ID NO: 881858
aucgaagagauuaucaggu

SEQ ID NO: 881860 - RNA, 19 nt, Artificial Sequence
  Description of Artificial Sequence: Synthetic oligonucleotide
  Sense strand starting at position 1012 of SEQ ID NO: 588676
cugauaaucucuucgauca

SEQ ID NO: 881861 - RNA, 19 nt, Artificial Sequence
  Description of Artificial Sequence: Synthetic oligonucleotide
  Antisense strand to SEQ ID NO: 881860
ugaucgaagagauuaucag

SEQ ID NO: 881862 - RNA, 19 nt, Artificial Sequence
  Description of Artificial Sequence: Synthetic oligonucleotide
  Sense strand starting at position 1013 of SEQ ID NO: 588676
ugauaaucucuucgaucau

SEQ ID NO: 881863 - RNA, 19 nt, Artificial Sequence
  Description of Artificial Sequence: Synthetic oligonucleotide
  Antisense strand to SEQ ID NO: 881862
augaucgaagagauuauca

SEQ ID NO: 881864 - RNA, 19 nt, Artificial Sequence
  Description of Artificial Sequence: Synthetic oligonucleotide
  Sense strand starting at position 1022 of SEQ ID NO: 588676
cuucgaucaugucuuaauu

SEQ ID NO: 881865 - RNA, 19 nt, Artificial Sequence
  Description of Artificial Sequence: Synthetic oligonucleotide
  Antisense strand to SEQ ID NO: 881864
aauuaagacaugaucgaag

SEQ ID NO: 881866 - RNA, 19 nt, Artificial Sequence
  Description of Artificial Sequence: Synthetic oligonucleotide
  Sense strand starting at position 2919 of SEQ ID NO: 588676
gaauacuguuuagccauga

SEQ ID NO: 881867 - RNA, 19 nt, Artificial Sequence
  Description of Artificial Sequence: Synthetic oligonucleotide
  Antisense strand to SEQ ID NO: 881866
ucauggcuaaacaguauuc

SEQ ID NO: 881868 - RNA, 19 nt, Artificial Sequence
  Description of Artificial Sequence: Synthetic oligonucleotide
  Sense strand starting at position 2946 of SEQ ID NO: 588676
gaaaucgugucauuuguag

SEQ ID NO: 881869 - RNA, 19 nt, Artificial Sequence
  Description of Artificial Sequence: Synthetic oligonucleotide
  Antisense strand to SEQ ID NO: 881868
cuacaaaugacacgauuuc

SEQ ID NO: 881870 - RNA, 19 nt, Artificial Sequence
  Description of Artificial Sequence: Synthetic oligonucleotide
  Sense strand starting at position 2986 of SEQ ID NO: 588676
ucauuauucugagugaaac

SEQ ID NO: 881871 - RNA, 19 nt, Artificial Sequence
  Description of Artificial Sequence: Synthetic oligonucleotide
  Antisense strand to SEQ ID NO: 881870
guuucacucagaauaauga

SEQ ID NO: 881872 - RNA, 19 nt, Artificial Sequence
  Description of Artificial Sequence: Synthetic oligonucleotide
  Sense strand starting at position 3110 of SEQ ID NO: 588676
ggaucauugugaguggaau

SEQ ID NO: 881873 - RNA, 19 nt, Artificial Sequence
  Description of Artificial Sequence: Synthetic oligonucleotide
  Antisense strand to SEQ ID NO: 881872
auuccacucacaaugaucc

SEQ ID NO: 881874 - RNA, 19 nt, Artificial Sequence
  Description of Artificial Sequence: Synthetic oligonucleotide
  Sense strand starting at position 3111 of SEQ ID NO: 588676
gaucauugugaguggaaug

SEQ ID NO: 881875 - RNA, 19 nt, Artificial Sequence
  Description of Artificial Sequence: Synthetic oligonucleotide
  Antisense strand to SEQ ID NO: 881874
cauuccacucacaaugauc

SEQ ID NO: 881876 - RNA, 19 nt, Artificial Sequence
  Description of Artificial Sequence: Synthetic oligonucleotide
  Sense strand starting at position 3112 of SEQ ID NO: 588676
aucauugugaguggaauga

SEQ ID NO: 881877 - RNA, 19 nt, Artificial Sequence
  Description of Artificial Sequence: Synthetic oligonucleotide
  Antisense strand to SEQ ID NO: 881876
ucauuccacucacaaugau

SEQ ID NO: 881878 - RNA, 19 nt, Artificial Sequence
  Description of Artificial Sequence: Synthetic oligonucleotide
  Sense strand starting at position 3174 of SEQ ID NO: 588676
gggaaugaaugaugauaaa

SEQ ID NO: 881879 - RNA, 19 nt, Artificial Sequence
  Description of Artificial Sequence: Synthetic oligonucleotide
  Antisense strand to SEQ ID NO: 881878
uuuaucaucauucauuccc

SEQ ID NO: 881880 - RNA, 19 nt, Artificial Sequence
  Description of Artificial Sequence: Synthetic oligonucleotide
  Sense strand starting at position 3187 of SEQ ID NO: 588676
gauaaauugccucaugggu

SEQ ID NO: 881881 - RNA, 19 nt, Artificial Sequence
  Description of Artificial Sequence: Synthetic oligonucleotide
  Antisense strand to SEQ ID NO: 881880
acccaugaggcaauuuauc

SEQ ID NO: 881882 - RNA, 19 nt, Artificial Sequence
  Description of Artificial Sequence: Synthetic oligonucleotide
  Sense strand starting at position 3195 of SEQ ID NO: 588676
gccucauggguacaaugua

SEQ ID NO: 881883 - RNA, 19 nt, Artificial Sequence
  Description of Artificial Sequence: Synthetic oligonucleotide
  Antisense strand to SEQ ID NO: 881882
uacauuguacccaugaggc

SEQ ID NO: 881884 - RNA, 19 nt, Artificial Sequence
  Description of Artificial Sequence: Synthetic oligonucleotide
  Sense strand starting at position 3214 of SEQ ID NO: 588676
uguuauuugcaugguagac

SEQ ID NO: 881885 - RNA, 19 nt, Artificial Sequence
  Description of Artificial Sequence: Synthetic oligonucleotide
  Antisense strand to SEQ ID NO: 881884
gucuaccaugcaaauaaca

SEQ ID NO: 881886 - RNA, 19 nt, Artificial Sequence
  Description of Artificial Sequence: Synthetic oligonucleotide
  Sense strand starting at position 3344 of SEQ ID NO: 588676
ggaacuucuaaguggccua

SEQ ID NO: 881887 - RNA, 19 nt, Artificial Sequence
  Description of Artificial Sequence: Synthetic oligonucleotide
  Antisense strand to SEQ ID NO: 881886
uaggccacuuagaaguucc

SEQ ID NO: 881888 - RNA, 19 nt, Artificial Sequence
  Description of Artificial Sequence: Synthetic oligonucleotide
  Sense strand starting at position 3347 of SEQ ID NO: 588676
acuucuaaguggccuaauu

SEQ ID NO: 881889 - RNA, 19 nt, Artificial Sequence
  Description of Artificial Sequence: Synthetic oligonucleotide
  Antisense strand to SEQ ID NO: 881888
aauuaggccacuuagaagu

SEQ ID NO: 881890 - RNA, 19 nt, Artificial Sequence
  Description of Artificial Sequence: Synthetic oligonucleotide
  Sense strand starting at position 3356 of SEQ ID NO: 588676
uggccuaauuugccugagu

SEQ ID NO: 881891 - RNA, 19 nt, Artificial Sequence
  Description of Artificial Sequence: Synthetic oligonucleotide
  Antisense strand to SEQ ID NO: 881890
acucaggcaaauuaggcca

SEQ ID NO: 881892 - RNA, 19 nt, Artificial Sequence
  Description of Artificial Sequence: Synthetic oligonucleotide
  Sense strand starting at position 3357 of SEQ ID NO: 588676
ggccuaauuugccugaguu

SEQ ID NO: 881893 - RNA, 19 nt, Artificial Sequence
  Description of Artificial Sequence: Synthetic oligonucleotide
  Antisense strand to SEQ ID NO: 881892
aacucaggcaaauuaggcc

SEQ ID NO: 881894 - RNA, 19 nt, Artificial Sequence
  Description of Artificial Sequence: Synthetic oligonucleotide
  Sense strand starting at position 3501 of SEQ ID NO: 588676
aggguaucuccaugaauga

SEQ ID NO: 881895 - RNA, 19 nt, Artificial Sequence
  Description of Artificial Sequence: Synthetic oligonucleotide
  Antisense strand to SEQ ID NO: 881894
ucauucauggagauacccu

SEQ ID NO: 881896 - RNA, 19 nt, Artificial Sequence
  Description of Artificial Sequence: Synthetic oligonucleotide
  Sense strand starting at position 3558 of SEQ ID NO: 588676
ggagguggugaugauaguu

SEQ ID NO: 881897 - RNA, 19 nt, Artificial Sequence
  Description of Artificial Sequence: Synthetic oligonucleotide
  Antisense strand to SEQ ID NO: 881896
aacuaucaucaccaccucc

SEQ ID NO: 881898 - RNA, 19 nt, Artificial Sequence
  Description of Artificial Sequence: Synthetic oligonucleotide
  Sense strand starting at position 3564 of SEQ ID NO: 588676
ggugaugauaguugagaua

SEQ ID NO: 881899 - RNA, 19 nt, Artificial Sequence
  Description of Artificial Sequence: Synthetic oligonucleotide
  Antisense strand to SEQ ID NO: 881898
uaucucaacuaucaucacc

SEQ ID NO: 881900 - RNA, 19 nt, Artificial Sequence
  Description of Artificial Sequence: Synthetic oligonucleotide
  Sense strand starting at position 3701 of SEQ ID NO: 588676
guuaauaugauguggauac

SEQ ID NO: 881901 - RNA, 19 nt, Artificial Sequence
  Description of Artificial Sequence: Synthetic oligonucleotide
  Antisense strand to SEQ ID NO: 881900
guauccacaucauauuaac

SEQ ID NO: 881902 - RNA, 19 nt, Artificial Sequence
  Description of Artificial Sequence: Synthetic oligonucleotide
  Sense strand starting at position 3708 of SEQ ID NO: 588676
ugauguggauacuuuaauu

SEQ ID NO: 881903 - RNA, 19 nt, Artificial Sequence
  Description of Artificial Sequence: Synthetic oligonucleotide
  Antisense strand to SEQ ID NO: 881902
aauuaaaguauccacauca

SEQ ID NO: 881904 - RNA, 19 nt, Artificial Sequence
  Description of Artificial Sequence: Synthetic oligonucleotide
  Sense strand starting at position 3729 of SEQ ID NO: 588676
aagcguuugguccaaagau

SEQ ID NO: 881905 - RNA, 19 nt, Artificial Sequence
  Description of Artificial Sequence: Synthetic oligonucleotide
  Antisense strand to SEQ ID NO: 881904
aucuuuggaccaaacgcuu

SEQ ID NO: 881906 - RNA, 19 nt, Artificial Sequence
  Description of Artificial Sequence: Synthetic oligonucleotide
  Sense strand starting at position 3770 of SEQ ID NO: 588676
ccaggaauagccuauguua

SEQ ID NO: 881907 - RNA, 19 nt, Artificial Sequence
  Description of Artificial Sequence: Synthetic oligonucleotide
  Antisense strand to SEQ ID NO: 881906
uaacauaggcuauuccugg

SEQ ID NO: 881908 - RNA, 19 nt, Artificial Sequence
  Description of Artificial Sequence: Synthetic oligonucleotide
  Sense strand starting at position 3772 of SEQ ID NO: 588676
aggaauagccuauguuacu

SEQ ID NO: 881909 - RNA, 19 nt, Artificial Sequence
  Description of Artificial Sequence: Synthetic oligonucleotide
  Antisense strand to SEQ ID NO: 881908
aguaacauaggcuauuccu

SEQ ID NO: 881910 - RNA, 19 nt, Artificial Sequence
  Description of Artificial Sequence: Synthetic oligonucleotide
  Sense strand starting at position 3965 of SEQ ID NO: 588676
uugauauaguggucucaau

SEQ ID NO: 881911 - RNA, 19 nt, Artificial Sequence
  Description of Artificial Sequence: Synthetic oligonucleotide
  Antisense strand to SEQ ID NO: 881910
auugagaccacuauaucaa

SEQ ID NO: 881912 - RNA, 19 nt, Artificial Sequence
  Description of Artificial Sequence: Synthetic oligonucleotide
  Sense strand starting at position 3972 of SEQ ID NO: 588676
aguggucucaaucagugaa

SEQ ID NO: 881913 - RNA, 19 nt, Artificial Sequence
  Description of Artificial Sequence: Synthetic oligonucleotide
  Antisense strand to SEQ ID NO: 881912
uucacugauugagaccacu

SEQ ID NO: 881914 - RNA, 19 nt, Artificial Sequence
  Description of Artificial Sequence: Synthetic oligonucleotide
  Sense strand starting at position 59 of SEQ ID NO: 588677
auuugauucuuugaacaug

SEQ ID NO: 881915 - RNA, 19 nt, Artificial Sequence
  Description of Artificial Sequence: Synthetic oligonucleotide
  Antisense strand to SEQ ID NO: 881914
cauguucaaagaaucaaau

SEQ ID NO: 881916 - RNA, 19 nt, Artificial Sequence
  Description of Artificial Sequence: Synthetic oligonucleotide
  Sense strand starting at position 71 of SEQ ID NO: 588677
gaacaugcugcauauaguu

SEQ ID NO: 881917 - RNA, 19 nt, Artificial Sequence
  Description of Artificial Sequence: Synthetic oligonucleotide
  Antisense strand to SEQ ID NO: 881916
aacuauaugcagcauguuc

SEQ ID NO: 881918 - RNA, 19 nt, Artificial Sequence
  Description of Artificial Sequence: Synthetic oligonucleotide
  Sense strand starting at position 184 of SEQ ID NO: 588677
cccugaacaucuuuggaga

SEQ ID NO: 881919 - RNA, 19 nt, Artificial Sequence
  Description of Artificial Sequence: Synthetic oligonucleotide
  Antisense strand to SEQ ID NO: 881918
ucuccaaagauguucaggg

SEQ ID NO: 881920 - RNA, 19 nt, Artificial Sequence
  Description of Artificial Sequence: Synthetic oligonucleotide
  Sense strand starting at position 185 of SEQ ID NO: 588677
ccugaacaucuuuggagau

SEQ ID NO: 881921 - RNA, 19 nt, Artificial Sequence
  Description of Artificial Sequence: Synthetic oligonucleotide
  Antisense strand to SEQ ID NO: 881920
aucuccaaagauguucagg

SEQ ID NO: 881922 - RNA, 19 nt, Artificial Sequence
  Description of Artificial Sequence: Synthetic oligonucleotide
  Sense strand starting at position 304 of SEQ ID NO: 588677
acaguuucuagacgaagua

SEQ ID NO: 881923 - RNA, 19 nt, Artificial Sequence
  Description of Artificial Sequence: Synthetic oligonucleotide
  Antisense strand to SEQ ID NO: 881922
uacuucgucuagaaacugu

SEQ ID NO: 881924 - RNA, 19 nt, Artificial Sequence
  Description of Artificial Sequence: Synthetic oligonucleotide
  Sense strand starting at position 305 of SEQ ID NO: 588677
caguuucuagacgaaguau

SEQ ID NO: 881925 - RNA, 19 nt, Artificial Sequence
  Description of Artificial Sequence: Synthetic oligonucleotide
  Antisense strand to SEQ ID NO: 881924
auacuucgucuagaaacug

SEQ ID NO: 881926 - RNA, 19 nt, Artificial Sequence
  Description of Artificial Sequence: Synthetic oligonucleotide
  Sense strand starting at position 387 of SEQ ID NO: 588677
cccugugugaaauggauaa

SEQ ID NO: 881927 - RNA, 19 nt, Artificial Sequence
  Description of Artificial Sequence: Synthetic oligonucleotide
  Antisense strand to SEQ ID NO: 881926
uuauccauuucacacaggg

SEQ ID NO: 881928 - RNA, 19 nt, Artificial Sequence
  Description of Artificial Sequence: Synthetic oligonucleotide
  Sense strand starting at position 398 of SEQ ID NO: 588677
auggauaauuuccauguua

SEQ ID NO: 881929 - RNA, 19 nt, Artificial Sequence
  Description of Artificial Sequence: Synthetic oligonucleotide
  Antisense strand to SEQ ID NO: 881928
uaacauggaaauuauccau

SEQ ID NO: 881930 - RNA, 19 nt, Artificial Sequence
  Description of Artificial Sequence: Synthetic oligonucleotide
  Sense strand starting at position 431 of SEQ ID NO: 588677
uguucuuucugaccauuag

SEQ ID NO: 881931 - RNA, 19 nt, Artificial Sequence
  Description of Artificial Sequence: Synthetic oligonucleotide
  Antisense strand to SEQ ID NO: 881930
cuaauggucagaaagaaca

SEQ ID NO: 881932 - RNA, 19 nt, Artificial Sequence
  Description of Artificial Sequence: Synthetic oligonucleotide
  Sense strand starting at position 739 of SEQ ID NO: 588677
uuuggaggaucugccuuaa

SEQ ID NO: 881933 - RNA, 19 nt, Artificial Sequence
  Description of Artificial Sequence: Synthetic oligonucleotide
  Antisense strand to SEQ ID NO: 881932
uuaaggcagauccuccaaa

SEQ ID NO: 881934 - RNA, 19 nt, Artificial Sequence
  Description of Artificial Sequence: Synthetic oligonucleotide
  Sense strand starting at position 793 of SEQ ID NO: 588677
gggaaaggauuagauuaaa

SEQ ID NO: 881935 - RNA, 19 nt, Artificial Sequence
  Description of Artificial Sequence: Synthetic oligonucleotide
  Antisense strand to SEQ ID NO: 881934
uuuaaucuaauccuuuccc

SEQ ID NO: 881936 - RNA, 19 nt, Artificial Sequence
  Description of Artificial Sequence: Synthetic oligonucleotide
  Sense strand starting at position 873 of SEQ ID NO: 588677
acaggaaacgauugugauu

SEQ ID NO: 881937 - RNA, 19 nt, Artificial Sequence
  Description of Artificial Sequence: Synthetic oligonucleotide
  Antisense strand to SEQ ID NO: 881936
aaucacaaucguuuccugu

SEQ ID NO: 881938 - RNA, 19 nt, Artificial Sequence
  Description of Artificial Sequence: Synthetic oligonucleotide
  Sense strand starting at position 876 of SEQ ID NO: 588677
ggaaacgauugugauuuaa

SEQ ID NO: 881939 - RNA, 19 nt, Artificial Sequence
  Description of Artificial Sequence: Synthetic oligonucleotide
  Antisense strand to SEQ ID NO: 881938
uuaaaucacaaucguuucc

SEQ ID NO: 881940 - RNA, 19 nt, Artificial Sequence
  Description of Artificial Sequence: Synthetic oligonucleotide
  Sense strand starting at position 909 of SEQ ID NO: 588677
auuguugggucaucaucaa

SEQ ID NO: 881941 - RNA, 19 nt, Artificial Sequence
  Description of Artificial Sequence: Synthetic oligonucleotide
  Antisense strand to SEQ ID NO: 881940
uugaugaugacccaacaau

SEQ ID NO: 881942 - RNA, 19 nt, Artificial Sequence
  Description of Artificial Sequence: Synthetic oligonucleotide
  Sense strand starting at position 916 of SEQ ID NO: 588677
ggucaucaucaauggaugu

SEQ ID NO: 881943 - RNA, 19 nt, Artificial Sequence
  Description of Artificial Sequence: Synthetic oligonucleotide
  Antisense strand to SEQ ID NO: 881942
acauccauugaugaugacc

SEQ ID NO: 881944 - RNA, 19 nt, Artificial Sequence
  Description of Artificial Sequence: Synthetic oligonucleotide
  Sense strand starting at position 920 of SEQ ID NO: 588677
aucaucaauggauguaagu

SEQ ID NO: 881945 - RNA, 19 nt, Artificial Sequence
  Description of Artificial Sequence: Synthetic oligonucleotide
  Antisense strand to SEQ ID NO: 881944
acuuacauccauugaugau

SEQ ID NO: 881946 - RNA, 19 nt, Artificial Sequence
  Description of Artificial Sequence: Synthetic oligonucleotide
  Sense strand starting at position 930 of SEQ ID NO: 588677
gauguaagugcccacaaua

SEQ ID NO: 881947 - RNA, 19 nt, Artificial Sequence
  Description of Artificial Sequence: Synthetic oligonucleotide
  Antisense strand to SEQ ID NO: 881946
uauugugggcacuuacauc

SEQ ID NO: 881948 - RNA, 19 nt, Artificial Sequence
  Description of Artificial Sequence: Synthetic oligonucleotide
  Sense strand starting at position 952 of SEQ ID NO: 588677
uugucucacaugggucaga

SEQ ID NO: 881949 - RNA, 19 nt, Artificial Sequence
  Description of Artificial Sequence: Synthetic oligonucleotide
  Antisense strand to SEQ ID NO: 881948
ucugacccaugugagacaa

SEQ ID NO: 881950 - RNA, 19 nt, Artificial Sequence
  Description of Artificial Sequence: Synthetic oligonucleotide
  Sense strand starting at position 1034 of SEQ ID NO: 588677
gcagauuccacuuacgagu

SEQ ID NO: 881951 - RNA, 19 nt, Artificial Sequence
  Description of Artificial Sequence: Synthetic oligonucleotide
  Antisense strand to SEQ ID NO: 881950
acucguaaguggaaucugc

SEQ ID NO: 881952 - RNA, 19 nt, Artificial Sequence
  Description of Artificial Sequence: Synthetic oligonucleotide
  Sense strand starting at position 1328 of SEQ ID NO: 588677
uagugaggauucguauaua

SEQ ID NO: 881953 - RNA, 19 nt, Artificial Sequence
  Description of Artificial Sequence: Synthetic oligonucleotide
  Antisense strand to SEQ ID NO: 881952
uauauacgaauccucacua

SEQ ID NO: 881954 - RNA, 19 nt, Artificial Sequence
  Description of Artificial Sequence: Synthetic oligonucleotide
  Sense strand starting at position 1473 of SEQ ID NO: 588677
guggauaacauuggaguca

SEQ ID NO: 881955 - RNA, 19 nt, Artificial Sequence
  Description of Artificial Sequence: Synthetic oligonucleotide
  Antisense strand to SEQ ID NO: 881954
ugacuccaauguuauccac

SEQ ID NO: 881956 - RNA, 19 nt, Artificial Sequence
  Description of Artificial Sequence: Synthetic oligonucleotide
  Sense strand starting at position 1780 of SEQ ID NO: 588677
aagcaaauaucagugagag

SEQ ID NO: 881957 - RNA, 19 nt, Artificial Sequence
  Description of Artificial Sequence: Synthetic oligonucleotide
  Antisense strand to SEQ ID NO: 881956
cucucacugauauuugcuu

SEQ ID NO: 881958 - RNA, 19 nt, Artificial Sequence
  Description of Artificial Sequence: Synthetic oligonucleotide
  Sense strand starting at position 1847 of SEQ ID NO: 588677
agcgaauggccaggaugau

SEQ ID NO: 881959 - RNA, 19 nt, Artificial Sequence
  Description of Artificial Sequence: Synthetic oligonucleotide
  Antisense strand to SEQ ID NO: 881958
aucauccuggccauucgcu

SEQ ID NO: 881960 - RNA, 19 nt, Artificial Sequence
  Description of Artificial Sequence: Synthetic oligonucleotide
  Sense strand starting at position 1908 of SEQ ID NO: 588677
gagaacaaagagugucuuu

SEQ ID NO: 881961 - RNA, 19 nt, Artificial Sequence
  Description of Artificial Sequence: Synthetic oligonucleotide
  Antisense strand to SEQ ID NO: 881960
aaagacacucuuuguucuc

SEQ ID NO: 881962 - RNA, 19 nt, Artificial Sequence
  Description of Artificial Sequence: Synthetic oligonucleotide
  Sense strand starting at position 1985 of SEQ ID NO: 588677
gguugauucuuuccauuga

SEQ ID NO: 881963 - RNA, 19 nt, Artificial Sequence
  Description of Artificial Sequence: Synthetic oligonucleotide
  Antisense strand to SEQ ID NO: 881962
ucaauggaaagaaucaacc

SEQ ID NO: 881964 - RNA, 19 nt, Artificial Sequence
  Description of Artificial Sequence: Synthetic oligonucleotide
  Sense strand starting at position 2000 of SEQ ID NO: 588677
uugacuugggcucaguuau

SEQ ID NO: 881965 - RNA, 19 nt, Artificial Sequence
  Description of Artificial Sequence: Synthetic oligonucleotide
  Antisense strand to SEQ ID NO: 881964
auaacugagcccaagucaa

SEQ ID NO: 881966 - RNA, 19 nt, Artificial Sequence
  Description of Artificial Sequence: Synthetic oligonucleotide
  Sense strand starting at position 2187 of SEQ ID NO: 588677
gcuccauaagggcauuaua

SEQ ID NO: 881967 - RNA, 19 nt, Artificial Sequence
  Description of Artificial Sequence: Synthetic oligonucleotide
  Antisense strand to SEQ ID NO: 881966
uauaaugcccuuauggagc

SEQ ID NO: 881968 - RNA, 19 nt, Artificial Sequence
  Description of Artificial Sequence: Synthetic oligonucleotide
  Sense strand starting at position 2376 of SEQ ID NO: 588677
ggagguagaucauuauacu

SEQ ID NO: 881969 - RNA, 19 nt, Artificial Sequence
  Description of Artificial Sequence: Synthetic oligonucleotide
  Antisense strand to SEQ ID NO: 881968
aguauaaugaucuaccucc

SEQ ID NO: 881970 - RNA, 19 nt, Artificial Sequence
  Description of Artificial Sequence: Synthetic oligonucleotide
  Sense strand starting at position 2404 of SEQ ID NO: 588677
guaguauagcaucaguuag

SEQ ID NO: 881971 - RNA, 19 nt, Artificial Sequence
  Description of Artificial Sequence: Synthetic oligonucleotide
  Antisense strand to SEQ ID NO: 881970
cuaacugaugcuauacuac

SEQ ID NO: 881972 - RNA, 19 nt, Artificial Sequence
  Description of Artificial Sequence: Synthetic oligonucleotide
  Sense strand starting at position 2412 of SEQ ID NO: 588677
gcaucaguuagggauacau

SEQ ID NO: 881973 - RNA, 19 nt, Artificial Sequence
  Description of Artificial Sequence: Synthetic oligonucleotide
  Antisense strand to SEQ ID NO: 881972
auguaucccuaacugaugc

SEQ ID NO: 881974 - RNA, 19 nt, Artificial Sequence
  Description of Artificial Sequence: Synthetic oligonucleotide
  Sense strand starting at position 2542 of SEQ ID NO: 588677
aguugugucacgcugaagu

SEQ ID NO: 881975 - RNA, 19 nt, Artificial Sequence
  Description of Artificial Sequence: Synthetic oligonucleotide
  Antisense strand to SEQ ID NO: 881974
acuucagcgugacacaacu

SEQ ID NO: 881976 - RNA, 19 nt, Artificial Sequence
  Description of Artificial Sequence: Synthetic oligonucleotide
  Sense strand starting at position 2619 of SEQ ID NO: 588677
aucuaagacgacuguugaa

SEQ ID NO: 881977 - RNA, 19 nt, Artificial Sequence
  Description of Artificial Sequence: Synthetic oligonucleotide
  Antisense strand to SEQ ID NO: 881976
uucaacagucgucuuagau

SEQ ID NO: 881978 - RNA, 19 nt, Artificial Sequence
  Description of Artificial Sequence: Synthetic oligonucleotide
  Sense strand starting at position 2632 of SEQ ID NO: 588677
guugaacgcagucaauaga

SEQ ID NO: 881979 - RNA, 19 nt, Artificial Sequence
  Description of Artificial Sequence: Synthetic oligonucleotide
  Antisense strand to SEQ ID NO: 881978
ucuauugacugcguucaac

SEQ ID NO: 881980 - RNA, 19 nt, Artificial Sequence
  Description of Artificial Sequence: Synthetic oligonucleotide
  Sense strand starting at position 2708 of SEQ ID NO: 588677
acaugcuaucaucauuagu

SEQ ID NO: 881981 - RNA, 19 nt, Artificial Sequence
  Description of Artificial Sequence: Synthetic oligonucleotide
  Antisense strand to SEQ ID NO: 881980
acuaaugaugauagcaugu

SEQ ID NO: 881982 - RNA, 19 nt, Artificial Sequence
  Description of Artificial Sequence: Synthetic oligonucleotide
  Sense strand starting at position 2915 of SEQ ID NO: 588677
guuaccuaccaauggauau

SEQ ID NO: 881983 - RNA, 19 nt, Artificial Sequence
  Description of Artificial Sequence: Synthetic oligonucleotide
  Antisense strand to SEQ ID NO: 881982
auauccauugguagguaac

SEQ ID NO: 881984 - RNA, 19 nt, Artificial Sequence
  Description of Artificial Sequence: Synthetic oligonucleotide
  Sense strand starting at position 3051 of SEQ ID NO: 588677
auaccuugugaauaggcau

SEQ ID NO: 881985 - RNA, 19 nt, Artificial Sequence
  Description of Artificial Sequence: Synthetic oligonucleotide
  Antisense strand to SEQ ID NO: 881984
augccuauucacaagguau

SEQ ID NO: 881986 - RNA, 19 nt, Artificial Sequence
  Description of Artificial Sequence: Synthetic oligonucleotide
  Sense strand starting at position 3054 of SEQ ID NO: 588677
ccuugugaauaggcauauu

SEQ ID NO: 881987 - RNA, 19 nt, Artificial Sequence
  Description of Artificial Sequence: Synthetic oligonucleotide
  Antisense strand to SEQ ID NO: 881986
aauaugccuauucacaagg

SEQ ID NO: 881988 - RNA, 19 nt, Artificial Sequence
  Description of Artificial Sequence: Synthetic oligonucleotide
  Sense strand starting at position 3057 of SEQ ID NO: 588677
ugugaauaggcauauuaca

SEQ ID NO: 881989 - RNA, 19 nt, Artificial Sequence
  Description of Artificial Sequence: Synthetic oligonucleotide
  Antisense strand to SEQ ID NO: 881988
uguaauaugccuauucaca

SEQ ID NO: 881990 - RNA, 19 nt, Artificial Sequence
  Description of Artificial Sequence: Synthetic oligonucleotide
  Sense strand starting at position 3158 of SEQ ID NO: 588677
ccaccaagauguuugaaac

SEQ ID NO: 881991 - RNA, 19 nt, Artificial Sequence
  Description of Artificial Sequence: Synthetic oligonucleotide
  Antisense strand to SEQ ID NO: 881990
guuucaaacaucuuggugg

SEQ ID NO: 881992 - RNA, 19 nt, Artificial Sequence
  Description of Artificial Sequence: Synthetic oligonucleotide
  Sense strand starting at position 3905 of SEQ ID NO: 588677
gugaaugggccuuaauaca

SEQ ID NO: 881993 - RNA, 19 nt, Artificial Sequence
  Description of Artificial Sequence: Synthetic oligonucleotide
  Antisense strand to SEQ ID NO: 881992
uguauuaaggcccauucac

SEQ ID NO: 881994 - RNA, 19 nt, Artificial Sequence
  Description of Artificial Sequence: Synthetic oligonucleotide
  Sense strand starting at position 59 of SEQ ID NO: 588678
auagguuaggucugagaaa

SEQ ID NO: 881995 - RNA, 19 nt, Artificial Sequence
  Description of Artificial Sequence: Synthetic oligonucleotide
  Antisense strand to SEQ ID NO: 881994
uuucucagaccuaaccuau

SEQ ID NO: 881996 - RNA, 19 nt, Artificial Sequence
  Description of Artificial Sequence: Synthetic oligonucleotide
  Sense strand starting at position 121 of SEQ ID NO: 588678
ggugauaccagauguaaga

SEQ ID NO: 881997 - RNA, 19 nt, Artificial Sequence
  Description of Artificial Sequence: Synthetic oligonucleotide
  Antisense strand to SEQ ID NO: 881996
ucuuacaucugguaucacc

SEQ ID NO: 881998 - RNA, 19 nt, Artificial Sequence
  Description of Artificial Sequence: Synthetic oligonucleotide
  Sense strand starting at position 185 of SEQ ID NO: 588678
uuucuaagauucuuggaga

SEQ ID NO: 881999 - RNA, 19 nt, Artificial Sequence
  Description of Artificial Sequence: Synthetic oligonucleotide
  Antisense strand to SEQ ID NO: 881998
ucuccaagaaucuuagaaa

SEQ ID NO: 882000 - RNA, 19 nt, Artificial Sequence
  Description of Artificial Sequence: Synthetic oligonucleotide
  Sense strand starting at position 627 of SEQ ID NO: 588678
cuagaaugaaagugucaug

SEQ ID NO: 882001 - RNA, 19 nt, Artificial Sequence
  Description of Artificial Sequence: Synthetic oligonucleotide
  Antisense strand to SEQ ID NO: 882000
caugacacuuucauucuag

SEQ ID NO: 882002 - RNA, 19 nt, Artificial Sequence
  Description of Artificial Sequence: Synthetic oligonucleotide
  Sense strand starting at position 1075 of SEQ ID NO: 588678
acaauacuccugugacuga

SEQ ID NO: 882003 - RNA, 19 nt, Artificial Sequence
  Description of Artificial Sequence: Synthetic oligonucleotide
  Antisense strand to SEQ ID NO: 882002
ucagucacaggaguauugu

SEQ ID NO: 882004 - RNA, 19 nt, Artificial Sequence
  Description of Artificial Sequence: Synthetic oligonucleotide
  Sense strand starting at position 1126 of SEQ ID NO: 588678
uuccuuaggcuauagauaa

SEQ ID NO: 882005 - RNA, 19 nt, Artificial Sequence
  Description of Artificial Sequence: Synthetic oligonucleotide
  Antisense strand to SEQ ID NO: 882004
uuaucuauagccuaaggaa

SEQ ID NO: 882006 - RNA, 19 nt, Artificial Sequence
  Description of Artificial Sequence: Synthetic oligonucleotide
  Sense strand starting at position 1349 of SEQ ID NO: 588678
ggauguaggaggugacaau

SEQ ID NO: 882007 - RNA, 19 nt, Artificial Sequence
  Description of Artificial Sequence: Synthetic oligonucleotide
  Antisense strand to SEQ ID NO: 882006
auugucaccuccuacaucc

SEQ ID NO: 882008 - RNA, 19 nt, Artificial Sequence
  Description of Artificial Sequence: Synthetic oligonucleotide
  Sense strand starting at position 1532 of SEQ ID NO: 588678
gagucagggcaacgauauu

SEQ ID NO: 882009 - RNA, 19 nt, Artificial Sequence
  Description of Artificial Sequence: Synthetic oligonucleotide
  Antisense strand to SEQ ID NO: 882008
aauaucguugcccugacuc

SEQ ID NO: 882010 - RNA, 19 nt, Artificial Sequence
  Description of Artificial Sequence: Synthetic oligonucleotide
  Sense strand starting at position 1664 of SEQ ID NO: 588678
ggaagaagcugucuagauc

SEQ ID NO: 882011 - RNA, 19 nt, Artificial Sequence
  Description of Artificial Sequence: Synthetic oligonucleotide
  Antisense strand to SEQ ID NO: 882010
gaucuagacagcuucuucc

SEQ ID NO: 882012 - RNA, 19 nt, Artificial Sequence
  Description of Artificial Sequence: Synthetic oligonucleotide
  Sense strand starting at position 1670 of SEQ ID NO: 588678
agcugucuagaucaccaaa

SEQ ID NO: 882013 - RNA, 19 nt, Artificial Sequence
  Description of Artificial Sequence: Synthetic oligonucleotide
  Antisense strand to SEQ ID NO: 882012
uuuggugaucuagacagcu

SEQ ID NO: 882014 - RNA, 19 nt, Artificial Sequence
  Description of Artificial Sequence: Synthetic oligonucleotide
  Sense strand starting at position 1700 of SEQ ID NO: 588678
aauacauuugcgugaggca

SEQ ID NO: 882015 - RNA, 19 nt, Artificial Sequence
  Description of Artificial Sequence: Synthetic oligonucleotide
  Antisense strand to SEQ ID NO: 882014
ugccucacgcaaauguauu

SEQ ID NO: 882016 - RNA, 19 nt, Artificial Sequence
  Description of Artificial Sequence: Synthetic oligonucleotide
  Sense strand starting at position 1709 of SEQ ID NO: 588678
gcgugaggcaacccguaua

SEQ ID NO: 882017 - RNA, 19 nt, Artificial Sequence
  Description of Artificial Sequence: Synthetic oligonucleotide
  Antisense strand to SEQ ID NO: 882016
uauacggguugccucacgc

SEQ ID NO: 882018 - RNA, 19 nt, Artificial Sequence
  Description of Artificial Sequence: Synthetic oligonucleotide
  Sense strand starting at position 1735 of SEQ ID NO: 588678
gugugaugccgagucugua

SEQ ID NO: 882019 - RNA, 19 nt, Artificial Sequence
  Description of Artificial Sequence: Synthetic oligonucleotide
  Antisense strand to SEQ ID NO: 882018
uacagacucggcaucacac

SEQ ID NO: 882020 - RNA, 19 nt, Artificial Sequence
  Description of Artificial Sequence: Synthetic oligonucleotide
  Sense strand starting at position 1782 of SEQ ID NO: 588678
ggacguuaaacccauguca

SEQ ID NO: 882021 - RNA, 19 nt, Artificial Sequence
  Description of Artificial Sequence: Synthetic oligonucleotide
  Antisense strand to SEQ ID NO: 882020
ugacauggguuuaacgucc

SEQ ID NO: 882022 - RNA, 19 nt, Artificial Sequence
  Description of Artificial Sequence: Synthetic oligonucleotide
  Sense strand starting at position 1952 of SEQ ID NO: 588678
cugauauuccucggaggaa

SEQ ID NO: 882023 - RNA, 19 nt, Artificial Sequence
  Description of Artificial Sequence: Synthetic oligonucleotide
  Antisense strand to SEQ ID NO: 882022
uuccuccgaggaauaucag

SEQ ID NO: 882024 - RNA, 19 nt, Artificial Sequence
  Description of Artificial Sequence: Synthetic oligonucleotide
  Sense strand starting at position 1975 of SEQ ID NO: 588678
ucagaaaugcuggauuggu

SEQ ID NO: 882025 - RNA, 19 nt, Artificial Sequence
  Description of Artificial Sequence: Synthetic oligonucleotide
  Antisense strand to SEQ ID NO: 882024
accaauccagcauuucuga

SEQ ID NO: 882026 - RNA, 19 nt, Artificial Sequence
  Description of Artificial Sequence: Synthetic oligonucleotide
  Sense strand starting at position 2253 of SEQ ID NO: 588678
augaccaugccuuagacua

SEQ ID NO: 882027 - RNA, 19 nt, Artificial Sequence
  Description of Artificial Sequence: Synthetic oligonucleotide
  Antisense strand to SEQ ID NO: 882026
uagucuaaggcauggucau

SEQ ID NO: 882028 - RNA, 19 nt, Artificial Sequence
  Description of Artificial Sequence: Synthetic oligonucleotide
  Sense strand starting at position 2553 of SEQ ID NO: 588678
auuacauguuagccacaua

SEQ ID NO: 882029 - RNA, 19 nt, Artificial Sequence
  Description of Artificial Sequence: Synthetic oligonucleotide
  Antisense strand to SEQ ID NO: 882028
uauguggcuaacauguaau

SEQ ID NO: 882030 - RNA, 19 nt, Artificial Sequence
  Description of Artificial Sequence: Synthetic oligonucleotide
  Sense strand starting at position 2592 of SEQ ID NO: 588678
guacuuuaugaagauuguu

SEQ ID NO: 882031 - RNA, 19 nt, Artificial Sequence
  Description of Artificial Sequence: Synthetic oligonucleotide
  Antisense strand to SEQ ID NO: 882030
aacaaucuucauaaaguac

SEQ ID NO: 882032 - RNA, 19 nt, Artificial Sequence
  Description of Artificial Sequence: Synthetic oligonucleotide
  Sense strand starting at position 2597 of SEQ ID NO: 588678
uuaugaagauuguuuccuu

SEQ ID NO: 882033 - RNA, 19 nt, Artificial Sequence
  Description of Artificial Sequence: Synthetic oligonucleotide
  Antisense strand to SEQ ID NO: 882032
aaggaaacaaucuucauaa

SEQ ID NO: 882034 - RNA, 19 nt, Artificial Sequence
  Description of Artificial Sequence: Synthetic oligonucleotide
  Sense strand starting at position 2632 of SEQ ID NO: 588678
cuaggaugcagagauuguu

SEQ ID NO: 882035 - RNA, 19 nt, Artificial Sequence
  Description of Artificial Sequence: Synthetic oligonucleotide
  Antisense strand to SEQ ID NO: 882034
aacaaucucugcauccuag

SEQ ID NO: 882036 - RNA, 19 nt, Artificial Sequence
  Description of Artificial Sequence: Synthetic oligonucleotide
  Sense strand starting at position 2635 of SEQ ID NO: 588678
ggaugcagagauuguuauu

SEQ ID NO: 882037 - RNA, 19 nt, Artificial Sequence
  Description of Artificial Sequence: Synthetic oligonucleotide
  Antisense strand to SEQ ID NO: 882036
aauaacaaucucugcaucc

SEQ ID NO: 882038 - RNA, 19 nt, Artificial Sequence
  Description of Artificial Sequence: Synthetic oligonucleotide
  Sense strand starting at position 2675 of SEQ ID NO: 588678
ugagucuaaggauguuuaa

SEQ ID NO: 882039 - RNA, 19 nt, Artificial Sequence
  Description of Artificial Sequence: Synthetic oligonucleotide
  Antisense strand to SEQ ID NO: 882038
uuaaacauccuuagacuca

SEQ ID NO: 882040 - RNA, 19 nt, Artificial Sequence
  Description of Artificial Sequence: Synthetic oligonucleotide
  Sense strand starting at position 2678 of SEQ ID NO: 588678
gucuaaggauguuuaagua

SEQ ID NO: 882041 - RNA, 19 nt, Artificial Sequence
  Description of Artificial Sequence: Synthetic oligonucleotide
  Antisense strand to SEQ ID NO: 882040
uacuuaaacauccuuagac

SEQ ID NO: 882042 - RNA, 19 nt, Artificial Sequence
  Description of Artificial Sequence: Synthetic oligonucleotide
  Sense strand starting at position 2749 of SEQ ID NO: 588678
cagcaaugguuuccagaga

SEQ ID NO: 882043 - RNA, 19 nt, Artificial Sequence
  Description of Artificial Sequence: Synthetic oligonucleotide
  Antisense strand to SEQ ID NO: 882042
ucucuggaaaccauugcug

SEQ ID NO: 882044 - RNA, 19 nt, Artificial Sequence
  Description of Artificial Sequence: Synthetic oligonucleotide
  Sense strand starting at position 2754 of SEQ ID NO: 588678
augguuuccagagacugua

SEQ ID NO: 882045 - RNA, 19 nt, Artificial Sequence
  Description of Artificial Sequence: Synthetic oligonucleotide
  Antisense strand to SEQ ID NO: 882044
uacagucucuggaaaccau

SEQ ID NO: 882046 - RNA, 19 nt, Artificial Sequence
  Description of Artificial Sequence: Synthetic oligonucleotide
  Sense strand starting at position 2767 of SEQ ID NO: 588678
acuguaccaucagucaaua

SEQ ID NO: 882047 - RNA, 19 nt, Artificial Sequence
  Description of Artificial Sequence: Synthetic oligonucleotide
  Antisense strand to SEQ ID NO: 882046
uauugacugaugguacagu

SEQ ID NO: 882048 - RNA, 19 nt, Artificial Sequence
  Description of Artificial Sequence: Synthetic oligonucleotide
  Sense strand starting at position 2841 of SEQ ID NO: 588678
aguuuaacguauuuagucu

SEQ ID NO: 882049 - RNA, 19 nt, Artificial Sequence
  Description of Artificial Sequence: Synthetic oligonucleotide
  Antisense strand to SEQ ID NO: 882048
agacuaaauacguuaaacu

SEQ ID NO: 882050 - RNA, 19 nt, Artificial Sequence
  Description of Artificial Sequence: Synthetic oligonucleotide
  Sense strand starting at position 2959 of SEQ ID NO: 588678
agcauuggucuguagacca

SEQ ID NO: 882051 - RNA, 19 nt, Artificial Sequence
  Description of Artificial Sequence: Synthetic oligonucleotide
  Antisense strand to SEQ ID NO: 882050
uggucuacagaccaaugcu

SEQ ID NO: 882052 - RNA, 19 nt, Artificial Sequence
  Description of Artificial Sequence: Synthetic oligonucleotide
  Sense strand starting at position 2964 of SEQ ID NO: 588678
uggucuguagaccaguuua

SEQ ID NO: 882053 - RNA, 19 nt, Artificial Sequence
  Description of Artificial Sequence: Synthetic oligonucleotide
  Antisense strand to SEQ ID NO: 882052
uaaacuggucuacagacca

SEQ ID NO: 882054 - RNA, 19 nt, Artificial Sequence
  Description of Artificial Sequence: Synthetic oligonucleotide
  Sense strand starting at position 2969 of SEQ ID NO: 588678
uguagaccaguuuaucaua

SEQ ID NO: 882055 - RNA, 19 nt, Artificial Sequence
  Description of Artificial Sequence: Synthetic oligonucleotide
  Antisense strand to SEQ ID NO: 882054
uaugauaaacuggucuaca

SEQ ID NO: 882056 - RNA, 19 nt, Artificial Sequence
  Description of Artificial Sequence: Synthetic oligonucleotide
  Sense strand starting at position 3407 of SEQ ID NO: 588678
acugaaggcuucucaggua

SEQ ID NO: 882057 - RNA, 19 nt, Artificial Sequence
  Description of Artificial Sequence: Synthetic oligonucleotide
  Antisense strand to SEQ ID NO: 882056
uaccugagaagccuucagu

SEQ ID NO: 882058 - RNA, 19 nt, Artificial Sequence
  Description of Artificial Sequence: Synthetic oligonucleotide
  Sense strand starting at position 3427 of SEQ ID NO: 588678
uuugaugcucagugaggau

SEQ ID NO: 882059 - RNA, 19 nt, Artificial Sequence
  Description of Artificial Sequence: Synthetic oligonucleotide
  Antisense strand to SEQ ID NO: 882058
auccucacugagcaucaaa

SEQ ID NO: 882060 - RNA, 19 nt, Artificial Sequence
  Description of Artificial Sequence: Synthetic oligonucleotide
  Sense strand starting at position 3532 of SEQ ID NO: 588678
acacuaugucuuggaggaa

SEQ ID NO: 882061 - RNA, 19 nt, Artificial Sequence
  Description of Artificial Sequence: Synthetic oligonucleotide
  Antisense strand to SEQ ID NO: 882060
uuccuccaagacauagugu

SEQ ID NO: 882062 - RNA, 19 nt, Artificial Sequence
  Description of Artificial Sequence: Synthetic oligonucleotide
  Sense strand starting at position 3535 of SEQ ID NO: 588678
cuaugucuuggaggaagau

SEQ ID NO: 882063 - RNA, 19 nt, Artificial Sequence
  Description of Artificial Sequence: Synthetic oligonucleotide
  Antisense strand to SEQ ID NO: 882062
aucuuccuccaagacauag

SEQ ID NO: 882064 - RNA, 19 nt, Artificial Sequence
  Description of Artificial Sequence: Synthetic oligonucleotide
  Sense strand starting at position 3569 of SEQ ID NO: 588678
ggguaucaaugcucucaga

SEQ ID NO: 882065 - RNA, 19 nt, Artificial Sequence
  Description of Artificial Sequence: Synthetic oligonucleotide
  Antisense strand to SEQ ID NO: 882064
ucugagagcauugauaccc

SEQ ID NO: 882066 - RNA, 19 nt, Artificial Sequence
  Description of Artificial Sequence: Synthetic oligonucleotide
  Sense strand starting at position 3648 of SEQ ID NO: 588678
cuuacagaucuagaugugu

SEQ ID NO: 882067 - RNA, 19 nt, Artificial Sequence
  Description of Artificial Sequence: Synthetic oligonucleotide
  Antisense strand to SEQ ID NO: 882066
acacaucuagaucuguaag

SEQ ID NO: 882068 - RNA, 19 nt, Artificial Sequence
  Description of Artificial Sequence: Synthetic oligonucleotide
  Sense strand starting at position 3748 of SEQ ID NO: 588678
uguauucugaaguggauag

SEQ ID NO: 882069 - RNA, 19 nt, Artificial Sequence
  Description of Artificial Sequence: Synthetic oligonucleotide
  Antisense strand to SEQ ID NO: 882068
cuauccacuucagaauaca

SEQ ID NO: 882070 - RNA, 19 nt, Artificial Sequence
  Description of Artificial Sequence: Synthetic oligonucleotide
  Sense strand starting at position 3787 of SEQ ID NO: 588678
guauguaucuaucccugaa

SEQ ID NO: 882071 - RNA, 19 nt, Artificial Sequence
  Description of Artificial Sequence: Synthetic oligonucleotide
  Antisense strand to SEQ ID NO: 882070
uucagggauagauacauac

SEQ ID NO: 882072 - RNA, 19 nt, Artificial Sequence
  Description of Artificial Sequence: Synthetic oligonucleotide
  Sense strand starting at position 3933 of SEQ ID NO: 588678
uagccauguccagaagggu

SEQ ID NO: 882073 - RNA, 19 nt, Artificial Sequence
  Description of Artificial Sequence: Synthetic oligonucleotide
  Antisense strand to SEQ ID NO: 882072
acccuucuggacauggcua

SEQ ID NO: 882074 - RNA, 19 nt, Artificial Sequence
  Description of Artificial Sequence: Synthetic oligonucleotide
  Sense strand starting at position 317 of SEQ ID NO: 588679
guagguguacaacaaauau

SEQ ID NO: 882075 - RNA, 19 nt, Artificial Sequence
  Description of Artificial Sequence: Synthetic oligonucleotide
  Antisense strand to SEQ ID NO: 882074
auauuuguuguacaccuac

SEQ ID NO: 882076 - RNA, 19 nt, Artificial Sequence
  Description of Artificial Sequence: Synthetic oligonucleotide
  Sense strand starting at position 516 of SEQ ID NO: 588679
gggagucgauaggcauaaa

SEQ ID NO: 882077 - RNA, 19 nt, Artificial Sequence
  Description of Artificial Sequence: Synthetic oligonucleotide
  Antisense strand to SEQ ID NO: 882076
uuuaugccuaucgacuccc

SEQ ID NO: 882078 - RNA, 19 nt, Artificial Sequence
  Description of Artificial Sequence: Synthetic oligonucleotide
  Sense strand starting at position 517 of SEQ ID NO: 588679
ggagucgauaggcauaaau

SEQ ID NO: 882079 - RNA, 19 nt, Artificial Sequence
  Description of Artificial Sequence: Synthetic oligonucleotide
  Antisense strand to SEQ ID NO: 882078
auuuaugccuaucgacucc

SEQ ID NO: 882080 - RNA, 19 nt, Artificial Sequence
  Description of Artificial Sequence: Synthetic oligonucleotide
  Sense strand starting at position 519 of SEQ ID NO: 588679
agucgauaggcauaaauug

SEQ ID NO: 882081 - RNA, 19 nt, Artificial Sequence
  Description of Artificial Sequence: Synthetic oligonucleotide
  Antisense strand to SEQ ID NO: 882080
caauuuaugccuaucgacu

SEQ ID NO: 882082 - RNA, 19 nt, Artificial Sequence
  Description of Artificial Sequence: Synthetic oligonucleotide
  Sense strand starting at position 527 of SEQ ID NO: 588679
ggcauaaauugacuuguua

SEQ ID NO: 882083 - RNA, 19 nt, Artificial Sequence
  Description of Artificial Sequence: Synthetic oligonucleotide
  Antisense strand to SEQ ID NO: 882082
uaacaagucaauuuaugcc

SEQ ID NO: 882084 - RNA, 19 nt, Artificial Sequence
  Description of Artificial Sequence: Synthetic oligonucleotide
  Sense strand starting at position 539 of SEQ ID NO: 588679
cuuguuaaguuauuuagca

SEQ ID NO: 882085 - RNA, 19 nt, Artificial Sequence
  Description of Artificial Sequence: Synthetic oligonucleotide
  Antisense strand to SEQ ID NO: 882084
ugcuaaauaacuuaacaag

SEQ ID NO: 882086 - RNA, 19 nt, Artificial Sequence
  Description of Artificial Sequence: Synthetic oligonucleotide
  Sense strand starting at position 618 of SEQ ID NO: 588679
cauuguggauagucaauaa

SEQ ID NO: 882087 - RNA, 19 nt, Artificial Sequence
  Description of Artificial Sequence: Synthetic oligonucleotide
  Antisense strand to SEQ ID NO: 882086
uuauugacuauccacaaug

SEQ ID NO: 882088 - RNA, 19 nt, Artificial Sequence
  Description of Artificial Sequence: Synthetic oligonucleotide
  Sense strand starting at position 699 of SEQ ID NO: 588679
gcuccagagccucauaaca

SEQ ID NO: 882089 - RNA, 19 nt, Artificial Sequence
  Description of Artificial Sequence: Synthetic oligonucleotide
  Antisense strand to SEQ ID NO: 882088
uguuaugaggcucuggagc

SEQ ID NO: 882090 - RNA, 19 nt, Artificial Sequence
  Description of Artificial Sequence: Synthetic oligonucleotide
  Sense strand starting at position 893 of SEQ ID NO: 588679
cucagagucaacggauaac

SEQ ID NO: 882091 - RNA, 19 nt, Artificial Sequence
  Description of Artificial Sequence: Synthetic oligonucleotide
  Antisense strand to SEQ ID NO: 882090
guuauccguugacucugag

SEQ ID NO: 882092 - RNA, 19 nt, Artificial Sequence
  Description of Artificial Sequence: Synthetic oligonucleotide
  Sense strand starting at position 935 of SEQ ID NO: 588679
guaguagaauuacugaagu

SEQ ID NO: 882093 - RNA, 19 nt, Artificial Sequence
  Description of Artificial Sequence: Synthetic oligonucleotide
  Antisense strand to SEQ ID NO: 882092
acuucaguaauucuacuac

SEQ ID NO: 882094 - RNA, 19 nt, Artificial Sequence
  Description of Artificial Sequence: Synthetic oligonucleotide
  Sense strand starting at position 986 of SEQ ID NO: 588679
gacaucaccgucuagaugu

SEQ ID NO: 882095 - RNA, 19 nt, Artificial Sequence
  Description of Artificial Sequence: Synthetic oligonucleotide
  Antisense strand to SEQ ID NO: 882094
acaucuagacggugauguc

SEQ ID NO: 882096 - RNA, 19 nt, Artificial Sequence
  Description of Artificial Sequence: Synthetic oligonucleotide
  Sense strand starting at position 1996 of SEQ ID NO: 588679
uuccaugugucaguauuua

SEQ ID NO: 882097 - RNA, 19 nt, Artificial Sequence
  Description of Artificial Sequence: Synthetic oligonucleotide
  Antisense strand to SEQ ID NO: 882096
uaaauacugacacauggaa

SEQ ID NO: 882098 - RNA, 19 nt, Artificial Sequence
  Description of Artificial Sequence: Synthetic oligonucleotide
  Sense strand starting at position 2052 of SEQ ID NO: 588679
cagaacugugcugggagaa

SEQ ID NO: 882099 - RNA, 19 nt, Artificial Sequence
  Description of Artificial Sequence: Synthetic oligonucleotide
  Antisense strand to SEQ ID NO: 882098
uucucccagcacaguucug

SEQ ID NO: 882100 - RNA, 19 nt, Artificial Sequence
  Description of Artificial Sequence: Synthetic oligonucleotide
  Sense strand starting at position 2053 of SEQ ID NO: 588679
agaacugugcugggagaaa

SEQ ID NO: 882101 - RNA, 19 nt, Artificial Sequence
  Description of Artificial Sequence: Synthetic oligonucleotide
  Antisense strand to SEQ ID NO: 882100
uuucucccagcacaguucu

SEQ ID NO: 882102 - RNA, 19 nt, Artificial Sequence
  Description of Artificial Sequence: Synthetic oligonucleotide
  Sense strand starting at position 2090 of SEQ ID NO: 588679
ggucuuugccaauaagaau

SEQ ID NO: 882103 - RNA, 19 nt, Artificial Sequence
  Description of Artificial Sequence: Synthetic oligonucleotide
  Antisense strand to SEQ ID NO: 882102
auucuuauuggcaaagacc

SEQ ID NO: 882104 - RNA, 19 nt, Artificial Sequence
  Description of Artificial Sequence: Synthetic oligonucleotide
  Sense strand starting at position 2109 of SEQ ID NO: 588679
cucugaaucucacugggaa

SEQ ID NO: 882105 - RNA, 19 nt, Artificial Sequence
  Description of Artificial Sequence: Synthetic oligonucleotide
  Antisense strand to SEQ ID NO: 882104
uucccagugagauucagag

SEQ ID NO: 882106 - RNA, 19 nt, Artificial Sequence
  Description of Artificial Sequence: Synthetic oligonucleotide
  Sense strand starting at position 2110 of SEQ ID NO: 588679
ucugaaucucacugggaau

SEQ ID NO: 882107 - RNA, 19 nt, Artificial Sequence
  Description of Artificial Sequence: Synthetic oligonucleotide
  Antisense strand to SEQ ID NO: 882106
auucccagugagauucaga

SEQ ID NO: 882108 - RNA, 19 nt, Artificial Sequence
  Description of Artificial Sequence: Synthetic oligonucleotide
  Sense strand starting at position 2225 of SEQ ID NO: 588679
agagauuuguuugaccaga

SEQ ID NO: 882109 - RNA, 19 nt, Artificial Sequence
  Description of Artificial Sequence: Synthetic oligonucleotide
  Antisense strand to SEQ ID NO: 882108
ucuggucaaacaaaucucu

SEQ ID NO: 882110 - RNA, 19 nt, Artificial Sequence
  Description of Artificial Sequence: Synthetic oligonucleotide
  Sense strand starting at position 2242 of SEQ ID NO: 588679
gagaaauuggcaugggcua

SEQ ID NO: 882111 - RNA, 19 nt, Artificial Sequence
  Description of Artificial Sequence: Synthetic oligonucleotide
  Antisense strand to SEQ ID NO: 882110
uagcccaugccaauuucuc

SEQ ID NO: 882112 - RNA, 19 nt, Artificial Sequence
  Description of Artificial Sequence: Synthetic oligonucleotide
  Sense strand starting at position 2243 of SEQ ID NO: 588679
agaaauuggcaugggcuau

SEQ ID NO: 882113 - RNA, 19 nt, Artificial Sequence
  Description of Artificial Sequence: Synthetic oligonucleotide
  Antisense strand to SEQ ID NO: 882112
auagcccaugccaauuucu

SEQ ID NO: 882114 - RNA, 19 nt, Artificial Sequence
  Description of Artificial Sequence: Synthetic oligonucleotide
  Sense strand starting at position 2276 of SEQ ID NO: 588679
aauugagaauagcuugaug

SEQ ID NO: 882115 - RNA, 19 nt, Artificial Sequence
  Description of Artificial Sequence: Synthetic oligonucleotide
  Antisense strand to SEQ ID NO: 882114
caucaagcuauucucaauu

SEQ ID NO: 882116 - RNA, 19 nt, Artificial Sequence
  Description of Artificial Sequence: Synthetic oligonucleotide
  Sense strand starting at position 2279 of SEQ ID NO: 588679
ugagaauagcuugauggca

SEQ ID NO: 882117 - RNA, 19 nt, Artificial Sequence
  Description of Artificial Sequence: Synthetic oligonucleotide
  Antisense strand to SEQ ID NO: 882116
ugccaucaagcuauucuca

SEQ ID NO: 882118 - RNA, 19 nt, Artificial Sequence
  Description of Artificial Sequence: Synthetic oligonucleotide
  Sense strand starting at position 2287 of SEQ ID NO: 588679
gcuugauggcaagauuaga

SEQ ID NO: 882119 - RNA, 19 nt, Artificial Sequence
  Description of Artificial Sequence: Synthetic oligonucleotide
  Antisense strand to SEQ ID NO: 882118
ucuaaucuugccaucaagc

SEQ ID NO: 882120 - RNA, 19 nt, Artificial Sequence
  Description of Artificial Sequence: Synthetic oligonucleotide
  Sense strand starting at position 2308 of SEQ ID NO: 588679
agccauuuguuauugucaa

SEQ ID NO: 882121 - RNA, 19 nt, Artificial Sequence
  Description of Artificial Sequence: Synthetic oligonucleotide
  Antisense strand to SEQ ID NO: 882120
uugacaauaacaaauggcu

SEQ ID NO: 882122 - RNA, 19 nt, Artificial Sequence
  Description of Artificial Sequence: Synthetic oligonucleotide
  Sense strand starting at position 2316 of SEQ ID NO: 588679
guuauugucaauuggaaag

SEQ ID NO: 882123 - RNA, 19 nt, Artificial Sequence
  Description of Artificial Sequence: Synthetic oligonucleotide
  Antisense strand to SEQ ID NO: 882122
cuuuccaauugacaauaac

SEQ ID NO: 882124 - RNA, 19 nt, Artificial Sequence
  Description of Artificial Sequence: Synthetic oligonucleotide
  Sense strand starting at position 2729 of SEQ ID NO: 588679
ugcucugggaacugauauu

SEQ ID NO: 882125 - RNA, 19 nt, Artificial Sequence
  Description of Artificial Sequence: Synthetic oligonucleotide
  Antisense strand to SEQ ID NO: 882124
aauaucaguucccagagca

SEQ ID NO: 882126 - RNA, 19 nt, Artificial Sequence
  Description of Artificial Sequence: Synthetic oligonucleotide
  Sense strand starting at position 2913 of SEQ ID NO: 588679
auugaucuuguagaaguuu

SEQ ID NO: 882127 - RNA, 19 nt, Artificial Sequence
  Description of Artificial Sequence: Synthetic oligonucleotide
  Antisense strand to SEQ ID NO: 882126
aaacuucuacaagaucaau

SEQ ID NO: 882128 - RNA, 19 nt, Artificial Sequence
  Description of Artificial Sequence: Synthetic oligonucleotide
  Sense strand starting at position 2925 of SEQ ID NO: 588679
gaaguuuggccuuagaagc

SEQ ID NO: 882129 - RNA, 19 nt, Artificial Sequence
  Description of Artificial Sequence: Synthetic oligonucleotide
  Antisense strand to SEQ ID NO: 882128
gcuucuaaggccaaacuuc

SEQ ID NO: 882130 - RNA, 19 nt, Artificial Sequence
  Description of Artificial Sequence: Synthetic oligonucleotide
  Sense strand starting at position 3015 of SEQ ID NO: 588679
agcacuuucccaggaaacu

SEQ ID NO: 882131 - RNA, 19 nt, Artificial Sequence
  Description of Artificial Sequence: Synthetic oligonucleotide
  Antisense strand to SEQ ID NO: 882130
aguuuccugggaaagugcu

SEQ ID NO: 882132 - RNA, 19 nt, Artificial Sequence
  Description of Artificial Sequence: Synthetic oligonucleotide
  Sense strand starting at position 3016 of SEQ ID NO: 588679
gcacuuucccaggaaacuu

SEQ ID NO: 882133 - RNA, 19 nt, Artificial Sequence
  Description of Artificial Sequence: Synthetic oligonucleotide
  Antisense strand to SEQ ID NO: 882132
aaguuuccugggaaagugc

SEQ ID NO: 882134 - RNA, 19 nt, Artificial Sequence
  Description of Artificial Sequence: Synthetic oligonucleotide
  Sense strand starting at position 3060 of SEQ ID NO: 588679
ugggaaggaagguguauau

SEQ ID NO: 882135 - RNA, 19 nt, Artificial Sequence
  Description of Artificial Sequence: Synthetic oligonucleotide
  Antisense strand to SEQ ID NO: 882134
auauacaccuuccuuccca

SEQ ID NO: 882136 - RNA, 19 nt, Artificial Sequence
  Description of Artificial Sequence: Synthetic oligonucleotide
  Sense strand starting at position 3209 of SEQ ID NO: 588679
cucuuccuuggauggauaa

SEQ ID NO: 882137 - RNA, 19 nt, Artificial Sequence
  Description of Artificial Sequence: Synthetic oligonucleotide
  Antisense strand to SEQ ID NO: 882136
uuauccauccaaggaagag

SEQ ID NO: 882138 - RNA, 19 nt, Artificial Sequence
  Description of Artificial Sequence: Synthetic oligonucleotide
  Sense strand starting at position 3210 of SEQ ID NO: 588679
ucuuccuuggauggauaau

SEQ ID NO: 882139 - RNA, 19 nt, Artificial Sequence
  Description of Artificial Sequence: Synthetic oligonucleotide
  Antisense strand to SEQ ID NO: 882138
auuauccauccaaggaaga

SEQ ID NO: 882140 - RNA, 19 nt, Artificial Sequence
  Description of Artificial Sequence: Synthetic oligonucleotide
  Sense strand starting at position 3314 of SEQ ID NO: 588679
aaguguauggcucgauuuc

SEQ ID NO: 882141 - RNA, 19 nt, Artificial Sequence
  Description of Artificial Sequence: Synthetic oligonucleotide
  Antisense strand to SEQ ID NO: 882140
gaaaucgagccauacacuu

SEQ ID NO: 882142 - RNA, 19 nt, Artificial Sequence
  Description of Artificial Sequence: Synthetic oligonucleotide
  Sense strand starting at position 3315 of SEQ ID NO: 588679
aguguauggcucgauuuca

SEQ ID NO: 882143 - RNA, 19 nt, Artificial Sequence
  Description of Artificial Sequence: Synthetic oligonucleotide
  Antisense strand to SEQ ID NO: 882142
ugaaaucgagccauacacu

SEQ ID NO: 882144 - RNA, 19 nt, Artificial Sequence
  Description of Artificial Sequence: Synthetic oligonucleotide
  Sense strand starting at position 3524 of SEQ ID NO: 588679
ucgggaaugugauucugaa

SEQ ID NO: 882145 - RNA, 19 nt, Artificial Sequence
  Description of Artificial Sequence: Synthetic oligonucleotide
  Antisense strand to SEQ ID NO: 882144
uucagaaucacauucccga

SEQ ID NO: 882146 - RNA, 19 nt, Artificial Sequence
  Description of Artificial Sequence: Synthetic oligonucleotide
  Sense strand starting at position 3691 of SEQ ID NO: 588679
acuauuucugcuggcgauu

SEQ ID NO: 882147 - RNA, 19 nt, Artificial Sequence
  Description of Artificial Sequence: Synthetic oligonucleotide
  Antisense strand to SEQ ID NO: 882146
aaucgccagcagaaauagu

SEQ ID NO: 882148 - RNA, 19 nt, Artificial Sequence
  Description of Artificial Sequence: Synthetic oligonucleotide
  Sense strand starting at position 3859 of SEQ ID NO: 588679
uaauucuauuaaguggaga

SEQ ID NO: 882149 - RNA, 19 nt, Artificial Sequence
  Description of Artificial Sequence: Synthetic oligonucleotide
  Antisense strand to SEQ ID NO: 882148
ucuccacuuaauagaauua

SEQ ID NO: 882150 - RNA, 19 nt, Artificial Sequence
  Description of Artificial Sequence: Synthetic oligonucleotide
  Sense strand starting at position 3890 of SEQ ID NO: 588679
caccuaggucuguaaugac

SEQ ID NO: 882151 - RNA, 19 nt, Artificial Sequence
  Description of Artificial Sequence: Synthetic oligonucleotide
  Antisense strand to SEQ ID NO: 882150
gucauuacagaccuaggug

SEQ ID NO: 882152 - RNA, 19 nt, Artificial Sequence
  Description of Artificial Sequence: Synthetic oligonucleotide
  Sense strand starting at position 3899 of SEQ ID NO: 588679
cuguaaugacucuggagua

SEQ ID NO: 882153 - RNA, 19 nt, Artificial Sequence
  Description of Artificial Sequence: Synthetic oligonucleotide
  Antisense strand to SEQ ID NO: 882152
uacuccagagucauuacag

SEQ ID NO: 882154 - RNA, 19 nt, Artificial Sequence
  Description of Artificial Sequence: Synthetic oligonucleotide
  Sense strand starting at position 50 of SEQ ID NO: 588680
ccaguauugauuggucaga

SEQ ID NO: 882155 - RNA, 19 nt, Artificial Sequence
  Description of Artificial Sequence: Synthetic oligonucleotide
  Antisense strand to SEQ ID NO: 882154
ucugaccaaucaauacugg

SEQ ID NO: 882156 - RNA, 19 nt, Artificial Sequence
  Description of Artificial Sequence: Synthetic oligonucleotide
  Sense strand starting at position 51 of SEQ ID NO: 588680
caguauugauuggucagaa

SEQ ID NO: 882157 - RNA, 19 nt, Artificial Sequence
  Description of Artificial Sequence: Synthetic oligonucleotide
  Antisense strand to SEQ ID NO: 882156
uucugaccaaucaauacug

SEQ ID NO: 882158 - RNA, 19 nt, Artificial Sequence
  Description of Artificial Sequence: Synthetic oligonucleotide
  Sense strand starting at position 52 of SEQ ID NO: 588680
aguauugauuggucagaag

SEQ ID NO: 882159 - RNA, 19 nt, Artificial Sequence
  Description of Artificial Sequence: Synthetic oligonucleotide
  Antisense strand to SEQ ID NO: 882158
cuucugaccaaucaauacu

SEQ ID NO: 882160 - RNA, 19 nt, Artificial Sequence
  Description of Artificial Sequence: Synthetic oligonucleotide
  Sense strand starting at position 150 of SEQ ID NO: 588680
gaguuugacuuaucccuga

SEQ ID NO: 882161 - RNA, 19 nt, Artificial Sequence
  Description of Artificial Sequence: Synthetic oligonucleotide
  Antisense strand to SEQ ID NO: 882160
ucagggauaagucaaacuc

SEQ ID NO: 882162 - RNA, 19 nt, Artificial Sequence
  Description of Artificial Sequence: Synthetic oligonucleotide
  Sense strand starting at position 153 of SEQ ID NO: 588680
uuugacuuaucccugagua

SEQ ID NO: 882163 - RNA, 19 nt, Artificial Sequence
  Description of Artificial Sequence: Synthetic oligonucleotide
  Antisense strand to SEQ ID NO: 882162
uacucagggauaagucaaa

SEQ ID NO: 882164 - RNA, 19 nt, Artificial Sequence
  Description of Artificial Sequence: Synthetic oligonucleotide
  Sense strand starting at position 154 of SEQ ID NO: 588680
uugacuuaucccugaguag

SEQ ID NO: 882165 - RNA, 19 nt, Artificial Sequence
  Description of Artificial Sequence: Synthetic oligonucleotide
  Antisense strand to SEQ ID NO: 882164
cuacucagggauaagucaa

SEQ ID NO: 882166 - RNA, 19 nt, Artificial Sequence
  Description of Artificial Sequence: Synthetic oligonucleotide
  Sense strand starting at position 155 of SEQ ID NO: 588680
ugacuuaucccugaguagu

SEQ ID NO: 882167 - RNA, 19 nt, Artificial Sequence
  Description of Artificial Sequence: Synthetic oligonucleotide
  Antisense strand to SEQ ID NO: 882166
acuacucagggauaaguca

SEQ ID NO: 882168 - RNA, 19 nt, Artificial Sequence
  Description of Artificial Sequence: Synthetic oligonucleotide
  Sense strand starting at position 286 of SEQ ID NO: 588680
cuuauauuggaguaguuac

SEQ ID NO: 882169 - RNA, 19 nt, Artificial Sequence
  Description of Artificial Sequence: Synthetic oligonucleotide
  Antisense strand to SEQ ID NO: 882168
guaacuacuccaauauaag

SEQ ID NO: 882170 - RNA, 19 nt, Artificial Sequence
  Description of Artificial Sequence: Synthetic oligonucleotide
  Sense strand starting at position 383 of SEQ ID NO: 588680
ggauguguuggugaccaaa

SEQ ID NO: 882171 - RNA, 19 nt, Artificial Sequence
  Description of Artificial Sequence: Synthetic oligonucleotide
  Antisense strand to SEQ ID NO: 882170
uuuggucaccaacacaucc

SEQ ID NO: 882172 - RNA, 19 nt, Artificial Sequence
  Description of Artificial Sequence: Synthetic oligonucleotide
  Sense strand starting at position 476 of SEQ ID NO: 588680
cuuucuggaagugguaaua

SEQ ID NO: 882173 - RNA, 19 nt, Artificial Sequence
  Description of Artificial Sequence: Synthetic oligonucleotide
  Antisense strand to SEQ ID NO: 882172
uauuaccacuuccagaaag

SEQ ID NO: 882174 - RNA, 19 nt, Artificial Sequence
  Description of Artificial Sequence: Synthetic oligonucleotide
  Sense strand starting at position 539 of SEQ ID NO: 588680
gguaguauaggaggaggua

SEQ ID NO: 882175 - RNA, 19 nt, Artificial Sequence
  Description of Artificial Sequence: Synthetic oligonucleotide
  Antisense strand to SEQ ID NO: 882174
uaccuccuccuauacuacc

SEQ ID NO: 882176 - RNA, 19 nt, Artificial Sequence
  Description of Artificial Sequence: Synthetic oligonucleotide
  Sense strand starting at position 596 of SEQ ID NO: 588680
uccucauuagacuaguucu

SEQ ID NO: 882177 - RNA, 19 nt, Artificial Sequence
  Description of Artificial Sequence: Synthetic oligonucleotide
  Antisense strand to SEQ ID NO: 882176
agaacuagucuaaugagga

SEQ ID NO: 882178 - RNA, 19 nt, Artificial Sequence
  Description of Artificial Sequence: Synthetic oligonucleotide
  Sense strand starting at position 604 of SEQ ID NO: 588680
agacuaguucugggauaug

SEQ ID NO: 882179 - RNA, 19 nt, Artificial Sequence
  Description of Artificial Sequence: Synthetic oligonucleotide
  Antisense strand to SEQ ID NO: 882178
cauaucccagaacuagucu

SEQ ID NO: 882180 - RNA, 19 nt, Artificial Sequence
  Description of Artificial Sequence: Synthetic oligonucleotide
  Sense strand starting at position 631 of SEQ ID NO: 588680
ugcaguucugaugauauga

SEQ ID NO: 882181 - RNA, 19 nt, Artificial Sequence
  Description of Artificial Sequence: Synthetic oligonucleotide
  Antisense strand to SEQ ID NO: 882180
ucauaucaucagaacugca

SEQ ID NO: 882182 - RNA, 19 nt, Artificial Sequence
  Description of Artificial Sequence: Synthetic oligonucleotide
  Sense strand starting at position 701 of SEQ ID NO: 588680
augcaugagcuccacauau

SEQ ID NO: 882183 - RNA, 19 nt, Artificial Sequence
  Description of Artificial Sequence: Synthetic oligonucleotide
  Antisense strand to SEQ ID NO: 882182
auauguggagcucaugcau

SEQ ID NO: 882184 - RNA, 19 nt, Artificial Sequence
  Description of Artificial Sequence: Synthetic oligonucleotide
  Sense strand starting at position 703 of SEQ ID NO: 588680
gcaugagcuccacauaucu

SEQ ID NO: 882185 - RNA, 19 nt, Artificial Sequence
  Description of Artificial Sequence: Synthetic oligonucleotide
  Antisense strand to SEQ ID NO: 882184
agauauguggagcucaugc

SEQ ID NO: 882186 - RNA, 19 nt, Artificial Sequence
  Description of Artificial Sequence: Synthetic oligonucleotide
  Sense strand starting at position 792 of SEQ ID NO: 588680
gaguuacaacccuaguguu

SEQ ID NO: 882187 - RNA, 19 nt, Artificial Sequence
  Description of Artificial Sequence: Synthetic oligonucleotide
  Antisense strand to SEQ ID NO: 882186
aacacuaggguuguaacuc

SEQ ID NO: 882188 - RNA, 19 nt, Artificial Sequence
  Description of Artificial Sequence: Synthetic oligonucleotide
  Sense strand starting at position 921 of SEQ ID NO: 588680
ggcaauauccagugagaaa

SEQ ID NO: 882189 - RNA, 19 nt, Artificial Sequence
  Description of Artificial Sequence: Synthetic oligonucleotide
  Antisense strand to SEQ ID NO: 882188
uuucucacuggauauugcc

SEQ ID NO: 882190 - RNA, 19 nt, Artificial Sequence
  Description of Artificial Sequence: Synthetic oligonucleotide
  Sense strand starting at position 993 of SEQ ID NO: 588680
aucugugaggcacaacauu

SEQ ID NO: 882191 - RNA, 19 nt, Artificial Sequence
  Description of Artificial Sequence: Synthetic oligonucleotide
  Antisense strand to SEQ ID NO: 882190
aauguugugccucacagau

SEQ ID NO: 882192 - RNA, 19 nt, Artificial Sequence
  Description of Artificial Sequence: Synthetic oligonucleotide
  Sense strand starting at position 1027 of SEQ ID NO: 588680
uagguaaaccucugaacug

SEQ ID NO: 882193 - RNA, 19 nt, Artificial Sequence
  Description of Artificial Sequence: Synthetic oligonucleotide
  Antisense strand to SEQ ID NO: 882192
caguucagagguuuaccua

SEQ ID NO: 882194 - RNA, 19 nt, Artificial Sequence
  Description of Artificial Sequence: Synthetic oligonucleotide
  Sense strand starting at position 2030 of SEQ ID NO: 588680
uucuauagacuuggacaua

SEQ ID NO: 882195 - RNA, 19 nt, Artificial Sequence
  Description of Artificial Sequence: Synthetic oligonucleotide
  Antisense strand to SEQ ID NO: 882194
uauguccaagucuauagaa

SEQ ID NO: 882196 - RNA, 19 nt, Artificial Sequence
  Description of Artificial Sequence: Synthetic oligonucleotide
  Sense strand starting at position 2083 of SEQ ID NO: 588680
ugugcugauaaagggauua

SEQ ID NO: 882197 - RNA, 19 nt, Artificial Sequence
  Description of Artificial Sequence: Synthetic oligonucleotide
  Antisense strand to SEQ ID NO: 882196
uaaucccuuuaucagcaca

SEQ ID NO: 882198 - RNA, 19 nt, Artificial Sequence
  Description of Artificial Sequence: Synthetic oligonucleotide
  Sense strand starting at position 2095 of SEQ ID NO: 588680
gggauuaagugcuuaugac

SEQ ID NO: 882199 - RNA, 19 nt, Artificial Sequence
  Description of Artificial Sequence: Synthetic oligonucleotide
  Antisense strand to SEQ ID NO: 882198
gucauaagcacuuaauccc

SEQ ID NO: 882200 - RNA, 19 nt, Artificial Sequence
  Description of Artificial Sequence: Synthetic oligonucleotide
  Sense strand starting at position 2096 of SEQ ID NO: 588680
ggauuaagugcuuaugacu

SEQ ID NO: 882201 - RNA, 19 nt, Artificial Sequence
  Description of Artificial Sequence: Synthetic oligonucleotide
  Antisense strand to SEQ ID NO: 882200
agucauaagcacuuaaucc

SEQ ID NO: 882202 - RNA, 19 nt, Artificial Sequence
  Description of Artificial Sequence: Synthetic oligonucleotide
  Sense strand starting at position 2270 of SEQ ID NO: 588680
ucaauaacucuaugaggcu

SEQ ID NO: 882203 - RNA, 19 nt, Artificial Sequence
  Description of Artificial Sequence: Synthetic oligonucleotide
  Antisense strand to SEQ ID NO: 882202
agccucauagaguuauuga

SEQ ID NO: 882204 - RNA, 19 nt, Artificial Sequence
  Description of Artificial Sequence: Synthetic oligonucleotide
  Sense strand starting at position 2276 of SEQ ID NO: 588680
acucuaugaggcuauuauu

SEQ ID NO: 882205 - RNA, 19 nt, Artificial Sequence
  Description of Artificial Sequence: Synthetic oligonucleotide
  Antisense strand to SEQ ID NO: 882204
aauaauagccucauagagu

SEQ ID NO: 882206 - RNA, 19 nt, Artificial Sequence
  Description of Artificial Sequence: Synthetic oligonucleotide
  Sense strand starting at position 2405 of SEQ ID NO: 588680
ggugccaaagauuauacua

SEQ ID NO: 882207 - RNA, 19 nt, Artificial Sequence
  Description of Artificial Sequence: Synthetic oligonucleotide
  Antisense strand to SEQ ID NO: 882206
uaguauaaucuuuggcacc

SEQ ID NO: 882208 - RNA, 19 nt, Artificial Sequence
  Description of Artificial Sequence: Synthetic oligonucleotide
  Sense strand starting at position 2486 of SEQ ID NO: 588680
accuauugaugagcuauau

SEQ ID NO: 882209 - RNA, 19 nt, Artificial Sequence
  Description of Artificial Sequence: Synthetic oligonucleotide
  Antisense strand to SEQ ID NO: 882208
auauagcucaucaauaggu

SEQ ID NO: 882210 - RNA, 19 nt, Artificial Sequence
  Description of Artificial Sequence: Synthetic oligonucleotide
  Sense strand starting at position 2581 of SEQ ID NO: 588680
ucuugcugaucuccagaga

SEQ ID NO: 882211 - RNA, 19 nt, Artificial Sequence
  Description of Artificial Sequence: Synthetic oligonucleotide
  Antisense strand to SEQ ID NO: 882210
ucucuggagaucagcaaga

SEQ ID NO: 882212 - RNA, 19 nt, Artificial Sequence
  Description of Artificial Sequence: Synthetic oligonucleotide
  Sense strand starting at position 2584 of SEQ ID NO: 588680
ugcugaucuccagagacuu

SEQ ID NO: 882213 - RNA, 19 nt, Artificial Sequence
  Description of Artificial Sequence: Synthetic oligonucleotide
  Antisense strand to SEQ ID NO: 882212
aagucucuggagaucagca

SEQ ID NO: 882214 - RNA, 19 nt, Artificial Sequence
  Description of Artificial Sequence: Synthetic oligonucleotide
  Sense strand starting at position 2592 of SEQ ID NO: 588680
uccagagacuucucaguac

SEQ ID NO: 882215 - RNA, 19 nt, Artificial Sequence
  Description of Artificial Sequence: Synthetic oligonucleotide
  Antisense strand to SEQ ID NO: 882214
guacugagaagucucugga

SEQ ID NO: 882216 - RNA, 19 nt, Artificial Sequence
  Description of Artificial Sequence: Synthetic oligonucleotide
  Sense strand starting at position 2595 of SEQ ID NO: 588680
agagacuucucaguacaua

SEQ ID NO: 882217 - RNA, 19 nt, Artificial Sequence
  Description of Artificial Sequence: Synthetic oligonucleotide
  Antisense strand to SEQ ID NO: 882216
uauguacugagaagucucu

SEQ ID NO: 882218 - RNA, 19 nt, Artificial Sequence
  Description of Artificial Sequence: Synthetic oligonucleotide
  Sense strand starting at position 2878 of SEQ ID NO: 588680
ugugauauauuaccauaug

SEQ ID NO: 882219 - RNA, 19 nt, Artificial Sequence
  Description of Artificial Sequence: Synthetic oligonucleotide
  Antisense strand to SEQ ID NO: 882218
cauaugguaauauaucaca

SEQ ID NO: 882220 - RNA, 19 nt, Artificial Sequence
  Description of Artificial Sequence: Synthetic oligonucleotide
  Sense strand starting at position 2973 of SEQ ID NO: 588680
uggucaguuguuuaaacug

SEQ ID NO: 882221 - RNA, 19 nt, Artificial Sequence
  Description of Artificial Sequence: Synthetic oligonucleotide
  Antisense strand to SEQ ID NO: 882220
caguuuaaacaacugacca

SEQ ID NO: 882222 - RNA, 19 nt, Artificial Sequence
  Description of Artificial Sequence: Synthetic oligonucleotide
  Sense strand starting at position 3018 of SEQ ID NO: 588680
uugugauaauaacucaaug

SEQ ID NO: 882223 - RNA, 19 nt, Artificial Sequence
  Description of Artificial Sequence: Synthetic oligonucleotide
  Antisense strand to SEQ ID NO: 882222
cauugaguuauuaucacaa

SEQ ID NO: 882224 - RNA, 19 nt, Artificial Sequence
  Description of Artificial Sequence: Synthetic oligonucleotide
  Sense strand starting at position 3133 of SEQ ID NO: 588680
auaagagacuuuccagcau

SEQ ID NO: 882225 - RNA, 19 nt, Artificial Sequence
  Description of Artificial Sequence: Synthetic oligonucleotide
  Antisense strand to SEQ ID NO: 882224
augcuggaaagucucuuau

SEQ ID NO: 882226 - RNA, 19 nt, Artificial Sequence
  Description of Artificial Sequence: Synthetic oligonucleotide
  Sense strand starting at position 3306 of SEQ ID NO: 588680
uuagaugucauuggguaca

SEQ ID NO: 882227 - RNA, 19 nt, Artificial Sequence
  Description of Artificial Sequence: Synthetic oligonucleotide
  Antisense strand to SEQ ID NO: 882226
uguacccaaugacaucuaa

SEQ ID NO: 882228 - RNA, 19 nt, Artificial Sequence
  Description of Artificial Sequence: Synthetic oligonucleotide
  Sense strand starting at position 3308 of SEQ ID NO: 588680
agaugucauuggguacauu

SEQ ID NO: 882229 - RNA, 19 nt, Artificial Sequence
  Description of Artificial Sequence: Synthetic oligonucleotide
  Antisense strand to SEQ ID NO: 882228
aauguacccaaugacaucu

SEQ ID NO: 882230 - RNA, 19 nt, Artificial Sequence
  Description of Artificial Sequence: Synthetic oligonucleotide
  Sense strand starting at position 3357 of SEQ ID NO: 588680
aguacaauacuccauguau

SEQ ID NO: 882231 - RNA, 19 nt, Artificial Sequence
  Description of Artificial Sequence: Synthetic oligonucleotide
  Antisense strand to SEQ ID NO: 882230
auacauggaguauuguacu

SEQ ID NO: 882232 - RNA, 19 nt, Artificial Sequence
  Description of Artificial Sequence: Synthetic oligonucleotide
  Sense strand starting at position 3866 of SEQ ID NO: 588680
agaugaaaguaccugguuu

SEQ ID NO: 882233 - RNA, 19 nt, Artificial Sequence
  Description of Artificial Sequence: Synthetic oligonucleotide
  Antisense strand to SEQ ID NO: 882232
aaaccagguacuuucaucu

SEQ ID NO: 882234 - RNA, 19 nt, Artificial Sequence
  Description of Artificial Sequence: Synthetic oligonucleotide
  Sense strand starting at position 16 of SEQ ID NO: 588681
cugcacaaucuguaucaga

SEQ ID NO: 882235 - RNA, 19 nt, Artificial Sequence
  Description of Artificial Sequence: Synthetic oligonucleotide
  Antisense strand to SEQ ID NO: 882234
ucugauacagauugugcag

SEQ ID NO: 882236 - RNA, 19 nt, Artificial Sequence
  Description of Artificial Sequence: Synthetic oligonucleotide
  Sense strand starting at position 267 of SEQ ID NO: 588681
aaauaaagugacuggugua

SEQ ID NO: 882237 - RNA, 19 nt, Artificial Sequence
  Description of Artificial Sequence: Synthetic oligonucleotide
  Antisense strand to SEQ ID NO: 882236
uacaccagucacuuuauuu

SEQ ID NO: 882238 - RNA, 19 nt, Artificial Sequence
  Description of Artificial Sequence: Synthetic oligonucleotide
  Sense strand starting at position 279 of SEQ ID NO: 588681
ugguguaaagcugauaaau

SEQ ID NO: 882239 - RNA, 19 nt, Artificial Sequence
  Description of Artificial Sequence: Synthetic oligonucleotide
  Antisense strand to SEQ ID NO: 882238
auuuaucagcuuuacacca

SEQ ID NO: 882240 - RNA, 19 nt, Artificial Sequence
  Description of Artificial Sequence: Synthetic oligonucleotide
  Sense strand starting at position 311 of SEQ ID NO: 588681
gaaugagugcuguaaacag

SEQ ID NO: 882241 - RNA, 19 nt, Artificial Sequence
  Description of Artificial Sequence: Synthetic oligonucleotide
  Antisense strand to SEQ ID NO: 882240
cuguuuacagcacucauuc

SEQ ID NO: 882242 - RNA, 19 nt, Artificial Sequence
  Description of Artificial Sequence: Synthetic oligonucleotide
  Sense strand starting at position 349 of SEQ ID NO: 588681
gaauacaugucucugugaa

SEQ ID NO: 882243 - RNA, 19 nt, Artificial Sequence
  Description of Artificial Sequence: Synthetic oligonucleotide
  Antisense strand to SEQ ID NO: 882242
uucacagagacauguauuc

SEQ ID NO: 882244 - RNA, 19 nt, Artificial Sequence
  Description of Artificial Sequence: Synthetic oligonucleotide
  Sense strand starting at position 350 of SEQ ID NO: 588681
aauacaugucucugugaag

SEQ ID NO: 882245 - RNA, 19 nt, Artificial Sequence
  Description of Artificial Sequence: Synthetic oligonucleotide
  Antisense strand to SEQ ID NO: 882244
cuucacagagacauguauu

SEQ ID NO: 882246 - RNA, 19 nt, Artificial Sequence
  Description of Artificial Sequence: Synthetic oligonucleotide
  Sense strand starting at position 364 of SEQ ID NO: 588681
ugaagucaaucauccaaug

SEQ ID NO: 882247 - RNA, 19 nt, Artificial Sequence
  Description of Artificial Sequence: Synthetic oligonucleotide
  Antisense strand to SEQ ID NO: 882246
cauuggaugauugacuuca

SEQ ID NO: 882248 - RNA, 19 nt, Artificial Sequence
  Description of Artificial Sequence: Synthetic oligonucleotide
  Sense strand starting at position 509 of SEQ ID NO: 588681
ucaaguaggcaucauugaa

SEQ ID NO: 882249 - RNA, 19 nt, Artificial Sequence
  Description of Artificial Sequence: Synthetic oligonucleotide
  Antisense strand to SEQ ID NO: 882248
uucaaugaugccuacuuga

SEQ ID NO: 882250 - RNA, 19 nt, Artificial Sequence
  Description of Artificial Sequence: Synthetic oligonucleotide
  Sense strand starting at position 528 of SEQ ID NO: 588681
ugccuuacucagggagaua

SEQ ID NO: 882251 - RNA, 19 nt, Artificial Sequence
  Description of Artificial Sequence: Synthetic oligonucleotide
  Antisense strand to SEQ ID NO: 882250
uaucucccugaguaaggca

SEQ ID NO: 882252 - RNA, 19 nt, Artificial Sequence
  Description of Artificial Sequence: Synthetic oligonucleotide
  Sense strand starting at position 611 of SEQ ID NO: 588681
acaagcucuggccaagaaa

SEQ ID NO: 882253 - RNA, 19 nt, Artificial Sequence
  Description of Artificial Sequence: Synthetic oligonucleotide
  Antisense strand to SEQ ID NO: 882252
uuucuuggccagagcuugu

SEQ ID NO: 882254 - RNA, 19 nt, Artificial Sequence
  Description of Artificial Sequence: Synthetic oligonucleotide
  Sense strand starting at position 768 of SEQ ID NO: 588681
aggauuaaaucacagaaga

SEQ ID NO: 882255 - RNA, 19 nt, Artificial Sequence
  Description of Artificial Sequence: Synthetic oligonucleotide
  Antisense strand to SEQ ID NO: 882254
ucuucugugauuuaauccu

SEQ ID NO: 882256 - RNA, 19 nt, Artificial Sequence
  Description of Artificial Sequence: Synthetic oligonucleotide
  Sense strand starting at position 792 of SEQ ID NO: 588681
acgauuucuucuguagcaa

SEQ ID NO: 882257 - RNA, 19 nt, Artificial Sequence
  Description of Artificial Sequence: Synthetic oligonucleotide
  Antisense strand to SEQ ID NO: 882256
uugcuacagaagaaaucgu

SEQ ID NO: 882258 - RNA, 19 nt, Artificial Sequence
  Description of Artificial Sequence: Synthetic oligonucleotide
  Sense strand starting at position 924 of SEQ ID NO: 588681
agcucauaacugugaaauu

SEQ ID NO: 882259 - RNA, 19 nt, Artificial Sequence
  Description of Artificial Sequence: Synthetic oligonucleotide
  Antisense strand to SEQ ID NO: 882258
aauuucacaguuaugagcu

SEQ ID NO: 882260 - RNA, 19 nt, Artificial Sequence
  Description of Artificial Sequence: Synthetic oligonucleotide
  Sense strand starting at position 964 of SEQ ID NO: 588681
agaguucuaagagguugua

SEQ ID NO: 882261 - RNA, 19 nt, Artificial Sequence
  Description of Artificial Sequence: Synthetic oligonucleotide
  Antisense strand to SEQ ID NO: 882260
uacaaccucuuagaacucu

SEQ ID NO: 882262 - RNA, 19 nt, Artificial Sequence
  Description of Artificial Sequence: Synthetic oligonucleotide
  Sense strand starting at position 980 of SEQ ID NO: 588681
guauguugucucgaauuuc

SEQ ID NO: 882263 - RNA, 19 nt, Artificial Sequence
  Description of Artificial Sequence: Synthetic oligonucleotide
  Antisense strand to SEQ ID NO: 882262
gaaauucgagacaacauac

SEQ ID NO: 882264 - RNA, 19 nt, Artificial Sequence
  Description of Artificial Sequence: Synthetic oligonucleotide
  Sense strand starting at position 1346 of SEQ ID NO: 588681
agauguaagagaugcaaac

SEQ ID NO: 882265 - RNA, 19 nt, Artificial Sequence
  Description of Artificial Sequence: Synthetic oligonucleotide
  Antisense strand to SEQ ID NO: 882264
guuugcaucucuuacaucu

SEQ ID NO: 882266 - RNA, 19 nt, Artificial Sequence
  Description of Artificial Sequence: Synthetic oligonucleotide
  Sense strand starting at position 1413 of SEQ ID NO: 588681
gguguucaugagcagugaa

SEQ ID NO: 882267 - RNA, 19 nt, Artificial Sequence
  Description of Artificial Sequence: Synthetic oligonucleotide
  Antisense strand to SEQ ID NO: 882266
uucacugcucaugaacacc

SEQ ID NO: 882268 - RNA, 19 nt, Artificial Sequence
  Description of Artificial Sequence: Synthetic oligonucleotide
  Sense strand starting at position 1470 of SEQ ID NO: 588681
cgugaagugaucgaugaga

SEQ ID NO: 882269 - RNA, 19 nt, Artificial Sequence
  Description of Artificial Sequence: Synthetic oligonucleotide
  Antisense strand to SEQ ID NO: 882268
ucucaucgaucacuucacg

SEQ ID NO: 882270 - RNA, 19 nt, Artificial Sequence
  Description of Artificial Sequence: Synthetic oligonucleotide
  Sense strand starting at position 1472 of SEQ ID NO: 588681
ugaagugaucgaugagauu

SEQ ID NO: 882271 - RNA, 19 nt, Artificial Sequence
  Description of Artificial Sequence: Synthetic oligonucleotide
  Antisense strand to SEQ ID NO: 882270
aaucucaucgaucacuuca

SEQ ID NO: 882272 - RNA, 19 nt, Artificial Sequence
  Description of Artificial Sequence: Synthetic oligonucleotide
  Sense strand starting at position 1590 of SEQ ID NO: 588681
guucaugaugauggaguau

SEQ ID NO: 882273 - RNA, 19 nt, Artificial Sequence
  Description of Artificial Sequence: Synthetic oligonucleotide
  Antisense strand to SEQ ID NO: 882272
auacuccaucaucaugaac

SEQ ID NO: 882274 - RNA, 19 nt, Artificial Sequence
  Description of Artificial Sequence: Synthetic oligonucleotide
  Sense strand starting at position 1607 of SEQ ID NO: 588681
aucucagcggguuacaaau

SEQ ID NO: 882275 - RNA, 19 nt, Artificial Sequence
  Description of Artificial Sequence: Synthetic oligonucleotide
  Antisense strand to SEQ ID NO: 882274
auuuguaacccgcugagau

SEQ ID NO: 882276 - RNA, 19 nt, Artificial Sequence
  Description of Artificial Sequence: Synthetic oligonucleotide
  Sense strand starting at position 1617 of SEQ ID NO: 588681
guuacaaauggccacauaa

SEQ ID NO: 882277 - RNA, 19 nt, Artificial Sequence
  Description of Artificial Sequence: Synthetic oligonucleotide
  Antisense strand to SEQ ID NO: 882276
uuauguggccauuuguaac

SEQ ID NO: 882278 - RNA, 19 nt, Artificial Sequence
  Description of Artificial Sequence: Synthetic oligonucleotide
  Sense strand starting at position 1971 of SEQ ID NO: 588681
gcuccaaauggugaaguuu

SEQ ID NO: 882279 - RNA, 19 nt, Artificial Sequence
  Description of Artificial Sequence: Synthetic oligonucleotide
  Antisense strand to SEQ ID NO: 882278
aaacuucaccauuuggagc

SEQ ID NO: 882280 - RNA, 19 nt, Artificial Sequence
  Description of Artificial Sequence: Synthetic oligonucleotide
  Sense strand starting at position 2188 of SEQ ID NO: 588681
cagguugauguacauaagu

SEQ ID NO: 882281 - RNA, 19 nt, Artificial Sequence
  Description of Artificial Sequence: Synthetic oligonucleotide
  Antisense strand to SEQ ID NO: 882280
acuuauguacaucaaccug

SEQ ID NO: 882282 - RNA, 19 nt, Artificial Sequence
  Description of Artificial Sequence: Synthetic oligonucleotide
  Sense strand starting at position 2190 of SEQ ID NO: 588681
gguugauguacauaaguug

SEQ ID NO: 882283 - RNA, 19 nt, Artificial Sequence
  Description of Artificial Sequence: Synthetic oligonucleotide
  Antisense strand to SEQ ID NO: 882282
caacuuauguacaucaacc

SEQ ID NO: 882284 - RNA, 19 nt, Artificial Sequence
  Description of Artificial Sequence: Synthetic oligonucleotide
  Sense strand starting at position 2193 of SEQ ID NO: 588681
ugauguacauaaguugauu

SEQ ID NO: 882285 - RNA, 19 nt, Artificial Sequence
  Description of Artificial Sequence: Synthetic oligonucleotide
  Antisense strand to SEQ ID NO: 882284
aaucaacuuauguacauca

SEQ ID NO: 882286 - RNA, 19 nt, Artificial Sequence
  Description of Artificial Sequence: Synthetic oligonucleotide
  Sense strand starting at position 2325 of SEQ ID NO: 588681
uuugaaagugaccgaauga

SEQ ID NO: 882287 - RNA, 19 nt, Artificial Sequence
  Description of Artificial Sequence: Synthetic oligonucleotide
  Antisense strand to SEQ ID NO: 882286
ucauucggucacuuucaaa

SEQ ID NO: 882288 - RNA, 19 nt, Artificial Sequence
  Description of Artificial Sequence: Synthetic oligonucleotide
  Sense strand starting at position 2370 of SEQ ID NO: 588681
aguuauugagcucaaauca

SEQ ID NO: 882289 - RNA, 19 nt, Artificial Sequence
  Description of Artificial Sequence: Synthetic oligonucleotide
  Antisense strand to SEQ ID NO: 882288
ugauuugagcucaauaacu

SEQ ID NO: 882290 - RNA, 19 nt, Artificial Sequence
  Description of Artificial Sequence: Synthetic oligonucleotide
  Sense strand starting at position 2589 of SEQ ID NO: 588681
gggcaacaugauggugaaa

SEQ ID NO: 882291 - RNA, 19 nt, Artificial Sequence
  Description of Artificial Sequence: Synthetic oligonucleotide
  Antisense strand to SEQ ID NO: 882290
uuucaccaucauguugccc

SEQ ID NO: 882292 - RNA, 19 nt, Artificial Sequence
  Description of Artificial Sequence: Synthetic oligonucleotide
  Sense strand starting at position 2809 of SEQ ID NO: 588681
aagcucugggucuaaauga

SEQ ID NO: 882293 - RNA, 19 nt, Artificial Sequence
  Description of Artificial Sequence: Synthetic oligonucleotide
  Antisense strand to SEQ ID NO: 882292
ucauuuagacccagagcuu

SEQ ID NO: 882294 - RNA, 19 nt, Artificial Sequence
  Description of Artificial Sequence: Synthetic oligonucleotide
  Sense strand starting at position 2883 of SEQ ID NO: 588681
acaacaaugcuugaagcau

SEQ ID NO: 882295 - RNA, 19 nt, Artificial Sequence
  Description of Artificial Sequence: Synthetic oligonucleotide
  Antisense strand to SEQ ID NO: 882294
augcuucaagcauuguugu

SEQ ID NO: 882296 - RNA, 19 nt, Artificial Sequence
  Description of Artificial Sequence: Synthetic oligonucleotide
  Sense strand starting at position 2894 of SEQ ID NO: 588681
ugaagcauuguagauacua

SEQ ID NO: 882297 - RNA, 19 nt, Artificial Sequence
  Description of Artificial Sequence: Synthetic oligonucleotide
  Antisense strand to SEQ ID NO: 882296
uaguaucuacaaugcuuca

SEQ ID NO: 882298 - RNA, 19 nt, Artificial Sequence
  Description of Artificial Sequence: Synthetic oligonucleotide
  Sense strand starting at position 3097 of SEQ ID NO: 588681
cuaaacucccuuggaagau

SEQ ID NO: 882299 - RNA, 19 nt, Artificial Sequence
  Description of Artificial Sequence: Synthetic oligonucleotide
  Antisense strand to SEQ ID NO: 882298
aucuuccaagggaguuuag

SEQ ID NO: 882300 - RNA, 19 nt, Artificial Sequence
  Description of Artificial Sequence: Synthetic oligonucleotide
  Sense strand starting at position 3210 of SEQ ID NO: 588681
ugaucauauccaugagcag

SEQ ID NO: 882301 - RNA, 19 nt, Artificial Sequence
  Description of Artificial Sequence: Synthetic oligonucleotide
  Antisense strand to SEQ ID NO: 882300
cugcucauggauaugauca

SEQ ID NO: 882302 - RNA, 19 nt, Artificial Sequence
  Description of Artificial Sequence: Synthetic oligonucleotide
  Sense strand starting at position 3211 of SEQ ID NO: 588681
gaucauauccaugagcagu

SEQ ID NO: 882303 - RNA, 19 nt, Artificial Sequence
  Description of Artificial Sequence: Synthetic oligonucleotide
  Antisense strand to SEQ ID NO: 882302
acugcucauggauaugauc

SEQ ID NO: 882304 - RNA, 19 nt, Artificial Sequence
  Description of Artificial Sequence: Synthetic oligonucleotide
  Sense strand starting at position 3224 of SEQ ID NO: 588681
agcagugaacuugagcaaa

SEQ ID NO: 882305 - RNA, 19 nt, Artificial Sequence
  Description of Artificial Sequence: Synthetic oligonucleotide
  Antisense strand to SEQ ID NO: 882304
uuugcucaaguucacugcu

SEQ ID NO: 882306 - RNA, 19 nt, Artificial Sequence
  Description of Artificial Sequence: Synthetic oligonucleotide
  Sense strand starting at position 3226 of SEQ ID NO: 588681
cagugaacuugagcaaacu

SEQ ID NO: 882307 - RNA, 19 nt, Artificial Sequence
  Description of Artificial Sequence: Synthetic oligonucleotide
  Antisense strand to SEQ ID NO: 882306
aguuugcucaaguucacug

SEQ ID NO: 882308 - RNA, 19 nt, Artificial Sequence
  Description of Artificial Sequence: Synthetic oligonucleotide
  Sense strand starting at position 3268 of SEQ ID NO: 588681
acuugugaucaaugagauu

SEQ ID NO: 882309 - RNA, 19 nt, Artificial Sequence
  Description of Artificial Sequence: Synthetic oligonucleotide
  Antisense strand to SEQ ID NO: 882308
aaucucauugaucacaagu

SEQ ID NO: 882310 - RNA, 19 nt, Artificial Sequence
  Description of Artificial Sequence: Synthetic oligonucleotide
  Sense strand starting at position 3787 of SEQ ID NO: 588681
guuaacuacguccaagaaa

SEQ ID NO: 882311 - RNA, 19 nt, Artificial Sequence
  Description of Artificial Sequence: Synthetic oligonucleotide
  Antisense strand to SEQ ID NO: 882310
uuucuuggacguaguuaac

SEQ ID NO: 882312 - RNA, 19 nt, Artificial Sequence
  Description of Artificial Sequence: Synthetic oligonucleotide
  Sense strand starting at position 3970 of SEQ ID NO: 588681
ucuguugucccugaacaau

SEQ ID NO: 882313 - RNA, 19 nt, Artificial Sequence
  Description of Artificial Sequence: Synthetic oligonucleotide
  Antisense strand to SEQ ID NO: 882312
auuguucagggacaacaga

SEQ ID NO: 882314 - RNA, 19 nt, Artificial Sequence
  Description of Artificial Sequence: Synthetic oligonucleotide
  Sense strand starting at position 406 of SEQ ID NO: 588682
cuaggugguguucaaugau

SEQ ID NO: 882315 - RNA, 19 nt, Artificial Sequence
  Description of Artificial Sequence: Synthetic oligonucleotide
  Antisense strand to SEQ ID NO: 882314
aucauugaacaccaccuag

SEQ ID NO: 882316 - RNA, 19 nt, Artificial Sequence
  Description of Artificial Sequence: Synthetic oligonucleotide
  Sense strand starting at position 551 of SEQ ID NO: 588682
gcaaacugaguguaauaaa

SEQ ID NO: 882317 - RNA, 19 nt, Artificial Sequence
  Description of Artificial Sequence: Synthetic oligonucleotide
  Antisense strand to SEQ ID NO: 882316
uuuauuacacucaguuugc

SEQ ID NO: 882318 - RNA, 19 nt, Artificial Sequence
  Description of Artificial Sequence: Synthetic oligonucleotide
  Sense strand starting at position 620 of SEQ ID NO: 588682
uggugaauccaguagggcu

SEQ ID NO: 882319 - RNA, 19 nt, Artificial Sequence
  Description of Artificial Sequence: Synthetic oligonucleotide
  Antisense strand to SEQ ID NO: 882318
agcccuacuggauucacca

SEQ ID NO: 882320 - RNA, 19 nt, Artificial Sequence
  Description of Artificial Sequence: Synthetic oligonucleotide
  Sense strand starting at position 672 of SEQ ID NO: 588682
guucuaacucuagagcuga

SEQ ID NO: 882321 - RNA, 19 nt, Artificial Sequence
  Description of Artificial Sequence: Synthetic oligonucleotide
  Antisense strand to SEQ ID NO: 882320
ucagcucuagaguuagaac

SEQ ID NO: 882322 - RNA, 19 nt, Artificial Sequence
  Description of Artificial Sequence: Synthetic oligonucleotide
  Sense strand starting at position 805 of SEQ ID NO: 588682
agcugucagacauaggacu

SEQ ID NO: 882323 - RNA, 19 nt, Artificial Sequence
  Description of Artificial Sequence: Synthetic oligonucleotide
  Antisense strand to SEQ ID NO: 882322
aguccuaugucugacagcu

SEQ ID NO: 882324 - RNA, 19 nt, Artificial Sequence
  Description of Artificial Sequence: Synthetic oligonucleotide
  Sense strand starting at position 1101 of SEQ ID NO: 588682
ggaugaguuugucugaaag

SEQ ID NO: 882325 - RNA, 19 nt, Artificial Sequence
  Description of Artificial Sequence: Synthetic oligonucleotide
  Antisense strand to SEQ ID NO: 882324
cuuucagacaaacucaucc

SEQ ID NO: 882326 - RNA, 19 nt, Artificial Sequence
  Description of Artificial Sequence: Synthetic oligonucleotide
  Sense strand starting at position 1115 of SEQ ID NO: 588682
gaaagauccucuuugucug

SEQ ID NO: 882327 - RNA, 19 nt, Artificial Sequence
  Description of Artificial Sequence: Synthetic oligonucleotide
  Antisense strand to SEQ ID NO: 882326
cagacaaagaggaucuuuc

SEQ ID NO: 882328 - RNA, 19 nt, Artificial Sequence
  Description of Artificial Sequence: Synthetic oligonucleotide
  Sense strand starting at position 1154 of SEQ ID NO: 588682
uuaggcuucccauacauga

SEQ ID NO: 882329 - RNA, 19 nt, Artificial Sequence
  Description of Artificial Sequence: Synthetic oligonucleotide
  Antisense strand to SEQ ID NO: 882328
ucauguaugggaagccuaa

SEQ ID NO: 882330 - RNA, 19 nt, Artificial Sequence
  Description of Artificial Sequence: Synthetic oligonucleotide
  Sense strand starting at position 1311 of SEQ ID NO: 588682
ccgggacuccuaggaagau

SEQ ID NO: 882331 - RNA, 19 nt, Artificial Sequence
  Description of Artificial Sequence: Synthetic oligonucleotide
  Antisense strand to SEQ ID NO: 882330
aucuuccuaggagucccgg

SEQ ID NO: 882332 - RNA, 19 nt, Artificial Sequence
  Description of Artificial Sequence: Synthetic oligonucleotide
  Sense strand starting at position 1347 of SEQ ID NO: 588682
ugcugaucacauugaugga

SEQ ID NO: 882333 - RNA, 19 nt, Artificial Sequence
  Description of Artificial Sequence: Synthetic oligonucleotide
  Antisense strand to SEQ ID NO: 882332
uccaucaaugugaucagca

SEQ ID NO: 882334 - RNA, 19 nt, Artificial Sequence
  Description of Artificial Sequence: Synthetic oligonucleotide
  Sense strand starting at position 1408 of SEQ ID NO: 588682
ggugaagugguugaugaca

SEQ ID NO: 882335 - RNA, 19 nt, Artificial Sequence
  Description of Artificial Sequence: Synthetic oligonucleotide
  Antisense strand to SEQ ID NO: 882334
ugucaucaaccacuucacc

SEQ ID NO: 882336 - RNA, 19 nt, Artificial Sequence
  Description of Artificial Sequence: Synthetic oligonucleotide
  Sense strand starting at position 1419 of SEQ ID NO: 588682
ugaugacauugucuccaca

SEQ ID NO: 882337 - RNA, 19 nt, Artificial Sequence
  Description of Artificial Sequence: Synthetic oligonucleotide
  Antisense strand to SEQ ID NO: 882336
uguggagacaaugucauca

SEQ ID NO: 882338 - RNA, 19 nt, Artificial Sequence
  Description of Artificial Sequence: Synthetic oligonucleotide
  Sense strand starting at position 1421 of SEQ ID NO: 588682
augacauugucuccacaga

SEQ ID NO: 882339 - RNA, 19 nt, Artificial Sequence
  Description of Artificial Sequence: Synthetic oligonucleotide
  Antisense strand to SEQ ID NO: 882338
ucuguggagacaaugucau

SEQ ID NO: 882340 - RNA, 19 nt, Artificial Sequence
  Description of Artificial Sequence: Synthetic oligonucleotide
  Sense strand starting at position 2030 of SEQ ID NO: 588682
guucccauugcauaauaga

SEQ ID NO: 882341 - RNA, 19 nt, Artificial Sequence
  Description of Artificial Sequence: Synthetic oligonucleotide
  Antisense strand to SEQ ID NO: 882340
ucuauuaugcaaugggaac

SEQ ID NO: 882342 - RNA, 19 nt, Artificial Sequence
  Description of Artificial Sequence: Synthetic oligonucleotide
  Sense strand starting at position 2049 of SEQ ID NO: 588682
agaacauaucugugcaaga

SEQ ID NO: 882343 - RNA, 19 nt, Artificial Sequence
  Description of Artificial Sequence: Synthetic oligonucleotide
  Antisense strand to SEQ ID NO: 882342
ucuugcacagauauguucu

SEQ ID NO: 882344 - RNA, 19 nt, Artificial Sequence
  Description of Artificial Sequence: Synthetic oligonucleotide
  Sense strand starting at position 2050 of SEQ ID NO: 588682
gaacauaucugugcaagag

SEQ ID NO: 882345 - RNA, 19 nt, Artificial Sequence
  Description of Artificial Sequence: Synthetic oligonucleotide
  Antisense strand to SEQ ID NO: 882344
cucuugcacagauauguuc

SEQ ID NO: 882346 - RNA, 19 nt, Artificial Sequence
  Description of Artificial Sequence: Synthetic oligonucleotide
  Sense strand starting at position 2135 of SEQ ID NO: 588682
gggugagggccucaaaugu

SEQ ID NO: 882347 - RNA, 19 nt, Artificial Sequence
  Description of Artificial Sequence: Synthetic oligonucleotide
  Antisense strand to SEQ ID NO: 882346
acauuugaggcccucaccc

SEQ ID NO: 882348 - RNA, 19 nt, Artificial Sequence
  Description of Artificial Sequence: Synthetic oligonucleotide
  Sense strand starting at position 2229 of SEQ ID NO: 588682
ggagaagugaccuguccaa

SEQ ID NO: 882349 - RNA, 19 nt, Artificial Sequence
  Description of Artificial Sequence: Synthetic oligonucleotide
  Antisense strand to SEQ ID NO: 882348
uuggacaggucacuucucc

SEQ ID NO: 882350 - RNA, 19 nt, Artificial Sequence
  Description of Artificial Sequence: Synthetic oligonucleotide
  Sense strand starting at position 2335 of SEQ ID NO: 588682
gauuaagugcuaggaaaug

SEQ ID NO: 882351 - RNA, 19 nt, Artificial Sequence
  Description of Artificial Sequence: Synthetic oligonucleotide
  Antisense strand to SEQ ID NO: 882350
cauuuccuagcacuuaauc

SEQ ID NO: 882352 - RNA, 19 nt, Artificial Sequence
  Description of Artificial Sequence: Synthetic oligonucleotide
  Sense strand starting at position 2408 of SEQ ID NO: 588682
uuucuuagauucucagaga

SEQ ID NO: 882353 - RNA, 19 nt, Artificial Sequence
  Description of Artificial Sequence: Synthetic oligonucleotide
  Antisense strand to SEQ ID NO: 882352
ucucugagaaucuaagaaa

SEQ ID NO: 882354 - RNA, 19 nt, Artificial Sequence
  Description of Artificial Sequence: Synthetic oligonucleotide
  Sense strand starting at position 2455 of SEQ ID NO: 588682
ggaccuagcaagugauuaa

SEQ ID NO: 882355 - RNA, 19 nt, Artificial Sequence
  Description of Artificial Sequence: Synthetic oligonucleotide
  Antisense strand to SEQ ID NO: 882354
uuaaucacuugcuaggucc

SEQ ID NO: 882356 - RNA, 19 nt, Artificial Sequence
  Description of Artificial Sequence: Synthetic oligonucleotide
  Sense strand starting at position 2459 of SEQ ID NO: 588682
cuagcaagugauuaaguuu

SEQ ID NO: 882357 - RNA, 19 nt, Artificial Sequence
  Description of Artificial Sequence: Synthetic oligonucleotide
  Antisense strand to SEQ ID NO: 882356
aaacuuaaucacuugcuag

SEQ ID NO: 882358 - RNA, 19 nt, Artificial Sequence
  Description of Artificial Sequence: Synthetic oligonucleotide
  Sense strand starting at position 2615 of SEQ ID NO: 588682
aggaauagaucugccuauu

SEQ ID NO: 882359 - RNA, 19 nt, Artificial Sequence
  Description of Artificial Sequence: Synthetic oligonucleotide
  Antisense strand to SEQ ID NO: 882358
aauaggcagaucuauuccu

SEQ ID NO: 882360 - RNA, 19 nt, Artificial Sequence
  Description of Artificial Sequence: Synthetic oligonucleotide
  Sense strand starting at position 2664 of SEQ ID NO: 588682
agguccuauagcugggaaa

SEQ ID NO: 882361 - RNA, 19 nt, Artificial Sequence
  Description of Artificial Sequence: Synthetic oligonucleotide
  Antisense strand to SEQ ID NO: 882360
uuucccagcuauaggaccu

SEQ ID NO: 882362 - RNA, 19 nt, Artificial Sequence
  Description of Artificial Sequence: Synthetic oligonucleotide
  Sense strand starting at position 2676 of SEQ ID NO: 588682
ugggaaauuuaugaagcca

SEQ ID NO: 882363 - RNA, 19 nt, Artificial Sequence
  Description of Artificial Sequence: Synthetic oligonucleotide
  Antisense strand to SEQ ID NO: 882362
uggcuucauaaauuuccca

SEQ ID NO: 882364 - RNA, 19 nt, Artificial Sequence
  Description of Artificial Sequence: Synthetic oligonucleotide
  Sense strand starting at position 2787 of SEQ ID NO: 588682
uaacuauaguuaucgauag

SEQ ID NO: 882365 - RNA, 19 nt, Artificial Sequence
  Description of Artificial Sequence: Synthetic oligonucleotide
  Antisense strand to SEQ ID NO: 882364
cuaucgauaacuauaguua

SEQ ID NO: 882366 - RNA, 19 nt, Artificial Sequence
  Description of Artificial Sequence: Synthetic oligonucleotide
  Sense strand starting at position 2791 of SEQ ID NO: 588682
uauaguuaucgauaguaga

SEQ ID NO: 882367 - RNA, 19 nt, Artificial Sequence
  Description of Artificial Sequence: Synthetic oligonucleotide
  Antisense strand to SEQ ID NO: 882366
ucuacuaucgauaacuaua

SEQ ID NO: 882368 - RNA, 19 nt, Artificial Sequence
  Description of Artificial Sequence: Synthetic oligonucleotide
  Sense strand starting at position 2853 of SEQ ID NO: 588682
ugaaauuccuaaccgugaa

SEQ ID NO: 882369 - RNA, 19 nt, Artificial Sequence
  Description of Artificial Sequence: Synthetic oligonucleotide
  Antisense strand to SEQ ID NO: 882368
uucacgguuaggaauuuca

SEQ ID NO: 882370 - RNA, 19 nt, Artificial Sequence
  Description of Artificial Sequence: Synthetic oligonucleotide
  Sense strand starting at position 2992 of SEQ ID NO: 588682
ugccuuuguauagaggaua

SEQ ID NO: 882371 - RNA, 19 nt, Artificial Sequence
  Description of Artificial Sequence: Synthetic oligonucleotide
  Antisense strand to SEQ ID NO: 882370
uauccucuauacaaaggca

SEQ ID NO: 882372 - RNA, 19 nt, Artificial Sequence
  Description of Artificial Sequence: Synthetic oligonucleotide
  Sense strand starting at position 3004 of SEQ ID NO: 588682
gaggauaucuagucucuua

SEQ ID NO: 882373 - RNA, 19 nt, Artificial Sequence
  Description of Artificial Sequence: Synthetic oligonucleotide
  Antisense strand to SEQ ID NO: 882372
uaagagacuagauauccuc

SEQ ID NO: 882374 - RNA, 19 nt, Artificial Sequence
  Description of Artificial Sequence: Synthetic oligonucleotide
  Sense strand starting at position 3111 of SEQ ID NO: 588682
auaagaguggguggaugau

SEQ ID NO: 882375 - RNA, 19 nt, Artificial Sequence
  Description of Artificial Sequence: Synthetic oligonucleotide
  Antisense strand to SEQ ID NO: 882374
aucauccacccacucuuau

SEQ ID NO: 882376 - RNA, 19 nt, Artificial Sequence
  Description of Artificial Sequence: Synthetic oligonucleotide
  Sense strand starting at position 3127 of SEQ ID NO: 588682
gauggaagaugagugguua

SEQ ID NO: 882377 - RNA, 19 nt, Artificial Sequence
  Description of Artificial Sequence: Synthetic oligonucleotide
  Antisense strand to SEQ ID NO: 882376
uaaccacucaucuuccauc

SEQ ID NO: 882378 - RNA, 19 nt, Artificial Sequence
  Description of Artificial Sequence: Synthetic oligonucleotide
  Sense strand starting at position 3128 of SEQ ID NO: 588682
auggaagaugagugguuaa

SEQ ID NO: 882379 - RNA, 19 nt, Artificial Sequence
  Description of Artificial Sequence: Synthetic oligonucleotide
  Antisense strand to SEQ ID NO: 882378
uuaaccacucaucuuccau

SEQ ID NO: 882380 - RNA, 19 nt, Artificial Sequence
  Description of Artificial Sequence: Synthetic oligonucleotide
  Sense strand starting at position 3131 of SEQ ID NO: 588682
gaagaugagugguuaauau

SEQ ID NO: 882381 - RNA, 19 nt, Artificial Sequence
  Description of Artificial Sequence: Synthetic oligonucleotide
  Antisense strand to SEQ ID NO: 882380
auauuaaccacucaucuuc

SEQ ID NO: 882382 - RNA, 19 nt, Artificial Sequence
  Description of Artificial Sequence: Synthetic oligonucleotide
  Sense strand starting at position 3329 of SEQ ID NO: 588682
agaccuaguccugaguucu

SEQ ID NO: 882383 - RNA, 19 nt, Artificial Sequence
  Description of Artificial Sequence: Synthetic oligonucleotide
  Antisense strand to SEQ ID NO: 882382
agaacucaggacuaggucu

SEQ ID NO: 882384 - RNA, 19 nt, Artificial Sequence
  Description of Artificial Sequence: Synthetic oligonucleotide
  Sense strand starting at position 3457 of SEQ ID NO: 588682
auugcuauagcauaaugau

SEQ ID NO: 882385 - RNA, 19 nt, Artificial Sequence
  Description of Artificial Sequence: Synthetic oligonucleotide
  Antisense strand to SEQ ID NO: 882384
aucauuaugcuauagcaau

SEQ ID NO: 882386 - RNA, 19 nt, Artificial Sequence
  Description of Artificial Sequence: Synthetic oligonucleotide
  Sense strand starting at position 3600 of SEQ ID NO: 588682
agauguguugucaggcagu

SEQ ID NO: 882387 - RNA, 19 nt, Artificial Sequence
  Description of Artificial Sequence: Synthetic oligonucleotide
  Antisense strand to SEQ ID NO: 882386
acugccugacaacacaucu

SEQ ID NO: 882388 - RNA, 19 nt, Artificial Sequence
  Description of Artificial Sequence: Synthetic oligonucleotide
  Sense strand starting at position 3897 of SEQ ID NO: 588682
agagaacgauuggucuaac

SEQ ID NO: 882389 - RNA, 19 nt, Artificial Sequence
  Description of Artificial Sequence: Synthetic oligonucleotide
  Antisense strand to SEQ ID NO: 882388
guuagaccaaucguucucu

SEQ ID NO: 882390 - RNA, 19 nt, Artificial Sequence
  Description of Artificial Sequence: Synthetic oligonucleotide
  Sense strand starting at position 3900 of SEQ ID NO: 588682
gaacgauuggucuaaccca

SEQ ID NO: 882391 - RNA, 19 nt, Artificial Sequence
  Description of Artificial Sequence: Synthetic oligonucleotide
  Antisense strand to SEQ ID NO: 882390
uggguuagaccaaucguuc

SEQ ID NO: 882392 - RNA, 19 nt, Artificial Sequence
  Description of Artificial Sequence: Synthetic oligonucleotide
  Sense strand starting at position 3955 of SEQ ID NO: 588682
agguauuuccugugcaauc

SEQ ID NO: 882393 - RNA, 19 nt, Artificial Sequence
  Description of Artificial Sequence: Synthetic oligonucleotide
  Antisense strand to SEQ ID NO: 882392
gauugcacaggaaauaccu

SEQ ID NO: 882394 - RNA, 19 nt, Artificial Sequence
  Description of Artificial Sequence: Synthetic oligonucleotide
  Sense strand starting at position 318 of SEQ ID NO: 588683
ggagguugguugcacagau

SEQ ID NO: 882395 - RNA, 19 nt, Artificial Sequence
  Description of Artificial Sequence: Synthetic oligonucleotide
  Antisense strand to SEQ ID NO: 882394
aucugugcaaccaaccucc

SEQ ID NO: 882396 - RNA, 19 nt, Artificial Sequence
  Description of Artificial Sequence: Synthetic oligonucleotide
  Sense strand starting at position 322 of SEQ ID NO: 588683
guugguugcacagauuauu

SEQ ID NO: 882397 - RNA, 19 nt, Artificial Sequence
  Description of Artificial Sequence: Synthetic oligonucleotide
  Antisense strand to SEQ ID NO: 882396
aauaaucugugcaaccaac

SEQ ID NO: 882398 - RNA, 19 nt, Artificial Sequence
  Description of Artificial Sequence: Synthetic oligonucleotide
  Sense strand starting at position 447 of SEQ ID NO: 588683
cucuauauguccgcauguu

SEQ ID NO: 882399 - RNA, 19 nt, Artificial Sequence
  Description of Artificial Sequence: Synthetic oligonucleotide
  Antisense strand to SEQ ID NO: 882398
aacaugcggacauauagag

SEQ ID NO: 882400 - RNA, 19 nt, Artificial Sequence
  Description of Artificial Sequence: Synthetic oligonucleotide
  Sense strand starting at position 448 of SEQ ID NO: 588683
ucuauauguccgcauguuc

SEQ ID NO: 882401 - RNA, 19 nt, Artificial Sequence
  Description of Artificial Sequence: Synthetic oligonucleotide
  Antisense strand to SEQ ID NO: 882400
gaacaugcggacauauaga

SEQ ID NO: 882402 - RNA, 19 nt, Artificial Sequence
  Description of Artificial Sequence: Synthetic oligonucleotide
  Sense strand starting at position 459 of SEQ ID NO: 588683
gcauguucucguuguuuag

SEQ ID NO: 882403 - RNA, 19 nt, Artificial Sequence
  Description of Artificial Sequence: Synthetic oligonucleotide
  Antisense strand to SEQ ID NO: 882402
cuaaacaacgagaacaugc

SEQ ID NO: 882404 - RNA, 19 nt, Artificial Sequence
  Description of Artificial Sequence: Synthetic oligonucleotide
  Sense strand starting at position 808 of SEQ ID NO: 588683
gaaacauuagccuggucua

SEQ ID NO: 882405 - RNA, 19 nt, Artificial Sequence
  Description of Artificial Sequence: Synthetic oligonucleotide
  Antisense strand to SEQ ID NO: 882404
uagaccaggcuaauguuuc

SEQ ID NO: 882406 - RNA, 19 nt, Artificial Sequence
  Description of Artificial Sequence: Synthetic oligonucleotide
  Sense strand starting at position 838 of SEQ ID NO: 588683
uaggucuagcccuagauga

SEQ ID NO: 882407 - RNA, 19 nt, Artificial Sequence
  Description of Artificial Sequence: Synthetic oligonucleotide
  Antisense strand to SEQ ID NO: 882406
ucaucuagggcuagaccua

SEQ ID NO: 882408 - RNA, 19 nt, Artificial Sequence
  Description of Artificial Sequence: Synthetic oligonucleotide
  Sense strand starting at position 840 of SEQ ID NO: 588683
ggucuagcccuagaugaac

SEQ ID NO: 882409 - RNA, 19 nt, Artificial Sequence
  Description of Artificial Sequence: Synthetic oligonucleotide
  Antisense strand to SEQ ID NO: 882408
guucaucuagggcuagacc

SEQ ID NO: 882410 - RNA, 19 nt, Artificial Sequence
  Description of Artificial Sequence: Synthetic oligonucleotide
  Sense strand starting at position 939 of SEQ ID NO: 588683
agaggaacaucccaucuuu

SEQ ID NO: 882411 - RNA, 19 nt, Artificial Sequence
  Description of Artificial Sequence: Synthetic oligonucleotide
  Antisense strand to SEQ ID NO: 882410
aaagaugggauguuccucu

SEQ ID NO: 882412 - RNA, 19 nt, Artificial Sequence
  Description of Artificial Sequence: Synthetic oligonucleotide
  Sense strand starting at position 2082 of SEQ ID NO: 588683
cauccuguacugggaguua

SEQ ID NO: 882413 - RNA, 19 nt, Artificial Sequence
  Description of Artificial Sequence: Synthetic oligonucleotide
  Antisense strand to SEQ ID NO: 882412
uaacucccaguacaggaug

SEQ ID NO: 882414 - RNA, 19 nt, Artificial Sequence
  Description of Artificial Sequence: Synthetic oligonucleotide
  Sense strand starting at position 2178 of SEQ ID NO: 588683
guuucuaacucuuagaagu

SEQ ID NO: 882415 - RNA, 19 nt, Artificial Sequence
  Description of Artificial Sequence: Synthetic oligonucleotide
  Antisense strand to SEQ ID NO: 882414
acuucuaagaguuagaaac

SEQ ID NO: 882416 - RNA, 19 nt, Artificial Sequence
  Description of Artificial Sequence: Synthetic oligonucleotide
  Sense strand starting at position 2188 of SEQ ID NO: 588683
cuuagaagucauugcagaa

SEQ ID NO: 882417 - RNA, 19 nt, Artificial Sequence
  Description of Artificial Sequence: Synthetic oligonucleotide
  Antisense strand to SEQ ID NO: 882416
uucugcaaugacuucuaag

SEQ ID NO: 882418 - RNA, 19 nt, Artificial Sequence
  Description of Artificial Sequence: Synthetic oligonucleotide
  Sense strand starting at position 3012 of SEQ ID NO: 588683
gagagcauugccuagcaca

SEQ ID NO: 882419 - RNA, 19 nt, Artificial Sequence
  Description of Artificial Sequence: Synthetic oligonucleotide
  Antisense strand to SEQ ID NO: 882418
ugugcuaggcaaugcucuc

SEQ ID NO: 882420 - RNA, 19 nt, Artificial Sequence
  Description of Artificial Sequence: Synthetic oligonucleotide
  Sense strand starting at position 3059 of SEQ ID NO: 588683
augaaugaaugggaugaua

SEQ ID NO: 882421 - RNA, 19 nt, Artificial Sequence
  Description of Artificial Sequence: Synthetic oligonucleotide
  Antisense strand to SEQ ID NO: 882420
uaucaucccauucauucau

SEQ ID NO: 882422 - RNA, 19 nt, Artificial Sequence
  Description of Artificial Sequence: Synthetic oligonucleotide
  Sense strand starting at position 3071 of SEQ ID NO: 588683
gaugauauuuaguguccag

SEQ ID NO: 882423 - RNA, 19 nt, Artificial Sequence
  Description of Artificial Sequence: Synthetic oligonucleotide
  Antisense strand to SEQ ID NO: 882422
cuggacacuaaauaucauc

SEQ ID NO: 882424 - RNA, 19 nt, Artificial Sequence
  Description of Artificial Sequence: Synthetic oligonucleotide
  Sense strand starting at position 3074 of SEQ ID NO: 588683
gauauuuaguguccagcca

SEQ ID NO: 882425 - RNA, 19 nt, Artificial Sequence
  Description of Artificial Sequence: Synthetic oligonucleotide
  Antisense strand to SEQ ID NO: 882424
uggcuggacacuaaauauc

SEQ ID NO: 882426 - RNA, 19 nt, Artificial Sequence
  Description of Artificial Sequence: Synthetic oligonucleotide
  Sense strand starting at position 3082 of SEQ ID NO: 588683
guguccagccaaugauuga

SEQ ID NO: 882427 - RNA, 19 nt, Artificial Sequence
  Description of Artificial Sequence: Synthetic oligonucleotide
  Antisense strand to SEQ ID NO: 882426
ucaaucauuggcuggacac

SEQ ID NO: 882428 - RNA, 19 nt, Artificial Sequence
  Description of Artificial Sequence: Synthetic oligonucleotide
  Sense strand starting at position 3120 of SEQ ID NO: 588683
gcauucuccucuccaguuu

SEQ ID NO: 882429 - RNA, 19 nt, Artificial Sequence
  Description of Artificial Sequence: Synthetic oligonucleotide
  Antisense strand to SEQ ID NO: 882428
aaacuggagaggagaaugc

SEQ ID NO: 882430 - RNA, 19 nt, Artificial Sequence
  Description of Artificial Sequence: Synthetic oligonucleotide
  Sense strand starting at position 3227 of SEQ ID NO: 588683
gggacaucuuuccuuugga

SEQ ID NO: 882431 - RNA, 19 nt, Artificial Sequence
  Description of Artificial Sequence: Synthetic oligonucleotide
  Antisense strand to SEQ ID NO: 882430
uccaaaggaaagauguccc

SEQ ID NO: 882432 - RNA, 19 nt, Artificial Sequence
  Description of Artificial Sequence: Synthetic oligonucleotide
  Sense strand starting at position 3228 of SEQ ID NO: 588683
ggacaucuuuccuuuggag

SEQ ID NO: 882433 - RNA, 19 nt, Artificial Sequence
  Description of Artificial Sequence: Synthetic oligonucleotide
  Antisense strand to SEQ ID NO: 882432
cuccaaaggaaagaugucc

SEQ ID NO: 882434 - RNA, 19 nt, Artificial Sequence
  Description of Artificial Sequence: Synthetic oligonucleotide
  Sense strand starting at position 3230 of SEQ ID NO: 588683
acaucuuuccuuuggagua

SEQ ID NO: 882435 - RNA, 19 nt, Artificial Sequence
  Description of Artificial Sequence: Synthetic oligonucleotide
  Antisense strand to SEQ ID NO: 882434
uacuccaaaggaaagaugu

SEQ ID NO: 882436 - RNA, 19 nt, Artificial Sequence
  Description of Artificial Sequence: Synthetic oligonucleotide
  Sense strand starting at position 3235 of SEQ ID NO: 588683
uuuccuuuggaguaagauc

SEQ ID NO: 882437 - RNA, 19 nt, Artificial Sequence
  Description of Artificial Sequence: Synthetic oligonucleotide
  Antisense strand to SEQ ID NO: 882436
gaucuuacuccaaaggaaa

SEQ ID NO: 882438 - RNA, 19 nt, Artificial Sequence
  Description of Artificial Sequence: Synthetic oligonucleotide
  Sense strand starting at position 3243 of SEQ ID NO: 588683
ggaguaagaucggagaaag

SEQ ID NO: 882439 - RNA, 19 nt, Artificial Sequence
  Description of Artificial Sequence: Synthetic oligonucleotide
  Antisense strand to SEQ ID NO: 882438
cuuucuccgaucuuacucc

SEQ ID NO: 882440 - RNA, 19 nt, Artificial Sequence
  Description of Artificial Sequence: Synthetic oligonucleotide
  Sense strand starting at position 3258 of SEQ ID NO: 588683
aaaggaguagccugguauc

SEQ ID NO: 882441 - RNA, 19 nt, Artificial Sequence
  Description of Artificial Sequence: Synthetic oligonucleotide
  Antisense strand to SEQ ID NO: 882440
gauaccaggcuacuccuuu

SEQ ID NO: 882442 - RNA, 19 nt, Artificial Sequence
  Description of Artificial Sequence: Synthetic oligonucleotide
  Sense strand starting at position 3313 of SEQ ID NO: 588683
gugaauauauuccugagcu

SEQ ID NO: 882443 - RNA, 19 nt, Artificial Sequence
  Description of Artificial Sequence: Synthetic oligonucleotide
  Antisense strand to SEQ ID NO: 882442
agcucaggaauauauucac

SEQ ID NO: 882444 - RNA, 19 nt, Artificial Sequence
  Description of Artificial Sequence: Synthetic oligonucleotide
  Sense strand starting at position 3314 of SEQ ID NO: 588683
ugaauauauuccugagcug

SEQ ID NO: 882445 - RNA, 19 nt, Artificial Sequence
  Description of Artificial Sequence: Synthetic oligonucleotide
  Antisense strand to SEQ ID NO: 882444
cagcucaggaauauauuca

SEQ ID NO: 882446 - RNA, 19 nt, Artificial Sequence
  Description of Artificial Sequence: Synthetic oligonucleotide
  Sense strand starting at position 3317 of SEQ ID NO: 588683
auauauuccugagcugaau

SEQ ID NO: 882447 - RNA, 19 nt, Artificial Sequence
  Description of Artificial Sequence: Synthetic oligonucleotide
  Antisense strand to SEQ ID NO: 882446
auucagcucaggaauauau

SEQ ID NO: 882448 - RNA, 19 nt, Artificial Sequence
  Description of Artificial Sequence: Synthetic oligonucleotide
  Sense strand starting at position 3328 of SEQ ID NO: 588683
agcugaauucuuggccucu

SEQ ID NO: 882449 - RNA, 19 nt, Artificial Sequence
  Description of Artificial Sequence: Synthetic oligonucleotide
  Antisense strand to SEQ ID NO: 882448
agaggccaagaauucagcu

SEQ ID NO: 882450 - RNA, 19 nt, Artificial Sequence
  Description of Artificial Sequence: Synthetic oligonucleotide
  Sense strand starting at position 3357 of SEQ ID NO: 588683
auguucucaucuggauaau

SEQ ID NO: 882451 - RNA, 19 nt, Artificial Sequence
  Description of Artificial Sequence: Synthetic oligonucleotide
  Antisense strand to SEQ ID NO: 882450
auuauccagaugagaacau

SEQ ID NO: 882452 - RNA, 19 nt, Artificial Sequence
  Description of Artificial Sequence: Synthetic oligonucleotide
  Sense strand starting at position 3358 of SEQ ID NO: 588683
uguucucaucuggauaaug

SEQ ID NO: 882453 - RNA, 19 nt, Artificial Sequence
  Description of Artificial Sequence: Synthetic oligonucleotide
  Antisense strand to SEQ ID NO: 882452
cauuauccagaugagaaca

SEQ ID NO: 882454 - RNA, 19 nt, Artificial Sequence
  Description of Artificial Sequence: Synthetic oligonucleotide
  Sense strand starting at position 3385 of SEQ ID NO: 588683
cugcaaggauucgaugaga

SEQ ID NO: 882455 - RNA, 19 nt, Artificial Sequence
  Description of Artificial Sequence: Synthetic oligonucleotide
  Antisense strand to SEQ ID NO: 882454
ucucaucgaauccuugcag

SEQ ID NO: 882456 - RNA, 19 nt, Artificial Sequence
  Description of Artificial Sequence: Synthetic oligonucleotide
  Sense strand starting at position 3458 of SEQ ID NO: 588683
ggcccugcgaauggaaaua

SEQ ID NO: 882457 - RNA, 19 nt, Artificial Sequence
  Description of Artificial Sequence: Synthetic oligonucleotide
  Antisense strand to SEQ ID NO: 882456
uauuuccauucgcagggcc

SEQ ID NO: 882458 - RNA, 19 nt, Artificial Sequence
  Description of Artificial Sequence: Synthetic oligonucleotide
  Sense strand starting at position 3514 of SEQ ID NO: 588683
gcaacuuuauggcaaucaa

SEQ ID NO: 882459 - RNA, 19 nt, Artificial Sequence
  Description of Artificial Sequence: Synthetic oligonucleotide
  Antisense strand to SEQ ID NO: 882458
uugauugccauaaaguugc

SEQ ID NO: 882460 - RNA, 19 nt, Artificial Sequence
  Description of Artificial Sequence: Synthetic oligonucleotide
  Sense strand starting at position 3535 of SEQ ID NO: 588683
guaguauaauucccagaaa

SEQ ID NO: 882461 - RNA, 19 nt, Artificial Sequence
  Description of Artificial Sequence: Synthetic oligonucleotide
  Antisense strand to SEQ ID NO: 882460
uuucugggaauuauacuac

SEQ ID NO: 882462 - RNA, 19 nt, Artificial Sequence
  Description of Artificial Sequence: Synthetic oligonucleotide
  Sense strand starting at position 3635 of SEQ ID NO: 588683
aaguuucuccagugugaag

SEQ ID NO: 882463 - RNA, 19 nt, Artificial Sequence
  Description of Artificial Sequence: Synthetic oligonucleotide
  Antisense strand to SEQ ID NO: 882462
cuucacacuggagaaacuu

SEQ ID NO: 882464 - RNA, 19 nt, Artificial Sequence
  Description of Artificial Sequence: Synthetic oligonucleotide
  Sense strand starting at position 3761 of SEQ ID NO: 588683
cccuguggaugugugaaau

SEQ ID NO: 882465 - RNA, 19 nt, Artificial Sequence
  Description of Artificial Sequence: Synthetic oligonucleotide
  Antisense strand to SEQ ID NO: 882464
auuucacacauccacaggg

SEQ ID NO: 882466 - RNA, 19 nt, Artificial Sequence
  Description of Artificial Sequence: Synthetic oligonucleotide
  Sense strand starting at position 3772 of SEQ ID NO: 588683
ugugaaaucacagaucgua

SEQ ID NO: 882467 - RNA, 19 nt, Artificial Sequence
  Description of Artificial Sequence: Synthetic oligonucleotide
  Antisense strand to SEQ ID NO: 882466
uacgaucugugauuucaca

SEQ ID NO: 882468 - RNA, 19 nt, Artificial Sequence
  Description of Artificial Sequence: Synthetic oligonucleotide
  Sense strand starting at position 3777 of SEQ ID NO: 588683
aaucacagaucguacugaa

SEQ ID NO: 882469 - RNA, 19 nt, Artificial Sequence
  Description of Artificial Sequence: Synthetic oligonucleotide
  Antisense strand to SEQ ID NO: 882468
uucaguacgaucugugauu

SEQ ID NO: 882470 - RNA, 19 nt, Artificial Sequence
  Description of Artificial Sequence: Synthetic oligonucleotide
  Sense strand starting at position 3787 of SEQ ID NO: 588683
cguacugaacccuauauau

SEQ ID NO: 882471 - RNA, 19 nt, Artificial Sequence
  Description of Artificial Sequence: Synthetic oligonucleotide
  Antisense strand to SEQ ID NO: 882470
auauauaggguucaguacg

SEQ ID NO: 882472 - RNA, 19 nt, Artificial Sequence
  Description of Artificial Sequence: Synthetic oligonucleotide
  Sense strand starting at position 3858 of SEQ ID NO: 588683
uaggcauaguaagggauaa

SEQ ID NO: 882473 - RNA, 19 nt, Artificial Sequence
  Description of Artificial Sequence: Synthetic oligonucleotide
  Antisense strand to SEQ ID NO: 882472
uuaucccuuacuaugccua

SEQ ID NO: 882474 - RNA, 19 nt, Artificial Sequence
  Description of Artificial Sequence: Synthetic oligonucleotide
  Sense strand starting at position 275 of SEQ ID NO: 588684
gcacaauggugucugucuu

SEQ ID NO: 882475 - RNA, 19 nt, Artificial Sequence
  Description of Artificial Sequence: Synthetic oligonucleotide
  Antisense strand to SEQ ID NO: 882474
aagacagacaccauugugc

SEQ ID NO: 882476 - RNA, 19 nt, Artificial Sequence
  Description of Artificial Sequence: Synthetic oligonucleotide
  Sense strand starting at position 276 of SEQ ID NO: 588684
cacaauggugucugucuua

SEQ ID NO: 882477 - RNA, 19 nt, Artificial Sequence
  Description of Artificial Sequence: Synthetic oligonucleotide
  Antisense strand to SEQ ID NO: 882476
uaagacagacaccauugug

SEQ ID NO: 882478 - RNA, 19 nt, Artificial Sequence
  Description of Artificial Sequence: Synthetic oligonucleotide
  Sense strand starting at position 283 of SEQ ID NO: 588684
gugucugucuuacagguga

SEQ ID NO: 882479 - RNA, 19 nt, Artificial Sequence
  Description of Artificial Sequence: Synthetic oligonucleotide
  Antisense strand to SEQ ID NO: 882478
ucaccuguaagacagacac

SEQ ID NO: 882480 - RNA, 19 nt, Artificial Sequence
  Description of Artificial Sequence: Synthetic oligonucleotide
  Sense strand starting at position 512 of SEQ ID NO: 588684
gaugcuaaauggugucagu

SEQ ID NO: 882481 - RNA, 19 nt, Artificial Sequence
  Description of Artificial Sequence: Synthetic oligonucleotide
  Antisense strand to SEQ ID NO: 882480
acugacaccauuuagcauc

SEQ ID NO: 882482 - RNA, 19 nt, Artificial Sequence
  Description of Artificial Sequence: Synthetic oligonucleotide
  Sense strand starting at position 768 of SEQ ID NO: 588684
cucucaguguccucuuaga

SEQ ID NO: 882483 - RNA, 19 nt, Artificial Sequence
  Description of Artificial Sequence: Synthetic oligonucleotide
  Antisense strand to SEQ ID NO: 882482
ucuaagaggacacugagag

SEQ ID NO: 882484 - RNA, 19 nt, Artificial Sequence
  Description of Artificial Sequence: Synthetic oligonucleotide
  Sense strand starting at position 779 of SEQ ID NO: 588684
cucuuagaguuguuucuga

SEQ ID NO: 882485 - RNA, 19 nt, Artificial Sequence
  Description of Artificial Sequence: Synthetic oligonucleotide
  Antisense strand to SEQ ID NO: 882484
ucagaaacaacucuaagag

SEQ ID NO: 882486 - RNA, 19 nt, Artificial Sequence
  Description of Artificial Sequence: Synthetic oligonucleotide
  Sense strand starting at position 783 of SEQ ID NO: 588684
uagaguuguuucugagcac

SEQ ID NO: 882487 - RNA, 19 nt, Artificial Sequence
  Description of Artificial Sequence: Synthetic oligonucleotide
  Antisense strand to SEQ ID NO: 882486
gugcucagaaacaacucua

SEQ ID NO: 882488 - RNA, 19 nt, Artificial Sequence
  Description of Artificial Sequence: Synthetic oligonucleotide
  Sense strand starting at position 784 of SEQ ID NO: 588684
agaguuguuucugagcaca

SEQ ID NO: 882489 - RNA, 19 nt, Artificial Sequence
  Description of Artificial Sequence: Synthetic oligonucleotide
  Antisense strand to SEQ ID NO: 882488
ugugcucagaaacaacucu

SEQ ID NO: 882490 - RNA, 19 nt, Artificial Sequence
  Description of Artificial Sequence: Synthetic oligonucleotide
  Sense strand starting at position 786 of SEQ ID NO: 588684
aguuguuucugagcacauc

SEQ ID NO: 882491 - RNA, 19 nt, Artificial Sequence
  Description of Artificial Sequence: Synthetic oligonucleotide
  Antisense strand to SEQ ID NO: 882490
gaugugcucagaaacaacu

SEQ ID NO: 882492 - RNA, 19 nt, Artificial Sequence
  Description of Artificial Sequence: Synthetic oligonucleotide
  Sense strand starting at position 792 of SEQ ID NO: 588684
uucugagcacaucguuaga

SEQ ID NO: 882493 - RNA, 19 nt, Artificial Sequence
  Description of Artificial Sequence: Synthetic oligonucleotide
  Antisense strand to SEQ ID NO: 882492
ucuaacgaugugcucagaa

SEQ ID NO: 882494 - RNA, 19 nt, Artificial Sequence
  Description of Artificial Sequence: Synthetic oligonucleotide
  Sense strand starting at position 992 of SEQ ID NO: 588684
augcacugguccugucuaa

SEQ ID NO: 882495 - RNA, 19 nt, Artificial Sequence
  Description of Artificial Sequence: Synthetic oligonucleotide
  Antisense strand to SEQ ID NO: 882494
uuagacaggaccagugcau

SEQ ID NO: 882496 - RNA, 19 nt, Artificial Sequence
  Description of Artificial Sequence: Synthetic oligonucleotide
  Sense strand starting at position 1036 of SEQ ID NO: 588684
caggaagauuauugagaag

SEQ ID NO: 882497 - RNA, 19 nt, Artificial Sequence
  Description of Artificial Sequence: Synthetic oligonucleotide
  Antisense strand to SEQ ID NO: 882496
cuucucaauaaucuuccug

SEQ ID NO: 882498 - RNA, 19 nt, Artificial Sequence
  Description of Artificial Sequence: Synthetic oligonucleotide
  Sense strand starting at position 1043 of SEQ ID NO: 588684
auuauugagaaguggccaa

SEQ ID NO: 882499 - RNA, 19 nt, Artificial Sequence
  Description of Artificial Sequence: Synthetic oligonucleotide
  Antisense strand to SEQ ID NO: 882498
uuggccacuucucaauaau

SEQ ID NO: 882500 - RNA, 19 nt, Artificial Sequence
  Description of Artificial Sequence: Synthetic oligonucleotide
  Sense strand starting at position 2419 of SEQ ID NO: 588684
uggcaacagcugugucaga

SEQ ID NO: 882501 - RNA, 19 nt, Artificial Sequence
  Description of Artificial Sequence: Synthetic oligonucleotide
  Antisense strand to SEQ ID NO: 882500
ucugacacagcuguugcca

SEQ ID NO: 882502 - RNA, 19 nt, Artificial Sequence
  Description of Artificial Sequence: Synthetic oligonucleotide
  Sense strand starting at position 2428 of SEQ ID NO: 588684
cugugucagagccaaaguu

SEQ ID NO: 882503 - RNA, 19 nt, Artificial Sequence
  Description of Artificial Sequence: Synthetic oligonucleotide
  Antisense strand to SEQ ID NO: 882502
aacuuuggcucugacacag

SEQ ID NO: 882504 - RNA, 19 nt, Artificial Sequence
  Description of Artificial Sequence: Synthetic oligonucleotide
  Sense strand starting at position 2672 of SEQ ID NO: 588684
cucgguauauucuguggaa

SEQ ID NO: 882505 - RNA, 19 nt, Artificial Sequence
  Description of Artificial Sequence: Synthetic oligonucleotide
  Antisense strand to SEQ ID NO: 882504
uuccacagaauauaccgag

SEQ ID NO: 882506 - RNA, 19 nt, Artificial Sequence
  Description of Artificial Sequence: Synthetic oligonucleotide
  Sense strand starting at position 2673 of SEQ ID NO: 588684
ucgguauauucuguggaau

SEQ ID NO: 882507 - RNA, 19 nt, Artificial Sequence
  Description of Artificial Sequence: Synthetic oligonucleotide
  Antisense strand to SEQ ID NO: 882506
auuccacagaauauaccga

SEQ ID NO: 882508 - RNA, 19 nt, Artificial Sequence
  Description of Artificial Sequence: Synthetic oligonucleotide
  Sense strand starting at position 2674 of SEQ ID NO: 588684
cgguauauucuguggaaug

SEQ ID NO: 882509 - RNA, 19 nt, Artificial Sequence
  Description of Artificial Sequence: Synthetic oligonucleotide
  Antisense strand to SEQ ID NO: 882508
cauuccacagaauauaccg

SEQ ID NO: 882510 - RNA, 19 nt, Artificial Sequence
  Description of Artificial Sequence: Synthetic oligonucleotide
  Sense strand starting at position 2675 of SEQ ID NO: 588684
gguauauucuguggaauga

SEQ ID NO: 882511 - RNA, 19 nt, Artificial Sequence
  Description of Artificial Sequence: Synthetic oligonucleotide
  Antisense strand to SEQ ID NO: 882510
ucauuccacagaauauacc

SEQ ID NO: 882512 - RNA, 19 nt, Artificial Sequence
  Description of Artificial Sequence: Synthetic oligonucleotide
  Sense strand starting at position 2676 of SEQ ID NO: 588684
guauauucuguggaaugag

SEQ ID NO: 882513 - RNA, 19 nt, Artificial Sequence
  Description of Artificial Sequence: Synthetic oligonucleotide
  Antisense strand to SEQ ID NO: 882512
cucauuccacagaauauac

SEQ ID NO: 882514 - RNA, 19 nt, Artificial Sequence
  Description of Artificial Sequence: Synthetic oligonucleotide
  Sense strand starting at position 2679 of SEQ ID NO: 588684
uauucuguggaaugaguga

SEQ ID NO: 882515 - RNA, 19 nt, Artificial Sequence
  Description of Artificial Sequence: Synthetic oligonucleotide
  Antisense strand to SEQ ID NO: 882514
ucacucauuccacagaaua

SEQ ID NO: 882516 - RNA, 19 nt, Artificial Sequence
  Description of Artificial Sequence: Synthetic oligonucleotide
  Sense strand starting at position 2703 of SEQ ID NO: 588684
uggcccauuuguguuccua

SEQ ID NO: 882517 - RNA, 19 nt, Artificial Sequence
  Description of Artificial Sequence: Synthetic oligonucleotide
  Antisense strand to SEQ ID NO: 882516
uaggaacacaaaugggcca

SEQ ID NO: 882518 - RNA, 19 nt, Artificial Sequence
  Description of Artificial Sequence: Synthetic oligonucleotide
  Sense strand starting at position 3050 of SEQ ID NO: 588684
ugggauuacucagaaagua

SEQ ID NO: 882519 - RNA, 19 nt, Artificial Sequence
  Description of Artificial Sequence: Synthetic oligonucleotide
  Antisense strand to SEQ ID NO: 882518
uacuuucugaguaauccca

SEQ ID NO: 882520 - RNA, 19 nt, Artificial Sequence
  Description of Artificial Sequence: Synthetic oligonucleotide
  Sense strand starting at position 3060 of SEQ ID NO: 588684
cagaaaguauucuuacggu

SEQ ID NO: 882521 - RNA, 19 nt, Artificial Sequence
  Description of Artificial Sequence: Synthetic oligonucleotide
  Antisense strand to SEQ ID NO: 882520
accguaagaauacuuucug

SEQ ID NO: 882522 - RNA, 19 nt, Artificial Sequence
  Description of Artificial Sequence: Synthetic oligonucleotide
  Sense strand starting at position 3063 of SEQ ID NO: 588684
aaaguauucuuacgguaug

SEQ ID NO: 882523 - RNA, 19 nt, Artificial Sequence
  Description of Artificial Sequence: Synthetic oligonucleotide
  Antisense strand to SEQ ID NO: 882522
cauaccguaagaauacuuu

SEQ ID NO: 882524 - RNA, 19 nt, Artificial Sequence
  Description of Artificial Sequence: Synthetic oligonucleotide
  Sense strand starting at position 3064 of SEQ ID NO: 588684
aaguauucuuacgguauga

SEQ ID NO: 882525 - RNA, 19 nt, Artificial Sequence
  Description of Artificial Sequence: Synthetic oligonucleotide
  Antisense strand to SEQ ID NO: 882524
ucauaccguaagaauacuu

SEQ ID NO: 882526 - RNA, 19 nt, Artificial Sequence
  Description of Artificial Sequence: Synthetic oligonucleotide
  Sense strand starting at position 3066 of SEQ ID NO: 588684
guauucuuacgguaugauu

SEQ ID NO: 882527 - RNA, 19 nt, Artificial Sequence
  Description of Artificial Sequence: Synthetic oligonucleotide
  Antisense strand to SEQ ID NO: 882526
aaucauaccguaagaauac

SEQ ID NO: 882528 - RNA, 19 nt, Artificial Sequence
  Description of Artificial Sequence: Synthetic oligonucleotide
  Sense strand starting at position 3068 of SEQ ID NO: 588684
auucuuacgguaugauuau

SEQ ID NO: 882529 - RNA, 19 nt, Artificial Sequence
  Description of Artificial Sequence: Synthetic oligonucleotide
  Antisense strand to SEQ ID NO: 882528
auaaucauaccguaagaau

SEQ ID NO: 882530 - RNA, 19 nt, Artificial Sequence
  Description of Artificial Sequence: Synthetic oligonucleotide
  Sense strand starting at position 3069 of SEQ ID NO: 588684
uucuuacgguaugauuaua

SEQ ID NO: 882531 - RNA, 19 nt, Artificial Sequence
  Description of Artificial Sequence: Synthetic oligonucleotide
  Antisense strand to SEQ ID NO: 882530
uauaaucauaccguaagaa

SEQ ID NO: 882532 - RNA, 19 nt, Artificial Sequence
  Description of Artificial Sequence: Synthetic oligonucleotide
  Sense strand starting at position 3132 of SEQ ID NO: 588684
caguguaguuuguaguuaa

SEQ ID NO: 882533 - RNA, 19 nt, Artificial Sequence
  Description of Artificial Sequence: Synthetic oligonucleotide
  Antisense strand to SEQ ID NO: 882532
uuaacuacaaacuacacug

SEQ ID NO: 882534 - RNA, 19 nt, Artificial Sequence
  Description of Artificial Sequence: Synthetic oligonucleotide
  Sense strand starting at position 3622 of SEQ ID NO: 588684
gacucugaggcuggaagau

SEQ ID NO: 882535 - RNA, 19 nt, Artificial Sequence
  Description of Artificial Sequence: Synthetic oligonucleotide
  Antisense strand to SEQ ID NO: 882534
aucuuccagccucagaguc

SEQ ID NO: 882536 - RNA, 19 nt, Artificial Sequence
  Description of Artificial Sequence: Synthetic oligonucleotide
  Sense strand starting at position 3757 of SEQ ID NO: 588684
aaguguaauggaugcacaa

SEQ ID NO: 882537 - RNA, 19 nt, Artificial Sequence
  Description of Artificial Sequence: Synthetic oligonucleotide
  Antisense strand to SEQ ID NO: 882536
uugugcauccauuacacuu

SEQ ID NO: 882538 - RNA, 19 nt, Artificial Sequence
  Description of Artificial Sequence: Synthetic oligonucleotide
  Sense strand starting at position 3759 of SEQ ID NO: 588684
guguaauggaugcacaacu

SEQ ID NO: 882539 - RNA, 19 nt, Artificial Sequence
  Description of Artificial Sequence: Synthetic oligonucleotide
  Antisense strand to SEQ ID NO: 882538
aguugugcauccauuacac

SEQ ID NO: 882540 - RNA, 19 nt, Artificial Sequence
  Description of Artificial Sequence: Synthetic oligonucleotide
  Sense strand starting at position 265 of SEQ ID NO: 588685
cacaauggugccugucuua

SEQ ID NO: 882541 - RNA, 19 nt, Artificial Sequence
  Description of Artificial Sequence: Synthetic oligonucleotide
  Antisense strand to SEQ ID NO: 882540
uaagacaggcaccauugug

SEQ ID NO: 882542 - RNA, 19 nt, Artificial Sequence
  Description of Artificial Sequence: Synthetic oligonucleotide
  Sense strand starting at position 286 of SEQ ID NO: 588685
ggugaggaguccuaggugu

SEQ ID NO: 882543 - RNA, 19 nt, Artificial Sequence
  Description of Artificial Sequence: Synthetic oligonucleotide
  Antisense strand to SEQ ID NO: 882542
acaccuaggacuccucacc

SEQ ID NO: 882544 - RNA, 19 nt, Artificial Sequence
  Description of Artificial Sequence: Synthetic oligonucleotide
  Sense strand starting at position 288 of SEQ ID NO: 588685
ugaggaguccuaggugugu

SEQ ID NO: 882545 - RNA, 19 nt, Artificial Sequence
  Description of Artificial Sequence: Synthetic oligonucleotide
  Antisense strand to SEQ ID NO: 882544
acacaccuaggacuccuca

SEQ ID NO: 882546 - RNA, 19 nt, Artificial Sequence
  Description of Artificial Sequence: Synthetic oligonucleotide
  Sense strand starting at position 503 of SEQ ID NO: 588685
gaugcuaaaugaugucagu

SEQ ID NO: 882547 - RNA, 19 nt, Artificial Sequence
  Description of Artificial Sequence: Synthetic oligonucleotide
  Antisense strand to SEQ ID NO: 882546
acugacaucauuuagcauc

SEQ ID NO: 882548 - RNA, 19 nt, Artificial Sequence
  Description of Artificial Sequence: Synthetic oligonucleotide
  Sense strand starting at position 725 of SEQ ID NO: 588685
ugaggucucuguucuuaug

SEQ ID NO: 882549 - RNA, 19 nt, Artificial Sequence
  Description of Artificial Sequence: Synthetic oligonucleotide
  Antisense strand to SEQ ID NO: 882548
cauaagaacagagaccuca

SEQ ID NO: 882550 - RNA, 19 nt, Artificial Sequence
  Description of Artificial Sequence: Synthetic oligonucleotide
  Sense strand starting at position 753 of SEQ ID NO: 588685
cuaauucucucagugucuu

SEQ ID NO: 882551 - RNA, 19 nt, Artificial Sequence
  Description of Artificial Sequence: Synthetic oligonucleotide
  Antisense strand to SEQ ID NO: 882550
aagacacugagagaauuag

SEQ ID NO: 882552 - RNA, 19 nt, Artificial Sequence
  Description of Artificial Sequence: Synthetic oligonucleotide
  Sense strand starting at position 761 of SEQ ID NO: 588685
cucagugucuucuuaggga

SEQ ID NO: 882553 - RNA, 19 nt, Artificial Sequence
  Description of Artificial Sequence: Synthetic oligonucleotide
  Antisense strand to SEQ ID NO: 882552
ucccuaagaagacacugag

SEQ ID NO: 882554 - RNA, 19 nt, Artificial Sequence
  Description of Artificial Sequence: Synthetic oligonucleotide
  Sense strand starting at position 764 of SEQ ID NO: 588685
agugucuucuuagggauuu

SEQ ID NO: 882555 - RNA, 19 nt, Artificial Sequence
  Description of Artificial Sequence: Synthetic oligonucleotide
  Antisense strand to SEQ ID NO: 882554
aaaucccuaagaagacacu

SEQ ID NO: 882556 - RNA, 19 nt, Artificial Sequence
  Description of Artificial Sequence: Synthetic oligonucleotide
  Sense strand starting at position 985 of SEQ ID NO: 588685
agcacugguucuggcuaaa

SEQ ID NO: 882557 - RNA, 19 nt, Artificial Sequence
  Description of Artificial Sequence: Synthetic oligonucleotide
  Antisense strand to SEQ ID NO: 882556
uuuagccagaaccagugcu

SEQ ID NO: 882558 - RNA, 19 nt, Artificial Sequence
  Description of Artificial Sequence: Synthetic oligonucleotide
  Sense strand starting at position 1027 of SEQ ID NO: 588685
acaguaauguuaucgagga

SEQ ID NO: 882559 - RNA, 19 nt, Artificial Sequence
  Description of Artificial Sequence: Synthetic oligonucleotide
  Antisense strand to SEQ ID NO: 882558
uccucgauaacauuacugu

SEQ ID NO: 882560 - RNA, 19 nt, Artificial Sequence
  Description of Artificial Sequence: Synthetic oligonucleotide
  Sense strand starting at position 1028 of SEQ ID NO: 588685
caguaauguuaucgaggag

SEQ ID NO: 882561 - RNA, 19 nt, Artificial Sequence
  Description of Artificial Sequence: Synthetic oligonucleotide
  Antisense strand to SEQ ID NO: 882560
cuccucgauaacauuacug

SEQ ID NO: 882562 - RNA, 19 nt, Artificial Sequence
  Description of Artificial Sequence: Synthetic oligonucleotide
  Sense strand starting at position 1029 of SEQ ID NO: 588685
aguaauguuaucgaggaga

SEQ ID NO: 882563 - RNA, 19 nt, Artificial Sequence
  Description of Artificial Sequence: Synthetic oligonucleotide
  Antisense strand to SEQ ID NO: 882562
ucuccucgauaacauuacu

SEQ ID NO: 882564 - RNA, 19 nt, Artificial Sequence
  Description of Artificial Sequence: Synthetic oligonucleotide
  Sense strand starting at position 1031 of SEQ ID NO: 588685
uaauguuaucgaggagaag

SEQ ID NO: 882565 - RNA, 19 nt, Artificial Sequence
  Description of Artificial Sequence: Synthetic oligonucleotide
  Antisense strand to SEQ ID NO: 882564
cuucuccucgauaacauua

SEQ ID NO: 882566 - RNA, 19 nt, Artificial Sequence
  Description of Artificial Sequence: Synthetic oligonucleotide
  Sense strand starting at position 1032 of SEQ ID NO: 588685
aauguuaucgaggagaagu

SEQ ID NO: 882567 - RNA, 19 nt, Artificial Sequence
  Description of Artificial Sequence: Synthetic oligonucleotide
  Antisense strand to SEQ ID NO: 882566
acuucuccucgauaacauu

SEQ ID NO: 882568 - RNA, 19 nt, Artificial Sequence
  Description of Artificial Sequence: Synthetic oligonucleotide
  Sense strand starting at position 2414 of SEQ ID NO: 588685
uggcaacagcuaugucaga

SEQ ID NO: 882569 - RNA, 19 nt, Artificial Sequence
  Description of Artificial Sequence: Synthetic oligonucleotide
  Antisense strand to SEQ ID NO: 882568
ucugacauagcuguugcca

SEQ ID NO: 882570 - RNA, 19 nt, Artificial Sequence
  Description of Artificial Sequence: Synthetic oligonucleotide
  Sense strand starting at position 2419 of SEQ ID NO: 588685
acagcuaugucagagccaa

SEQ ID NO: 882571 - RNA, 19 nt, Artificial Sequence
  Description of Artificial Sequence: Synthetic oligonucleotide
  Antisense strand to SEQ ID NO: 882570
uuggcucugacauagcugu

SEQ ID NO: 882572 - RNA, 19 nt, Artificial Sequence
  Description of Artificial Sequence: Synthetic oligonucleotide
  Sense strand starting at position 2667 of SEQ ID NO: 588685
cucgguguauacuguggaa

SEQ ID NO: 882573 - RNA, 19 nt, Artificial Sequence
  Description of Artificial Sequence: Synthetic oligonucleotide
  Antisense strand to SEQ ID NO: 882572
uuccacaguauacaccgag

SEQ ID NO: 882574 - RNA, 19 nt, Artificial Sequence
  Description of Artificial Sequence: Synthetic oligonucleotide
  Sense strand starting at position 2669 of SEQ ID NO: 588685
cgguguauacuguggaaug

SEQ ID NO: 882575 - RNA, 19 nt, Artificial Sequence
  Description of Artificial Sequence: Synthetic oligonucleotide
  Antisense strand to SEQ ID NO: 882574
cauuccacaguauacaccg

SEQ ID NO: 882576 - RNA, 19 nt, Artificial Sequence
  Description of Artificial Sequence: Synthetic oligonucleotide
  Sense strand starting at position 2670 of SEQ ID NO: 588685
gguguauacuguggaauga

SEQ ID NO: 882577 - RNA, 19 nt, Artificial Sequence
  Description of Artificial Sequence: Synthetic oligonucleotide
  Antisense strand to SEQ ID NO: 882576
ucauuccacaguauacacc

SEQ ID NO: 882578 - RNA, 19 nt, Artificial Sequence
  Description of Artificial Sequence: Synthetic oligonucleotide
  Sense strand starting at position 3131 of SEQ ID NO: 588685
gacccugauucuuacgcua

SEQ ID NO: 882579 - RNA, 19 nt, Artificial Sequence
  Description of Artificial Sequence: Synthetic oligonucleotide
  Antisense strand to SEQ ID NO: 882578
uagcguaagaaucaggguc

SEQ ID NO: 882580 - RNA, 19 nt, Artificial Sequence
  Description of Artificial Sequence: Synthetic oligonucleotide
  Sense strand starting at position 3133 of SEQ ID NO: 588685
cccugauucuuacgcuaaa

SEQ ID NO: 882581 - RNA, 19 nt, Artificial Sequence
  Description of Artificial Sequence: Synthetic oligonucleotide
  Antisense strand to SEQ ID NO: 882580
uuuagcguaagaaucaggg

SEQ ID NO: 882582 - RNA, 19 nt, Artificial Sequence
  Description of Artificial Sequence: Synthetic oligonucleotide
  Sense strand starting at position 3134 of SEQ ID NO: 588685
ccugauucuuacgcuaaac

SEQ ID NO: 882583 - RNA, 19 nt, Artificial Sequence
  Description of Artificial Sequence: Synthetic oligonucleotide
  Antisense strand to SEQ ID NO: 882582
guuuagcguaagaaucagg

SEQ ID NO: 882584 - RNA, 19 nt, Artificial Sequence
  Description of Artificial Sequence: Synthetic oligonucleotide
  Sense strand starting at position 3136 of SEQ ID NO: 588685
ugauucuuacgcuaaacac

SEQ ID NO: 882585 - RNA, 19 nt, Artificial Sequence
  Description of Artificial Sequence: Synthetic oligonucleotide
  Antisense strand to SEQ ID NO: 882584
guguuuagcguaagaauca

SEQ ID NO: 882586 - RNA, 19 nt, Artificial Sequence
  Description of Artificial Sequence: Synthetic oligonucleotide
  Sense strand starting at position 3170 of SEQ ID NO: 588685
ucacacagucccuguacua

SEQ ID NO: 882587 - RNA, 19 nt, Artificial Sequence
  Description of Artificial Sequence: Synthetic oligonucleotide
  Antisense strand to SEQ ID NO: 882586
uaguacagggacuguguga

SEQ ID NO: 882588 - RNA, 19 nt, Artificial Sequence
  Description of Artificial Sequence: Synthetic oligonucleotide
  Sense strand starting at position 3481 of SEQ ID NO: 588685
agcggauccuccucaguau

SEQ ID NO: 882589 - RNA, 19 nt, Artificial Sequence
  Description of Artificial Sequence: Synthetic oligonucleotide
  Antisense strand to SEQ ID NO: 882588
auacugaggaggauccgcu

SEQ ID NO: 882590 - RNA, 19 nt, Artificial Sequence
  Description of Artificial Sequence: Synthetic oligonucleotide
  Sense strand starting at position 3488 of SEQ ID NO: 588685
ccuccucaguaugguugaa

SEQ ID NO: 882591 - RNA, 19 nt, Artificial Sequence
  Description of Artificial Sequence: Synthetic oligonucleotide
  Antisense strand to SEQ ID NO: 882590
uucaaccauacugaggagg

SEQ ID NO: 882592 - RNA, 19 nt, Artificial Sequence
  Description of Artificial Sequence: Synthetic oligonucleotide
  Sense strand starting at position 3507 of SEQ ID NO: 588685
aauggugucuuacugaaag

SEQ ID NO: 882593 - RNA, 19 nt, Artificial Sequence
  Description of Artificial Sequence: Synthetic oligonucleotide
  Antisense strand to SEQ ID NO: 882592
cuuucaguaagacaccauu

SEQ ID NO: 882594 - RNA, 19 nt, Artificial Sequence
  Description of Artificial Sequence: Synthetic oligonucleotide
  Sense strand starting at position 3509 of SEQ ID NO: 588685
uggugucuuacugaaagua

SEQ ID NO: 882595 - RNA, 19 nt, Artificial Sequence
  Description of Artificial Sequence: Synthetic oligonucleotide
  Antisense strand to SEQ ID NO: 882594
uacuuucaguaagacacca

SEQ ID NO: 882596 - RNA, 19 nt, Artificial Sequence
  Description of Artificial Sequence: Synthetic oligonucleotide
  Sense strand starting at position 3743 of SEQ ID NO: 588685
ggaguggugccugaggaca

SEQ ID NO: 882597 - RNA, 19 nt, Artificial Sequence
  Description of Artificial Sequence: Synthetic oligonucleotide
  Antisense strand to SEQ ID NO: 882596
uguccucaggcaccacucc

SEQ ID NO: 882598 - RNA, 19 nt, Artificial Sequence
  Description of Artificial Sequence: Synthetic oligonucleotide
  Sense strand starting at position 3798 of SEQ ID NO: 588685
auggucuuaucacccugua

SEQ ID NO: 882599 - RNA, 19 nt, Artificial Sequence
  Description of Artificial Sequence: Synthetic oligonucleotide
  Antisense strand to SEQ ID NO: 882598
uacagggugauaagaccau

SEQ ID NO: 882600 - RNA, 19 nt, Artificial Sequence
  Description of Artificial Sequence: Synthetic oligonucleotide
  Sense strand starting at position 3904 of SEQ ID NO: 588685
acaagaggcugucaaucau

SEQ ID NO: 882601 - RNA, 19 nt, Artificial Sequence
  Description of Artificial Sequence: Synthetic oligonucleotide
  Antisense strand to SEQ ID NO: 882600
augauugacagccucuugu

SEQ ID NO: 882602 - RNA, 19 nt, Artificial Sequence
  Description of Artificial Sequence: Synthetic oligonucleotide
  Sense strand starting at position 20 of SEQ ID NO: 588686
accugucauguuuaaccau

SEQ ID NO: 882603 - RNA, 19 nt, Artificial Sequence
  Description of Artificial Sequence: Synthetic oligonucleotide
  Antisense strand to SEQ ID NO: 882602
augguuaaacaugacaggu

SEQ ID NO: 882604 - RNA, 19 nt, Artificial Sequence
  Description of Artificial Sequence: Synthetic oligonucleotide
  Sense strand starting at position 23 of SEQ ID NO: 588686
ugucauguuuaaccauaag

SEQ ID NO: 882605 - RNA, 19 nt, Artificial Sequence
  Description of Artificial Sequence: Synthetic oligonucleotide
  Antisense strand to SEQ ID NO: 882604
cuuaugguuaaacaugaca

SEQ ID NO: 882606 - RNA, 19 nt, Artificial Sequence
  Description of Artificial Sequence: Synthetic oligonucleotide
  Sense strand starting at position 34 of SEQ ID NO: 588686
accauaagcuuucugaugu

SEQ ID NO: 882607 - RNA, 19 nt, Artificial Sequence
  Description of Artificial Sequence: Synthetic oligonucleotide
  Antisense strand to SEQ ID NO: 882606
acaucagaaagcuuauggu

SEQ ID NO: 882608 - RNA, 19 nt, Artificial Sequence
  Description of Artificial Sequence: Synthetic oligonucleotide
  Sense strand starting at position 40 of SEQ ID NO: 588686
agcuuucugaugugaagga

SEQ ID NO: 882609 - RNA, 19 nt, Artificial Sequence
  Description of Artificial Sequence: Synthetic oligonucleotide
  Antisense strand to SEQ ID NO: 882608
uccuucacaucagaaagcu

SEQ ID NO: 882610 - RNA, 19 nt, Artificial Sequence
  Description of Artificial Sequence: Synthetic oligonucleotide
  Sense strand starting at position 71 of SEQ ID NO: 588686
cugggaauguauccacaau

SEQ ID NO: 882611 - RNA, 19 nt, Artificial Sequence
  Description of Artificial Sequence: Synthetic oligonucleotide
  Antisense strand to SEQ ID NO: 882610
auuguggauacauucccag

SEQ ID NO: 882612 - RNA, 19 nt, Artificial Sequence
  Description of Artificial Sequence: Synthetic oligonucleotide
  Sense strand starting at position 139 of SEQ ID NO: 588686
auacauuacuguguacaca

SEQ ID NO: 882613 - RNA, 19 nt, Artificial Sequence
  Description of Artificial Sequence: Synthetic oligonucleotide
  Antisense strand to SEQ ID NO: 882612
uguguacacaguaauguau

SEQ ID NO: 882614 - RNA, 19 nt, Artificial Sequence
  Description of Artificial Sequence: Synthetic oligonucleotide
  Sense strand starting at position 251 of SEQ ID NO: 588686
aagggcauucuuuaacgua

SEQ ID NO: 882615 - RNA, 19 nt, Artificial Sequence
  Description of Artificial Sequence: Synthetic oligonucleotide
  Antisense strand to SEQ ID NO: 882614
uacguuaaagaaugcccuu

SEQ ID NO: 882616 - RNA, 19 nt, Artificial Sequence
  Description of Artificial Sequence: Synthetic oligonucleotide
  Sense strand starting at position 278 of SEQ ID NO: 588686
ggcagcaggugaucagaaa

SEQ ID NO: 882617 - RNA, 19 nt, Artificial Sequence
  Description of Artificial Sequence: Synthetic oligonucleotide
  Antisense strand to SEQ ID NO: 882616
uuucugaucaccugcugcc

SEQ ID NO: 882618 - RNA, 19 nt, Artificial Sequence
  Description of Artificial Sequence: Synthetic oligonucleotide
  Sense strand starting at position 335 of SEQ ID NO: 588686
acaacucugcacuguuaga

SEQ ID NO: 882619 - RNA, 19 nt, Artificial Sequence
  Description of Artificial Sequence: Synthetic oligonucleotide
  Antisense strand to SEQ ID NO: 882618
ucuaacagugcagaguugu

SEQ ID NO: 882620 - RNA, 19 nt, Artificial Sequence
  Description of Artificial Sequence: Synthetic oligonucleotide
  Sense strand starting at position 345 of SEQ ID NO: 588686
acuguuagauacuuaaggu

SEQ ID NO: 882621 - RNA, 19 nt, Artificial Sequence
  Description of Artificial Sequence: Synthetic oligonucleotide
  Antisense strand to SEQ ID NO: 882620
accuuaaguaucuaacagu

SEQ ID NO: 882622 - RNA, 19 nt, Artificial Sequence
  Description of Artificial Sequence: Synthetic oligonucleotide
  Sense strand starting at position 414 of SEQ ID NO: 588686
auggaaauuucucaucaga

SEQ ID NO: 882623 - RNA, 19 nt, Artificial Sequence
  Description of Artificial Sequence: Synthetic oligonucleotide
  Antisense strand to SEQ ID NO: 882622
ucugaugagaaauuuccau

SEQ ID NO: 882624 - RNA, 19 nt, Artificial Sequence
  Description of Artificial Sequence: Synthetic oligonucleotide
  Sense strand starting at position 532 of SEQ ID NO: 588686
agaugucaguccucaguga

SEQ ID NO: 882625 - RNA, 19 nt, Artificial Sequence
  Description of Artificial Sequence: Synthetic oligonucleotide
  Antisense strand to SEQ ID NO: 882624
ucacugaggacugacaucu

SEQ ID NO: 882626 - RNA, 19 nt, Artificial Sequence
  Description of Artificial Sequence: Synthetic oligonucleotide
  Sense strand starting at position 533 of SEQ ID NO: 588686
gaugucaguccucagugaa

SEQ ID NO: 882627 - RNA, 19 nt, Artificial Sequence
  Description of Artificial Sequence: Synthetic oligonucleotide
  Antisense strand to SEQ ID NO: 882626
uucacugaggacugacauc

SEQ ID NO: 882628 - RNA, 19 nt, Artificial Sequence
  Description of Artificial Sequence: Synthetic oligonucleotide
  Sense strand starting at position 551 of SEQ ID NO: 588686
agcacuauuccacauacgu

SEQ ID NO: 882629 - RNA, 19 nt, Artificial Sequence
  Description of Artificial Sequence: Synthetic oligonucleotide
  Antisense strand to SEQ ID NO: 882628
acguauguggaauagugcu

SEQ ID NO: 882630 - RNA, 19 nt, Artificial Sequence
  Description of Artificial Sequence: Synthetic oligonucleotide
  Sense strand starting at position 568 of SEQ ID NO: 588686
guacguacaugauuaucaa

SEQ ID NO: 882631 - RNA, 19 nt, Artificial Sequence
  Description of Artificial Sequence: Synthetic oligonucleotide
  Antisense strand to SEQ ID NO: 882630
uugauaaucauguacguac

SEQ ID NO: 882632 - RNA, 19 nt, Artificial Sequence
  Description of Artificial Sequence: Synthetic oligonucleotide
  Sense strand starting at position 571 of SEQ ID NO: 588686
cguacaugauuaucaaaua

SEQ ID NO: 882633 - RNA, 19 nt, Artificial Sequence
  Description of Artificial Sequence: Synthetic oligonucleotide
  Antisense strand to SEQ ID NO: 882632
uauuugauaaucauguacg

SEQ ID NO: 882634 - RNA, 19 nt, Artificial Sequence
  Description of Artificial Sequence: Synthetic oligonucleotide
  Sense strand starting at position 641 of SEQ ID NO: 588686
guaugaaagcuauagaguu

SEQ ID NO: 882635 - RNA, 19 nt, Artificial Sequence
  Description of Artificial Sequence: Synthetic oligonucleotide
  Antisense strand to SEQ ID NO: 882634
aacucuauagcuuucauac

SEQ ID NO: 882636 - RNA, 19 nt, Artificial Sequence
  Description of Artificial Sequence: Synthetic oligonucleotide
  Sense strand starting at position 748 of SEQ ID NO: 588686
agcauuucgcuauaccgaa

SEQ ID NO: 882637 - RNA, 19 nt, Artificial Sequence
  Description of Artificial Sequence: Synthetic oligonucleotide
  Antisense strand to SEQ ID NO: 882636
uucgguauagcgaaaugcu

SEQ ID NO: 882638 - RNA, 19 nt, Artificial Sequence
  Description of Artificial Sequence: Synthetic oligonucleotide
  Sense strand starting at position 767 of SEQ ID NO: 588686
auuacacuaugggaagaaa

SEQ ID NO: 882639 - RNA, 19 nt, Artificial Sequence
  Description of Artificial Sequence: Synthetic oligonucleotide
  Antisense strand to SEQ ID NO: 882638
uuucuucccauaguguaau

SEQ ID NO: 882640 - RNA, 19 nt, Artificial Sequence
  Description of Artificial Sequence: Synthetic oligonucleotide
  Sense strand starting at position 876 of SEQ ID NO: 588686
aguauugaaauacgucagu

SEQ ID NO: 882641 - RNA, 19 nt, Artificial Sequence
  Description of Artificial Sequence: Synthetic oligonucleotide
  Antisense strand to SEQ ID NO: 882640
acugacguauuucaauacu

SEQ ID NO: 882642 - RNA, 19 nt, Artificial Sequence
  Description of Artificial Sequence: Synthetic oligonucleotide
  Sense strand starting at position 924 of SEQ ID NO: 588686
gcggaacaguauguuacaa

SEQ ID NO: 882643 - RNA, 19 nt, Artificial Sequence
  Description of Artificial Sequence: Synthetic oligonucleotide
  Antisense strand to SEQ ID NO: 882642
uuguaacauacuguuccgc

SEQ ID NO: 882644 - RNA, 19 nt, Artificial Sequence
  Description of Artificial Sequence: Synthetic oligonucleotide
  Sense strand starting at position 1058 of SEQ ID NO: 588686
ugaggaauuuaguaaucuc

SEQ ID NO: 882645 - RNA, 19 nt, Artificial Sequence
  Description of Artificial Sequence: Synthetic oligonucleotide
  Antisense strand to SEQ ID NO: 882644
gagauuacuaaauuccuca

SEQ ID NO: 882646 - RNA, 19 nt, Artificial Sequence
  Description of Artificial Sequence: Synthetic oligonucleotide
  Sense strand starting at position 1101 of SEQ ID NO: 588686
acgucuuugggagagcaaa

SEQ ID NO: 882647 - RNA, 19 nt, Artificial Sequence
  Description of Artificial Sequence: Synthetic oligonucleotide
  Antisense strand to SEQ ID NO: 882646
uuugcucucccaaagacgu

SEQ ID NO: 882648 - RNA, 19 nt, Artificial Sequence
  Description of Artificial Sequence: Synthetic oligonucleotide
  Sense strand starting at position 1234 of SEQ ID NO: 588686
ccaagaucccgaggucaau

SEQ ID NO: 882649 - RNA, 19 nt, Artificial Sequence
  Description of Artificial Sequence: Synthetic oligonucleotide
  Antisense strand to SEQ ID NO: 882648
auugaccucgggaucuugg

SEQ ID NO: 882650 - RNA, 19 nt, Artificial Sequence
  Description of Artificial Sequence: Synthetic oligonucleotide
  Sense strand starting at position 2696 of SEQ ID NO: 588686
gaacgcugccuccaagaga

SEQ ID NO: 882651 - RNA, 19 nt, Artificial Sequence
  Description of Artificial Sequence: Synthetic oligonucleotide
  Antisense strand to SEQ ID NO: 882650
ucucuuggaggcagcguuc

SEQ ID NO: 882652 - RNA, 19 nt, Artificial Sequence
  Description of Artificial Sequence: Synthetic oligonucleotide
  Sense strand starting at position 2776 of SEQ ID NO: 588686
ggucucauuccucuagcgu

SEQ ID NO: 882653 - RNA, 19 nt, Artificial Sequence
  Description of Artificial Sequence: Synthetic oligonucleotide
  Antisense strand to SEQ ID NO: 882652
acgcuagaggaaugagacc

SEQ ID NO: 882654 - RNA, 19 nt, Artificial Sequence
  Description of Artificial Sequence: Synthetic oligonucleotide
  Sense strand starting at position 2934 of SEQ ID NO: 588686
uuacgauuucaguguccgu

SEQ ID NO: 882655 - RNA, 19 nt, Artificial Sequence
  Description of Artificial Sequence: Synthetic oligonucleotide
  Antisense strand to SEQ ID NO: 882654
acggacacugaaaucguaa

SEQ ID NO: 882656 - RNA, 19 nt, Artificial Sequence
  Description of Artificial Sequence: Synthetic oligonucleotide
  Sense strand starting at position 2937 of SEQ ID NO: 588686
cgauuucaguguccguaaa

SEQ ID NO: 882657 - RNA, 19 nt, Artificial Sequence
  Description of Artificial Sequence: Synthetic oligonucleotide
  Antisense strand to SEQ ID NO: 882656
uuuacggacacugaaaucg

SEQ ID NO: 882658 - RNA, 19 nt, Artificial Sequence
  Description of Artificial Sequence: Synthetic oligonucleotide
  Sense strand starting at position 3094 of SEQ ID NO: 588686
cccugaucuaucggauuga

SEQ ID NO: 882659 - RNA, 19 nt, Artificial Sequence
  Description of Artificial Sequence: Synthetic oligonucleotide
  Antisense strand to SEQ ID NO: 882658
ucaauccgauagaucaggg

SEQ ID NO: 882660 - RNA, 19 nt, Artificial Sequence
  Description of Artificial Sequence: Synthetic oligonucleotide
  Sense strand starting at position 3098 of SEQ ID NO: 588686
gaucuaucggauugaaucu

SEQ ID NO: 882661 - RNA, 19 nt, Artificial Sequence
  Description of Artificial Sequence: Synthetic oligonucleotide
  Antisense strand to SEQ ID NO: 882660
agauucaauccgauagauc

SEQ ID NO: 882662 - RNA, 19 nt, Artificial Sequence
  Description of Artificial Sequence: Synthetic oligonucleotide
  Sense strand starting at position 3110 of SEQ ID NO: 588686
ugaaucuucggugggagga

SEQ ID NO: 882663 - RNA, 19 nt, Artificial Sequence
  Description of Artificial Sequence: Synthetic oligonucleotide
  Antisense strand to SEQ ID NO: 882662
uccucccaccgaagauuca

SEQ ID NO: 882664 - RNA, 19 nt, Artificial Sequence
  Description of Artificial Sequence: Synthetic oligonucleotide
  Sense strand starting at position 3111 of SEQ ID NO: 588686
gaaucuucggugggaggaa

SEQ ID NO: 882665 - RNA, 19 nt, Artificial Sequence
  Description of Artificial Sequence: Synthetic oligonucleotide
  Antisense strand to SEQ ID NO: 882664
uuccucccaccgaagauuc

SEQ ID NO: 882666 - RNA, 19 nt, Artificial Sequence
  Description of Artificial Sequence: Synthetic oligonucleotide
  Sense strand starting at position 3638 of SEQ ID NO: 588686
gcccuaucuccuggaagaa

SEQ ID NO: 882667 - RNA, 19 nt, Artificial Sequence
  Description of Artificial Sequence: Synthetic oligonucleotide
  Antisense strand to SEQ ID NO: 882666
uucuuccaggagauagggc

SEQ ID NO: 882668 - RNA, 19 nt, Artificial Sequence
  Description of Artificial Sequence: Synthetic oligonucleotide
  Sense strand starting at position 3690 of SEQ ID NO: 588686
guaagaaguccuggaaaca

SEQ ID NO: 882669 - RNA, 19 nt, Artificial Sequence
  Description of Artificial Sequence: Synthetic oligonucleotide
  Antisense strand to SEQ ID NO: 882668
uguuuccaggacuucuuac

SEQ ID NO: 882670 - RNA, 19 nt, Artificial Sequence
  Description of Artificial Sequence: Synthetic oligonucleotide
  Sense strand starting at position 3729 of SEQ ID NO: 588686
cagacuguccuguagauac

SEQ ID NO: 882671 - RNA, 19 nt, Artificial Sequence
  Description of Artificial Sequence: Synthetic oligonucleotide
  Antisense strand to SEQ ID NO: 882670
guaucuacaggacagucug

SEQ ID NO: 882672 - RNA, 19 nt, Artificial Sequence
  Description of Artificial Sequence: Synthetic oligonucleotide
  Sense strand starting at position 3731 of SEQ ID NO: 588686
gacuguccuguagauacau

SEQ ID NO: 882673 - RNA, 19 nt, Artificial Sequence
  Description of Artificial Sequence: Synthetic oligonucleotide
  Antisense strand to SEQ ID NO: 882672
auguaucuacaggacaguc

SEQ ID NO: 882674 - RNA, 19 nt, Artificial Sequence
  Description of Artificial Sequence: Synthetic oligonucleotide
  Sense strand starting at position 3805 of SEQ ID NO: 588686
cugcguuagagaguucgua

SEQ ID NO: 882675 - RNA, 19 nt, Artificial Sequence
  Description of Artificial Sequence: Synthetic oligonucleotide
  Antisense strand to SEQ ID NO: 882674
uacgaacucucuaacgcag

SEQ ID NO: 882676 - RNA, 19 nt, Artificial Sequence
  Description of Artificial Sequence: Synthetic oligonucleotide
  Sense strand starting at position 3852 of SEQ ID NO: 588686
cugaccauucugcaguuua

SEQ ID NO: 882677 - RNA, 19 nt, Artificial Sequence
  Description of Artificial Sequence: Synthetic oligonucleotide
  Antisense strand to SEQ ID NO: 882676
uaaacugcagaauggucag

SEQ ID NO: 882678 - RNA, 19 nt, Artificial Sequence
  Description of Artificial Sequence: Synthetic oligonucleotide
  Sense strand starting at position 3879 of SEQ ID NO: 588686
aaggcaaguguuuaguagu

SEQ ID NO: 882679 - RNA, 19 nt, Artificial Sequence
  Description of Artificial Sequence: Synthetic oligonucleotide
  Antisense strand to SEQ ID NO: 882678
acuacuaaacacuugccuu

SEQ ID NO: 882680 - RNA, 19 nt, Artificial Sequence
  Description of Artificial Sequence: Synthetic oligonucleotide
  Sense strand starting at position 3886 of SEQ ID NO: 588686
guguuuaguagugaaauga

SEQ ID NO: 882681 - RNA, 19 nt, Artificial Sequence
  Description of Artificial Sequence: Synthetic oligonucleotide
  Antisense strand to SEQ ID NO: 882680
ucauuucacuacuaaacac

SEQ ID NO: 882682 - RNA, 19 nt, Artificial Sequence
  Description of Artificial Sequence: Synthetic oligonucleotide
  Sense strand starting at position 58 of SEQ ID NO: 588687
uguugcaaauuguuaggaa

SEQ ID NO: 882683 - RNA, 19 nt, Artificial Sequence
  Description of Artificial Sequence: Synthetic oligonucleotide
  Antisense strand to SEQ ID NO: 882682
uuccuaacaauuugcaaca

SEQ ID NO: 882684 - RNA, 19 nt, Artificial Sequence
  Description of Artificial Sequence: Synthetic oligonucleotide
  Sense strand starting at position 62 of SEQ ID NO: 588687
gcaaauuguuaggaagaau

SEQ ID NO: 882685 - RNA, 19 nt, Artificial Sequence
  Description of Artificial Sequence: Synthetic oligonucleotide
  Antisense strand to SEQ ID NO: 882684
auucuuccuaacaauuugc

SEQ ID NO: 882686 - RNA, 19 nt, Artificial Sequence
  Description of Artificial Sequence: Synthetic oligonucleotide
  Sense strand starting at position 582 of SEQ ID NO: 588687
cagagugaacagugcaaca

SEQ ID NO: 882687 - RNA, 19 nt, Artificial Sequence
  Description of Artificial Sequence: Synthetic oligonucleotide
  Antisense strand to SEQ ID NO: 882686
uguugcacuguucacucug

SEQ ID NO: 882688 - RNA, 19 nt, Artificial Sequence
  Description of Artificial Sequence: Synthetic oligonucleotide
  Sense strand starting at position 649 of SEQ ID NO: 588687
augucaugccaagaauuag

SEQ ID NO: 882689 - RNA, 19 nt, Artificial Sequence
  Description of Artificial Sequence: Synthetic oligonucleotide
  Antisense strand to SEQ ID NO: 882688
cuaauucuuggcaugacau

SEQ ID NO: 882690 - RNA, 19 nt, Artificial Sequence
  Description of Artificial Sequence: Synthetic oligonucleotide
  Sense strand starting at position 712 of SEQ ID NO: 588687
ucagguugaccggaguaaa

SEQ ID NO: 882691 - RNA, 19 nt, Artificial Sequence
  Description of Artificial Sequence: Synthetic oligonucleotide
  Antisense strand to SEQ ID NO: 882690
uuuacuccggucaaccuga

SEQ ID NO: 882692 - RNA, 19 nt, Artificial Sequence
  Description of Artificial Sequence: Synthetic oligonucleotide
  Sense strand starting at position 860 of SEQ ID NO: 588687
acucacaguugaucuugaa

SEQ ID NO: 882693 - RNA, 19 nt, Artificial Sequence
  Description of Artificial Sequence: Synthetic oligonucleotide
  Antisense strand to SEQ ID NO: 882692
uucaagaucaacugugagu

SEQ ID NO: 882694 - RNA, 19 nt, Artificial Sequence
  Description of Artificial Sequence: Synthetic oligonucleotide
  Sense strand starting at position 926 of SEQ ID NO: 588687
agcuguuguucucccugaa

SEQ ID NO: 882695 - RNA, 19 nt, Artificial Sequence
  Description of Artificial Sequence: Synthetic oligonucleotide
  Antisense strand to SEQ ID NO: 882694
uucagggagaacaacagcu

SEQ ID NO: 882696 - RNA, 19 nt, Artificial Sequence
  Description of Artificial Sequence: Synthetic oligonucleotide
  Sense strand starting at position 929 of SEQ ID NO: 588687
uguuguucucccugaaagg

SEQ ID NO: 882697 - RNA, 19 nt, Artificial Sequence
  Description of Artificial Sequence: Synthetic oligonucleotide
  Antisense strand to SEQ ID NO: 882696
ccuuucagggagaacaaca

SEQ ID NO: 882698 - RNA, 19 nt, Artificial Sequence
  Description of Artificial Sequence: Synthetic oligonucleotide
  Sense strand starting at position 930 of SEQ ID NO: 588687
guuguucucccugaaaggu

SEQ ID NO: 882699 - RNA, 19 nt, Artificial Sequence
  Description of Artificial Sequence: Synthetic oligonucleotide
  Antisense strand to SEQ ID NO: 882698
accuuucagggagaacaac

SEQ ID NO: 882700 - RNA, 19 nt, Artificial Sequence
  Description of Artificial Sequence: Synthetic oligonucleotide
  Sense strand starting at position 1300 of SEQ ID NO: 588687
gcccgucucaaugaugaga

SEQ ID NO: 882701 - RNA, 19 nt, Artificial Sequence
  Description of Artificial Sequence: Synthetic oligonucleotide
  Antisense strand to SEQ ID NO: 882700
ucucaucauugagacgggc

SEQ ID NO: 882702 - RNA, 19 nt, Artificial Sequence
  Description of Artificial Sequence: Synthetic oligonucleotide
  Sense strand starting at position 1534 of SEQ ID NO: 588687
ggcugagucuaacugggau

SEQ ID NO: 882703 - RNA, 19 nt, Artificial Sequence
  Description of Artificial Sequence: Synthetic oligonucleotide
  Antisense strand to SEQ ID NO: 882702
aucccaguuagacucagcc

SEQ ID NO: 882704 - RNA, 19 nt, Artificial Sequence
  Description of Artificial Sequence: Synthetic oligonucleotide
  Sense strand starting at position 1566 of SEQ ID NO: 588687
auuggaugguugucugcua

SEQ ID NO: 882705 - RNA, 19 nt, Artificial Sequence
  Description of Artificial Sequence: Synthetic oligonucleotide
  Antisense strand to SEQ ID NO: 882704
uagcagacaaccauccaau

SEQ ID NO: 882706 - RNA, 19 nt, Artificial Sequence
  Description of Artificial Sequence: Synthetic oligonucleotide
  Sense strand starting at position 1567 of SEQ ID NO: 588687
uuggaugguugucugcuau

SEQ ID NO: 882707 - RNA, 19 nt, Artificial Sequence
  Description of Artificial Sequence: Synthetic oligonucleotide
  Antisense strand to SEQ ID NO: 882706
auagcagacaaccauccaa

SEQ ID NO: 882708 - RNA, 19 nt, Artificial Sequence
  Description of Artificial Sequence: Synthetic oligonucleotide
  Sense strand starting at position 1586 of SEQ ID NO: 588687
cuaccagauccugggcuau

SEQ ID NO: 882709 - RNA, 19 nt, Artificial Sequence
  Description of Artificial Sequence: Synthetic oligonucleotide
  Antisense strand to SEQ ID NO: 882708
auagcccaggaucugguag

SEQ ID NO: 882710 - RNA, 19 nt, Artificial Sequence
  Description of Artificial Sequence: Synthetic oligonucleotide
  Sense strand starting at position 1588 of SEQ ID NO: 588687
accagauccugggcuauga

SEQ ID NO: 882711 - RNA, 19 nt, Artificial Sequence
  Description of Artificial Sequence: Synthetic oligonucleotide
  Antisense strand to SEQ ID NO: 882710
ucauagcccaggaucuggu

SEQ ID NO: 882712 - RNA, 19 nt, Artificial Sequence
  Description of Artificial Sequence: Synthetic oligonucleotide
  Sense strand starting at position 1592 of SEQ ID NO: 588687
gauccugggcuaugaaauu

SEQ ID NO: 882713 - RNA, 19 nt, Artificial Sequence
  Description of Artificial Sequence: Synthetic oligonucleotide
  Antisense strand to SEQ ID NO: 882712
aauuucauagcccaggauc

SEQ ID NO: 882714 - RNA, 19 nt, Artificial Sequence
  Description of Artificial Sequence: Synthetic oligonucleotide
  Sense strand starting at position 1622 of SEQ ID NO: 588687
aaaugaccagugugugcua

SEQ ID NO: 882715 - RNA, 19 nt, Artificial Sequence
  Description of Artificial Sequence: Synthetic oligonucleotide
  Antisense strand to SEQ ID NO: 882714
uagcacacacuggucauuu

SEQ ID NO: 882716 - RNA, 19 nt, Artificial Sequence
  Description of Artificial Sequence: Synthetic oligonucleotide
  Sense strand starting at position 1635 of SEQ ID NO: 588687
gugcuaacucaggaguguu

SEQ ID NO: 882717 - RNA, 19 nt, Artificial Sequence
  Description of Artificial Sequence: Synthetic oligonucleotide
  Antisense strand to SEQ ID NO: 882716
aacacuccugaguuagcac

SEQ ID NO: 882718 - RNA, 19 nt, Artificial Sequence
  Description of Artificial Sequence: Synthetic oligonucleotide
  Sense strand starting at position 2071 of SEQ ID NO: 588687
ccaugugauuccucgaacc

SEQ ID NO: 882719 - RNA, 19 nt, Artificial Sequence
  Description of Artificial Sequence: Synthetic oligonucleotide
  Antisense strand to SEQ ID NO: 882718
gguucgaggaaucacaugg

SEQ ID NO: 882720 - RNA, 19 nt, Artificial Sequence
  Description of Artificial Sequence: Synthetic oligonucleotide
  Sense strand starting at position 2073 of SEQ ID NO: 588687
augugauuccucgaaccug

SEQ ID NO: 882721 - RNA, 19 nt, Artificial Sequence
  Description of Artificial Sequence: Synthetic oligonucleotide
  Antisense strand to SEQ ID NO: 882720
cagguucgaggaaucacau

SEQ ID NO: 882722 - RNA, 19 nt, Artificial Sequence
  Description of Artificial Sequence: Synthetic oligonucleotide
  Sense strand starting at position 2405 of SEQ ID NO: 588687
gacugacugcacggucaua

SEQ ID NO: 882723 - RNA, 19 nt, Artificial Sequence
  Description of Artificial Sequence: Synthetic oligonucleotide
  Antisense strand to SEQ ID NO: 882722
uaugaccgugcagucaguc

SEQ ID NO: 882724 - RNA, 19 nt, Artificial Sequence
  Description of Artificial Sequence: Synthetic oligonucleotide
  Sense strand starting at position 2417 of SEQ ID NO: 588687
ggucauaauccugaccugu

SEQ ID NO: 882725 - RNA, 19 nt, Artificial Sequence
  Description of Artificial Sequence: Synthetic oligonucleotide
  Antisense strand to SEQ ID NO: 882724
acaggucaggauuaugacc

SEQ ID NO: 882726 - RNA, 19 nt, Artificial Sequence
  Description of Artificial Sequence: Synthetic oligonucleotide
  Sense strand starting at position 2520 of SEQ ID NO: 588687
acuguuucucucugacuca

SEQ ID NO: 882727 - RNA, 19 nt, Artificial Sequence
  Description of Artificial Sequence: Synthetic oligonucleotide
  Antisense strand to SEQ ID NO: 882726
ugagucagagagaaacagu

SEQ ID NO: 882728 - RNA, 19 nt, Artificial Sequence
  Description of Artificial Sequence: Synthetic oligonucleotide
  Sense strand starting at position 2593 of SEQ ID NO: 588687
gucuauauuggauguacuu

SEQ ID NO: 882729 - RNA, 19 nt, Artificial Sequence
  Description of Artificial Sequence: Synthetic oligonucleotide
  Antisense strand to SEQ ID NO: 882728
aaguacauccaauauagac

SEQ ID NO: 882730 - RNA, 19 nt, Artificial Sequence
  Description of Artificial Sequence: Synthetic oligonucleotide
  Sense strand starting at position 2620 of SEQ ID NO: 588687
agggaagcaucacuuugua

SEQ ID NO: 882731 - RNA, 19 nt, Artificial Sequence
  Description of Artificial Sequence: Synthetic oligonucleotide
  Antisense strand to SEQ ID NO: 882730
uacaaagugaugcuucccu

SEQ ID NO: 882732 - RNA, 19 nt, Artificial Sequence
  Description of Artificial Sequence: Synthetic oligonucleotide
  Sense strand starting at position 2799 of SEQ ID NO: 588687
agguauaccugucucuauu

SEQ ID NO: 882733 - RNA, 19 nt, Artificial Sequence
  Description of Artificial Sequence: Synthetic oligonucleotide
  Antisense strand to SEQ ID NO: 882732
aauagagacagguauaccu

SEQ ID NO: 882734 - RNA, 19 nt, Artificial Sequence
  Description of Artificial Sequence: Synthetic oligonucleotide
  Sense strand starting at position 2805 of SEQ ID NO: 588687
accugucucuauucgcaua

SEQ ID NO: 882735 - RNA, 19 nt, Artificial Sequence
  Description of Artificial Sequence: Synthetic oligonucleotide
  Antisense strand to SEQ ID NO: 882734
uaugcgaauagagacaggu

SEQ ID NO: 882736 - RNA, 19 nt, Artificial Sequence
  Description of Artificial Sequence: Synthetic oligonucleotide
  Sense strand starting at position 2807 of SEQ ID NO: 588687
cugucucuauucgcauaua

SEQ ID NO: 882737 - RNA, 19 nt, Artificial Sequence
  Description of Artificial Sequence: Synthetic oligonucleotide
  Antisense strand to SEQ ID NO: 882736
uauaugcgaauagagacag

SEQ ID NO: 882738 - RNA, 19 nt, Artificial Sequence
  Description of Artificial Sequence: Synthetic oligonucleotide
  Sense strand starting at position 2928 of SEQ ID NO: 588687
cacagugucaaggaguaga

SEQ ID NO: 882739 - RNA, 19 nt, Artificial Sequence
  Description of Artificial Sequence: Synthetic oligonucleotide
  Antisense strand to SEQ ID NO: 882738
ucuacuccuugacacugug

SEQ ID NO: 882740 - RNA, 19 nt, Artificial Sequence
  Description of Artificial Sequence: Synthetic oligonucleotide
  Sense strand starting at position 3084 of SEQ ID NO: 588687
auguguucaugggcuggaa

SEQ ID NO: 882741 - RNA, 19 nt, Artificial Sequence
  Description of Artificial Sequence: Synthetic oligonucleotide
  Antisense strand to SEQ ID NO: 882740
uuccagcccaugaacacau

SEQ ID NO: 882742 - RNA, 19 nt, Artificial Sequence
  Description of Artificial Sequence: Synthetic oligonucleotide
  Sense strand starting at position 3119 of SEQ ID NO: 588687
gguguuagcucuccucaac

SEQ ID NO: 882743 - RNA, 19 nt, Artificial Sequence
  Description of Artificial Sequence: Synthetic oligonucleotide
  Antisense strand to SEQ ID NO: 882742
guugaggagagcuaacacc

SEQ ID NO: 882744 - RNA, 19 nt, Artificial Sequence
  Description of Artificial Sequence: Synthetic oligonucleotide
  Sense strand starting at position 3626 of SEQ ID NO: 588687
aguauaaagaguuagucua

SEQ ID NO: 882745 - RNA, 19 nt, Artificial Sequence
  Description of Artificial Sequence: Synthetic oligonucleotide
  Antisense strand to SEQ ID NO: 882744
uagacuaacucuuuauacu

SEQ ID NO: 882746 - RNA, 19 nt, Artificial Sequence
  Description of Artificial Sequence: Synthetic oligonucleotide
  Sense strand starting at position 3634 of SEQ ID NO: 588687
gaguuagucuacccaaguu

SEQ ID NO: 882747 - RNA, 19 nt, Artificial Sequence
  Description of Artificial Sequence: Synthetic oligonucleotide
  Antisense strand to SEQ ID NO: 882746
aacuuggguagacuaacuc

SEQ ID NO: 882748 - RNA, 19 nt, Artificial Sequence
  Description of Artificial Sequence: Synthetic oligonucleotide
  Sense strand starting at position 3674 of SEQ ID NO: 588687
ucaccaagagauuguggua

SEQ ID NO: 882749 - RNA, 19 nt, Artificial Sequence
  Description of Artificial Sequence: Synthetic oligonucleotide
  Antisense strand to SEQ ID NO: 882748
uaccacaaucucuugguga

SEQ ID NO: 882750 - RNA, 19 nt, Artificial Sequence
  Description of Artificial Sequence: Synthetic oligonucleotide
  Sense strand starting at position 3687 of SEQ ID NO: 588687
gugguauuggcagagaaau

SEQ ID NO: 882751 - RNA, 19 nt, Artificial Sequence
  Description of Artificial Sequence: Synthetic oligonucleotide
  Antisense strand to SEQ ID NO: 882750
auuucucugccaauaccac

SEQ ID NO: 882752 - RNA, 19 nt, Artificial Sequence
  Description of Artificial Sequence: Synthetic oligonucleotide
  Sense strand starting at position 3839 of SEQ ID NO: 588687
aagaauggguucuuagauc

SEQ ID NO: 882753 - RNA, 19 nt, Artificial Sequence
  Description of Artificial Sequence: Synthetic oligonucleotide
  Antisense strand to SEQ ID NO: 882752
gaucuaagaacccauucuu

SEQ ID NO: 882754 - RNA, 19 nt, Artificial Sequence
  Description of Artificial Sequence: Synthetic oligonucleotide
  Sense strand starting at position 3851 of SEQ ID NO: 588687
uuagaucucacacgggaaa

SEQ ID NO: 882755 - RNA, 19 nt, Artificial Sequence
  Description of Artificial Sequence: Synthetic oligonucleotide
  Antisense strand to SEQ ID NO: 882754
uuucccgugugagaucuaa

SEQ ID NO: 882756 - RNA, 19 nt, Artificial Sequence
  Description of Artificial Sequence: Synthetic oligonucleotide
  Sense strand starting at position 3912 of SEQ ID NO: 588687
gggaaaugacucugugcca

SEQ ID NO: 882757 - RNA, 19 nt, Artificial Sequence
  Description of Artificial Sequence: Synthetic oligonucleotide
  Antisense strand to SEQ ID NO: 882756
uggcacagagucauuuccc

SEQ ID NO: 882758 - RNA, 19 nt, Artificial Sequence
  Description of Artificial Sequence: Synthetic oligonucleotide
  Sense strand starting at position 3976 of SEQ ID NO: 588687
agugccucuguuuguaaga

SEQ ID NO: 882759 - RNA, 19 nt, Artificial Sequence
  Description of Artificial Sequence: Synthetic oligonucleotide
  Antisense strand to SEQ ID NO: 882758
ucuuacaaacagaggcacu

SEQ ID NO: 882760 - RNA, 19 nt, Artificial Sequence
  Description of Artificial Sequence: Synthetic oligonucleotide
  Sense strand starting at position 3977 of SEQ ID NO: 588687
gugccucuguuuguaagaa

SEQ ID NO: 882761 - RNA, 19 nt, Artificial Sequence
  Description of Artificial Sequence: Synthetic oligonucleotide
  Antisense strand to SEQ ID NO: 882760
uucuuacaaacagaggcac

SEQ ID NO: 882762 - RNA, 19 nt, Artificial Sequence
  Description of Artificial Sequence: Synthetic oligonucleotide
  Sense strand starting at position 42 of SEQ ID NO: 588688
caaucccgucuguaugaaa

SEQ ID NO: 882763 - RNA, 19 nt, Artificial Sequence
  Description of Artificial Sequence: Synthetic oligonucleotide
  Antisense strand to SEQ ID NO: 882762
uuucauacagacgggauug

SEQ ID NO: 882764 - RNA, 19 nt, Artificial Sequence
  Description of Artificial Sequence: Synthetic oligonucleotide
  Sense strand starting at position 218 of SEQ ID NO: 588688
gaagaauagcuuggugcca

SEQ ID NO: 882765 - RNA, 19 nt, Artificial Sequence
  Description of Artificial Sequence: Synthetic oligonucleotide
  Antisense strand to SEQ ID NO: 882764
uggcaccaagcuauucuuc

SEQ ID NO: 882766 - RNA, 19 nt, Artificial Sequence
  Description of Artificial Sequence: Synthetic oligonucleotide
  Sense strand starting at position 426 of SEQ ID NO: 588688
accuuauauguguauguau

SEQ ID NO: 882767 - RNA, 19 nt, Artificial Sequence
  Description of Artificial Sequence: Synthetic oligonucleotide
  Antisense strand to SEQ ID NO: 882766
auacauacacauauaaggu

SEQ ID NO: 882768 - RNA, 19 nt, Artificial Sequence
  Description of Artificial Sequence: Synthetic oligonucleotide
  Sense strand starting at position 614 of SEQ ID NO: 588688
acaugacacuaguuccuua

SEQ ID NO: 882769 - RNA, 19 nt, Artificial Sequence
  Description of Artificial Sequence: Synthetic oligonucleotide
  Antisense strand to SEQ ID NO: 882768
uaaggaacuagugucaugu

SEQ ID NO: 882770 - RNA, 19 nt, Artificial Sequence
  Description of Artificial Sequence: Synthetic oligonucleotide
  Sense strand starting at position 705 of SEQ ID NO: 588688
gcuucaaagugaguaagga

SEQ ID NO: 882771 - RNA, 19 nt, Artificial Sequence
  Description of Artificial Sequence: Synthetic oligonucleotide
  Antisense strand to SEQ ID NO: 882770
uccuuacucacuuugaagc

SEQ ID NO: 882772 - RNA, 19 nt, Artificial Sequence
  Description of Artificial Sequence: Synthetic oligonucleotide
  Sense strand starting at position 822 of SEQ ID NO: 588688
gccugaaauccaugacugu

SEQ ID NO: 882773 - RNA, 19 nt, Artificial Sequence
  Description of Artificial Sequence: Synthetic oligonucleotide
  Antisense strand to SEQ ID NO: 882772
acagucauggauuucaggc

SEQ ID NO: 882774 - RNA, 19 nt, Artificial Sequence
  Description of Artificial Sequence: Synthetic oligonucleotide
  Sense strand starting at position 837 of SEQ ID NO: 588688
cugugacuccuacaaugcu

SEQ ID NO: 882775 - RNA, 19 nt, Artificial Sequence
  Description of Artificial Sequence: Synthetic oligonucleotide
  Antisense strand to SEQ ID NO: 882774
agcauuguaggagucacag

SEQ ID NO: 882776 - RNA, 19 nt, Artificial Sequence
  Description of Artificial Sequence: Synthetic oligonucleotide
  Sense strand starting at position 929 of SEQ ID NO: 588688
ggauaaaggcugcaucuaa

SEQ ID NO: 882777 - RNA, 19 nt, Artificial Sequence
  Description of Artificial Sequence: Synthetic oligonucleotide
  Antisense strand to SEQ ID NO: 882776
uuagaugcagccuuuaucc

SEQ ID NO: 882778 - RNA, 19 nt, Artificial Sequence
  Description of Artificial Sequence: Synthetic oligonucleotide
  Sense strand starting at position 1028 of SEQ ID NO: 588688
cucaaugucaaggaguagu

SEQ ID NO: 882779 - RNA, 19 nt, Artificial Sequence
  Description of Artificial Sequence: Synthetic oligonucleotide
  Antisense strand to SEQ ID NO: 882778
acuacuccuugacauugag

SEQ ID NO: 882780 - RNA, 19 nt, Artificial Sequence
  Description of Artificial Sequence: Synthetic oligonucleotide
  Sense strand starting at position 1077 of SEQ ID NO: 588688
ccaagugagcgggaucuaa

SEQ ID NO: 882781 - RNA, 19 nt, Artificial Sequence
  Description of Artificial Sequence: Synthetic oligonucleotide
  Antisense strand to SEQ ID NO: 882780
uuagaucccgcucacuugg

SEQ ID NO: 882782 - RNA, 19 nt, Artificial Sequence
  Description of Artificial Sequence: Synthetic oligonucleotide
  Sense strand starting at position 1091 of SEQ ID NO: 588688
ucuaauagcuggcuccaaa

SEQ ID NO: 882783 - RNA, 19 nt, Artificial Sequence
  Description of Artificial Sequence: Synthetic oligonucleotide
  Antisense strand to SEQ ID NO: 882782
uuuggagccagcuauuaga

SEQ ID NO: 882784 - RNA, 19 nt, Artificial Sequence
  Description of Artificial Sequence: Synthetic oligonucleotide
  Sense strand starting at position 1133 of SEQ ID NO: 588688
ggcugucgccugucagagu

SEQ ID NO: 882785 - RNA, 19 nt, Artificial Sequence
  Description of Artificial Sequence: Synthetic oligonucleotide
  Antisense strand to SEQ ID NO: 882784
acucugacaggcgacagcc

SEQ ID NO: 882786 - RNA, 19 nt, Artificial Sequence
  Description of Artificial Sequence: Synthetic oligonucleotide
  Sense strand starting at position 1318 of SEQ ID NO: 588688
cggugccaaacguuguaau

SEQ ID NO: 882787 - RNA, 19 nt, Artificial Sequence
  Description of Artificial Sequence: Synthetic oligonucleotide
  Antisense strand to SEQ ID NO: 882786
auuacaacguuuggcaccg

SEQ ID NO: 882788 - RNA, 19 nt, Artificial Sequence
  Description of Artificial Sequence: Synthetic oligonucleotide
  Sense strand starting at position 1411 of SEQ ID NO: 588688
uucugaugguuucuaguag

SEQ ID NO: 882789 - RNA, 19 nt, Artificial Sequence
  Description of Artificial Sequence: Synthetic oligonucleotide
  Antisense strand to SEQ ID NO: 882788
cuacuagaaaccaucagaa

SEQ ID NO: 882790 - RNA, 19 nt, Artificial Sequence
  Description of Artificial Sequence: Synthetic oligonucleotide
  Sense strand starting at position 1558 of SEQ ID NO: 588688
ugcugacaugguuaggaau

SEQ ID NO: 882791 - RNA, 19 nt, Artificial Sequence
  Description of Artificial Sequence: Synthetic oligonucleotide
  Antisense strand to SEQ ID NO: 882790
auuccuaaccaugucagca

SEQ ID NO: 882792 - RNA, 19 nt, Artificial Sequence
  Description of Artificial Sequence: Synthetic oligonucleotide
  Sense strand starting at position 1873 of SEQ ID NO: 588688
gcaacaugccgagaggaga

SEQ ID NO: 882793 - RNA, 19 nt, Artificial Sequence
  Description of Artificial Sequence: Synthetic oligonucleotide
  Antisense strand to SEQ ID NO: 882792
ucuccucucggcauguugc

SEQ ID NO: 882794 - RNA, 19 nt, Artificial Sequence
  Description of Artificial Sequence: Synthetic oligonucleotide
  Sense strand starting at position 2123 of SEQ ID NO: 588688
acgggaagcaauuggauaa

SEQ ID NO: 882795 - RNA, 19 nt, Artificial Sequence
  Description of Artificial Sequence: Synthetic oligonucleotide
  Antisense strand to SEQ ID NO: 882794
uuauccaauugcuucccgu

SEQ ID NO: 882796 - RNA, 19 nt, Artificial Sequence
  Description of Artificial Sequence: Synthetic oligonucleotide
  Sense strand starting at position 2124 of SEQ ID NO: 588688
cgggaagcaauuggauaau

SEQ ID NO: 882797 - RNA, 19 nt, Artificial Sequence
  Description of Artificial Sequence: Synthetic oligonucleotide
  Antisense strand to SEQ ID NO: 882796
auuauccaauugcuucccg

SEQ ID NO: 882798 - RNA, 19 nt, Artificial Sequence
  Description of Artificial Sequence: Synthetic oligonucleotide
  Sense strand starting at position 2399 of SEQ ID NO: 588688
cagcucucgccgcuuagaa

SEQ ID NO: 882799 - RNA, 19 nt, Artificial Sequence
  Description of Artificial Sequence: Synthetic oligonucleotide
  Antisense strand to SEQ ID NO: 882798
uucuaagcggcgagagcug

SEQ ID NO: 882800 - RNA, 19 nt, Artificial Sequence
  Description of Artificial Sequence: Synthetic oligonucleotide
  Sense strand starting at position 2636 of SEQ ID NO: 588688
ggaagacauuguccagggu

SEQ ID NO: 882801 - RNA, 19 nt, Artificial Sequence
  Description of Artificial Sequence: Synthetic oligonucleotide
  Antisense strand to SEQ ID NO: 882800
acccuggacaaugucuucc

SEQ ID NO: 882802 - RNA, 19 nt, Artificial Sequence
  Description of Artificial Sequence: Synthetic oligonucleotide
  Sense strand starting at position 2640 of SEQ ID NO: 588688
gacauuguccagggucagu

SEQ ID NO: 882803 - RNA, 19 nt, Artificial Sequence
  Description of Artificial Sequence: Synthetic oligonucleotide
  Antisense strand to SEQ ID NO: 882802
acugacccuggacaauguc

SEQ ID NO: 882804 - RNA, 19 nt, Artificial Sequence
  Description of Artificial Sequence: Synthetic oligonucleotide
  Sense strand starting at position 2686 of SEQ ID NO: 588688
agcuauauugacuaugguu

SEQ ID NO: 882805 - RNA, 19 nt, Artificial Sequence
  Description of Artificial Sequence: Synthetic oligonucleotide
  Antisense strand to SEQ ID NO: 882804
aaccauagucaauauagcu

SEQ ID NO: 882806 - RNA, 19 nt, Artificial Sequence
  Description of Artificial Sequence: Synthetic oligonucleotide
  Sense strand starting at position 2694 of SEQ ID NO: 588688
ugacuaugguuucccaaau

SEQ ID NO: 882807 - RNA, 19 nt, Artificial Sequence
  Description of Artificial Sequence: Synthetic oligonucleotide
  Antisense strand to SEQ ID NO: 882806
auuugggaaaccauaguca

SEQ ID NO: 882808 - RNA, 19 nt, Artificial Sequence
  Description of Artificial Sequence: Synthetic oligonucleotide
  Sense strand starting at position 2984 of SEQ ID NO: 588688
gagcucacggguuaaagua

SEQ ID NO: 882809 - RNA, 19 nt, Artificial Sequence
  Description of Artificial Sequence: Synthetic oligonucleotide
  Antisense strand to SEQ ID NO: 882808
uacuuuaacccgugagcuc

SEQ ID NO: 882810 - RNA, 19 nt, Artificial Sequence
  Description of Artificial Sequence: Synthetic oligonucleotide
  Sense strand starting at position 3081 of SEQ ID NO: 588688
agaugcugugaugaauguu

SEQ ID NO: 882811 - RNA, 19 nt, Artificial Sequence
  Description of Artificial Sequence: Synthetic oligonucleotide
  Antisense strand to SEQ ID NO: 882810
aacauucaucacagcaucu

SEQ ID NO: 882812 - RNA, 19 nt, Artificial Sequence
  Description of Artificial Sequence: Synthetic oligonucleotide
  Sense strand starting at position 3087 of SEQ ID NO: 588688
ugugaugaauguucuagaa

SEQ ID NO: 882813 - RNA, 19 nt, Artificial Sequence
  Description of Artificial Sequence: Synthetic oligonucleotide
  Antisense strand to SEQ ID NO: 882812
uucuagaacauucaucaca

SEQ ID NO: 882814 - RNA, 19 nt, Artificial Sequence
  Description of Artificial Sequence: Synthetic oligonucleotide
  Sense strand starting at position 3153 of SEQ ID NO: 588688
aauuauacacucuggguga

SEQ ID NO: 882815 - RNA, 19 nt, Artificial Sequence
  Description of Artificial Sequence: Synthetic oligonucleotide
  Antisense strand to SEQ ID NO: 882814
ucacccagaguguauaauu

SEQ ID NO: 882816 - RNA, 19 nt, Artificial Sequence
  Description of Artificial Sequence: Synthetic oligonucleotide
  Sense strand starting at position 3155 of SEQ ID NO: 588688
uuauacacucugggugaau

SEQ ID NO: 882817 - RNA, 19 nt, Artificial Sequence
  Description of Artificial Sequence: Synthetic oligonucleotide
  Antisense strand to SEQ ID NO: 882816
auucacccagaguguauaa

SEQ ID NO: 882818 - RNA, 19 nt, Artificial Sequence
  Description of Artificial Sequence: Synthetic oligonucleotide
  Sense strand starting at position 3156 of SEQ ID NO: 588688
uauacacucugggugaauu

SEQ ID NO: 882819 - RNA, 19 nt, Artificial Sequence
  Description of Artificial Sequence: Synthetic oligonucleotide
  Antisense strand to SEQ ID NO: 882818
aauucacccagaguguaua

SEQ ID NO: 882820 - RNA, 19 nt, Artificial Sequence
  Description of Artificial Sequence: Synthetic oligonucleotide
  Sense strand starting at position 3221 of SEQ ID NO: 588688
aaaugcuuugauggagaau

SEQ ID NO: 882821 - RNA, 19 nt, Artificial Sequence
  Description of Artificial Sequence: Synthetic oligonucleotide
  Antisense strand to SEQ ID NO: 882820
auucuccaucaaagcauuu

SEQ ID NO: 882822 - RNA, 19 nt, Artificial Sequence
  Description of Artificial Sequence: Synthetic oligonucleotide
  Sense strand starting at position 3260 of SEQ ID NO: 588688
uagguagguguucagggaa

SEQ ID NO: 882823 - RNA, 19 nt, Artificial Sequence
  Description of Artificial Sequence: Synthetic oligonucleotide
  Antisense strand to SEQ ID NO: 882822
uucccugaacaccuaccua

SEQ ID NO: 882824 - RNA, 19 nt, Artificial Sequence
  Description of Artificial Sequence: Synthetic oligonucleotide
  Sense strand starting at position 3379 of SEQ ID NO: 588688
augggagacugcuccauau

SEQ ID NO: 882825 - RNA, 19 nt, Artificial Sequence
  Description of Artificial Sequence: Synthetic oligonucleotide
  Antisense strand to SEQ ID NO: 882824
auauggagcagucucccau

SEQ ID NO: 882826 - RNA, 19 nt, Artificial Sequence
  Description of Artificial Sequence: Synthetic oligonucleotide
  Sense strand starting at position 3381 of SEQ ID NO: 588688
gggagacugcuccauaugu

SEQ ID NO: 882827 - RNA, 19 nt, Artificial Sequence
  Description of Artificial Sequence: Synthetic oligonucleotide
  Antisense strand to SEQ ID NO: 882826
acauauggagcagucuccc

SEQ ID NO: 882828 - RNA, 19 nt, Artificial Sequence
  Description of Artificial Sequence: Synthetic oligonucleotide
  Sense strand starting at position 3383 of SEQ ID NO: 588688
gagacugcuccauauguca

SEQ ID NO: 882829 - RNA, 19 nt, Artificial Sequence
  Description of Artificial Sequence: Synthetic oligonucleotide
  Antisense strand to SEQ ID NO: 882828
ugacauauggagcagucuc

SEQ ID NO: 882830 - RNA, 19 nt, Artificial Sequence
  Description of Artificial Sequence: Synthetic oligonucleotide
  Sense strand starting at position 3426 of SEQ ID NO: 588688
aaauguucucaguggauuc

SEQ ID NO: 882831 - RNA, 19 nt, Artificial Sequence
  Description of Artificial Sequence: Synthetic oligonucleotide
  Antisense strand to SEQ ID NO: 882830
gaauccacugagaacauuu

SEQ ID NO: 882832 - RNA, 19 nt, Artificial Sequence
  Description of Artificial Sequence: Synthetic oligonucleotide
  Sense strand starting at position 3481 of SEQ ID NO: 588688
agucaaacccagugaagau

SEQ ID NO: 882833 - RNA, 19 nt, Artificial Sequence
  Description of Artificial Sequence: Synthetic oligonucleotide
  Antisense strand to SEQ ID NO: 882832
aucuucacuggguuugacu

SEQ ID NO: 882834 - RNA, 19 nt, Artificial Sequence
  Description of Artificial Sequence: Synthetic oligonucleotide
  Sense strand starting at position 3556 of SEQ ID NO: 588688
gagaaauucuaugugaauu

SEQ ID NO: 882835 - RNA, 19 nt, Artificial Sequence
  Description of Artificial Sequence: Synthetic oligonucleotide
  Antisense strand to SEQ ID NO: 882834
aauucacauagaauuucuc

SEQ ID NO: 882836 - RNA, 19 nt, Artificial Sequence
  Description of Artificial Sequence: Synthetic oligonucleotide
  Sense strand starting at position 3637 of SEQ ID NO: 588688
augugugaauaauuaagag

SEQ ID NO: 882837 - RNA, 19 nt, Artificial Sequence
  Description of Artificial Sequence: Synthetic oligonucleotide
  Antisense strand to SEQ ID NO: 882836
cucuuaauuauucacacau

SEQ ID NO: 882838 - RNA, 19 nt, Artificial Sequence
  Description of Artificial Sequence: Synthetic oligonucleotide
  Sense strand starting at position 3842 of SEQ ID NO: 588688
cccuuaugucugcauucca

SEQ ID NO: 882839 - RNA, 19 nt, Artificial Sequence
  Description of Artificial Sequence: Synthetic oligonucleotide
  Antisense strand to SEQ ID NO: 882838
uggaaugcagacauaaggg

SEQ ID NO: 882840 - RNA, 19 nt, Artificial Sequence
  Description of Artificial Sequence: Synthetic oligonucleotide
  Sense strand starting at position 3955 of SEQ ID NO: 588688
uuagaucuccuuggccaga

SEQ ID NO: 882841 - RNA, 19 nt, Artificial Sequence
  Description of Artificial Sequence: Synthetic oligonucleotide
  Antisense strand to SEQ ID NO: 882840
ucuggccaaggagaucuaa

SEQ ID NO: 882842 - RNA, 19 nt, Artificial Sequence
  Description of Artificial Sequence: Synthetic oligonucleotide
  Sense strand starting at position 18 of SEQ ID NO: 588689
aagugaguauuugugugua

SEQ ID NO: 882843 - RNA, 19 nt, Artificial Sequence
  Description of Artificial Sequence: Synthetic oligonucleotide
  Antisense strand to SEQ ID NO: 882842
uacacacaaauacucacuu

SEQ ID NO: 882844 - RNA, 19 nt, Artificial Sequence
  Description of Artificial Sequence: Synthetic oligonucleotide
  Sense strand starting at position 20 of SEQ ID NO: 588689
gugaguauuuguguguauu

SEQ ID NO: 882845 - RNA, 19 nt, Artificial Sequence
  Description of Artificial Sequence: Synthetic oligonucleotide
  Antisense strand to SEQ ID NO: 882844
aauacacacaaauacucac

SEQ ID NO: 882846 - RNA, 19 nt, Artificial Sequence
  Description of Artificial Sequence: Synthetic oligonucleotide
  Sense strand starting at position 21 of SEQ ID NO: 588689
ugaguauuuguguguauuc

SEQ ID NO: 882847 - RNA, 19 nt, Artificial Sequence
  Description of Artificial Sequence: Synthetic oligonucleotide
  Antisense strand to SEQ ID NO: 882846
gaauacacacaaauacuca

SEQ ID NO: 882848 - RNA, 19 nt, Artificial Sequence
  Description of Artificial Sequence: Synthetic oligonucleotide
  Sense strand starting at position 22 of SEQ ID NO: 588689
gaguauuuguguguauucu

SEQ ID NO: 882849 - RNA, 19 nt, Artificial Sequence
  Description of Artificial Sequence: Synthetic oligonucleotide
  Antisense strand to SEQ ID NO: 882848
agaauacacacaaauacuc

SEQ ID NO: 882850 - RNA, 19 nt, Artificial Sequence
  Description of Artificial Sequence: Synthetic oligonucleotide
  Sense strand starting at position 23 of SEQ ID NO: 588689
aguauuuguguguauucuu

SEQ ID NO: 882851 - RNA, 19 nt, Artificial Sequence
  Description of Artificial Sequence: Synthetic oligonucleotide
  Antisense strand to SEQ ID NO: 882850
aagaauacacacaaauacu

SEQ ID NO: 882852 - RNA, 19 nt, Artificial Sequence
  Description of Artificial Sequence: Synthetic oligonucleotide
  Sense strand starting at position 36 of SEQ ID NO: 588689
auucuuauaugcucaagag

SEQ ID NO: 882853 - RNA, 19 nt, Artificial Sequence
  Description of Artificial Sequence: Synthetic oligonucleotide
  Antisense strand to SEQ ID NO: 882852
cucuugagcauauaagaau

SEQ ID NO: 882854 - RNA, 19 nt, Artificial Sequence
  Description of Artificial Sequence: Synthetic oligonucleotide
  Sense strand starting at position 37 of SEQ ID NO: 588689
uucuuauaugcucaagaga

SEQ ID NO: 882855 - RNA, 19 nt, Artificial Sequence
  Description of Artificial Sequence: Synthetic oligonucleotide
  Antisense strand to SEQ ID NO: 882854
ucucuugagcauauaagaa

SEQ ID NO: 882856 - RNA, 19 nt, Artificial Sequence
  Description of Artificial Sequence: Synthetic oligonucleotide
  Sense strand starting at position 71 of SEQ ID NO: 588689
ccuagaucuuucuuggaaa

SEQ ID NO: 882857 - RNA, 19 nt, Artificial Sequence
  Description of Artificial Sequence: Synthetic oligonucleotide
  Antisense strand to SEQ ID NO: 882856
uuuccaagaaagaucuagg

SEQ ID NO: 882858 - RNA, 19 nt, Artificial Sequence
  Description of Artificial Sequence: Synthetic oligonucleotide
  Sense strand starting at position 303 of SEQ ID NO: 588689
guuaaagcagccuauuauc

SEQ ID NO: 882859 - RNA, 19 nt, Artificial Sequence
  Description of Artificial Sequence: Synthetic oligonucleotide
  Antisense strand to SEQ ID NO: 882858
gauaauaggcugcuuuaac

SEQ ID NO: 882860 - RNA, 19 nt, Artificial Sequence
  Description of Artificial Sequence: Synthetic oligonucleotide
  Sense strand starting at position 612 of SEQ ID NO: 588689
ucagauuugaggcguuuga

SEQ ID NO: 882861 - RNA, 19 nt, Artificial Sequence
  Description of Artificial Sequence: Synthetic oligonucleotide
  Antisense strand to SEQ ID NO: 882860
ucaaacgccucaaaucuga

SEQ ID NO: 882862 - RNA, 19 nt, Artificial Sequence
  Description of Artificial Sequence: Synthetic oligonucleotide
  Sense strand starting at position 789 of SEQ ID NO: 588689
uuauauguguuuccagaga

SEQ ID NO: 882863 - RNA, 19 nt, Artificial Sequence
  Description of Artificial Sequence: Synthetic oligonucleotide
  Antisense strand to SEQ ID NO: 882862
ucucuggaaacacauauaa

SEQ ID NO: 882864 - RNA, 19 nt, Artificial Sequence
  Description of Artificial Sequence: Synthetic oligonucleotide
  Sense strand starting at position 840 of SEQ ID NO: 588689
guggaagaaugucuggaga

SEQ ID NO: 882865 - RNA, 19 nt, Artificial Sequence
  Description of Artificial Sequence: Synthetic oligonucleotide
  Antisense strand to SEQ ID NO: 882864
ucuccagacauucuuccac

SEQ ID NO: 882866 - RNA, 19 nt, Artificial Sequence
  Description of Artificial Sequence: Synthetic oligonucleotide
  Sense strand starting at position 930 of SEQ ID NO: 588689
ucccucauccucgaaggaa

SEQ ID NO: 882867 - RNA, 19 nt, Artificial Sequence
  Description of Artificial Sequence: Synthetic oligonucleotide
  Antisense strand to SEQ ID NO: 882866
uuccuucgaggaugaggga

SEQ ID NO: 882868 - RNA, 19 nt, Artificial Sequence
  Description of Artificial Sequence: Synthetic oligonucleotide
  Sense strand starting at position 933 of SEQ ID NO: 588689
cucauccucgaaggaaaua

SEQ ID NO: 882869 - RNA, 19 nt, Artificial Sequence
  Description of Artificial Sequence: Synthetic oligonucleotide
  Antisense strand to SEQ ID NO: 882868
uauuuccuucgaggaugag

SEQ ID NO: 882870 - RNA, 19 nt, Artificial Sequence
  Description of Artificial Sequence: Synthetic oligonucleotide
  Sense strand starting at position 984 of SEQ ID NO: 588689
accacaucuguggaucauu

SEQ ID NO: 882871 - RNA, 19 nt, Artificial Sequence
  Description of Artificial Sequence: Synthetic oligonucleotide
  Antisense strand to SEQ ID NO: 882870
aaugauccacagauguggu

SEQ ID NO: 882872 - RNA, 19 nt, Artificial Sequence
  Description of Artificial Sequence: Synthetic oligonucleotide
  Sense strand starting at position 989 of SEQ ID NO: 588689
aucuguggaucauuggcaa

SEQ ID NO: 882873 - RNA, 19 nt, Artificial Sequence
  Description of Artificial Sequence: Synthetic oligonucleotide
  Antisense strand to SEQ ID NO: 882872
uugccaaugauccacagau

SEQ ID NO: 882874 - RNA, 19 nt, Artificial Sequence
  Description of Artificial Sequence: Synthetic oligonucleotide
  Sense strand starting at position 1013 of SEQ ID NO: 588689
uguuaagauugcucaaauc

SEQ ID NO: 882875 - RNA, 19 nt, Artificial Sequence
  Description of Artificial Sequence: Synthetic oligonucleotide
  Antisense strand to SEQ ID NO: 882874
gauuugagcaaucuuaaca

SEQ ID NO: 882876 - RNA, 19 nt, Artificial Sequence
  Description of Artificial Sequence: Synthetic oligonucleotide
  Sense strand starting at position 1034 of SEQ ID NO: 588689
ggcagucucagagaguucu

SEQ ID NO: 882877 - RNA, 19 nt, Artificial Sequence
  Description of Artificial Sequence: Synthetic oligonucleotide
  Antisense strand to SEQ ID NO: 882876
agaacucucugagacugcc

SEQ ID NO: 882878 - RNA, 19 nt, Artificial Sequence
  Description of Artificial Sequence: Synthetic oligonucleotide
  Sense strand starting at position 1121 of SEQ ID NO: 588689
acuccuuuguaggcugaaa

SEQ ID NO: 882879 - RNA, 19 nt, Artificial Sequence
  Description of Artificial Sequence: Synthetic oligonucleotide
  Antisense strand to SEQ ID NO: 882878
uuucagccuacaaaggagu

SEQ ID NO: 882880 - RNA, 19 nt, Artificial Sequence
  Description of Artificial Sequence: Synthetic oligonucleotide
  Sense strand starting at position 1171 of SEQ ID NO: 588689
ggaggcucucauggaauau

SEQ ID NO: 882881 - RNA, 19 nt, Artificial Sequence
  Description of Artificial Sequence: Synthetic oligonucleotide
  Antisense strand to SEQ ID NO: 882880
auauuccaugagagccucc

SEQ ID NO: 882882 - RNA, 19 nt, Artificial Sequence
  Description of Artificial Sequence: Synthetic oligonucleotide
  Sense strand starting at position 1175 of SEQ ID NO: 588689
gcucucauggaauauuaua

SEQ ID NO: 882883 - RNA, 19 nt, Artificial Sequence
  Description of Artificial Sequence: Synthetic oligonucleotide
  Antisense strand to SEQ ID NO: 882882
uauaauauuccaugagagc

SEQ ID NO: 882884 - RNA, 19 nt, Artificial Sequence
  Description of Artificial Sequence: Synthetic oligonucleotide
  Sense strand starting at position 1195 of SEQ ID NO: 588689
ccaggacccaguuguauga

SEQ ID NO: 882885 - RNA, 19 nt, Artificial Sequence
  Description of Artificial Sequence: Synthetic oligonucleotide
  Antisense strand to SEQ ID NO: 882884
ucauacaacuggguccugg

SEQ ID NO: 882886 - RNA, 19 nt, Artificial Sequence
  Description of Artificial Sequence: Synthetic oligonucleotide
  Sense strand starting at position 1242 of SEQ ID NO: 588689
gugccagugcccuugucaa

SEQ ID NO: 882887 - RNA, 19 nt, Artificial Sequence
  Description of Artificial Sequence: Synthetic oligonucleotide
  Antisense strand to SEQ ID NO: 882886
uugacaagggcacuggcac

SEQ ID NO: 882888 - RNA, 19 nt, Artificial Sequence
  Description of Artificial Sequence: Synthetic oligonucleotide
  Sense strand starting at position 1445 of SEQ ID NO: 588689
ugagcauucggucauaaua

SEQ ID NO: 882889 - RNA, 19 nt, Artificial Sequence
  Description of Artificial Sequence: Synthetic oligonucleotide
  Antisense strand to SEQ ID NO: 882888
uauuaugaccgaaugcuca

SEQ ID NO: 882890 - RNA, 19 nt, Artificial Sequence
  Description of Artificial Sequence: Synthetic oligonucleotide
  Sense strand starting at position 1455 of SEQ ID NO: 588689
gucauaauauuccuggagu

SEQ ID NO: 882891 - RNA, 19 nt, Artificial Sequence
  Description of Artificial Sequence: Synthetic oligonucleotide
  Antisense strand to SEQ ID NO: 882890
acuccaggaauauuaugac

SEQ ID NO: 882892 - RNA, 19 nt, Artificial Sequence
  Description of Artificial Sequence: Synthetic oligonucleotide
  Sense strand starting at position 1458 of SEQ ID NO: 588689
auaauauuccuggagucgu

SEQ ID NO: 882893 - RNA, 19 nt, Artificial Sequence
  Description of Artificial Sequence: Synthetic oligonucleotide
  Antisense strand to SEQ ID NO: 882892
acgacuccaggaauauuau

SEQ ID NO: 882894 - RNA, 19 nt, Artificial Sequence
  Description of Artificial Sequence: Synthetic oligonucleotide
  Sense strand starting at position 1586 of SEQ ID NO: 588689
ggucuccaucuauagacau

SEQ ID NO: 882895 - RNA, 19 nt, Artificial Sequence
  Description of Artificial Sequence: Synthetic oligonucleotide
  Antisense strand to SEQ ID NO: 882894
augucuauagauggagacc

SEQ ID NO: 882896 - RNA, 19 nt, Artificial Sequence
  Description of Artificial Sequence: Synthetic oligonucleotide
  Sense strand starting at position 2553 of SEQ ID NO: 588689
ggcccacaugcuuaagaug

SEQ ID NO: 882897 - RNA, 19 nt, Artificial Sequence
  Description of Artificial Sequence: Synthetic oligonucleotide
  Antisense strand to SEQ ID NO: 882896
caucuuaagcaugugggcc

SEQ ID NO: 882898 - RNA, 19 nt, Artificial Sequence
  Description of Artificial Sequence: Synthetic oligonucleotide
  Sense strand starting at position 2603 of SEQ ID NO: 588689
uaggguauaucuccagaga

SEQ ID NO: 882899 - RNA, 19 nt, Artificial Sequence
  Description of Artificial Sequence: Synthetic oligonucleotide
  Antisense strand to SEQ ID NO: 882898
ucucuggagauauacccua

SEQ ID NO: 882900 - RNA, 19 nt, Artificial Sequence
  Description of Artificial Sequence: Synthetic oligonucleotide
  Sense strand starting at position 2606 of SEQ ID NO: 588689
gguauaucuccagagaggc

SEQ ID NO: 882901 - RNA, 19 nt, Artificial Sequence
  Description of Artificial Sequence: Synthetic oligonucleotide
  Antisense strand to SEQ ID NO: 882900
gccucucuggagauauacc

SEQ ID NO: 882902 - RNA, 19 nt, Artificial Sequence
  Description of Artificial Sequence: Synthetic oligonucleotide
  Sense strand starting at position 2777 of SEQ ID NO: 588689
ggaucacauaggugucauu

SEQ ID NO: 882903 - RNA, 19 nt, Artificial Sequence
  Description of Artificial Sequence: Synthetic oligonucleotide
  Antisense strand to SEQ ID NO: 882902
aaugacaccuaugugaucc

SEQ ID NO: 882904 - RNA, 19 nt, Artificial Sequence
  Description of Artificial Sequence: Synthetic oligonucleotide
  Sense strand starting at position 2787 of SEQ ID NO: 588689
ggugucauuagagacgaau

SEQ ID NO: 882905 - RNA, 19 nt, Artificial Sequence
  Description of Artificial Sequence: Synthetic oligonucleotide
  Antisense strand to SEQ ID NO: 882904
auucgucucuaaugacacc

SEQ ID NO: 882906 - RNA, 19 nt, Artificial Sequence
  Description of Artificial Sequence: Synthetic oligonucleotide
  Sense strand starting at position 2789 of SEQ ID NO: 588689
ugucauuagagacgaauga

SEQ ID NO: 882907 - RNA, 19 nt, Artificial Sequence
  Description of Artificial Sequence: Synthetic oligonucleotide
  Antisense strand to SEQ ID NO: 882906
ucauucgucucuaaugaca

SEQ ID NO: 882908 - RNA, 19 nt, Artificial Sequence
  Description of Artificial Sequence: Synthetic oligonucleotide
  Sense strand starting at position 2856 of SEQ ID NO: 588689
cuuauuauccugugacauu

SEQ ID NO: 882909 - RNA, 19 nt, Artificial Sequence
  Description of Artificial Sequence: Synthetic oligonucleotide
  Antisense strand to SEQ ID NO: 882908
aaugucacaggauaauaag

SEQ ID NO: 882910 - RNA, 19 nt, Artificial Sequence
  Description of Artificial Sequence: Synthetic oligonucleotide
  Sense strand starting at position 3020 of SEQ ID NO: 588689
ggauguaagaaguggauca

SEQ ID NO: 882911 - RNA, 19 nt, Artificial Sequence
  Description of Artificial Sequence: Synthetic oligonucleotide
  Antisense strand to SEQ ID NO: 882910
ugauccacuucuuacaucc

SEQ ID NO: 882912 - RNA, 19 nt, Artificial Sequence
  Description of Artificial Sequence: Synthetic oligonucleotide
  Sense strand starting at position 3181 of SEQ ID NO: 588689
ucuuuagagccauaggauu

SEQ ID NO: 882913 - RNA, 19 nt, Artificial Sequence
  Description of Artificial Sequence: Synthetic oligonucleotide
  Antisense strand to SEQ ID NO: 882912
aauccuauggcucuaaaga

SEQ ID NO: 882914 - RNA, 19 nt, Artificial Sequence
  Description of Artificial Sequence: Synthetic oligonucleotide
  Sense strand starting at position 3721 of SEQ ID NO: 588689
uggagcugauuguuuaaua

SEQ ID NO: 882915 - RNA, 19 nt, Artificial Sequence
  Description of Artificial Sequence: Synthetic oligonucleotide
  Antisense strand to SEQ ID NO: 882914
uauuaaacaaucagcucca

SEQ ID NO: 882916 - RNA, 19 nt, Artificial Sequence
  Description of Artificial Sequence: Synthetic oligonucleotide
  Sense strand starting at position 3722 of SEQ ID NO: 588689
ggagcugauuguuuaauaa

SEQ ID NO: 882917 - RNA, 19 nt, Artificial Sequence
  Description of Artificial Sequence: Synthetic oligonucleotide
  Antisense strand to SEQ ID NO: 882916
uuauuaaacaaucagcucc

SEQ ID NO: 882918 - RNA, 19 nt, Artificial Sequence
  Description of Artificial Sequence: Synthetic oligonucleotide
  Sense strand starting at position 3745 of SEQ ID NO: 588689
aagccagugccagauucua

SEQ ID NO: 882919 - RNA, 19 nt, Artificial Sequence
  Description of Artificial Sequence: Synthetic oligonucleotide
  Antisense strand to SEQ ID NO: 882918
uagaaucuggcacuggcuu

SEQ ID NO: 882920 - RNA, 19 nt, Artificial Sequence
  Description of Artificial Sequence: Synthetic oligonucleotide
  Sense strand starting at position 3916 of SEQ ID NO: 588689
ucagcagagugauuguaga

SEQ ID NO: 882921 - RNA, 19 nt, Artificial Sequence
  Description of Artificial Sequence: Synthetic oligonucleotide
  Antisense strand to SEQ ID NO: 882920
ucuacaaucacucugcuga

SEQ ID NO: 882922 - RNA, 19 nt, Artificial Sequence
  Description of Artificial Sequence: Synthetic oligonucleotide
  Sense strand starting at position 137 of SEQ ID NO: 588692
ugcucuuaggcuuguauuu

SEQ ID NO: 882923 - RNA, 19 nt, Artificial Sequence
  Description of Artificial Sequence: Synthetic oligonucleotide
  Antisense strand to SEQ ID NO: 882922
aaauacaagccuaagagca

SEQ ID NO: 882924 - RNA, 19 nt, Artificial Sequence
  Description of Artificial Sequence: Synthetic oligonucleotide
  Sense strand starting at position 220 of SEQ ID NO: 588692
gggccaagagaguguuugu

SEQ ID NO: 882925 - RNA, 19 nt, Artificial Sequence
  Description of Artificial Sequence: Synthetic oligonucleotide
  Antisense strand to SEQ ID NO: 882924
acaaacacucucuuggccc

SEQ ID NO: 882926 - RNA, 19 nt, Artificial Sequence
  Description of Artificial Sequence: Synthetic oligonucleotide
  Sense strand starting at position 242 of SEQ ID NO: 588692
ggaguuacacaguggccua

SEQ ID NO: 882927 - RNA, 19 nt, Artificial Sequence
  Description of Artificial Sequence: Synthetic oligonucleotide
  Antisense strand to SEQ ID NO: 882926
uaggccacuguguaacucc

SEQ ID NO: 882928 - RNA, 19 nt, Artificial Sequence
  Description of Artificial Sequence: Synthetic oligonucleotide
  Sense strand starting at position 254 of SEQ ID NO: 588692
uggccuagugagugaaaga

SEQ ID NO: 882929 - RNA, 19 nt, Artificial Sequence
  Description of Artificial Sequence: Synthetic oligonucleotide
  Antisense strand to SEQ ID NO: 882928
ucuuucacucacuaggcca

SEQ ID NO: 882930 - RNA, 19 nt, Artificial Sequence
  Description of Artificial Sequence: Synthetic oligonucleotide
  Sense strand starting at position 431 of SEQ ID NO: 588692
gcugaaugcccagacuaug

SEQ ID NO: 882931 - RNA, 19 nt, Artificial Sequence
  Description of Artificial Sequence: Synthetic oligonucleotide
  Antisense strand to SEQ ID NO: 882930
cauagucugggcauucagc

SEQ ID NO: 882932 - RNA, 19 nt, Artificial Sequence
  Description of Artificial Sequence: Synthetic oligonucleotide
  Sense strand starting at position 564 of SEQ ID NO: 588692
gaggcuugucuaggugaaa

SEQ ID NO: 882933 - RNA, 19 nt, Artificial Sequence
  Description of Artificial Sequence: Synthetic oligonucleotide
  Antisense strand to SEQ ID NO: 882932
uuucaccuagacaagccuc

SEQ ID NO: 882934 - RNA, 19 nt, Artificial Sequence
  Description of Artificial Sequence: Synthetic oligonucleotide
  Sense strand starting at position 565 of SEQ ID NO: 588692
aggcuugucuaggugaaag

SEQ ID NO: 882935 - RNA, 19 nt, Artificial Sequence
  Description of Artificial Sequence: Synthetic oligonucleotide
  Antisense strand to SEQ ID NO: 882934
cuuucaccuagacaagccu

SEQ ID NO: 882936 - RNA, 19 nt, Artificial Sequence
  Description of Artificial Sequence: Synthetic oligonucleotide
  Sense strand starting at position 666 of SEQ ID NO: 588692
aggagaccuguuuguacaa

SEQ ID NO: 882937 - RNA, 19 nt, Artificial Sequence
  Description of Artificial Sequence: Synthetic oligonucleotide
  Antisense strand to SEQ ID NO: 882936
uuguacaaacaggucuccu

SEQ ID NO: 882938 - RNA, 19 nt, Artificial Sequence
  Description of Artificial Sequence: Synthetic oligonucleotide
  Sense strand starting at position 667 of SEQ ID NO: 588692
ggagaccuguuuguacaaa

SEQ ID NO: 882939 - RNA, 19 nt, Artificial Sequence
  Description of Artificial Sequence: Synthetic oligonucleotide
  Antisense strand to SEQ ID NO: 882938
uuuguacaaacaggucucc

SEQ ID NO: 882940 - RNA, 19 nt, Artificial Sequence
  Description of Artificial Sequence: Synthetic oligonucleotide
  Sense strand starting at position 829 of SEQ ID NO: 588692
gacccacgucuaggaguuu

SEQ ID NO: 882941 - RNA, 19 nt, Artificial Sequence
  Description of Artificial Sequence: Synthetic oligonucleotide
  Antisense strand to SEQ ID NO: 882940
aaacuccuagacguggguc

SEQ ID NO: 882942 - RNA, 19 nt, Artificial Sequence
  Description of Artificial Sequence: Synthetic oligonucleotide
  Sense strand starting at position 838 of SEQ ID NO: 588692
cuaggaguuugccuagaga

SEQ ID NO: 882943 - RNA, 19 nt, Artificial Sequence
  Description of Artificial Sequence: Synthetic oligonucleotide
  Antisense strand to SEQ ID NO: 882942
ucucuaggcaaacuccuag

SEQ ID NO: 882944 - RNA, 19 nt, Artificial Sequence
  Description of Artificial Sequence: Synthetic oligonucleotide
  Sense strand starting at position 841 of SEQ ID NO: 588692
ggaguuugccuagagacac

SEQ ID NO: 882945 - RNA, 19 nt, Artificial Sequence
  Description of Artificial Sequence: Synthetic oligonucleotide
  Antisense strand to SEQ ID NO: 882944
gugucucuaggcaaacucc

SEQ ID NO: 882946 - RNA, 19 nt, Artificial Sequence
  Description of Artificial Sequence: Synthetic oligonucleotide
  Sense strand starting at position 872 of SEQ ID NO: 588692
ggcguguaugcaucggaca

SEQ ID NO: 882947 - RNA, 19 nt, Artificial Sequence
  Description of Artificial Sequence: Synthetic oligonucleotide
  Antisense strand to SEQ ID NO: 882946
uguccgaugcauacacgcc

SEQ ID NO: 882948 - RNA, 19 nt, Artificial Sequence
  Description of Artificial Sequence: Synthetic oligonucleotide
  Sense strand starting at position 1001 of SEQ ID NO: 588692
cucagauauuuccgaauua

SEQ ID NO: 882949 - RNA, 19 nt, Artificial Sequence
  Description of Artificial Sequence: Synthetic oligonucleotide
  Antisense strand to SEQ ID NO: 882948
uaauucggaaauaucugag

SEQ ID NO: 882950 - RNA, 19 nt, Artificial Sequence
  Description of Artificial Sequence: Synthetic oligonucleotide
  Sense strand starting at position 1002 of SEQ ID NO: 588692
ucagauauuuccgaauuac

SEQ ID NO: 882951 - RNA, 19 nt, Artificial Sequence
  Description of Artificial Sequence: Synthetic oligonucleotide
  Antisense strand to SEQ ID NO: 882950
guaauucggaaauaucuga

SEQ ID NO: 882952 - RNA, 19 nt, Artificial Sequence
  Description of Artificial Sequence: Synthetic oligonucleotide
  Sense strand starting at position 1318 of SEQ ID NO: 588692
cacagauauuuggacugau

SEQ ID NO: 882953 - RNA, 19 nt, Artificial Sequence
  Description of Artificial Sequence: Synthetic oligonucleotide
  Antisense strand to SEQ ID NO: 882952
aucaguccaaauaucugug

SEQ ID NO: 882954 - RNA, 19 nt, Artificial Sequence
  Description of Artificial Sequence: Synthetic oligonucleotide
  Sense strand starting at position 1386 of SEQ ID NO: 588692
guuagacagucucuacgaa

SEQ ID NO: 882955 - RNA, 19 nt, Artificial Sequence
  Description of Artificial Sequence: Synthetic oligonucleotide
  Antisense strand to SEQ ID NO: 882954
uucguagagacugucuaac

SEQ ID NO: 882956 - RNA, 19 nt, Artificial Sequence
  Description of Artificial Sequence: Synthetic oligonucleotide
  Sense strand starting at position 1387 of SEQ ID NO: 588692
uuagacagucucuacgaaa

SEQ ID NO: 882957 - RNA, 19 nt, Artificial Sequence
  Description of Artificial Sequence: Synthetic oligonucleotide
  Antisense strand to SEQ ID NO: 882956
uuucguagagacugucuaa

SEQ ID NO: 882958 - RNA, 19 nt, Artificial Sequence
  Description of Artificial Sequence: Synthetic oligonucleotide
  Sense strand starting at position 1518 of SEQ ID NO: 588692
guccgaggagucggauaau

SEQ ID NO: 882959 - RNA, 19 nt, Artificial Sequence
  Description of Artificial Sequence: Synthetic oligonucleotide
  Antisense strand to SEQ ID NO: 882958
auuauccgacuccucggac

SEQ ID NO: 882960 - RNA, 19 nt, Artificial Sequence
  Description of Artificial Sequence: Synthetic oligonucleotide
  Sense strand starting at position 1713 of SEQ ID NO: 588692
gcugaucacugagcugaaa

SEQ ID NO: 882961 - RNA, 19 nt, Artificial Sequence
  Description of Artificial Sequence: Synthetic oligonucleotide
  Antisense strand to SEQ ID NO: 882960
uuucagcucagugaucagc

SEQ ID NO: 882962 - RNA, 19 nt, Artificial Sequence
  Description of Artificial Sequence: Synthetic oligonucleotide
  Sense strand starting at position 1765 of SEQ ID NO: 588692
ggcaccgugaaaugauuaa

SEQ ID NO: 882963 - RNA, 19 nt, Artificial Sequence
  Description of Artificial Sequence: Synthetic oligonucleotide
  Antisense strand to SEQ ID NO: 882962
uuaaucauuucacggugcc

SEQ ID NO: 882964 - RNA, 19 nt, Artificial Sequence
  Description of Artificial Sequence: Synthetic oligonucleotide
  Sense strand starting at position 1772 of SEQ ID NO: 588692
ugaaaugauuaaggaacua

SEQ ID NO: 882965 - RNA, 19 nt, Artificial Sequence
  Description of Artificial Sequence: Synthetic oligonucleotide
  Antisense strand to SEQ ID NO: 882964
uaguuccuuaaucauuuca

SEQ ID NO: 882966 - RNA, 19 nt, Artificial Sequence
  Description of Artificial Sequence: Synthetic oligonucleotide
  Sense strand starting at position 1792 of SEQ ID NO: 588692
agagcuucucgccauguga

SEQ ID NO: 882967 - RNA, 19 nt, Artificial Sequence
  Description of Artificial Sequence: Synthetic oligonucleotide
  Antisense strand to SEQ ID NO: 882966
ucacauggcgagaagcucu

SEQ ID NO: 882968 - RNA, 19 nt, Artificial Sequence
  Description of Artificial Sequence: Synthetic oligonucleotide
  Sense strand starting at position 1807 of SEQ ID NO: 588692
gugagaucauguccuguuc

SEQ ID NO: 882969 - RNA, 19 nt, Artificial Sequence
  Description of Artificial Sequence: Synthetic oligonucleotide
  Antisense strand to SEQ ID NO: 882968
gaacaggacaugaucucac

SEQ ID NO: 882970 - RNA, 19 nt, Artificial Sequence
  Description of Artificial Sequence: Synthetic oligonucleotide
  Sense strand starting at position 2196 of SEQ ID NO: 588692
gugacaucuccaugugcaa

SEQ ID NO: 882971 - RNA, 19 nt, Artificial Sequence
  Description of Artificial Sequence: Synthetic oligonucleotide
  Antisense strand to SEQ ID NO: 882970
uugcacauggagaugucac

SEQ ID NO: 882972 - RNA, 19 nt, Artificial Sequence
  Description of Artificial Sequence: Synthetic oligonucleotide
  Sense strand starting at position 2259 of SEQ ID NO: 588692
gaaauuaacugcucggcca

SEQ ID NO: 882973 - RNA, 19 nt, Artificial Sequence
  Description of Artificial Sequence: Synthetic oligonucleotide
  Antisense strand to SEQ ID NO: 882972
uggccgagcaguuaauuuc

SEQ ID NO: 882974 - RNA, 19 nt, Artificial Sequence
  Description of Artificial Sequence: Synthetic oligonucleotide
  Sense strand starting at position 2487 of SEQ ID NO: 588692
ccagucuucuagucccaga

SEQ ID NO: 882975 - RNA, 19 nt, Artificial Sequence
  Description of Artificial Sequence: Synthetic oligonucleotide
  Antisense strand to SEQ ID NO: 882974
ucugggacuagaagacugg

SEQ ID NO: 882976 - RNA, 19 nt, Artificial Sequence
  Description of Artificial Sequence: Synthetic oligonucleotide
  Sense strand starting at position 2546 of SEQ ID NO: 588692
gagguuaagcugugaaaua

SEQ ID NO: 882977 - RNA, 19 nt, Artificial Sequence
  Description of Artificial Sequence: Synthetic oligonucleotide
  Antisense strand to SEQ ID NO: 882976
uauuucacagcuuaaccuc

SEQ ID NO: 882978 - RNA, 19 nt, Artificial Sequence
  Description of Artificial Sequence: Synthetic oligonucleotide
  Sense strand starting at position 2611 of SEQ ID NO: 588692
agaacaucucaguaguuuc

SEQ ID NO: 882979 - RNA, 19 nt, Artificial Sequence
  Description of Artificial Sequence: Synthetic oligonucleotide
  Antisense strand to SEQ ID NO: 882978
gaaacuacugagauguucu

SEQ ID NO: 882980 - RNA, 19 nt, Artificial Sequence
  Description of Artificial Sequence: Synthetic oligonucleotide
  Sense strand starting at position 2981 of SEQ ID NO: 588692
gagagugaaucguccucag

SEQ ID NO: 882981 - RNA, 19 nt, Artificial Sequence
  Description of Artificial Sequence: Synthetic oligonucleotide
  Antisense strand to SEQ ID NO: 882980
cugaggacgauucacucuc

SEQ ID NO: 882982 - RNA, 19 nt, Artificial Sequence
  Description of Artificial Sequence: Synthetic oligonucleotide
  Sense strand starting at position 2984 of SEQ ID NO: 588692
agugaaucguccucagcaa

SEQ ID NO: 882983 - RNA, 19 nt, Artificial Sequence
  Description of Artificial Sequence: Synthetic oligonucleotide
  Antisense strand to SEQ ID NO: 882982
uugcugaggacgauucacu

SEQ ID NO: 882984 - RNA, 19 nt, Artificial Sequence
  Description of Artificial Sequence: Synthetic oligonucleotide
  Sense strand starting at position 2985 of SEQ ID NO: 588692
gugaaucguccucagcaag

SEQ ID NO: 882985 - RNA, 19 nt, Artificial Sequence
  Description of Artificial Sequence: Synthetic oligonucleotide
  Antisense strand to SEQ ID NO: 882984
cuugcugaggacgauucac

SEQ ID NO: 882986 - RNA, 19 nt, Artificial Sequence
  Description of Artificial Sequence: Synthetic oligonucleotide
  Sense strand starting at position 2988 of SEQ ID NO: 588692
aaucguccucagcaagagu

SEQ ID NO: 882987 - RNA, 19 nt, Artificial Sequence
  Description of Artificial Sequence: Synthetic oligonucleotide
  Antisense strand to SEQ ID NO: 882986
acucuugcugaggacgauu

SEQ ID NO: 882988 - RNA, 19 nt, Artificial Sequence
  Description of Artificial Sequence: Synthetic oligonucleotide
  Sense strand starting at position 3062 of SEQ ID NO: 588692
gagccuagagcucgaggaa

SEQ ID NO: 882989 - RNA, 19 nt, Artificial Sequence
  Description of Artificial Sequence: Synthetic oligonucleotide
  Antisense strand to SEQ ID NO: 882988
uuccucgagcucuaggcuc

SEQ ID NO: 882990 - RNA, 19 nt, Artificial Sequence
  Description of Artificial Sequence: Synthetic oligonucleotide
  Sense strand starting at position 3063 of SEQ ID NO: 588692
agccuagagcucgaggaaa

SEQ ID NO: 882991 - RNA, 19 nt, Artificial Sequence
  Description of Artificial Sequence: Synthetic oligonucleotide
  Antisense strand to SEQ ID NO: 882990
uuuccucgagcucuaggcu

SEQ ID NO: 882992 - RNA, 19 nt, Artificial Sequence
  Description of Artificial Sequence: Synthetic oligonucleotide
  Sense strand starting at position 3120 of SEQ ID NO: 588692
ugagcagauuucgccacaa

SEQ ID NO: 882993 - RNA, 19 nt, Artificial Sequence
  Description of Artificial Sequence: Synthetic oligonucleotide
  Antisense strand to SEQ ID NO: 882992
uuguggcgaaaucugcuca

SEQ ID NO: 882994 - RNA, 19 nt, Artificial Sequence
  Description of Artificial Sequence: Synthetic oligonucleotide
  Sense strand starting at position 3140 of SEQ ID NO: 588692
cggaaauguggcuguggau

SEQ ID NO: 882995 - RNA, 19 nt, Artificial Sequence
  Description of Artificial Sequence: Synthetic oligonucleotide
  Antisense strand to SEQ ID NO: 882994
auccacagccacauuuccg

SEQ ID NO: 882996 - RNA, 19 nt, Artificial Sequence
  Description of Artificial Sequence: Synthetic oligonucleotide
  Sense strand starting at position 3690 of SEQ ID NO: 588692
cgcgguguuuagauguguu

SEQ ID NO: 882997 - RNA, 19 nt, Artificial Sequence
  Description of Artificial Sequence: Synthetic oligonucleotide
  Antisense strand to SEQ ID NO: 882996
aacacaucuaaacaccgcg

SEQ ID NO: 882998 - RNA, 19 nt, Artificial Sequence
  Description of Artificial Sequence: Synthetic oligonucleotide
  Sense strand starting at position 3886 of SEQ ID NO: 588692
gagaguuugcguguguauu

SEQ ID NO: 882999 - RNA, 19 nt, Artificial Sequence
  Description of Artificial Sequence: Synthetic oligonucleotide
  Antisense strand to SEQ ID NO: 882998
aauacacacgcaaacucuc

SEQ ID NO: 883000 - RNA, 19 nt, Artificial Sequence
  Description of Artificial Sequence: Synthetic oligonucleotide
  Sense strand starting at position 3887 of SEQ ID NO: 588692
agaguuugcguguguauuu

SEQ ID NO: 883001 - RNA, 19 nt, Artificial Sequence
  Description of Artificial Sequence: Synthetic oligonucleotide
  Antisense strand to SEQ ID NO: 883000
aaauacacacgcaaacucu

SEQ ID NO: 883002 - RNA, 19 nt, Artificial Sequence
  Description of Artificial Sequence: Synthetic oligonucleotide
  Sense strand starting at position 14 of SEQ ID NO: 588695
cucagaaacuguccguacu

SEQ ID NO: 883003 - RNA, 19 nt, Artificial Sequence
  Description of Artificial Sequence: Synthetic oligonucleotide
  Antisense strand to SEQ ID NO: 883002
aguacggacaguuucugag

SEQ ID NO: 883004 - RNA, 19 nt, Artificial Sequence
  Description of Artificial Sequence: Synthetic oligonucleotide
  Sense strand starting at position 383 of SEQ ID NO: 588695
auagcaucaccuuaguuua

SEQ ID NO: 883005 - RNA, 19 nt, Artificial Sequence
  Description of Artificial Sequence: Synthetic oligonucleotide
  Antisense strand to SEQ ID NO: 883004
uaaacuaaggugaugcuau

SEQ ID NO: 883006 - RNA, 19 nt, Artificial Sequence
  Description of Artificial Sequence: Synthetic oligonucleotide
  Sense strand starting at position 403 of SEQ ID NO: 588695
gggcauuucucccuagcag

SEQ ID NO: 883007 - RNA, 19 nt, Artificial Sequence
  Description of Artificial Sequence: Synthetic oligonucleotide
  Antisense strand to SEQ ID NO: 883006
cugcuagggagaaaugccc

SEQ ID NO: 883008 - RNA, 19 nt, Artificial Sequence
  Description of Artificial Sequence: Synthetic oligonucleotide
  Sense strand starting at position 418 of SEQ ID NO: 588695
gcaggagagcucugccaaa

SEQ ID NO: 883009 - RNA, 19 nt, Artificial Sequence
  Description of Artificial Sequence: Synthetic oligonucleotide
  Antisense strand to SEQ ID NO: 883008
uuuggcagagcucuccugc

SEQ ID NO: 883010 - RNA, 19 nt, Artificial Sequence
  Description of Artificial Sequence: Synthetic oligonucleotide
  Sense strand starting at position 768 of SEQ ID NO: 588695
gagguucucucgcccaaga

SEQ ID NO: 883011 - RNA, 19 nt, Artificial Sequence
  Description of Artificial Sequence: Synthetic oligonucleotide
  Antisense strand to SEQ ID NO: 883010
ucuugggcgagagaaccuc

SEQ ID NO: 883012 - RNA, 19 nt, Artificial Sequence
  Description of Artificial Sequence: Synthetic oligonucleotide
  Sense strand starting at position 791 of SEQ ID NO: 588695
acuucuuucugggcuaaau

SEQ ID NO: 883013 - RNA, 19 nt, Artificial Sequence
  Description of Artificial Sequence: Synthetic oligonucleotide
  Antisense strand to SEQ ID NO: 883012
auuuagcccagaaagaagu

SEQ ID NO: 883014 - RNA, 19 nt, Artificial Sequence
  Description of Artificial Sequence: Synthetic oligonucleotide
  Sense strand starting at position 917 of SEQ ID NO: 588695
cugagacugccucagauua

SEQ ID NO: 883015 - RNA, 19 nt, Artificial Sequence
  Description of Artificial Sequence: Synthetic oligonucleotide
  Antisense strand to SEQ ID NO: 883014
uaaucugaggcagucucag

SEQ ID NO: 883016 - RNA, 19 nt, Artificial Sequence
  Description of Artificial Sequence: Synthetic oligonucleotide
  Sense strand starting at position 1265 of SEQ ID NO: 588695
ucguuaccuguccuauguu

SEQ ID NO: 883017 - RNA, 19 nt, Artificial Sequence
  Description of Artificial Sequence: Synthetic oligonucleotide
  Antisense strand to SEQ ID NO: 883016
aacauaggacagguaacga

SEQ ID NO: 883018 - RNA, 19 nt, Artificial Sequence
  Description of Artificial Sequence: Synthetic oligonucleotide
  Sense strand starting at position 1268 of SEQ ID NO: 588695
uuaccuguccuauguugau

SEQ ID NO: 883019 - RNA, 19 nt, Artificial Sequence
  Description of Artificial Sequence: Synthetic oligonucleotide
  Antisense strand to SEQ ID NO: 883018
aucaacauaggacagguaa

SEQ ID NO: 883020 - RNA, 19 nt, Artificial Sequence
  Description of Artificial Sequence: Synthetic oligonucleotide
  Sense strand starting at position 1985 of SEQ ID NO: 588695
uccugcucugcauaaauga

SEQ ID NO: 883021 - RNA, 19 nt, Artificial Sequence
  Description of Artificial Sequence: Synthetic oligonucleotide
  Antisense strand to SEQ ID NO: 883020
ucauuuaugcagagcagga

SEQ ID NO: 883022 - RNA, 19 nt, Artificial Sequence
  Description of Artificial Sequence: Synthetic oligonucleotide
  Sense strand starting at position 2115 of SEQ ID NO: 588695
cggguucgcccagcuguaa

SEQ ID NO: 883023 - RNA, 19 nt, Artificial Sequence
  Description of Artificial Sequence: Synthetic oligonucleotide
  Antisense strand to SEQ ID NO: 883022
uuacagcugggcgaacccg

SEQ ID NO: 883024 - RNA, 19 nt, Artificial Sequence
  Description of Artificial Sequence: Synthetic oligonucleotide
  Sense strand starting at position 2138 of SEQ ID NO: 588695
caggguuccgggcaguaaa

SEQ ID NO: 883025 - RNA, 19 nt, Artificial Sequence
  Description of Artificial Sequence: Synthetic oligonucleotide
  Antisense strand to SEQ ID NO: 883024
uuuacugcccggaacccug

SEQ ID NO: 883026 - RNA, 19 nt, Artificial Sequence
  Description of Artificial Sequence: Synthetic oligonucleotide
  Sense strand starting at position 2291 of SEQ ID NO: 588695
auuaaccgcccugaagauu

SEQ ID NO: 883027 - RNA, 19 nt, Artificial Sequence
  Description of Artificial Sequence: Synthetic oligonucleotide
  Antisense strand to SEQ ID NO: 883026
aaucuucagggcgguuaau

SEQ ID NO: 883028 - RNA, 19 nt, Artificial Sequence
  Description of Artificial Sequence: Synthetic oligonucleotide
  Sense strand starting at position 2355 of SEQ ID NO: 588695
gaggucacuuacgugucaa

SEQ ID NO: 883029 - RNA, 19 nt, Artificial Sequence
  Description of Artificial Sequence: Synthetic oligonucleotide
  Antisense strand to SEQ ID NO: 883028
uugacacguaagugaccuc

SEQ ID NO: 883030 - RNA, 19 nt, Artificial Sequence
  Description of Artificial Sequence: Synthetic oligonucleotide
  Sense strand starting at position 2367 of SEQ ID NO: 588695
gugucaauugccgaacaaa

SEQ ID NO: 883031 - RNA, 19 nt, Artificial Sequence
  Description of Artificial Sequence: Synthetic oligonucleotide
  Antisense strand to SEQ ID NO: 883030
uuuguucggcaauugacac

SEQ ID NO: 883032 - RNA, 19 nt, Artificial Sequence
  Description of Artificial Sequence: Synthetic oligonucleotide
  Sense strand starting at position 2494 of SEQ ID NO: 588695
cuccuagaauuggcucgaa

SEQ ID NO: 883033 - RNA, 19 nt, Artificial Sequence
  Description of Artificial Sequence: Synthetic oligonucleotide
  Antisense strand to SEQ ID NO: 883032
uucgagccaauucuaggag

SEQ ID NO: 883034 - RNA, 19 nt, Artificial Sequence
  Description of Artificial Sequence: Synthetic oligonucleotide
  Sense strand starting at position 2497 of SEQ ID NO: 588695
cuagaauuggcucgaaagc

SEQ ID NO: 883035 - RNA, 19 nt, Artificial Sequence
  Description of Artificial Sequence: Synthetic oligonucleotide
  Antisense strand to SEQ ID NO: 883034
gcuuucgagccaauucuag

SEQ ID NO: 883036 - RNA, 19 nt, Artificial Sequence
  Description of Artificial Sequence: Synthetic oligonucleotide
  Sense strand starting at position 2534 of SEQ ID NO: 588695
acuuucgaaaucugcgaua

SEQ ID NO: 883037 - RNA, 19 nt, Artificial Sequence
  Description of Artificial Sequence: Synthetic oligonucleotide
  Antisense strand to SEQ ID NO: 883036
uaucgcagauuucgaaagu

SEQ ID NO: 883038 - RNA, 19 nt, Artificial Sequence
  Description of Artificial Sequence: Synthetic oligonucleotide
  Sense strand starting at position 2536 of SEQ ID NO: 588695
uuucgaaaucugcgauacu

SEQ ID NO: 883039 - RNA, 19 nt, Artificial Sequence
  Description of Artificial Sequence: Synthetic oligonucleotide
  Antisense strand to SEQ ID NO: 883038
aguaucgcagauuucgaaa

SEQ ID NO: 883040 - RNA, 19 nt, Artificial Sequence
  Description of Artificial Sequence: Synthetic oligonucleotide
  Sense strand starting at position 2613 of SEQ ID NO: 588695
gaauauuuggugugcuagu

SEQ ID NO: 883041 - RNA, 19 nt, Artificial Sequence
  Description of Artificial Sequence: Synthetic oligonucleotide
  Antisense strand to SEQ ID NO: 883040
acuagcacaccaaauauuc

SEQ ID NO: 883042 - RNA, 19 nt, Artificial Sequence
  Description of Artificial Sequence: Synthetic oligonucleotide
  Sense strand starting at position 2736 of SEQ ID NO: 588695
agcacaguccuguaacagu

SEQ ID NO: 883043 - RNA, 19 nt, Artificial Sequence
  Description of Artificial Sequence: Synthetic oligonucleotide
  Antisense strand to SEQ ID NO: 883042
acuguuacaggacugugcu

SEQ ID NO: 883044 - RNA, 19 nt, Artificial Sequence
  Description of Artificial Sequence: Synthetic oligonucleotide
  Sense strand starting at position 2782 of SEQ ID NO: 588695
agaggaaguucagaugaga

SEQ ID NO: 883045 - RNA, 19 nt, Artificial Sequence
  Description of Artificial Sequence: Synthetic oligonucleotide
  Antisense strand to SEQ ID NO: 883044
ucucaucugaacuuccucu

SEQ ID NO: 883046 - RNA, 19 nt, Artificial Sequence
  Description of Artificial Sequence: Synthetic oligonucleotide
  Sense strand starting at position 2934 of SEQ ID NO: 588695
gugauuuacugugacaaga

SEQ ID NO: 883047 - RNA, 19 nt, Artificial Sequence
  Description of Artificial Sequence: Synthetic oligonucleotide
  Antisense strand to SEQ ID NO: 883046
ucuugucacaguaaaucac

SEQ ID NO: 883048 - RNA, 19 nt, Artificial Sequence
  Description of Artificial Sequence: Synthetic oligonucleotide
  Sense strand starting at position 2936 of SEQ ID NO: 588695
gauuuacugugacaagaaa

SEQ ID NO: 883049 - RNA, 19 nt, Artificial Sequence
  Description of Artificial Sequence: Synthetic oligonucleotide
  Antisense strand to SEQ ID NO: 883048
uuucuugucacaguaaauc

SEQ ID NO: 883050 - RNA, 19 nt, Artificial Sequence
  Description of Artificial Sequence: Synthetic oligonucleotide
  Sense strand starting at position 3071 of SEQ ID NO: 588695
guuugagauuaauuaacuc

SEQ ID NO: 883051 - RNA, 19 nt, Artificial Sequence
  Description of Artificial Sequence: Synthetic oligonucleotide
  Antisense strand to SEQ ID NO: 883050
gaguuaauuaaucucaaac

SEQ ID NO: 883052 - RNA, 19 nt, Artificial Sequence
  Description of Artificial Sequence: Synthetic oligonucleotide
  Sense strand starting at position 3126 of SEQ ID NO: 588695
ucugaaagauaccugcaga

SEQ ID NO: 883053 - RNA, 19 nt, Artificial Sequence
  Description of Artificial Sequence: Synthetic oligonucleotide
  Antisense strand to SEQ ID NO: 883052
ucugcagguaucuuucaga

SEQ ID NO: 883054 - RNA, 19 nt, Artificial Sequence
  Description of Artificial Sequence: Synthetic oligonucleotide
  Sense strand starting at position 3169 of SEQ ID NO: 588695
agcauagcauuugacauuu

SEQ ID NO: 883055 - RNA, 19 nt, Artificial Sequence
  Description of Artificial Sequence: Synthetic oligonucleotide
  Antisense strand to SEQ ID NO: 883054
aaaugucaaaugcuaugcu

SEQ ID NO: 883056 - RNA, 19 nt, Artificial Sequence
  Description of Artificial Sequence: Synthetic oligonucleotide
  Sense strand starting at position 3194 of SEQ ID NO: 588695
uuguauaagguaugcuaua

SEQ ID NO: 883057 - RNA, 19 nt, Artificial Sequence
  Description of Artificial Sequence: Synthetic oligonucleotide
  Antisense strand to SEQ ID NO: 883056
uauagcauaccuuauacaa

SEQ ID NO: 883058 - RNA, 19 nt, Artificial Sequence
  Description of Artificial Sequence: Synthetic oligonucleotide
  Sense strand starting at position 3195 of SEQ ID NO: 588695
uguauaagguaugcuauau

SEQ ID NO: 883059 - RNA, 19 nt, Artificial Sequence
  Description of Artificial Sequence: Synthetic oligonucleotide
  Antisense strand to SEQ ID NO: 883058
auauagcauaccuuauaca

SEQ ID NO: 883060 - RNA, 19 nt, Artificial Sequence
  Description of Artificial Sequence: Synthetic oligonucleotide
  Sense strand starting at position 3253 of SEQ ID NO: 588695
cccacauuauagcugaaga

SEQ ID NO: 883061 - RNA, 19 nt, Artificial Sequence
  Description of Artificial Sequence: Synthetic oligonucleotide
  Antisense strand to SEQ ID NO: 883060
ucuucagcuauaauguggg

SEQ ID NO: 883062 - RNA, 19 nt, Artificial Sequence
  Description of Artificial Sequence: Synthetic oligonucleotide
  Sense strand starting at position 3298 of SEQ ID NO: 588695
ugugcagaaguguauguau

SEQ ID NO: 883063 - RNA, 19 nt, Artificial Sequence
  Description of Artificial Sequence: Synthetic oligonucleotide
  Antisense strand to SEQ ID NO: 883062
auacauacacuucugcaca

SEQ ID NO: 883064 - RNA, 19 nt, Artificial Sequence
  Description of Artificial Sequence: Synthetic oligonucleotide
  Sense strand starting at position 3300 of SEQ ID NO: 588695
ugcagaaguguauguauuu

SEQ ID NO: 883065 - RNA, 19 nt, Artificial Sequence
  Description of Artificial Sequence: Synthetic oligonucleotide
  Antisense strand to SEQ ID NO: 883064
aaauacauacacuucugca

SEQ ID NO: 883066 - RNA, 19 nt, Artificial Sequence
  Description of Artificial Sequence: Synthetic oligonucleotide
  Sense strand starting at position 3366 of SEQ ID NO: 588695
uagcaugugcaaugaauug

SEQ ID NO: 883067 - RNA, 19 nt, Artificial Sequence
  Description of Artificial Sequence: Synthetic oligonucleotide
  Antisense strand to SEQ ID NO: 883066
caauucauugcacaugcua

SEQ ID NO: 883068 - RNA, 19 nt, Artificial Sequence
  Description of Artificial Sequence: Synthetic oligonucleotide
  Sense strand starting at position 3383 of SEQ ID NO: 588695
ugugcuguacacuggagaa

SEQ ID NO: 883069 - RNA, 19 nt, Artificial Sequence
  Description of Artificial Sequence: Synthetic oligonucleotide
  Antisense strand to SEQ ID NO: 883068
uucuccaguguacagcaca

SEQ ID NO: 883070 - RNA, 19 nt, Artificial Sequence
  Description of Artificial Sequence: Synthetic oligonucleotide
  Sense strand starting at position 3443 of SEQ ID NO: 588695
cucugaauacuguagagua

SEQ ID NO: 883071 - RNA, 19 nt, Artificial Sequence
  Description of Artificial Sequence: Synthetic oligonucleotide
  Antisense strand to SEQ ID NO: 883070
uacucuacaguauucagag

SEQ ID NO: 883072 - RNA, 19 nt, Artificial Sequence
  Description of Artificial Sequence: Synthetic oligonucleotide
  Sense strand starting at position 3448 of SEQ ID NO: 588695
aauacuguagaguaaaugu

SEQ ID NO: 883073 - RNA, 19 nt, Artificial Sequence
  Description of Artificial Sequence: Synthetic oligonucleotide
  Antisense strand to SEQ ID NO: 883072
acauuuacucuacaguauu

SEQ ID NO: 883074 - RNA, 19 nt, Artificial Sequence
  Description of Artificial Sequence: Synthetic oligonucleotide
  Sense strand starting at position 3466 of SEQ ID NO: 588695
ugguuuauuauugaaggua

SEQ ID NO: 883075 - RNA, 19 nt, Artificial Sequence
  Description of Artificial Sequence: Synthetic oligonucleotide
  Antisense strand to SEQ ID NO: 883074
uaccuucaauaauaaacca

SEQ ID NO: 883076 - RNA, 19 nt, Artificial Sequence
  Description of Artificial Sequence: Synthetic oligonucleotide
  Sense strand starting at position 3474 of SEQ ID NO: 588695
uauugaagguauguaugua

SEQ ID NO: 883077 - RNA, 19 nt, Artificial Sequence
  Description of Artificial Sequence: Synthetic oligonucleotide
  Antisense strand to SEQ ID NO: 883076
uacauacauaccuucaaua

SEQ ID NO: 883078 - RNA, 19 nt, Artificial Sequence
  Description of Artificial Sequence: Synthetic oligonucleotide
  Sense strand starting at position 3475 of SEQ ID NO: 588695
auugaagguauguauguau

SEQ ID NO: 883079 - RNA, 19 nt, Artificial Sequence
  Description of Artificial Sequence: Synthetic oligonucleotide
  Antisense strand to SEQ ID NO: 883078
auacauacauaccuucaau

SEQ ID NO: 883080 - RNA, 19 nt, Artificial Sequence
  Description of Artificial Sequence: Synthetic oligonucleotide
  Sense strand starting at position 3695 of SEQ ID NO: 588695
aggguuggcuggucucgaa

SEQ ID NO: 883081 - RNA, 19 nt, Artificial Sequence
  Description of Artificial Sequence: Synthetic oligonucleotide
  Antisense strand to SEQ ID NO: 883080
uucgagaccagccaacccu

SEQ ID NO: 883082 - RNA, 19 nt, Artificial Sequence
  Description of Artificial Sequence: Synthetic oligonucleotide
  Sense strand starting at position 73 of SEQ ID NO: 588696
guacuucugaggcaaugga

SEQ ID NO: 883083 - RNA, 19 nt, Artificial Sequence
  Description of Artificial Sequence: Synthetic oligonucleotide
  Antisense strand to SEQ ID NO: 883082
uccauugccucagaaguac

SEQ ID NO: 883084 - RNA, 19 nt, Artificial Sequence
  Description of Artificial Sequence: Synthetic oligonucleotide
  Sense strand starting at position 228 of SEQ ID NO: 588696
uugucuguccuggaauucu

SEQ ID NO: 883085 - RNA, 19 nt, Artificial Sequence
  Description of Artificial Sequence: Synthetic oligonucleotide
  Antisense strand to SEQ ID NO: 883084
agaauuccaggacagacaa

SEQ ID NO: 883086 - RNA, 19 nt, Artificial Sequence
  Description of Artificial Sequence: Synthetic oligonucleotide
  Sense strand starting at position 236 of SEQ ID NO: 588696
ccuggaauucugugaguug

SEQ ID NO: 883087 - RNA, 19 nt, Artificial Sequence
  Description of Artificial Sequence: Synthetic oligonucleotide
  Antisense strand to SEQ ID NO: 883086
caacucacagaauuccagg

SEQ ID NO: 883088 - RNA, 19 nt, Artificial Sequence
  Description of Artificial Sequence: Synthetic oligonucleotide
  Sense strand starting at position 239 of SEQ ID NO: 588696
ggaauucugugaguugauu

SEQ ID NO: 883089 - RNA, 19 nt, Artificial Sequence
  Description of Artificial Sequence: Synthetic oligonucleotide
  Antisense strand to SEQ ID NO: 883088
aaucaacucacagaauucc

SEQ ID NO: 883090 - RNA, 19 nt, Artificial Sequence
  Description of Artificial Sequence: Synthetic oligonucleotide
  Sense strand starting at position 294 of SEQ ID NO: 588696
guggcaugaggaggugaua

SEQ ID NO: 883091 - RNA, 19 nt, Artificial Sequence
  Description of Artificial Sequence: Synthetic oligonucleotide
  Antisense strand to SEQ ID NO: 883090
uaucaccuccucaugccac

SEQ ID NO: 883092 - RNA, 19 nt, Artificial Sequence
  Description of Artificial Sequence: Synthetic oligonucleotide
  Sense strand starting at position 339 of SEQ ID NO: 588696
ccacguaugcaacaauuaa

SEQ ID NO: 883093 - RNA, 19 nt, Artificial Sequence
  Description of Artificial Sequence: Synthetic oligonucleotide
  Antisense strand to SEQ ID NO: 883092
uuaauuguugcauacgugg

SEQ ID NO: 883094 - RNA, 19 nt, Artificial Sequence
  Description of Artificial Sequence: Synthetic oligonucleotide
  Sense strand starting at position 363 of SEQ ID NO: 588696
augacauauuuggacauua

SEQ ID NO: 883095 - RNA, 19 nt, Artificial Sequence
  Description of Artificial Sequence: Synthetic oligonucleotide
  Antisense strand to SEQ ID NO: 883094
uaauguccaaauaugucau

SEQ ID NO: 883096 - RNA, 19 nt, Artificial Sequence
  Description of Artificial Sequence: Synthetic oligonucleotide
  Sense strand starting at position 373 of SEQ ID NO: 588696
uggacauuagcauguggaa

SEQ ID NO: 883097 - RNA, 19 nt, Artificial Sequence
  Description of Artificial Sequence: Synthetic oligonucleotide
  Antisense strand to SEQ ID NO: 883096
uuccacaugcuaaugucca

SEQ ID NO: 883098 - RNA, 19 nt, Artificial Sequence
  Description of Artificial Sequence: Synthetic oligonucleotide
  Sense strand starting at position 441 of SEQ ID NO: 588696
gcaaauaaacucugaagca

SEQ ID NO: 883099 - RNA, 19 nt, Artificial Sequence
  Description of Artificial Sequence: Synthetic oligonucleotide
  Antisense strand to SEQ ID NO: 883098
ugcuucagaguuuauuugc

SEQ ID NO: 883100 - RNA, 19 nt, Artificial Sequence
  Description of Artificial Sequence: Synthetic oligonucleotide
  Sense strand starting at position 517 of SEQ ID NO: 588696
uguccauuacacgaacauu

SEQ ID NO: 883101 - RNA, 19 nt, Artificial Sequence
  Description of Artificial Sequence: Synthetic oligonucleotide
  Antisense strand to SEQ ID NO: 883100
aauguucguguaauggaca

SEQ ID NO: 883102 - RNA, 19 nt, Artificial Sequence
  Description of Artificial Sequence: Synthetic oligonucleotide
  Sense strand starting at position 541 of SEQ ID NO: 588696
ucuggugauucuccugaca

SEQ ID NO: 883103 - RNA, 19 nt, Artificial Sequence
  Description of Artificial Sequence: Synthetic oligonucleotide
  Antisense strand to SEQ ID NO: 883102
ugucaggagaaucaccaga

SEQ ID NO: 883104 - RNA, 19 nt, Artificial Sequence
  Description of Artificial Sequence: Synthetic oligonucleotide
  Sense strand starting at position 851 of SEQ ID NO: 588696
acagaaucuuaggcuugga

SEQ ID NO: 883105 - RNA, 19 nt, Artificial Sequence
  Description of Artificial Sequence: Synthetic oligonucleotide
  Antisense strand to SEQ ID NO: 883104
uccaagccuaagauucugu

SEQ ID NO: 883106 - RNA, 19 nt, Artificial Sequence
  Description of Artificial Sequence: Synthetic oligonucleotide
  Sense strand starting at position 854 of SEQ ID NO: 588696
gaaucuuaggcuuggaaag

SEQ ID NO: 883107 - RNA, 19 nt, Artificial Sequence
  Description of Artificial Sequence: Synthetic oligonucleotide
  Antisense strand to SEQ ID NO: 883106
cuuuccaagccuaagauuc

SEQ ID NO: 883108 - RNA, 19 nt, Artificial Sequence
  Description of Artificial Sequence: Synthetic oligonucleotide
  Sense strand starting at position 990 of SEQ ID NO: 588696
cccucagagccauaguauu

SEQ ID NO: 883109 - RNA, 19 nt, Artificial Sequence
  Description of Artificial Sequence: Synthetic oligonucleotide
  Antisense strand to SEQ ID NO: 883108
aauacuauggcucugaggg

SEQ ID NO: 883110 - RNA, 19 nt, Artificial Sequence
  Description of Artificial Sequence: Synthetic oligonucleotide
  Sense strand starting at position 1027 of SEQ ID NO: 588696
auuaguugguaaucucacu

SEQ ID NO: 883111 - RNA, 19 nt, Artificial Sequence
  Description of Artificial Sequence: Synthetic oligonucleotide
  Antisense strand to SEQ ID NO: 883110
agugagauuaccaacuaau

SEQ ID NO: 883112 - RNA, 19 nt, Artificial Sequence
  Description of Artificial Sequence: Synthetic oligonucleotide
  Sense strand starting at position 1122 of SEQ ID NO: 588696
gugagcaaucaauagcaau

SEQ ID NO: 883113 - RNA, 19 nt, Artificial Sequence
  Description of Artificial Sequence: Synthetic oligonucleotide
  Antisense strand to SEQ ID NO: 883112
auugcuauugauugcucac

SEQ ID NO: 883114 - RNA, 19 nt, Artificial Sequence
  Description of Artificial Sequence: Synthetic oligonucleotide
  Sense strand starting at position 1487 of SEQ ID NO: 588696
ugcacauauuuggugcaga

SEQ ID NO: 883115 - RNA, 19 nt, Artificial Sequence
  Description of Artificial Sequence: Synthetic oligonucleotide
  Antisense strand to SEQ ID NO: 883114
ucugcaccaaauaugugca

SEQ ID NO: 883116 - RNA, 19 nt, Artificial Sequence
  Description of Artificial Sequence: Synthetic oligonucleotide
  Sense strand starting at position 1550 of SEQ ID NO: 588696
aggaacaagugagagaaau

SEQ ID NO: 883117 - RNA, 19 nt, Artificial Sequence
  Description of Artificial Sequence: Synthetic oligonucleotide
  Antisense strand to SEQ ID NO: 883116
auuucucucacuuguuccu

SEQ ID NO: 883118 - RNA, 19 nt, Artificial Sequence
  Description of Artificial Sequence: Synthetic oligonucleotide
  Sense strand starting at position 1574 of SEQ ID NO: 588696
gcaggaggacauuagcuua

SEQ ID NO: 883119 - RNA, 19 nt, Artificial Sequence
  Description of Artificial Sequence: Synthetic oligonucleotide
  Antisense strand to SEQ ID NO: 883118
uaagcuaauguccuccugc

SEQ ID NO: 883120 - RNA, 19 nt, Artificial Sequence
  Description of Artificial Sequence: Synthetic oligonucleotide
  Sense strand starting at position 1701 of SEQ ID NO: 588696
aacauaauaguaugagagu

SEQ ID NO: 883121 - RNA, 19 nt, Artificial Sequence
  Description of Artificial Sequence: Synthetic oligonucleotide
  Antisense strand to SEQ ID NO: 883120
acucucauacuauuauguu

SEQ ID NO: 883122 - RNA, 19 nt, Artificial Sequence
  Description of Artificial Sequence: Synthetic oligonucleotide
  Sense strand starting at position 1732 of SEQ ID NO: 588696
ucguuacucacaugaggac

SEQ ID NO: 883123 - RNA, 19 nt, Artificial Sequence
  Description of Artificial Sequence: Synthetic oligonucleotide
  Antisense strand to SEQ ID NO: 883122
guccucaugugaguaacga

SEQ ID NO: 883124 - RNA, 19 nt, Artificial Sequence
  Description of Artificial Sequence: Synthetic oligonucleotide
  Sense strand starting at position 2003 of SEQ ID NO: 588696
guaacaugagagugaguca

SEQ ID NO: 883125 - RNA, 19 nt, Artificial Sequence
  Description of Artificial Sequence: Synthetic oligonucleotide
  Antisense strand to SEQ ID NO: 883124
ugacucacucucauguuac

SEQ ID NO: 883126 - RNA, 19 nt, Artificial Sequence
  Description of Artificial Sequence: Synthetic oligonucleotide
  Sense strand starting at position 2047 of SEQ ID NO: 588696
acgaaagccuggcuuauuu

SEQ ID NO: 883127 - RNA, 19 nt, Artificial Sequence
  Description of Artificial Sequence: Synthetic oligonucleotide
  Antisense strand to SEQ ID NO: 883126
aaauaagccaggcuuucgu

SEQ ID NO: 883128 - RNA, 19 nt, Artificial Sequence
  Description of Artificial Sequence: Synthetic oligonucleotide
  Sense strand starting at position 2140 of SEQ ID NO: 588696
uaugguugguguuuaggaa

SEQ ID NO: 883129 - RNA, 19 nt, Artificial Sequence
  Description of Artificial Sequence: Synthetic oligonucleotide
  Antisense strand to SEQ ID NO: 883128
uuccuaaacaccaaccaua

SEQ ID NO: 883130 - RNA, 19 nt, Artificial Sequence
  Description of Artificial Sequence: Synthetic oligonucleotide
  Sense strand starting at position 2141 of SEQ ID NO: 588696
augguugguguuuaggaau

SEQ ID NO: 883131 - RNA, 19 nt, Artificial Sequence
  Description of Artificial Sequence: Synthetic oligonucleotide
  Antisense strand to SEQ ID NO: 883130
auuccuaaacaccaaccau

SEQ ID NO: 883132 - RNA, 19 nt, Artificial Sequence
  Description of Artificial Sequence: Synthetic oligonucleotide
  Sense strand starting at position 2355 of SEQ ID NO: 588696
cuuccaauaguauggugaa

SEQ ID NO: 883133 - RNA, 19 nt, Artificial Sequence
  Description of Artificial Sequence: Synthetic oligonucleotide
  Antisense strand to SEQ ID NO: 883132
uucaccauacuauuggaag

SEQ ID NO: 883134 - RNA, 19 nt, Artificial Sequence
  Description of Artificial Sequence: Synthetic oligonucleotide
  Sense strand starting at position 2536 of SEQ ID NO: 588696
uuuaacauaccuugagagu

SEQ ID NO: 883135 - RNA, 19 nt, Artificial Sequence
  Description of Artificial Sequence: Synthetic oligonucleotide
  Antisense strand to SEQ ID NO: 883134
acucucaagguauguuaaa

SEQ ID NO: 883136 - RNA, 19 nt, Artificial Sequence
  Description of Artificial Sequence: Synthetic oligonucleotide
  Sense strand starting at position 2658 of SEQ ID NO: 588696
gaagaauaccagcaugucu

SEQ ID NO: 883137 - RNA, 19 nt, Artificial Sequence
  Description of Artificial Sequence: Synthetic oligonucleotide
  Antisense strand to SEQ ID NO: 883136
agacaugcugguauucuuc

SEQ ID NO: 883138 - RNA, 19 nt, Artificial Sequence
  Description of Artificial Sequence: Synthetic oligonucleotide
  Sense strand starting at position 2660 of SEQ ID NO: 588696
agaauaccagcaugucuua

SEQ ID NO: 883139 - RNA, 19 nt, Artificial Sequence
  Description of Artificial Sequence: Synthetic oligonucleotide
  Antisense strand to SEQ ID NO: 883138
uaagacaugcugguauucu

SEQ ID NO: 883140 - RNA, 19 nt, Artificial Sequence
  Description of Artificial Sequence: Synthetic oligonucleotide
  Sense strand starting at position 2739 of SEQ ID NO: 588696
uuggcauucccugacuuau

SEQ ID NO: 883141 - RNA, 19 nt, Artificial Sequence
  Description of Artificial Sequence: Synthetic oligonucleotide
  Antisense strand to SEQ ID NO: 883140
auaagucagggaaugccaa

SEQ ID NO: 883142 - RNA, 19 nt, Artificial Sequence
  Description of Artificial Sequence: Synthetic oligonucleotide
  Sense strand starting at position 2741 of SEQ ID NO: 588696
ggcauucccugacuuauag

SEQ ID NO: 883143 - RNA, 19 nt, Artificial Sequence
  Description of Artificial Sequence: Synthetic oligonucleotide
  Antisense strand to SEQ ID NO: 883142
cuauaagucagggaaugcc

SEQ ID NO: 883144 - RNA, 19 nt, Artificial Sequence
  Description of Artificial Sequence: Synthetic oligonucleotide
  Sense strand starting at position 2756 of SEQ ID NO: 588696
auaguuguaucacuccaau

SEQ ID NO: 883145 - RNA, 19 nt, Artificial Sequence
  Description of Artificial Sequence: Synthetic oligonucleotide
  Antisense strand to SEQ ID NO: 883144
auuggagugauacaacuau

SEQ ID NO: 883146 - RNA, 19 nt, Artificial Sequence
  Description of Artificial Sequence: Synthetic oligonucleotide
  Sense strand starting at position 2839 of SEQ ID NO: 588696
aggauaccauccguuugau

SEQ ID NO: 883147 - RNA, 19 nt, Artificial Sequence
  Description of Artificial Sequence: Synthetic oligonucleotide
  Antisense strand to SEQ ID NO: 883146
aucaaacggaugguauccu

SEQ ID NO: 883148 - RNA, 19 nt, Artificial Sequence
  Description of Artificial Sequence: Synthetic oligonucleotide
  Sense strand starting at position 2842 of SEQ ID NO: 588696
auaccauccguuugauuag

SEQ ID NO: 883149 - RNA, 19 nt, Artificial Sequence
  Description of Artificial Sequence: Synthetic oligonucleotide
  Antisense strand to SEQ ID NO: 883148
cuaaucaaacggaugguau

SEQ ID NO: 883150 - RNA, 19 nt, Artificial Sequence
  Description of Artificial Sequence: Synthetic oligonucleotide
  Sense strand starting at position 2853 of SEQ ID NO: 588696
uugauuagugcccacccua

SEQ ID NO: 883151 - RNA, 19 nt, Artificial Sequence
  Description of Artificial Sequence: Synthetic oligonucleotide
  Antisense strand to SEQ ID NO: 883150
uagggugggcacuaaucaa

SEQ ID NO: 883152 - RNA, 19 nt, Artificial Sequence
  Description of Artificial Sequence: Synthetic oligonucleotide
  Sense strand starting at position 2932 of SEQ ID NO: 588696
uucugagguccucaguaga

SEQ ID NO: 883153 - RNA, 19 nt, Artificial Sequence
  Description of Artificial Sequence: Synthetic oligonucleotide
  Antisense strand to SEQ ID NO: 883152
ucuacugaggaccucagaa

SEQ ID NO: 883154 - RNA, 19 nt, Artificial Sequence
  Description of Artificial Sequence: Synthetic oligonucleotide
  Sense strand starting at position 2935 of SEQ ID NO: 588696
ugagguccucaguagacau

SEQ ID NO: 883155 - RNA, 19 nt, Artificial Sequence
  Description of Artificial Sequence: Synthetic oligonucleotide
  Antisense strand to SEQ ID NO: 883154
augucuacugaggaccuca

SEQ ID NO: 883156 - RNA, 19 nt, Artificial Sequence
  Description of Artificial Sequence: Synthetic oligonucleotide
  Sense strand starting at position 3192 of SEQ ID NO: 588696
ugaauauaggccugaauga

SEQ ID NO: 883157 - RNA, 19 nt, Artificial Sequence
  Description of Artificial Sequence: Synthetic oligonucleotide
  Antisense strand to SEQ ID NO: 883156
ucauucaggccuauauuca

SEQ ID NO: 883158 - RNA, 19 nt, Artificial Sequence
  Description of Artificial Sequence: Synthetic oligonucleotide
  Sense strand starting at position 3459 of SEQ ID NO: 588696
cuguguaguaccuacagau

SEQ ID NO: 883159 - RNA, 19 nt, Artificial Sequence
  Description of Artificial Sequence: Synthetic oligonucleotide
  Antisense strand to SEQ ID NO: 883158
aucuguagguacuacacag

SEQ ID NO: 883160 - RNA, 19 nt, Artificial Sequence
  Description of Artificial Sequence: Synthetic oligonucleotide
  Sense strand starting at position 3624 of SEQ ID NO: 588696
cagugacuggcugaggaau

SEQ ID NO: 883161 - RNA, 19 nt, Artificial Sequence
  Description of Artificial Sequence: Synthetic oligonucleotide
  Antisense strand to SEQ ID NO: 883160
auuccucagccagucacug

SEQ ID NO: 883162 - RNA, 19 nt, Artificial Sequence
  Description of Artificial Sequence: Synthetic oligonucleotide
  Sense strand starting at position 107 of SEQ ID NO: 588697
gcaacuuaucaucaagggu

SEQ ID NO: 883163 - RNA, 19 nt, Artificial Sequence
  Description of Artificial Sequence: Synthetic oligonucleotide
  Antisense strand to SEQ ID NO: 883162
acccuugaugauaaguugc

SEQ ID NO: 883164 - RNA, 19 nt, Artificial Sequence
  Description of Artificial Sequence: Synthetic oligonucleotide
  Sense strand starting at position 125 of SEQ ID NO: 588697
uggucauggugucuggaaa

SEQ ID NO: 883165 - RNA, 19 nt, Artificial Sequence
  Description of Artificial Sequence: Synthetic oligonucleotide
  Antisense strand to SEQ ID NO: 883164
uuuccagacaccaugacca

SEQ ID NO: 883166 - RNA, 19 nt, Artificial Sequence
  Description of Artificial Sequence: Synthetic oligonucleotide
  Sense strand starting at position 155 of SEQ ID NO: 588697
ucagguucuuugcugauuu

SEQ ID NO: 883167 - RNA, 19 nt, Artificial Sequence
  Description of Artificial Sequence: Synthetic oligonucleotide
  Antisense strand to SEQ ID NO: 883166
aaaucagcaaagaaccuga

SEQ ID NO: 883168 - RNA, 19 nt, Artificial Sequence
  Description of Artificial Sequence: Synthetic oligonucleotide
  Sense strand starting at position 297 of SEQ ID NO: 588697
uguguuagggcuuaucaca

SEQ ID NO: 883169 - RNA, 19 nt, Artificial Sequence
  Description of Artificial Sequence: Synthetic oligonucleotide
  Antisense strand to SEQ ID NO: 883168
ugugauaagcccuaacaca

SEQ ID NO: 883170 - RNA, 19 nt, Artificial Sequence
  Description of Artificial Sequence: Synthetic oligonucleotide
  Sense strand starting at position 366 of SEQ ID NO: 588697
caagcuuaacagcgaauga

SEQ ID NO: 883171 - RNA, 19 nt, Artificial Sequence
  Description of Artificial Sequence: Synthetic oligonucleotide
  Antisense strand to SEQ ID NO: 883170
ucauucgcuguuaagcuug

SEQ ID NO: 883172 - RNA, 19 nt, Artificial Sequence
  Description of Artificial Sequence: Synthetic oligonucleotide
  Sense strand starting at position 417 of SEQ ID NO: 588697
cuccaagagccugagguau

SEQ ID NO: 883173 - RNA, 19 nt, Artificial Sequence
  Description of Artificial Sequence: Synthetic oligonucleotide
  Antisense strand to SEQ ID NO: 883172
auaccucaggcucuuggag

SEQ ID NO: 883174 - RNA, 19 nt, Artificial Sequence
  Description of Artificial Sequence: Synthetic oligonucleotide
  Sense strand starting at position 431 of SEQ ID NO: 588697
gguauaaauuacucuaguc

SEQ ID NO: 883175 - RNA, 19 nt, Artificial Sequence
  Description of Artificial Sequence: Synthetic oligonucleotide
  Antisense strand to SEQ ID NO: 883174
gacuagaguaauuuauacc

SEQ ID NO: 883176 - RNA, 19 nt, Artificial Sequence
  Description of Artificial Sequence: Synthetic oligonucleotide
  Sense strand starting at position 438 of SEQ ID NO: 588697
auuacucuagucugaguua

SEQ ID NO: 883177 - RNA, 19 nt, Artificial Sequence
  Description of Artificial Sequence: Synthetic oligonucleotide
  Antisense strand to SEQ ID NO: 883176
uaacucagacuagaguaau

SEQ ID NO: 883178 - RNA, 19 nt, Artificial Sequence
  Description of Artificial Sequence: Synthetic oligonucleotide
  Sense strand starting at position 441 of SEQ ID NO: 588697
acucuagucugaguuaagu

SEQ ID NO: 883179 - RNA, 19 nt, Artificial Sequence
  Description of Artificial Sequence: Synthetic oligonucleotide
  Antisense strand to SEQ ID NO: 883178
acuuaacucagacuagagu

SEQ ID NO: 883180 - RNA, 19 nt, Artificial Sequence
  Description of Artificial Sequence: Synthetic oligonucleotide
  Sense strand starting at position 443 of SEQ ID NO: 588697
ucuagucugaguuaagugu

SEQ ID NO: 883181 - RNA, 19 nt, Artificial Sequence
  Description of Artificial Sequence: Synthetic oligonucleotide
  Antisense strand to SEQ ID NO: 883180
acacuuaacucagacuaga

SEQ ID NO: 883182 - RNA, 19 nt, Artificial Sequence
  Description of Artificial Sequence: Synthetic oligonucleotide
  Sense strand starting at position 447 of SEQ ID NO: 588697
gucugaguuaaguguacaa

SEQ ID NO: 883183 - RNA, 19 nt, Artificial Sequence
  Description of Artificial Sequence: Synthetic oligonucleotide
  Antisense strand to SEQ ID NO: 883182
uuguacacuuaacucagac

SEQ ID NO: 883184 - RNA, 19 nt, Artificial Sequence
  Description of Artificial Sequence: Synthetic oligonucleotide
  Sense strand starting at position 451 of SEQ ID NO: 588697
gaguuaaguguacaagcca

SEQ ID NO: 883185 - RNA, 19 nt, Artificial Sequence
  Description of Artificial Sequence: Synthetic oligonucleotide
  Antisense strand to SEQ ID NO: 883184
uggcuuguacacuuaacuc

SEQ ID NO: 883186 - RNA, 19 nt, Artificial Sequence
  Description of Artificial Sequence: Synthetic oligonucleotide
  Sense strand starting at position 562 of SEQ ID NO: 588697
guuuaaguauccucaggaa

SEQ ID NO: 883187 - RNA, 19 nt, Artificial Sequence
  Description of Artificial Sequence: Synthetic oligonucleotide
  Antisense strand to SEQ ID NO: 883186
uuccugaggauacuuaaac

SEQ ID NO: 883188 - RNA, 19 nt, Artificial Sequence
  Description of Artificial Sequence: Synthetic oligonucleotide
  Sense strand starting at position 605 of SEQ ID NO: 588697
guacaaugcugagucacua

SEQ ID NO: 883189 - RNA, 19 nt, Artificial Sequence
  Description of Artificial Sequence: Synthetic oligonucleotide
  Antisense strand to SEQ ID NO: 883188
uagugacucagcauuguac

SEQ ID NO: 883190 - RNA, 19 nt, Artificial Sequence
  Description of Artificial Sequence: Synthetic oligonucleotide
  Sense strand starting at position 617 of SEQ ID NO: 588697
gucacuauuugucuaggca

SEQ ID NO: 883191 - RNA, 19 nt, Artificial Sequence
  Description of Artificial Sequence: Synthetic oligonucleotide
  Antisense strand to SEQ ID NO: 883190
ugccuagacaaauagugac

SEQ ID NO: 883192 - RNA, 19 nt, Artificial Sequence
  Description of Artificial Sequence: Synthetic oligonucleotide
  Sense strand starting at position 688 of SEQ ID NO: 588697
gauggauggucucugaaac

SEQ ID NO: 883193 - RNA, 19 nt, Artificial Sequence
  Description of Artificial Sequence: Synthetic oligonucleotide
  Antisense strand to SEQ ID NO: 883192
guuucagagaccauccauc

SEQ ID NO: 883194 - RNA, 19 nt, Artificial Sequence
  Description of Artificial Sequence: Synthetic oligonucleotide
  Sense strand starting at position 1109 of SEQ ID NO: 588697
aggcuucugcaucagaagu

SEQ ID NO: 883195 - RNA, 19 nt, Artificial Sequence
  Description of Artificial Sequence: Synthetic oligonucleotide
  Antisense strand to SEQ ID NO: 883194
acuucugaugcagaagccu

SEQ ID NO: 883196 - RNA, 19 nt, Artificial Sequence
  Description of Artificial Sequence: Synthetic oligonucleotide
  Sense strand starting at position 1168 of SEQ ID NO: 588697
agaggccugcuugagaauu

SEQ ID NO: 883197 - RNA, 19 nt, Artificial Sequence
  Description of Artificial Sequence: Synthetic oligonucleotide
  Antisense strand to SEQ ID NO: 883196
aauucucaagcaggccucu

SEQ ID NO: 883198 - RNA, 19 nt, Artificial Sequence
  Description of Artificial Sequence: Synthetic oligonucleotide
  Sense strand starting at position 1210 of SEQ ID NO: 588697
agacuuaucaccgggccua

SEQ ID NO: 883199 - RNA, 19 nt, Artificial Sequence
  Description of Artificial Sequence: Synthetic oligonucleotide
  Antisense strand to SEQ ID NO: 883198
uaggcccggugauaagucu

SEQ ID NO: 883200 - RNA, 19 nt, Artificial Sequence
  Description of Artificial Sequence: Synthetic oligonucleotide
  Sense strand starting at position 1211 of SEQ ID NO: 588697
gacuuaucaccgggccuau

SEQ ID NO: 883201 - RNA, 19 nt, Artificial Sequence
  Description of Artificial Sequence: Synthetic oligonucleotide
  Antisense strand to SEQ ID NO: 883200
auaggcccggugauaaguc

SEQ ID NO: 883202 - RNA, 19 nt, Artificial Sequence
  Description of Artificial Sequence: Synthetic oligonucleotide
  Sense strand starting at position 1266 of SEQ ID NO: 588697
caaggaguucuugaacgua

SEQ ID NO: 883203 - RNA, 19 nt, Artificial Sequence
  Description of Artificial Sequence: Synthetic oligonucleotide
  Antisense strand to SEQ ID NO: 883202
uacguucaagaacuccuug

SEQ ID NO: 883204 - RNA, 19 nt, Artificial Sequence
  Description of Artificial Sequence: Synthetic oligonucleotide
  Sense strand starting at position 2043 of SEQ ID NO: 588697
ggguccuaccuuggaacaa

SEQ ID NO: 883205 - RNA, 19 nt, Artificial Sequence
  Description of Artificial Sequence: Synthetic oligonucleotide
  Antisense strand to SEQ ID NO: 883204
uuguuccaagguaggaccc

SEQ ID NO: 883206 - RNA, 19 nt, Artificial Sequence
  Description of Artificial Sequence: Synthetic oligonucleotide
  Sense strand starting at position 2123 of SEQ ID NO: 588697
aagugaauuguaugaccca

SEQ ID NO: 883207 - RNA, 19 nt, Artificial Sequence
  Description of Artificial Sequence: Synthetic oligonucleotide
  Antisense strand to SEQ ID NO: 883206
ugggucauacaauucacuu

SEQ ID NO: 883208 - RNA, 19 nt, Artificial Sequence
  Description of Artificial Sequence: Synthetic oligonucleotide
  Sense strand starting at position 2141 of SEQ ID NO: 588697
agcgucaagcaauaagaaa

SEQ ID NO: 883209 - RNA, 19 nt, Artificial Sequence
  Description of Artificial Sequence: Synthetic oligonucleotide
  Antisense strand to SEQ ID NO: 883208
uuucuuauugcuugacgcu

SEQ ID NO: 883210 - RNA, 19 nt, Artificial Sequence
  Description of Artificial Sequence: Synthetic oligonucleotide
  Sense strand starting at position 2542 of SEQ ID NO: 588697
ucgcaucacgucuauuaga

SEQ ID NO: 883211 - RNA, 19 nt, Artificial Sequence
  Description of Artificial Sequence: Synthetic oligonucleotide
  Antisense strand to SEQ ID NO: 883210
ucuaauagacgugaugcga

SEQ ID NO: 883212 - RNA, 19 nt, Artificial Sequence
  Description of Artificial Sequence: Synthetic oligonucleotide
  Sense strand starting at position 2574 of SEQ ID NO: 588697
cagagacguucgguaauuu

SEQ ID NO: 883213 - RNA, 19 nt, Artificial Sequence
  Description of Artificial Sequence: Synthetic oligonucleotide
  Antisense strand to SEQ ID NO: 883212
aaauuaccgaacgucucug

SEQ ID NO: 883214 - RNA, 19 nt, Artificial Sequence
  Description of Artificial Sequence: Synthetic oligonucleotide
  Sense strand starting at position 2582 of SEQ ID NO: 588697
uucgguaauuugcccgaga

SEQ ID NO: 883215 - RNA, 19 nt, Artificial Sequence
  Description of Artificial Sequence: Synthetic oligonucleotide
  Antisense strand to SEQ ID NO: 883214
ucucgggcaaauuaccgaa

SEQ ID NO: 883216 - RNA, 19 nt, Artificial Sequence
  Description of Artificial Sequence: Synthetic oligonucleotide
  Sense strand starting at position 2583 of SEQ ID NO: 588697
ucgguaauuugcccgagag

SEQ ID NO: 883217 - RNA, 19 nt, Artificial Sequence
  Description of Artificial Sequence: Synthetic oligonucleotide
  Antisense strand to SEQ ID NO: 883216
cucucgggcaaauuaccga

SEQ ID NO: 883218 - RNA, 19 nt, Artificial Sequence
  Description of Artificial Sequence: Synthetic oligonucleotide
  Sense strand starting at position 2584 of SEQ ID NO: 588697
cgguaauuugcccgagagc

SEQ ID NO: 883219 - RNA, 19 nt, Artificial Sequence
  Description of Artificial Sequence: Synthetic oligonucleotide
  Antisense strand to SEQ ID NO: 883218
gcucucgggcaaauuaccg

SEQ ID NO: 883220 - RNA, 19 nt, Artificial Sequence
  Description of Artificial Sequence: Synthetic oligonucleotide
  Sense strand starting at position 2955 of SEQ ID NO: 588697
aggaauguaaugugaaauc

SEQ ID NO: 883221 - RNA, 19 nt, Artificial Sequence
  Description of Artificial Sequence: Synthetic oligonucleotide
  Antisense strand to SEQ ID NO: 883220
gauuucacauuacauuccu

SEQ ID NO: 883222 - RNA, 19 nt, Artificial Sequence
  Description of Artificial Sequence: Synthetic oligonucleotide
  Sense strand starting at position 3414 of SEQ ID NO: 588697
uggagauucuauuagauga

SEQ ID NO: 883223 - RNA, 19 nt, Artificial Sequence
  Description of Artificial Sequence: Synthetic oligonucleotide
  Antisense strand to SEQ ID NO: 883222
ucaucuaauagaaucucca

SEQ ID NO: 883224 - RNA, 19 nt, Artificial Sequence
  Description of Artificial Sequence: Synthetic oligonucleotide
  Sense strand starting at position 3416 of SEQ ID NO: 588697
gagauucuauuagaugaag

SEQ ID NO: 883225 - RNA, 19 nt, Artificial Sequence
  Description of Artificial Sequence: Synthetic oligonucleotide
  Antisense strand to SEQ ID NO: 883224
cuucaucuaauagaaucuc

SEQ ID NO: 883226 - RNA, 19 nt, Artificial Sequence
  Description of Artificial Sequence: Synthetic oligonucleotide
  Sense strand starting at position 3472 of SEQ ID NO: 588697
uuucuucuuccaggguaaa

SEQ ID NO: 883227 - RNA, 19 nt, Artificial Sequence
  Description of Artificial Sequence: Synthetic oligonucleotide
  Antisense strand to SEQ ID NO: 883226
uuuacccuggaagaagaaa

SEQ ID NO: 883228 - RNA, 19 nt, Artificial Sequence
  Description of Artificial Sequence: Synthetic oligonucleotide
  Sense strand starting at position 3473 of SEQ ID NO: 588697
uucuucuuccaggguaaag

SEQ ID NO: 883229 - RNA, 19 nt, Artificial Sequence
  Description of Artificial Sequence: Synthetic oligonucleotide
  Antisense strand to SEQ ID NO: 883228
cuuuacccuggaagaagaa

SEQ ID NO: 883230 - RNA, 19 nt, Artificial Sequence
  Description of Artificial Sequence: Synthetic oligonucleotide
  Sense strand starting at position 3612 of SEQ ID NO: 588697
aauacacaaccgugaaguu

SEQ ID NO: 883231 - RNA, 19 nt, Artificial Sequence
  Description of Artificial Sequence: Synthetic oligonucleotide
  Antisense strand to SEQ ID NO: 883230
aacuucacgguuguguauu

SEQ ID NO: 883232 - RNA, 19 nt, Artificial Sequence
  Description of Artificial Sequence: Synthetic oligonucleotide
  Sense strand starting at position 3622 of SEQ ID NO: 588697
cgugaaguugcucauagaa

SEQ ID NO: 883233 - RNA, 19 nt, Artificial Sequence
  Description of Artificial Sequence: Synthetic oligonucleotide
  Antisense strand to SEQ ID NO: 883232
uucuaugagcaacuucacg

SEQ ID NO: 883234 - RNA, 19 nt, Artificial Sequence
  Description of Artificial Sequence: Synthetic oligonucleotide
  Sense strand starting at position 3634 of SEQ ID NO: 588697
cauagaaagcuuuggguaa

SEQ ID NO: 883235 - RNA, 19 nt, Artificial Sequence
  Description of Artificial Sequence: Synthetic oligonucleotide
  Antisense strand to SEQ ID NO: 883234
uuacccaaagcuuucuaug

SEQ ID NO: 883236 - RNA, 19 nt, Artificial Sequence
  Description of Artificial Sequence: Synthetic oligonucleotide
  Sense strand starting at position 3745 of SEQ ID NO: 588697
accugaaauugucugcaaa

SEQ ID NO: 883237 - RNA, 19 nt, Artificial Sequence
  Description of Artificial Sequence: Synthetic oligonucleotide
  Antisense strand to SEQ ID NO: 883236
uuugcagacaauuucaggu

SEQ ID NO: 883238 - RNA, 19 nt, Artificial Sequence
  Description of Artificial Sequence: Synthetic oligonucleotide
  Sense strand starting at position 3746 of SEQ ID NO: 588697
ccugaaauugucugcaaau

SEQ ID NO: 883239 - RNA, 19 nt, Artificial Sequence
  Description of Artificial Sequence: Synthetic oligonucleotide
  Antisense strand to SEQ ID NO: 883238
auuugcagacaauuucagg

SEQ ID NO: 883240 - RNA, 19 nt, Artificial Sequence
  Description of Artificial Sequence: Synthetic oligonucleotide
  Sense strand starting at position 3936 of SEQ ID NO: 588697
gcccgacacugguuuauuu

SEQ ID NO: 883241 - RNA, 19 nt, Artificial Sequence
  Description of Artificial Sequence: Synthetic oligonucleotide
  Antisense strand to SEQ ID NO: 883240
aaauaaaccagugucgggc

SEQ ID NO: 883242 - RNA, 19 nt, Artificial Sequence
  Description of Artificial Sequence: Synthetic oligonucleotide
  Sense strand starting at position 541 of SEQ ID NO: 588698
ggugcuucuaguuauagga

SEQ ID NO: 883243 - RNA, 19 nt, Artificial Sequence
  Description of Artificial Sequence: Synthetic oligonucleotide
  Antisense strand to SEQ ID NO: 883242
uccuauaacuagaagcacc

SEQ ID NO: 883244 - RNA, 19 nt, Artificial Sequence
  Description of Artificial Sequence: Synthetic oligonucleotide
  Sense strand starting at position 543 of SEQ ID NO: 588698
ugcuucuaguuauaggaca

SEQ ID NO: 883245 - RNA, 19 nt, Artificial Sequence
  Description of Artificial Sequence: Synthetic oligonucleotide
  Antisense strand to SEQ ID NO: 883244
uguccuauaacuagaagca

SEQ ID NO: 883246 - RNA, 19 nt, Artificial Sequence
  Description of Artificial Sequence: Synthetic oligonucleotide
  Sense strand starting at position 679 of SEQ ID NO: 588698
caugaaauguugucaaaug

SEQ ID NO: 883247 - RNA, 19 nt, Artificial Sequence
  Description of Artificial Sequence: Synthetic oligonucleotide
  Antisense strand to SEQ ID NO: 883246
cauuugacaacauuucaug

SEQ ID NO: 883248 - RNA, 19 nt, Artificial Sequence
  Description of Artificial Sequence: Synthetic oligonucleotide
  Sense strand starting at position 1034 of SEQ ID NO: 588698
acuggcagauuauugcaaa

SEQ ID NO: 883249 - RNA, 19 nt, Artificial Sequence
  Description of Artificial Sequence: Synthetic oligonucleotide
  Antisense strand to SEQ ID NO: 883248
uuugcaauaaucugccagu

SEQ ID NO: 883250 - RNA, 19 nt, Artificial Sequence
  Description of Artificial Sequence: Synthetic oligonucleotide
  Sense strand starting at position 1117 of SEQ ID NO: 588698
cagugaaugcguugggaac

SEQ ID NO: 883251 - RNA, 19 nt, Artificial Sequence
  Description of Artificial Sequence: Synthetic oligonucleotide
  Antisense strand to SEQ ID NO: 883250
guucccaacgcauucacug

SEQ ID NO: 883252 - RNA, 19 nt, Artificial Sequence
  Description of Artificial Sequence: Synthetic oligonucleotide
  Sense strand starting at position 1118 of SEQ ID NO: 588698
agugaaugcguugggaaca

SEQ ID NO: 883253 - RNA, 19 nt, Artificial Sequence
  Description of Artificial Sequence: Synthetic oligonucleotide
  Antisense strand to SEQ ID NO: 883252
uguucccaacgcauucacu

SEQ ID NO: 883254 - RNA, 19 nt, Artificial Sequence
  Description of Artificial Sequence: Synthetic oligonucleotide
  Sense strand starting at position 1119 of SEQ ID NO: 588698
gugaaugcguugggaacaa

SEQ ID NO: 883255 - RNA, 19 nt, Artificial Sequence
  Description of Artificial Sequence: Synthetic oligonucleotide
  Antisense strand to SEQ ID NO: 883254
uuguucccaacgcauucac

SEQ ID NO: 883256 - RNA, 19 nt, Artificial Sequence
  Description of Artificial Sequence: Synthetic oligonucleotide
  Sense strand starting at position 1150 of SEQ ID NO: 588698
ggagcugccuuggaaucua

SEQ ID NO: 883257 - RNA, 19 nt, Artificial Sequence
  Description of Artificial Sequence: Synthetic oligonucleotide
  Antisense strand to SEQ ID NO: 883256
uagauuccaaggcagcucc

SEQ ID NO: 883258 - RNA, 19 nt, Artificial Sequence
  Description of Artificial Sequence: Synthetic oligonucleotide
  Sense strand starting at position 1989 of SEQ ID NO: 588698
gcuucugccuuccuguaaa

SEQ ID NO: 883259 - RNA, 19 nt, Artificial Sequence
  Description of Artificial Sequence: Synthetic oligonucleotide
  Antisense strand to SEQ ID NO: 883258
uuuacaggaaggcagaagc

SEQ ID NO: 883260 - RNA, 19 nt, Artificial Sequence
  Description of Artificial Sequence: Synthetic oligonucleotide
  Sense strand starting at position 2221 of SEQ ID NO: 588698
gcgagacuuugggcagagu

SEQ ID NO: 883261 - RNA, 19 nt, Artificial Sequence
  Description of Artificial Sequence: Synthetic oligonucleotide
  Antisense strand to SEQ ID NO: 883260
acucugcccaaagucucgc

SEQ ID NO: 883262 - RNA, 19 nt, Artificial Sequence
  Description of Artificial Sequence: Synthetic oligonucleotide
  Sense strand starting at position 2739 of SEQ ID NO: 588698
gcuccugccuuagaaauag

SEQ ID NO: 883263 - RNA, 19 nt, Artificial Sequence
  Description of Artificial Sequence: Synthetic oligonucleotide
  Antisense strand to SEQ ID NO: 883262
cuauuucuaaggcaggagc

SEQ ID NO: 883264 - RNA, 19 nt, Artificial Sequence
  Description of Artificial Sequence: Synthetic oligonucleotide
  Sense strand starting at position 2904 of SEQ ID NO: 588698
gugcuagguuccuuugcau

SEQ ID NO: 883265 - RNA, 19 nt, Artificial Sequence
  Description of Artificial Sequence: Synthetic oligonucleotide
  Antisense strand to SEQ ID NO: 883264
augcaaaggaaccuagcac

SEQ ID NO: 883266 - RNA, 19 nt, Artificial Sequence
  Description of Artificial Sequence: Synthetic oligonucleotide
  Sense strand starting at position 2907 of SEQ ID NO: 588698
cuagguuccuuugcaugua

SEQ ID NO: 883267 - RNA, 19 nt, Artificial Sequence
  Description of Artificial Sequence: Synthetic oligonucleotide
  Antisense strand to SEQ ID NO: 883266
uacaugcaaaggaaccuag

SEQ ID NO: 883268 - RNA, 19 nt, Artificial Sequence
  Description of Artificial Sequence: Synthetic oligonucleotide
  Sense strand starting at position 3285 of SEQ ID NO: 588698
uucuuuggaggcugaagaa

SEQ ID NO: 883269 - RNA, 19 nt, Artificial Sequence
  Description of Artificial Sequence: Synthetic oligonucleotide
  Antisense strand to SEQ ID NO: 883268
uucuucagccuccaaagaa

SEQ ID NO: 883270 - RNA, 19 nt, Artificial Sequence
  Description of Artificial Sequence: Synthetic oligonucleotide
  Sense strand starting at position 3464 of SEQ ID NO: 588698
acugaagccgucuguugaa

SEQ ID NO: 883271 - RNA, 19 nt, Artificial Sequence
  Description of Artificial Sequence: Synthetic oligonucleotide
  Antisense strand to SEQ ID NO: 883270
uucaacagacggcuucagu

SEQ ID NO: 883272 - RNA, 19 nt, Artificial Sequence
  Description of Artificial Sequence: Synthetic oligonucleotide
  Sense strand starting at position 3843 of SEQ ID NO: 588698
aaagaauaguguggccagu

SEQ ID NO: 883273 - RNA, 19 nt, Artificial Sequence
  Description of Artificial Sequence: Synthetic oligonucleotide
  Antisense strand to SEQ ID NO: 883272
acuggccacacuauucuuu

SEQ ID NO: 883274 - RNA, 19 nt, Artificial Sequence
  Description of Artificial Sequence: Synthetic oligonucleotide
  Sense strand starting at position 224 of SEQ ID NO: 588699
ugccaugauuucuggcuuu

SEQ ID NO: 883275 - RNA, 19 nt, Artificial Sequence
  Description of Artificial Sequence: Synthetic oligonucleotide
  Antisense strand to SEQ ID NO: 883274
aaagccagaaaucauggca

SEQ ID NO: 883276 - RNA, 19 nt, Artificial Sequence
  Description of Artificial Sequence: Synthetic oligonucleotide
  Sense strand starting at position 660 of SEQ ID NO: 588699
ugguguugugacuaucugu

SEQ ID NO: 883277 - RNA, 19 nt, Artificial Sequence
  Description of Artificial Sequence: Synthetic oligonucleotide
  Antisense strand to SEQ ID NO: 883276
acagauagucacaacacca

SEQ ID NO: 883278 - RNA, 19 nt, Artificial Sequence
  Description of Artificial Sequence: Synthetic oligonucleotide
  Sense strand starting at position 745 of SEQ ID NO: 588699
ggaugaugucuacggcauu

SEQ ID NO: 883279 - RNA, 19 nt, Artificial Sequence
  Description of Artificial Sequence: Synthetic oligonucleotide
  Antisense strand to SEQ ID NO: 883278
aaugccguagacaucaucc

SEQ ID NO: 883280 - RNA, 19 nt, Artificial Sequence
  Description of Artificial Sequence: Synthetic oligonucleotide
  Sense strand starting at position 757 of SEQ ID NO: 588699
cggcauugugccagggagu

SEQ ID NO: 883281 - RNA, 19 nt, Artificial Sequence
  Description of Artificial Sequence: Synthetic oligonucleotide
  Antisense strand to SEQ ID NO: 883280
acucccuggcacaaugccg

SEQ ID NO: 883282 - RNA, 19 nt, Artificial Sequence
  Description of Artificial Sequence: Synthetic oligonucleotide
  Sense strand starting at position 1275 of SEQ ID NO: 588699
gcaggaagcgaggaugauu

SEQ ID NO: 883283 - RNA, 19 nt, Artificial Sequence
  Description of Artificial Sequence: Synthetic oligonucleotide
  Antisense strand to SEQ ID NO: 883282
aaucauccucgcuuccugc

SEQ ID NO: 883284 - RNA, 19 nt, Artificial Sequence
  Description of Artificial Sequence: Synthetic oligonucleotide
  Sense strand starting at position 1672 of SEQ ID NO: 588699
cgccaaaguucagggagau

SEQ ID NO: 883285 - RNA, 19 nt, Artificial Sequence
  Description of Artificial Sequence: Synthetic oligonucleotide
  Antisense strand to SEQ ID NO: 883284
aucucccugaacuuuggcg

SEQ ID NO: 883286 - RNA, 19 nt, Artificial Sequence
  Description of Artificial Sequence: Synthetic oligonucleotide
  Sense strand starting at position 1673 of SEQ ID NO: 588699
gccaaaguucagggagauu

SEQ ID NO: 883287 - RNA, 19 nt, Artificial Sequence
  Description of Artificial Sequence: Synthetic oligonucleotide
  Antisense strand to SEQ ID NO: 883286
aaucucccugaacuuuggc

SEQ ID NO: 883288 - RNA, 19 nt, Artificial Sequence
  Description of Artificial Sequence: Synthetic oligonucleotide
  Sense strand starting at position 2020 of SEQ ID NO: 588699
ugacgucccgcuuauguaa

SEQ ID NO: 883289 - RNA, 19 nt, Artificial Sequence
  Description of Artificial Sequence: Synthetic oligonucleotide
  Antisense strand to SEQ ID NO: 883288
uuacauaagcgggacguca

SEQ ID NO: 883290 - RNA, 19 nt, Artificial Sequence
  Description of Artificial Sequence: Synthetic oligonucleotide
  Sense strand starting at position 2241 of SEQ ID NO: 588699
ucgcacacuuguugaggaa

SEQ ID NO: 883291 - RNA, 19 nt, Artificial Sequence
  Description of Artificial Sequence: Synthetic oligonucleotide
  Antisense strand to SEQ ID NO: 883290
uuccucaacaagugugcga

SEQ ID NO: 883292 - RNA, 19 nt, Artificial Sequence
  Description of Artificial Sequence: Synthetic oligonucleotide
  Sense strand starting at position 2242 of SEQ ID NO: 588699
cgcacacuuguugaggaaa

SEQ ID NO: 883293 - RNA, 19 nt, Artificial Sequence
  Description of Artificial Sequence: Synthetic oligonucleotide
  Antisense strand to SEQ ID NO: 883292
uuuccucaacaagugugcg

SEQ ID NO: 883294 - RNA, 19 nt, Artificial Sequence
  Description of Artificial Sequence: Synthetic oligonucleotide
  Sense strand starting at position 2244 of SEQ ID NO: 588699
cacacuuguugaggaaaca

SEQ ID NO: 883295 - RNA, 19 nt, Artificial Sequence
  Description of Artificial Sequence: Synthetic oligonucleotide
  Antisense strand to SEQ ID NO: 883294
uguuuccucaacaagugug

SEQ ID NO: 883296 - RNA, 19 nt, Artificial Sequence
  Description of Artificial Sequence: Synthetic oligonucleotide
  Sense strand starting at position 2449 of SEQ ID NO: 588699
gcauguuguuccgacacag

SEQ ID NO: 883297 - RNA, 19 nt, Artificial Sequence
  Description of Artificial Sequence: Synthetic oligonucleotide
  Antisense strand to SEQ ID NO: 883296
cugugucggaacaacaugc

SEQ ID NO: 883298 - RNA, 19 nt, Artificial Sequence
  Description of Artificial Sequence: Synthetic oligonucleotide
  Sense strand starting at position 2589 of SEQ ID NO: 588699
agaacaugcauguaaggua

SEQ ID NO: 883299 - RNA, 19 nt, Artificial Sequence
  Description of Artificial Sequence: Synthetic oligonucleotide
  Antisense strand to SEQ ID NO: 883298
uaccuuacaugcauguucu

SEQ ID NO: 883300 - RNA, 19 nt, Artificial Sequence
  Description of Artificial Sequence: Synthetic oligonucleotide
  Sense strand starting at position 2677 of SEQ ID NO: 588699
ucagauagguuguggaaau

SEQ ID NO: 883301 - RNA, 19 nt, Artificial Sequence
  Description of Artificial Sequence: Synthetic oligonucleotide
  Antisense strand to SEQ ID NO: 883300
auuuccacaaccuaucuga

SEQ ID NO: 883302 - RNA, 19 nt, Artificial Sequence
  Description of Artificial Sequence: Synthetic oligonucleotide
  Sense strand starting at position 2678 of SEQ ID NO: 588699
cagauagguuguggaaaua

SEQ ID NO: 883303 - RNA, 19 nt, Artificial Sequence
  Description of Artificial Sequence: Synthetic oligonucleotide
  Antisense strand to SEQ ID NO: 883302
uauuuccacaaccuaucug

SEQ ID NO: 883304 - RNA, 19 nt, Artificial Sequence
  Description of Artificial Sequence: Synthetic oligonucleotide
  Sense strand starting at position 2729 of SEQ ID NO: 588699
gugggcuaacaaugcaauu

SEQ ID NO: 883305 - RNA, 19 nt, Artificial Sequence
  Description of Artificial Sequence: Synthetic oligonucleotide
  Antisense strand to SEQ ID NO: 883304
aauugcauuguuagcccac

SEQ ID NO: 883306 - RNA, 19 nt, Artificial Sequence
  Description of Artificial Sequence: Synthetic oligonucleotide
  Sense strand starting at position 2821 of SEQ ID NO: 588699
acaacaaauugcguagaga

SEQ ID NO: 883307 - RNA, 19 nt, Artificial Sequence
  Description of Artificial Sequence: Synthetic oligonucleotide
  Antisense strand to SEQ ID NO: 883306
ucucuacgcaauuuguugu

SEQ ID NO: 883308 - RNA, 19 nt, Artificial Sequence
  Description of Artificial Sequence: Synthetic oligonucleotide
  Sense strand starting at position 2858 of SEQ ID NO: 588699
augguacaaucgcaaauau

SEQ ID NO: 883309 - RNA, 19 nt, Artificial Sequence
  Description of Artificial Sequence: Synthetic oligonucleotide
  Antisense strand to SEQ ID NO: 883308
auauuugcgauuguaccau

SEQ ID NO: 883310 - RNA, 19 nt, Artificial Sequence
  Description of Artificial Sequence: Synthetic oligonucleotide
  Sense strand starting at position 2885 of SEQ ID NO: 588699
cgcacaacaugucauguaa

SEQ ID NO: 883311 - RNA, 19 nt, Artificial Sequence
  Description of Artificial Sequence: Synthetic oligonucleotide
  Antisense strand to SEQ ID NO: 883310
uuacaugacauguugugcg

SEQ ID NO: 883312 - RNA, 19 nt, Artificial Sequence
  Description of Artificial Sequence: Synthetic oligonucleotide
  Sense strand starting at position 2931 of SEQ ID NO: 588699
ugcacagagucauaggaau

SEQ ID NO: 883313 - RNA, 19 nt, Artificial Sequence
  Description of Artificial Sequence: Synthetic oligonucleotide
  Antisense strand to SEQ ID NO: 883312
auuccuaugacucugugca

SEQ ID NO: 883314 - RNA, 19 nt, Artificial Sequence
  Description of Artificial Sequence: Synthetic oligonucleotide
  Sense strand starting at position 2937 of SEQ ID NO: 588699
gagucauaggaauggcaga

SEQ ID NO: 883315 - RNA, 19 nt, Artificial Sequence
  Description of Artificial Sequence: Synthetic oligonucleotide
  Antisense strand to SEQ ID NO: 883314
ucugccauuccuaugacuc

SEQ ID NO: 883316 - RNA, 19 nt, Artificial Sequence
  Description of Artificial Sequence: Synthetic oligonucleotide
  Sense strand starting at position 2965 of SEQ ID NO: 588699
ugggcagagcuccaaucau

SEQ ID NO: 883317 - RNA, 19 nt, Artificial Sequence
  Description of Artificial Sequence: Synthetic oligonucleotide
  Antisense strand to SEQ ID NO: 883316
augauuggagcucugccca

SEQ ID NO: 883318 - RNA, 19 nt, Artificial Sequence
  Description of Artificial Sequence: Synthetic oligonucleotide
  Sense strand starting at position 3150 of SEQ ID NO: 588699
agggauaugugcuuucaug

SEQ ID NO: 883319 - RNA, 19 nt, Artificial Sequence
  Description of Artificial Sequence: Synthetic oligonucleotide
  Antisense strand to SEQ ID NO: 883318
caugaaagcacauaucccu

SEQ ID NO: 883320 - RNA, 19 nt, Artificial Sequence
  Description of Artificial Sequence: Synthetic oligonucleotide
  Sense strand starting at position 3282 of SEQ ID NO: 588699
ucaccuucucagcagagau

SEQ ID NO: 883321 - RNA, 19 nt, Artificial Sequence
  Description of Artificial Sequence: Synthetic oligonucleotide
  Antisense strand to SEQ ID NO: 883320
aucucugcugagaagguga

SEQ ID NO: 883322 - RNA, 19 nt, Artificial Sequence
  Description of Artificial Sequence: Synthetic oligonucleotide
  Sense strand starting at position 3512 of SEQ ID NO: 588699
cuaggauugugcuacuuaa

SEQ ID NO: 883323 - RNA, 19 nt, Artificial Sequence
  Description of Artificial Sequence: Synthetic oligonucleotide
  Antisense strand to SEQ ID NO: 883322
uuaaguagcacaauccuag

SEQ ID NO: 883324 - RNA, 19 nt, Artificial Sequence
  Description of Artificial Sequence: Synthetic oligonucleotide
  Sense strand starting at position 3713 of SEQ ID NO: 588699
cugagugugucacuucuuu

SEQ ID NO: 883325 - RNA, 19 nt, Artificial Sequence
  Description of Artificial Sequence: Synthetic oligonucleotide
  Antisense strand to SEQ ID NO: 883324
aaagaagugacacacucag

SEQ ID NO: 883326 - RNA, 19 nt, Artificial Sequence
  Description of Artificial Sequence: Synthetic oligonucleotide
  Sense strand starting at position 3752 of SEQ ID NO: 588699
auucuugcuccagagacuu

SEQ ID NO: 883327 - RNA, 19 nt, Artificial Sequence
  Description of Artificial Sequence: Synthetic oligonucleotide
  Antisense strand to SEQ ID NO: 883326
aagucucuggagcaagaau

SEQ ID NO: 883328 - RNA, 19 nt, Artificial Sequence
  Description of Artificial Sequence: Synthetic oligonucleotide
  Sense strand starting at position 3802 of SEQ ID NO: 588699
uagaguuauugggaagguu

SEQ ID NO: 883329 - RNA, 19 nt, Artificial Sequence
  Description of Artificial Sequence: Synthetic oligonucleotide
  Antisense strand to SEQ ID NO: 883328
aaccuucccaauaacucua

SEQ ID NO: 883330 - RNA, 19 nt, Artificial Sequence
  Description of Artificial Sequence: Synthetic oligonucleotide
  Sense strand starting at position 3805 of SEQ ID NO: 588699
aguuauugggaagguuaga

SEQ ID NO: 883331 - RNA, 19 nt, Artificial Sequence
  Description of Artificial Sequence: Synthetic oligonucleotide
  Antisense strand to SEQ ID NO: 883330
ucuaaccuucccaauaacu

SEQ ID NO: 883332 - RNA, 19 nt, Artificial Sequence
  Description of Artificial Sequence: Synthetic oligonucleotide
  Sense strand starting at position 3810 of SEQ ID NO: 588699
uugggaagguuagaguuaa

SEQ ID NO: 883333 - RNA, 19 nt, Artificial Sequence
  Description of Artificial Sequence: Synthetic oligonucleotide
  Antisense strand to SEQ ID NO: 883332
uuaacucuaaccuucccaa

SEQ ID NO: 883334 - RNA, 19 nt, Artificial Sequence
  Description of Artificial Sequence: Synthetic oligonucleotide
  Sense strand starting at position 3814 of SEQ ID NO: 588699
gaagguuagaguuaaugua

SEQ ID NO: 883335 - RNA, 19 nt, Artificial Sequence
  Description of Artificial Sequence: Synthetic oligonucleotide
  Antisense strand to SEQ ID NO: 883334
uacauuaacucuaaccuuc

SEQ ID NO: 883336 - RNA, 19 nt, Artificial Sequence
  Description of Artificial Sequence: Synthetic oligonucleotide
  Sense strand starting at position 3821 of SEQ ID NO: 588699
agaguuaauguaugcaaag

SEQ ID NO: 883337 - RNA, 19 nt, Artificial Sequence
  Description of Artificial Sequence: Synthetic oligonucleotide
  Antisense strand to SEQ ID NO: 883336
cuuugcauacauuaacucu

SEQ ID NO: 883338 - RNA, 19 nt, Artificial Sequence
  Description of Artificial Sequence: Synthetic oligonucleotide
  Sense strand starting at position 3857 of SEQ ID NO: 588699
gugugcaguaagugaucau

SEQ ID NO: 883339 - RNA, 19 nt, Artificial Sequence
  Description of Artificial Sequence: Synthetic oligonucleotide
  Antisense strand to SEQ ID NO: 883338
augaucacuuacugcacac

SEQ ID NO: 883340 - RNA, 19 nt, Artificial Sequence
  Description of Artificial Sequence: Synthetic oligonucleotide
  Sense strand starting at position 3858 of SEQ ID NO: 588699
ugugcaguaagugaucauu

SEQ ID NO: 883341 - RNA, 19 nt, Artificial Sequence
  Description of Artificial Sequence: Synthetic oligonucleotide
  Antisense strand to SEQ ID NO: 883340
aaugaucacuuacugcaca

SEQ ID NO: 883342 - RNA, 19 nt, Artificial Sequence
  Description of Artificial Sequence: Synthetic oligonucleotide
  Sense strand starting at position 3860 of SEQ ID NO: 588699
ugcaguaagugaucauugu

SEQ ID NO: 883343 - RNA, 19 nt, Artificial Sequence
  Description of Artificial Sequence: Synthetic oligonucleotide
  Antisense strand to SEQ ID NO: 883342
acaaugaucacuuacugca

SEQ ID NO: 883344 - RNA, 19 nt, Artificial Sequence
  Description of Artificial Sequence: Synthetic oligonucleotide
  Sense strand starting at position 3861 of SEQ ID NO: 588699
gcaguaagugaucauugua

SEQ ID NO: 883345 - RNA, 19 nt, Artificial Sequence
  Description of Artificial Sequence: Synthetic oligonucleotide
  Antisense strand to SEQ ID NO: 883344
uacaaugaucacuuacugc

SEQ ID NO: 883346 - RNA, 19 nt, Artificial Sequence
  Description of Artificial Sequence: Synthetic oligonucleotide
  Sense strand starting at position 3864 of SEQ ID NO: 588699
guaagugaucauuguauua

SEQ ID NO: 883347 - RNA, 19 nt, Artificial Sequence
  Description of Artificial Sequence: Synthetic oligonucleotide
  Antisense strand to SEQ ID NO: 883346
uaauacaaugaucacuuac

SEQ ID NO: 883348 - RNA, 19 nt, Artificial Sequence
  Description of Artificial Sequence: Synthetic oligonucleotide
  Sense strand starting at position 174 of SEQ ID NO: 588700
cugggaggauugaguaaga

SEQ ID NO: 883349 - RNA, 19 nt, Artificial Sequence
  Description of Artificial Sequence: Synthetic oligonucleotide
  Antisense strand to SEQ ID NO: 883348
ucuuacucaauccucccag

SEQ ID NO: 883350 - RNA, 19 nt, Artificial Sequence
  Description of Artificial Sequence: Synthetic oligonucleotide
  Sense strand starting at position 181 of SEQ ID NO: 588700
gauugaguaagaugaugua

SEQ ID NO: 883351 - RNA, 19 nt, Artificial Sequence
  Description of Artificial Sequence: Synthetic oligonucleotide
  Antisense strand to SEQ ID NO: 883350
uacaucaucuuacucaauc

SEQ ID NO: 883352 - RNA, 19 nt, Artificial Sequence
  Description of Artificial Sequence: Synthetic oligonucleotide
  Sense strand starting at position 271 of SEQ ID NO: 588700
cuaugaaugucauuguuaa

SEQ ID NO: 883353 - RNA, 19 nt, Artificial Sequence
  Description of Artificial Sequence: Synthetic oligonucleotide
  Antisense strand to SEQ ID NO: 883352
uuaacaaugacauucauag

SEQ ID NO: 883354 - RNA, 19 nt, Artificial Sequence
  Description of Artificial Sequence: Synthetic oligonucleotide
  Sense strand starting at position 291 of SEQ ID NO: 588700
ugacuuaguaaaggcagua

SEQ ID NO: 883355 - RNA, 19 nt, Artificial Sequence
  Description of Artificial Sequence: Synthetic oligonucleotide
  Antisense strand to SEQ ID NO: 883354
uacugccuuuacuaaguca

SEQ ID NO: 883356 - RNA, 19 nt, Artificial Sequence
  Description of Artificial Sequence: Synthetic oligonucleotide
  Sense strand starting at position 305 of SEQ ID NO: 588700
caguaaugugugcaacaug

SEQ ID NO: 883357 - RNA, 19 nt, Artificial Sequence
  Description of Artificial Sequence: Synthetic oligonucleotide
  Antisense strand to SEQ ID NO: 883356
cauguugcacacauuacug

SEQ ID NO: 883358 - RNA, 19 nt, Artificial Sequence
  Description of Artificial Sequence: Synthetic oligonucleotide
  Sense strand starting at position 308 of SEQ ID NO: 588700
uaaugugugcaacaugagu

SEQ ID NO: 883359 - RNA, 19 nt, Artificial Sequence
  Description of Artificial Sequence: Synthetic oligonucleotide
  Antisense strand to SEQ ID NO: 883358
acucauguugcacacauua

SEQ ID NO: 883360 - RNA, 19 nt, Artificial Sequence
  Description of Artificial Sequence: Synthetic oligonucleotide
  Sense strand starting at position 684 of SEQ ID NO: 588700
ucacuuaagugagcaaauu

SEQ ID NO: 883361 - RNA, 19 nt, Artificial Sequence
  Description of Artificial Sequence: Synthetic oligonucleotide
  Antisense strand to SEQ ID NO: 883360
aauuugcucacuuaaguga

SEQ ID NO: 883362 - RNA, 19 nt, Artificial Sequence
  Description of Artificial Sequence: Synthetic oligonucleotide
  Sense strand starting at position 783 of SEQ ID NO: 588700
ggugcacucagagaugacu

SEQ ID NO: 883363 - RNA, 19 nt, Artificial Sequence
  Description of Artificial Sequence: Synthetic oligonucleotide
  Antisense strand to SEQ ID NO: 883362
agucaucucugagugcacc

SEQ ID NO: 883364 - RNA, 19 nt, Artificial Sequence
  Description of Artificial Sequence: Synthetic oligonucleotide
  Sense strand starting at position 789 of SEQ ID NO: 588700
cucagagaugacugaaugu

SEQ ID NO: 883365 - RNA, 19 nt, Artificial Sequence
  Description of Artificial Sequence: Synthetic oligonucleotide
  Antisense strand to SEQ ID NO: 883364
acauucagucaucucugag

SEQ ID NO: 883366 - RNA, 19 nt, Artificial Sequence
  Description of Artificial Sequence: Synthetic oligonucleotide
  Sense strand starting at position 875 of SEQ ID NO: 588700
uacuguuacgagggagaaa

SEQ ID NO: 883367 - RNA, 19 nt, Artificial Sequence
  Description of Artificial Sequence: Synthetic oligonucleotide
  Antisense strand to SEQ ID NO: 883366
uuucucccucguaacagua

SEQ ID NO: 883368 - RNA, 19 nt, Artificial Sequence
  Description of Artificial Sequence: Synthetic oligonucleotide
  Sense strand starting at position 900 of SEQ ID NO: 588700
cauauagaucccugcgaug

SEQ ID NO: 883369 - RNA, 19 nt, Artificial Sequence
  Description of Artificial Sequence: Synthetic oligonucleotide
  Antisense strand to SEQ ID NO: 883368
caucgcagggaucuauaug

SEQ ID NO: 883370 - RNA, 19 nt, Artificial Sequence
  Description of Artificial Sequence: Synthetic oligonucleotide
  Sense strand starting at position 902 of SEQ ID NO: 588700
uauagaucccugcgaugga

SEQ ID NO: 883371 - RNA, 19 nt, Artificial Sequence
  Description of Artificial Sequence: Synthetic oligonucleotide
  Antisense strand to SEQ ID NO: 883370
uccaucgcagggaucuaua

SEQ ID NO: 883372 - RNA, 19 nt, Artificial Sequence
  Description of Artificial Sequence: Synthetic oligonucleotide
  Sense strand starting at position 924 of SEQ ID NO: 588700
uggucuauggugaguugua

SEQ ID NO: 883373 - RNA, 19 nt, Artificial Sequence
  Description of Artificial Sequence: Synthetic oligonucleotide
  Antisense strand to SEQ ID NO: 883372
uacaacucaccauagacca

SEQ ID NO: 883374 - RNA, 19 nt, Artificial Sequence
  Description of Artificial Sequence: Synthetic oligonucleotide
  Sense strand starting at position 1360 of SEQ ID NO: 588700
cgcuguucucugucaguca

SEQ ID NO: 883375 - RNA, 19 nt, Artificial Sequence
  Description of Artificial Sequence: Synthetic oligonucleotide
  Antisense strand to SEQ ID NO: 883374
ugacugacagagaacagcg

SEQ ID NO: 883376 - RNA, 19 nt, Artificial Sequence
  Description of Artificial Sequence: Synthetic oligonucleotide
  Sense strand starting at position 1549 of SEQ ID NO: 588700
aacggaauccuugggauuc

SEQ ID NO: 883377 - RNA, 19 nt, Artificial Sequence
  Description of Artificial Sequence: Synthetic oligonucleotide
  Antisense strand to SEQ ID NO: 883376
gaaucccaaggauuccguu

SEQ ID NO: 883378 - RNA, 19 nt, Artificial Sequence
  Description of Artificial Sequence: Synthetic oligonucleotide
  Sense strand starting at position 1787 of SEQ ID NO: 588700
ccgcucaaugcguuccaua

SEQ ID NO: 883379 - RNA, 19 nt, Artificial Sequence
  Description of Artificial Sequence: Synthetic oligonucleotide
  Antisense strand to SEQ ID NO: 883378
uauggaacgcauugagcgg

SEQ ID NO: 883380 - RNA, 19 nt, Artificial Sequence
  Description of Artificial Sequence: Synthetic oligonucleotide
  Sense strand starting at position 1788 of SEQ ID NO: 588700
cgcucaaugcguuccauau

SEQ ID NO: 883381 - RNA, 19 nt, Artificial Sequence
  Description of Artificial Sequence: Synthetic oligonucleotide
  Antisense strand to SEQ ID NO: 883380
auauggaacgcauugagcg

SEQ ID NO: 883382 - RNA, 19 nt, Artificial Sequence
  Description of Artificial Sequence: Synthetic oligonucleotide
  Sense strand starting at position 1986 of SEQ ID NO: 588700
acacgacuuacugguagaa

SEQ ID NO: 883383 - RNA, 19 nt, Artificial Sequence
  Description of Artificial Sequence: Synthetic oligonucleotide
  Antisense strand to SEQ ID NO: 883382
uucuaccaguaagucgugu

SEQ ID NO: 883384 - RNA, 19 nt, Artificial Sequence
  Description of Artificial Sequence: Synthetic oligonucleotide
  Sense strand starting at position 2013 of SEQ ID NO: 588700
agagucgacuccuuaaaua

SEQ ID NO: 883385 - RNA, 19 nt, Artificial Sequence
  Description of Artificial Sequence: Synthetic oligonucleotide
  Antisense strand to SEQ ID NO: 883384
uauuuaaggagucgacucu

SEQ ID NO: 883386 - RNA, 19 nt, Artificial Sequence
  Description of Artificial Sequence: Synthetic oligonucleotide
  Sense strand starting at position 2099 of SEQ ID NO: 588700
cuucucuuguauuugugua

SEQ ID NO: 883387 - RNA, 19 nt, Artificial Sequence
  Description of Artificial Sequence: Synthetic oligonucleotide
  Antisense strand to SEQ ID NO: 883386
uacacaaauacaagagaag

SEQ ID NO: 883388 - RNA, 19 nt, Artificial Sequence
  Description of Artificial Sequence: Synthetic oligonucleotide
  Sense strand starting at position 2101 of SEQ ID NO: 588700
ucucuuguauuuguguaau

SEQ ID NO: 883389 - RNA, 19 nt, Artificial Sequence
  Description of Artificial Sequence: Synthetic oligonucleotide
  Antisense strand to SEQ ID NO: 883388
auuacacaaauacaagaga

SEQ ID NO: 883390 - RNA, 19 nt, Artificial Sequence
  Description of Artificial Sequence: Synthetic oligonucleotide
  Sense strand starting at position 2107 of SEQ ID NO: 588700
guauuuguguaaucccagu

SEQ ID NO: 883391 - RNA, 19 nt, Artificial Sequence
  Description of Artificial Sequence: Synthetic oligonucleotide
  Antisense strand to SEQ ID NO: 883390
acugggauuacacaaauac

SEQ ID NO: 883392 - RNA, 19 nt, Artificial Sequence
  Description of Artificial Sequence: Synthetic oligonucleotide
  Sense strand starting at position 2161 of SEQ ID NO: 588700
agcuuugcccaagaugaca

SEQ ID NO: 883393 - RNA, 19 nt, Artificial Sequence
  Description of Artificial Sequence: Synthetic oligonucleotide
  Antisense strand to SEQ ID NO: 883392
ugucaucuugggcaaagcu

SEQ ID NO: 883394 - RNA, 19 nt, Artificial Sequence
  Description of Artificial Sequence: Synthetic oligonucleotide
  Sense strand starting at position 2270 of SEQ ID NO: 588700
cguccagugcucuuucuau

SEQ ID NO: 883395 - RNA, 19 nt, Artificial Sequence
  Description of Artificial Sequence: Synthetic oligonucleotide
  Antisense strand to SEQ ID NO: 883394
auagaaagagcacuggacg

SEQ ID NO: 883396 - RNA, 19 nt, Artificial Sequence
  Description of Artificial Sequence: Synthetic oligonucleotide
  Sense strand starting at position 2422 of SEQ ID NO: 588700
ggcuaaugccaguaauccu

SEQ ID NO: 883397 - RNA, 19 nt, Artificial Sequence
  Description of Artificial Sequence: Synthetic oligonucleotide
  Antisense strand to SEQ ID NO: 883396
aggauuacuggcauuagcc

SEQ ID NO: 883398 - RNA, 19 nt, Artificial Sequence
  Description of Artificial Sequence: Synthetic oligonucleotide
  Sense strand starting at position 2701 of SEQ ID NO: 588700
aggacaagugauugccuua

SEQ ID NO: 883399 - RNA, 19 nt, Artificial Sequence
  Description of Artificial Sequence: Synthetic oligonucleotide
  Antisense strand to SEQ ID NO: 883398
uaaggcaaucacuuguccu

SEQ ID NO: 883400 - RNA, 19 nt, Artificial Sequence
  Description of Artificial Sequence: Synthetic oligonucleotide
  Sense strand starting at position 2704 of SEQ ID NO: 588700
acaagugauugccuuaaag

SEQ ID NO: 883401 - RNA, 19 nt, Artificial Sequence
  Description of Artificial Sequence: Synthetic oligonucleotide
  Antisense strand to SEQ ID NO: 883400
cuuuaaggcaaucacuugu

SEQ ID NO: 883402 - RNA, 19 nt, Artificial Sequence
  Description of Artificial Sequence: Synthetic oligonucleotide
  Sense strand starting at position 2718 of SEQ ID NO: 588700
uaaagagaagccugugacu

SEQ ID NO: 883403 - RNA, 19 nt, Artificial Sequence
  Description of Artificial Sequence: Synthetic oligonucleotide
  Antisense strand to SEQ ID NO: 883402
agucacaggcuucucuuua

SEQ ID NO: 883404 - RNA, 19 nt, Artificial Sequence
  Description of Artificial Sequence: Synthetic oligonucleotide
  Sense strand starting at position 2720 of SEQ ID NO: 588700
aagagaagccugugacuuu

SEQ ID NO: 883405 - RNA, 19 nt, Artificial Sequence
  Description of Artificial Sequence: Synthetic oligonucleotide
  Antisense strand to SEQ ID NO: 883404
aaagucacaggcuucucuu

SEQ ID NO: 883406 - RNA, 19 nt, Artificial Sequence
  Description of Artificial Sequence: Synthetic oligonucleotide
  Sense strand starting at position 2782 of SEQ ID NO: 588700
ugagucaaguucucaccaa

SEQ ID NO: 883407 - RNA, 19 nt, Artificial Sequence
  Description of Artificial Sequence: Synthetic oligonucleotide
  Antisense strand to SEQ ID NO: 883406
uuggugagaacuugacuca

SEQ ID NO: 883408 - RNA, 19 nt, Artificial Sequence
  Description of Artificial Sequence: Synthetic oligonucleotide
  Sense strand starting at position 3154 of SEQ ID NO: 588700
ccaugugacccugaagagu

SEQ ID NO: 883409 - RNA, 19 nt, Artificial Sequence
  Description of Artificial Sequence: Synthetic oligonucleotide
  Antisense strand to SEQ ID NO: 883408
acucuucagggucacaugg

SEQ ID NO: 883410 - RNA, 19 nt, Artificial Sequence
  Description of Artificial Sequence: Synthetic oligonucleotide
  Sense strand starting at position 3282 of SEQ ID NO: 588700
uuagcaugguacuugauau

SEQ ID NO: 883411 - RNA, 19 nt, Artificial Sequence
  Description of Artificial Sequence: Synthetic oligonucleotide
  Antisense strand to SEQ ID NO: 883410
auaucaaguaccaugcuaa

SEQ ID NO: 883412 - RNA, 19 nt, Artificial Sequence
  Description of Artificial Sequence: Synthetic oligonucleotide
  Sense strand starting at position 3379 of SEQ ID NO: 588700
uuagguccaugaucucauu

SEQ ID NO: 883413 - RNA, 19 nt, Artificial Sequence
  Description of Artificial Sequence: Synthetic oligonucleotide
  Antisense strand to SEQ ID NO: 883412
aaugagaucauggaccuaa

SEQ ID NO: 883414 - RNA, 19 nt, Artificial Sequence
  Description of Artificial Sequence: Synthetic oligonucleotide
  Sense strand starting at position 3382 of SEQ ID NO: 588700
gguccaugaucucauuuaa

SEQ ID NO: 883415 - RNA, 19 nt, Artificial Sequence
  Description of Artificial Sequence: Synthetic oligonucleotide
  Antisense strand to SEQ ID NO: 883414
uuaaaugagaucauggacc

SEQ ID NO: 883416 - RNA, 19 nt, Artificial Sequence
  Description of Artificial Sequence: Synthetic oligonucleotide
  Sense strand starting at position 3465 of SEQ ID NO: 588700
agauuagaacccugaagcu

SEQ ID NO: 883417 - RNA, 19 nt, Artificial Sequence
  Description of Artificial Sequence: Synthetic oligonucleotide
  Antisense strand to SEQ ID NO: 883416
agcuucaggguucuaaucu

SEQ ID NO: 883418 - RNA, 19 nt, Artificial Sequence
  Description of Artificial Sequence: Synthetic oligonucleotide
  Sense strand starting at position 3486 of SEQ ID NO: 588700
gguucugaaccaugagaca

SEQ ID NO: 883419 - RNA, 19 nt, Artificial Sequence
  Description of Artificial Sequence: Synthetic oligonucleotide
  Antisense strand to SEQ ID NO: 883418
ugucucaugguucagaacc

SEQ ID NO: 883420 - RNA, 19 nt, Artificial Sequence
  Description of Artificial Sequence: Synthetic oligonucleotide
  Sense strand starting at position 3909 of SEQ ID NO: 588700
guugcacacccugaaauga

SEQ ID NO: 883421 - RNA, 19 nt, Artificial Sequence
  Description of Artificial Sequence: Synthetic oligonucleotide
  Antisense strand to SEQ ID NO: 883420
ucauuucagggugugcaac

SEQ ID NO: 883422 - RNA, 19 nt, Artificial Sequence
  Description of Artificial Sequence: Synthetic oligonucleotide
  Sense strand starting at position 3971 of SEQ ID NO: 588700
cuuucucuuguguaggaua

SEQ ID NO: 883423 - RNA, 19 nt, Artificial Sequence
  Description of Artificial Sequence: Synthetic oligonucleotide
  Antisense strand to SEQ ID NO: 883422
uauccuacacaagagaaag

SEQ ID NO: 883424 - RNA, 19 nt, Artificial Sequence
  Description of Artificial Sequence: Synthetic oligonucleotide
  Sense strand starting at position 3976 of SEQ ID NO: 588700
ucuuguguaggauacuuua

SEQ ID NO: 883425 - RNA, 19 nt, Artificial Sequence
  Description of Artificial Sequence: Synthetic oligonucleotide
  Antisense strand to SEQ ID NO: 883424
uaaaguauccuacacaaga

SEQ ID NO: 883426 - RNA, 19 nt, Artificial Sequence
  Description of Artificial Sequence: Synthetic oligonucleotide
  Sense strand starting at position 3979 of SEQ ID NO: 588700
uguguaggauacuuuauaa

SEQ ID NO: 883427 - RNA, 19 nt, Artificial Sequence
  Description of Artificial Sequence: Synthetic oligonucleotide
  Antisense strand to SEQ ID NO: 883426
uuauaaaguauccuacaca

SEQ ID NO: 883428 - RNA, 19 nt, Artificial Sequence
  Description of Artificial Sequence: Synthetic oligonucleotide
  Sense strand starting at position 201 of SEQ ID NO: 588701
ggaccugagaguuggacau

SEQ ID NO: 883429 - RNA, 19 nt, Artificial Sequence
  Description of Artificial Sequence: Synthetic oligonucleotide
  Antisense strand to SEQ ID NO: 883428
auguccaacucucaggucc

SEQ ID NO: 883430 - RNA, 19 nt, Artificial Sequence
  Description of Artificial Sequence: Synthetic oligonucleotide
  Sense strand starting at position 203 of SEQ ID NO: 588701
accugagaguuggacauau

SEQ ID NO: 883431 - RNA, 19 nt, Artificial Sequence
  Description of Artificial Sequence: Synthetic oligonucleotide
  Antisense strand to SEQ ID NO: 883430
auauguccaacucucaggu

SEQ ID NO: 883432 - RNA, 19 nt, Artificial Sequence
  Description of Artificial Sequence: Synthetic oligonucleotide
  Sense strand starting at position 274 of SEQ ID NO: 588701
acagauaagucacagguga

SEQ ID NO: 883433 - RNA, 19 nt, Artificial Sequence
  Description of Artificial Sequence: Synthetic oligonucleotide
  Antisense strand to SEQ ID NO: 883432
ucaccugugacuuaucugu

SEQ ID NO: 883434 - RNA, 19 nt, Artificial Sequence
  Description of Artificial Sequence: Synthetic oligonucleotide
  Sense strand starting at position 288 of SEQ ID NO: 588701
ggugaaauggcuugcccua

SEQ ID NO: 883435 - RNA, 19 nt, Artificial Sequence
  Description of Artificial Sequence: Synthetic oligonucleotide
  Antisense strand to SEQ ID NO: 883434
uagggcaagccauuucacc

SEQ ID NO: 883436 - RNA, 19 nt, Artificial Sequence
  Description of Artificial Sequence: Synthetic oligonucleotide
  Sense strand starting at position 434 of SEQ ID NO: 588701
gggaaacguuugccuugga

SEQ ID NO: 883437 - RNA, 19 nt, Artificial Sequence
  Description of Artificial Sequence: Synthetic oligonucleotide
  Antisense strand to SEQ ID NO: 883436
uccaaggcaaacguuuccc

SEQ ID NO: 883438 - RNA, 19 nt, Artificial Sequence
  Description of Artificial Sequence: Synthetic oligonucleotide
  Sense strand starting at position 437 of SEQ ID NO: 588701
aaacguuugccuuggagac

SEQ ID NO: 883439 - RNA, 19 nt, Artificial Sequence
  Description of Artificial Sequence: Synthetic oligonucleotide
  Antisense strand to SEQ ID NO: 883438
gucuccaaggcaaacguuu

SEQ ID NO: 883440 - RNA, 19 nt, Artificial Sequence
  Description of Artificial Sequence: Synthetic oligonucleotide
  Sense strand starting at position 438 of SEQ ID NO: 588701
aacguuugccuuggagacu

SEQ ID NO: 883441 - RNA, 19 nt, Artificial Sequence
  Description of Artificial Sequence: Synthetic oligonucleotide
  Antisense strand to SEQ ID NO: 883440
agucuccaaggcaaacguu

SEQ ID NO: 883442 - RNA, 19 nt, Artificial Sequence
  Description of Artificial Sequence: Synthetic oligonucleotide
  Sense strand starting at position 462 of SEQ ID NO: 588701
ggagaauaaugguuucugu

SEQ ID NO: 883443 - RNA, 19 nt, Artificial Sequence
  Description of Artificial Sequence: Synthetic oligonucleotide
  Antisense strand to SEQ ID NO: 883442
acagaaaccauuauucucc

SEQ ID NO: 883444 - RNA, 19 nt, Artificial Sequence
  Description of Artificial Sequence: Synthetic oligonucleotide
  Sense strand starting at position 465 of SEQ ID NO: 588701
gaauaaugguuucuguaag

SEQ ID NO: 883445 - RNA, 19 nt, Artificial Sequence
  Description of Artificial Sequence: Synthetic oligonucleotide
  Antisense strand to SEQ ID NO: 883444
cuuacagaaaccauuauuc

SEQ ID NO: 883446 - RNA, 19 nt, Artificial Sequence
  Description of Artificial Sequence: Synthetic oligonucleotide
  Sense strand starting at position 534 of SEQ ID NO: 588701
ggccuaucauggucaucca

SEQ ID NO: 883447 - RNA, 19 nt, Artificial Sequence
  Description of Artificial Sequence: Synthetic oligonucleotide
  Antisense strand to SEQ ID NO: 883446
uggaugaccaugauaggcc

SEQ ID NO: 883448 - RNA, 19 nt, Artificial Sequence
  Description of Artificial Sequence: Synthetic oligonucleotide
  Sense strand starting at position 535 of SEQ ID NO: 588701
gccuaucauggucauccaa

SEQ ID NO: 883449 - RNA, 19 nt, Artificial Sequence
  Description of Artificial Sequence: Synthetic oligonucleotide
  Antisense strand to SEQ ID NO: 883448
uuggaugaccaugauaggc

SEQ ID NO: 883450 - RNA, 19 nt, Artificial Sequence
  Description of Artificial Sequence: Synthetic oligonucleotide
  Sense strand starting at position 608 of SEQ ID NO: 588701
ucaggugagcuccagguua

SEQ ID NO: 883451 - RNA, 19 nt, Artificial Sequence
  Description of Artificial Sequence: Synthetic oligonucleotide
  Antisense strand to SEQ ID NO: 883450
uaaccuggagcucaccuga

SEQ ID NO: 883452 - RNA, 19 nt, Artificial Sequence
  Description of Artificial Sequence: Synthetic oligonucleotide
  Sense strand starting at position 610 of SEQ ID NO: 588701
aggugagcuccagguuaaa

SEQ ID NO: 883453 - RNA, 19 nt, Artificial Sequence
  Description of Artificial Sequence: Synthetic oligonucleotide
  Antisense strand to SEQ ID NO: 883452
uuuaaccuggagcucaccu

SEQ ID NO: 883454 - RNA, 19 nt, Artificial Sequence
  Description of Artificial Sequence: Synthetic oligonucleotide
  Sense strand starting at position 631 of SEQ ID NO: 588701
gcagauuccuugguccacu

SEQ ID NO: 883455 - RNA, 19 nt, Artificial Sequence
  Description of Artificial Sequence: Synthetic oligonucleotide
  Antisense strand to SEQ ID NO: 883454
aguggaccaaggaaucugc

SEQ ID NO: 883456 - RNA, 19 nt, Artificial Sequence
  Description of Artificial Sequence: Synthetic oligonucleotide
  Sense strand starting at position 695 of SEQ ID NO: 588701
acaagcauccugugcaacu

SEQ ID NO: 883457 - RNA, 19 nt, Artificial Sequence
  Description of Artificial Sequence: Synthetic oligonucleotide
  Antisense strand to SEQ ID NO: 883456
aguugcacaggaugcuugu

SEQ ID NO: 883458 - RNA, 19 nt, Artificial Sequence
  Description of Artificial Sequence: Synthetic oligonucleotide
  Sense strand starting at position 716 of SEQ ID NO: 588701
gcccauaggcguugagaaa

SEQ ID NO: 883459 - RNA, 19 nt, Artificial Sequence
  Description of Artificial Sequence: Synthetic oligonucleotide
  Antisense strand to SEQ ID NO: 883458
uuucucaacgccuaugggc

SEQ ID NO: 883460 - RNA, 19 nt, Artificial Sequence
  Description of Artificial Sequence: Synthetic oligonucleotide
  Sense strand starting at position 739 of SEQ ID NO: 588701
gcauuaaugcaggaaaggu

SEQ ID NO: 883461 - RNA, 19 nt, Artificial Sequence
  Description of Artificial Sequence: Synthetic oligonucleotide
  Antisense strand to SEQ ID NO: 883460
accuuuccugcauuaaugc

SEQ ID NO: 883462 - RNA, 19 nt, Artificial Sequence
  Description of Artificial Sequence: Synthetic oligonucleotide
  Sense strand starting at position 795 of SEQ ID NO: 588701
agcucaugggccugaaguu

SEQ ID NO: 883463 - RNA, 19 nt, Artificial Sequence
  Description of Artificial Sequence: Synthetic oligonucleotide
  Antisense strand to SEQ ID NO: 883462
aacuucaggcccaugagcu

SEQ ID NO: 883464 - RNA, 19 nt, Artificial Sequence
  Description of Artificial Sequence: Synthetic oligonucleotide
  Sense strand starting at position 796 of SEQ ID NO: 588701
gcucaugggccugaaguua

SEQ ID NO: 883465 - RNA, 19 nt, Artificial Sequence
  Description of Artificial Sequence: Synthetic oligonucleotide
  Antisense strand to SEQ ID NO: 883464
uaacuucaggcccaugagc

SEQ ID NO: 883466 - RNA, 19 nt, Artificial Sequence
  Description of Artificial Sequence: Synthetic oligonucleotide
  Sense strand starting at position 820 of SEQ ID NO: 588701
aagcccauuugagagauga

SEQ ID NO: 883467 - RNA, 19 nt, Artificial Sequence
  Description of Artificial Sequence: Synthetic oligonucleotide
  Antisense strand to SEQ ID NO: 883466
ucaucucucaaaugggcuu

SEQ ID NO: 883468 - RNA, 19 nt, Artificial Sequence
  Description of Artificial Sequence: Synthetic oligonucleotide
  Sense strand starting at position 845 of SEQ ID NO: 588701
ucaagcuuugcccaaguua

SEQ ID NO: 883469 - RNA, 19 nt, Artificial Sequence
  Description of Artificial Sequence: Synthetic oligonucleotide
  Antisense strand to SEQ ID NO: 883468
uaacuugggcaaagcuuga

SEQ ID NO: 883470 - RNA, 19 nt, Artificial Sequence
  Description of Artificial Sequence: Synthetic oligonucleotide
  Sense strand starting at position 1045 of SEQ ID NO: 588701
caaagacucuugccgcaga

SEQ ID NO: 883471 - RNA, 19 nt, Artificial Sequence
  Description of Artificial Sequence: Synthetic oligonucleotide
  Antisense strand to SEQ ID NO: 883470
ucugcggcaagagucuuug

SEQ ID NO: 883472 - RNA, 19 nt, Artificial Sequence
  Description of Artificial Sequence: Synthetic oligonucleotide
  Sense strand starting at position 1362 of SEQ ID NO: 588701
cacugacucugacugugaa

SEQ ID NO: 883473 - RNA, 19 nt, Artificial Sequence
  Description of Artificial Sequence: Synthetic oligonucleotide
  Antisense strand to SEQ ID NO: 883472
uucacagucagagucagug

SEQ ID NO: 883474 - RNA, 19 nt, Artificial Sequence
  Description of Artificial Sequence: Synthetic oligonucleotide
  Sense strand starting at position 1363 of SEQ ID NO: 588701
acugacucugacugugaaa

SEQ ID NO: 883475 - RNA, 19 nt, Artificial Sequence
  Description of Artificial Sequence: Synthetic oligonucleotide
  Antisense strand to SEQ ID NO: 883474
uuucacagucagagucagu

SEQ ID NO: 883476 - RNA, 19 nt, Artificial Sequence
  Description of Artificial Sequence: Synthetic oligonucleotide
  Sense strand starting at position 1468 of SEQ ID NO: 588701
ugagaaccucuaugugaau

SEQ ID NO: 883477 - RNA, 19 nt, Artificial Sequence
  Description of Artificial Sequence: Synthetic oligonucleotide
  Antisense strand to SEQ ID NO: 883476
auucacauagagguucuca

SEQ ID NO: 883478 - RNA, 19 nt, Artificial Sequence
  Description of Artificial Sequence: Synthetic oligonucleotide
  Sense strand starting at position 1469 of SEQ ID NO: 588701
gagaaccucuaugugaauu

SEQ ID NO: 883479 - RNA, 19 nt, Artificial Sequence
  Description of Artificial Sequence: Synthetic oligonucleotide
  Antisense strand to SEQ ID NO: 883478
aauucacauagagguucuc

SEQ ID NO: 883480 - RNA, 19 nt, Artificial Sequence
  Description of Artificial Sequence: Synthetic oligonucleotide
  Sense strand starting at position 1651 of SEQ ID NO: 588701
ccucguuuccuacaaagcu

SEQ ID NO: 883481 - RNA, 19 nt, Artificial Sequence
  Description of Artificial Sequence: Synthetic oligonucleotide
  Antisense strand to SEQ ID NO: 883480
agcuuuguaggaaacgagg

SEQ ID NO: 883482 - RNA, 19 nt, Artificial Sequence
  Description of Artificial Sequence: Synthetic oligonucleotide
  Sense strand starting at position 1823 of SEQ ID NO: 588701
uccuguucccgaggccuua

SEQ ID NO: 883483 - RNA, 19 nt, Artificial Sequence
  Description of Artificial Sequence: Synthetic oligonucleotide
  Antisense strand to SEQ ID NO: 883482
uaaggccucgggaacagga

SEQ ID NO: 883484 - RNA, 19 nt, Artificial Sequence
  Description of Artificial Sequence: Synthetic oligonucleotide
  Sense strand starting at position 2521 of SEQ ID NO: 588701
acccgcagauauuccaaua

SEQ ID NO: 883485 - RNA, 19 nt, Artificial Sequence
  Description of Artificial Sequence: Synthetic oligonucleotide
  Antisense strand to SEQ ID NO: 883484
uauuggaauaucugcgggu

SEQ ID NO: 883486 - RNA, 19 nt, Artificial Sequence
  Description of Artificial Sequence: Synthetic oligonucleotide
  Sense strand starting at position 2599 of SEQ ID NO: 588701
aaggaacuccguugauaac

SEQ ID NO: 883487 - RNA, 19 nt, Artificial Sequence
  Description of Artificial Sequence: Synthetic oligonucleotide
  Antisense strand to SEQ ID NO: 883486
guuaucaacggaguuccuu

SEQ ID NO: 883488 - RNA, 19 nt, Artificial Sequence
  Description of Artificial Sequence: Synthetic oligonucleotide
  Sense strand starting at position 2626 of SEQ ID NO: 588701
gaguaauaagcgcaauaaa

SEQ ID NO: 883489 - RNA, 19 nt, Artificial Sequence
  Description of Artificial Sequence: Synthetic oligonucleotide
  Antisense strand to SEQ ID NO: 883488
uuuauugcgcuuauuacuc

SEQ ID NO: 883490 - RNA, 19 nt, Artificial Sequence
  Description of Artificial Sequence: Synthetic oligonucleotide
  Sense strand starting at position 2711 of SEQ ID NO: 588701
cccguuauucccgacacca

SEQ ID NO: 883491 - RNA, 19 nt, Artificial Sequence
  Description of Artificial Sequence: Synthetic oligonucleotide
  Antisense strand to SEQ ID NO: 883490
uggugucgggaauaacggg

SEQ ID NO: 883492 - RNA, 19 nt, Artificial Sequence
  Description of Artificial Sequence: Synthetic oligonucleotide
  Sense strand starting at position 2713 of SEQ ID NO: 588701
cguuauucccgacaccaaa

SEQ ID NO: 883493 - RNA, 19 nt, Artificial Sequence
  Description of Artificial Sequence: Synthetic oligonucleotide
  Antisense strand to SEQ ID NO: 883492
uuuggugucgggaauaacg

SEQ ID NO: 883494 - RNA, 19 nt, Artificial Sequence
  Description of Artificial Sequence: Synthetic oligonucleotide
  Sense strand starting at position 3577 of SEQ ID NO: 588701
augucuucccuaggcagau

SEQ ID NO: 883495 - RNA, 19 nt, Artificial Sequence
  Description of Artificial Sequence: Synthetic oligonucleotide
  Antisense strand to SEQ ID NO: 883494
aucugccuagggaagacau

SEQ ID NO: 883496 - RNA, 19 nt, Artificial Sequence
  Description of Artificial Sequence: Synthetic oligonucleotide
  Sense strand starting at position 3767 of SEQ ID NO: 588701
cucugagaugccuaucauc

SEQ ID NO: 883497 - RNA, 19 nt, Artificial Sequence
  Description of Artificial Sequence: Synthetic oligonucleotide
  Antisense strand to SEQ ID NO: 883496
gaugauaggcaucucagag

SEQ ID NO: 883498 - RNA, 19 nt, Artificial Sequence
  Description of Artificial Sequence: Synthetic oligonucleotide
  Sense strand starting at position 3784 of SEQ ID NO: 588701
ucauuaccauucgaaagau

SEQ ID NO: 883499 - RNA, 19 nt, Artificial Sequence
  Description of Artificial Sequence: Synthetic oligonucleotide
  Antisense strand to SEQ ID NO: 883498
aucuuucgaaugguaauga

SEQ ID NO: 883500 - RNA, 19 nt, Artificial Sequence
  Description of Artificial Sequence: Synthetic oligonucleotide
  Sense strand starting at position 3824 of SEQ ID NO: 588701
gguuaagucccuugcuuag

SEQ ID NO: 883501 - RNA, 19 nt, Artificial Sequence
  Description of Artificial Sequence: Synthetic oligonucleotide
  Antisense strand to SEQ ID NO: 883500
cuaagcaagggacuuaacc

SEQ ID NO: 883502 - RNA, 19 nt, Artificial Sequence
  Description of Artificial Sequence: Synthetic oligonucleotide
  Sense strand starting at position 3863 of SEQ ID NO: 588701
ggauuaaacccauggcugu

SEQ ID NO: 883503 - RNA, 19 nt, Artificial Sequence
  Description of Artificial Sequence: Synthetic oligonucleotide
  Antisense strand to SEQ ID NO: 883502
acagccauggguuuaaucc

SEQ ID NO: 883504 - RNA, 19 nt, Artificial Sequence
  Description of Artificial Sequence: Synthetic oligonucleotide
  Sense strand starting at position 3864 of SEQ ID NO: 588701
gauuaaacccauggcuguu

SEQ ID NO: 883505 - RNA, 19 nt, Artificial Sequence
  Description of Artificial Sequence: Synthetic oligonucleotide
  Antisense strand to SEQ ID NO: 883504
aacagccauggguuuaauc

SEQ ID NO: 883506 - RNA, 19 nt, Artificial Sequence
  Description of Artificial Sequence: Synthetic oligonucleotide
  Sense strand starting at position 3870 of SEQ ID NO: 588701
acccauggcuguuugacau

SEQ ID NO: 883507 - RNA, 19 nt, Artificial Sequence
  Description of Artificial Sequence: Synthetic oligonucleotide
  Antisense strand to SEQ ID NO: 883506
augucaaacagccaugggu

SEQ ID NO: 883508 - RNA, 19 nt, Artificial Sequence
  Description of Artificial Sequence: Synthetic oligonucleotide
  Sense strand starting at position 75 of SEQ ID NO: 588702
cccagaagguucuguagca

SEQ ID NO: 883509 - RNA, 19 nt, Artificial Sequence
  Description of Artificial Sequence: Synthetic oligonucleotide
  Antisense strand to SEQ ID NO: 883508
ugcuacagaaccuucuggg

SEQ ID NO: 883510 - RNA, 19 nt, Artificial Sequence
  Description of Artificial Sequence: Synthetic oligonucleotide
  Sense strand starting at position 185 of SEQ ID NO: 588702
ucagcaucccuggauauga

SEQ ID NO: 883511 - RNA, 19 nt, Artificial Sequence
  Description of Artificial Sequence: Synthetic oligonucleotide
  Antisense strand to SEQ ID NO: 883510
ucauauccagggaugcuga

SEQ ID NO: 883512 - RNA, 19 nt, Artificial Sequence
  Description of Artificial Sequence: Synthetic oligonucleotide
  Sense strand starting at position 369 of SEQ ID NO: 588702
cccagauuuccgugggcau

SEQ ID NO: 883513 - RNA, 19 nt, Artificial Sequence
  Description of Artificial Sequence: Synthetic oligonucleotide
  Antisense strand to SEQ ID NO: 883512
augcccacggaaaucuggg

SEQ ID NO: 883514 - RNA, 19 nt, Artificial Sequence
  Description of Artificial Sequence: Synthetic oligonucleotide
  Sense strand starting at position 370 of SEQ ID NO: 588702
ccagauuuccgugggcauc

SEQ ID NO: 883515 - RNA, 19 nt, Artificial Sequence
  Description of Artificial Sequence: Synthetic oligonucleotide
  Antisense strand to SEQ ID NO: 883514
gaugcccacggaaaucugg

SEQ ID NO: 883516 - RNA, 19 nt, Artificial Sequence
  Description of Artificial Sequence: Synthetic oligonucleotide
  Sense strand starting at position 731 of SEQ ID NO: 588702
caggcaaagucagaugcaa

SEQ ID NO: 883517 - RNA, 19 nt, Artificial Sequence
  Description of Artificial Sequence: Synthetic oligonucleotide
  Antisense strand to SEQ ID NO: 883516
uugcaucugacuuugccug

SEQ ID NO: 883518 - RNA, 19 nt, Artificial Sequence
  Description of Artificial Sequence: Synthetic oligonucleotide
  Sense strand starting at position 733 of SEQ ID NO: 588702
ggcaaagucagaugcaaga

SEQ ID NO: 883519 - RNA, 19 nt, Artificial Sequence
  Description of Artificial Sequence: Synthetic oligonucleotide
  Antisense strand to SEQ ID NO: 883518
ucuugcaucugacuuugcc

SEQ ID NO: 883520 - RNA, 19 nt, Artificial Sequence
  Description of Artificial Sequence: Synthetic oligonucleotide
  Sense strand starting at position 938 of SEQ ID NO: 588702
agcauaagaucaugucaaa

SEQ ID NO: 883521 - RNA, 19 nt, Artificial Sequence
  Description of Artificial Sequence: Synthetic oligonucleotide
  Antisense strand to SEQ ID NO: 883520
uuugacaugaucuuaugcu

SEQ ID NO: 883522 - RNA, 19 nt, Artificial Sequence
  Description of Artificial Sequence: Synthetic oligonucleotide
  Sense strand starting at position 2478 of SEQ ID NO: 588702
gagccuugagacugaaagu

SEQ ID NO: 883523 - RNA, 19 nt, Artificial Sequence
  Description of Artificial Sequence: Synthetic oligonucleotide
  Antisense strand to SEQ ID NO: 883522
acuuucagucucaaggcuc

SEQ ID NO: 883524 - RNA, 19 nt, Artificial Sequence
  Description of Artificial Sequence: Synthetic oligonucleotide
  Sense strand starting at position 2608 of SEQ ID NO: 588702
gagccuuccuagucuagaa

SEQ ID NO: 883525 - RNA, 19 nt, Artificial Sequence
  Description of Artificial Sequence: Synthetic oligonucleotide
  Antisense strand to SEQ ID NO: 883524
uucuagacuaggaaggcuc

SEQ ID NO: 883526 - RNA, 19 nt, Artificial Sequence
  Description of Artificial Sequence: Synthetic oligonucleotide
  Sense strand starting at position 2646 of SEQ ID NO: 588702
ggcccuaacuuucuucuga

SEQ ID NO: 883527 - RNA, 19 nt, Artificial Sequence
  Description of Artificial Sequence: Synthetic oligonucleotide
  Antisense strand to SEQ ID NO: 883526
ucagaagaaaguuagggcc

SEQ ID NO: 883528 - RNA, 19 nt, Artificial Sequence
  Description of Artificial Sequence: Synthetic oligonucleotide
  Sense strand starting at position 2878 of SEQ ID NO: 588702
agcucuguucccuggcauu

SEQ ID NO: 883529 - RNA, 19 nt, Artificial Sequence
  Description of Artificial Sequence: Synthetic oligonucleotide
  Antisense strand to SEQ ID NO: 883528
aaugccagggaacagagcu

SEQ ID NO: 883530 - RNA, 19 nt, Artificial Sequence
  Description of Artificial Sequence: Synthetic oligonucleotide
  Sense strand starting at position 2930 of SEQ ID NO: 588702
gcuggucagcucugucaag

SEQ ID NO: 883531 - RNA, 19 nt, Artificial Sequence
  Description of Artificial Sequence: Synthetic oligonucleotide
  Antisense strand to SEQ ID NO: 883530
cuugacagagcugaccagc

SEQ ID NO: 883532 - RNA, 19 nt, Artificial Sequence
  Description of Artificial Sequence: Synthetic oligonucleotide
  Sense strand starting at position 2931 of SEQ ID NO: 588702
cuggucagcucugucaaga

SEQ ID NO: 883533 - RNA, 19 nt, Artificial Sequence
  Description of Artificial Sequence: Synthetic oligonucleotide
  Antisense strand to SEQ ID NO: 883532
ucuugacagagcugaccag

SEQ ID NO: 883534 - RNA, 19 nt, Artificial Sequence
  Description of Artificial Sequence: Synthetic oligonucleotide
  Sense strand starting at position 2948 of SEQ ID NO: 588702
gagagagcucccuggcauu

SEQ ID NO: 883535 - RNA, 19 nt, Artificial Sequence
  Description of Artificial Sequence: Synthetic oligonucleotide
  Antisense strand to SEQ ID NO: 883534
aaugccagggagcucucuc

SEQ ID NO: 883536 - RNA, 19 nt, Artificial Sequence
  Description of Artificial Sequence: Synthetic oligonucleotide
  Sense strand starting at position 3080 of SEQ ID NO: 588702
gucacuugcacgcguucua

SEQ ID NO: 883537 - RNA, 19 nt, Artificial Sequence
  Description of Artificial Sequence: Synthetic oligonucleotide
  Antisense strand to SEQ ID NO: 883536
uagaacgcgugcaagugac

SEQ ID NO: 883538 - RNA, 19 nt, Artificial Sequence
  Description of Artificial Sequence: Synthetic oligonucleotide
  Sense strand starting at position 3221 of SEQ ID NO: 588702
uccgcaucgugcugggaaa

SEQ ID NO: 883539 - RNA, 19 nt, Artificial Sequence
  Description of Artificial Sequence: Synthetic oligonucleotide
  Antisense strand to SEQ ID NO: 883538
uuucccagcacgaugcgga

SEQ ID NO: 883540 - RNA, 19 nt, Artificial Sequence
  Description of Artificial Sequence: Synthetic oligonucleotide
  Sense strand starting at position 3222 of SEQ ID NO: 588702
ccgcaucgugcugggaaau

SEQ ID NO: 883541 - RNA, 19 nt, Artificial Sequence
  Description of Artificial Sequence: Synthetic oligonucleotide
  Antisense strand to SEQ ID NO: 883540
auuucccagcacgaugcgg

SEQ ID NO: 883542 - RNA, 19 nt, Artificial Sequence
  Description of Artificial Sequence: Synthetic oligonucleotide
  Sense strand starting at position 3528 of SEQ ID NO: 588702
gggagaaguagcuggccau

SEQ ID NO: 883543 - RNA, 19 nt, Artificial Sequence
  Description of Artificial Sequence: Synthetic oligonucleotide
  Antisense strand to SEQ ID NO: 883542
auggccagcuacuucuccc

SEQ ID NO: 883544 - RNA, 19 nt, Artificial Sequence
  Description of Artificial Sequence: Synthetic oligonucleotide
  Sense strand starting at position 3529 of SEQ ID NO: 588702
ggagaaguagcuggccaua

SEQ ID NO: 883545 - RNA, 19 nt, Artificial Sequence
  Description of Artificial Sequence: Synthetic oligonucleotide
  Antisense strand to SEQ ID NO: 883544
uauggccagcuacuucucc

SEQ ID NO: 883546 - RNA, 19 nt, Artificial Sequence
  Description of Artificial Sequence: Synthetic oligonucleotide
  Sense strand starting at position 3531 of SEQ ID NO: 588702
agaaguagcuggccauaga

SEQ ID NO: 883547 - RNA, 19 nt, Artificial Sequence
  Description of Artificial Sequence: Synthetic oligonucleotide
  Antisense strand to SEQ ID NO: 883546
ucuauggccagcuacuucu

SEQ ID NO: 883548 - RNA, 19 nt, Artificial Sequence
  Description of Artificial Sequence: Synthetic oligonucleotide
  Sense strand starting at position 3615 of SEQ ID NO: 588702
aggccuuccuaccugaauu

SEQ ID NO: 883549 - RNA, 19 nt, Artificial Sequence
  Description of Artificial Sequence: Synthetic oligonucleotide
  Antisense strand to SEQ ID NO: 883548
aauucagguaggaaggccu

SEQ ID NO: 883550 - RNA, 19 nt, Artificial Sequence
  Description of Artificial Sequence: Synthetic oligonucleotide
  Sense strand starting at position 3627 of SEQ ID NO: 588702
cugaauuccgguugucacu

SEQ ID NO: 883551 - RNA, 19 nt, Artificial Sequence
  Description of Artificial Sequence: Synthetic oligonucleotide
  Antisense strand to SEQ ID NO: 883550
agugacaaccggaauucag

SEQ ID NO: 883552 - RNA, 19 nt, Artificial Sequence
  Description of Artificial Sequence: Synthetic oligonucleotide
  Sense strand starting at position 3650 of SEQ ID NO: 588702
cccuuccuccugggugaaa

SEQ ID NO: 883553 - RNA, 19 nt, Artificial Sequence
  Description of Artificial Sequence: Synthetic oligonucleotide
  Antisense strand to SEQ ID NO: 883552
uuucacccaggaggaaggg

SEQ ID NO: 883554 - RNA, 19 nt, Artificial Sequence
  Description of Artificial Sequence: Synthetic oligonucleotide
  Sense strand starting at position 3702 of SEQ ID NO: 588702
uacugaaguucugggaaag

SEQ ID NO: 883555 - RNA, 19 nt, Artificial Sequence
  Description of Artificial Sequence: Synthetic oligonucleotide
  Antisense strand to SEQ ID NO: 883554
cuuucccagaacuucagua

SEQ ID NO: 883556 - RNA, 19 nt, Artificial Sequence
  Description of Artificial Sequence: Synthetic oligonucleotide
  Sense strand starting at position 3719 of SEQ ID NO: 588702
agaaguaacucuuaagcca

SEQ ID NO: 883557 - RNA, 19 nt, Artificial Sequence
  Description of Artificial Sequence: Synthetic oligonucleotide
  Antisense strand to SEQ ID NO: 883556
uggcuuaagaguuacuucu

SEQ ID NO: 883558 - RNA, 19 nt, Artificial Sequence
  Description of Artificial Sequence: Synthetic oligonucleotide
  Sense strand starting at position 3734 of SEQ ID NO: 588702
gccauugucuacuauuaug

SEQ ID NO: 883559 - RNA, 19 nt, Artificial Sequence
  Description of Artificial Sequence: Synthetic oligonucleotide
  Antisense strand to SEQ ID NO: 883558
cauaauaguagacaauggc

SEQ ID NO: 883560 - RNA, 19 nt, Artificial Sequence
  Description of Artificial Sequence: Synthetic oligonucleotide
  Sense strand starting at position 3739 of SEQ ID NO: 588702
ugucuacuauuauguagau

SEQ ID NO: 883561 - RNA, 19 nt, Artificial Sequence
  Description of Artificial Sequence: Synthetic oligonucleotide
  Antisense strand to SEQ ID NO: 883560
aucuacauaauaguagaca

SEQ ID NO: 883562 - RNA, 19 nt, Artificial Sequence
  Description of Artificial Sequence: Synthetic oligonucleotide
  Sense strand starting at position 3740 of SEQ ID NO: 588702
gucuacuauuauguagaua

SEQ ID NO: 883563 - RNA, 19 nt, Artificial Sequence
  Description of Artificial Sequence: Synthetic oligonucleotide
  Antisense strand to SEQ ID NO: 883562
uaucuacauaauaguagac

SEQ ID NO: 883564 - RNA, 19 nt, Artificial Sequence
  Description of Artificial Sequence: Synthetic oligonucleotide
  Sense strand starting at position 3756 of SEQ ID NO: 588702
auagaaugcucagccugaa

SEQ ID NO: 883565 - RNA, 19 nt, Artificial Sequence
  Description of Artificial Sequence: Synthetic oligonucleotide
  Antisense strand to SEQ ID NO: 883564
uucaggcugagcauucuau

SEQ ID NO: 883566 - RNA, 19 nt, Artificial Sequence
  Description of Artificial Sequence: Synthetic oligonucleotide
  Sense strand starting at position 3759 of SEQ ID NO: 588702
gaaugcucagccugaaggu

SEQ ID NO: 883567 - RNA, 19 nt, Artificial Sequence
  Description of Artificial Sequence: Synthetic oligonucleotide
  Antisense strand to SEQ ID NO: 883566
accuucaggcugagcauuc

SEQ ID NO: 883568 - RNA, 19 nt, Artificial Sequence
  Description of Artificial Sequence: Synthetic oligonucleotide
  Sense strand starting at position 3809 of SEQ ID NO: 588702
ggugcccacuuccuugaua

SEQ ID NO: 883569 - RNA, 19 nt, Artificial Sequence
  Description of Artificial Sequence: Synthetic oligonucleotide
  Antisense strand to SEQ ID NO: 883568
uaucaaggaagugggcacc

SEQ ID NO: 883570 - RNA, 19 nt, Artificial Sequence
  Description of Artificial Sequence: Synthetic oligonucleotide
  Sense strand starting at position 3811 of SEQ ID NO: 588702
ugcccacuuccuugauaga

SEQ ID NO: 883571 - RNA, 19 nt, Artificial Sequence
  Description of Artificial Sequence: Synthetic oligonucleotide
  Antisense strand to SEQ ID NO: 883570
ucuaucaaggaagugggca

SEQ ID NO: 883572 - RNA, 19 nt, Artificial Sequence
  Description of Artificial Sequence: Synthetic oligonucleotide
  Sense strand starting at position 3812 of SEQ ID NO: 588702
gcccacuuccuugauagau

SEQ ID NO: 883573 - RNA, 19 nt, Artificial Sequence
  Description of Artificial Sequence: Synthetic oligonucleotide
  Antisense strand to SEQ ID NO: 883572
aucuaucaaggaagugggc

SEQ ID NO: 883574 - RNA, 19 nt, Artificial Sequence
  Description of Artificial Sequence: Synthetic oligonucleotide
  Sense strand starting at position 3871 of SEQ ID NO: 588702
gugagcagugcccaaauga

SEQ ID NO: 883575 - RNA, 19 nt, Artificial Sequence
  Description of Artificial Sequence: Synthetic oligonucleotide
  Antisense strand to SEQ ID NO: 883574
ucauuugggcacugcucac

SEQ ID NO: 883576 - RNA, 19 nt, Artificial Sequence
  Description of Artificial Sequence: Synthetic oligonucleotide
  Sense strand starting at position 52 of SEQ ID NO: 588703
ggaccauaggccuggagaa

SEQ ID NO: 883577 - RNA, 19 nt, Artificial Sequence
  Description of Artificial Sequence: Synthetic oligonucleotide
  Antisense strand to SEQ ID NO: 883576
uucuccaggccuauggucc

SEQ ID NO: 883578 - RNA, 19 nt, Artificial Sequence
  Description of Artificial Sequence: Synthetic oligonucleotide
  Sense strand starting at position 794 of SEQ ID NO: 588703
guagauguccgcugggaug

SEQ ID NO: 883579 - RNA, 19 nt, Artificial Sequence
  Description of Artificial Sequence: Synthetic oligonucleotide
  Antisense strand to SEQ ID NO: 883578
caucccagcggacaucuac

SEQ ID NO: 883580 - RNA, 19 nt, Artificial Sequence
  Description of Artificial Sequence: Synthetic oligonucleotide
  Sense strand starting at position 2060 of SEQ ID NO: 588703
uggaaauuauuccggucca

SEQ ID NO: 883581 - RNA, 19 nt, Artificial Sequence
  Description of Artificial Sequence: Synthetic oligonucleotide
  Antisense strand to SEQ ID NO: 883580
uggaccggaauaauuucca

SEQ ID NO: 883582 - RNA, 19 nt, Artificial Sequence
  Description of Artificial Sequence: Synthetic oligonucleotide
  Sense strand starting at position 2061 of SEQ ID NO: 588703
ggaaauuauuccgguccag

SEQ ID NO: 883583 - RNA, 19 nt, Artificial Sequence
  Description of Artificial Sequence: Synthetic oligonucleotide
  Antisense strand to SEQ ID NO: 883582
cuggaccggaauaauuucc

SEQ ID NO: 883584 - RNA, 19 nt, Artificial Sequence
  Description of Artificial Sequence: Synthetic oligonucleotide
  Sense strand starting at position 2682 of SEQ ID NO: 588703
ugcauaucggccugaagac

SEQ ID NO: 883585 - RNA, 19 nt, Artificial Sequence
  Description of Artificial Sequence: Synthetic oligonucleotide
  Antisense strand to SEQ ID NO: 883584
gucuucaggccgauaugca

SEQ ID NO: 883586 - RNA, 19 nt, Artificial Sequence
  Description of Artificial Sequence: Synthetic oligonucleotide
  Sense strand starting at position 2932 of SEQ ID NO: 588703
gggcguguuuaaagugaca

SEQ ID NO: 883587 - RNA, 19 nt, Artificial Sequence
  Description of Artificial Sequence: Synthetic oligonucleotide
  Antisense strand to SEQ ID NO: 883586
ugucacuuuaaacacgccc

SEQ ID NO: 883588 - RNA, 19 nt, Artificial Sequence
  Description of Artificial Sequence: Synthetic oligonucleotide
  Sense strand starting at position 2934 of SEQ ID NO: 588703
gcguguuuaaagugacaga

SEQ ID NO: 883589 - RNA, 19 nt, Artificial Sequence
  Description of Artificial Sequence: Synthetic oligonucleotide
  Antisense strand to SEQ ID NO: 883588
ucugucacuuuaaacacgc

SEQ ID NO: 883590 - RNA, 19 nt, Artificial Sequence
  Description of Artificial Sequence: Synthetic oligonucleotide
  Sense strand starting at position 55 of SEQ ID NO: 588704
guaacagacuuugaaacaa

SEQ ID NO: 883591 - RNA, 19 nt, Artificial Sequence
  Description of Artificial Sequence: Synthetic oligonucleotide
  Antisense strand to SEQ ID NO: 883590
uuguuucaaagucuguuac

SEQ ID NO: 883592 - RNA, 19 nt, Artificial Sequence
  Description of Artificial Sequence: Synthetic oligonucleotide
  Sense strand starting at position 76 of SEQ ID NO: 588704
cuucuagagcuguauacga

SEQ ID NO: 883593 - RNA, 19 nt, Artificial Sequence
  Description of Artificial Sequence: Synthetic oligonucleotide
  Antisense strand to SEQ ID NO: 883592
ucguauacagcucuagaag

SEQ ID NO: 883594 - RNA, 19 nt, Artificial Sequence
  Description of Artificial Sequence: Synthetic oligonucleotide
  Sense strand starting at position 78 of SEQ ID NO: 588704
ucuagagcuguauacgaaa

SEQ ID NO: 883595 - RNA, 19 nt, Artificial Sequence
  Description of Artificial Sequence: Synthetic oligonucleotide
  Antisense strand to SEQ ID NO: 883594
uuucguauacagcucuaga

SEQ ID NO: 883596 - RNA, 19 nt, Artificial Sequence
  Description of Artificial Sequence: Synthetic oligonucleotide
  Sense strand starting at position 101 of SEQ ID NO: 588704
uaagucucagcguaggaau

SEQ ID NO: 883597 - RNA, 19 nt, Artificial Sequence
  Description of Artificial Sequence: Synthetic oligonucleotide
  Antisense strand to SEQ ID NO: 883596
auuccuacgcugagacuua

SEQ ID NO: 883598 - RNA, 19 nt, Artificial Sequence
  Description of Artificial Sequence: Synthetic oligonucleotide
  Sense strand starting at position 138 of SEQ ID NO: 588704
aaggcuguugcacacuaau

SEQ ID NO: 883599 - RNA, 19 nt, Artificial Sequence
  Description of Artificial Sequence: Synthetic oligonucleotide
  Antisense strand to SEQ ID NO: 883598
auuagugugcaacagccuu

SEQ ID NO: 883600 - RNA, 19 nt, Artificial Sequence
  Description of Artificial Sequence: Synthetic oligonucleotide
  Sense strand starting at position 150 of SEQ ID NO: 588704
cacuaauuccuacgaggua

SEQ ID NO: 883601 - RNA, 19 nt, Artificial Sequence
  Description of Artificial Sequence: Synthetic oligonucleotide
  Antisense strand to SEQ ID NO: 883600
uaccucguaggaauuagug

SEQ ID NO: 883602 - RNA, 19 nt, Artificial Sequence
  Description of Artificial Sequence: Synthetic oligonucleotide
  Sense strand starting at position 174 of SEQ ID NO: 588704
uugugauuggacgaacaug

SEQ ID NO: 883603 - RNA, 19 nt, Artificial Sequence
  Description of Artificial Sequence: Synthetic oligonucleotide
  Antisense strand to SEQ ID NO: 883602
cauguucguccaaucacaa

SEQ ID NO: 883604 - RNA, 19 nt, Artificial Sequence
  Description of Artificial Sequence: Synthetic oligonucleotide
  Sense strand starting at position 346 of SEQ ID NO: 588704
gguccugugaucuagacac

SEQ ID NO: 883605 - RNA, 19 nt, Artificial Sequence
  Description of Artificial Sequence: Synthetic oligonucleotide
  Antisense strand to SEQ ID NO: 883604
gugucuagaucacaggacc

SEQ ID NO: 883606 - RNA, 19 nt, Artificial Sequence
  Description of Artificial Sequence: Synthetic oligonucleotide
  Sense strand starting at position 366 of SEQ ID NO: 588704
cagggcuaugugugaagaa

SEQ ID NO: 883607 - RNA, 19 nt, Artificial Sequence
  Description of Artificial Sequence: Synthetic oligonucleotide
  Antisense strand to SEQ ID NO: 883606
uucuucacacauagcccug

SEQ ID NO: 883608 - RNA, 19 nt, Artificial Sequence
  Description of Artificial Sequence: Synthetic oligonucleotide
  Sense strand starting at position 424 of SEQ ID NO: 588704
uucaguuucguccucggua

SEQ ID NO: 883609 - RNA, 19 nt, Artificial Sequence
  Description of Artificial Sequence: Synthetic oligonucleotide
  Antisense strand to SEQ ID NO: 883608
uaccgaggacgaaacugaa

SEQ ID NO: 883610 - RNA, 19 nt, Artificial Sequence
  Description of Artificial Sequence: Synthetic oligonucleotide
  Sense strand starting at position 722 of SEQ ID NO: 588704
gccugugaccuccaggcua

SEQ ID NO: 883611 - RNA, 19 nt, Artificial Sequence
  Description of Artificial Sequence: Synthetic oligonucleotide
  Antisense strand to SEQ ID NO: 883610
uagccuggaggucacaggc

SEQ ID NO: 883612 - RNA, 19 nt, Artificial Sequence
  Description of Artificial Sequence: Synthetic oligonucleotide
  Sense strand starting at position 724 of SEQ ID NO: 588704
cugugaccuccaggcuaau

SEQ ID NO: 883613 - RNA, 19 nt, Artificial Sequence
  Description of Artificial Sequence: Synthetic oligonucleotide
  Antisense strand to SEQ ID NO: 883612
auuagccuggaggucacag

SEQ ID NO: 883614 - RNA, 19 nt, Artificial Sequence
  Description of Artificial Sequence: Synthetic oligonucleotide
  Sense strand starting at position 808 of SEQ ID NO: 588704
cucuguguuucuucuggaa

SEQ ID NO: 883615 - RNA, 19 nt, Artificial Sequence
  Description of Artificial Sequence: Synthetic oligonucleotide
  Antisense strand to SEQ ID NO: 883614
uuccagaagaaacacagag

SEQ ID NO: 883616 - RNA, 19 nt, Artificial Sequence
  Description of Artificial Sequence: Synthetic oligonucleotide
  Sense strand starting at position 812 of SEQ ID NO: 588704
guguuucuucuggaaacca

SEQ ID NO: 883617 - RNA, 19 nt, Artificial Sequence
  Description of Artificial Sequence: Synthetic oligonucleotide
  Antisense strand to SEQ ID NO: 883616
ugguuuccagaagaaacac

SEQ ID NO: 883618 - RNA, 19 nt, Artificial Sequence
  Description of Artificial Sequence: Synthetic oligonucleotide
  Sense strand starting at position 1030 of SEQ ID NO: 588704
gggcauuccaaagguggaa

SEQ ID NO: 883619 - RNA, 19 nt, Artificial Sequence
  Description of Artificial Sequence: Synthetic oligonucleotide
  Antisense strand to SEQ ID NO: 883618
uuccaccuuuggaaugccc

SEQ ID NO: 883620 - RNA, 19 nt, Artificial Sequence
  Description of Artificial Sequence: Synthetic oligonucleotide
  Sense strand starting at position 1173 of SEQ ID NO: 588704
gguaucuuaguaggaggaa

SEQ ID NO: 883621 - RNA, 19 nt, Artificial Sequence
  Description of Artificial Sequence: Synthetic oligonucleotide
  Antisense strand to SEQ ID NO: 883620
uuccuccuacuaagauacc

SEQ ID NO: 883622 - RNA, 19 nt, Artificial Sequence
  Description of Artificial Sequence: Synthetic oligonucleotide
  Sense strand starting at position 1205 of SEQ ID NO: 588704
gagagaugcuuccuguuac

SEQ ID NO: 883623 - RNA, 19 nt, Artificial Sequence
  Description of Artificial Sequence: Synthetic oligonucleotide
  Antisense strand to SEQ ID NO: 883622
guaacaggaagcaucucuc

SEQ ID NO: 883624 - RNA, 19 nt, Artificial Sequence
  Description of Artificial Sequence: Synthetic oligonucleotide
  Sense strand starting at position 2282 of SEQ ID NO: 588704
guaguagagacucagugaa

SEQ ID NO: 883625 - RNA, 19 nt, Artificial Sequence
  Description of Artificial Sequence: Synthetic oligonucleotide
  Antisense strand to SEQ ID NO: 883624
uucacugagucucuacuac

SEQ ID NO: 883626 - RNA, 19 nt, Artificial Sequence
  Description of Artificial Sequence: Synthetic oligonucleotide
  Sense strand starting at position 2295 of SEQ ID NO: 588704
agugaagcagacuguguuu

SEQ ID NO: 883627 - RNA, 19 nt, Artificial Sequence
  Description of Artificial Sequence: Synthetic oligonucleotide
  Antisense strand to SEQ ID NO: 883626
aaacacagucugcuucacu

SEQ ID NO: 883628 - RNA, 19 nt, Artificial Sequence
  Description of Artificial Sequence: Synthetic oligonucleotide
  Sense strand starting at position 2306 of SEQ ID NO: 588704
cuguguuugcgucccagau

SEQ ID NO: 883629 - RNA, 19 nt, Artificial Sequence
  Description of Artificial Sequence: Synthetic oligonucleotide
  Antisense strand to SEQ ID NO: 883628
aucugggacgcaaacacag

SEQ ID NO: 883630 - RNA, 19 nt, Artificial Sequence
  Description of Artificial Sequence: Synthetic oligonucleotide
  Sense strand starting at position 2307 of SEQ ID NO: 588704
uguguuugcgucccagaug

SEQ ID NO: 883631 - RNA, 19 nt, Artificial Sequence
  Description of Artificial Sequence: Synthetic oligonucleotide
  Antisense strand to SEQ ID NO: 883630
caucugggacgcaaacaca

SEQ ID NO: 883632 - RNA, 19 nt, Artificial Sequence
  Description of Artificial Sequence: Synthetic oligonucleotide
  Sense strand starting at position 2336 of SEQ ID NO: 588704
acuuucccagucuguaauu

SEQ ID NO: 883633 - RNA, 19 nt, Artificial Sequence
  Description of Artificial Sequence: Synthetic oligonucleotide
  Antisense strand to SEQ ID NO: 883632
aauuacagacugggaaagu

SEQ ID NO: 883634 - RNA, 19 nt, Artificial Sequence
  Description of Artificial Sequence: Synthetic oligonucleotide
  Sense strand starting at position 2374 of SEQ ID NO: 588704
cccugugagcaguaaauaa

SEQ ID NO: 883635 - RNA, 19 nt, Artificial Sequence
  Description of Artificial Sequence: Synthetic oligonucleotide
  Antisense strand to SEQ ID NO: 883634
uuauuuacugcucacaggg

SEQ ID NO: 883636 - RNA, 19 nt, Artificial Sequence
  Description of Artificial Sequence: Synthetic oligonucleotide
  Sense strand starting at position 2381 of SEQ ID NO: 588704
agcaguaaauaagaugaau

SEQ ID NO: 883637 - RNA, 19 nt, Artificial Sequence
  Description of Artificial Sequence: Synthetic oligonucleotide
  Antisense strand to SEQ ID NO: 883636
auucaucuuauuuacugcu

SEQ ID NO: 883638 - RNA, 19 nt, Artificial Sequence
  Description of Artificial Sequence: Synthetic oligonucleotide
  Sense strand starting at position 2439 of SEQ ID NO: 588704
cugaguaagugccuaccaa

SEQ ID NO: 883639 - RNA, 19 nt, Artificial Sequence
  Description of Artificial Sequence: Synthetic oligonucleotide
  Antisense strand to SEQ ID NO: 883638
uugguaggcacuuacucag

SEQ ID NO: 883640 - RNA, 19 nt, Artificial Sequence
  Description of Artificial Sequence: Synthetic oligonucleotide
  Sense strand starting at position 2492 of SEQ ID NO: 588704
ggcuguucugaguggaaua

SEQ ID NO: 883641 - RNA, 19 nt, Artificial Sequence
  Description of Artificial Sequence: Synthetic oligonucleotide
  Antisense strand to SEQ ID NO: 883640
uauuccacucagaacagcc

SEQ ID NO: 883642 - RNA, 19 nt, Artificial Sequence
  Description of Artificial Sequence: Synthetic oligonucleotide
  Sense strand starting at position 2493 of SEQ ID NO: 588704
gcuguucugaguggaauau

SEQ ID NO: 883643 - RNA, 19 nt, Artificial Sequence
  Description of Artificial Sequence: Synthetic oligonucleotide
  Antisense strand to SEQ ID NO: 883642
auauuccacucagaacagc

SEQ ID NO: 883644 - RNA, 19 nt, Artificial Sequence
  Description of Artificial Sequence: Synthetic oligonucleotide
  Sense strand starting at position 2494 of SEQ ID NO: 588704
cuguucugaguggaauauu

SEQ ID NO: 883645 - RNA, 19 nt, Artificial Sequence
  Description of Artificial Sequence: Synthetic oligonucleotide
  Antisense strand to SEQ ID NO: 883644
aauauuccacucagaacag

SEQ ID NO: 883646 - RNA, 19 nt, Artificial Sequence
  Description of Artificial Sequence: Synthetic oligonucleotide
  Sense strand starting at position 2874 of SEQ ID NO: 588704
ugcuguuacaaucagagag

SEQ ID NO: 883647 - RNA, 19 nt, Artificial Sequence
  Description of Artificial Sequence: Synthetic oligonucleotide
  Antisense strand to SEQ ID NO: 883646
cucucugauuguaacagca

SEQ ID NO: 883648 - RNA, 19 nt, Artificial Sequence
  Description of Artificial Sequence: Synthetic oligonucleotide
  Sense strand starting at position 2876 of SEQ ID NO: 588704
cuguuacaaucagagagaa

SEQ ID NO: 883649 - RNA, 19 nt, Artificial Sequence
  Description of Artificial Sequence: Synthetic oligonucleotide
  Antisense strand to SEQ ID NO: 883648
uucucucugauuguaacag

SEQ ID NO: 883650 - RNA, 19 nt, Artificial Sequence
  Description of Artificial Sequence: Synthetic oligonucleotide
  Sense strand starting at position 3010 of SEQ ID NO: 588704
ggcgguguuucuacauggu

SEQ ID NO: 883651 - RNA, 19 nt, Artificial Sequence
  Description of Artificial Sequence: Synthetic oligonucleotide
  Antisense strand to SEQ ID NO: 883650
accauguagaaacaccgcc

SEQ ID NO: 883652 - RNA, 19 nt, Artificial Sequence
  Description of Artificial Sequence: Synthetic oligonucleotide
  Sense strand starting at position 3311 of SEQ ID NO: 588704
gggauagacucuguccagu

SEQ ID NO: 883653 - RNA, 19 nt, Artificial Sequence
  Description of Artificial Sequence: Synthetic oligonucleotide
  Antisense strand to SEQ ID NO: 883652
acuggacagagucuauccc

SEQ ID NO: 883654 - RNA, 19 nt, Artificial Sequence
  Description of Artificial Sequence: Synthetic oligonucleotide
  Sense strand starting at position 3313 of SEQ ID NO: 588704
gauagacucuguccaguug

SEQ ID NO: 883655 - RNA, 19 nt, Artificial Sequence
  Description of Artificial Sequence: Synthetic oligonucleotide
  Antisense strand to SEQ ID NO: 883654
caacuggacagagucuauc

SEQ ID NO: 883656 - RNA, 19 nt, Artificial Sequence
  Description of Artificial Sequence: Synthetic oligonucleotide
  Sense strand starting at position 3380 of SEQ ID NO: 588704
gucagauaugauggccuuu

SEQ ID NO: 883657 - RNA, 19 nt, Artificial Sequence
  Description of Artificial Sequence: Synthetic oligonucleotide
  Antisense strand to SEQ ID NO: 883656
aaaggccaucauaucugac

SEQ ID NO: 883658 - RNA, 19 nt, Artificial Sequence
  Description of Artificial Sequence: Synthetic oligonucleotide
  Sense strand starting at position 3451 of SEQ ID NO: 588704
auccuuggucuggguggaa

SEQ ID NO: 883659 - RNA, 19 nt, Artificial Sequence
  Description of Artificial Sequence: Synthetic oligonucleotide
  Antisense strand to SEQ ID NO: 883658
uuccacccagaccaaggau

SEQ ID NO: 883660 - RNA, 19 nt, Artificial Sequence
  Description of Artificial Sequence: Synthetic oligonucleotide
  Sense strand starting at position 3529 of SEQ ID NO: 588704
cuacauaaucgccauuguu

SEQ ID NO: 883661 - RNA, 19 nt, Artificial Sequence
  Description of Artificial Sequence: Synthetic oligonucleotide
  Antisense strand to SEQ ID NO: 883660
aacaauggcgauuauguag

SEQ ID NO: 883662 - RNA, 19 nt, Artificial Sequence
  Description of Artificial Sequence: Synthetic oligonucleotide
  Sense strand starting at position 3538 of SEQ ID NO: 588704
cgccauuguuccuugaaca

SEQ ID NO: 883663 - RNA, 19 nt, Artificial Sequence
  Description of Artificial Sequence: Synthetic oligonucleotide
  Antisense strand to SEQ ID NO: 883662
uguucaaggaacaauggcg

SEQ ID NO: 883664 - RNA, 19 nt, Artificial Sequence
  Description of Artificial Sequence: Synthetic oligonucleotide
  Sense strand starting at position 3539 of SEQ ID NO: 588704
gccauuguuccuugaacag

SEQ ID NO: 883665 - RNA, 19 nt, Artificial Sequence
  Description of Artificial Sequence: Synthetic oligonucleotide
  Antisense strand to SEQ ID NO: 883664
cuguucaaggaacaauggc

SEQ ID NO: 883666 - RNA, 19 nt, Artificial Sequence
  Description of Artificial Sequence: Synthetic oligonucleotide
  Sense strand starting at position 3551 of SEQ ID NO: 588704
ugaacaguccugcaagugu

SEQ ID NO: 883667 - RNA, 19 nt, Artificial Sequence
  Description of Artificial Sequence: Synthetic oligonucleotide
  Antisense strand to SEQ ID NO: 883666
acacuugcaggacuguuca

SEQ ID NO: 883668 - RNA, 19 nt, Artificial Sequence
  Description of Artificial Sequence: Synthetic oligonucleotide
  Sense strand starting at position 3805 of SEQ ID NO: 588704
ggaaauucccauuguccac

SEQ ID NO: 883669 - RNA, 19 nt, Artificial Sequence
  Description of Artificial Sequence: Synthetic oligonucleotide
  Antisense strand to SEQ ID NO: 883668
guggacaaugggaauuucc

SEQ ID NO: 883670 - RNA, 19 nt, Artificial Sequence
  Description of Artificial Sequence: Synthetic oligonucleotide
  Sense strand starting at position 170 of SEQ ID NO: 588705
cgcagucuuguucuguuga

SEQ ID NO: 883671 - RNA, 19 nt, Artificial Sequence
  Description of Artificial Sequence: Synthetic oligonucleotide
  Antisense strand to SEQ ID NO: 883670
ucaacagaacaagacugcg

SEQ ID NO: 883672 - RNA, 19 nt, Artificial Sequence
  Description of Artificial Sequence: Synthetic oligonucleotide
  Sense strand starting at position 702 of SEQ ID NO: 588705
ggauuaguuuaacaaagua

SEQ ID NO: 883673 - RNA, 19 nt, Artificial Sequence
  Description of Artificial Sequence: Synthetic oligonucleotide
  Antisense strand to SEQ ID NO: 883672
uacuuuguuaaacuaaucc

SEQ ID NO: 883674 - RNA, 19 nt, Artificial Sequence
  Description of Artificial Sequence: Synthetic oligonucleotide
  Sense strand starting at position 780 of SEQ ID NO: 588705
cucaaagauuggcuauaca

SEQ ID NO: 883675 - RNA, 19 nt, Artificial Sequence
  Description of Artificial Sequence: Synthetic oligonucleotide
  Antisense strand to SEQ ID NO: 883674
uguauagccaaucuuugag

SEQ ID NO: 883676 - RNA, 19 nt, Artificial Sequence
  Description of Artificial Sequence: Synthetic oligonucleotide
  Sense strand starting at position 798 of SEQ ID NO: 588705
augauuaucuggccauugu

SEQ ID NO: 883677 - RNA, 19 nt, Artificial Sequence
  Description of Artificial Sequence: Synthetic oligonucleotide
  Antisense strand to SEQ ID NO: 883676
acaauggccagauaaucau

SEQ ID NO: 883678 - RNA, 19 nt, Artificial Sequence
  Description of Artificial Sequence: Synthetic oligonucleotide
  Sense strand starting at position 802 of SEQ ID NO: 588705
uuaucuggccauugugaga

SEQ ID NO: 883679 - RNA, 19 nt, Artificial Sequence
  Description of Artificial Sequence: Synthetic oligonucleotide
  Antisense strand to SEQ ID NO: 883678
ucucacaauggccagauaa

SEQ ID NO: 883680 - RNA, 19 nt, Artificial Sequence
  Description of Artificial Sequence: Synthetic oligonucleotide
  Sense strand starting at position 815 of SEQ ID NO: 588705
gugagaacuugaccaagua

SEQ ID NO: 883681 - RNA, 19 nt, Artificial Sequence
  Description of Artificial Sequence: Synthetic oligonucleotide
  Antisense strand to SEQ ID NO: 883680
uacuuggucaaguucucac

SEQ ID NO: 883682 - RNA, 19 nt, Artificial Sequence
  Description of Artificial Sequence: Synthetic oligonucleotide
  Sense strand starting at position 1234 of SEQ ID NO: 588705
gucguuugaaccugggagu

SEQ ID NO: 883683 - RNA, 19 nt, Artificial Sequence
  Description of Artificial Sequence: Synthetic oligonucleotide
  Antisense strand to SEQ ID NO: 883682
acucccagguucaaacgac

SEQ ID NO: 883684 - RNA, 19 nt, Artificial Sequence
  Description of Artificial Sequence: Synthetic oligonucleotide
  Sense strand starting at position 1418 of SEQ ID NO: 588705
cagcacuugauucguggua

SEQ ID NO: 883685 - RNA, 19 nt, Artificial Sequence
  Description of Artificial Sequence: Synthetic oligonucleotide
  Antisense strand to SEQ ID NO: 883684
uaccacgaaucaagugcug

SEQ ID NO: 883686 - RNA, 19 nt, Artificial Sequence
  Description of Artificial Sequence: Synthetic oligonucleotide
  Sense strand starting at position 1443 of SEQ ID NO: 588705
guaacagacuuugaaacaa

SEQ ID NO: 883687 - RNA, 19 nt, Artificial Sequence
  Description of Artificial Sequence: Synthetic oligonucleotide
  Antisense strand to SEQ ID NO: 883686
uuguuucaaagucuguuac

SEQ ID NO: 883688 - RNA, 19 nt, Artificial Sequence
  Description of Artificial Sequence: Synthetic oligonucleotide
  Sense strand starting at position 1464 of SEQ ID NO: 588705
cuucuagagcuguauacga

SEQ ID NO: 883689 - RNA, 19 nt, Artificial Sequence
  Description of Artificial Sequence: Synthetic oligonucleotide
  Antisense strand to SEQ ID NO: 883688
ucguauacagcucuagaag

SEQ ID NO: 883690 - RNA, 19 nt, Artificial Sequence
  Description of Artificial Sequence: Synthetic oligonucleotide
  Sense strand starting at position 1466 of SEQ ID NO: 588705
ucuagagcuguauacgaaa

SEQ ID NO: 883691 - RNA, 19 nt, Artificial Sequence
  Description of Artificial Sequence: Synthetic oligonucleotide
  Antisense strand to SEQ ID NO: 883690
uuucguauacagcucuaga

SEQ ID NO: 883692 - RNA, 19 nt, Artificial Sequence
  Description of Artificial Sequence: Synthetic oligonucleotide
  Sense strand starting at position 1489 of SEQ ID NO: 588705
uaagucucagcguaggaau

SEQ ID NO: 883693 - RNA, 19 nt, Artificial Sequence
  Description of Artificial Sequence: Synthetic oligonucleotide
  Antisense strand to SEQ ID NO: 883692
auuccuacgcugagacuua

SEQ ID NO: 883694 - RNA, 19 nt, Artificial Sequence
  Description of Artificial Sequence: Synthetic oligonucleotide
  Sense strand starting at position 1526 of SEQ ID NO: 588705
aaggcuguugcacacuaau

SEQ ID NO: 883695 - RNA, 19 nt, Artificial Sequence
  Description of Artificial Sequence: Synthetic oligonucleotide
  Antisense strand to SEQ ID NO: 883694
auuagugugcaacagccuu

SEQ ID NO: 883696 - RNA, 19 nt, Artificial Sequence
  Description of Artificial Sequence: Synthetic oligonucleotide
  Sense strand starting at position 1538 of SEQ ID NO: 588705
cacuaauuccuacgaggua

SEQ ID NO: 883697 - RNA, 19 nt, Artificial Sequence
  Description of Artificial Sequence: Synthetic oligonucleotide
  Antisense strand to SEQ ID NO: 883696
uaccucguaggaauuagug

SEQ ID NO: 883698 - RNA, 19 nt, Artificial Sequence
  Description of Artificial Sequence: Synthetic oligonucleotide
  Sense strand starting at position 1562 of SEQ ID NO: 588705
uugugauuggacgaacaug

SEQ ID NO: 883699 - RNA, 19 nt, Artificial Sequence
  Description of Artificial Sequence: Synthetic oligonucleotide
  Antisense strand to SEQ ID NO: 883698
cauguucguccaaucacaa

SEQ ID NO: 883700 - RNA, 19 nt, Artificial Sequence
  Description of Artificial Sequence: Synthetic oligonucleotide
  Sense strand starting at position 1734 of SEQ ID NO: 588705
gguccugugaucuagacac

SEQ ID NO: 883701 - RNA, 19 nt, Artificial Sequence
  Description of Artificial Sequence: Synthetic oligonucleotide
  Antisense strand to SEQ ID NO: 883700
gugucuagaucacaggacc

SEQ ID NO: 883702 - RNA, 19 nt, Artificial Sequence
  Description of Artificial Sequence: Synthetic oligonucleotide
  Sense strand starting at position 1754 of SEQ ID NO: 588705
cagggcuaugugugaagaa

SEQ ID NO: 883703 - RNA, 19 nt, Artificial Sequence
  Description of Artificial Sequence: Synthetic oligonucleotide
  Antisense strand to SEQ ID NO: 883702
uucuucacacauagcccug

SEQ ID NO: 883704 - RNA, 19 nt, Artificial Sequence
  Description of Artificial Sequence: Synthetic oligonucleotide
  Sense strand starting at position 1812 of SEQ ID NO: 588705
uucaguuucguccucggua

SEQ ID NO: 883705 - RNA, 19 nt, Artificial Sequence
  Description of Artificial Sequence: Synthetic oligonucleotide
  Antisense strand to SEQ ID NO: 883704
uaccgaggacgaaacugaa

SEQ ID NO: 883706 - RNA, 19 nt, Artificial Sequence
  Description of Artificial Sequence: Synthetic oligonucleotide
  Sense strand starting at position 1814 of SEQ ID NO: 588705
caguuucguccucgguaaa

SEQ ID NO: 883707 - RNA, 19 nt, Artificial Sequence
  Description of Artificial Sequence: Synthetic oligonucleotide
  Antisense strand to SEQ ID NO: 883706
uuuaccgaggacgaaacug

SEQ ID NO: 883708 - RNA, 19 nt, Artificial Sequence
  Description of Artificial Sequence: Synthetic oligonucleotide
  Sense strand starting at position 2110 of SEQ ID NO: 588705
gccugugaccuccaggcua

SEQ ID NO: 883709 - RNA, 19 nt, Artificial Sequence
  Description of Artificial Sequence: Synthetic oligonucleotide
  Antisense strand to SEQ ID NO: 883708
uagccuggaggucacaggc

SEQ ID NO: 883710 - RNA, 19 nt, Artificial Sequence
  Description of Artificial Sequence: Synthetic oligonucleotide
  Sense strand starting at position 2112 of SEQ ID NO: 588705
cugugaccuccaggcuaau

SEQ ID NO: 883711 - RNA, 19 nt, Artificial Sequence
  Description of Artificial Sequence: Synthetic oligonucleotide
  Antisense strand to SEQ ID NO: 883710
auuagccuggaggucacag

SEQ ID NO: 883712 - RNA, 19 nt, Artificial Sequence
  Description of Artificial Sequence: Synthetic oligonucleotide
  Sense strand starting at position 2187 of SEQ ID NO: 588705
aucugcuuccucuguguuu

SEQ ID NO: 883713 - RNA, 19 nt, Artificial Sequence
  Description of Artificial Sequence: Synthetic oligonucleotide
  Antisense strand to SEQ ID NO: 883712
aaacacagaggaagcagau

SEQ ID NO: 883714 - RNA, 19 nt, Artificial Sequence
  Description of Artificial Sequence: Synthetic oligonucleotide
  Sense strand starting at position 2196 of SEQ ID NO: 588705
cucuguguuucuucuggaa

SEQ ID NO: 883715 - RNA, 19 nt, Artificial Sequence
  Description of Artificial Sequence: Synthetic oligonucleotide
  Antisense strand to SEQ ID NO: 883714
uuccagaagaaacacagag

SEQ ID NO: 883716 - RNA, 19 nt, Artificial Sequence
  Description of Artificial Sequence: Synthetic oligonucleotide
  Sense strand starting at position 2200 of SEQ ID NO: 588705
guguuucuucuggaaacca

SEQ ID NO: 883717 - RNA, 19 nt, Artificial Sequence
  Description of Artificial Sequence: Synthetic oligonucleotide
  Antisense strand to SEQ ID NO: 883716
ugguuuccagaagaaacac

SEQ ID NO: 883718 - RNA, 19 nt, Artificial Sequence
  Description of Artificial Sequence: Synthetic oligonucleotide
  Sense strand starting at position 2418 of SEQ ID NO: 588705
gggcauuccaaagguggaa

SEQ ID NO: 883719 - RNA, 19 nt, Artificial Sequence
  Description of Artificial Sequence: Synthetic oligonucleotide
  Antisense strand to SEQ ID NO: 883718
uuccaccuuuggaaugccc

SEQ ID NO: 883720 - RNA, 19 nt, Artificial Sequence
  Description of Artificial Sequence: Synthetic oligonucleotide
  Sense strand starting at position 2561 of SEQ ID NO: 588705
gguaucuuaguaggaggaa

SEQ ID NO: 883721 - RNA, 19 nt, Artificial Sequence
  Description of Artificial Sequence: Synthetic oligonucleotide
  Antisense strand to SEQ ID NO: 883720
uuccuccuacuaagauacc

SEQ ID NO: 883722 - RNA, 19 nt, Artificial Sequence
  Description of Artificial Sequence: Synthetic oligonucleotide
  Sense strand starting at position 2593 of SEQ ID NO: 588705
gagagaugcuuccuguuac

SEQ ID NO: 883723 - RNA, 19 nt, Artificial Sequence
  Description of Artificial Sequence: Synthetic oligonucleotide
  Antisense strand to SEQ ID NO: 883722
guaacaggaagcaucucuc

SEQ ID NO: 883724 - RNA, 19 nt, Artificial Sequence
  Description of Artificial Sequence: Synthetic oligonucleotide
  Sense strand starting at position 3670 of SEQ ID NO: 588705
guaguagagacucagugaa

SEQ ID NO: 883725 - RNA, 19 nt, Artificial Sequence
  Description of Artificial Sequence: Synthetic oligonucleotide
  Antisense strand to SEQ ID NO: 883724
uucacugagucucuacuac

SEQ ID NO: 883726 - RNA, 19 nt, Artificial Sequence
  Description of Artificial Sequence: Synthetic oligonucleotide
  Sense strand starting at position 3683 of SEQ ID NO: 588705
agugaagcagacuguguuu

SEQ ID NO: 883727 - RNA, 19 nt, Artificial Sequence
  Description of Artificial Sequence: Synthetic oligonucleotide
  Antisense strand to SEQ ID NO: 883726
aaacacagucugcuucacu

SEQ ID NO: 883728 - RNA, 19 nt, Artificial Sequence
  Description of Artificial Sequence: Synthetic oligonucleotide
  Sense strand starting at position 3694 of SEQ ID NO: 588705
cuguguuugcgucccagau

SEQ ID NO: 883729 - RNA, 19 nt, Artificial Sequence
  Description of Artificial Sequence: Synthetic oligonucleotide
  Antisense strand to SEQ ID NO: 883728
aucugggacgcaaacacag

SEQ ID NO: 883730 - RNA, 19 nt, Artificial Sequence
  Description of Artificial Sequence: Synthetic oligonucleotide
  Sense strand starting at position 3695 of SEQ ID NO: 588705
uguguuugcgucccagaug

SEQ ID NO: 883731 - RNA, 19 nt, Artificial Sequence
  Description of Artificial Sequence: Synthetic oligonucleotide
  Antisense strand to SEQ ID NO: 883730
caucugggacgcaaacaca

SEQ ID NO: 883732 - RNA, 19 nt, Artificial Sequence
  Description of Artificial Sequence: Synthetic oligonucleotide
  Sense strand starting at position 3724 of SEQ ID NO: 588705
acuuucccagucuguaauu

SEQ ID NO: 883733 - RNA, 19 nt, Artificial Sequence
  Description of Artificial Sequence: Synthetic oligonucleotide
  Antisense strand to SEQ ID NO: 883732
aauuacagacugggaaagu

SEQ ID NO: 883734 - RNA, 19 nt, Artificial Sequence
  Description of Artificial Sequence: Synthetic oligonucleotide
  Sense strand starting at position 3762 of SEQ ID NO: 588705
cccugugagcaguaaauaa

SEQ ID NO: 883735 - RNA, 19 nt, Artificial Sequence
  Description of Artificial Sequence: Synthetic oligonucleotide
  Antisense strand to SEQ ID NO: 883734
uuauuuacugcucacaggg

SEQ ID NO: 883736 - RNA, 19 nt, Artificial Sequence
  Description of Artificial Sequence: Synthetic oligonucleotide
  Sense strand starting at position 3769 of SEQ ID NO: 588705
agcaguaaauaagaugaau

SEQ ID NO: 883737 - RNA, 19 nt, Artificial Sequence
  Description of Artificial Sequence: Synthetic oligonucleotide
  Antisense strand to SEQ ID NO: 883736
auucaucuuauuuacugcu

SEQ ID NO: 883738 - RNA, 19 nt, Artificial Sequence
  Description of Artificial Sequence: Synthetic oligonucleotide
  Sense strand starting at position 3780 of SEQ ID NO: 588705
agaugaaugcuucgcagcu

SEQ ID NO: 883739 - RNA, 19 nt, Artificial Sequence
  Description of Artificial Sequence: Synthetic oligonucleotide
  Antisense strand to SEQ ID NO: 883738
agcugcgaagcauucaucu

SEQ ID NO: 883740 - RNA, 19 nt, Artificial Sequence
  Description of Artificial Sequence: Synthetic oligonucleotide
  Sense strand starting at position 3786 of SEQ ID NO: 588705
augcuucgcagcugauaaa

SEQ ID NO: 883741 - RNA, 19 nt, Artificial Sequence
  Description of Artificial Sequence: Synthetic oligonucleotide
  Antisense strand to SEQ ID NO: 883740
uuuaucagcugcgaagcau

SEQ ID NO: 883742 - RNA, 19 nt, Artificial Sequence
  Description of Artificial Sequence: Synthetic oligonucleotide
  Sense strand starting at position 3827 of SEQ ID NO: 588705
cugaguaagugccuaccaa

SEQ ID NO: 883743 - RNA, 19 nt, Artificial Sequence
  Description of Artificial Sequence: Synthetic oligonucleotide
  Antisense strand to SEQ ID NO: 883742
uugguaggcacuuacucag

SEQ ID NO: 883744 - RNA, 19 nt, Artificial Sequence
  Description of Artificial Sequence: Synthetic oligonucleotide
  Sense strand starting at position 3880 of SEQ ID NO: 588705
ggcuguucugaguggaaua

SEQ ID NO: 883745 - RNA, 19 nt, Artificial Sequence
  Description of Artificial Sequence: Synthetic oligonucleotide
  Antisense strand to SEQ ID NO: 883744
uauuccacucagaacagcc

SEQ ID NO: 883746 - RNA, 19 nt, Artificial Sequence
  Description of Artificial Sequence: Synthetic oligonucleotide
  Sense strand starting at position 3881 of SEQ ID NO: 588705
gcuguucugaguggaauau

SEQ ID NO: 883747 - RNA, 19 nt, Artificial Sequence
  Description of Artificial Sequence: Synthetic oligonucleotide
  Antisense strand to SEQ ID NO: 883746
auauuccacucagaacagc

SEQ ID NO: 883748 - RNA, 19 nt, Artificial Sequence
  Description of Artificial Sequence: Synthetic oligonucleotide
  Sense strand starting at position 3882 of SEQ ID NO: 588705
cuguucugaguggaauauu

SEQ ID NO: 883749 - RNA, 19 nt, Artificial Sequence
  Description of Artificial Sequence: Synthetic oligonucleotide
  Antisense strand to SEQ ID NO: 883748
aauauuccacucagaacag

SEQ ID NO: 883750 - RNA, 19 nt, Artificial Sequence
  Description of Artificial Sequence: Synthetic oligonucleotide
  Sense strand starting at position 43 of SEQ ID NO: 588706
cuaguucugucucugggua

SEQ ID NO: 883751 - RNA, 19 nt, Artificial Sequence
  Description of Artificial Sequence: Synthetic oligonucleotide
  Antisense strand to SEQ ID NO: 883750
uacccagagacagaacuag

SEQ ID NO: 883752 - RNA, 19 nt, Artificial Sequence
  Description of Artificial Sequence: Synthetic oligonucleotide
  Sense strand starting at position 44 of SEQ ID NO: 588706
uaguucugucucuggguau

SEQ ID NO: 883753 - RNA, 19 nt, Artificial Sequence
  Description of Artificial Sequence: Synthetic oligonucleotide
  Antisense strand to SEQ ID NO: 883752
auacccagagacagaacua

SEQ ID NO: 883754 - RNA, 19 nt, Artificial Sequence
  Description of Artificial Sequence: Synthetic oligonucleotide
  Sense strand starting at position 58 of SEQ ID NO: 588706
gguaucucuacugaguugu

SEQ ID NO: 883755 - RNA, 19 nt, Artificial Sequence
  Description of Artificial Sequence: Synthetic oligonucleotide
  Antisense strand to SEQ ID NO: 883754
acaacucaguagagauacc

SEQ ID NO: 883756 - RNA, 19 nt, Artificial Sequence
  Description of Artificial Sequence: Synthetic oligonucleotide
  Sense strand starting at position 99 of SEQ ID NO: 588706
cuucccagucagugaauga

SEQ ID NO: 883757 - RNA, 19 nt, Artificial Sequence
  Description of Artificial Sequence: Synthetic oligonucleotide
  Antisense strand to SEQ ID NO: 883756
ucauucacugacugggaag

SEQ ID NO: 883758 - RNA, 19 nt, Artificial Sequence
  Description of Artificial Sequence: Synthetic oligonucleotide
  Sense strand starting at position 123 of SEQ ID NO: 588706
gccuguauuucucugcuuu

SEQ ID NO: 883759 - RNA, 19 nt, Artificial Sequence
  Description of Artificial Sequence: Synthetic oligonucleotide
  Antisense strand to SEQ ID NO: 883758
aaagcagagaaauacaggc

SEQ ID NO: 883760 - RNA, 19 nt, Artificial Sequence
  Description of Artificial Sequence: Synthetic oligonucleotide
  Sense strand starting at position 457 of SEQ ID NO: 588706
gaagaaauuugccaaggua

SEQ ID NO: 883761 - RNA, 19 nt, Artificial Sequence
  Description of Artificial Sequence: Synthetic oligonucleotide
  Antisense strand to SEQ ID NO: 883760
uaccuuggcaaauuucuuc

SEQ ID NO: 883762 - RNA, 19 nt, Artificial Sequence
  Description of Artificial Sequence: Synthetic oligonucleotide
  Sense strand starting at position 512 of SEQ ID NO: 588706
uggugagcugcuuaaugag

SEQ ID NO: 883763 - RNA, 19 nt, Artificial Sequence
  Description of Artificial Sequence: Synthetic oligonucleotide
  Antisense strand to SEQ ID NO: 883762
cucauuaagcagcucacca

SEQ ID NO: 883764 - RNA, 19 nt, Artificial Sequence
  Description of Artificial Sequence: Synthetic oligonucleotide
  Sense strand starting at position 521 of SEQ ID NO: 588706
gcuuaaugagauugucuuc

SEQ ID NO: 883765 - RNA, 19 nt, Artificial Sequence
  Description of Artificial Sequence: Synthetic oligonucleotide
  Antisense strand to SEQ ID NO: 883764
gaagacaaucucauuaagc

SEQ ID NO: 883766 - RNA, 19 nt, Artificial Sequence
  Description of Artificial Sequence: Synthetic oligonucleotide
  Sense strand starting at position 526 of SEQ ID NO: 588706
augagauugucuuccacua

SEQ ID NO: 883767 - RNA, 19 nt, Artificial Sequence
  Description of Artificial Sequence: Synthetic oligonucleotide
  Antisense strand to SEQ ID NO: 883766
uaguggaagacaaucucau

SEQ ID NO: 883768 - RNA, 19 nt, Artificial Sequence
  Description of Artificial Sequence: Synthetic oligonucleotide
  Sense strand starting at position 528 of SEQ ID NO: 588706
gagauugucuuccacuaug

SEQ ID NO: 883769 - RNA, 19 nt, Artificial Sequence
  Description of Artificial Sequence: Synthetic oligonucleotide
  Antisense strand to SEQ ID NO: 883768
cauaguggaagacaaucuc

SEQ ID NO: 883770 - RNA, 19 nt, Artificial Sequence
  Description of Artificial Sequence: Synthetic oligonucleotide
  Sense strand starting at position 674 of SEQ ID NO: 588706
gcugaaucuccaggauccu

SEQ ID NO: 883771 - RNA, 19 nt, Artificial Sequence
  Description of Artificial Sequence: Synthetic oligonucleotide
  Antisense strand to SEQ ID NO: 883770
aggauccuggagauucagc

SEQ ID NO: 883772 - RNA, 19 nt, Artificial Sequence
  Description of Artificial Sequence: Synthetic oligonucleotide
  Sense strand starting at position 683 of SEQ ID NO: 588706
ccaggauccucugcaagga

SEQ ID NO: 883773 - RNA, 19 nt, Artificial Sequence
  Description of Artificial Sequence: Synthetic oligonucleotide
  Antisense strand to SEQ ID NO: 883772
uccuugcagaggauccugg

SEQ ID NO: 883774 - RNA, 19 nt, Artificial Sequence
  Description of Artificial Sequence: Synthetic oligonucleotide
  Sense strand starting at position 701 of SEQ ID NO: 588706
agcuuaguuugcccaggaa

SEQ ID NO: 883775 - RNA, 19 nt, Artificial Sequence
  Description of Artificial Sequence: Synthetic oligonucleotide
  Antisense strand to SEQ ID NO: 883774
uuccugggcaaacuaagcu

SEQ ID NO: 883776 - RNA, 19 nt, Artificial Sequence
  Description of Artificial Sequence: Synthetic oligonucleotide
  Sense strand starting at position 739 of SEQ ID NO: 588706
ucucuaggcacgugugaau

SEQ ID NO: 883777 - RNA, 19 nt, Artificial Sequence
  Description of Artificial Sequence: Synthetic oligonucleotide
  Antisense strand to SEQ ID NO: 883776
auucacacgugccuagaga

SEQ ID NO: 883778 - RNA, 19 nt, Artificial Sequence
  Description of Artificial Sequence: Synthetic oligonucleotide
  Sense strand starting at position 902 of SEQ ID NO: 588706
uaugguuggugagcuccaa

SEQ ID NO: 883779 - RNA, 19 nt, Artificial Sequence
  Description of Artificial Sequence: Synthetic oligonucleotide
  Antisense strand to SEQ ID NO: 883778
uuggagcucaccaaccaua

SEQ ID NO: 883780 - RNA, 19 nt, Artificial Sequence
  Description of Artificial Sequence: Synthetic oligonucleotide
  Sense strand starting at position 950 of SEQ ID NO: 588706
gggcaaugccagcguagaa

SEQ ID NO: 883781 - RNA, 19 nt, Artificial Sequence
  Description of Artificial Sequence: Synthetic oligonucleotide
  Antisense strand to SEQ ID NO: 883780
uucuacgcuggcauugccc

SEQ ID NO: 883782 - RNA, 19 nt, Artificial Sequence
  Description of Artificial Sequence: Synthetic oligonucleotide
  Sense strand starting at position 1066 of SEQ ID NO: 588706
uggauauucuggucccuga

SEQ ID NO: 883783 - RNA, 19 nt, Artificial Sequence
  Description of Artificial Sequence: Synthetic oligonucleotide
  Antisense strand to SEQ ID NO: 883782
ucagggaccagaauaucca

SEQ ID NO: 883784 - RNA, 19 nt, Artificial Sequence
  Description of Artificial Sequence: Synthetic oligonucleotide
  Sense strand starting at position 1069 of SEQ ID NO: 588706
auauucuggucccugaaua

SEQ ID NO: 883785 - RNA, 19 nt, Artificial Sequence
  Description of Artificial Sequence: Synthetic oligonucleotide
  Antisense strand to SEQ ID NO: 883784
uauucagggaccagaauau

SEQ ID NO: 883786 - RNA, 19 nt, Artificial Sequence
  Description of Artificial Sequence: Synthetic oligonucleotide
  Sense strand starting at position 1113 of SEQ ID NO: 588706
ccggaaaccuuccuggaga

SEQ ID NO: 883787 - RNA, 19 nt, Artificial Sequence
  Description of Artificial Sequence: Synthetic oligonucleotide
  Antisense strand to SEQ ID NO: 883786
ucuccaggaagguuuccgg

SEQ ID NO: 883788 - RNA, 19 nt, Artificial Sequence
  Description of Artificial Sequence: Synthetic oligonucleotide
  Sense strand starting at position 1114 of SEQ ID NO: 588706
cggaaaccuuccuggagau

SEQ ID NO: 883789 - RNA, 19 nt, Artificial Sequence
  Description of Artificial Sequence: Synthetic oligonucleotide
  Antisense strand to SEQ ID NO: 883788
aucuccaggaagguuuccg

SEQ ID NO: 883790 - RNA, 19 nt, Artificial Sequence
  Description of Artificial Sequence: Synthetic oligonucleotide
  Sense strand starting at position 1536 of SEQ ID NO: 588706
gcuaaugcugccuguacau

SEQ ID NO: 883791 - RNA, 19 nt, Artificial Sequence
  Description of Artificial Sequence: Synthetic oligonucleotide
  Antisense strand to SEQ ID NO: 883790
auguacaggcagcauuagc

SEQ ID NO: 883792 - RNA, 19 nt, Artificial Sequence
  Description of Artificial Sequence: Synthetic oligonucleotide
  Sense strand starting at position 1942 of SEQ ID NO: 588706
gagggagacucccuuacuu

SEQ ID NO: 883793 - RNA, 19 nt, Artificial Sequence
  Description of Artificial Sequence: Synthetic oligonucleotide
  Antisense strand to SEQ ID NO: 883792
aaguaagggagucucccuc

SEQ ID NO: 883794 - RNA, 19 nt, Artificial Sequence
  Description of Artificial Sequence: Synthetic oligonucleotide
  Sense strand starting at position 2064 of SEQ ID NO: 588706
cagagaugcgugcgccaga

SEQ ID NO: 883795 - RNA, 19 nt, Artificial Sequence
  Description of Artificial Sequence: Synthetic oligonucleotide
  Antisense strand to SEQ ID NO: 883794
ucuggcgcacgcaucucug

SEQ ID NO: 883796 - RNA, 19 nt, Artificial Sequence
  Description of Artificial Sequence: Synthetic oligonucleotide
  Sense strand starting at position 2160 of SEQ ID NO: 588706
ccaguuugaugggauauuu

SEQ ID NO: 883797 - RNA, 19 nt, Artificial Sequence
  Description of Artificial Sequence: Synthetic oligonucleotide
  Antisense strand to SEQ ID NO: 883796
aaauaucccaucaaacugg

SEQ ID NO: 883798 - RNA, 19 nt, Artificial Sequence
  Description of Artificial Sequence: Synthetic oligonucleotide
  Sense strand starting at position 2169 of SEQ ID NO: 588706
ugggauauuuaguaauuga

SEQ ID NO: 883799 - RNA, 19 nt, Artificial Sequence
  Description of Artificial Sequence: Synthetic oligonucleotide
  Antisense strand to SEQ ID NO: 883798
ucaauuacuaaauauccca

SEQ ID NO: 883800 - RNA, 19 nt, Artificial Sequence
  Description of Artificial Sequence: Synthetic oligonucleotide
  Sense strand starting at position 2264 of SEQ ID NO: 588706
ggcugcuggagucaaacuu

SEQ ID NO: 883801 - RNA, 19 nt, Artificial Sequence
  Description of Artificial Sequence: Synthetic oligonucleotide
  Antisense strand to SEQ ID NO: 883800
aaguuugacuccagcagcc

SEQ ID NO: 883802 - RNA, 19 nt, Artificial Sequence
  Description of Artificial Sequence: Synthetic oligonucleotide
  Sense strand starting at position 2273 of SEQ ID NO: 588706
agucaaacuugacuugaau

SEQ ID NO: 883803 - RNA, 19 nt, Artificial Sequence
  Description of Artificial Sequence: Synthetic oligonucleotide
  Antisense strand to SEQ ID NO: 883802
auucaagucaaguuugacu

SEQ ID NO: 883804 - RNA, 19 nt, Artificial Sequence
  Description of Artificial Sequence: Synthetic oligonucleotide
  Sense strand starting at position 2293 of SEQ ID NO: 588706
cuagcuuggccgcacauau

SEQ ID NO: 883805 - RNA, 19 nt, Artificial Sequence
  Description of Artificial Sequence: Synthetic oligonucleotide
  Antisense strand to SEQ ID NO: 883804
auaugugcggccaagcuag

SEQ ID NO: 883806 - RNA, 19 nt, Artificial Sequence
  Description of Artificial Sequence: Synthetic oligonucleotide
  Sense strand starting at position 2302 of SEQ ID NO: 588706
ccgcacauauugucaucau

SEQ ID NO: 883807 - RNA, 19 nt, Artificial Sequence
  Description of Artificial Sequence: Synthetic oligonucleotide
  Antisense strand to SEQ ID NO: 883806
augaugacaauaugugcgg

SEQ ID NO: 883808 - RNA, 19 nt, Artificial Sequence
  Description of Artificial Sequence: Synthetic oligonucleotide
  Sense strand starting at position 2323 of SEQ ID NO: 588706
ggcauuaccucaucuguaa

SEQ ID NO: 883809 - RNA, 19 nt, Artificial Sequence
  Description of Artificial Sequence: Synthetic oligonucleotide
  Antisense strand to SEQ ID NO: 883808
uuacagaugagguaaugcc

SEQ ID NO: 883810 - RNA, 19 nt, Artificial Sequence
  Description of Artificial Sequence: Synthetic oligonucleotide
  Sense strand starting at position 2420 of SEQ ID NO: 588706
guaacuaaaucuuacgacu

SEQ ID NO: 883811 - RNA, 19 nt, Artificial Sequence
  Description of Artificial Sequence: Synthetic oligonucleotide
  Antisense strand to SEQ ID NO: 883810
agucguaagauuuaguuac

SEQ ID NO: 883812 - RNA, 19 nt, Artificial Sequence
  Description of Artificial Sequence: Synthetic oligonucleotide
  Sense strand starting at position 2450 of SEQ ID NO: 588706
caaauaauccuucggagug

SEQ ID NO: 883813 - RNA, 19 nt, Artificial Sequence
  Description of Artificial Sequence: Synthetic oligonucleotide
  Antisense strand to SEQ ID NO: 883812
cacuccgaaggauuauuug

SEQ ID NO: 883814 - RNA, 19 nt, Artificial Sequence
  Description of Artificial Sequence: Synthetic oligonucleotide
  Sense strand starting at position 2831 of SEQ ID NO: 588706
uggagaaucaguugaaguc

SEQ ID NO: 883815 - RNA, 19 nt, Artificial Sequence
  Description of Artificial Sequence: Synthetic oligonucleotide
  Antisense strand to SEQ ID NO: 883814
gacuucaacugauucucca

SEQ ID NO: 883816 - RNA, 19 nt, Artificial Sequence
  Description of Artificial Sequence: Synthetic oligonucleotide
  Sense strand starting at position 3432 of SEQ ID NO: 588706
ucugaaauucuacacguau

SEQ ID NO: 883817 - RNA, 19 nt, Artificial Sequence
  Description of Artificial Sequence: Synthetic oligonucleotide
  Antisense strand to SEQ ID NO: 883816
auacguguagaauuucaga

SEQ ID NO: 883818 - RNA, 19 nt, Artificial Sequence
  Description of Artificial Sequence: Synthetic oligonucleotide
  Sense strand starting at position 3443 of SEQ ID NO: 588706
acacguauuuaugguuuau

SEQ ID NO: 883819 - RNA, 19 nt, Artificial Sequence
  Description of Artificial Sequence: Synthetic oligonucleotide
  Antisense strand to SEQ ID NO: 883818
auaaaccauaaauacgugu

SEQ ID NO: 883820 - RNA, 19 nt, Artificial Sequence
  Description of Artificial Sequence: Synthetic oligonucleotide
  Sense strand starting at position 3482 of SEQ ID NO: 588706
gcucauugaggucagggaa

SEQ ID NO: 883821 - RNA, 19 nt, Artificial Sequence
  Description of Artificial Sequence: Synthetic oligonucleotide
  Antisense strand to SEQ ID NO: 883820
uucccugaccucaaugagc

SEQ ID NO: 883822 - RNA, 19 nt, Artificial Sequence
  Description of Artificial Sequence: Synthetic oligonucleotide
  Sense strand starting at position 3597 of SEQ ID NO: 588706
uugaguuauucuuccaccu

SEQ ID NO: 883823 - RNA, 19 nt, Artificial Sequence
  Description of Artificial Sequence: Synthetic oligonucleotide
  Antisense strand to SEQ ID NO: 883822
agguggaagaauaacucaa

SEQ ID NO: 883824 - RNA, 19 nt, Artificial Sequence
  Description of Artificial Sequence: Synthetic oligonucleotide
  Sense strand starting at position 3700 of SEQ ID NO: 588706
uccugugucucccuacuau

SEQ ID NO: 883825 - RNA, 19 nt, Artificial Sequence
  Description of Artificial Sequence: Synthetic oligonucleotide
  Antisense strand to SEQ ID NO: 883824
auaguagggagacacagga

SEQ ID NO: 883826 - RNA, 19 nt, Artificial Sequence
  Description of Artificial Sequence: Synthetic oligonucleotide
  Sense strand starting at position 3736 of SEQ ID NO: 588706
gcaagacagcucuaacuaa

SEQ ID NO: 883827 - RNA, 19 nt, Artificial Sequence
  Description of Artificial Sequence: Synthetic oligonucleotide
  Antisense strand to SEQ ID NO: 883826
uuaguuagagcugucuugc

SEQ ID NO: 883828 - RNA, 19 nt, Artificial Sequence
  Description of Artificial Sequence: Synthetic oligonucleotide
  Sense strand starting at position 3756 of SEQ ID NO: 588706
acauuaaugugauuacugu

SEQ ID NO: 883829 - RNA, 19 nt, Artificial Sequence
  Description of Artificial Sequence: Synthetic oligonucleotide
  Antisense strand to SEQ ID NO: 883828
acaguaaucacauuaaugu

SEQ ID NO: 883830 - RNA, 19 nt, Artificial Sequence
  Description of Artificial Sequence: Synthetic oligonucleotide
  Sense strand starting at position 6 of SEQ ID NO: 588707
gguaucucuacugaguugu

SEQ ID NO: 883831 - RNA, 19 nt, Artificial Sequence
  Description of Artificial Sequence: Synthetic oligonucleotide
  Antisense strand to SEQ ID NO: 883830
acaacucaguagagauacc

SEQ ID NO: 883832 - RNA, 19 nt, Artificial Sequence
  Description of Artificial Sequence: Synthetic oligonucleotide
  Sense strand starting at position 47 of SEQ ID NO: 588707
cuucccagucagugaauga

SEQ ID NO: 883833 - RNA, 19 nt, Artificial Sequence
  Description of Artificial Sequence: Synthetic oligonucleotide
  Antisense strand to SEQ ID NO: 883832
ucauucacugacugggaag

SEQ ID NO: 883834 - RNA, 19 nt, Artificial Sequence
  Description of Artificial Sequence: Synthetic oligonucleotide
  Sense strand starting at position 71 of SEQ ID NO: 588707
gccuguauuucucugcuuu

SEQ ID NO: 883835 - RNA, 19 nt, Artificial Sequence
  Description of Artificial Sequence: Synthetic oligonucleotide
  Antisense strand to SEQ ID NO: 883834
aaagcagagaaauacaggc

SEQ ID NO: 883836 - RNA, 19 nt, Artificial Sequence
  Description of Artificial Sequence: Synthetic oligonucleotide
  Sense strand starting at position 405 of SEQ ID NO: 588707
gaagaaauuugccaaggua

SEQ ID NO: 883837 - RNA, 19 nt, Artificial Sequence
  Description of Artificial Sequence: Synthetic oligonucleotide
  Antisense strand to SEQ ID NO: 883836
uaccuuggcaaauuucuuc

SEQ ID NO: 883838 - RNA, 19 nt, Artificial Sequence
  Description of Artificial Sequence: Synthetic oligonucleotide
  Sense strand starting at position 460 of SEQ ID NO: 588707
uggugagcugcuuaaugag

SEQ ID NO: 883839 - RNA, 19 nt, Artificial Sequence
  Description of Artificial Sequence: Synthetic oligonucleotide
  Antisense strand to SEQ ID NO: 883838
cucauuaagcagcucacca

SEQ ID NO: 883840 - RNA, 19 nt, Artificial Sequence
  Description of Artificial Sequence: Synthetic oligonucleotide
  Sense strand starting at position 469 of SEQ ID NO: 588707
gcuuaaugagauugucuuc

SEQ ID NO: 883841 - RNA, 19 nt, Artificial Sequence
  Description of Artificial Sequence: Synthetic oligonucleotide
  Antisense strand to SEQ ID NO: 883840
gaagacaaucucauuaagc

SEQ ID NO: 883842 - RNA, 19 nt, Artificial Sequence
  Description of Artificial Sequence: Synthetic oligonucleotide
  Sense strand starting at position 474 of SEQ ID NO: 588707
augagauugucuuccacua

SEQ ID NO: 883843 - RNA, 19 nt, Artificial Sequence
  Description of Artificial Sequence: Synthetic oligonucleotide
  Antisense strand to SEQ ID NO: 883842
uaguggaagacaaucucau

SEQ ID NO: 883844 - RNA, 19 nt, Artificial Sequence
  Description of Artificial Sequence: Synthetic oligonucleotide
  Sense strand starting at position 476 of SEQ ID NO: 588707
gagauugucuuccacuaug

SEQ ID NO: 883845 - RNA, 19 nt, Artificial Sequence
  Description of Artificial Sequence: Synthetic oligonucleotide
  Antisense strand to SEQ ID NO: 883844
cauaguggaagacaaucuc

SEQ ID NO: 883846 - RNA, 19 nt, Artificial Sequence
  Description of Artificial Sequence: Synthetic oligonucleotide
  Sense strand starting at position 585 of SEQ ID NO: 588707
gggucaaccugagaucggu

SEQ ID NO: 883847 - RNA, 19 nt, Artificial Sequence
  Description of Artificial Sequence: Synthetic oligonucleotide
  Antisense strand to SEQ ID NO: 883846
accgaucucagguugaccc

SEQ ID NO: 883848 - RNA, 19 nt, Artificial Sequence
  Description of Artificial Sequence: Synthetic oligonucleotide
  Sense strand starting at position 622 of SEQ ID NO: 588707
gcugaaucuccaggauccu

SEQ ID NO: 883849 - RNA, 19 nt, Artificial Sequence
  Description of Artificial Sequence: Synthetic oligonucleotide
  Antisense strand to SEQ ID NO: 883848
aggauccuggagauucagc

SEQ ID NO: 883850 - RNA, 19 nt, Artificial Sequence
  Description of Artificial Sequence: Synthetic oligonucleotide
  Sense strand starting at position 631 of SEQ ID NO: 588707
ccaggauccucugcaagga

SEQ ID NO: 883851 - RNA, 19 nt, Artificial Sequence
  Description of Artificial Sequence: Synthetic oligonucleotide
  Antisense strand to SEQ ID NO: 883850
uccuugcagaggauccugg

SEQ ID NO: 883852 - RNA, 19 nt, Artificial Sequence
  Description of Artificial Sequence: Synthetic oligonucleotide
  Sense strand starting at position 649 of SEQ ID NO: 588707
agcuuaguuugcccaggaa

SEQ ID NO: 883853 - RNA, 19 nt, Artificial Sequence
  Description of Artificial Sequence: Synthetic oligonucleotide
  Antisense strand to SEQ ID NO: 883852
uuccugggcaaacuaagcu

SEQ ID NO: 883854 - RNA, 19 nt, Artificial Sequence
  Description of Artificial Sequence: Synthetic oligonucleotide
  Sense strand starting at position 687 of SEQ ID NO: 588707
ucucuaggcacgugugaau

SEQ ID NO: 883855 - RNA, 19 nt, Artificial Sequence
  Description of Artificial Sequence: Synthetic oligonucleotide
  Antisense strand to SEQ ID NO: 883854
auucacacgugccuagaga

SEQ ID NO: 883856 - RNA, 19 nt, Artificial Sequence
  Description of Artificial Sequence: Synthetic oligonucleotide
  Sense strand starting at position 850 of SEQ ID NO: 588707
uaugguuggugagcuccaa

SEQ ID NO: 883857 - RNA, 19 nt, Artificial Sequence
  Description of Artificial Sequence: Synthetic oligonucleotide
  Antisense strand to SEQ ID NO: 883856
uuggagcucaccaaccaua

SEQ ID NO: 883858 - RNA, 19 nt, Artificial Sequence
  Description of Artificial Sequence: Synthetic oligonucleotide
  Sense strand starting at position 898 of SEQ ID NO: 588707
gggcaaugccagcguagaa

SEQ ID NO: 883859 - RNA, 19 nt, Artificial Sequence
  Description of Artificial Sequence: Synthetic oligonucleotide
  Antisense strand to SEQ ID NO: 883858
uucuacgcuggcauugccc

SEQ ID NO: 883860 - RNA, 19 nt, Artificial Sequence
  Description of Artificial Sequence: Synthetic oligonucleotide
  Sense strand starting at position 1014 of SEQ ID NO: 588707
uggauauucuggucccuga

SEQ ID NO: 883861 - RNA, 19 nt, Artificial Sequence
  Description of Artificial Sequence: Synthetic oligonucleotide
  Antisense strand to SEQ ID NO: 883860
ucagggaccagaauaucca

SEQ ID NO: 883862 - RNA, 19 nt, Artificial Sequence
  Description of Artificial Sequence: Synthetic oligonucleotide
  Sense strand starting at position 1017 of SEQ ID NO: 588707
auauucuggucccugaaua

SEQ ID NO: 883863 - RNA, 19 nt, Artificial Sequence
  Description of Artificial Sequence: Synthetic oligonucleotide
  Antisense strand to SEQ ID NO: 883862
uauucagggaccagaauau

SEQ ID NO: 883864 - RNA, 19 nt, Artificial Sequence
  Description of Artificial Sequence: Synthetic oligonucleotide
  Sense strand starting at position 1061 of SEQ ID NO: 588707
ccggaaaccuuccuggaga

SEQ ID NO: 883865 - RNA, 19 nt, Artificial Sequence
  Description of Artificial Sequence: Synthetic oligonucleotide
  Antisense strand to SEQ ID NO: 883864
ucuccaggaagguuuccgg

SEQ ID NO: 883866 - RNA, 19 nt, Artificial Sequence
  Description of Artificial Sequence: Synthetic oligonucleotide
  Sense strand starting at position 1062 of SEQ ID NO: 588707
cggaaaccuuccuggagau

SEQ ID NO: 883867 - RNA, 19 nt, Artificial Sequence
  Description of Artificial Sequence: Synthetic oligonucleotide
  Antisense strand to SEQ ID NO: 883866
aucuccaggaagguuuccg

SEQ ID NO: 883868 - RNA, 19 nt, Artificial Sequence
  Description of Artificial Sequence: Synthetic oligonucleotide
  Sense strand starting at position 1484 of SEQ ID NO: 588707
gcuaaugcugccuguacau

SEQ ID NO: 883869 - RNA, 19 nt, Artificial Sequence
  Description of Artificial Sequence: Synthetic oligonucleotide
  Antisense strand to SEQ ID NO: 883868
auguacaggcagcauuagc

SEQ ID NO: 883870 - RNA, 19 nt, Artificial Sequence
  Description of Artificial Sequence: Synthetic oligonucleotide
  Sense strand starting at position 1890 of SEQ ID NO: 588707
gagggagacucccuuacuu

SEQ ID NO: 883871 - RNA, 19 nt, Artificial Sequence
  Description of Artificial Sequence: Synthetic oligonucleotide
  Antisense strand to SEQ ID NO: 883870
aaguaagggagucucccuc

SEQ ID NO: 883872 - RNA, 19 nt, Artificial Sequence
  Description of Artificial Sequence: Synthetic oligonucleotide
  Sense strand starting at position 2012 of SEQ ID NO: 588707
cagagaugcgugcgccaga

SEQ ID NO: 883873 - RNA, 19 nt, Artificial Sequence
  Description of Artificial Sequence: Synthetic oligonucleotide
  Antisense strand to SEQ ID NO: 883872
ucuggcgcacgcaucucug

SEQ ID NO: 883874 - RNA, 19 nt, Artificial Sequence
  Description of Artificial Sequence: Synthetic oligonucleotide
  Sense strand starting at position 2108 of SEQ ID NO: 588707
ccaguuugaugggauauuu

SEQ ID NO: 883875 - RNA, 19 nt, Artificial Sequence
  Description of Artificial Sequence: Synthetic oligonucleotide
  Antisense strand to SEQ ID NO: 883874
aaauaucccaucaaacugg

SEQ ID NO: 883876 - RNA, 19 nt, Artificial Sequence
  Description of Artificial Sequence: Synthetic oligonucleotide
  Sense strand starting at position 2117 of SEQ ID NO: 588707
ugggauauuuaguaauuga

SEQ ID NO: 883877 - RNA, 19 nt, Artificial Sequence
  Description of Artificial Sequence: Synthetic oligonucleotide
  Antisense strand to SEQ ID NO: 883876
ucaauuacuaaauauccca

SEQ ID NO: 883878 - RNA, 19 nt, Artificial Sequence
  Description of Artificial Sequence: Synthetic oligonucleotide
  Sense strand starting at position 2212 of SEQ ID NO: 588707
ggcugcuggagucaaacuu

SEQ ID NO: 883879 - RNA, 19 nt, Artificial Sequence
  Description of Artificial Sequence: Synthetic oligonucleotide
  Antisense strand to SEQ ID NO: 883878
aaguuugacuccagcagcc

SEQ ID NO: 883880 - RNA, 19 nt, Artificial Sequence
  Description of Artificial Sequence: Synthetic oligonucleotide
  Sense strand starting at position 2221 of SEQ ID NO: 588707
agucaaacuugacuugaau

SEQ ID NO: 883881 - RNA, 19 nt, Artificial Sequence
  Description of Artificial Sequence: Synthetic oligonucleotide
  Antisense strand to SEQ ID NO: 883880
auucaagucaaguuugacu

SEQ ID NO: 883882 - RNA, 19 nt, Artificial Sequence
  Description of Artificial Sequence: Synthetic oligonucleotide
  Sense strand starting at position 2241 of SEQ ID NO: 588707
cuagcuuggccgcacauau

SEQ ID NO: 883883 - RNA, 19 nt, Artificial Sequence
  Description of Artificial Sequence: Synthetic oligonucleotide
  Antisense strand to SEQ ID NO: 883882
auaugugcggccaagcuag

SEQ ID NO: 883884 - RNA, 19 nt, Artificial Sequence
  Description of Artificial Sequence: Synthetic oligonucleotide
  Sense strand starting at position 2250 of SEQ ID NO: 588707
ccgcacauauugucaucau

SEQ ID NO: 883885 - RNA, 19 nt, Artificial Sequence
  Description of Artificial Sequence: Synthetic oligonucleotide
  Antisense strand to SEQ ID NO: 883884
augaugacaauaugugcgg

SEQ ID NO: 883886 - RNA, 19 nt, Artificial Sequence
  Description of Artificial Sequence: Synthetic oligonucleotide
  Sense strand starting at position 2271 of SEQ ID NO: 588707
ggcauuaccucaucuguaa

SEQ ID NO: 883887 - RNA, 19 nt, Artificial Sequence
  Description of Artificial Sequence: Synthetic oligonucleotide
  Antisense strand to SEQ ID NO: 883886
uuacagaugagguaaugcc

SEQ ID NO: 883888 - RNA, 19 nt, Artificial Sequence
  Description of Artificial Sequence: Synthetic oligonucleotide
  Sense strand starting at position 2368 of SEQ ID NO: 588707
guaacuaaaucuuacgacu

SEQ ID NO: 883889 - RNA, 19 nt, Artificial Sequence
  Description of Artificial Sequence: Synthetic oligonucleotide
  Antisense strand to SEQ ID NO: 883888
agucguaagauuuaguuac

SEQ ID NO: 883890 - RNA, 19 nt, Artificial Sequence
  Description of Artificial Sequence: Synthetic oligonucleotide
  Sense strand starting at position 2398 of SEQ ID NO: 588707
caaauaauccuucggagug

SEQ ID NO: 883891 - RNA, 19 nt, Artificial Sequence
  Description of Artificial Sequence: Synthetic oligonucleotide
  Antisense strand to SEQ ID NO: 883890
cacuccgaaggauuauuug

SEQ ID NO: 883892 - RNA, 19 nt, Artificial Sequence
  Description of Artificial Sequence: Synthetic oligonucleotide
  Sense strand starting at position 2779 of SEQ ID NO: 588707
uggagaaucaguugaaguc

SEQ ID NO: 883893 - RNA, 19 nt, Artificial Sequence
  Description of Artificial Sequence: Synthetic oligonucleotide
  Antisense strand to SEQ ID NO: 883892
gacuucaacugauucucca

SEQ ID NO: 883894 - RNA, 19 nt, Artificial Sequence
  Description of Artificial Sequence: Synthetic oligonucleotide
  Sense strand starting at position 3033 of SEQ ID NO: 588707
gguuucucaucucagagua

SEQ ID NO: 883895 - RNA, 19 nt, Artificial Sequence
  Description of Artificial Sequence: Synthetic oligonucleotide
  Antisense strand to SEQ ID NO: 883894
uacucugagaugagaaacc

SEQ ID NO: 883896 - RNA, 19 nt, Artificial Sequence
  Description of Artificial Sequence: Synthetic oligonucleotide
  Sense strand starting at position 3380 of SEQ ID NO: 588707
ucugaaauucuacacguau

SEQ ID NO: 883897 - RNA, 19 nt, Artificial Sequence
  Description of Artificial Sequence: Synthetic oligonucleotide
  Antisense strand to SEQ ID NO: 883896
auacguguagaauuucaga

SEQ ID NO: 883898 - RNA, 19 nt, Artificial Sequence
  Description of Artificial Sequence: Synthetic oligonucleotide
  Sense strand starting at position 3391 of SEQ ID NO: 588707
acacguauuuaugguuuau

SEQ ID NO: 883899 - RNA, 19 nt, Artificial Sequence
  Description of Artificial Sequence: Synthetic oligonucleotide
  Antisense strand to SEQ ID NO: 883898
auaaaccauaaauacgugu

SEQ ID NO: 883900 - RNA, 19 nt, Artificial Sequence
  Description of Artificial Sequence: Synthetic oligonucleotide
  Sense strand starting at position 3430 of SEQ ID NO: 588707
gcucauugaggucagggaa

SEQ ID NO: 883901 - RNA, 19 nt, Artificial Sequence
  Description of Artificial Sequence: Synthetic oligonucleotide
  Antisense strand to SEQ ID NO: 883900
uucccugaccucaaugagc

SEQ ID NO: 883902 - RNA, 19 nt, Artificial Sequence
  Description of Artificial Sequence: Synthetic oligonucleotide
  Sense strand starting at position 3545 of SEQ ID NO: 588707
uugaguuauucuuccaccu

SEQ ID NO: 883903 - RNA, 19 nt, Artificial Sequence
  Description of Artificial Sequence: Synthetic oligonucleotide
  Antisense strand to SEQ ID NO: 883902
agguggaagaauaacucaa

SEQ ID NO: 883904 - RNA, 19 nt, Artificial Sequence
  Description of Artificial Sequence: Synthetic oligonucleotide
  Sense strand starting at position 3648 of SEQ ID NO: 588707
uccugugucucccuacuau

SEQ ID NO: 883905 - RNA, 19 nt, Artificial Sequence
  Description of Artificial Sequence: Synthetic oligonucleotide
  Antisense strand to SEQ ID NO: 883904
auaguagggagacacagga

SEQ ID NO: 883906 - RNA, 19 nt, Artificial Sequence
  Description of Artificial Sequence: Synthetic oligonucleotide
  Sense strand starting at position 3684 of SEQ ID NO: 588707
gcaagacagcucuaacuaa

SEQ ID NO: 883907 - RNA, 19 nt, Artificial Sequence
  Description of Artificial Sequence: Synthetic oligonucleotide
  Antisense strand to SEQ ID NO: 883906
uuaguuagagcugucuugc

SEQ ID NO: 883908 - RNA, 19 nt, Artificial Sequence
  Description of Artificial Sequence: Synthetic oligonucleotide
  Sense strand starting at position 3704 of SEQ ID NO: 588707
acauuaaugugauuacugu

SEQ ID NO: 883909 - RNA, 19 nt, Artificial Sequence
  Description of Artificial Sequence: Synthetic oligonucleotide
  Antisense strand to SEQ ID NO: 883908
acaguaaucacauuaaugu

SEQ ID NO: 883910 - RNA, 19 nt, Artificial Sequence
  Description of Artificial Sequence: Synthetic oligonucleotide
  Sense strand starting at position 44 of SEQ ID NO: 588708
cucagaaauguuuggaauu

SEQ ID NO: 883911 - RNA, 19 nt, Artificial Sequence
  Description of Artificial Sequence: Synthetic oligonucleotide
  Antisense strand to SEQ ID NO: 883910
aauuccaaacauuucugag

SEQ ID NO: 883912 - RNA, 19 nt, Artificial Sequence
  Description of Artificial Sequence: Synthetic oligonucleotide
  Sense strand starting at position 137 of SEQ ID NO: 588708
cuagucuuaacguggacaa

SEQ ID NO: 883913 - RNA, 19 nt, Artificial Sequence
  Description of Artificial Sequence: Synthetic oligonucleotide
  Antisense strand to SEQ ID NO: 883912
uuguccacguuaagacuag

SEQ ID NO: 883914 - RNA, 19 nt, Artificial Sequence
  Description of Artificial Sequence: Synthetic oligonucleotide
  Sense strand starting at position 138 of SEQ ID NO: 588708
uagucuuaacguggacaaa

SEQ ID NO: 883915 - RNA, 19 nt, Artificial Sequence
  Description of Artificial Sequence: Synthetic oligonucleotide
  Antisense strand to SEQ ID NO: 883914
uuuguccacguuaagacua

SEQ ID NO: 883916 - RNA, 19 nt, Artificial Sequence
  Description of Artificial Sequence: Synthetic oligonucleotide
  Sense strand starting at position 165 of SEQ ID NO: 588708
gugguucuaucauuuagug

SEQ ID NO: 883917 - RNA, 19 nt, Artificial Sequence
  Description of Artificial Sequence: Synthetic oligonucleotide
  Antisense strand to SEQ ID NO: 883916
cacuaaaugauagaaccac

SEQ ID NO: 883918 - RNA, 19 nt, Artificial Sequence
  Description of Artificial Sequence: Synthetic oligonucleotide
  Sense strand starting at position 246 of SEQ ID NO: 588708
cucaucaguccucauaagu

SEQ ID NO: 883919 - RNA, 19 nt, Artificial Sequence
  Description of Artificial Sequence: Synthetic oligonucleotide
  Antisense strand to SEQ ID NO: 883918
acuuaugaggacugaugag

SEQ ID NO: 883920 - RNA, 19 nt, Artificial Sequence
  Description of Artificial Sequence: Synthetic oligonucleotide
  Sense strand starting at position 391 of SEQ ID NO: 588708
cugggaaugcucuagcaaa

SEQ ID NO: 883921 - RNA, 19 nt, Artificial Sequence
  Description of Artificial Sequence: Synthetic oligonucleotide
  Antisense strand to SEQ ID NO: 883920
uuugcuagagcauucccag

SEQ ID NO: 883922 - RNA, 19 nt, Artificial Sequence
  Description of Artificial Sequence: Synthetic oligonucleotide
  Sense strand starting at position 558 of SEQ ID NO: 588708
gggagaagucucuggcuga

SEQ ID NO: 883923 - RNA, 19 nt, Artificial Sequence
  Description of Artificial Sequence: Synthetic oligonucleotide
  Antisense strand to SEQ ID NO: 883922
ucagccagagacuucuccc

SEQ ID NO: 883924 - RNA, 19 nt, Artificial Sequence
  Description of Artificial Sequence: Synthetic oligonucleotide
  Sense strand starting at position 561 of SEQ ID NO: 588708
agaagucucuggcugaaug

SEQ ID NO: 883925 - RNA, 19 nt, Artificial Sequence
  Description of Artificial Sequence: Synthetic oligonucleotide
  Antisense strand to SEQ ID NO: 883924
cauucagccagagacuucu

SEQ ID NO: 883926 - RNA, 19 nt, Artificial Sequence
  Description of Artificial Sequence: Synthetic oligonucleotide
  Sense strand starting at position 647 of SEQ ID NO: 588708
ucuuccuugcacgagauua

SEQ ID NO: 883927 - RNA, 19 nt, Artificial Sequence
  Description of Artificial Sequence: Synthetic oligonucleotide
  Antisense strand to SEQ ID NO: 883926
uaaucucgugcaaggaaga

SEQ ID NO: 883928 - RNA, 19 nt, Artificial Sequence
  Description of Artificial Sequence: Synthetic oligonucleotide
  Sense strand starting at position 649 of SEQ ID NO: 588708
uuccuugcacgagauuaac

SEQ ID NO: 883929 - RNA, 19 nt, Artificial Sequence
  Description of Artificial Sequence: Synthetic oligonucleotide
  Antisense strand to SEQ ID NO: 883928
guuaaucucgugcaaggaa

SEQ ID NO: 883930 - RNA, 19 nt, Artificial Sequence
  Description of Artificial Sequence: Synthetic oligonucleotide
  Sense strand starting at position 725 of SEQ ID NO: 588708
ugcaucugagaaugucaca

SEQ ID NO: 883931 - RNA, 19 nt, Artificial Sequence
  Description of Artificial Sequence: Synthetic oligonucleotide
  Antisense strand to SEQ ID NO: 883930
ugugacauucucagaugca

SEQ ID NO: 883932 - RNA, 19 nt, Artificial Sequence
  Description of Artificial Sequence: Synthetic oligonucleotide
  Sense strand starting at position 738 of SEQ ID NO: 588708
gucacagagagguagugau

SEQ ID NO: 883933 - RNA, 19 nt, Artificial Sequence
  Description of Artificial Sequence: Synthetic oligonucleotide
  Antisense strand to SEQ ID NO: 883932
aucacuaccucucugugac

SEQ ID NO: 883934 - RNA, 19 nt, Artificial Sequence
  Description of Artificial Sequence: Synthetic oligonucleotide
  Sense strand starting at position 753 of SEQ ID NO: 588708
ugaugauaguggguguuau

SEQ ID NO: 883935 - RNA, 19 nt, Artificial Sequence
  Description of Artificial Sequence: Synthetic oligonucleotide
  Antisense strand to SEQ ID NO: 883934
auaacacccacuaucauca

SEQ ID NO: 883936 - RNA, 19 nt, Artificial Sequence
  Description of Artificial Sequence: Synthetic oligonucleotide
  Sense strand starting at position 754 of SEQ ID NO: 588708
gaugauaguggguguuauu

SEQ ID NO: 883937 - RNA, 19 nt, Artificial Sequence
  Description of Artificial Sequence: Synthetic oligonucleotide
  Antisense strand to SEQ ID NO: 883936
aauaacacccacuaucauc

SEQ ID NO: 883938 - RNA, 19 nt, Artificial Sequence
  Description of Artificial Sequence: Synthetic oligonucleotide
  Sense strand starting at position 803 of SEQ ID NO: 588708
gcaucagaguaacuaggau

SEQ ID NO: 883939 - RNA, 19 nt, Artificial Sequence
  Description of Artificial Sequence: Synthetic oligonucleotide
  Antisense strand to SEQ ID NO: 883938
auccuaguuacucugaugc

SEQ ID NO: 883940 - RNA, 19 nt, Artificial Sequence
  Description of Artificial Sequence: Synthetic oligonucleotide
  Sense strand starting at position 878 of SEQ ID NO: 588708
ccaaauaacuucuccggaa

SEQ ID NO: 883941 - RNA, 19 nt, Artificial Sequence
  Description of Artificial Sequence: Synthetic oligonucleotide
  Antisense strand to SEQ ID NO: 883940
uuccggagaaguuauuugg

SEQ ID NO: 883942 - RNA, 19 nt, Artificial Sequence
  Description of Artificial Sequence: Synthetic oligonucleotide
  Sense strand starting at position 892 of SEQ ID NO: 588708
cggaauagguuucuacuca

SEQ ID NO: 883943 - RNA, 19 nt, Artificial Sequence
  Description of Artificial Sequence: Synthetic oligonucleotide
  Antisense strand to SEQ ID NO: 883942
ugaguagaaaccuauuccg

SEQ ID NO: 883944 - RNA, 19 nt, Artificial Sequence
  Description of Artificial Sequence: Synthetic oligonucleotide
  Sense strand starting at position 896 of SEQ ID NO: 588708
auagguuucuacucagcca

SEQ ID NO: 883945 - RNA, 19 nt, Artificial Sequence
  Description of Artificial Sequence: Synthetic oligonucleotide
  Antisense strand to SEQ ID NO: 883944
uggcugaguagaaaccuau

SEQ ID NO: 883946 - RNA, 19 nt, Artificial Sequence
  Description of Artificial Sequence: Synthetic oligonucleotide
  Sense strand starting at position 1102 of SEQ ID NO: 588708
gauguugaagcgucacguu

SEQ ID NO: 883947 - RNA, 19 nt, Artificial Sequence
  Description of Artificial Sequence: Synthetic oligonucleotide
  Antisense strand to SEQ ID NO: 883946
aacgugacgcuucaacauc

SEQ ID NO: 883948 - RNA, 19 nt, Artificial Sequence
  Description of Artificial Sequence: Synthetic oligonucleotide
  Sense strand starting at position 2477 of SEQ ID NO: 588708
ccguucucagcgucuugaa

SEQ ID NO: 883949 - RNA, 19 nt, Artificial Sequence
  Description of Artificial Sequence: Synthetic oligonucleotide
  Antisense strand to SEQ ID NO: 883948
uucaagacgcugagaacgg

SEQ ID NO: 883950 - RNA, 19 nt, Artificial Sequence
  Description of Artificial Sequence: Synthetic oligonucleotide
  Sense strand starting at position 2688 of SEQ ID NO: 588708
agguguucccagcaaguaa

SEQ ID NO: 883951 - RNA, 19 nt, Artificial Sequence
  Description of Artificial Sequence: Synthetic oligonucleotide
  Antisense strand to SEQ ID NO: 883950
uuacuugcugggaacaccu

SEQ ID NO: 883952 - RNA, 19 nt, Artificial Sequence
  Description of Artificial Sequence: Synthetic oligonucleotide
  Sense strand starting at position 3127 of SEQ ID NO: 588708
ccaguuucuguuugaagga

SEQ ID NO: 883953 - RNA, 19 nt, Artificial Sequence
  Description of Artificial Sequence: Synthetic oligonucleotide
  Antisense strand to SEQ ID NO: 883952
uccuucaaacagaaacugg

SEQ ID NO: 883954 - RNA, 19 nt, Artificial Sequence
  Description of Artificial Sequence: Synthetic oligonucleotide
  Sense strand starting at position 3140 of SEQ ID NO: 588708
gaaggauacucccuuaguu

SEQ ID NO: 883955 - RNA, 19 nt, Artificial Sequence
  Description of Artificial Sequence: Synthetic oligonucleotide
  Antisense strand to SEQ ID NO: 883954
aacuaagggaguauccuuc

SEQ ID NO: 883956 - RNA, 19 nt, Artificial Sequence
  Description of Artificial Sequence: Synthetic oligonucleotide
  Sense strand starting at position 3142 of SEQ ID NO: 588708
aggauacucccuuaguucu

SEQ ID NO: 883957 - RNA, 19 nt, Artificial Sequence
  Description of Artificial Sequence: Synthetic oligonucleotide
  Antisense strand to SEQ ID NO: 883956
agaacuaagggaguauccu

SEQ ID NO: 883958 - RNA, 19 nt, Artificial Sequence
  Description of Artificial Sequence: Synthetic oligonucleotide
  Sense strand starting at position 3152 of SEQ ID NO: 588708
cuuaguucucugcaaauga

SEQ ID NO: 883959 - RNA, 19 nt, Artificial Sequence
  Description of Artificial Sequence: Synthetic oligonucleotide
  Antisense strand to SEQ ID NO: 883958
ucauuugcagagaacuaag

SEQ ID NO: 883960 - RNA, 19 nt, Artificial Sequence
  Description of Artificial Sequence: Synthetic oligonucleotide
  Sense strand starting at position 3228 of SEQ ID NO: 588708
ucugcuaugguuuaauauc

SEQ ID NO: 883961 - RNA, 19 nt, Artificial Sequence
  Description of Artificial Sequence: Synthetic oligonucleotide
  Antisense strand to SEQ ID NO: 883960
gauauuaaaccauagcaga

SEQ ID NO: 883962 - RNA, 19 nt, Artificial Sequence
  Description of Artificial Sequence: Synthetic oligonucleotide
  Sense strand starting at position 3236 of SEQ ID NO: 588708
gguuuaauaucagccuuga

SEQ ID NO: 883963 - RNA, 19 nt, Artificial Sequence
  Description of Artificial Sequence: Synthetic oligonucleotide
  Antisense strand to SEQ ID NO: 883962
ucaaggcugauauuaaacc

SEQ ID NO: 883964 - RNA, 19 nt, Artificial Sequence
  Description of Artificial Sequence: Synthetic oligonucleotide
  Sense strand starting at position 3251 of SEQ ID NO: 588708
uugaaucaagugcaauaau

SEQ ID NO: 883965 - RNA, 19 nt, Artificial Sequence
  Description of Artificial Sequence: Synthetic oligonucleotide
  Antisense strand to SEQ ID NO: 883964
auuauugcacuugauucaa

SEQ ID NO: 883966 - RNA, 19 nt, Artificial Sequence
  Description of Artificial Sequence: Synthetic oligonucleotide
  Sense strand starting at position 3268 of SEQ ID NO: 588708
auuucuugauaacagaagu

SEQ ID NO: 883967 - RNA, 19 nt, Artificial Sequence
  Description of Artificial Sequence: Synthetic oligonucleotide
  Antisense strand to SEQ ID NO: 883966
acuucuguuaucaagaaau

SEQ ID NO: 883968 - RNA, 19 nt, Artificial Sequence
  Description of Artificial Sequence: Synthetic oligonucleotide
  Sense strand starting at position 3304 of SEQ ID NO: 588708
uuuacugagccauaauuga

SEQ ID NO: 883969 - RNA, 19 nt, Artificial Sequence
  Description of Artificial Sequence: Synthetic oligonucleotide
  Antisense strand to SEQ ID NO: 883968
ucaauuauggcucaguaaa

SEQ ID NO: 883970 - RNA, 19 nt, Artificial Sequence
  Description of Artificial Sequence: Synthetic oligonucleotide
  Sense strand starting at position 3387 of SEQ ID NO: 588708
ggccauuacugagagauuu

SEQ ID NO: 883971 - RNA, 19 nt, Artificial Sequence
  Description of Artificial Sequence: Synthetic oligonucleotide
  Antisense strand to SEQ ID NO: 883970
aaaucucucaguaauggcc

SEQ ID NO: 883972 - RNA, 19 nt, Artificial Sequence
  Description of Artificial Sequence: Synthetic oligonucleotide
  Sense strand starting at position 3406 of SEQ ID NO: 588708
aagguaugguuuguuuaga

SEQ ID NO: 883973 - RNA, 19 nt, Artificial Sequence
  Description of Artificial Sequence: Synthetic oligonucleotide
  Antisense strand to SEQ ID NO: 883972
ucuaaacaaaccauaccuu

SEQ ID NO: 883974 - RNA, 19 nt, Artificial Sequence
  Description of Artificial Sequence: Synthetic oligonucleotide
  Sense strand starting at position 3407 of SEQ ID NO: 588708
agguaugguuuguuuagaa

SEQ ID NO: 883975 - RNA, 19 nt, Artificial Sequence
  Description of Artificial Sequence: Synthetic oligonucleotide
  Antisense strand to SEQ ID NO: 883974
uucuaaacaaaccauaccu

SEQ ID NO: 883976 - RNA, 19 nt, Artificial Sequence
  Description of Artificial Sequence: Synthetic oligonucleotide
  Sense strand starting at position 3417 of SEQ ID NO: 588708
uguuuagaacccugugacu

SEQ ID NO: 883977 - RNA, 19 nt, Artificial Sequence
  Description of Artificial Sequence: Synthetic oligonucleotide
  Antisense strand to SEQ ID NO: 883976
agucacaggguucuaaaca

SEQ ID NO: 883978 - RNA, 19 nt, Artificial Sequence
  Description of Artificial Sequence: Synthetic oligonucleotide
  Sense strand starting at position 3419 of SEQ ID NO: 588708
uuuagaacccugugacuug

SEQ ID NO: 883979 - RNA, 19 nt, Artificial Sequence
  Description of Artificial Sequence: Synthetic oligonucleotide
  Antisense strand to SEQ ID NO: 883978
caagucacaggguucuaaa

SEQ ID NO: 883980 - RNA, 19 nt, Artificial Sequence
  Description of Artificial Sequence: Synthetic oligonucleotide
  Sense strand starting at position 3698 of SEQ ID NO: 588708
ugguacgaaucacuguaua

SEQ ID NO: 883981 - RNA, 19 nt, Artificial Sequence
  Description of Artificial Sequence: Synthetic oligonucleotide
  Antisense strand to SEQ ID NO: 883980
uauacagugauucguacca

SEQ ID NO: 883982 - RNA, 19 nt, Artificial Sequence
  Description of Artificial Sequence: Synthetic oligonucleotide
  Sense strand starting at position 3762 of SEQ ID NO: 588708
ugggaaugguaaucccagu

SEQ ID NO: 883983 - RNA, 19 nt, Artificial Sequence
  Description of Artificial Sequence: Synthetic oligonucleotide
  Antisense strand to SEQ ID NO: 883982
acugggauuaccauuccca

SEQ ID NO: 883984 - RNA, 19 nt, Artificial Sequence
  Description of Artificial Sequence: Synthetic oligonucleotide
  Sense strand starting at position 3871 of SEQ ID NO: 588708
caaagucaguuucugguaa

SEQ ID NO: 883985 - RNA, 19 nt, Artificial Sequence
  Description of Artificial Sequence: Synthetic oligonucleotide
  Antisense strand to SEQ ID NO: 883984
uuaccagaaacugacuuug

SEQ ID NO: 883986 - RNA, 19 nt, Artificial Sequence
  Description of Artificial Sequence: Synthetic oligonucleotide
  Sense strand starting at position 3947 of SEQ ID NO: 588708
acguauaaauguccaaaua

SEQ ID NO: 883987 - RNA, 19 nt, Artificial Sequence
  Description of Artificial Sequence: Synthetic oligonucleotide
  Antisense strand to SEQ ID NO: 883986
uauuuggacauuuauacgu

SEQ ID NO: 883988 - RNA, 19 nt, Artificial Sequence
  Description of Artificial Sequence: Synthetic oligonucleotide
  Sense strand starting at position 3948 of SEQ ID NO: 588708
cguauaaauguccaaauac

SEQ ID NO: 883989 - RNA, 19 nt, Artificial Sequence
  Description of Artificial Sequence: Synthetic oligonucleotide
  Antisense strand to SEQ ID NO: 883988
guauuuggacauuuauacg

SEQ ID NO: 883990 - RNA, 19 nt, Artificial Sequence
  Description of Artificial Sequence: Synthetic oligonucleotide
  Sense strand starting at position 671 of SEQ ID NO: 588711
acaagcuacgucuggaaca

SEQ ID NO: 883991 - RNA, 19 nt, Artificial Sequence
  Description of Artificial Sequence: Synthetic oligonucleotide
  Antisense strand to SEQ ID NO: 883990
uguuccagacguagcuugu

SEQ ID NO: 883992 - RNA, 19 nt, Artificial Sequence
  Description of Artificial Sequence: Synthetic oligonucleotide
  Sense strand starting at position 1044 of SEQ ID NO: 588711
ccgcuauguacccaaaggu

SEQ ID NO: 883993 - RNA, 19 nt, Artificial Sequence
  Description of Artificial Sequence: Synthetic oligonucleotide
  Antisense strand to SEQ ID NO: 883992
accuuuggguacauagcgg

SEQ ID NO: 883994 - RNA, 19 nt, Artificial Sequence
  Description of Artificial Sequence: Synthetic oligonucleotide
  Sense strand starting at position 1118 of SEQ ID NO: 588711
uccugugcuccgggaagga

SEQ ID NO: 883995 - RNA, 19 nt, Artificial Sequence
  Description of Artificial Sequence: Synthetic oligonucleotide
  Antisense strand to SEQ ID NO: 883994
uccuucccggagcacagga

SEQ ID NO: 883996 - RNA, 19 nt, Artificial Sequence
  Description of Artificial Sequence: Synthetic oligonucleotide
  Sense strand starting at position 1366 of SEQ ID NO: 588711
gcggacugauuuggagacu

SEQ ID NO: 883997 - RNA, 19 nt, Artificial Sequence
  Description of Artificial Sequence: Synthetic oligonucleotide
  Antisense strand to SEQ ID NO: 883996
agucuccaaaucaguccgc

SEQ ID NO: 883998 - RNA, 19 nt, Artificial Sequence
  Description of Artificial Sequence: Synthetic oligonucleotide
  Sense strand starting at position 2187 of SEQ ID NO: 588711
guugguguaaugugggcua

SEQ ID NO: 883999 - RNA, 19 nt, Artificial Sequence
  Description of Artificial Sequence: Synthetic oligonucleotide
  Antisense strand to SEQ ID NO: 883998
uagcccacauuacaccaac

SEQ ID NO: 884000 - RNA, 19 nt, Artificial Sequence
  Description of Artificial Sequence: Synthetic oligonucleotide
  Sense strand starting at position 2189 of SEQ ID NO: 588711
ugguguaaugugggcuaau

SEQ ID NO: 884001 - RNA, 19 nt, Artificial Sequence
  Description of Artificial Sequence: Synthetic oligonucleotide
  Antisense strand to SEQ ID NO: 884000
auuagcccacauuacacca

SEQ ID NO: 884002 - RNA, 19 nt, Artificial Sequence
  Description of Artificial Sequence: Synthetic oligonucleotide
  Sense strand starting at position 2190 of SEQ ID NO: 588711
gguguaaugugggcuaauc

SEQ ID NO: 884003 - RNA, 19 nt, Artificial Sequence
  Description of Artificial Sequence: Synthetic oligonucleotide
  Antisense strand to SEQ ID NO: 884002
gauuagcccacauuacacc

SEQ ID NO: 884004 - RNA, 19 nt, Artificial Sequence
  Description of Artificial Sequence: Synthetic oligonucleotide
  Sense strand starting at position 2192 of SEQ ID NO: 588711
uguaaugugggcuaaucca

SEQ ID NO: 884005 - RNA, 19 nt, Artificial Sequence
  Description of Artificial Sequence: Synthetic oligonucleotide
  Antisense strand to SEQ ID NO: 884004
uggauuagcccacauuaca

SEQ ID NO: 884006 - RNA, 19 nt, Artificial Sequence
  Description of Artificial Sequence: Synthetic oligonucleotide
  Sense strand starting at position 2231 of SEQ ID NO: 588711
gugguuggcccagacuaga

SEQ ID NO: 884007 - RNA, 19 nt, Artificial Sequence
  Description of Artificial Sequence: Synthetic oligonucleotide
  Antisense strand to SEQ ID NO: 884006
ucuagucugggccaaccac

SEQ ID NO: 884008 - RNA, 19 nt, Artificial Sequence
  Description of Artificial Sequence: Synthetic oligonucleotide
  Sense strand starting at position 2244 of SEQ ID NO: 588711
acuagauauuagucacuac

SEQ ID NO: 884009 - RNA, 19 nt, Artificial Sequence
  Description of Artificial Sequence: Synthetic oligonucleotide
  Antisense strand to SEQ ID NO: 884008
guagugacuaauaucuagu

SEQ ID NO: 884010 - RNA, 19 nt, Artificial Sequence
  Description of Artificial Sequence: Synthetic oligonucleotide
  Sense strand starting at position 2765 of SEQ ID NO: 588711
auuuacaccuggugaaaua

SEQ ID NO: 884011 - RNA, 19 nt, Artificial Sequence
  Description of Artificial Sequence: Synthetic oligonucleotide
  Antisense strand to SEQ ID NO: 884010
uauuucaccagguguaaau

SEQ ID NO: 884012 - RNA, 19 nt, Artificial Sequence
  Description of Artificial Sequence: Synthetic oligonucleotide
  Sense strand starting at position 2777 of SEQ ID NO: 588711
ugaaauagccgccacuauu

SEQ ID NO: 884013 - RNA, 19 nt, Artificial Sequence
  Description of Artificial Sequence: Synthetic oligonucleotide
  Antisense strand to SEQ ID NO: 884012
aauaguggcggcuauuuca

SEQ ID NO: 884014 - RNA, 19 nt, Artificial Sequence
  Description of Artificial Sequence: Synthetic oligonucleotide
  Sense strand starting at position 2805 of SEQ ID NO: 588711
gggaggugugcuggucacu

SEQ ID NO: 884015 - RNA, 19 nt, Artificial Sequence
  Description of Artificial Sequence: Synthetic oligonucleotide
  Antisense strand to SEQ ID NO: 884014
agugaccagcacaccuccc

SEQ ID NO: 884016 - RNA, 19 nt, Artificial Sequence
  Description of Artificial Sequence: Synthetic oligonucleotide
  Sense strand starting at position 2855 of SEQ ID NO: 588711
cuggcauccugcguuuaca

SEQ ID NO: 884017 - RNA, 19 nt, Artificial Sequence
  Description of Artificial Sequence: Synthetic oligonucleotide
  Antisense strand to SEQ ID NO: 884016
uguaaacgcaggaugccag

SEQ ID NO: 884018 - RNA, 19 nt, Artificial Sequence
  Description of Artificial Sequence: Synthetic oligonucleotide
  Sense strand starting at position 2942 of SEQ ID NO: 588711
ccgacagugacuuggaaca

SEQ ID NO: 884019 - RNA, 19 nt, Artificial Sequence
  Description of Artificial Sequence: Synthetic oligonucleotide
  Antisense strand to SEQ ID NO: 884018
uguuccaagucacugucgg

SEQ ID NO: 884020 - RNA, 19 nt, Artificial Sequence
  Description of Artificial Sequence: Synthetic oligonucleotide
  Sense strand starting at position 2944 of SEQ ID NO: 588711
gacagugacuuggaacaga

SEQ ID NO: 884021 - RNA, 19 nt, Artificial Sequence
  Description of Artificial Sequence: Synthetic oligonucleotide
  Antisense strand to SEQ ID NO: 884020
ucuguuccaagucacuguc

SEQ ID NO: 884022 - RNA, 19 nt, Artificial Sequence
  Description of Artificial Sequence: Synthetic oligonucleotide
  Sense strand starting at position 2970 of SEQ ID NO: 588711
uggugcucuuacugaauga

SEQ ID NO: 884023 - RNA, 19 nt, Artificial Sequence
  Description of Artificial Sequence: Synthetic oligonucleotide
  Antisense strand to SEQ ID NO: 884022
ucauucaguaagagcacca

SEQ ID NO: 884024 - RNA, 19 nt, Artificial Sequence
  Description of Artificial Sequence: Synthetic oligonucleotide
  Sense strand starting at position 2971 of SEQ ID NO: 588711
ggugcucuuacugaaugaa

SEQ ID NO: 884025 - RNA, 19 nt, Artificial Sequence
  Description of Artificial Sequence: Synthetic oligonucleotide
  Antisense strand to SEQ ID NO: 884024
uucauucaguaagagcacc

SEQ ID NO: 884026 - RNA, 19 nt, Artificial Sequence
  Description of Artificial Sequence: Synthetic oligonucleotide
  Sense strand starting at position 2974 of SEQ ID NO: 588711
gcucuuacugaaugaagga

SEQ ID NO: 884027 - RNA, 19 nt, Artificial Sequence
  Description of Artificial Sequence: Synthetic oligonucleotide
  Antisense strand to SEQ ID NO: 884026
uccuucauucaguaagagc

SEQ ID NO: 884028 - RNA, 19 nt, Artificial Sequence
  Description of Artificial Sequence: Synthetic oligonucleotide
  Sense strand starting at position 2998 of SEQ ID NO: 588711
cauguugugcuuugcacua

SEQ ID NO: 884029 - RNA, 19 nt, Artificial Sequence
  Description of Artificial Sequence: Synthetic oligonucleotide
  Antisense strand to SEQ ID NO: 884028
uagugcaaagcacaacaug

SEQ ID NO: 884030 - RNA, 19 nt, Artificial Sequence
  Description of Artificial Sequence: Synthetic oligonucleotide
  Sense strand starting at position 3045 of SEQ ID NO: 588711
aagugaaauuggugagcca

SEQ ID NO: 884031 - RNA, 19 nt, Artificial Sequence
  Description of Artificial Sequence: Synthetic oligonucleotide
  Antisense strand to SEQ ID NO: 884030
uggcucaccaauuucacuu

SEQ ID NO: 884032 - RNA, 19 nt, Artificial Sequence
  Description of Artificial Sequence: Synthetic oligonucleotide
  Sense strand starting at position 3046 of SEQ ID NO: 588711
agugaaauuggugagccau

SEQ ID NO: 884033 - RNA, 19 nt, Artificial Sequence
  Description of Artificial Sequence: Synthetic oligonucleotide
  Antisense strand to SEQ ID NO: 884032
auggcucaccaauuucacu

SEQ ID NO: 884034 - RNA, 19 nt, Artificial Sequence
  Description of Artificial Sequence: Synthetic oligonucleotide
  Sense strand starting at position 3052 of SEQ ID NO: 588711
auuggugagccauggacaa

SEQ ID NO: 884035 - RNA, 19 nt, Artificial Sequence
  Description of Artificial Sequence: Synthetic oligonucleotide
  Antisense strand to SEQ ID NO: 884034
uuguccauggcucaccaau

SEQ ID NO: 884036 - RNA, 19 nt, Artificial Sequence
  Description of Artificial Sequence: Synthetic oligonucleotide
  Sense strand starting at position 3077 of SEQ ID NO: 588711
guuguccugcuaugggaaa

SEQ ID NO: 884037 - RNA, 19 nt, Artificial Sequence
  Description of Artificial Sequence: Synthetic oligonucleotide
  Antisense strand to SEQ ID NO: 884036
uuucccauagcaggacaac

SEQ ID NO: 884038 - RNA, 19 nt, Artificial Sequence
  Description of Artificial Sequence: Synthetic oligonucleotide
  Sense strand starting at position 3078 of SEQ ID NO: 588711
uuguccugcuaugggaaau

SEQ ID NO: 884039 - RNA, 19 nt, Artificial Sequence
  Description of Artificial Sequence: Synthetic oligonucleotide
  Antisense strand to SEQ ID NO: 884038
auuucccauagcaggacaa

SEQ ID NO: 884040 - RNA, 19 nt, Artificial Sequence
  Description of Artificial Sequence: Synthetic oligonucleotide
  Sense strand starting at position 3104 of SEQ ID NO: 588711
guggcauugacauauaagc

SEQ ID NO: 884041 - RNA, 19 nt, Artificial Sequence
  Description of Artificial Sequence: Synthetic oligonucleotide
  Antisense strand to SEQ ID NO: 884040
gcuuauaugucaaugccac

SEQ ID NO: 884042 - RNA, 19 nt, Artificial Sequence
  Description of Artificial Sequence: Synthetic oligonucleotide
  Sense strand starting at position 3127 of SEQ ID NO: 588711
gcaacuuggcucugugaaa

SEQ ID NO: 884043 - RNA, 19 nt, Artificial Sequence
  Description of Artificial Sequence: Synthetic oligonucleotide
  Antisense strand to SEQ ID NO: 884042
uuucacagagccaaguugc

SEQ ID NO: 884044 - RNA, 19 nt, Artificial Sequence
  Description of Artificial Sequence: Synthetic oligonucleotide
  Sense strand starting at position 3128 of SEQ ID NO: 588711
caacuuggcucugugaaac

SEQ ID NO: 884045 - RNA, 19 nt, Artificial Sequence
  Description of Artificial Sequence: Synthetic oligonucleotide
  Antisense strand to SEQ ID NO: 884044
guuucacagagccaaguug

SEQ ID NO: 884046 - RNA, 19 nt, Artificial Sequence
  Description of Artificial Sequence: Synthetic oligonucleotide
  Sense strand starting at position 3139 of SEQ ID NO: 588711
ugugaaacaugcccagauu

SEQ ID NO: 884047 - RNA, 19 nt, Artificial Sequence
  Description of Artificial Sequence: Synthetic oligonucleotide
  Antisense strand to SEQ ID NO: 884046
aaucugggcauguuucaca

SEQ ID NO: 884048 - RNA, 19 nt, Artificial Sequence
  Description of Artificial Sequence: Synthetic oligonucleotide
  Sense strand starting at position 3166 of SEQ ID NO: 588711
agaggcgaaaugugacauu

SEQ ID NO: 884049 - RNA, 19 nt, Artificial Sequence
  Description of Artificial Sequence: Synthetic oligonucleotide
  Antisense strand to SEQ ID NO: 884048
aaugucacauuucgccucu

SEQ ID NO: 884050 - RNA, 19 nt, Artificial Sequence
  Description of Artificial Sequence: Synthetic oligonucleotide
  Sense strand starting at position 3169 of SEQ ID NO: 588711
ggcgaaaugugacauuuac

SEQ ID NO: 884051 - RNA, 19 nt, Artificial Sequence
  Description of Artificial Sequence: Synthetic oligonucleotide
  Antisense strand to SEQ ID NO: 884050
guaaaugucacauuucgcc

SEQ ID NO: 884052 - RNA, 19 nt, Artificial Sequence
  Description of Artificial Sequence: Synthetic oligonucleotide
  Sense strand starting at position 3175 of SEQ ID NO: 588711
augugacauuuacacauua

SEQ ID NO: 884053 - RNA, 19 nt, Artificial Sequence
  Description of Artificial Sequence: Synthetic oligonucleotide
  Antisense strand to SEQ ID NO: 884052
uaauguguaaaugucacau

SEQ ID NO: 884054 - RNA, 19 nt, Artificial Sequence
  Description of Artificial Sequence: Synthetic oligonucleotide
  Sense strand starting at position 3186 of SEQ ID NO: 588711
acacauuagaguuguugag

SEQ ID NO: 884055 - RNA, 19 nt, Artificial Sequence
  Description of Artificial Sequence: Synthetic oligonucleotide
  Antisense strand to SEQ ID NO: 884054
cucaacaacucuaaugugu

SEQ ID NO: 884056 - RNA, 19 nt, Artificial Sequence
  Description of Artificial Sequence: Synthetic oligonucleotide
  Sense strand starting at position 3188 of SEQ ID NO: 588711
acauuagaguuguugaggu

SEQ ID NO: 884057 - RNA, 19 nt, Artificial Sequence
  Description of Artificial Sequence: Synthetic oligonucleotide
  Antisense strand to SEQ ID NO: 884056
accucaacaacucuaaugu

SEQ ID NO: 884058 - RNA, 19 nt, Artificial Sequence
  Description of Artificial Sequence: Synthetic oligonucleotide
  Sense strand starting at position 3196 of SEQ ID NO: 588711
guuguugaggucuagacau

SEQ ID NO: 884059 - RNA, 19 nt, Artificial Sequence
  Description of Artificial Sequence: Synthetic oligonucleotide
  Antisense strand to SEQ ID NO: 884058
augucuagaccucaacaac

SEQ ID NO: 884060 - RNA, 19 nt, Artificial Sequence
  Description of Artificial Sequence: Synthetic oligonucleotide
  Sense strand starting at position 3198 of SEQ ID NO: 588711
uguugaggucuagacauua

SEQ ID NO: 884061 - RNA, 19 nt, Artificial Sequence
  Description of Artificial Sequence: Synthetic oligonucleotide
  Antisense strand to SEQ ID NO: 884060
uaaugucuagaccucaaca

SEQ ID NO: 884062 - RNA, 19 nt, Artificial Sequence
  Description of Artificial Sequence: Synthetic oligonucleotide
  Sense strand starting at position 3233 of SEQ ID NO: 588711
cauaguagguucuuugaca

SEQ ID NO: 884063 - RNA, 19 nt, Artificial Sequence
  Description of Artificial Sequence: Synthetic oligonucleotide
  Antisense strand to SEQ ID NO: 884062
ugucaaagaaccuacuaug

SEQ ID NO: 884064 - RNA, 19 nt, Artificial Sequence
  Description of Artificial Sequence: Synthetic oligonucleotide
  Sense strand starting at position 3234 of SEQ ID NO: 588711
auaguagguucuuugacau

SEQ ID NO: 884065 - RNA, 19 nt, Artificial Sequence
  Description of Artificial Sequence: Synthetic oligonucleotide
  Antisense strand to SEQ ID NO: 884064
augucaaagaaccuacuau

SEQ ID NO: 884066 - RNA, 19 nt, Artificial Sequence
  Description of Artificial Sequence: Synthetic oligonucleotide
  Sense strand starting at position 3770 of SEQ ID NO: 588711
gcaggcaaaucaccugaau

SEQ ID NO: 884067 - RNA, 19 nt, Artificial Sequence
  Description of Artificial Sequence: Synthetic oligonucleotide
  Antisense strand to SEQ ID NO: 884066
auucaggugauuugccugc

SEQ ID NO: 884068 - RNA, 19 nt, Artificial Sequence
  Description of Artificial Sequence: Synthetic oligonucleotide
  Sense strand starting at position 3901 of SEQ ID NO: 588711
agguuaaaugaacguuauu

SEQ ID NO: 884069 - RNA, 19 nt, Artificial Sequence
  Description of Artificial Sequence: Synthetic oligonucleotide
  Antisense strand to SEQ ID NO: 884068
aauaacguucauuuaaccu

SEQ ID NO: 884070 - RNA, 19 nt, Artificial Sequence
  Description of Artificial Sequence: Synthetic oligonucleotide
  Sense strand starting at position 56 of SEQ ID NO: 588712
ggaccaucuuguguugauu

SEQ ID NO: 884071 - RNA, 19 nt, Artificial Sequence
  Description of Artificial Sequence: Synthetic oligonucleotide
  Antisense strand to SEQ ID NO: 884070
aaucaacacaagauggucc

SEQ ID NO: 884072 - RNA, 19 nt, Artificial Sequence
  Description of Artificial Sequence: Synthetic oligonucleotide
  Sense strand starting at position 59 of SEQ ID NO: 588712
ccaucuuguguugauuaua

SEQ ID NO: 884073 - RNA, 19 nt, Artificial Sequence
  Description of Artificial Sequence: Synthetic oligonucleotide
  Antisense strand to SEQ ID NO: 884072
uauaaucaacacaagaugg

SEQ ID NO: 884074 - RNA, 19 nt, Artificial Sequence
  Description of Artificial Sequence: Synthetic oligonucleotide
  Sense strand starting at position 62 of SEQ ID NO: 588712
ucuuguguugauuauacua

SEQ ID NO: 884075 - RNA, 19 nt, Artificial Sequence
  Description of Artificial Sequence: Synthetic oligonucleotide
  Antisense strand to SEQ ID NO: 884074
uaguauaaucaacacaaga

SEQ ID NO: 884076 - RNA, 19 nt, Artificial Sequence
  Description of Artificial Sequence: Synthetic oligonucleotide
  Sense strand starting at position 305 of SEQ ID NO: 588712
cuggaaugcucuuccaauu

SEQ ID NO: 884077 - RNA, 19 nt, Artificial Sequence
  Description of Artificial Sequence: Synthetic oligonucleotide
  Antisense strand to SEQ ID NO: 884076
aauuggaagagcauuccag

SEQ ID NO: 884078 - RNA, 19 nt, Artificial Sequence
  Description of Artificial Sequence: Synthetic oligonucleotide
  Sense strand starting at position 332 of SEQ ID NO: 588712
ccuauuugcucuuccacga

SEQ ID NO: 884079 - RNA, 19 nt, Artificial Sequence
  Description of Artificial Sequence: Synthetic oligonucleotide
  Antisense strand to SEQ ID NO: 884078
ucguggaagagcaaauagg

SEQ ID NO: 884080 - RNA, 19 nt, Artificial Sequence
  Description of Artificial Sequence: Synthetic oligonucleotide
  Sense strand starting at position 406 of SEQ ID NO: 588712
agaggcuuccuuuaauaua

SEQ ID NO: 884081 - RNA, 19 nt, Artificial Sequence
  Description of Artificial Sequence: Synthetic oligonucleotide
  Antisense strand to SEQ ID NO: 884080
uauauuaaaggaagccucu

SEQ ID NO: 884082 - RNA, 19 nt, Artificial Sequence
  Description of Artificial Sequence: Synthetic oligonucleotide
  Sense strand starting at position 433 of SEQ ID NO: 588712
ccuaauuaacuguauguuu

SEQ ID NO: 884083 - RNA, 19 nt, Artificial Sequence
  Description of Artificial Sequence: Synthetic oligonucleotide
  Antisense strand to SEQ ID NO: 884082
aaacauacaguuaauuagg

SEQ ID NO: 884084 - RNA, 19 nt, Artificial Sequence
  Description of Artificial Sequence: Synthetic oligonucleotide
  Sense strand starting at position 583 of SEQ ID NO: 588712
ggaggcacucaacaguuau

SEQ ID NO: 884085 - RNA, 19 nt, Artificial Sequence
  Description of Artificial Sequence: Synthetic oligonucleotide
  Antisense strand to SEQ ID NO: 884084
auaacuguugagugccucc

SEQ ID NO: 884086 - RNA, 19 nt, Artificial Sequence
  Description of Artificial Sequence: Synthetic oligonucleotide
  Sense strand starting at position 612 of SEQ ID NO: 588712
uauggauggugacucaaau

SEQ ID NO: 884087 - RNA, 19 nt, Artificial Sequence
  Description of Artificial Sequence: Synthetic oligonucleotide
  Antisense strand to SEQ ID NO: 884086
auuugagucaccauccaua

SEQ ID NO: 884088 - RNA, 19 nt, Artificial Sequence
  Description of Artificial Sequence: Synthetic oligonucleotide
  Sense strand starting at position 706 of SEQ ID NO: 588712
aucugucuucuaggucuua

SEQ ID NO: 884089 - RNA, 19 nt, Artificial Sequence
  Description of Artificial Sequence: Synthetic oligonucleotide
  Antisense strand to SEQ ID NO: 884088
uaagaccuagaagacagau

SEQ ID NO: 884090 - RNA, 19 nt, Artificial Sequence
  Description of Artificial Sequence: Synthetic oligonucleotide
  Sense strand starting at position 707 of SEQ ID NO: 588712
ucugucuucuaggucuuaa

SEQ ID NO: 884091 - RNA, 19 nt, Artificial Sequence
  Description of Artificial Sequence: Synthetic oligonucleotide
  Antisense strand to SEQ ID NO: 884090
uuaagaccuagaagacaga

SEQ ID NO: 884092 - RNA, 19 nt, Artificial Sequence
  Description of Artificial Sequence: Synthetic oligonucleotide
  Sense strand starting at position 718 of SEQ ID NO: 588712
ggucuuaaauauccuguua

SEQ ID NO: 884093 - RNA, 19 nt, Artificial Sequence
  Description of Artificial Sequence: Synthetic oligonucleotide
  Antisense strand to SEQ ID NO: 884092
uaacaggauauuuaagacc

SEQ ID NO: 884094 - RNA, 19 nt, Artificial Sequence
  Description of Artificial Sequence: Synthetic oligonucleotide
  Sense strand starting at position 853 of SEQ ID NO: 588712
ugcugcuucuccucaagaa

SEQ ID NO: 884095 - RNA, 19 nt, Artificial Sequence
  Description of Artificial Sequence: Synthetic oligonucleotide
  Antisense strand to SEQ ID NO: 884094
uucuugaggagaagcagca

SEQ ID NO: 884096 - RNA, 19 nt, Artificial Sequence
  Description of Artificial Sequence: Synthetic oligonucleotide
  Sense strand starting at position 854 of SEQ ID NO: 588712
gcugcuucuccucaagaaa

SEQ ID NO: 884097 - RNA, 19 nt, Artificial Sequence
  Description of Artificial Sequence: Synthetic oligonucleotide
  Antisense strand to SEQ ID NO: 884096
uuucuugaggagaagcagc

SEQ ID NO: 884098 - RNA, 19 nt, Artificial Sequence
  Description of Artificial Sequence: Synthetic oligonucleotide
  Sense strand starting at position 1131 of SEQ ID NO: 588712
aaagaaacuugggagauca

SEQ ID NO: 884099 - RNA, 19 nt, Artificial Sequence
  Description of Artificial Sequence: Synthetic oligonucleotide
  Antisense strand to SEQ ID NO: 884098
ugaucucccaaguuucuuu

SEQ ID NO: 884100 - RNA, 19 nt, Artificial Sequence
  Description of Artificial Sequence: Synthetic oligonucleotide
  Sense strand starting at position 1139 of SEQ ID NO: 588712
uugggagaucaucguccaa

SEQ ID NO: 884101 - RNA, 19 nt, Artificial Sequence
  Description of Artificial Sequence: Synthetic oligonucleotide
  Antisense strand to SEQ ID NO: 884100
uuggacgaugaucucccaa

SEQ ID NO: 884102 - RNA, 19 nt, Artificial Sequence
  Description of Artificial Sequence: Synthetic oligonucleotide
  Sense strand starting at position 1180 of SEQ ID NO: 588712
gagacucgucuguggucaa

SEQ ID NO: 884103 - RNA, 19 nt, Artificial Sequence
  Description of Artificial Sequence: Synthetic oligonucleotide
  Antisense strand to SEQ ID NO: 884102
uugaccacagacgagucuc

SEQ ID NO: 884104 - RNA, 19 nt, Artificial Sequence
  Description of Artificial Sequence: Synthetic oligonucleotide
  Sense strand starting at position 1247 of SEQ ID NO: 588712
cacuuaaaucccgaugguu

SEQ ID NO: 884105 - RNA, 19 nt, Artificial Sequence
  Description of Artificial Sequence: Synthetic oligonucleotide
  Antisense strand to SEQ ID NO: 884104
aaccaucgggauuuaagug

SEQ ID NO: 884106 - RNA, 19 nt, Artificial Sequence
  Description of Artificial Sequence: Synthetic oligonucleotide
  Sense strand starting at position 1249 of SEQ ID NO: 588712
cuuaaaucccgaugguuuc

SEQ ID NO: 884107 - RNA, 19 nt, Artificial Sequence
  Description of Artificial Sequence: Synthetic oligonucleotide
  Antisense strand to SEQ ID NO: 884106
gaaaccaucgggauuuaag

SEQ ID NO: 884108 - RNA, 19 nt, Artificial Sequence
  Description of Artificial Sequence: Synthetic oligonucleotide
  Sense strand starting at position 1256 of SEQ ID NO: 588712
cccgaugguuucuuacaga

SEQ ID NO: 884109 - RNA, 19 nt, Artificial Sequence
  Description of Artificial Sequence: Synthetic oligonucleotide
  Antisense strand to SEQ ID NO: 884108
ucuguaagaaaccaucggg

SEQ ID NO: 884110 - RNA, 19 nt, Artificial Sequence
  Description of Artificial Sequence: Synthetic oligonucleotide
  Sense strand starting at position 1273 of SEQ ID NO: 588712
gaguucuaauagucugaga

SEQ ID NO: 884111 - RNA, 19 nt, Artificial Sequence
  Description of Artificial Sequence: Synthetic oligonucleotide
  Antisense strand to SEQ ID NO: 884110
ucucagacuauuagaacuc

SEQ ID NO: 884112 - RNA, 19 nt, Artificial Sequence
  Description of Artificial Sequence: Synthetic oligonucleotide
  Sense strand starting at position 1275 of SEQ ID NO: 588712
guucuaauagucugagaau

SEQ ID NO: 884113 - RNA, 19 nt, Artificial Sequence
  Description of Artificial Sequence: Synthetic oligonucleotide
  Antisense strand to SEQ ID NO: 884112
auucucagacuauuagaac

SEQ ID NO: 884114 - RNA, 19 nt, Artificial Sequence
  Description of Artificial Sequence: Synthetic oligonucleotide
  Sense strand starting at position 1978 of SEQ ID NO: 588712
ggcccaacaguuuguggua

SEQ ID NO: 884115 - RNA, 19 nt, Artificial Sequence
  Description of Artificial Sequence: Synthetic oligonucleotide
  Antisense strand to SEQ ID NO: 884114
uaccacaaacuguugggcc

SEQ ID NO: 884116 - RNA, 19 nt, Artificial Sequence
  Description of Artificial Sequence: Synthetic oligonucleotide
  Sense strand starting at position 1979 of SEQ ID NO: 588712
gcccaacaguuugugguaa

SEQ ID NO: 884117 - RNA, 19 nt, Artificial Sequence
  Description of Artificial Sequence: Synthetic oligonucleotide
  Antisense strand to SEQ ID NO: 884116
uuaccacaaacuguugggc

SEQ ID NO: 884118 - RNA, 19 nt, Artificial Sequence
  Description of Artificial Sequence: Synthetic oligonucleotide
  Sense strand starting at position 2087 of SEQ ID NO: 588712
gagucuuucgcgcugggca

SEQ ID NO: 884119 - RNA, 19 nt, Artificial Sequence
  Description of Artificial Sequence: Synthetic oligonucleotide
  Antisense strand to SEQ ID NO: 884118
ugcccagcgcgaaagacuc

SEQ ID NO: 884120 - RNA, 19 nt, Artificial Sequence
  Description of Artificial Sequence: Synthetic oligonucleotide
  Sense strand starting at position 2253 of SEQ ID NO: 588712
uugaacuauuccuccguuu

SEQ ID NO: 884121 - RNA, 19 nt, Artificial Sequence
  Description of Artificial Sequence: Synthetic oligonucleotide
  Antisense strand to SEQ ID NO: 884120
aaacggaggaauaguucaa

SEQ ID NO: 884122 - RNA, 19 nt, Artificial Sequence
  Description of Artificial Sequence: Synthetic oligonucleotide
  Sense strand starting at position 2393 of SEQ ID NO: 588712
guaggucugaguuagagcu

SEQ ID NO: 884123 - RNA, 19 nt, Artificial Sequence
  Description of Artificial Sequence: Synthetic oligonucleotide
  Antisense strand to SEQ ID NO: 884122
agcucuaacucagaccuac

SEQ ID NO: 884124 - RNA, 19 nt, Artificial Sequence
  Description of Artificial Sequence: Synthetic oligonucleotide
  Sense strand starting at position 2460 of SEQ ID NO: 588712
cuugcuagucauuaucaga

SEQ ID NO: 884125 - RNA, 19 nt, Artificial Sequence
  Description of Artificial Sequence: Synthetic oligonucleotide
  Antisense strand to SEQ ID NO: 884124
ucugauaaugacuagcaag

SEQ ID NO: 884126 - RNA, 19 nt, Artificial Sequence
  Description of Artificial Sequence: Synthetic oligonucleotide
  Sense strand starting at position 2482 of SEQ ID NO: 588712
uauugagugccaggguaaa

SEQ ID NO: 884127 - RNA, 19 nt, Artificial Sequence
  Description of Artificial Sequence: Synthetic oligonucleotide
  Antisense strand to SEQ ID NO: 884126
uuuacccuggcacucaaua

SEQ ID NO: 884128 - RNA, 19 nt, Artificial Sequence
  Description of Artificial Sequence: Synthetic oligonucleotide
  Sense strand starting at position 2503 of SEQ ID NO: 588712
ugaccugucuccuuacuuu

SEQ ID NO: 884129 - RNA, 19 nt, Artificial Sequence
  Description of Artificial Sequence: Synthetic oligonucleotide
  Antisense strand to SEQ ID NO: 884128
aaaguaaggagacagguca

SEQ ID NO: 884130 - RNA, 19 nt, Artificial Sequence
  Description of Artificial Sequence: Synthetic oligonucleotide
  Sense strand starting at position 2658 of SEQ ID NO: 588712
ccugguuugggagaucauu

SEQ ID NO: 884131 - RNA, 19 nt, Artificial Sequence
  Description of Artificial Sequence: Synthetic oligonucleotide
  Antisense strand to SEQ ID NO: 884130
aaugaucucccaaaccagg

SEQ ID NO: 884132 - RNA, 19 nt, Artificial Sequence
  Description of Artificial Sequence: Synthetic oligonucleotide
  Sense strand starting at position 2756 of SEQ ID NO: 588712
agagcuguauucccauauu

SEQ ID NO: 884133 - RNA, 19 nt, Artificial Sequence
  Description of Artificial Sequence: Synthetic oligonucleotide
  Antisense strand to SEQ ID NO: 884132
aauaugggaauacagcucu

SEQ ID NO: 884134 - RNA, 19 nt, Artificial Sequence
  Description of Artificial Sequence: Synthetic oligonucleotide
  Sense strand starting at position 2759 of SEQ ID NO: 588712
gcuguauucccauauuguc

SEQ ID NO: 884135 - RNA, 19 nt, Artificial Sequence
  Description of Artificial Sequence: Synthetic oligonucleotide
  Antisense strand to SEQ ID NO: 884134
gacaauaugggaauacagc

SEQ ID NO: 884136 - RNA, 19 nt, Artificial Sequence
  Description of Artificial Sequence: Synthetic oligonucleotide
  Sense strand starting at position 2961 of SEQ ID NO: 588712
ugugauggcuuuccauuau

SEQ ID NO: 884137 - RNA, 19 nt, Artificial Sequence
  Description of Artificial Sequence: Synthetic oligonucleotide
  Antisense strand to SEQ ID NO: 884136
auaauggaaagccaucaca

SEQ ID NO: 884138 - RNA, 19 nt, Artificial Sequence
  Description of Artificial Sequence: Synthetic oligonucleotide
  Sense strand starting at position 3293 of SEQ ID NO: 588712
ggcuuuccauucuuauagu

SEQ ID NO: 884139 - RNA, 19 nt, Artificial Sequence
  Description of Artificial Sequence: Synthetic oligonucleotide
  Antisense strand to SEQ ID NO: 884138
acuauaagaauggaaagcc

SEQ ID NO: 884140 - RNA, 19 nt, Artificial Sequence
  Description of Artificial Sequence: Synthetic oligonucleotide
  Sense strand starting at position 3398 of SEQ ID NO: 588712
uuucgaauuugucacaauu

SEQ ID NO: 884141 - RNA, 19 nt, Artificial Sequence
  Description of Artificial Sequence: Synthetic oligonucleotide
  Antisense strand to SEQ ID NO: 884140
aauugugacaaauucgaaa

SEQ ID NO: 884142 - RNA, 19 nt, Artificial Sequence
  Description of Artificial Sequence: Synthetic oligonucleotide
  Sense strand starting at position 3522 of SEQ ID NO: 588712
accaguuuaucuucuguuu

SEQ ID NO: 884143 - RNA, 19 nt, Artificial Sequence
  Description of Artificial Sequence: Synthetic oligonucleotide
  Antisense strand to SEQ ID NO: 884142
aaacagaagauaaacuggu

SEQ ID NO: 884144 - RNA, 19 nt, Artificial Sequence
  Description of Artificial Sequence: Synthetic oligonucleotide
  Sense strand starting at position 3575 of SEQ ID NO: 588712
gucuguugucaauauagua

SEQ ID NO: 884145 - RNA, 19 nt, Artificial Sequence
  Description of Artificial Sequence: Synthetic oligonucleotide
  Antisense strand to SEQ ID NO: 884144
uacuauauugacaacagac

SEQ ID NO: 884146 - RNA, 19 nt, Artificial Sequence
  Description of Artificial Sequence: Synthetic oligonucleotide
  Sense strand starting at position 3781 of SEQ ID NO: 588712
acaauaacccugcaaggua

SEQ ID NO: 884147 - RNA, 19 nt, Artificial Sequence
  Description of Artificial Sequence: Synthetic oligonucleotide
  Antisense strand to SEQ ID NO: 884146
uaccuugcaggguuauugu

SEQ ID NO: 884148 - RNA, 19 nt, Artificial Sequence
  Description of Artificial Sequence: Synthetic oligonucleotide
  Sense strand starting at position 3790 of SEQ ID NO: 588712
cugcaagguagauaguauu

SEQ ID NO: 884149 - RNA, 19 nt, Artificial Sequence
  Description of Artificial Sequence: Synthetic oligonucleotide
  Antisense strand to SEQ ID NO: 884148
aauacuaucuaccuugcag

SEQ ID NO: 884150 - RNA, 19 nt, Artificial Sequence
  Description of Artificial Sequence: Synthetic oligonucleotide
  Sense strand starting at position 2 of SEQ ID NO: 588713
aaggauacaccuggaguuu

SEQ ID NO: 884151 - RNA, 19 nt, Artificial Sequence
  Description of Artificial Sequence: Synthetic oligonucleotide
  Antisense strand to SEQ ID NO: 884150
aaacuccagguguauccuu

SEQ ID NO: 884152 - RNA, 19 nt, Artificial Sequence
  Description of Artificial Sequence: Synthetic oligonucleotide
  Sense strand starting at position 275 of SEQ ID NO: 588713
ugagguuaggagcgagaua

SEQ ID NO: 884153 - RNA, 19 nt, Artificial Sequence
  Description of Artificial Sequence: Synthetic oligonucleotide
  Antisense strand to SEQ ID NO: 884152
uaucucgcuccuaaccuca

SEQ ID NO: 884154 - RNA, 19 nt, Artificial Sequence
  Description of Artificial Sequence: Synthetic oligonucleotide
  Sense strand starting at position 276 of SEQ ID NO: 588713
gagguuaggagcgagauau

SEQ ID NO: 884155 - RNA, 19 nt, Artificial Sequence
  Description of Artificial Sequence: Synthetic oligonucleotide
  Antisense strand to SEQ ID NO: 884154
auaucucgcuccuaaccuc

SEQ ID NO: 884156 - RNA, 19 nt, Artificial Sequence
  Description of Artificial Sequence: Synthetic oligonucleotide
  Sense strand starting at position 280 of SEQ ID NO: 588713
uuaggagcgagauauuauc

SEQ ID NO: 884157 - RNA, 19 nt, Artificial Sequence
  Description of Artificial Sequence: Synthetic oligonucleotide
  Antisense strand to SEQ ID NO: 884156
gauaauaucucgcuccuaa

SEQ ID NO: 884158 - RNA, 19 nt, Artificial Sequence
  Description of Artificial Sequence: Synthetic oligonucleotide
  Sense strand starting at position 286 of SEQ ID NO: 588713
gcgagauauuauccaucuu

SEQ ID NO: 884159 - RNA, 19 nt, Artificial Sequence
  Description of Artificial Sequence: Synthetic oligonucleotide
  Antisense strand to SEQ ID NO: 884158
aagauggauaauaucucgc

SEQ ID NO: 884160 - RNA, 19 nt, Artificial Sequence
  Description of Artificial Sequence: Synthetic oligonucleotide
  Sense strand starting at position 576 of SEQ ID NO: 588713
ucaugucaaucaucuggga

SEQ ID NO: 884161 - RNA, 19 nt, Artificial Sequence
  Description of Artificial Sequence: Synthetic oligonucleotide
  Antisense strand to SEQ ID NO: 884160
ucccagaugauugacauga

SEQ ID NO: 884162 - RNA, 19 nt, Artificial Sequence
  Description of Artificial Sequence: Synthetic oligonucleotide
  Sense strand starting at position 598 of SEQ ID NO: 588713
aaacacugucugggaaguu

SEQ ID NO: 884163 - RNA, 19 nt, Artificial Sequence
  Description of Artificial Sequence: Synthetic oligonucleotide
  Antisense strand to SEQ ID NO: 884162
aacuucccagacaguguuu

SEQ ID NO: 884164 - RNA, 19 nt, Artificial Sequence
  Description of Artificial Sequence: Synthetic oligonucleotide
  Sense strand starting at position 607 of SEQ ID NO: 588713
cugggaaguuaguauuuag

SEQ ID NO: 884165 - RNA, 19 nt, Artificial Sequence
  Description of Artificial Sequence: Synthetic oligonucleotide
  Antisense strand to SEQ ID NO: 884164
cuaaauacuaacuucccag

SEQ ID NO: 884166 - RNA, 19 nt, Artificial Sequence
  Description of Artificial Sequence: Synthetic oligonucleotide
  Sense strand starting at position 659 of SEQ ID NO: 588713
cuggacuuguagucugaau

SEQ ID NO: 884167 - RNA, 19 nt, Artificial Sequence
  Description of Artificial Sequence: Synthetic oligonucleotide
  Antisense strand to SEQ ID NO: 884166
auucagacuacaaguccag

SEQ ID NO: 884168 - RNA, 19 nt, Artificial Sequence
  Description of Artificial Sequence: Synthetic oligonucleotide
  Sense strand starting at position 871 of SEQ ID NO: 588713
ugggaauauuccguagggu

SEQ ID NO: 884169 - RNA, 19 nt, Artificial Sequence
  Description of Artificial Sequence: Synthetic oligonucleotide
  Antisense strand to SEQ ID NO: 884168
acccuacggaauauuccca

SEQ ID NO: 884170 - RNA, 19 nt, Artificial Sequence
  Description of Artificial Sequence: Synthetic oligonucleotide
  Sense strand starting at position 872 of SEQ ID NO: 588713
gggaauauuccguagggug

SEQ ID NO: 884171 - RNA, 19 nt, Artificial Sequence
  Description of Artificial Sequence: Synthetic oligonucleotide
  Antisense strand to SEQ ID NO: 884170
cacccuacggaauauuccc

SEQ ID NO: 884172 - RNA, 19 nt, Artificial Sequence
  Description of Artificial Sequence: Synthetic oligonucleotide
  Sense strand starting at position 1191 of SEQ ID NO: 588713
ucaggugagcuauagauua

SEQ ID NO: 884173 - RNA, 19 nt, Artificial Sequence
  Description of Artificial Sequence: Synthetic oligonucleotide
  Antisense strand to SEQ ID NO: 884172
uaaucuauagcucaccuga

SEQ ID NO: 884174 - RNA, 19 nt, Artificial Sequence
  Description of Artificial Sequence: Synthetic oligonucleotide
  Sense strand starting at position 1193 of SEQ ID NO: 588713
aggugagcuauagauuacu

SEQ ID NO: 884175 - RNA, 19 nt, Artificial Sequence
  Description of Artificial Sequence: Synthetic oligonucleotide
  Antisense strand to SEQ ID NO: 884174
aguaaucuauagcucaccu

SEQ ID NO: 884176 - RNA, 19 nt, Artificial Sequence
  Description of Artificial Sequence: Synthetic oligonucleotide
  Sense strand starting at position 1207 of SEQ ID NO: 588713
uuacuaugggaagguguau

SEQ ID NO: 884177 - RNA, 19 nt, Artificial Sequence
  Description of Artificial Sequence: Synthetic oligonucleotide
  Antisense strand to SEQ ID NO: 884176
auacaccuucccauaguaa

SEQ ID NO: 884178 - RNA, 19 nt, Artificial Sequence
  Description of Artificial Sequence: Synthetic oligonucleotide
  Sense strand starting at position 1334 of SEQ ID NO: 588713
ugaauucugucaucgggau

SEQ ID NO: 884179 - RNA, 19 nt, Artificial Sequence
  Description of Artificial Sequence: Synthetic oligonucleotide
  Antisense strand to SEQ ID NO: 884178
aucccgaugacagaauuca

SEQ ID NO: 884180 - RNA, 19 nt, Artificial Sequence
  Description of Artificial Sequence: Synthetic oligonucleotide
  Sense strand starting at position 1335 of SEQ ID NO: 588713
gaauucugucaucgggauu

SEQ ID NO: 884181 - RNA, 19 nt, Artificial Sequence
  Description of Artificial Sequence: Synthetic oligonucleotide
  Antisense strand to SEQ ID NO: 884180
aaucccgaugacagaauuc

SEQ ID NO: 884182 - RNA, 19 nt, Artificial Sequence
  Description of Artificial Sequence: Synthetic oligonucleotide
  Sense strand starting at position 1349 of SEQ ID NO: 588713
ggauuaccacgcugacuua

SEQ ID NO: 884183 - RNA, 19 nt, Artificial Sequence
  Description of Artificial Sequence: Synthetic oligonucleotide
  Antisense strand to SEQ ID NO: 884182
uaagucagcgugguaaucc

SEQ ID NO: 884184 - RNA, 19 nt, Artificial Sequence
  Description of Artificial Sequence: Synthetic oligonucleotide
  Sense strand starting at position 1381 of SEQ ID NO: 588713
ugacacauugccugaaugu

SEQ ID NO: 884185 - RNA, 19 nt, Artificial Sequence
  Description of Artificial Sequence: Synthetic oligonucleotide
  Antisense strand to SEQ ID NO: 884184
acauucaggcaauguguca

SEQ ID NO: 884186 - RNA, 19 nt, Artificial Sequence
  Description of Artificial Sequence: Synthetic oligonucleotide
  Sense strand starting at position 1382 of SEQ ID NO: 588713
gacacauugccugaaugua

SEQ ID NO: 884187 - RNA, 19 nt, Artificial Sequence
  Description of Artificial Sequence: Synthetic oligonucleotide
  Antisense strand to SEQ ID NO: 884186
uacauucaggcaauguguc

SEQ ID NO: 884188 - RNA, 19 nt, Artificial Sequence
  Description of Artificial Sequence: Synthetic oligonucleotide
  Sense strand starting at position 1394 of SEQ ID NO: 588713
gaauguaugacugaucguc

SEQ ID NO: 884189 - RNA, 19 nt, Artificial Sequence
  Description of Artificial Sequence: Synthetic oligonucleotide
  Antisense strand to SEQ ID NO: 884188
gacgaucagucauacauuc

SEQ ID NO: 884190 - RNA, 19 nt, Artificial Sequence
  Description of Artificial Sequence: Synthetic oligonucleotide
  Sense strand starting at position 1571 of SEQ ID NO: 588713
gugugcugauuucuguuga

SEQ ID NO: 884191 - RNA, 19 nt, Artificial Sequence
  Description of Artificial Sequence: Synthetic oligonucleotide
  Antisense strand to SEQ ID NO: 884190
ucaacagaaaucagcacac

SEQ ID NO: 884192 - RNA, 19 nt, Artificial Sequence
  Description of Artificial Sequence: Synthetic oligonucleotide
  Sense strand starting at position 1630 of SEQ ID NO: 588713
cggagagauccggagucca

SEQ ID NO: 884193 - RNA, 19 nt, Artificial Sequence
  Description of Artificial Sequence: Synthetic oligonucleotide
  Antisense strand to SEQ ID NO: 884192
uggacuccggaucucuccg

SEQ ID NO: 884194 - RNA, 19 nt, Artificial Sequence
  Description of Artificial Sequence: Synthetic oligonucleotide
  Sense strand starting at position 1668 of SEQ ID NO: 588713
gcucuaauggaacgaaguu

SEQ ID NO: 884195 - RNA, 19 nt, Artificial Sequence
  Description of Artificial Sequence: Synthetic oligonucleotide
  Antisense strand to SEQ ID NO: 884194
aacuucguuccauuagagc

SEQ ID NO: 884196 - RNA, 19 nt, Artificial Sequence
  Description of Artificial Sequence: Synthetic oligonucleotide
  Sense strand starting at position 1680 of SEQ ID NO: 588713
cgaaguuggcaauaccuau

SEQ ID NO: 884197 - RNA, 19 nt, Artificial Sequence
  Description of Artificial Sequence: Synthetic oligonucleotide
  Antisense strand to SEQ ID NO: 884196
auagguauugccaacuucg

SEQ ID NO: 884198 - RNA, 19 nt, Artificial Sequence
  Description of Artificial Sequence: Synthetic oligonucleotide
  Sense strand starting at position 2201 of SEQ ID NO: 588713
ucuguuaaauuggcacuau

SEQ ID NO: 884199 - RNA, 19 nt, Artificial Sequence
  Description of Artificial Sequence: Synthetic oligonucleotide
  Antisense strand to SEQ ID NO: 884198
auagugccaauuuaacaga

SEQ ID NO: 884200 - RNA, 19 nt, Artificial Sequence
  Description of Artificial Sequence: Synthetic oligonucleotide
  Sense strand starting at position 2476 of SEQ ID NO: 588713
ucaggaaagucccugcuaa

SEQ ID NO: 884201 - RNA, 19 nt, Artificial Sequence
  Description of Artificial Sequence: Synthetic oligonucleotide
  Antisense strand to SEQ ID NO: 884200
uuagcagggacuuuccuga

SEQ ID NO: 884202 - RNA, 19 nt, Artificial Sequence
  Description of Artificial Sequence: Synthetic oligonucleotide
  Sense strand starting at position 2477 of SEQ ID NO: 588713
caggaaagucccugcuaac

SEQ ID NO: 884203 - RNA, 19 nt, Artificial Sequence
  Description of Artificial Sequence: Synthetic oligonucleotide
  Antisense strand to SEQ ID NO: 884202
guuagcagggacuuuccug

SEQ ID NO: 884204 - RNA, 19 nt, Artificial Sequence
  Description of Artificial Sequence: Synthetic oligonucleotide
  Sense strand starting at position 2508 of SEQ ID NO: 588713
ggagaaggcgucuaacuuu

SEQ ID NO: 884205 - RNA, 19 nt, Artificial Sequence
  Description of Artificial Sequence: Synthetic oligonucleotide
  Antisense strand to SEQ ID NO: 884204
aaaguuagacgccuucucc

SEQ ID NO: 884206 - RNA, 19 nt, Artificial Sequence
  Description of Artificial Sequence: Synthetic oligonucleotide
  Sense strand starting at position 2699 of SEQ ID NO: 588713
gcggguuaccaggagguuu

SEQ ID NO: 884207 - RNA, 19 nt, Artificial Sequence
  Description of Artificial Sequence: Synthetic oligonucleotide
  Antisense strand to SEQ ID NO: 884206
aaaccuccugguaacccgc

SEQ ID NO: 884208 - RNA, 19 nt, Artificial Sequence
  Description of Artificial Sequence: Synthetic oligonucleotide
  Sense strand starting at position 2773 of SEQ ID NO: 588713
gugcacagacucuagcaua

SEQ ID NO: 884209 - RNA, 19 nt, Artificial Sequence
  Description of Artificial Sequence: Synthetic oligonucleotide
  Antisense strand to SEQ ID NO: 884208
uaugcuagagucugugcac

SEQ ID NO: 884210 - RNA, 19 nt, Artificial Sequence
  Description of Artificial Sequence: Synthetic oligonucleotide
  Sense strand starting at position 2895 of SEQ ID NO: 588713
agauaauauaugugggcau

SEQ ID NO: 884211 - RNA, 19 nt, Artificial Sequence
  Description of Artificial Sequence: Synthetic oligonucleotide
  Antisense strand to SEQ ID NO: 884210
augcccacauauauuaucu

SEQ ID NO: 884212 - RNA, 19 nt, Artificial Sequence
  Description of Artificial Sequence: Synthetic oligonucleotide
  Sense strand starting at position 2932 of SEQ ID NO: 588713
cauaguucgccuuccguaa

SEQ ID NO: 884213 - RNA, 19 nt, Artificial Sequence
  Description of Artificial Sequence: Synthetic oligonucleotide
  Antisense strand to SEQ ID NO: 884212
uuacggaaggcgaacuaug

SEQ ID NO: 884214 - RNA, 19 nt, Artificial Sequence
  Description of Artificial Sequence: Synthetic oligonucleotide
  Sense strand starting at position 3054 of SEQ ID NO: 588713
guggcuguacgagagagua

SEQ ID NO: 884215 - RNA, 19 nt, Artificial Sequence
  Description of Artificial Sequence: Synthetic oligonucleotide
  Antisense strand to SEQ ID NO: 884214
uacucucucguacagccac

SEQ ID NO: 884216 - RNA, 19 nt, Artificial Sequence
  Description of Artificial Sequence: Synthetic oligonucleotide
  Sense strand starting at position 3087 of SEQ ID NO: 588713
ugucguucaguagaggaaa

SEQ ID NO: 884217 - RNA, 19 nt, Artificial Sequence
  Description of Artificial Sequence: Synthetic oligonucleotide
  Antisense strand to SEQ ID NO: 884216
uuuccucuacugaacgaca

SEQ ID NO: 884218 - RNA, 19 nt, Artificial Sequence
  Description of Artificial Sequence: Synthetic oligonucleotide
  Sense strand starting at position 3387 of SEQ ID NO: 588713
cacuuuaagcucuagggua

SEQ ID NO: 884219 - RNA, 19 nt, Artificial Sequence
  Description of Artificial Sequence: Synthetic oligonucleotide
  Antisense strand to SEQ ID NO: 884218
uacccuagagcuuaaagug

SEQ ID NO: 884220 - RNA, 19 nt, Artificial Sequence
  Description of Artificial Sequence: Synthetic oligonucleotide
  Sense strand starting at position 3719 of SEQ ID NO: 588713
auaguauuccagcacacca

SEQ ID NO: 884221 - RNA, 19 nt, Artificial Sequence
  Description of Artificial Sequence: Synthetic oligonucleotide
  Antisense strand to SEQ ID NO: 884220
uggugugcuggaauacuau

SEQ ID NO: 884222 - RNA, 19 nt, Artificial Sequence
  Description of Artificial Sequence: Synthetic oligonucleotide
  Sense strand starting at position 3741 of SEQ ID NO: 588713
cuacaaccuuggguuuauu

SEQ ID NO: 884223 - RNA, 19 nt, Artificial Sequence
  Description of Artificial Sequence: Synthetic oligonucleotide
  Antisense strand to SEQ ID NO: 884222
aauaaacccaagguuguag

SEQ ID NO: 884224 - RNA, 19 nt, Artificial Sequence
  Description of Artificial Sequence: Synthetic oligonucleotide
  Sense strand starting at position 3876 of SEQ ID NO: 588713
gauuccucacagugacaga

SEQ ID NO: 884225 - RNA, 19 nt, Artificial Sequence
  Description of Artificial Sequence: Synthetic oligonucleotide
  Antisense strand to SEQ ID NO: 884224
ucugucacugugaggaauc

SEQ ID NO: 884226 - RNA, 19 nt, Artificial Sequence
  Description of Artificial Sequence: Synthetic oligonucleotide
  Sense strand starting at position 3939 of SEQ ID NO: 588713
cuauauauugagggcaaga

SEQ ID NO: 884227 - RNA, 19 nt, Artificial Sequence
  Description of Artificial Sequence: Synthetic oligonucleotide
  Antisense strand to SEQ ID NO: 884226
ucuugcccucaauauauag

SEQ ID NO: 884228 - RNA, 19 nt, Artificial Sequence
  Description of Artificial Sequence: Synthetic oligonucleotide
  Sense strand starting at position 3964 of SEQ ID NO: 588713
augcaugacaccuggagau

SEQ ID NO: 884229 - RNA, 19 nt, Artificial Sequence
  Description of Artificial Sequence: Synthetic oligonucleotide
  Antisense strand to SEQ ID NO: 884228
aucuccaggugucaugcau

SEQ ID NO: 884230 - RNA, 19 nt, Artificial Sequence
  Description of Artificial Sequence: Synthetic oligonucleotide
  Sense strand starting at position 14 of SEQ ID NO: 588714
cugccaaagcuaugaaaca

SEQ ID NO: 884231 - RNA, 19 nt, Artificial Sequence
  Description of Artificial Sequence: Synthetic oligonucleotide
  Antisense strand to SEQ ID NO: 884230
uguuucauagcuuuggcag

SEQ ID NO: 884232 - RNA, 19 nt, Artificial Sequence
  Description of Artificial Sequence: Synthetic oligonucleotide
  Sense strand starting at position 114 of SEQ ID NO: 588714
ggaguuaagccuggccaau

SEQ ID NO: 884233 - RNA, 19 nt, Artificial Sequence
  Description of Artificial Sequence: Synthetic oligonucleotide
  Antisense strand to SEQ ID NO: 884232
auuggccaggcuuaacucc

SEQ ID NO: 884234 - RNA, 19 nt, Artificial Sequence
  Description of Artificial Sequence: Synthetic oligonucleotide
  Sense strand starting at position 116 of SEQ ID NO: 588714
aguuaagccuggccaauau

SEQ ID NO: 884235 - RNA, 19 nt, Artificial Sequence
  Description of Artificial Sequence: Synthetic oligonucleotide
  Antisense strand to SEQ ID NO: 884234
auauuggccaggcuuaacu

SEQ ID NO: 884236 - RNA, 19 nt, Artificial Sequence
  Description of Artificial Sequence: Synthetic oligonucleotide
  Sense strand starting at position 376 of SEQ ID NO: 588714
accugaaaguuucuaggua

SEQ ID NO: 884237 - RNA, 19 nt, Artificial Sequence
  Description of Artificial Sequence: Synthetic oligonucleotide
  Antisense strand to SEQ ID NO: 884236
uaccuagaaacuuucaggu

SEQ ID NO: 884238 - RNA, 19 nt, Artificial Sequence
  Description of Artificial Sequence: Synthetic oligonucleotide
  Sense strand starting at position 380 of SEQ ID NO: 588714
gaaaguuucuagguaaagg

SEQ ID NO: 884239 - RNA, 19 nt, Artificial Sequence
  Description of Artificial Sequence: Synthetic oligonucleotide
  Antisense strand to SEQ ID NO: 884238
ccuuuaccuagaaacuuuc

SEQ ID NO: 884240 - RNA, 19 nt, Artificial Sequence
  Description of Artificial Sequence: Synthetic oligonucleotide
  Sense strand starting at position 421 of SEQ ID NO: 588714
ugaggaguuccagauguua

SEQ ID NO: 884241 - RNA, 19 nt, Artificial Sequence
  Description of Artificial Sequence: Synthetic oligonucleotide
  Antisense strand to SEQ ID NO: 884240
uaacaucuggaacuccuca

SEQ ID NO: 884242 - RNA, 19 nt, Artificial Sequence
  Description of Artificial Sequence: Synthetic oligonucleotide
  Sense strand starting at position 620 of SEQ ID NO: 588714
guccuuuguacugagauag

SEQ ID NO: 884243 - RNA, 19 nt, Artificial Sequence
  Description of Artificial Sequence: Synthetic oligonucleotide
  Antisense strand to SEQ ID NO: 884242
cuaucucaguacaaaggac

SEQ ID NO: 884244 - RNA, 19 nt, Artificial Sequence
  Description of Artificial Sequence: Synthetic oligonucleotide
  Sense strand starting at position 716 of SEQ ID NO: 588714
uagggaggguaugcuuauu

SEQ ID NO: 884245 - RNA, 19 nt, Artificial Sequence
  Description of Artificial Sequence: Synthetic oligonucleotide
  Antisense strand to SEQ ID NO: 884244
aauaagcauacccucccua

SEQ ID NO: 884246 - RNA, 19 nt, Artificial Sequence
  Description of Artificial Sequence: Synthetic oligonucleotide
  Sense strand starting at position 721 of SEQ ID NO: 588714
aggguaugcuuauuaaucu

SEQ ID NO: 884247 - RNA, 19 nt, Artificial Sequence
  Description of Artificial Sequence: Synthetic oligonucleotide
  Antisense strand to SEQ ID NO: 884246
agauuaauaagcauacccu

SEQ ID NO: 884248 - RNA, 19 nt, Artificial Sequence
  Description of Artificial Sequence: Synthetic oligonucleotide
  Sense strand starting at position 783 of SEQ ID NO: 588714
auucauaccgguuguggau

SEQ ID NO: 884249 - RNA, 19 nt, Artificial Sequence
  Description of Artificial Sequence: Synthetic oligonucleotide
  Antisense strand to SEQ ID NO: 884248
auccacaaccgguaugaau

SEQ ID NO: 884250 - RNA, 19 nt, Artificial Sequence
  Description of Artificial Sequence: Synthetic oligonucleotide
  Sense strand starting at position 908 of SEQ ID NO: 588714
agcaaaugcugauuacaag

SEQ ID NO: 884251 - RNA, 19 nt, Artificial Sequence
  Description of Artificial Sequence: Synthetic oligonucleotide
  Antisense strand to SEQ ID NO: 884250
cuuguaaucagcauuugcu

SEQ ID NO: 884252 - RNA, 19 nt, Artificial Sequence
  Description of Artificial Sequence: Synthetic oligonucleotide
  Sense strand starting at position 909 of SEQ ID NO: 588714
gcaaaugcugauuacaagu

SEQ ID NO: 884253 - RNA, 19 nt, Artificial Sequence
  Description of Artificial Sequence: Synthetic oligonucleotide
  Antisense strand to SEQ ID NO: 884252
acuuguaaucagcauuugc

SEQ ID NO: 884254 - RNA, 19 nt, Artificial Sequence
  Description of Artificial Sequence: Synthetic oligonucleotide
  Sense strand starting at position 941 of SEQ ID NO: 588714
gggugagcucccuguaguc

SEQ ID NO: 884255 - RNA, 19 nt, Artificial Sequence
  Description of Artificial Sequence: Synthetic oligonucleotide
  Antisense strand to SEQ ID NO: 884254
gacuacagggagcucaccc

SEQ ID NO: 884256 - RNA, 19 nt, Artificial Sequence
  Description of Artificial Sequence: Synthetic oligonucleotide
  Sense strand starting at position 943 of SEQ ID NO: 588714
gugagcucccuguagucuu

SEQ ID NO: 884257 - RNA, 19 nt, Artificial Sequence
  Description of Artificial Sequence: Synthetic oligonucleotide
  Antisense strand to SEQ ID NO: 884256
aagacuacagggagcucac

SEQ ID NO: 884258 - RNA, 19 nt, Artificial Sequence
  Description of Artificial Sequence: Synthetic oligonucleotide
  Sense strand starting at position 1053 of SEQ ID NO: 588714
cagagcuuauguguaaacu

SEQ ID NO: 884259 - RNA, 19 nt, Artificial Sequence
  Description of Artificial Sequence: Synthetic oligonucleotide
  Antisense strand to SEQ ID NO: 884258
aguuuacacauaagcucug

SEQ ID NO: 884260 - RNA, 19 nt, Artificial Sequence
  Description of Artificial Sequence: Synthetic oligonucleotide
  Sense strand starting at position 1054 of SEQ ID NO: 588714
agagcuuauguguaaacuu

SEQ ID NO: 884261 - RNA, 19 nt, Artificial Sequence
  Description of Artificial Sequence: Synthetic oligonucleotide
  Antisense strand to SEQ ID NO: 884260
aaguuuacacauaagcucu

SEQ ID NO: 884262 - RNA, 19 nt, Artificial Sequence
  Description of Artificial Sequence: Synthetic oligonucleotide
  Sense strand starting at position 1090 of SEQ ID NO: 588714
gaaguaaaguuguugacau

SEQ ID NO: 884263 - RNA, 19 nt, Artificial Sequence
  Description of Artificial Sequence: Synthetic oligonucleotide
  Antisense strand to SEQ ID NO: 884262
augucaacaacuuuacuuc

SEQ ID NO: 884264 - RNA, 19 nt, Artificial Sequence
  Description of Artificial Sequence: Synthetic oligonucleotide
  Sense strand starting at position 1092 of SEQ ID NO: 588714
aguaaaguuguugacauac

SEQ ID NO: 884265 - RNA, 19 nt, Artificial Sequence
  Description of Artificial Sequence: Synthetic oligonucleotide
  Antisense strand to SEQ ID NO: 884264
guaugucaacaacuuuacu

SEQ ID NO: 884266 - RNA, 19 nt, Artificial Sequence
  Description of Artificial Sequence: Synthetic oligonucleotide
  Sense strand starting at position 1103 of SEQ ID NO: 588714
ugacauacuucucuuguuu

SEQ ID NO: 884267 - RNA, 19 nt, Artificial Sequence
  Description of Artificial Sequence: Synthetic oligonucleotide
  Antisense strand to SEQ ID NO: 884266
aaacaagagaaguauguca

SEQ ID NO: 884268 - RNA, 19 nt, Artificial Sequence
  Description of Artificial Sequence: Synthetic oligonucleotide
  Sense strand starting at position 1112 of SEQ ID NO: 588714
ucucuuguuucuccgagua

SEQ ID NO: 884269 - RNA, 19 nt, Artificial Sequence
  Description of Artificial Sequence: Synthetic oligonucleotide
  Antisense strand to SEQ ID NO: 884268
uacucggagaaacaagaga

SEQ ID NO: 884270 - RNA, 19 nt, Artificial Sequence
  Description of Artificial Sequence: Synthetic oligonucleotide
  Sense strand starting at position 1117 of SEQ ID NO: 588714
uguuucuccgaguaucugu

SEQ ID NO: 884271 - RNA, 19 nt, Artificial Sequence
  Description of Artificial Sequence: Synthetic oligonucleotide
  Antisense strand to SEQ ID NO: 884270
acagauacucggagaaaca

SEQ ID NO: 884272 - RNA, 19 nt, Artificial Sequence
  Description of Artificial Sequence: Synthetic oligonucleotide
  Sense strand starting at position 1122 of SEQ ID NO: 588714
cuccgaguaucuguuaaca

SEQ ID NO: 884273 - RNA, 19 nt, Artificial Sequence
  Description of Artificial Sequence: Synthetic oligonucleotide
  Antisense strand to SEQ ID NO: 884272
uguuaacagauacucggag

SEQ ID NO: 884274 - RNA, 19 nt, Artificial Sequence
  Description of Artificial Sequence: Synthetic oligonucleotide
  Sense strand starting at position 1208 of SEQ ID NO: 588714
gguggacugcuugauguca

SEQ ID NO: 884275 - RNA, 19 nt, Artificial Sequence
  Description of Artificial Sequence: Synthetic oligonucleotide
  Antisense strand to SEQ ID NO: 884274
ugacaucaagcaguccacc

SEQ ID NO: 884276 - RNA, 19 nt, Artificial Sequence
  Description of Artificial Sequence: Synthetic oligonucleotide
  Sense strand starting at position 1456 of SEQ ID NO: 588714
acgcguuucccuuucgaua

SEQ ID NO: 884277 - RNA, 19 nt, Artificial Sequence
  Description of Artificial Sequence: Synthetic oligonucleotide
  Antisense strand to SEQ ID NO: 884276
uaucgaaagggaaacgcgu

SEQ ID NO: 884278 - RNA, 19 nt, Artificial Sequence
  Description of Artificial Sequence: Synthetic oligonucleotide
  Sense strand starting at position 1457 of SEQ ID NO: 588714
cgcguuucccuuucgauaa

SEQ ID NO: 884279 - RNA, 19 nt, Artificial Sequence
  Description of Artificial Sequence: Synthetic oligonucleotide
  Antisense strand to SEQ ID NO: 884278
uuaucgaaagggaaacgcg

SEQ ID NO: 884280 - RNA, 19 nt, Artificial Sequence
  Description of Artificial Sequence: Synthetic oligonucleotide
  Sense strand starting at position 1469 of SEQ ID NO: 588714
ucgauaaugucccuucgac

SEQ ID NO: 884281 - RNA, 19 nt, Artificial Sequence
  Description of Artificial Sequence: Synthetic oligonucleotide
  Antisense strand to SEQ ID NO: 884280
gucgaagggacauuaucga

SEQ ID NO: 884282 - RNA, 19 nt, Artificial Sequence
  Description of Artificial Sequence: Synthetic oligonucleotide
  Sense strand starting at position 1475 of SEQ ID NO: 588714
augucccuucgacaaauau

SEQ ID NO: 884283 - RNA, 19 nt, Artificial Sequence
  Description of Artificial Sequence: Synthetic oligonucleotide
  Antisense strand to SEQ ID NO: 884282
auauuugucgaagggacau

SEQ ID NO: 884284 - RNA, 19 nt, Artificial Sequence
  Description of Artificial Sequence: Synthetic oligonucleotide
  Sense strand starting at position 1546 of SEQ ID NO: 588714
cuaaaucuguuggcaggaa

SEQ ID NO: 884285 - RNA, 19 nt, Artificial Sequence
  Description of Artificial Sequence: Synthetic oligonucleotide
  Antisense strand to SEQ ID NO: 884284
uuccugccaacagauuuag

SEQ ID NO: 884286 - RNA, 19 nt, Artificial Sequence
  Description of Artificial Sequence: Synthetic oligonucleotide
  Sense strand starting at position 1547 of SEQ ID NO: 588714
uaaaucuguuggcaggaaa

SEQ ID NO: 884287 - RNA, 19 nt, Artificial Sequence
  Description of Artificial Sequence: Synthetic oligonucleotide
  Antisense strand to SEQ ID NO: 884286
uuuccugccaacagauuua

SEQ ID NO: 884288 - RNA, 19 nt, Artificial Sequence
  Description of Artificial Sequence: Synthetic oligonucleotide
  Sense strand starting at position 2325 of SEQ ID NO: 588714
cggcguuaguccucagaau

SEQ ID NO: 884289 - RNA, 19 nt, Artificial Sequence
  Description of Artificial Sequence: Synthetic oligonucleotide
  Antisense strand to SEQ ID NO: 884288
auucugaggacuaacgccg

SEQ ID NO: 884290 - RNA, 19 nt, Artificial Sequence
  Description of Artificial Sequence: Synthetic oligonucleotide
  Sense strand starting at position 2326 of SEQ ID NO: 588714
ggcguuaguccucagaaua

SEQ ID NO: 884291 - RNA, 19 nt, Artificial Sequence
  Description of Artificial Sequence: Synthetic oligonucleotide
  Antisense strand to SEQ ID NO: 884290
uauucugaggacuaacgcc

SEQ ID NO: 884292 - RNA, 19 nt, Artificial Sequence
  Description of Artificial Sequence: Synthetic oligonucleotide
  Sense strand starting at position 2408 of SEQ ID NO: 588714
agaggaucugucgagccua

SEQ ID NO: 884293 - RNA, 19 nt, Artificial Sequence
  Description of Artificial Sequence: Synthetic oligonucleotide
  Antisense strand to SEQ ID NO: 884292
uaggcucgacagauccucu

SEQ ID NO: 884294 - RNA, 19 nt, Artificial Sequence
  Description of Artificial Sequence: Synthetic oligonucleotide
  Sense strand starting at position 2592 of SEQ ID NO: 588714
auggcuucuacgcuguuau

SEQ ID NO: 884295 - RNA, 19 nt, Artificial Sequence
  Description of Artificial Sequence: Synthetic oligonucleotide
  Antisense strand to SEQ ID NO: 884294
auaacagcguagaagccau

SEQ ID NO: 884296 - RNA, 19 nt, Artificial Sequence
  Description of Artificial Sequence: Synthetic oligonucleotide
  Sense strand starting at position 3025 of SEQ ID NO: 588714
gguuaugugacauaggcaa

SEQ ID NO: 884297 - RNA, 19 nt, Artificial Sequence
  Description of Artificial Sequence: Synthetic oligonucleotide
  Antisense strand to SEQ ID NO: 884296
uugccuaugucacauaacc

SEQ ID NO: 884298 - RNA, 19 nt, Artificial Sequence
  Description of Artificial Sequence: Synthetic oligonucleotide
  Sense strand starting at position 3097 of SEQ ID NO: 588714
cugagucccaguuguguuu

SEQ ID NO: 884299 - RNA, 19 nt, Artificial Sequence
  Description of Artificial Sequence: Synthetic oligonucleotide
  Antisense strand to SEQ ID NO: 884298
aaacacaacugggacucag

SEQ ID NO: 884300 - RNA, 19 nt, Artificial Sequence
  Description of Artificial Sequence: Synthetic oligonucleotide
  Sense strand starting at position 3171 of SEQ ID NO: 588714
acgagauuauuugagcaga

SEQ ID NO: 884301 - RNA, 19 nt, Artificial Sequence
  Description of Artificial Sequence: Synthetic oligonucleotide
  Antisense strand to SEQ ID NO: 884300
ucugcucaaauaaucucgu

SEQ ID NO: 884302 - RNA, 19 nt, Artificial Sequence
  Description of Artificial Sequence: Synthetic oligonucleotide
  Sense strand starting at position 3455 of SEQ ID NO: 588714
uggaguuguaacuguagga

SEQ ID NO: 884303 - RNA, 19 nt, Artificial Sequence
  Description of Artificial Sequence: Synthetic oligonucleotide
  Antisense strand to SEQ ID NO: 884302
uccuacaguuacaacucca

SEQ ID NO: 884304 - RNA, 19 nt, Artificial Sequence
  Description of Artificial Sequence: Synthetic oligonucleotide
  Sense strand starting at position 3468 of SEQ ID NO: 588714
guaggaagcucucagagac

SEQ ID NO: 884305 - RNA, 19 nt, Artificial Sequence
  Description of Artificial Sequence: Synthetic oligonucleotide
  Antisense strand to SEQ ID NO: 884304
gucucugagagcuuccuac

SEQ ID NO: 884306 - RNA, 19 nt, Artificial Sequence
  Description of Artificial Sequence: Synthetic oligonucleotide
  Sense strand starting at position 3855 of SEQ ID NO: 588714
agauacuguugaucauauu

SEQ ID NO: 884307 - RNA, 19 nt, Artificial Sequence
  Description of Artificial Sequence: Synthetic oligonucleotide
  Antisense strand to SEQ ID NO: 884306
aauaugaucaacaguaucu

SEQ ID NO: 884308 - RNA, 19 nt, Artificial Sequence
  Description of Artificial Sequence: Synthetic oligonucleotide
  Sense strand starting at position 3936 of SEQ ID NO: 588714
aguacuuacuuagcaagaa

SEQ ID NO: 884309 - RNA, 19 nt, Artificial Sequence
  Description of Artificial Sequence: Synthetic oligonucleotide
  Antisense strand to SEQ ID NO: 884308
uucuugcuaaguaaguacu

SEQ ID NO: 884310 - RNA, 19 nt, Artificial Sequence
  Description of Artificial Sequence: Synthetic oligonucleotide
  Sense strand starting at position 159 of SEQ ID NO: 588715
augucaauaugacaugaua

SEQ ID NO: 884311 - RNA, 19 nt, Artificial Sequence
  Description of Artificial Sequence: Synthetic oligonucleotide
  Antisense strand to SEQ ID NO: 884310
uaucaugucauauugacau

SEQ ID NO: 884312 - RNA, 19 nt, Artificial Sequence
  Description of Artificial Sequence: Synthetic oligonucleotide
  Sense strand starting at position 186 of SEQ ID NO: 588715
uaauuacaugagggugauu

SEQ ID NO: 884313 - RNA, 19 nt, Artificial Sequence
  Description of Artificial Sequence: Synthetic oligonucleotide
  Antisense strand to SEQ ID NO: 884312
aaucacccucauguaauua

SEQ ID NO: 884314 - RNA, 19 nt, Artificial Sequence
  Description of Artificial Sequence: Synthetic oligonucleotide
  Sense strand starting at position 198 of SEQ ID NO: 588715
ggugauugugcugaugguu

SEQ ID NO: 884315 - RNA, 19 nt, Artificial Sequence
  Description of Artificial Sequence: Synthetic oligonucleotide
  Antisense strand to SEQ ID NO: 884314
aaccaucagcacaaucacc

SEQ ID NO: 884316 - RNA, 19 nt, Artificial Sequence
  Description of Artificial Sequence: Synthetic oligonucleotide
  Sense strand starting at position 220 of SEQ ID NO: 588715
cagguauauguguagcuca

SEQ ID NO: 884317 - RNA, 19 nt, Artificial Sequence
  Description of Artificial Sequence: Synthetic oligonucleotide
  Antisense strand to SEQ ID NO: 884316
ugagcuacacauauaccug

SEQ ID NO: 884318 - RNA, 19 nt, Artificial Sequence
  Description of Artificial Sequence: Synthetic oligonucleotide
  Sense strand starting at position 223 of SEQ ID NO: 588715
guauauguguagcucaaca

SEQ ID NO: 884319 - RNA, 19 nt, Artificial Sequence
  Description of Artificial Sequence: Synthetic oligonucleotide
  Antisense strand to SEQ ID NO: 884318
uguugagcuacacauauac

SEQ ID NO: 884320 - RNA, 19 nt, Artificial Sequence
  Description of Artificial Sequence: Synthetic oligonucleotide
  Sense strand starting at position 225 of SEQ ID NO: 588715
auauguguagcucaacauu

SEQ ID NO: 884321 - RNA, 19 nt, Artificial Sequence
  Description of Artificial Sequence: Synthetic oligonucleotide
  Antisense strand to SEQ ID NO: 884320
aauguugagcuacacauau

SEQ ID NO: 884322 - RNA, 19 nt, Artificial Sequence
  Description of Artificial Sequence: Synthetic oligonucleotide
  Sense strand starting at position 282 of SEQ ID NO: 588715
ucauaauuggcaugcuaau

SEQ ID NO: 884323 - RNA, 19 nt, Artificial Sequence
  Description of Artificial Sequence: Synthetic oligonucleotide
  Antisense strand to SEQ ID NO: 884322
auuagcaugccaauuauga

SEQ ID NO: 884324 - RNA, 19 nt, Artificial Sequence
  Description of Artificial Sequence: Synthetic oligonucleotide
  Sense strand starting at position 319 of SEQ ID NO: 588715
aaagcaugugcauguuaaa

SEQ ID NO: 884325 - RNA, 19 nt, Artificial Sequence
  Description of Artificial Sequence: Synthetic oligonucleotide
  Antisense strand to SEQ ID NO: 884324
uuuaacaugcacaugcuuu

SEQ ID NO: 884326 - RNA, 19 nt, Artificial Sequence
  Description of Artificial Sequence: Synthetic oligonucleotide
  Sense strand starting at position 685 of SEQ ID NO: 588715
gccuuucuacaggacuuau

SEQ ID NO: 884327 - RNA, 19 nt, Artificial Sequence
  Description of Artificial Sequence: Synthetic oligonucleotide
  Antisense strand to SEQ ID NO: 884326
auaaguccuguagaaaggc

SEQ ID NO: 884328 - RNA, 19 nt, Artificial Sequence
  Description of Artificial Sequence: Synthetic oligonucleotide
  Sense strand starting at position 695 of SEQ ID NO: 588715
aggacuuauuucuacagac

SEQ ID NO: 884329 - RNA, 19 nt, Artificial Sequence
  Description of Artificial Sequence: Synthetic oligonucleotide
  Antisense strand to SEQ ID NO: 884328
gucuguagaaauaaguccu

SEQ ID NO: 884330 - RNA, 19 nt, Artificial Sequence
  Description of Artificial Sequence: Synthetic oligonucleotide
  Sense strand starting at position 892 of SEQ ID NO: 588715
caccgaagucuuggauaaa

SEQ ID NO: 884331 - RNA, 19 nt, Artificial Sequence
  Description of Artificial Sequence: Synthetic oligonucleotide
  Antisense strand to SEQ ID NO: 884330
uuuauccaagacuucggug

SEQ ID NO: 884332 - RNA, 19 nt, Artificial Sequence
  Description of Artificial Sequence: Synthetic oligonucleotide
  Sense strand starting at position 920 of SEQ ID NO: 588715
ccuuauuaaccugguccga

SEQ ID NO: 884333 - RNA, 19 nt, Artificial Sequence
  Description of Artificial Sequence: Synthetic oligonucleotide
  Antisense strand to SEQ ID NO: 884332
ucggaccagguuaauaagg

SEQ ID NO: 884334 - RNA, 19 nt, Artificial Sequence
  Description of Artificial Sequence: Synthetic oligonucleotide
  Sense strand starting at position 922 of SEQ ID NO: 588715
uuauuaaccugguccgaag

SEQ ID NO: 884335 - RNA, 19 nt, Artificial Sequence
  Description of Artificial Sequence: Synthetic oligonucleotide
  Antisense strand to SEQ ID NO: 884334
cuucggaccagguuaauaa

SEQ ID NO: 884336 - RNA, 19 nt, Artificial Sequence
  Description of Artificial Sequence: Synthetic oligonucleotide
  Sense strand starting at position 1000 of SEQ ID NO: 588715
cccauagguccuggucaca

SEQ ID NO: 884337 - RNA, 19 nt, Artificial Sequence
  Description of Artificial Sequence: Synthetic oligonucleotide
  Antisense strand to SEQ ID NO: 884336
ugugaccaggaccuauggg

SEQ ID NO: 884338 - RNA, 19 nt, Artificial Sequence
  Description of Artificial Sequence: Synthetic oligonucleotide
  Sense strand starting at position 1198 of SEQ ID NO: 588715
augaaaggcugcuuguuua

SEQ ID NO: 884339 - RNA, 19 nt, Artificial Sequence
  Description of Artificial Sequence: Synthetic oligonucleotide
  Antisense strand to SEQ ID NO: 884338
uaaacaagcagccuuucau

SEQ ID NO: 884340 - RNA, 19 nt, Artificial Sequence
  Description of Artificial Sequence: Synthetic oligonucleotide
  Sense strand starting at position 1206 of SEQ ID NO: 588715
cugcuuguuuacuccaaag

SEQ ID NO: 884341 - RNA, 19 nt, Artificial Sequence
  Description of Artificial Sequence: Synthetic oligonucleotide
  Antisense strand to SEQ ID NO: 884340
cuuuggaguaaacaagcag

SEQ ID NO: 884342 - RNA, 19 nt, Artificial Sequence
  Description of Artificial Sequence: Synthetic oligonucleotide
  Sense strand starting at position 1208 of SEQ ID NO: 588715
gcuuguuuacuccaaagca

SEQ ID NO: 884343 - RNA, 19 nt, Artificial Sequence
  Description of Artificial Sequence: Synthetic oligonucleotide
  Antisense strand to SEQ ID NO: 884342
ugcuuuggaguaaacaagc

SEQ ID NO: 884344 - RNA, 19 nt, Artificial Sequence
  Description of Artificial Sequence: Synthetic oligonucleotide
  Sense strand starting at position 1413 of SEQ ID NO: 588715
aggguucuuaaacgucaga

SEQ ID NO: 884345 - RNA, 19 nt, Artificial Sequence
  Description of Artificial Sequence: Synthetic oligonucleotide
  Antisense strand to SEQ ID NO: 884344
ucugacguuuaagaacccu

SEQ ID NO: 884346 - RNA, 19 nt, Artificial Sequence
  Description of Artificial Sequence: Synthetic oligonucleotide
  Sense strand starting at position 1416 of SEQ ID NO: 588715
guucuuaaacgucagagau

SEQ ID NO: 884347 - RNA, 19 nt, Artificial Sequence
  Description of Artificial Sequence: Synthetic oligonucleotide
  Antisense strand to SEQ ID NO: 884346
aucucugacguuuaagaac

SEQ ID NO: 884348 - RNA, 19 nt, Artificial Sequence
  Description of Artificial Sequence: Synthetic oligonucleotide
  Sense strand starting at position 1565 of SEQ ID NO: 588715
gaggcauggccucggagaa

SEQ ID NO: 884349 - RNA, 19 nt, Artificial Sequence
  Description of Artificial Sequence: Synthetic oligonucleotide
  Antisense strand to SEQ ID NO: 884348
uucuccgaggccaugccuc

SEQ ID NO: 884350 - RNA, 19 nt, Artificial Sequence
  Description of Artificial Sequence: Synthetic oligonucleotide
  Sense strand starting at position 1741 of SEQ ID NO: 588715
gcgccaugucaccuguaga

SEQ ID NO: 884351 - RNA, 19 nt, Artificial Sequence
  Description of Artificial Sequence: Synthetic oligonucleotide
  Antisense strand to SEQ ID NO: 884350
ucuacaggugacauggcgc

SEQ ID NO: 884352 - RNA, 19 nt, Artificial Sequence
  Description of Artificial Sequence: Synthetic oligonucleotide
  Sense strand starting at position 1742 of SEQ ID NO: 588715
cgccaugucaccuguagaa

SEQ ID NO: 884353 - RNA, 19 nt, Artificial Sequence
  Description of Artificial Sequence: Synthetic oligonucleotide
  Antisense strand to SEQ ID NO: 884352
uucuacaggugacauggcg

SEQ ID NO: 884354 - RNA, 19 nt, Artificial Sequence
  Description of Artificial Sequence: Synthetic oligonucleotide
  Sense strand starting at position 1744 of SEQ ID NO: 588715
ccaugucaccuguagaaac

SEQ ID NO: 884355 - RNA, 19 nt, Artificial Sequence
  Description of Artificial Sequence: Synthetic oligonucleotide
  Antisense strand to SEQ ID NO: 884354
guuucuacaggugacaugg

SEQ ID NO: 884356 - RNA, 19 nt, Artificial Sequence
  Description of Artificial Sequence: Synthetic oligonucleotide
  Sense strand starting at position 2463 of SEQ ID NO: 588715
cuggcuuccgugggagaca

SEQ ID NO: 884357 - RNA, 19 nt, Artificial Sequence
  Description of Artificial Sequence: Synthetic oligonucleotide
  Antisense strand to SEQ ID NO: 884356
ugucucccacggaagccag

SEQ ID NO: 884358 - RNA, 19 nt, Artificial Sequence
  Description of Artificial Sequence: Synthetic oligonucleotide
  Sense strand starting at position 2554 of SEQ ID NO: 588715
gcacgagcucguccauuga

SEQ ID NO: 884359 - RNA, 19 nt, Artificial Sequence
  Description of Artificial Sequence: Synthetic oligonucleotide
  Antisense strand to SEQ ID NO: 884358
ucaauggacgagcucgugc

SEQ ID NO: 884360 - RNA, 19 nt, Artificial Sequence
  Description of Artificial Sequence: Synthetic oligonucleotide
  Sense strand starting at position 2774 of SEQ ID NO: 588715
ggcagugauuggaaaccga

SEQ ID NO: 884361 - RNA, 19 nt, Artificial Sequence
  Description of Artificial Sequence: Synthetic oligonucleotide
  Antisense strand to SEQ ID NO: 884360
ucgguuuccaaucacugcc

SEQ ID NO: 884362 - RNA, 19 nt, Artificial Sequence
  Description of Artificial Sequence: Synthetic oligonucleotide
  Sense strand starting at position 2892 of SEQ ID NO: 588715
aggaguguuugugugguua

SEQ ID NO: 884363 - RNA, 19 nt, Artificial Sequence
  Description of Artificial Sequence: Synthetic oligonucleotide
  Antisense strand to SEQ ID NO: 884362
uaaccacacaaacacuccu

SEQ ID NO: 884364 - RNA, 19 nt, Artificial Sequence
  Description of Artificial Sequence: Synthetic oligonucleotide
  Sense strand starting at position 2905 of SEQ ID NO: 588715
ugguuaugccaggaucuga

SEQ ID NO: 884365 - RNA, 19 nt, Artificial Sequence
  Description of Artificial Sequence: Synthetic oligonucleotide
  Antisense strand to SEQ ID NO: 884364
ucagauccuggcauaacca

SEQ ID NO: 884366 - RNA, 19 nt, Artificial Sequence
  Description of Artificial Sequence: Synthetic oligonucleotide
  Sense strand starting at position 3049 of SEQ ID NO: 588715
gucacaagucugggagcuu

SEQ ID NO: 884367 - RNA, 19 nt, Artificial Sequence
  Description of Artificial Sequence: Synthetic oligonucleotide
  Antisense strand to SEQ ID NO: 884366
aagcucccagacuugugac

SEQ ID NO: 884368 - RNA, 19 nt, Artificial Sequence
  Description of Artificial Sequence: Synthetic oligonucleotide
  Sense strand starting at position 3390 of SEQ ID NO: 588715
aguucucuagacugugaga

SEQ ID NO: 884369 - RNA, 19 nt, Artificial Sequence
  Description of Artificial Sequence: Synthetic oligonucleotide
  Antisense strand to SEQ ID NO: 884368
ucucacagucuagagaacu

SEQ ID NO: 884370 - RNA, 19 nt, Artificial Sequence
  Description of Artificial Sequence: Synthetic oligonucleotide
  Sense strand starting at position 3392 of SEQ ID NO: 588715
uucucuagacugugagaac

SEQ ID NO: 884371 - RNA, 19 nt, Artificial Sequence
  Description of Artificial Sequence: Synthetic oligonucleotide
  Antisense strand to SEQ ID NO: 884370
guucucacagucuagagaa

SEQ ID NO: 884372 - RNA, 19 nt, Artificial Sequence
  Description of Artificial Sequence: Synthetic oligonucleotide
  Sense strand starting at position 3476 of SEQ ID NO: 588715
cagcauggugggugacauu

SEQ ID NO: 884373 - RNA, 19 nt, Artificial Sequence
  Description of Artificial Sequence: Synthetic oligonucleotide
  Antisense strand to SEQ ID NO: 884372
aaugucacccaccaugcug

SEQ ID NO: 884374 - RNA, 19 nt, Artificial Sequence
  Description of Artificial Sequence: Synthetic oligonucleotide
  Sense strand starting at position 3487 of SEQ ID NO: 588715
gugacauuguuucuuugca

SEQ ID NO: 884375 - RNA, 19 nt, Artificial Sequence
  Description of Artificial Sequence: Synthetic oligonucleotide
  Antisense strand to SEQ ID NO: 884374
ugcaaagaaacaaugucac

SEQ ID NO: 884376 - RNA, 19 nt, Artificial Sequence
  Description of Artificial Sequence: Synthetic oligonucleotide
  Sense strand starting at position 3489 of SEQ ID NO: 588715
gacauuguuucuuugcaga

SEQ ID NO: 884377 - RNA, 19 nt, Artificial Sequence
  Description of Artificial Sequence: Synthetic oligonucleotide
  Antisense strand to SEQ ID NO: 884376
ucugcaaagaaacaauguc

SEQ ID NO: 884378 - RNA, 19 nt, Artificial Sequence
  Description of Artificial Sequence: Synthetic oligonucleotide
  Sense strand starting at position 3573 of SEQ ID NO: 588715
gagguagaguaguucagca

SEQ ID NO: 884379 - RNA, 19 nt, Artificial Sequence
  Description of Artificial Sequence: Synthetic oligonucleotide
  Antisense strand to SEQ ID NO: 884378
ugcugaacuacucuaccuc

SEQ ID NO: 884380 - RNA, 19 nt, Artificial Sequence
  Description of Artificial Sequence: Synthetic oligonucleotide
  Sense strand starting at position 3575 of SEQ ID NO: 588715
gguagaguaguucagcaac

SEQ ID NO: 884381 - RNA, 19 nt, Artificial Sequence
  Description of Artificial Sequence: Synthetic oligonucleotide
  Antisense strand to SEQ ID NO: 884380
guugcugaacuacucuacc

SEQ ID NO: 884382 - RNA, 19 nt, Artificial Sequence
  Description of Artificial Sequence: Synthetic oligonucleotide
  Sense strand starting at position 3640 of SEQ ID NO: 588715
ugggacugucaaugugacu

SEQ ID NO: 884383 - RNA, 19 nt, Artificial Sequence
  Description of Artificial Sequence: Synthetic oligonucleotide
  Antisense strand to SEQ ID NO: 884382
agucacauugacaguccca

SEQ ID NO: 884384 - RNA, 19 nt, Artificial Sequence
  Description of Artificial Sequence: Synthetic oligonucleotide
  Sense strand starting at position 3646 of SEQ ID NO: 588715
ugucaaugugacuggcuau

SEQ ID NO: 884385 - RNA, 19 nt, Artificial Sequence
  Description of Artificial Sequence: Synthetic oligonucleotide
  Antisense strand to SEQ ID NO: 884384
auagccagucacauugaca

SEQ ID NO: 884386 - RNA, 19 nt, Artificial Sequence
  Description of Artificial Sequence: Synthetic oligonucleotide
  Sense strand starting at position 3889 of SEQ ID NO: 588715
gugggcguuauuuaggcua

SEQ ID NO: 884387 - RNA, 19 nt, Artificial Sequence
  Description of Artificial Sequence: Synthetic oligonucleotide
  Antisense strand to SEQ ID NO: 884386
uagccuaaauaacgcccac

SEQ ID NO: 884388 - RNA, 19 nt, Artificial Sequence
  Description of Artificial Sequence: Synthetic oligonucleotide
  Sense strand starting at position 3892 of SEQ ID NO: 588715
ggcguuauuuaggcuaccu

SEQ ID NO: 884389 - RNA, 19 nt, Artificial Sequence
  Description of Artificial Sequence: Synthetic oligonucleotide
  Antisense strand to SEQ ID NO: 884388
agguagccuaaauaacgcc

SEQ ID NO: 884390 - RNA, 19 nt, Artificial Sequence
  Description of Artificial Sequence: Synthetic oligonucleotide
  Sense strand starting at position 273 of SEQ ID NO: 588716
agcugagcccuucgaacuu

SEQ ID NO: 884391 - RNA, 19 nt, Artificial Sequence
  Description of Artificial Sequence: Synthetic oligonucleotide
  Antisense strand to SEQ ID NO: 884390
aaguucgaagggcucagcu

SEQ ID NO: 884392 - RNA, 19 nt, Artificial Sequence
  Description of Artificial Sequence: Synthetic oligonucleotide
  Sense strand starting at position 316 of SEQ ID NO: 588716
gggagcuucugcuucagga

SEQ ID NO: 884393 - RNA, 19 nt, Artificial Sequence
  Description of Artificial Sequence: Synthetic oligonucleotide
  Antisense strand to SEQ ID NO: 884392
uccugaagcagaagcuccc

SEQ ID NO: 884394 - RNA, 19 nt, Artificial Sequence
  Description of Artificial Sequence: Synthetic oligonucleotide
  Sense strand starting at position 439 of SEQ ID NO: 588716
cgcuucugggaccgauuau

SEQ ID NO: 884395 - RNA, 19 nt, Artificial Sequence
  Description of Artificial Sequence: Synthetic oligonucleotide
  Antisense strand to SEQ ID NO: 884394
auaaucggucccagaagcg

SEQ ID NO: 884396 - RNA, 19 nt, Artificial Sequence
  Description of Artificial Sequence: Synthetic oligonucleotide
  Sense strand starting at position 549 of SEQ ID NO: 588716
cuuuaauggguccaguguu

SEQ ID NO: 884397 - RNA, 19 nt, Artificial Sequence
  Description of Artificial Sequence: Synthetic oligonucleotide
  Antisense strand to SEQ ID NO: 884396
aacacuggacccauuaaag

SEQ ID NO: 884398 - RNA, 19 nt, Artificial Sequence
  Description of Artificial Sequence: Synthetic oligonucleotide
  Sense strand starting at position 557 of SEQ ID NO: 588716
gguccaguguucugguuua

SEQ ID NO: 884399 - RNA, 19 nt, Artificial Sequence
  Description of Artificial Sequence: Synthetic oligonucleotide
  Antisense strand to SEQ ID NO: 884398
uaaaccagaacacuggacc

SEQ ID NO: 884400 - RNA, 19 nt, Artificial Sequence
  Description of Artificial Sequence: Synthetic oligonucleotide
  Sense strand starting at position 562 of SEQ ID NO: 588716
aguguucugguuuaggaaa

SEQ ID NO: 884401 - RNA, 19 nt, Artificial Sequence
  Description of Artificial Sequence: Synthetic oligonucleotide
  Antisense strand to SEQ ID NO: 884400
uuuccuaaaccagaacacu

SEQ ID NO: 884402 - RNA, 19 nt, Artificial Sequence
  Description of Artificial Sequence: Synthetic oligonucleotide
  Sense strand starting at position 564 of SEQ ID NO: 588716
uguucugguuuaggaaaua

SEQ ID NO: 884403 - RNA, 19 nt, Artificial Sequence
  Description of Artificial Sequence: Synthetic oligonucleotide
  Antisense strand to SEQ ID NO: 884402
uauuuccuaaaccagaaca

SEQ ID NO: 884404 - RNA, 19 nt, Artificial Sequence
  Description of Artificial Sequence: Synthetic oligonucleotide
  Sense strand starting at position 589 of SEQ ID NO: 588716
uugccauguggcuacagau

SEQ ID NO: 884405 - RNA, 19 nt, Artificial Sequence
  Description of Artificial Sequence: Synthetic oligonucleotide
  Antisense strand to SEQ ID NO: 884404
aucuguagccacauggcaa

SEQ ID NO: 884406 - RNA, 19 nt, Artificial Sequence
  Description of Artificial Sequence: Synthetic oligonucleotide
  Sense strand starting at position 595 of SEQ ID NO: 588716
uguggcuacagauguuuga

SEQ ID NO: 884407 - RNA, 19 nt, Artificial Sequence
  Description of Artificial Sequence: Synthetic oligonucleotide
  Antisense strand to SEQ ID NO: 884406
ucaaacaucuguagccaca

SEQ ID NO: 884408 - RNA, 19 nt, Artificial Sequence
  Description of Artificial Sequence: Synthetic oligonucleotide
  Sense strand starting at position 598 of SEQ ID NO: 588716
ggcuacagauguuugacua

SEQ ID NO: 884409 - RNA, 19 nt, Artificial Sequence
  Description of Artificial Sequence: Synthetic oligonucleotide
  Antisense strand to SEQ ID NO: 884408
uagucaaacaucuguagcc

SEQ ID NO: 884410 - RNA, 19 nt, Artificial Sequence
  Description of Artificial Sequence: Synthetic oligonucleotide
  Sense strand starting at position 599 of SEQ ID NO: 588716
gcuacagauguuugacuaa

SEQ ID NO: 884411 - RNA, 19 nt, Artificial Sequence
  Description of Artificial Sequence: Synthetic oligonucleotide
  Antisense strand to SEQ ID NO: 884410
uuagucaaacaucuguagc

SEQ ID NO: 884412 - RNA, 19 nt, Artificial Sequence
  Description of Artificial Sequence: Synthetic oligonucleotide
  Sense strand starting at position 1258 of SEQ ID NO: 588716
caggcaaaguccuaaagga

SEQ ID NO: 884413 - RNA, 19 nt, Artificial Sequence
  Description of Artificial Sequence: Synthetic oligonucleotide
  Antisense strand to SEQ ID NO: 884412
uccuuuaggacuuugccug

SEQ ID NO: 884414 - RNA, 19 nt, Artificial Sequence
  Description of Artificial Sequence: Synthetic oligonucleotide
  Sense strand starting at position 1350 of SEQ ID NO: 588716
cugcccucgcugugaacaa

SEQ ID NO: 884415 - RNA, 19 nt, Artificial Sequence
  Description of Artificial Sequence: Synthetic oligonucleotide
  Antisense strand to SEQ ID NO: 884414
uuguucacagcgagggcag

SEQ ID NO: 884416 - RNA, 19 nt, Artificial Sequence
  Description of Artificial Sequence: Synthetic oligonucleotide
  Sense strand starting at position 1351 of SEQ ID NO: 588716
ugcccucgcugugaacaau

SEQ ID NO: 884417 - RNA, 19 nt, Artificial Sequence
  Description of Artificial Sequence: Synthetic oligonucleotide
  Antisense strand to SEQ ID NO: 884416
auuguucacagcgagggca

SEQ ID NO: 884418 - RNA, 19 nt, Artificial Sequence
  Description of Artificial Sequence: Synthetic oligonucleotide
  Sense strand starting at position 1385 of SEQ ID NO: 588716
cuggcugucugcugugaca

SEQ ID NO: 884419 - RNA, 19 nt, Artificial Sequence
  Description of Artificial Sequence: Synthetic oligonucleotide
  Antisense strand to SEQ ID NO: 884418
ugucacagcagacagccag

SEQ ID NO: 884420 - RNA, 19 nt, Artificial Sequence
  Description of Artificial Sequence: Synthetic oligonucleotide
  Sense strand starting at position 1561 of SEQ ID NO: 588716
cugggaaauccaggcaucu

SEQ ID NO: 884421 - RNA, 19 nt, Artificial Sequence
  Description of Artificial Sequence: Synthetic oligonucleotide
  Antisense strand to SEQ ID NO: 884420
agaugccuggauuucccag

SEQ ID NO: 884422 - RNA, 19 nt, Artificial Sequence
  Description of Artificial Sequence: Synthetic oligonucleotide
  Sense strand starting at position 1782 of SEQ ID NO: 588716
aaagucuguucuccaggaa

SEQ ID NO: 884423 - RNA, 19 nt, Artificial Sequence
  Description of Artificial Sequence: Synthetic oligonucleotide
  Antisense strand to SEQ ID NO: 884422
uuccuggagaacagacuuu

SEQ ID NO: 884424 - RNA, 19 nt, Artificial Sequence
  Description of Artificial Sequence: Synthetic oligonucleotide
  Sense strand starting at position 1785 of SEQ ID NO: 588716
gucuguucuccaggaagaa

SEQ ID NO: 884425 - RNA, 19 nt, Artificial Sequence
  Description of Artificial Sequence: Synthetic oligonucleotide
  Antisense strand to SEQ ID NO: 884424
uucuuccuggagaacagac

SEQ ID NO: 884426 - RNA, 19 nt, Artificial Sequence
  Description of Artificial Sequence: Synthetic oligonucleotide
  Sense strand starting at position 1814 of SEQ ID NO: 588716
uugagaagugucugucauc

SEQ ID NO: 884427 - RNA, 19 nt, Artificial Sequence
  Description of Artificial Sequence: Synthetic oligonucleotide
  Antisense strand to SEQ ID NO: 884426
gaugacagacacuucucaa

SEQ ID NO: 884428 - RNA, 19 nt, Artificial Sequence
  Description of Artificial Sequence: Synthetic oligonucleotide
  Sense strand starting at position 1815 of SEQ ID NO: 588716
ugagaagugucugucaucu

SEQ ID NO: 884429 - RNA, 19 nt, Artificial Sequence
  Description of Artificial Sequence: Synthetic oligonucleotide
  Antisense strand to SEQ ID NO: 884428
agaugacagacacuucuca

SEQ ID NO: 884430 - RNA, 19 nt, Artificial Sequence
  Description of Artificial Sequence: Synthetic oligonucleotide
  Sense strand starting at position 1819 of SEQ ID NO: 588716
aagugucugucaucugcua

SEQ ID NO: 884431 - RNA, 19 nt, Artificial Sequence
  Description of Artificial Sequence: Synthetic oligonucleotide
  Antisense strand to SEQ ID NO: 884430
uagcagaugacagacacuu

SEQ ID NO: 884432 - RNA, 19 nt, Artificial Sequence
  Description of Artificial Sequence: Synthetic oligonucleotide
  Sense strand starting at position 1963 of SEQ ID NO: 588716
agcgcugccuucuggagaa

SEQ ID NO: 884433 - RNA, 19 nt, Artificial Sequence
  Description of Artificial Sequence: Synthetic oligonucleotide
  Antisense strand to SEQ ID NO: 884432
uucuccagaaggcagcgcu

SEQ ID NO: 884434 - RNA, 19 nt, Artificial Sequence
  Description of Artificial Sequence: Synthetic oligonucleotide
  Sense strand starting at position 2702 of SEQ ID NO: 588716
acgugcuggguccaagauu

SEQ ID NO: 884435 - RNA, 19 nt, Artificial Sequence
  Description of Artificial Sequence: Synthetic oligonucleotide
  Antisense strand to SEQ ID NO: 884434
aaucuuggacccagcacgu

SEQ ID NO: 884436 - RNA, 19 nt, Artificial Sequence
  Description of Artificial Sequence: Synthetic oligonucleotide
  Sense strand starting at position 2710 of SEQ ID NO: 588716
gguccaagauuauugauua

SEQ ID NO: 884437 - RNA, 19 nt, Artificial Sequence
  Description of Artificial Sequence: Synthetic oligonucleotide
  Antisense strand to SEQ ID NO: 884436
uaaucaauaaucuuggacc

SEQ ID NO: 884438 - RNA, 19 nt, Artificial Sequence
  Description of Artificial Sequence: Synthetic oligonucleotide
  Sense strand starting at position 2711 of SEQ ID NO: 588716
guccaagauuauugauuaa

SEQ ID NO: 884439 - RNA, 19 nt, Artificial Sequence
  Description of Artificial Sequence: Synthetic oligonucleotide
  Antisense strand to SEQ ID NO: 884438
uuaaucaauaaucuuggac

SEQ ID NO: 884440 - RNA, 19 nt, Artificial Sequence
  Description of Artificial Sequence: Synthetic oligonucleotide
  Sense strand starting at position 3981 of SEQ ID NO: 588716
cagcuauacgguguuuguu

SEQ ID NO: 884441 - RNA, 19 nt, Artificial Sequence
  Description of Artificial Sequence: Synthetic oligonucleotide
  Antisense strand to SEQ ID NO: 884440
aacaaacaccguauagcug

SEQ ID NO: 884442 - RNA, 19 nt, Artificial Sequence
  Description of Artificial Sequence: Synthetic oligonucleotide
  Sense strand starting at position 150 of SEQ ID NO: 588717
ugcucuuccgagucuguuu

SEQ ID NO: 884443 - RNA, 19 nt, Artificial Sequence
  Description of Artificial Sequence: Synthetic oligonucleotide
  Antisense strand to SEQ ID NO: 884442
aaacagacucggaagagca

SEQ ID NO: 884444 - RNA, 19 nt, Artificial Sequence
  Description of Artificial Sequence: Synthetic oligonucleotide
  Sense strand starting at position 226 of SEQ ID NO: 588717
gccuauaugcuguaaggac

SEQ ID NO: 884445 - RNA, 19 nt, Artificial Sequence
  Description of Artificial Sequence: Synthetic oligonucleotide
  Antisense strand to SEQ ID NO: 884444
guccuuacagcauauaggc

SEQ ID NO: 884446 - RNA, 19 nt, Artificial Sequence
  Description of Artificial Sequence: Synthetic oligonucleotide
  Sense strand starting at position 750 of SEQ ID NO: 588717
gcuggcuuacuggacuuaa

SEQ ID NO: 884447 - RNA, 19 nt, Artificial Sequence
  Description of Artificial Sequence: Synthetic oligonucleotide
  Antisense strand to SEQ ID NO: 884446
uuaaguccaguaagccagc

SEQ ID NO: 884448 - RNA, 19 nt, Artificial Sequence
  Description of Artificial Sequence: Synthetic oligonucleotide
  Sense strand starting at position 816 of SEQ ID NO: 588717
ggaugaccaucuucuaugu

SEQ ID NO: 884449 - RNA, 19 nt, Artificial Sequence
  Description of Artificial Sequence: Synthetic oligonucleotide
  Antisense strand to SEQ ID NO: 884448
acauagaagauggucaucc

SEQ ID NO: 884450 - RNA, 19 nt, Artificial Sequence
  Description of Artificial Sequence: Synthetic oligonucleotide
  Sense strand starting at position 820 of SEQ ID NO: 588717
gaccaucuucuaugugguu

SEQ ID NO: 884451 - RNA, 19 nt, Artificial Sequence
  Description of Artificial Sequence: Synthetic oligonucleotide
  Antisense strand to SEQ ID NO: 884450
aaccacauagaagaugguc

SEQ ID NO: 884452 - RNA, 19 nt, Artificial Sequence
  Description of Artificial Sequence: Synthetic oligonucleotide
  Sense strand starting at position 825 of SEQ ID NO: 588717
ucuucuaugugguuuagaa

SEQ ID NO: 884453 - RNA, 19 nt, Artificial Sequence
  Description of Artificial Sequence: Synthetic oligonucleotide
  Antisense strand to SEQ ID NO: 884452
uucuaaaccacauagaaga

SEQ ID NO: 884454 - RNA, 19 nt, Artificial Sequence
  Description of Artificial Sequence: Synthetic oligonucleotide
  Sense strand starting at position 827 of SEQ ID NO: 588717
uucuaugugguuuagaaga

SEQ ID NO: 884455 - RNA, 19 nt, Artificial Sequence
  Description of Artificial Sequence: Synthetic oligonucleotide
  Antisense strand to SEQ ID NO: 884454
ucuucuaaaccacauagaa

SEQ ID NO: 884456 - RNA, 19 nt, Artificial Sequence
  Description of Artificial Sequence: Synthetic oligonucleotide
  Sense strand starting at position 829 of SEQ ID NO: 588717
cuaugugguuuagaagaca

SEQ ID NO: 884457 - RNA, 19 nt, Artificial Sequence
  Description of Artificial Sequence: Synthetic oligonucleotide
  Antisense strand to SEQ ID NO: 884456
ugucuucuaaaccacauag

SEQ ID NO: 884458 - RNA, 19 nt, Artificial Sequence
  Description of Artificial Sequence: Synthetic oligonucleotide
  Sense strand starting at position 845 of SEQ ID NO: 588717
acaagaggcucguuaccuu

SEQ ID NO: 884459 - RNA, 19 nt, Artificial Sequence
  Description of Artificial Sequence: Synthetic oligonucleotide
  Antisense strand to SEQ ID NO: 884458
aagguaacgagccucuugu

SEQ ID NO: 884460 - RNA, 19 nt, Artificial Sequence
  Description of Artificial Sequence: Synthetic oligonucleotide
  Sense strand starting at position 969 of SEQ ID NO: 588717
aguuguuagcacugagaga

SEQ ID NO: 884461 - RNA, 19 nt, Artificial Sequence
  Description of Artificial Sequence: Synthetic oligonucleotide
  Antisense strand to SEQ ID NO: 884460
ucucucagugcuaacaacu

SEQ ID NO: 884462 - RNA, 19 nt, Artificial Sequence
  Description of Artificial Sequence: Synthetic oligonucleotide
  Sense strand starting at position 970 of SEQ ID NO: 588717
guuguuagcacugagagaa

SEQ ID NO: 884463 - RNA, 19 nt, Artificial Sequence
  Description of Artificial Sequence: Synthetic oligonucleotide
  Antisense strand to SEQ ID NO: 884462
uucucucagugcuaacaac

SEQ ID NO: 884464 - RNA, 19 nt, Artificial Sequence
  Description of Artificial Sequence: Synthetic oligonucleotide
  Sense strand starting at position 1087 of SEQ ID NO: 588717
uuuggugugacagggauaa

SEQ ID NO: 884465 - RNA, 19 nt, Artificial Sequence
  Description of Artificial Sequence: Synthetic oligonucleotide
  Antisense strand to SEQ ID NO: 884464
uuaucccugucacaccaaa

SEQ ID NO: 884466 - RNA, 19 nt, Artificial Sequence
  Description of Artificial Sequence: Synthetic oligonucleotide
  Sense strand starting at position 1089 of SEQ ID NO: 588717
uggugugacagggauaagu

SEQ ID NO: 884467 - RNA, 19 nt, Artificial Sequence
  Description of Artificial Sequence: Synthetic oligonucleotide
  Antisense strand to SEQ ID NO: 884466
acuuaucccugucacacca

SEQ ID NO: 884468 - RNA, 19 nt, Artificial Sequence
  Description of Artificial Sequence: Synthetic oligonucleotide
  Sense strand starting at position 1098 of SEQ ID NO: 588717
agggauaaguccuucccuu

SEQ ID NO: 884469 - RNA, 19 nt, Artificial Sequence
  Description of Artificial Sequence: Synthetic oligonucleotide
  Antisense strand to SEQ ID NO: 884468
aagggaaggacuuaucccu

SEQ ID NO: 884470 - RNA, 19 nt, Artificial Sequence
  Description of Artificial Sequence: Synthetic oligonucleotide
  Sense strand starting at position 1184 of SEQ ID NO: 588717
ggcagaggacugugaacau

SEQ ID NO: 884471 - RNA, 19 nt, Artificial Sequence
  Description of Artificial Sequence: Synthetic oligonucleotide
  Antisense strand to SEQ ID NO: 884470
auguucacaguccucugcc

SEQ ID NO: 884472 - RNA, 19 nt, Artificial Sequence
  Description of Artificial Sequence: Synthetic oligonucleotide
  Sense strand starting at position 1485 of SEQ ID NO: 588717
cuugaugauccuggugauc

SEQ ID NO: 884473 - RNA, 19 nt, Artificial Sequence
  Description of Artificial Sequence: Synthetic oligonucleotide
  Antisense strand to SEQ ID NO: 884472
gaucaccaggaucaucaag

SEQ ID NO: 884474 - RNA, 19 nt, Artificial Sequence
  Description of Artificial Sequence: Synthetic oligonucleotide
  Sense strand starting at position 1852 of SEQ ID NO: 588717
ucgggaaccuucucaccaa

SEQ ID NO: 884475 - RNA, 19 nt, Artificial Sequence
  Description of Artificial Sequence: Synthetic oligonucleotide
  Antisense strand to SEQ ID NO: 884474
uuggugagaagguucccga

SEQ ID NO: 884476 - RNA, 19 nt, Artificial Sequence
  Description of Artificial Sequence: Synthetic oligonucleotide
  Sense strand starting at position 2425 of SEQ ID NO: 588717
ugaagaaugcaacgucaca

SEQ ID NO: 884477 - RNA, 19 nt, Artificial Sequence
  Description of Artificial Sequence: Synthetic oligonucleotide
  Antisense strand to SEQ ID NO: 884476
ugugacguugcauucuuca

SEQ ID NO: 884478 - RNA, 19 nt, Artificial Sequence
  Description of Artificial Sequence: Synthetic oligonucleotide
  Sense strand starting at position 3220 of SEQ ID NO: 588717
ccagccucccacugagaau

SEQ ID NO: 884479 - RNA, 19 nt, Artificial Sequence
  Description of Artificial Sequence: Synthetic oligonucleotide
  Antisense strand to SEQ ID NO: 884478
auucucagugggaggcugg

SEQ ID NO: 884480 - RNA, 19 nt, Artificial Sequence
  Description of Artificial Sequence: Synthetic oligonucleotide
  Sense strand starting at position 3223 of SEQ ID NO: 588717
gccucccacugagaauuaa

SEQ ID NO: 884481 - RNA, 19 nt, Artificial Sequence
  Description of Artificial Sequence: Synthetic oligonucleotide
  Antisense strand to SEQ ID NO: 884480
uuaauucucagugggaggc

SEQ ID NO: 884482 - RNA, 19 nt, Artificial Sequence
  Description of Artificial Sequence: Synthetic oligonucleotide
  Sense strand starting at position 3301 of SEQ ID NO: 588717
ucgauagaagccugauuau

SEQ ID NO: 884483 - RNA, 19 nt, Artificial Sequence
  Description of Artificial Sequence: Synthetic oligonucleotide
  Antisense strand to SEQ ID NO: 884482
auaaucaggcuucuaucga

SEQ ID NO: 884484 - RNA, 19 nt, Artificial Sequence
  Description of Artificial Sequence: Synthetic oligonucleotide
  Sense strand starting at position 3307 of SEQ ID NO: 588717
gaagccugauuauagagaa

SEQ ID NO: 884485 - RNA, 19 nt, Artificial Sequence
  Description of Artificial Sequence: Synthetic oligonucleotide
  Antisense strand to SEQ ID NO: 884484
uucucuauaaucaggcuuc

SEQ ID NO: 884486 - RNA, 19 nt, Artificial Sequence
  Description of Artificial Sequence: Synthetic oligonucleotide
  Sense strand starting at position 3343 of SEQ ID NO: 588717
agcaaaugcuaugauaaau

SEQ ID NO: 884487 - RNA, 19 nt, Artificial Sequence
  Description of Artificial Sequence: Synthetic oligonucleotide
  Antisense strand to SEQ ID NO: 884486
auuuaucauagcauuugcu

SEQ ID NO: 884488 - RNA, 19 nt, Artificial Sequence
  Description of Artificial Sequence: Synthetic oligonucleotide
  Sense strand starting at position 3406 of SEQ ID NO: 588717
ggaacuccgcuuggauaga

SEQ ID NO: 884489 - RNA, 19 nt, Artificial Sequence
  Description of Artificial Sequence: Synthetic oligonucleotide
  Antisense strand to SEQ ID NO: 884488
ucuauccaagcggaguucc

SEQ ID NO: 884490 - RNA, 19 nt, Artificial Sequence
  Description of Artificial Sequence: Synthetic oligonucleotide
  Sense strand starting at position 3407 of SEQ ID NO: 588717
gaacuccgcuuggauagaa

SEQ ID NO: 884491 - RNA, 19 nt, Artificial Sequence
  Description of Artificial Sequence: Synthetic oligonucleotide
  Antisense strand to SEQ ID NO: 884490
uucuauccaagcggaguuc

SEQ ID NO: 884492 - RNA, 19 nt, Artificial Sequence
  Description of Artificial Sequence: Synthetic oligonucleotide
  Sense strand starting at position 3480 of SEQ ID NO: 588717
uggaauugggcucaguguu

SEQ ID NO: 884493 - RNA, 19 nt, Artificial Sequence
  Description of Artificial Sequence: Synthetic oligonucleotide
  Antisense strand to SEQ ID NO: 884492
aacacugagcccaauucca

SEQ ID NO: 884494 - RNA, 19 nt, Artificial Sequence
  Description of Artificial Sequence: Synthetic oligonucleotide
  Sense strand starting at position 3488 of SEQ ID NO: 588717
ggcucaguguugucaagua

SEQ ID NO: 884495 - RNA, 19 nt, Artificial Sequence
  Description of Artificial Sequence: Synthetic oligonucleotide
  Antisense strand to SEQ ID NO: 884494
uacuugacaacacugagcc

SEQ ID NO: 884496 - RNA, 19 nt, Artificial Sequence
  Description of Artificial Sequence: Synthetic oligonucleotide
  Sense strand starting at position 3597 of SEQ ID NO: 588717
aguaauaggccaggugcaa

SEQ ID NO: 884497 - RNA, 19 nt, Artificial Sequence
  Description of Artificial Sequence: Synthetic oligonucleotide
  Antisense strand to SEQ ID NO: 884496
uugcaccuggccuauuacu

SEQ ID NO: 884498 - RNA, 19 nt, Artificial Sequence
  Description of Artificial Sequence: Synthetic oligonucleotide
  Sense strand starting at position 3609 of SEQ ID NO: 588717
ggugcaaucccaggcugau

SEQ ID NO: 884499 - RNA, 19 nt, Artificial Sequence
  Description of Artificial Sequence: Synthetic oligonucleotide
  Antisense strand to SEQ ID NO: 884498
aucagccugggauugcacc

SEQ ID NO: 884500 - RNA, 19 nt, Artificial Sequence
  Description of Artificial Sequence: Synthetic oligonucleotide
  Sense strand starting at position 3622 of SEQ ID NO: 588717
gcugauaguuuaucuuuga

SEQ ID NO: 884501 - RNA, 19 nt, Artificial Sequence
  Description of Artificial Sequence: Synthetic oligonucleotide
  Antisense strand to SEQ ID NO: 884500
ucaaagauaaacuaucagc

SEQ ID NO: 884502 - RNA, 19 nt, Artificial Sequence
  Description of Artificial Sequence: Synthetic oligonucleotide
  Sense strand starting at position 3623 of SEQ ID NO: 588717
cugauaguuuaucuuugau

SEQ ID NO: 884503 - RNA, 19 nt, Artificial Sequence
  Description of Artificial Sequence: Synthetic oligonucleotide
  Antisense strand to SEQ ID NO: 884502
aucaaagauaaacuaucag

SEQ ID NO: 884504 - RNA, 19 nt, Artificial Sequence
  Description of Artificial Sequence: Synthetic oligonucleotide
  Sense strand starting at position 3647 of SEQ ID NO: 588717
uuaugaaacuguuuagaac

SEQ ID NO: 884505 - RNA, 19 nt, Artificial Sequence
  Description of Artificial Sequence: Synthetic oligonucleotide
  Antisense strand to SEQ ID NO: 884504
guucuaaacaguuucauaa

SEQ ID NO: 884506 - RNA, 19 nt, Artificial Sequence
  Description of Artificial Sequence: Synthetic oligonucleotide
  Sense strand starting at position 3656 of SEQ ID NO: 588717
uguuuagaacagggaguuu

SEQ ID NO: 884507 - RNA, 19 nt, Artificial Sequence
  Description of Artificial Sequence: Synthetic oligonucleotide
  Antisense strand to SEQ ID NO: 884506
aaacucccuguucuaaaca

SEQ ID NO: 884508 - RNA, 19 nt, Artificial Sequence
  Description of Artificial Sequence: Synthetic oligonucleotide
  Sense strand starting at position 3665 of SEQ ID NO: 588717
cagggaguuuguuuauuac

SEQ ID NO: 884509 - RNA, 19 nt, Artificial Sequence
  Description of Artificial Sequence: Synthetic oligonucleotide
  Antisense strand to SEQ ID NO: 884508
guaauaaacaaacucccug

SEQ ID NO: 884510 - RNA, 19 nt, Artificial Sequence
  Description of Artificial Sequence: Synthetic oligonucleotide
  Sense strand starting at position 3668 of SEQ ID NO: 588717
ggaguuuguuuauuacugu

SEQ ID NO: 884511 - RNA, 19 nt, Artificial Sequence
  Description of Artificial Sequence: Synthetic oligonucleotide
  Antisense strand to SEQ ID NO: 884510
acaguaauaaacaaacucc

SEQ ID NO: 884512 - RNA, 19 nt, Artificial Sequence
  Description of Artificial Sequence: Synthetic oligonucleotide
  Sense strand starting at position 3783 of SEQ ID NO: 588717
uaaggugguaguuagugau

SEQ ID NO: 884513 - RNA, 19 nt, Artificial Sequence
  Description of Artificial Sequence: Synthetic oligonucleotide
  Antisense strand to SEQ ID NO: 884512
aucacuaacuaccaccuua

SEQ ID NO: 884514 - RNA, 19 nt, Artificial Sequence
  Description of Artificial Sequence: Synthetic oligonucleotide
  Sense strand starting at position 3789 of SEQ ID NO: 588717
gguaguuagugauugccua

SEQ ID NO: 884515 - RNA, 19 nt, Artificial Sequence
  Description of Artificial Sequence: Synthetic oligonucleotide
  Antisense strand to SEQ ID NO: 884514
uaggcaaucacuaacuacc

SEQ ID NO: 884516 - RNA, 19 nt, Artificial Sequence
  Description of Artificial Sequence: Synthetic oligonucleotide
  Sense strand starting at position 3790 of SEQ ID NO: 588717
guaguuagugauugccuaa

SEQ ID NO: 884517 - RNA, 19 nt, Artificial Sequence
  Description of Artificial Sequence: Synthetic oligonucleotide
  Antisense strand to SEQ ID NO: 884516
uuaggcaaucacuaacuac

SEQ ID NO: 884518 - RNA, 19 nt, Artificial Sequence
  Description of Artificial Sequence: Synthetic oligonucleotide
  Sense strand starting at position 3890 of SEQ ID NO: 588717
ugcaguccuacuuagggau

SEQ ID NO: 884519 - RNA, 19 nt, Artificial Sequence
  Description of Artificial Sequence: Synthetic oligonucleotide
  Antisense strand to SEQ ID NO: 884518
aucccuaaguaggacugca

SEQ ID NO: 884520 - RNA, 19 nt, Artificial Sequence
  Description of Artificial Sequence: Synthetic oligonucleotide
  Sense strand starting at position 3912 of SEQ ID NO: 588717
cugccuucugcuuauguua

SEQ ID NO: 884521 - RNA, 19 nt, Artificial Sequence
  Description of Artificial Sequence: Synthetic oligonucleotide
  Antisense strand to SEQ ID NO: 884520
uaacauaagcagaaggcag

SEQ ID NO: 884522 - RNA, 19 nt, Artificial Sequence
  Description of Artificial Sequence: Synthetic oligonucleotide
  Sense strand starting at position 334 of SEQ ID NO: 588718
ugccacaagacuugagaga

SEQ ID NO: 884523 - RNA, 19 nt, Artificial Sequence
  Description of Artificial Sequence: Synthetic oligonucleotide
  Antisense strand to SEQ ID NO: 884522
ucucucaagucuuguggca

SEQ ID NO: 884524 - RNA, 19 nt, Artificial Sequence
  Description of Artificial Sequence: Synthetic oligonucleotide
  Sense strand starting at position 363 of SEQ ID NO: 588718
gcuucuggcacuuaaaggu

SEQ ID NO: 884525 - RNA, 19 nt, Artificial Sequence
  Description of Artificial Sequence: Synthetic oligonucleotide
  Antisense strand to SEQ ID NO: 884524
accuuuaagugccagaagc

SEQ ID NO: 884526 - RNA, 19 nt, Artificial Sequence
  Description of Artificial Sequence: Synthetic oligonucleotide
  Sense strand starting at position 369 of SEQ ID NO: 588718
ggcacuuaaagguaugcaa

SEQ ID NO: 884527 - RNA, 19 nt, Artificial Sequence
  Description of Artificial Sequence: Synthetic oligonucleotide
  Antisense strand to SEQ ID NO: 884526
uugcauaccuuuaagugcc

SEQ ID NO: 884528 - RNA, 19 nt, Artificial Sequence
  Description of Artificial Sequence: Synthetic oligonucleotide
  Sense strand starting at position 384 of SEQ ID NO: 588718
gcaacaaagugauucugua

SEQ ID NO: 884529 - RNA, 19 nt, Artificial Sequence
  Description of Artificial Sequence: Synthetic oligonucleotide
  Antisense strand to SEQ ID NO: 884528
uacagaaucacuuuguugc

SEQ ID NO: 884530 - RNA, 19 nt, Artificial Sequence
  Description of Artificial Sequence: Synthetic oligonucleotide
  Sense strand starting at position 388 of SEQ ID NO: 588718
caaagugauucuguaagca

SEQ ID NO: 884531 - RNA, 19 nt, Artificial Sequence
  Description of Artificial Sequence: Synthetic oligonucleotide
  Antisense strand to SEQ ID NO: 884530
ugcuuacagaaucacuuug

SEQ ID NO: 884532 - RNA, 19 nt, Artificial Sequence
  Description of Artificial Sequence: Synthetic oligonucleotide
  Sense strand starting at position 392 of SEQ ID NO: 588718
gugauucuguaagcaaucu

SEQ ID NO: 884533 - RNA, 19 nt, Artificial Sequence
  Description of Artificial Sequence: Synthetic oligonucleotide
  Antisense strand to SEQ ID NO: 884532
agauugcuuacagaaucac

SEQ ID NO: 884534 - RNA, 19 nt, Artificial Sequence
  Description of Artificial Sequence: Synthetic oligonucleotide
  Sense strand starting at position 489 of SEQ ID NO: 588718
cugcauuuguccucacuau

SEQ ID NO: 884535 - RNA, 19 nt, Artificial Sequence
  Description of Artificial Sequence: Synthetic oligonucleotide
  Antisense strand to SEQ ID NO: 884534
auagugaggacaaaugcag

SEQ ID NO: 884536 - RNA, 19 nt, Artificial Sequence
  Description of Artificial Sequence: Synthetic oligonucleotide
  Sense strand starting at position 717 of SEQ ID NO: 588718
guucucaauccagggaaau

SEQ ID NO: 884537 - RNA, 19 nt, Artificial Sequence
  Description of Artificial Sequence: Synthetic oligonucleotide
  Antisense strand to SEQ ID NO: 884536
auuucccuggauugagaac

SEQ ID NO: 884538 - RNA, 19 nt, Artificial Sequence
  Description of Artificial Sequence: Synthetic oligonucleotide
  Sense strand starting at position 834 of SEQ ID NO: 588718
gaaacccugcucuagagua

SEQ ID NO: 884539 - RNA, 19 nt, Artificial Sequence
  Description of Artificial Sequence: Synthetic oligonucleotide
  Antisense strand to SEQ ID NO: 884538
uacucuagagcaggguuuc

SEQ ID NO: 884540 - RNA, 19 nt, Artificial Sequence
  Description of Artificial Sequence: Synthetic oligonucleotide
  Sense strand starting at position 931 of SEQ ID NO: 588718
cauaaaugcuuguugaaag

SEQ ID NO: 884541 - RNA, 19 nt, Artificial Sequence
  Description of Artificial Sequence: Synthetic oligonucleotide
  Antisense strand to SEQ ID NO: 884540
cuuucaacaagcauuuaug

SEQ ID NO: 884542 - RNA, 19 nt, Artificial Sequence
  Description of Artificial Sequence: Synthetic oligonucleotide
  Sense strand starting at position 1126 of SEQ ID NO: 588718
uuaccaggauccguugauu

SEQ ID NO: 884543 - RNA, 19 nt, Artificial Sequence
  Description of Artificial Sequence: Synthetic oligonucleotide
  Antisense strand to SEQ ID NO: 884542
aaucaacggauccugguaa

SEQ ID NO: 884544 - RNA, 19 nt, Artificial Sequence
  Description of Artificial Sequence: Synthetic oligonucleotide
  Sense strand starting at position 1238 of SEQ ID NO: 588718
aagagugcagcccaagaau

SEQ ID NO: 884545 - RNA, 19 nt, Artificial Sequence
  Description of Artificial Sequence: Synthetic oligonucleotide
  Antisense strand to SEQ ID NO: 884544
auucuugggcugcacucuu

SEQ ID NO: 884546 - RNA, 19 nt, Artificial Sequence
  Description of Artificial Sequence: Synthetic oligonucleotide
  Sense strand starting at position 1247 of SEQ ID NO: 588718
gcccaagaaugagaugaga

SEQ ID NO: 884547 - RNA, 19 nt, Artificial Sequence
  Description of Artificial Sequence: Synthetic oligonucleotide
  Antisense strand to SEQ ID NO: 884546
ucucaucucauucuugggc

SEQ ID NO: 884548 - RNA, 19 nt, Artificial Sequence
  Description of Artificial Sequence: Synthetic oligonucleotide
  Sense strand starting at position 1452 of SEQ ID NO: 588718
ggaaugucucgcggaagga

SEQ ID NO: 884549 - RNA, 19 nt, Artificial Sequence
  Description of Artificial Sequence: Synthetic oligonucleotide
  Antisense strand to SEQ ID NO: 884548
uccuuccgcgagacauucc

SEQ ID NO: 884550 - RNA, 19 nt, Artificial Sequence
  Description of Artificial Sequence: Synthetic oligonucleotide
  Sense strand starting at position 2223 of SEQ ID NO: 588718
aagagagugucgucucucu

SEQ ID NO: 884551 - RNA, 19 nt, Artificial Sequence
  Description of Artificial Sequence: Synthetic oligonucleotide
  Antisense strand to SEQ ID NO: 884550
agagagacgacacucucuu

SEQ ID NO: 884552 - RNA, 19 nt, Artificial Sequence
  Description of Artificial Sequence: Synthetic oligonucleotide
  Sense strand starting at position 2239 of SEQ ID NO: 588718
ucucuccuaccgugacaaa

SEQ ID NO: 884553 - RNA, 19 nt, Artificial Sequence
  Description of Artificial Sequence: Synthetic oligonucleotide
  Antisense strand to SEQ ID NO: 884552
uuugucacgguaggagaga

SEQ ID NO: 884554 - RNA, 19 nt, Artificial Sequence
  Description of Artificial Sequence: Synthetic oligonucleotide
  Sense strand starting at position 2293 of SEQ ID NO: 588718
uuuagaauucucugacagg

SEQ ID NO: 884555 - RNA, 19 nt, Artificial Sequence
  Description of Artificial Sequence: Synthetic oligonucleotide
  Antisense strand to SEQ ID NO: 884554
ccugucagagaauucuaaa

SEQ ID NO: 884556 - RNA, 19 nt, Artificial Sequence
  Description of Artificial Sequence: Synthetic oligonucleotide
  Sense strand starting at position 2294 of SEQ ID NO: 588718
uuagaauucucugacagga

SEQ ID NO: 884557 - RNA, 19 nt, Artificial Sequence
  Description of Artificial Sequence: Synthetic oligonucleotide
  Antisense strand to SEQ ID NO: 884556
uccugucagagaauucuaa

SEQ ID NO: 884558 - RNA, 19 nt, Artificial Sequence
  Description of Artificial Sequence: Synthetic oligonucleotide
  Sense strand starting at position 2296 of SEQ ID NO: 588718
agaauucucugacaggaac

SEQ ID NO: 884559 - RNA, 19 nt, Artificial Sequence
  Description of Artificial Sequence: Synthetic oligonucleotide
  Antisense strand to SEQ ID NO: 884558
guuccugucagagaauucu

SEQ ID NO: 884560 - RNA, 19 nt, Artificial Sequence
  Description of Artificial Sequence: Synthetic oligonucleotide
  Sense strand starting at position 2402 of SEQ ID NO: 588718
gguacaaacuuuguccaca

SEQ ID NO: 884561 - RNA, 19 nt, Artificial Sequence
  Description of Artificial Sequence: Synthetic oligonucleotide
  Antisense strand to SEQ ID NO: 884560
uguggacaaaguuuguacc

SEQ ID NO: 884562 - RNA, 19 nt, Artificial Sequence
  Description of Artificial Sequence: Synthetic oligonucleotide
  Sense strand starting at position 2515 of SEQ ID NO: 588718
agccuuugggcaggagauu

SEQ ID NO: 884563 - RNA, 19 nt, Artificial Sequence
  Description of Artificial Sequence: Synthetic oligonucleotide
  Antisense strand to SEQ ID NO: 884562
aaucuccugcccaaaggcu

SEQ ID NO: 884564 - RNA, 19 nt, Artificial Sequence
  Description of Artificial Sequence: Synthetic oligonucleotide
  Sense strand starting at position 2682 of SEQ ID NO: 588718
ugcccaaagaugcguacua

SEQ ID NO: 884565 - RNA, 19 nt, Artificial Sequence
  Description of Artificial Sequence: Synthetic oligonucleotide
  Antisense strand to SEQ ID NO: 884564
uaguacgcaucuuugggca

SEQ ID NO: 884566 - RNA, 19 nt, Artificial Sequence
  Description of Artificial Sequence: Synthetic oligonucleotide
  Sense strand starting at position 2683 of SEQ ID NO: 588718
gcccaaagaugcguacuau

SEQ ID NO: 884567 - RNA, 19 nt, Artificial Sequence
  Description of Artificial Sequence: Synthetic oligonucleotide
  Antisense strand to SEQ ID NO: 884566
auaguacgcaucuuugggc

SEQ ID NO: 884568 - RNA, 19 nt, Artificial Sequence
  Description of Artificial Sequence: Synthetic oligonucleotide
  Sense strand starting at position 2684 of SEQ ID NO: 588718
cccaaagaugcguacuauu

SEQ ID NO: 884569 - RNA, 19 nt, Artificial Sequence
  Description of Artificial Sequence: Synthetic oligonucleotide
  Antisense strand to SEQ ID NO: 884568
aauaguacgcaucuuuggg

SEQ ID NO: 884570 - RNA, 19 nt, Artificial Sequence
  Description of Artificial Sequence: Synthetic oligonucleotide
  Sense strand starting at position 2695 of SEQ ID NO: 588718
guacuauugaagggcaaga

SEQ ID NO: 884571 - RNA, 19 nt, Artificial Sequence
  Description of Artificial Sequence: Synthetic oligonucleotide
  Antisense strand to SEQ ID NO: 884570
ucuugcccuucaauaguac

SEQ ID NO: 884572 - RNA, 19 nt, Artificial Sequence
  Description of Artificial Sequence: Synthetic oligonucleotide
  Sense strand starting at position 2801 of SEQ ID NO: 588718
ccaggauccuaggaauaac

SEQ ID NO: 884573 - RNA, 19 nt, Artificial Sequence
  Description of Artificial Sequence: Synthetic oligonucleotide
  Antisense strand to SEQ ID NO: 884572
guuauuccuaggauccugg

SEQ ID NO: 884574 - RNA, 19 nt, Artificial Sequence
  Description of Artificial Sequence: Synthetic oligonucleotide
  Sense strand starting at position 2926 of SEQ ID NO: 588718
uagaguaaguugucaaccu

SEQ ID NO: 884575 - RNA, 19 nt, Artificial Sequence
  Description of Artificial Sequence: Synthetic oligonucleotide
  Antisense strand to SEQ ID NO: 884574
agguugacaacuuacucua

SEQ ID NO: 884576 - RNA, 19 nt, Artificial Sequence
  Description of Artificial Sequence: Synthetic oligonucleotide
  Sense strand starting at position 3077 of SEQ ID NO: 588718
gcaguucuaucccuugauu

SEQ ID NO: 884577 - RNA, 19 nt, Artificial Sequence
  Description of Artificial Sequence: Synthetic oligonucleotide
  Antisense strand to SEQ ID NO: 884576
aaucaagggauagaacugc

SEQ ID NO: 884578 - RNA, 19 nt, Artificial Sequence
  Description of Artificial Sequence: Synthetic oligonucleotide
  Sense strand starting at position 3080 of SEQ ID NO: 588718
guucuaucccuugauucca

SEQ ID NO: 884579 - RNA, 19 nt, Artificial Sequence
  Description of Artificial Sequence: Synthetic oligonucleotide
  Antisense strand to SEQ ID NO: 884578
uggaaucaagggauagaac

SEQ ID NO: 884580 - RNA, 19 nt, Artificial Sequence
  Description of Artificial Sequence: Synthetic oligonucleotide
  Sense strand starting at position 3322 of SEQ ID NO: 588718
ggaaauuagcacugguaca

SEQ ID NO: 884581 - RNA, 19 nt, Artificial Sequence
  Description of Artificial Sequence: Synthetic oligonucleotide
  Antisense strand to SEQ ID NO: 884580
uguaccagugcuaauuucc

SEQ ID NO: 884582 - RNA, 19 nt, Artificial Sequence
  Description of Artificial Sequence: Synthetic oligonucleotide
  Sense strand starting at position 3336 of SEQ ID NO: 588718
guacauuaccaccauguaa

SEQ ID NO: 884583 - RNA, 19 nt, Artificial Sequence
  Description of Artificial Sequence: Synthetic oligonucleotide
  Antisense strand to SEQ ID NO: 884582
uuacauggugguaauguac

SEQ ID NO: 884584 - RNA, 19 nt, Artificial Sequence
  Description of Artificial Sequence: Synthetic oligonucleotide
  Sense strand starting at position 3725 of SEQ ID NO: 588718
auguccugucaagaaucau

SEQ ID NO: 884585 - RNA, 19 nt, Artificial Sequence
  Description of Artificial Sequence: Synthetic oligonucleotide
  Antisense strand to SEQ ID NO: 884584
augauucuugacaggacau

SEQ ID NO: 884586 - RNA, 19 nt, Artificial Sequence
  Description of Artificial Sequence: Synthetic oligonucleotide
  Sense strand starting at position 3880 of SEQ ID NO: 588718
gagcuuaauugugugauug

SEQ ID NO: 884587 - RNA, 19 nt, Artificial Sequence
  Description of Artificial Sequence: Synthetic oligonucleotide
  Antisense strand to SEQ ID NO: 884586
caaucacacaauuaagcuc

SEQ ID NO: 884588 - RNA, 19 nt, Artificial Sequence
  Description of Artificial Sequence: Synthetic oligonucleotide
  Sense strand starting at position 3881 of SEQ ID NO: 588718
agcuuaauugugugauugu

SEQ ID NO: 884589 - RNA, 19 nt, Artificial Sequence
  Description of Artificial Sequence: Synthetic oligonucleotide
  Antisense strand to SEQ ID NO: 884588
acaaucacacaauuaagcu

SEQ ID NO: 884590 - RNA, 19 nt, Artificial Sequence
  Description of Artificial Sequence: Synthetic oligonucleotide
  Sense strand starting at position 3892 of SEQ ID NO: 588718
gugauugucucacccauug

SEQ ID NO: 884591 - RNA, 19 nt, Artificial Sequence
  Description of Artificial Sequence: Synthetic oligonucleotide
  Antisense strand to SEQ ID NO: 884590
caaugggugagacaaucac

SEQ ID NO: 884592 - RNA, 19 nt, Artificial Sequence
  Description of Artificial Sequence: Synthetic oligonucleotide
  Sense strand starting at position 3897 of SEQ ID NO: 588718
ugucucacccauugauugu

SEQ ID NO: 884593 - RNA, 19 nt, Artificial Sequence
  Description of Artificial Sequence: Synthetic oligonucleotide
  Antisense strand to SEQ ID NO: 884592
acaaucaaugggugagaca

SEQ ID NO: 884594 - RNA, 19 nt, Artificial Sequence
  Description of Artificial Sequence: Synthetic oligonucleotide
  Sense strand starting at position 3904 of SEQ ID NO: 588718
cccauugauuguuuccuca

SEQ ID NO: 884595 - RNA, 19 nt, Artificial Sequence
  Description of Artificial Sequence: Synthetic oligonucleotide
  Antisense strand to SEQ ID NO: 884594
ugaggaaacaaucaauggg

SEQ ID NO: 884596 - RNA, 19 nt, Artificial Sequence
  Description of Artificial Sequence: Synthetic oligonucleotide
  Sense strand starting at position 3907 of SEQ ID NO: 588718
auugauuguuuccucacua

SEQ ID NO: 884597 - RNA, 19 nt, Artificial Sequence
  Description of Artificial Sequence: Synthetic oligonucleotide
  Antisense strand to SEQ ID NO: 884596
uagugaggaaacaaucaau

SEQ ID NO: 884598 - RNA, 19 nt, Artificial Sequence
  Description of Artificial Sequence: Synthetic oligonucleotide
  Sense strand starting at position 3947 of SEQ ID NO: 588718
aaacacuuuggagguuaau

SEQ ID NO: 884599 - RNA, 19 nt, Artificial Sequence
  Description of Artificial Sequence: Synthetic oligonucleotide
  Antisense strand to SEQ ID NO: 884598
auuaaccuccaaaguguuu

SEQ ID NO: 884600 - RNA, 19 nt, Artificial Sequence
  Description of Artificial Sequence: Synthetic oligonucleotide
  Sense strand starting at position 3953 of SEQ ID NO: 588718
uuuggagguuaauaaacaa

SEQ ID NO: 884601 - RNA, 19 nt, Artificial Sequence
  Description of Artificial Sequence: Synthetic oligonucleotide
  Antisense strand to SEQ ID NO: 884600
uuguuuauuaaccuccaaa

SEQ ID NO: 884602 - RNA, 19 nt, Artificial Sequence
  Description of Artificial Sequence: Synthetic oligonucleotide
  Sense strand starting at position 228 of SEQ ID NO: 588719
aagugcucucaacagugaa

SEQ ID NO: 884603 - RNA, 19 nt, Artificial Sequence
  Description of Artificial Sequence: Synthetic oligonucleotide
  Antisense strand to SEQ ID NO: 884602
uucacuguugagagcacuu

SEQ ID NO: 884604 - RNA, 19 nt, Artificial Sequence
  Description of Artificial Sequence: Synthetic oligonucleotide
  Sense strand starting at position 241 of SEQ ID NO: 588719
agugaagacuuacuuccaa

SEQ ID NO: 884605 - RNA, 19 nt, Artificial Sequence
  Description of Artificial Sequence: Synthetic oligonucleotide
  Antisense strand to SEQ ID NO: 884604
uuggaaguaagucuucacu

SEQ ID NO: 884606 - RNA, 19 nt, Artificial Sequence
  Description of Artificial Sequence: Synthetic oligonucleotide
  Sense strand starting at position 503 of SEQ ID NO: 588719
cgccuccugucacaaagua

SEQ ID NO: 884607 - RNA, 19 nt, Artificial Sequence
  Description of Artificial Sequence: Synthetic oligonucleotide
  Antisense strand to SEQ ID NO: 884606
uacuuugugacaggaggcg

SEQ ID NO: 884608 - RNA, 19 nt, Artificial Sequence
  Description of Artificial Sequence: Synthetic oligonucleotide
  Sense strand starting at position 892 of SEQ ID NO: 588719
agugaacucgggugggaau

SEQ ID NO: 884609 - RNA, 19 nt, Artificial Sequence
  Description of Artificial Sequence: Synthetic oligonucleotide
  Antisense strand to SEQ ID NO: 884608
auucccacccgaguucacu

SEQ ID NO: 884610 - RNA, 19 nt, Artificial Sequence
  Description of Artificial Sequence: Synthetic oligonucleotide
  Sense strand starting at position 893 of SEQ ID NO: 588719
gugaacucgggugggaauu

SEQ ID NO: 884611 - RNA, 19 nt, Artificial Sequence
  Description of Artificial Sequence: Synthetic oligonucleotide
  Antisense strand to SEQ ID NO: 884610
aauucccacccgaguucac

SEQ ID NO: 884612 - RNA, 19 nt, Artificial Sequence
  Description of Artificial Sequence: Synthetic oligonucleotide
  Sense strand starting at position 987 of SEQ ID NO: 588719
cgagaacacugcuaaggaa

SEQ ID NO: 884613 - RNA, 19 nt, Artificial Sequence
  Description of Artificial Sequence: Synthetic oligonucleotide
  Antisense strand to SEQ ID NO: 884612
uuccuuagcaguguucucg

SEQ ID NO: 884614 - RNA, 19 nt, Artificial Sequence
  Description of Artificial Sequence: Synthetic oligonucleotide
  Sense strand starting at position 1087 of SEQ ID NO: 588719
gugccaucucagcugcuua

SEQ ID NO: 884615 - RNA, 19 nt, Artificial Sequence
  Description of Artificial Sequence: Synthetic oligonucleotide
  Antisense strand to SEQ ID NO: 884614
uaagcagcugagauggcac

SEQ ID NO: 884616 - RNA, 19 nt, Artificial Sequence
  Description of Artificial Sequence: Synthetic oligonucleotide
  Sense strand starting at position 1458 of SEQ ID NO: 588719
ucccaucuguccugggagu

SEQ ID NO: 884617 - RNA, 19 nt, Artificial Sequence
  Description of Artificial Sequence: Synthetic oligonucleotide
  Antisense strand to SEQ ID NO: 884616
acucccaggacagauggga

SEQ ID NO: 884618 - RNA, 19 nt, Artificial Sequence
  Description of Artificial Sequence: Synthetic oligonucleotide
  Sense strand starting at position 2056 of SEQ ID NO: 588719
aggagaggcaggugugaaa

SEQ ID NO: 884619 - RNA, 19 nt, Artificial Sequence
  Description of Artificial Sequence: Synthetic oligonucleotide
  Antisense strand to SEQ ID NO: 884618
uuucacaccugccucuccu

SEQ ID NO: 884620 - RNA, 19 nt, Artificial Sequence
  Description of Artificial Sequence: Synthetic oligonucleotide
  Sense strand starting at position 2113 of SEQ ID NO: 588719
gugccaggauuucugugua

SEQ ID NO: 884621 - RNA, 19 nt, Artificial Sequence
  Description of Artificial Sequence: Synthetic oligonucleotide
  Antisense strand to SEQ ID NO: 884620
uacacagaaauccuggcac

SEQ ID NO: 884622 - RNA, 19 nt, Artificial Sequence
  Description of Artificial Sequence: Synthetic oligonucleotide
  Sense strand starting at position 2202 of SEQ ID NO: 588719
cuccaucuggcgugaagau

SEQ ID NO: 884623 - RNA, 19 nt, Artificial Sequence
  Description of Artificial Sequence: Synthetic oligonucleotide
  Antisense strand to SEQ ID NO: 884622
aucuucacgccagauggag

SEQ ID NO: 884624 - RNA, 19 nt, Artificial Sequence
  Description of Artificial Sequence: Synthetic oligonucleotide
  Sense strand starting at position 2211 of SEQ ID NO: 588719
gcgugaagaucuuaauucu

SEQ ID NO: 884625 - RNA, 19 nt, Artificial Sequence
  Description of Artificial Sequence: Synthetic oligonucleotide
  Antisense strand to SEQ ID NO: 884624
agaauuaagaucuucacgc

SEQ ID NO: 884626 - RNA, 19 nt, Artificial Sequence
  Description of Artificial Sequence: Synthetic oligonucleotide
  Sense strand starting at position 2220 of SEQ ID NO: 588719
ucuuaauucugcgucugca

SEQ ID NO: 884627 - RNA, 19 nt, Artificial Sequence
  Description of Artificial Sequence: Synthetic oligonucleotide
  Antisense strand to SEQ ID NO: 884626
ugcagacgcagaauuaaga

SEQ ID NO: 884628 - RNA, 19 nt, Artificial Sequence
  Description of Artificial Sequence: Synthetic oligonucleotide
  Sense strand starting at position 2223 of SEQ ID NO: 588719
uaauucugcgucugcacaa

SEQ ID NO: 884629 - RNA, 19 nt, Artificial Sequence
  Description of Artificial Sequence: Synthetic oligonucleotide
  Antisense strand to SEQ ID NO: 884628
uugugcagacgcagaauua

SEQ ID NO: 884630 - RNA, 19 nt, Artificial Sequence
  Description of Artificial Sequence: Synthetic oligonucleotide
  Sense strand starting at position 2258 of SEQ ID NO: 588719
gcgccaguuugcuccuagu

SEQ ID NO: 884631 - RNA, 19 nt, Artificial Sequence
  Description of Artificial Sequence: Synthetic oligonucleotide
  Antisense strand to SEQ ID NO: 884630
acuaggagcaaacuggcgc

SEQ ID NO: 884632 - RNA, 19 nt, Artificial Sequence
  Description of Artificial Sequence: Synthetic oligonucleotide
  Sense strand starting at position 2260 of SEQ ID NO: 588719
gccaguuugcuccuaguuu

SEQ ID NO: 884633 - RNA, 19 nt, Artificial Sequence
  Description of Artificial Sequence: Synthetic oligonucleotide
  Antisense strand to SEQ ID NO: 884632
aaacuaggagcaaacuggc

SEQ ID NO: 884634 - RNA, 19 nt, Artificial Sequence
  Description of Artificial Sequence: Synthetic oligonucleotide
  Sense strand starting at position 2788 of SEQ ID NO: 588719
ccacgauccugcuugcaca

SEQ ID NO: 884635 - RNA, 19 nt, Artificial Sequence
  Description of Artificial Sequence: Synthetic oligonucleotide
  Antisense strand to SEQ ID NO: 884634
ugugcaagcaggaucgugg

SEQ ID NO: 884636 - RNA, 19 nt, Artificial Sequence
  Description of Artificial Sequence: Synthetic oligonucleotide
  Sense strand starting at position 2804 of SEQ ID NO: 588719
acauacaucuagcggugaa

SEQ ID NO: 884637 - RNA, 19 nt, Artificial Sequence
  Description of Artificial Sequence: Synthetic oligonucleotide
  Antisense strand to SEQ ID NO: 884636
uucaccgcuagauguaugu

SEQ ID NO: 884638 - RNA, 19 nt, Artificial Sequence
  Description of Artificial Sequence: Synthetic oligonucleotide
  Sense strand starting at position 3217 of SEQ ID NO: 588719
cccuaaacuccguggcaga

SEQ ID NO: 884639 - RNA, 19 nt, Artificial Sequence
  Description of Artificial Sequence: Synthetic oligonucleotide
  Antisense strand to SEQ ID NO: 884638
ucugccacggaguuuaggg

SEQ ID NO: 884640 - RNA, 19 nt, Artificial Sequence
  Description of Artificial Sequence: Synthetic oligonucleotide
  Sense strand starting at position 3218 of SEQ ID NO: 588719
ccuaaacuccguggcagaa

SEQ ID NO: 884641 - RNA, 19 nt, Artificial Sequence
  Description of Artificial Sequence: Synthetic oligonucleotide
  Antisense strand to SEQ ID NO: 884640
uucugccacggaguuuagg

SEQ ID NO: 884642 - RNA, 19 nt, Artificial Sequence
  Description of Artificial Sequence: Synthetic oligonucleotide
  Sense strand starting at position 3241 of SEQ ID NO: 588719
ggaggcuucuuccuccauu

SEQ ID NO: 884643 - RNA, 19 nt, Artificial Sequence
  Description of Artificial Sequence: Synthetic oligonucleotide
  Antisense strand to SEQ ID NO: 884642
aauggaggaagaagccucc

SEQ ID NO: 884644 - RNA, 19 nt, Artificial Sequence
  Description of Artificial Sequence: Synthetic oligonucleotide
  Sense strand starting at position 3329 of SEQ ID NO: 588719
ccugcuuuggagcagacau

SEQ ID NO: 884645 - RNA, 19 nt, Artificial Sequence
  Description of Artificial Sequence: Synthetic oligonucleotide
  Antisense strand to SEQ ID NO: 884644
augucugcuccaaagcagg

SEQ ID NO: 884646 - RNA, 19 nt, Artificial Sequence
  Description of Artificial Sequence: Synthetic oligonucleotide
  Sense strand starting at position 3470 of SEQ ID NO: 588719
ucuugaucuccuggucuau

SEQ ID NO: 884647 - RNA, 19 nt, Artificial Sequence
  Description of Artificial Sequence: Synthetic oligonucleotide
  Antisense strand to SEQ ID NO: 884646
auagaccaggagaucaaga

SEQ ID NO: 884648 - RNA, 19 nt, Artificial Sequence
  Description of Artificial Sequence: Synthetic oligonucleotide
  Sense strand starting at position 3480 of SEQ ID NO: 588719
cuggucuauuuguauguua

SEQ ID NO: 884649 - RNA, 19 nt, Artificial Sequence
  Description of Artificial Sequence: Synthetic oligonucleotide
  Antisense strand to SEQ ID NO: 884648
uaacauacaaauagaccag

SEQ ID NO: 884650 - RNA, 19 nt, Artificial Sequence
  Description of Artificial Sequence: Synthetic oligonucleotide
  Sense strand starting at position 3482 of SEQ ID NO: 588719
ggucuauuuguauguuaau

SEQ ID NO: 884651 - RNA, 19 nt, Artificial Sequence
  Description of Artificial Sequence: Synthetic oligonucleotide
  Antisense strand to SEQ ID NO: 884650
auuaacauacaaauagacc

SEQ ID NO: 884652 - RNA, 19 nt, Artificial Sequence
  Description of Artificial Sequence: Synthetic oligonucleotide
  Sense strand starting at position 3483 of SEQ ID NO: 588719
gucuauuuguauguuaauc

SEQ ID NO: 884653 - RNA, 19 nt, Artificial Sequence
  Description of Artificial Sequence: Synthetic oligonucleotide
  Antisense strand to SEQ ID NO: 884652
gauuaacauacaaauagac

SEQ ID NO: 884654 - RNA, 19 nt, Artificial Sequence
  Description of Artificial Sequence: Synthetic oligonucleotide
  Sense strand starting at position 3575 of SEQ ID NO: 588719
uuccauguugggcaacaua

SEQ ID NO: 884655 - RNA, 19 nt, Artificial Sequence
  Description of Artificial Sequence: Synthetic oligonucleotide
  Antisense strand to SEQ ID NO: 884654
uauguugcccaacauggaa

SEQ ID NO: 884656 - RNA, 19 nt, Artificial Sequence
  Description of Artificial Sequence: Synthetic oligonucleotide
  Sense strand starting at position 3586 of SEQ ID NO: 588719
gcaacauagcauuagauga

SEQ ID NO: 884657 - RNA, 19 nt, Artificial Sequence
  Description of Artificial Sequence: Synthetic oligonucleotide
  Antisense strand to SEQ ID NO: 884656
ucaucuaaugcuauguugc

SEQ ID NO: 884658 - RNA, 19 nt, Artificial Sequence
  Description of Artificial Sequence: Synthetic oligonucleotide
  Sense strand starting at position 3608 of SEQ ID NO: 588719
caguuagaauuucgugguu

SEQ ID NO: 884659 - RNA, 19 nt, Artificial Sequence
  Description of Artificial Sequence: Synthetic oligonucleotide
  Antisense strand to SEQ ID NO: 884658
aaccacgaaauucuaacug

SEQ ID NO: 884660 - RNA, 19 nt, Artificial Sequence
  Description of Artificial Sequence: Synthetic oligonucleotide
  Sense strand starting at position 3610 of SEQ ID NO: 588719
guuagaauuucgugguuac

SEQ ID NO: 884661 - RNA, 19 nt, Artificial Sequence
  Description of Artificial Sequence: Synthetic oligonucleotide
  Antisense strand to SEQ ID NO: 884660
guaaccacgaaauucuaac

SEQ ID NO: 884662 - RNA, 19 nt, Artificial Sequence
  Description of Artificial Sequence: Synthetic oligonucleotide
  Sense strand starting at position 3611 of SEQ ID NO: 588719
uuagaauuucgugguuacu

SEQ ID NO: 884663 - RNA, 19 nt, Artificial Sequence
  Description of Artificial Sequence: Synthetic oligonucleotide
  Antisense strand to SEQ ID NO: 884662
aguaaccacgaaauucuaa

SEQ ID NO: 884664 - RNA, 19 nt, Artificial Sequence
  Description of Artificial Sequence: Synthetic oligonucleotide
  Sense strand starting at position 3613 of SEQ ID NO: 588719
agaauuucgugguuacuuc

SEQ ID NO: 884665 - RNA, 19 nt, Artificial Sequence
  Description of Artificial Sequence: Synthetic oligonucleotide
  Antisense strand to SEQ ID NO: 884664
gaaguaaccacgaaauucu

SEQ ID NO: 884666 - RNA, 19 nt, Artificial Sequence
  Description of Artificial Sequence: Synthetic oligonucleotide
  Sense strand starting at position 3617 of SEQ ID NO: 588719
uuucgugguuacuucuuua

SEQ ID NO: 884667 - RNA, 19 nt, Artificial Sequence
  Description of Artificial Sequence: Synthetic oligonucleotide
  Antisense strand to SEQ ID NO: 884666
uaaagaaguaaccacgaaa

SEQ ID NO: 884668 - RNA, 19 nt, Artificial Sequence
  Description of Artificial Sequence: Synthetic oligonucleotide
  Sense strand starting at position 3654 of SEQ ID NO: 588719
uuaugugacucacccaaga

SEQ ID NO: 884669 - RNA, 19 nt, Artificial Sequence
  Description of Artificial Sequence: Synthetic oligonucleotide
  Antisense strand to SEQ ID NO: 884668
ucuugggugagucacauaa

SEQ ID NO: 884670 - RNA, 19 nt, Artificial Sequence
  Description of Artificial Sequence: Synthetic oligonucleotide
  Sense strand starting at position 3823 of SEQ ID NO: 588719
gguggugccucaggacuua

SEQ ID NO: 884671 - RNA, 19 nt, Artificial Sequence
  Description of Artificial Sequence: Synthetic oligonucleotide
  Antisense strand to SEQ ID NO: 884670
uaaguccugaggcaccacc

SEQ ID NO: 884672 - RNA, 19 nt, Artificial Sequence
  Description of Artificial Sequence: Synthetic oligonucleotide
  Sense strand starting at position 3891 of SEQ ID NO: 588719
cuggucuccguuugagauu

SEQ ID NO: 884673 - RNA, 19 nt, Artificial Sequence
  Description of Artificial Sequence: Synthetic oligonucleotide
  Antisense strand to SEQ ID NO: 884672
aaucucaaacggagaccag

SEQ ID NO: 884674 - RNA, 19 nt, Artificial Sequence
  Description of Artificial Sequence: Synthetic oligonucleotide
  Sense strand starting at position 3892 of SEQ ID NO: 588719
uggucuccguuugagauuu

SEQ ID NO: 884675 - RNA, 19 nt, Artificial Sequence
  Description of Artificial Sequence: Synthetic oligonucleotide
  Antisense strand to SEQ ID NO: 884674
aaaucucaaacggagacca

SEQ ID NO: 884676 - RNA, 19 nt, Artificial Sequence
  Description of Artificial Sequence: Synthetic oligonucleotide
  Sense strand starting at position 3948 of SEQ ID NO: 588719
cagugaguguggcuaguua

SEQ ID NO: 884677 - RNA, 19 nt, Artificial Sequence
  Description of Artificial Sequence: Synthetic oligonucleotide
  Antisense strand to SEQ ID NO: 884676
uaacuagccacacucacug

SEQ ID NO: 884678 - RNA, 19 nt, Artificial Sequence
  Description of Artificial Sequence: Synthetic oligonucleotide
  Sense strand starting at position 3950 of SEQ ID NO: 588719
gugaguguggcuaguuaaa

SEQ ID NO: 884679 - RNA, 19 nt, Artificial Sequence
  Description of Artificial Sequence: Synthetic oligonucleotide
  Antisense strand to SEQ ID NO: 884678
uuuaacuagccacacucac

SEQ ID NO: 884680 - RNA, 19 nt, Artificial Sequence
  Description of Artificial Sequence: Synthetic oligonucleotide
  Sense strand starting at position 3959 of SEQ ID NO: 588719
gcuaguuaaagcugagaug

SEQ ID NO: 884681 - RNA, 19 nt, Artificial Sequence
  Description of Artificial Sequence: Synthetic oligonucleotide
  Antisense strand to SEQ ID NO: 884680
caucucagcuuuaacuagc

SEQ ID NO: 884682 - RNA, 19 nt, Artificial Sequence
  Description of Artificial Sequence: Synthetic oligonucleotide
  Sense strand starting at position 2042 of SEQ ID NO: 588720
gauugugacaccuggugga

SEQ ID NO: 884683 - RNA, 19 nt, Artificial Sequence
  Description of Artificial Sequence: Synthetic oligonucleotide
  Antisense strand to SEQ ID NO: 884682
uccaccaggugucacaauc

SEQ ID NO: 884684 - RNA, 19 nt, Artificial Sequence
  Description of Artificial Sequence: Synthetic oligonucleotide
  Sense strand starting at position 2064 of SEQ ID NO: 588720
gugggagggaguuggaauu

SEQ ID NO: 884685 - RNA, 19 nt, Artificial Sequence
  Description of Artificial Sequence: Synthetic oligonucleotide
  Antisense strand to SEQ ID NO: 884684
aauuccaacucccucccac

SEQ ID NO: 884686 - RNA, 19 nt, Artificial Sequence
  Description of Artificial Sequence: Synthetic oligonucleotide
  Sense strand starting at position 2169 of SEQ ID NO: 588720
guaggagcuuaagagaaau

SEQ ID NO: 884687 - RNA, 19 nt, Artificial Sequence
  Description of Artificial Sequence: Synthetic oligonucleotide
  Antisense strand to SEQ ID NO: 884686
auuucucuuaagcuccuac

SEQ ID NO: 884688 - RNA, 19 nt, Artificial Sequence
  Description of Artificial Sequence: Synthetic oligonucleotide
  Sense strand starting at position 2259 of SEQ ID NO: 588720
auuucuugcccaggagugu

SEQ ID NO: 884689 - RNA, 19 nt, Artificial Sequence
  Description of Artificial Sequence: Synthetic oligonucleotide
  Antisense strand to SEQ ID NO: 884688
acacuccugggcaagaaau

SEQ ID NO: 884690 - RNA, 19 nt, Artificial Sequence
  Description of Artificial Sequence: Synthetic oligonucleotide
  Sense strand starting at position 2260 of SEQ ID NO: 588720
uuucuugcccaggaguguu

SEQ ID NO: 884691 - RNA, 19 nt, Artificial Sequence
  Description of Artificial Sequence: Synthetic oligonucleotide
  Antisense strand to SEQ ID NO: 884690
aacacuccugggcaagaaa

SEQ ID NO: 884692 - RNA, 19 nt, Artificial Sequence
  Description of Artificial Sequence: Synthetic oligonucleotide
  Sense strand starting at position 2272 of SEQ ID NO: 588720
gaguguuccugccuggcaa

SEQ ID NO: 884693 - RNA, 19 nt, Artificial Sequence
  Description of Artificial Sequence: Synthetic oligonucleotide
  Antisense strand to SEQ ID NO: 884692
uugccaggcaggaacacuc

SEQ ID NO: 884694 - RNA, 19 nt, Artificial Sequence
  Description of Artificial Sequence: Synthetic oligonucleotide
  Sense strand starting at position 2273 of SEQ ID NO: 588720
aguguuccugccuggcaaa

SEQ ID NO: 884695 - RNA, 19 nt, Artificial Sequence
  Description of Artificial Sequence: Synthetic oligonucleotide
  Antisense strand to SEQ ID NO: 884694
uuugccaggcaggaacacu

SEQ ID NO: 884696 - RNA, 19 nt, Artificial Sequence
  Description of Artificial Sequence: Synthetic oligonucleotide
  Sense strand starting at position 2308 of SEQ ID NO: 588720
gggucuaccucaugaauca

SEQ ID NO: 884697 - RNA, 19 nt, Artificial Sequence
  Description of Artificial Sequence: Synthetic oligonucleotide
  Antisense strand to SEQ ID NO: 884696
ugauucaugagguagaccc

SEQ ID NO: 884698 - RNA, 19 nt, Artificial Sequence
  Description of Artificial Sequence: Synthetic oligonucleotide
  Sense strand starting at position 2404 of SEQ ID NO: 588720
ugacuuucucauuggcuuu

SEQ ID NO: 884699 - RNA, 19 nt, Artificial Sequence
  Description of Artificial Sequence: Synthetic oligonucleotide
  Antisense strand to SEQ ID NO: 884698
aaagccaaugagaaaguca

SEQ ID NO: 884700 - RNA, 19 nt, Artificial Sequence
  Description of Artificial Sequence: Synthetic oligonucleotide
  Sense strand starting at position 2432 of SEQ ID NO: 588720
aagauaaccugagaguucu

SEQ ID NO: 884701 - RNA, 19 nt, Artificial Sequence
  Description of Artificial Sequence: Synthetic oligonucleotide
  Antisense strand to SEQ ID NO: 884700
agaacucucagguuaucuu

SEQ ID NO: 884702 - RNA, 19 nt, Artificial Sequence
  Description of Artificial Sequence: Synthetic oligonucleotide
  Sense strand starting at position 2438 of SEQ ID NO: 588720
accugagaguucuuauaaa

SEQ ID NO: 884703 - RNA, 19 nt, Artificial Sequence
  Description of Artificial Sequence: Synthetic oligonucleotide
  Antisense strand to SEQ ID NO: 884702
uuuauaagaacucucaggu

SEQ ID NO: 884704 - RNA, 19 nt, Artificial Sequence
  Description of Artificial Sequence: Synthetic oligonucleotide
  Sense strand starting at position 2470 of SEQ ID NO: 588720
acagcauuauuugguaaau

SEQ ID NO: 884705 - RNA, 19 nt, Artificial Sequence
  Description of Artificial Sequence: Synthetic oligonucleotide
  Antisense strand to SEQ ID NO: 884704
auuuaccaaauaaugcugu

SEQ ID NO: 884706 - RNA, 19 nt, Artificial Sequence
  Description of Artificial Sequence: Synthetic oligonucleotide
  Sense strand starting at position 2572 of SEQ ID NO: 588720
gagccaaguucugucaauc

SEQ ID NO: 884707 - RNA, 19 nt, Artificial Sequence
  Description of Artificial Sequence: Synthetic oligonucleotide
  Antisense strand to SEQ ID NO: 884706
gauugacagaacuuggcuc

SEQ ID NO: 884708 - RNA, 19 nt, Artificial Sequence
  Description of Artificial Sequence: Synthetic oligonucleotide
  Sense strand starting at position 2594 of SEQ ID NO: 588720
ugcuaaauacccugguuga

SEQ ID NO: 884709 - RNA, 19 nt, Artificial Sequence
  Description of Artificial Sequence: Synthetic oligonucleotide
  Antisense strand to SEQ ID NO: 884708
ucaaccaggguauuuagca

SEQ ID NO: 884710 - RNA, 19 nt, Artificial Sequence
  Description of Artificial Sequence: Synthetic oligonucleotide
  Sense strand starting at position 2595 of SEQ ID NO: 588720
gcuaaauacccugguugau

SEQ ID NO: 884711 - RNA, 19 nt, Artificial Sequence
  Description of Artificial Sequence: Synthetic oligonucleotide
  Antisense strand to SEQ ID NO: 884710
aucaaccaggguauuuagc

SEQ ID NO: 884712 - RNA, 19 nt, Artificial Sequence
  Description of Artificial Sequence: Synthetic oligonucleotide
  Sense strand starting at position 2604 of SEQ ID NO: 588720
ccugguugauguuuccuau

SEQ ID NO: 884713 - RNA, 19 nt, Artificial Sequence
  Description of Artificial Sequence: Synthetic oligonucleotide
  Antisense strand to SEQ ID NO: 884712
auaggaaacaucaaccagg

SEQ ID NO: 884714 - RNA, 19 nt, Artificial Sequence
  Description of Artificial Sequence: Synthetic oligonucleotide
  Sense strand starting at position 2607 of SEQ ID NO: 588720
gguugauguuuccuauucu

SEQ ID NO: 884715 - RNA, 19 nt, Artificial Sequence
  Description of Artificial Sequence: Synthetic oligonucleotide
  Antisense strand to SEQ ID NO: 884714
agaauaggaaacaucaacc

SEQ ID NO: 884716 - RNA, 19 nt, Artificial Sequence
  Description of Artificial Sequence: Synthetic oligonucleotide
  Sense strand starting at position 2608 of SEQ ID NO: 588720
guugauguuuccuauucuu

SEQ ID NO: 884717 - RNA, 19 nt, Artificial Sequence
  Description of Artificial Sequence: Synthetic oligonucleotide
  Antisense strand to SEQ ID NO: 884716
aagaauaggaaacaucaac

SEQ ID NO: 884718 - RNA, 19 nt, Artificial Sequence
  Description of Artificial Sequence: Synthetic oligonucleotide
  Sense strand starting at position 2611 of SEQ ID NO: 588720
gauguuuccuauucuugga

SEQ ID NO: 884719 - RNA, 19 nt, Artificial Sequence
  Description of Artificial Sequence: Synthetic oligonucleotide
  Antisense strand to SEQ ID NO: 884718
uccaagaauaggaaacauc

SEQ ID NO: 884720 - RNA, 19 nt, Artificial Sequence
  Description of Artificial Sequence: Synthetic oligonucleotide
  Sense strand starting at position 2614 of SEQ ID NO: 588720
guuuccuauucuuggaacu

SEQ ID NO: 884721 - RNA, 19 nt, Artificial Sequence
  Description of Artificial Sequence: Synthetic oligonucleotide
  Antisense strand to SEQ ID NO: 884720
aguuccaagaauaggaaac

SEQ ID NO: 884722 - RNA, 19 nt, Artificial Sequence
  Description of Artificial Sequence: Synthetic oligonucleotide
  Sense strand starting at position 2625 of SEQ ID NO: 588720
uuggaacucccauggcauu

SEQ ID NO: 884723 - RNA, 19 nt, Artificial Sequence
  Description of Artificial Sequence: Synthetic oligonucleotide
  Antisense strand to SEQ ID NO: 884722
aaugccaugggaguuccaa

SEQ ID NO: 884724 - RNA, 19 nt, Artificial Sequence
  Description of Artificial Sequence: Synthetic oligonucleotide
  Sense strand starting at position 2661 of SEQ ID NO: 588720
gagagcauuucugaauguu

SEQ ID NO: 884725 - RNA, 19 nt, Artificial Sequence
  Description of Artificial Sequence: Synthetic oligonucleotide
  Antisense strand to SEQ ID NO: 884724
aacauucagaaaugcucuc

SEQ ID NO: 884726 - RNA, 19 nt, Artificial Sequence
  Description of Artificial Sequence: Synthetic oligonucleotide
  Sense strand starting at position 2683 of SEQ ID NO: 588720
ggagguguuagagguaauu

SEQ ID NO: 884727 - RNA, 19 nt, Artificial Sequence
  Description of Artificial Sequence: Synthetic oligonucleotide
  Antisense strand to SEQ ID NO: 884726
aauuaccucuaacaccucc

SEQ ID NO: 884728 - RNA, 19 nt, Artificial Sequence
  Description of Artificial Sequence: Synthetic oligonucleotide
  Sense strand starting at position 2689 of SEQ ID NO: 588720
guuagagguaauugcauua

SEQ ID NO: 884729 - RNA, 19 nt, Artificial Sequence
  Description of Artificial Sequence: Synthetic oligonucleotide
  Antisense strand to SEQ ID NO: 884728
uaaugcaauuaccucuaac

SEQ ID NO: 884730 - RNA, 19 nt, Artificial Sequence
  Description of Artificial Sequence: Synthetic oligonucleotide
  Sense strand starting at position 2718 of SEQ ID NO: 588720
agggauuauuaauaaacug

SEQ ID NO: 884731 - RNA, 19 nt, Artificial Sequence
  Description of Artificial Sequence: Synthetic oligonucleotide
  Antisense strand to SEQ ID NO: 884730
caguuuauuaauaaucccu

SEQ ID NO: 884732 - RNA, 19 nt, Artificial Sequence
  Description of Artificial Sequence: Synthetic oligonucleotide
  Sense strand starting at position 2795 of SEQ ID NO: 588720
uuaguuaaauccuguaacu

SEQ ID NO: 884733 - RNA, 19 nt, Artificial Sequence
  Description of Artificial Sequence: Synthetic oligonucleotide
  Antisense strand to SEQ ID NO: 884732
aguuacaggauuuaacuaa

SEQ ID NO: 884734 - RNA, 19 nt, Artificial Sequence
  Description of Artificial Sequence: Synthetic oligonucleotide
  Sense strand starting at position 2843 of SEQ ID NO: 588720
uuuacuguuuccucagauc

SEQ ID NO: 884735 - RNA, 19 nt, Artificial Sequence
  Description of Artificial Sequence: Synthetic oligonucleotide
  Antisense strand to SEQ ID NO: 884734
gaucugaggaaacaguaaa

SEQ ID NO: 884736 - RNA, 19 nt, Artificial Sequence
  Description of Artificial Sequence: Synthetic oligonucleotide
  Sense strand starting at position 2846 of SEQ ID NO: 588720
acuguuuccucagaucaua

SEQ ID NO: 884737 - RNA, 19 nt, Artificial Sequence
  Description of Artificial Sequence: Synthetic oligonucleotide
  Antisense strand to SEQ ID NO: 884736
uaugaucugaggaaacagu

SEQ ID NO: 884738 - RNA, 19 nt, Artificial Sequence
  Description of Artificial Sequence: Synthetic oligonucleotide
  Sense strand starting at position 2895 of SEQ ID NO: 588720
uagauuccauucuggugaa

SEQ ID NO: 884739 - RNA, 19 nt, Artificial Sequence
  Description of Artificial Sequence: Synthetic oligonucleotide
  Antisense strand to SEQ ID NO: 884738
uucaccagaauggaaucua

SEQ ID NO: 884740 - RNA, 19 nt, Artificial Sequence
  Description of Artificial Sequence: Synthetic oligonucleotide
  Sense strand starting at position 2896 of SEQ ID NO: 588720
agauuccauucuggugaau

SEQ ID NO: 884741 - RNA, 19 nt, Artificial Sequence
  Description of Artificial Sequence: Synthetic oligonucleotide
  Antisense strand to SEQ ID NO: 884740
auucaccagaauggaaucu

SEQ ID NO: 884742 - RNA, 19 nt, Artificial Sequence
  Description of Artificial Sequence: Synthetic oligonucleotide
  Sense strand starting at position 2898 of SEQ ID NO: 588720
auuccauucuggugaauaa

SEQ ID NO: 884743 - RNA, 19 nt, Artificial Sequence
  Description of Artificial Sequence: Synthetic oligonucleotide
  Antisense strand to SEQ ID NO: 884742
uuauucaccagaauggaau

SEQ ID NO: 884744 - RNA, 19 nt, Artificial Sequence
  Description of Artificial Sequence: Synthetic oligonucleotide
  Sense strand starting at position 2899 of SEQ ID NO: 588720
uuccauucuggugaauaac

SEQ ID NO: 884745 - RNA, 19 nt, Artificial Sequence
  Description of Artificial Sequence: Synthetic oligonucleotide
  Antisense strand to SEQ ID NO: 884744
guuauucaccagaauggaa

SEQ ID NO: 884746 - RNA, 19 nt, Artificial Sequence
  Description of Artificial Sequence: Synthetic oligonucleotide
  Sense strand starting at position 2908 of SEQ ID NO: 588720
ggugaauaacauggugaua

SEQ ID NO: 884747 - RNA, 19 nt, Artificial Sequence
  Description of Artificial Sequence: Synthetic oligonucleotide
  Antisense strand to SEQ ID NO: 884746
uaucaccauguuauucacc

SEQ ID NO: 884748 - RNA, 19 nt, Artificial Sequence
  Description of Artificial Sequence: Synthetic oligonucleotide
  Sense strand starting at position 2980 of SEQ ID NO: 588720
ugauguuauuacuauguca

SEQ ID NO: 884749 - RNA, 19 nt, Artificial Sequence
  Description of Artificial Sequence: Synthetic oligonucleotide
  Antisense strand to SEQ ID NO: 884748
ugacauaguaauaacauca

SEQ ID NO: 884750 - RNA, 19 nt, Artificial Sequence
  Description of Artificial Sequence: Synthetic oligonucleotide
  Sense strand starting at position 2982 of SEQ ID NO: 588720
auguuauuacuaugucauc

SEQ ID NO: 884751 - RNA, 19 nt, Artificial Sequence
  Description of Artificial Sequence: Synthetic oligonucleotide
  Antisense strand to SEQ ID NO: 884750
gaugacauaguaauaacau

SEQ ID NO: 884752 - RNA, 19 nt, Artificial Sequence
  Description of Artificial Sequence: Synthetic oligonucleotide
  Sense strand starting at position 2983 of SEQ ID NO: 588720
uguuauuacuaugucauca

SEQ ID NO: 884753 - RNA, 19 nt, Artificial Sequence
  Description of Artificial Sequence: Synthetic oligonucleotide
  Antisense strand to SEQ ID NO: 884752
ugaugacauaguaauaaca

SEQ ID NO: 884754 - RNA, 19 nt, Artificial Sequence
  Description of Artificial Sequence: Synthetic oligonucleotide
  Sense strand starting at position 2987 of SEQ ID NO: 588720
auuacuaugucaucacuga

SEQ ID NO: 884755 - RNA, 19 nt, Artificial Sequence
  Description of Artificial Sequence: Synthetic oligonucleotide
  Antisense strand to SEQ ID NO: 884754
ucagugaugacauaguaau

SEQ ID NO: 884756 - RNA, 19 nt, Artificial Sequence
  Description of Artificial Sequence: Synthetic oligonucleotide
  Sense strand starting at position 3086 of SEQ ID NO: 588720
caaugucauugagggagau

SEQ ID NO: 884757 - RNA, 19 nt, Artificial Sequence
  Description of Artificial Sequence: Synthetic oligonucleotide
  Antisense strand to SEQ ID NO: 884756
aucucccucaaugacauug

SEQ ID NO: 884758 - RNA, 19 nt, Artificial Sequence
  Description of Artificial Sequence: Synthetic oligonucleotide
  Sense strand starting at position 3124 of SEQ ID NO: 588720
cagaguagagcaugucaca

SEQ ID NO: 884759 - RNA, 19 nt, Artificial Sequence
  Description of Artificial Sequence: Synthetic oligonucleotide
  Antisense strand to SEQ ID NO: 884758
ugugacaugcucuacucug

SEQ ID NO: 884760 - RNA, 19 nt, Artificial Sequence
  Description of Artificial Sequence: Synthetic oligonucleotide
  Sense strand starting at position 3127 of SEQ ID NO: 588720
aguagagcaugucacauuu

SEQ ID NO: 884761 - RNA, 19 nt, Artificial Sequence
  Description of Artificial Sequence: Synthetic oligonucleotide
  Antisense strand to SEQ ID NO: 884760
aaaugugacaugcucuacu

SEQ ID NO: 884762 - RNA, 19 nt, Artificial Sequence
  Description of Artificial Sequence: Synthetic oligonucleotide
  Sense strand starting at position 32 of SEQ ID NO: 588721
guuguagugagcugaaggu

SEQ ID NO: 884763 - RNA, 19 nt, Artificial Sequence
  Description of Artificial Sequence: Synthetic oligonucleotide
  Antisense strand to SEQ ID NO: 884762
accuucagcucacuacaac

SEQ ID NO: 884764 - RNA, 19 nt, Artificial Sequence
  Description of Artificial Sequence: Synthetic oligonucleotide
  Sense strand starting at position 36 of SEQ ID NO: 588721
uagugagcugaagguugua

SEQ ID NO: 884765 - RNA, 19 nt, Artificial Sequence
  Description of Artificial Sequence: Synthetic oligonucleotide
  Antisense strand to SEQ ID NO: 884764
uacaaccuucagcucacua

SEQ ID NO: 884766 - RNA, 19 nt, Artificial Sequence
  Description of Artificial Sequence: Synthetic oligonucleotide
  Sense strand starting at position 171 of SEQ ID NO: 588721
ccaucuccugcaugaagua

SEQ ID NO: 884767 - RNA, 19 nt, Artificial Sequence
  Description of Artificial Sequence: Synthetic oligonucleotide
  Antisense strand to SEQ ID NO: 884766
uacuucaugcaggagaugg

SEQ ID NO: 884768 - RNA, 19 nt, Artificial Sequence
  Description of Artificial Sequence: Synthetic oligonucleotide
  Sense strand starting at position 180 of SEQ ID NO: 588721
gcaugaaguauccaauggu

SEQ ID NO: 884769 - RNA, 19 nt, Artificial Sequence
  Description of Artificial Sequence: Synthetic oligonucleotide
  Antisense strand to SEQ ID NO: 884768
accauuggauacuucaugc

SEQ ID NO: 884770 - RNA, 19 nt, Artificial Sequence
  Description of Artificial Sequence: Synthetic oligonucleotide
  Sense strand starting at position 183 of SEQ ID NO: 588721
ugaaguauccaaugguuuc

SEQ ID NO: 884771 - RNA, 19 nt, Artificial Sequence
  Description of Artificial Sequence: Synthetic oligonucleotide
  Antisense strand to SEQ ID NO: 884770
gaaaccauuggauacuuca

SEQ ID NO: 884772 - RNA, 19 nt, Artificial Sequence
  Description of Artificial Sequence: Synthetic oligonucleotide
  Sense strand starting at position 274 of SEQ ID NO: 588721
auuguaacuuccucuggaa

SEQ ID NO: 884773 - RNA, 19 nt, Artificial Sequence
  Description of Artificial Sequence: Synthetic oligonucleotide
  Antisense strand to SEQ ID NO: 884772
uuccagaggaaguuacaau

SEQ ID NO: 884774 - RNA, 19 nt, Artificial Sequence
  Description of Artificial Sequence: Synthetic oligonucleotide
  Sense strand starting at position 276 of SEQ ID NO: 588721
uguaacuuccucuggaacu

SEQ ID NO: 884775 - RNA, 19 nt, Artificial Sequence
  Description of Artificial Sequence: Synthetic oligonucleotide
  Antisense strand to SEQ ID NO: 884774
aguuccagaggaaguuaca

SEQ ID NO: 884776 - RNA, 19 nt, Artificial Sequence
  Description of Artificial Sequence: Synthetic oligonucleotide
  Sense strand starting at position 295 of SEQ ID NO: 588721
gauguucuccgugguccaa

SEQ ID NO: 884777 - RNA, 19 nt, Artificial Sequence
  Description of Artificial Sequence: Synthetic oligonucleotide
  Antisense strand to SEQ ID NO: 884776
uuggaccacggagaacauc

SEQ ID NO: 884778 - RNA, 19 nt, Artificial Sequence
  Description of Artificial Sequence: Synthetic oligonucleotide
  Sense strand starting at position 348 of SEQ ID NO: 588721
auguuugccuugccugaga

SEQ ID NO: 884779 - RNA, 19 nt, Artificial Sequence
  Description of Artificial Sequence: Synthetic oligonucleotide
  Antisense strand to SEQ ID NO: 884778
ucucaggcaaggcaaacau

SEQ ID NO: 884780 - RNA, 19 nt, Artificial Sequence
  Description of Artificial Sequence: Synthetic oligonucleotide
  Sense strand starting at position 576 of SEQ ID NO: 588721
ggugcuaaucugcaagaca

SEQ ID NO: 884781 - RNA, 19 nt, Artificial Sequence
  Description of Artificial Sequence: Synthetic oligonucleotide
  Antisense strand to SEQ ID NO: 884780
ugucuugcagauuagcacc

SEQ ID NO: 884782 - RNA, 19 nt, Artificial Sequence
  Description of Artificial Sequence: Synthetic oligonucleotide
  Sense strand starting at position 579 of SEQ ID NO: 588721
gcuaaucugcaagacauug

SEQ ID NO: 884783 - RNA, 19 nt, Artificial Sequence
  Description of Artificial Sequence: Synthetic oligonucleotide
  Antisense strand to SEQ ID NO: 884782
caaugucuugcagauuagc

SEQ ID NO: 884784 - RNA, 19 nt, Artificial Sequence
  Description of Artificial Sequence: Synthetic oligonucleotide
  Sense strand starting at position 600 of SEQ ID NO: 588721
ggcaaagacuuugcaaaca

SEQ ID NO: 884785 - RNA, 19 nt, Artificial Sequence
  Description of Artificial Sequence: Synthetic oligonucleotide
  Antisense strand to SEQ ID NO: 884784
uguuugcaaagucuuugcc

SEQ ID NO: 884786 - RNA, 19 nt, Artificial Sequence
  Description of Artificial Sequence: Synthetic oligonucleotide
  Sense strand starting at position 1040 of SEQ ID NO: 588721
gcaggagagccucgucuau

SEQ ID NO: 884787 - RNA, 19 nt, Artificial Sequence
  Description of Artificial Sequence: Synthetic oligonucleotide
  Antisense strand to SEQ ID NO: 884786
auagacgaggcucuccugc

SEQ ID NO: 884788 - RNA, 19 nt, Artificial Sequence
  Description of Artificial Sequence: Synthetic oligonucleotide
  Sense strand starting at position 1044 of SEQ ID NO: 588721
gagagccucgucuaugcau

SEQ ID NO: 884789 - RNA, 19 nt, Artificial Sequence
  Description of Artificial Sequence: Synthetic oligonucleotide
  Antisense strand to SEQ ID NO: 884788
augcauagacgaggcucuc

SEQ ID NO: 884790 - RNA, 19 nt, Artificial Sequence
  Description of Artificial Sequence: Synthetic oligonucleotide
  Sense strand starting at position 2409 of SEQ ID NO: 588721
cuccgugagcucugauuuc

SEQ ID NO: 884791 - RNA, 19 nt, Artificial Sequence
  Description of Artificial Sequence: Synthetic oligonucleotide
  Antisense strand to SEQ ID NO: 884790
gaaaucagagcucacggag

SEQ ID NO: 884792 - RNA, 19 nt, Artificial Sequence
  Description of Artificial Sequence: Synthetic oligonucleotide
  Sense strand starting at position 2441 of SEQ ID NO: 588721
ggucaugaguugguuggua

SEQ ID NO: 884793 - RNA, 19 nt, Artificial Sequence
  Description of Artificial Sequence: Synthetic oligonucleotide
  Antisense strand to SEQ ID NO: 884792
uaccaaccaacucaugacc

SEQ ID NO: 884794 - RNA, 19 nt, Artificial Sequence
  Description of Artificial Sequence: Synthetic oligonucleotide
  Sense strand starting at position 2443 of SEQ ID NO: 588721
ucaugaguugguugguaau

SEQ ID NO: 884795 - RNA, 19 nt, Artificial Sequence
  Description of Artificial Sequence: Synthetic oligonucleotide
  Antisense strand to SEQ ID NO: 884794
auuaccaaccaacucauga

SEQ ID NO: 884796 - RNA, 19 nt, Artificial Sequence
  Description of Artificial Sequence: Synthetic oligonucleotide
  Sense strand starting at position 2615 of SEQ ID NO: 588721
gaaagaaggacacguguaa

SEQ ID NO: 884797 - RNA, 19 nt, Artificial Sequence
  Description of Artificial Sequence: Synthetic oligonucleotide
  Antisense strand to SEQ ID NO: 884796
uuacacguguccuucuuuc

SEQ ID NO: 884798 - RNA, 19 nt, Artificial Sequence
  Description of Artificial Sequence: Synthetic oligonucleotide
  Sense strand starting at position 2624 of SEQ ID NO: 588721
acacguguaaguggucaca

SEQ ID NO: 884799 - RNA, 19 nt, Artificial Sequence
  Description of Artificial Sequence: Synthetic oligonucleotide
  Antisense strand to SEQ ID NO: 884798
ugugaccacuuacacgugu

SEQ ID NO: 884800 - RNA, 19 nt, Artificial Sequence
  Description of Artificial Sequence: Synthetic oligonucleotide
  Sense strand starting at position 2635 of SEQ ID NO: 588721
uggucacaggugugcaaau

SEQ ID NO: 884801 - RNA, 19 nt, Artificial Sequence
  Description of Artificial Sequence: Synthetic oligonucleotide
  Antisense strand to SEQ ID NO: 884800
auuugcacaccugugacca

SEQ ID NO: 884802 - RNA, 19 nt, Artificial Sequence
  Description of Artificial Sequence: Synthetic oligonucleotide
  Sense strand starting at position 2690 of SEQ ID NO: 588721
cugggucuggucugggaau

SEQ ID NO: 884803 - RNA, 19 nt, Artificial Sequence
  Description of Artificial Sequence: Synthetic oligonucleotide
  Antisense strand to SEQ ID NO: 884802
auucccagaccagacccag

SEQ ID NO: 884804 - RNA, 19 nt, Artificial Sequence
  Description of Artificial Sequence: Synthetic oligonucleotide
  Sense strand starting at position 2692 of SEQ ID NO: 588721
gggucuggucugggaauca

SEQ ID NO: 884805 - RNA, 19 nt, Artificial Sequence
  Description of Artificial Sequence: Synthetic oligonucleotide
  Antisense strand to SEQ ID NO: 884804
ugauucccagaccagaccc

SEQ ID NO: 884806 - RNA, 19 nt, Artificial Sequence
  Description of Artificial Sequence: Synthetic oligonucleotide
  Sense strand starting at position 2862 of SEQ ID NO: 588721
gaggauuccggaugugagg

SEQ ID NO: 884807 - RNA, 19 nt, Artificial Sequence
  Description of Artificial Sequence: Synthetic oligonucleotide
  Antisense strand to SEQ ID NO: 884806
ccucacauccggaauccuc

SEQ ID NO: 884808 - RNA, 19 nt, Artificial Sequence
  Description of Artificial Sequence: Synthetic oligonucleotide
  Sense strand starting at position 2991 of SEQ ID NO: 588721
ccagaagagucagaaguga

SEQ ID NO: 884809 - RNA, 19 nt, Artificial Sequence
  Description of Artificial Sequence: Synthetic oligonucleotide
  Antisense strand to SEQ ID NO: 884808
ucacuucugacucuucugg

SEQ ID NO: 884810 - RNA, 19 nt, Artificial Sequence
  Description of Artificial Sequence: Synthetic oligonucleotide
  Sense strand starting at position 3022 of SEQ ID NO: 588721
ccugauucucaguggccaa

SEQ ID NO: 884811 - RNA, 19 nt, Artificial Sequence
  Description of Artificial Sequence: Synthetic oligonucleotide
  Antisense strand to SEQ ID NO: 884810
uuggccacugagaaucagg

SEQ ID NO: 884812 - RNA, 19 nt, Artificial Sequence
  Description of Artificial Sequence: Synthetic oligonucleotide
  Sense strand starting at position 3292 of SEQ ID NO: 588721
ccaccugucgcaugggaau

SEQ ID NO: 884813 - RNA, 19 nt, Artificial Sequence
  Description of Artificial Sequence: Synthetic oligonucleotide
  Antisense strand to SEQ ID NO: 884812
auucccaugcgacaggugg

SEQ ID NO: 884814 - RNA, 19 nt, Artificial Sequence
  Description of Artificial Sequence: Synthetic oligonucleotide
  Sense strand starting at position 3334 of SEQ ID NO: 588721
cucgugaguccgggugaga

SEQ ID NO: 884815 - RNA, 19 nt, Artificial Sequence
  Description of Artificial Sequence: Synthetic oligonucleotide
  Antisense strand to SEQ ID NO: 884814
ucucacccggacucacgag

SEQ ID NO: 884816 - RNA, 19 nt, Artificial Sequence
  Description of Artificial Sequence: Synthetic oligonucleotide
  Sense strand starting at position 3336 of SEQ ID NO: 588721
cgugaguccgggugagaca

SEQ ID NO: 884817 - RNA, 19 nt, Artificial Sequence
  Description of Artificial Sequence: Synthetic oligonucleotide
  Antisense strand to SEQ ID NO: 884816
ugucucacccggacucacg

SEQ ID NO: 884818 - RNA, 19 nt, Artificial Sequence
  Description of Artificial Sequence: Synthetic oligonucleotide
  Sense strand starting at position 3349 of SEQ ID NO: 588721
gagacaguguuugugaaac

SEQ ID NO: 884819 - RNA, 19 nt, Artificial Sequence
  Description of Artificial Sequence: Synthetic oligonucleotide
  Antisense strand to SEQ ID NO: 884818
guuucacaaacacugucuc

SEQ ID NO: 884820 - RNA, 19 nt, Artificial Sequence
  Description of Artificial Sequence: Synthetic oligonucleotide
  Sense strand starting at position 3386 of SEQ ID NO: 588721
ugcagagugaguuaggaau

SEQ ID NO: 884821 - RNA, 19 nt, Artificial Sequence
  Description of Artificial Sequence: Synthetic oligonucleotide
  Antisense strand to SEQ ID NO: 884820
auuccuaacucacucugca

SEQ ID NO: 884822 - RNA, 19 nt, Artificial Sequence
  Description of Artificial Sequence: Synthetic oligonucleotide
  Sense strand starting at position 3412 of SEQ ID NO: 588721
agcccuguggguuaguaau

SEQ ID NO: 884823 - RNA, 19 nt, Artificial Sequence
  Description of Artificial Sequence: Synthetic oligonucleotide
  Antisense strand to SEQ ID NO: 884822
auuacuaacccacagggcu

SEQ ID NO: 884824 - RNA, 19 nt, Artificial Sequence
  Description of Artificial Sequence: Synthetic oligonucleotide
  Sense strand starting at position 3796 of SEQ ID NO: 588721
cacggauauugagcgugua

SEQ ID NO: 884825 - RNA, 19 nt, Artificial Sequence
  Description of Artificial Sequence: Synthetic oligonucleotide
  Antisense strand to SEQ ID NO: 884824
uacacgcucaauauccgug

SEQ ID NO: 884826 - RNA, 19 nt, Artificial Sequence
  Description of Artificial Sequence: Synthetic oligonucleotide
  Sense strand starting at position 3797 of SEQ ID NO: 588721
acggauauugagcguguau

SEQ ID NO: 884827 - RNA, 19 nt, Artificial Sequence
  Description of Artificial Sequence: Synthetic oligonucleotide
  Antisense strand to SEQ ID NO: 884826
auacacgcucaauauccgu

SEQ ID NO: 884828 - RNA, 19 nt, Artificial Sequence
  Description of Artificial Sequence: Synthetic oligonucleotide
  Sense strand starting at position 3799 of SEQ ID NO: 588721
ggauauugagcguguauaa

SEQ ID NO: 884829 - RNA, 19 nt, Artificial Sequence
  Description of Artificial Sequence: Synthetic oligonucleotide
  Antisense strand to SEQ ID NO: 884828
uuauacacgcucaauaucc

SEQ ID NO: 884830 - RNA, 19 nt, Artificial Sequence
  Description of Artificial Sequence: Synthetic oligonucleotide
  Sense strand starting at position 3808 of SEQ ID NO: 588721
gcguguauaagcucuuugu

SEQ ID NO: 884831 - RNA, 19 nt, Artificial Sequence
  Description of Artificial Sequence: Synthetic oligonucleotide
  Antisense strand to SEQ ID NO: 884830
acaaagagcuuauacacgc

SEQ ID NO: 884832 - RNA, 19 nt, Artificial Sequence
  Description of Artificial Sequence: Synthetic oligonucleotide
  Sense strand starting at position 3810 of SEQ ID NO: 588721
guguauaagcucuuugugu

SEQ ID NO: 884833 - RNA, 19 nt, Artificial Sequence
  Description of Artificial Sequence: Synthetic oligonucleotide
  Antisense strand to SEQ ID NO: 884832
acacaaagagcuuauacac

SEQ ID NO: 884834 - RNA, 19 nt, Artificial Sequence
  Description of Artificial Sequence: Synthetic oligonucleotide
  Sense strand starting at position 3828 of SEQ ID NO: 588721
ugcugagcucucuaugugu

SEQ ID NO: 884835 - RNA, 19 nt, Artificial Sequence
  Description of Artificial Sequence: Synthetic oligonucleotide
  Antisense strand to SEQ ID NO: 884834
acacauagagagcucagca

SEQ ID NO: 884836 - RNA, 19 nt, Artificial Sequence
  Description of Artificial Sequence: Synthetic oligonucleotide
  Sense strand starting at position 3868 of SEQ ID NO: 588721
augacaguccuguaacgca

SEQ ID NO: 884837 - RNA, 19 nt, Artificial Sequence
  Description of Artificial Sequence: Synthetic oligonucleotide
  Antisense strand to SEQ ID NO: 884836
ugcguuacaggacugucau

SEQ ID NO: 884838 - RNA, 19 nt, Artificial Sequence
  Description of Artificial Sequence: Synthetic oligonucleotide
  Sense strand starting at position 3876 of SEQ ID NO: 588721
ccuguaacgcagcugugau

SEQ ID NO: 884839 - RNA, 19 nt, Artificial Sequence
  Description of Artificial Sequence: Synthetic oligonucleotide
  Antisense strand to SEQ ID NO: 884838
aucacagcugcguuacagg

SEQ ID NO: 884840 - RNA, 19 nt, Artificial Sequence
  Description of Artificial Sequence: Synthetic oligonucleotide
  Sense strand starting at position 3974 of SEQ ID NO: 588721
gcuccuaaguggucccuau

SEQ ID NO: 884841 - RNA, 19 nt, Artificial Sequence
  Description of Artificial Sequence: Synthetic oligonucleotide
  Antisense strand to SEQ ID NO: 884840
auagggaccacuuaggagc

SEQ ID NO: 884842 - RNA, 19 nt, Artificial Sequence
  Description of Artificial Sequence: Synthetic oligonucleotide
  Sense strand starting at position 206 of SEQ ID NO: 588722
gacagcuuguggcuuuaaa

SEQ ID NO: 884843 - RNA, 19 nt, Artificial Sequence
  Description of Artificial Sequence: Synthetic oligonucleotide
  Antisense strand to SEQ ID NO: 884842
uuuaaagccacaagcuguc

SEQ ID NO: 884844 - RNA, 19 nt, Artificial Sequence
  Description of Artificial Sequence: Synthetic oligonucleotide
  Sense strand starting at position 233 of SEQ ID NO: 588722
cgagaugaaucauucuuga

SEQ ID NO: 884845 - RNA, 19 nt, Artificial Sequence
  Description of Artificial Sequence: Synthetic oligonucleotide
  Antisense strand to SEQ ID NO: 884844
ucaagaaugauucaucucg

SEQ ID NO: 884846 - RNA, 19 nt, Artificial Sequence
  Description of Artificial Sequence: Synthetic oligonucleotide
  Sense strand starting at position 579 of SEQ ID NO: 588722
ccuaaucaguccuuagaga

SEQ ID NO: 884847 - RNA, 19 nt, Artificial Sequence
  Description of Artificial Sequence: Synthetic oligonucleotide
  Antisense strand to SEQ ID NO: 884846
ucucuaaggacugauuagg

SEQ ID NO: 884848 - RNA, 19 nt, Artificial Sequence
  Description of Artificial Sequence: Synthetic oligonucleotide
  Sense strand starting at position 586 of SEQ ID NO: 588722
aguccuuagagauaggugu

SEQ ID NO: 884849 - RNA, 19 nt, Artificial Sequence
  Description of Artificial Sequence: Synthetic oligonucleotide
  Antisense strand to SEQ ID NO: 884848
acaccuaucucuaaggacu

SEQ ID NO: 884850 - RNA, 19 nt, Artificial Sequence
  Description of Artificial Sequence: Synthetic oligonucleotide
  Sense strand starting at position 618 of SEQ ID NO: 588722
aggugcaggcuuugucaaa

SEQ ID NO: 884851 - RNA, 19 nt, Artificial Sequence
  Description of Artificial Sequence: Synthetic oligonucleotide
  Antisense strand to SEQ ID NO: 884850
uuugacaaagccugcaccu

SEQ ID NO: 884852 - RNA, 19 nt, Artificial Sequence
  Description of Artificial Sequence: Synthetic oligonucleotide
  Sense strand starting at position 619 of SEQ ID NO: 588722
ggugcaggcuuugucaaau

SEQ ID NO: 884853 - RNA, 19 nt, Artificial Sequence
  Description of Artificial Sequence: Synthetic oligonucleotide
  Antisense strand to SEQ ID NO: 884852
auuugacaaagccugcacc

SEQ ID NO: 884854 - RNA, 19 nt, Artificial Sequence
  Description of Artificial Sequence: Synthetic oligonucleotide
  Sense strand starting at position 699 of SEQ ID NO: 588722
gccacacggugucagauuu

SEQ ID NO: 884855 - RNA, 19 nt, Artificial Sequence
  Description of Artificial Sequence: Synthetic oligonucleotide
  Antisense strand to SEQ ID NO: 884854
aaaucugacaccguguggc

SEQ ID NO: 884856 - RNA, 19 nt, Artificial Sequence
  Description of Artificial Sequence: Synthetic oligonucleotide
  Sense strand starting at position 741 of SEQ ID NO: 588722
gguaccuucucgguccaga

SEQ ID NO: 884857 - RNA, 19 nt, Artificial Sequence
  Description of Artificial Sequence: Synthetic oligonucleotide
  Antisense strand to SEQ ID NO: 884856
ucuggaccgagaagguacc

SEQ ID NO: 884858 - RNA, 19 nt, Artificial Sequence
  Description of Artificial Sequence: Synthetic oligonucleotide
  Sense strand starting at position 817 of SEQ ID NO: 588722
ucugcccaccugugagaaa

SEQ ID NO: 884859 - RNA, 19 nt, Artificial Sequence
  Description of Artificial Sequence: Synthetic oligonucleotide
  Antisense strand to SEQ ID NO: 884858
uuucucacaggugggcaga

SEQ ID NO: 884860 - RNA, 19 nt, Artificial Sequence
  Description of Artificial Sequence: Synthetic oligonucleotide
  Sense strand starting at position 1011 of SEQ ID NO: 588722
gugggcgugggcuagaauu

SEQ ID NO: 884861 - RNA, 19 nt, Artificial Sequence
  Description of Artificial Sequence: Synthetic oligonucleotide
  Antisense strand to SEQ ID NO: 884860
aauucuagcccacgcccac

SEQ ID NO: 884862 - RNA, 19 nt, Artificial Sequence
  Description of Artificial Sequence: Synthetic oligonucleotide
  Sense strand starting at position 1013 of SEQ ID NO: 588722
gggcgugggcuagaauuca

SEQ ID NO: 884863 - RNA, 19 nt, Artificial Sequence
  Description of Artificial Sequence: Synthetic oligonucleotide
  Antisense strand to SEQ ID NO: 884862
ugaauucuagcccacgccc

SEQ ID NO: 884864 - RNA, 19 nt, Artificial Sequence
  Description of Artificial Sequence: Synthetic oligonucleotide
  Sense strand starting at position 1344 of SEQ ID NO: 588722
ggaguuauguuucugggau

SEQ ID NO: 884865 - RNA, 19 nt, Artificial Sequence
  Description of Artificial Sequence: Synthetic oligonucleotide
  Antisense strand to SEQ ID NO: 884864
aucccagaaacauaacucc

SEQ ID NO: 884866 - RNA, 19 nt, Artificial Sequence
  Description of Artificial Sequence: Synthetic oligonucleotide
  Sense strand starting at position 2731 of SEQ ID NO: 588722
ccaugugaccuugaaaguc

SEQ ID NO: 884867 - RNA, 19 nt, Artificial Sequence
  Description of Artificial Sequence: Synthetic oligonucleotide
  Antisense strand to SEQ ID NO: 884866
gacuuucaaggucacaugg

SEQ ID NO: 884868 - RNA, 19 nt, Artificial Sequence
  Description of Artificial Sequence: Synthetic oligonucleotide
  Sense strand starting at position 2739 of SEQ ID NO: 588722
ccuugaaagucuucccagu

SEQ ID NO: 884869 - RNA, 19 nt, Artificial Sequence
  Description of Artificial Sequence: Synthetic oligonucleotide
  Antisense strand to SEQ ID NO: 884868
acugggaagacuuucaagg

SEQ ID NO: 884870 - RNA, 19 nt, Artificial Sequence
  Description of Artificial Sequence: Synthetic oligonucleotide
  Sense strand starting at position 2741 of SEQ ID NO: 588722
uugaaagucuucccaguuu

SEQ ID NO: 884871 - RNA, 19 nt, Artificial Sequence
  Description of Artificial Sequence: Synthetic oligonucleotide
  Antisense strand to SEQ ID NO: 884870
aaacugggaagacuuucaa

SEQ ID NO: 884872 - RNA, 19 nt, Artificial Sequence
  Description of Artificial Sequence: Synthetic oligonucleotide
  Sense strand starting at position 2942 of SEQ ID NO: 588722
acacgugucugggagauga

SEQ ID NO: 884873 - RNA, 19 nt, Artificial Sequence
  Description of Artificial Sequence: Synthetic oligonucleotide
  Antisense strand to SEQ ID NO: 884872
ucaucucccagacacgugu

SEQ ID NO: 884874 - RNA, 19 nt, Artificial Sequence
  Description of Artificial Sequence: Synthetic oligonucleotide
  Sense strand starting at position 2944 of SEQ ID NO: 588722
acgugucugggagaugaau

SEQ ID NO: 884875 - RNA, 19 nt, Artificial Sequence
  Description of Artificial Sequence: Synthetic oligonucleotide
  Antisense strand to SEQ ID NO: 884874
auucaucucccagacacgu

SEQ ID NO: 884876 - RNA, 19 nt, Artificial Sequence
  Description of Artificial Sequence: Synthetic oligonucleotide
  Sense strand starting at position 2970 of SEQ ID NO: 588722
uucgguuccugucuagaaa

SEQ ID NO: 884877 - RNA, 19 nt, Artificial Sequence
  Description of Artificial Sequence: Synthetic oligonucleotide
  Antisense strand to SEQ ID NO: 884876
uuucuagacaggaaccgaa

SEQ ID NO: 884878 - RNA, 19 nt, Artificial Sequence
  Description of Artificial Sequence: Synthetic oligonucleotide
  Sense strand starting at position 2971 of SEQ ID NO: 588722
ucgguuccugucuagaaag

SEQ ID NO: 884879 - RNA, 19 nt, Artificial Sequence
  Description of Artificial Sequence: Synthetic oligonucleotide
  Antisense strand to SEQ ID NO: 884878
cuuucuagacaggaaccga

SEQ ID NO: 884880 - RNA, 19 nt, Artificial Sequence
  Description of Artificial Sequence: Synthetic oligonucleotide
  Sense strand starting at position 2978 of SEQ ID NO: 588722
cugucuagaaagugucaga

SEQ ID NO: 884881 - RNA, 19 nt, Artificial Sequence
  Description of Artificial Sequence: Synthetic oligonucleotide
  Antisense strand to SEQ ID NO: 884880
ucugacacuuucuagacag

SEQ ID NO: 884882 - RNA, 19 nt, Artificial Sequence
  Description of Artificial Sequence: Synthetic oligonucleotide
  Sense strand starting at position 2981 of SEQ ID NO: 588722
ucuagaaagugucagagau

SEQ ID NO: 884883 - RNA, 19 nt, Artificial Sequence
  Description of Artificial Sequence: Synthetic oligonucleotide
  Antisense strand to SEQ ID NO: 884882
aucucugacacuuucuaga

SEQ ID NO: 884884 - RNA, 19 nt, Artificial Sequence
  Description of Artificial Sequence: Synthetic oligonucleotide
  Sense strand starting at position 2983 of SEQ ID NO: 588722
uagaaagugucagagauuu

SEQ ID NO: 884885 - RNA, 19 nt, Artificial Sequence
  Description of Artificial Sequence: Synthetic oligonucleotide
  Antisense strand to SEQ ID NO: 884884
aaaucucugacacuuucua

SEQ ID NO: 884886 - RNA, 19 nt, Artificial Sequence
  Description of Artificial Sequence: Synthetic oligonucleotide
  Sense strand starting at position 3107 of SEQ ID NO: 588722
uuuaaugccuucgugaauu

SEQ ID NO: 884887 - RNA, 19 nt, Artificial Sequence
  Description of Artificial Sequence: Synthetic oligonucleotide
  Antisense strand to SEQ ID NO: 884886
aauucacgaaggcauuaaa

SEQ ID NO: 884888 - RNA, 19 nt, Artificial Sequence
  Description of Artificial Sequence: Synthetic oligonucleotide
  Sense strand starting at position 3203 of SEQ ID NO: 588722
uaaggugacuucccagaga

SEQ ID NO: 884889 - RNA, 19 nt, Artificial Sequence
  Description of Artificial Sequence: Synthetic oligonucleotide
  Antisense strand to SEQ ID NO: 884888
ucucugggaagucaccuua

SEQ ID NO: 884890 - RNA, 19 nt, Artificial Sequence
  Description of Artificial Sequence: Synthetic oligonucleotide
  Sense strand starting at position 3314 of SEQ ID NO: 588722
gagcauuuccugcgggcaa

SEQ ID NO: 884891 - RNA, 19 nt, Artificial Sequence
  Description of Artificial Sequence: Synthetic oligonucleotide
  Antisense strand to SEQ ID NO: 884890
uugcccgcaggaaaugcuc

SEQ ID NO: 884892 - RNA, 19 nt, Artificial Sequence
  Description of Artificial Sequence: Synthetic oligonucleotide
  Sense strand starting at position 3316 of SEQ ID NO: 588722
gcauuuccugcgggcaaau

SEQ ID NO: 884893 - RNA, 19 nt, Artificial Sequence
  Description of Artificial Sequence: Synthetic oligonucleotide
  Antisense strand to SEQ ID NO: 884892
auuugcccgcaggaaaugc

SEQ ID NO: 884894 - RNA, 19 nt, Artificial Sequence
  Description of Artificial Sequence: Synthetic oligonucleotide
  Sense strand starting at position 3453 of SEQ ID NO: 588722
ucuugccagcccugagaua

SEQ ID NO: 884895 - RNA, 19 nt, Artificial Sequence
  Description of Artificial Sequence: Synthetic oligonucleotide
  Antisense strand to SEQ ID NO: 884894
uaucucagggcuggcaaga

SEQ ID NO: 884896 - RNA, 19 nt, Artificial Sequence
  Description of Artificial Sequence: Synthetic oligonucleotide
  Sense strand starting at position 3454 of SEQ ID NO: 588722
cuugccagcccugagauau

SEQ ID NO: 884897 - RNA, 19 nt, Artificial Sequence
  Description of Artificial Sequence: Synthetic oligonucleotide
  Antisense strand to SEQ ID NO: 884896
auaucucagggcuggcaag

SEQ ID NO: 884898 - RNA, 19 nt, Artificial Sequence
  Description of Artificial Sequence: Synthetic oligonucleotide
  Sense strand starting at position 3465 of SEQ ID NO: 588722
ugagauaugucauugcguu

SEQ ID NO: 884899 - RNA, 19 nt, Artificial Sequence
  Description of Artificial Sequence: Synthetic oligonucleotide
  Antisense strand to SEQ ID NO: 884898
aacgcaaugacauaucuca

SEQ ID NO: 884900 - RNA, 19 nt, Artificial Sequence
  Description of Artificial Sequence: Synthetic oligonucleotide
  Sense strand starting at position 3466 of SEQ ID NO: 588722
gagauaugucauugcguua

SEQ ID NO: 884901 - RNA, 19 nt, Artificial Sequence
  Description of Artificial Sequence: Synthetic oligonucleotide
  Antisense strand to SEQ ID NO: 884900
uaacgcaaugacauaucuc

SEQ ID NO: 884902 - RNA, 19 nt, Artificial Sequence
  Description of Artificial Sequence: Synthetic oligonucleotide
  Sense strand starting at position 3469 of SEQ ID NO: 588722
auaugucauugcguuaugu

SEQ ID NO: 884903 - RNA, 19 nt, Artificial Sequence
  Description of Artificial Sequence: Synthetic oligonucleotide
  Antisense strand to SEQ ID NO: 884902
acauaacgcaaugacauau

SEQ ID NO: 884904 - RNA, 19 nt, Artificial Sequence
  Description of Artificial Sequence: Synthetic oligonucleotide
  Sense strand starting at position 3471 of SEQ ID NO: 588722
augucauugcguuaugucu

SEQ ID NO: 884905 - RNA, 19 nt, Artificial Sequence
  Description of Artificial Sequence: Synthetic oligonucleotide
  Antisense strand to SEQ ID NO: 884904
agacauaacgcaaugacau

SEQ ID NO: 884906 - RNA, 19 nt, Artificial Sequence
  Description of Artificial Sequence: Synthetic oligonucleotide
  Sense strand starting at position 3477 of SEQ ID NO: 588722
uugcguuaugucuuuggca

SEQ ID NO: 884907 - RNA, 19 nt, Artificial Sequence
  Description of Artificial Sequence: Synthetic oligonucleotide
  Antisense strand to SEQ ID NO: 884906
ugccaaagacauaacgcaa

SEQ ID NO: 884908 - RNA, 19 nt, Artificial Sequence
  Description of Artificial Sequence: Synthetic oligonucleotide
  Sense strand starting at position 3492 of SEQ ID NO: 588722
ggcagucugauaggcgaaa

SEQ ID NO: 884909 - RNA, 19 nt, Artificial Sequence
  Description of Artificial Sequence: Synthetic oligonucleotide
  Antisense strand to SEQ ID NO: 884908
uuucgccuaucagacugcc

SEQ ID NO: 884910 - RNA, 19 nt, Artificial Sequence
  Description of Artificial Sequence: Synthetic oligonucleotide
  Sense strand starting at position 3591 of SEQ ID NO: 588722
uggaauauugccugucugu

SEQ ID NO: 884911 - RNA, 19 nt, Artificial Sequence
  Description of Artificial Sequence: Synthetic oligonucleotide
  Antisense strand to SEQ ID NO: 884910
acagacaggcaauauucca

SEQ ID NO: 884912 - RNA, 19 nt, Artificial Sequence
  Description of Artificial Sequence: Synthetic oligonucleotide
  Sense strand starting at position 3604 of SEQ ID NO: 588722
gucuguguucuuugcccau

SEQ ID NO: 884913 - RNA, 19 nt, Artificial Sequence
  Description of Artificial Sequence: Synthetic oligonucleotide
  Antisense strand to SEQ ID NO: 884912
augggcaaagaacacagac

SEQ ID NO: 884914 - RNA, 19 nt, Artificial Sequence
  Description of Artificial Sequence: Synthetic oligonucleotide
  Sense strand starting at position 3674 of SEQ ID NO: 588722
uuguuaccguaaggaauuu

SEQ ID NO: 884915 - RNA, 19 nt, Artificial Sequence
  Description of Artificial Sequence: Synthetic oligonucleotide
  Antisense strand to SEQ ID NO: 884914
aaauuccuuacgguaacaa

SEQ ID NO: 884916 - RNA, 19 nt, Artificial Sequence
  Description of Artificial Sequence: Synthetic oligonucleotide
  Sense strand starting at position 3693 of SEQ ID NO: 588722
agcucuucucugugcugua

SEQ ID NO: 884917 - RNA, 19 nt, Artificial Sequence
  Description of Artificial Sequence: Synthetic oligonucleotide
  Antisense strand to SEQ ID NO: 884916
uacagcacagagaagagcu

SEQ ID NO: 884918 - RNA, 19 nt, Artificial Sequence
  Description of Artificial Sequence: Synthetic oligonucleotide
  Sense strand starting at position 3705 of SEQ ID NO: 588722
ugcuguaugcuacucugua

SEQ ID NO: 884919 - RNA, 19 nt, Artificial Sequence
  Description of Artificial Sequence: Synthetic oligonucleotide
  Antisense strand to SEQ ID NO: 884918
uacagaguagcauacagca

SEQ ID NO: 884920 - RNA, 19 nt, Artificial Sequence
  Description of Artificial Sequence: Synthetic oligonucleotide
  Sense strand starting at position 3709 of SEQ ID NO: 588722
guaugcuacucuguacaag

SEQ ID NO: 884921 - RNA, 19 nt, Artificial Sequence
  Description of Artificial Sequence: Synthetic oligonucleotide
  Antisense strand to SEQ ID NO: 884920
cuuguacagaguagcauac

SEQ ID NO: 884922 - RNA, 19 nt, Artificial Sequence
  Description of Artificial Sequence: Synthetic oligonucleotide
  Sense strand starting at position 198 of SEQ ID NO: 588723
cggagucaucaccagaacu

SEQ ID NO: 884923 - RNA, 19 nt, Artificial Sequence
  Description of Artificial Sequence: Synthetic oligonucleotide
  Antisense strand to SEQ ID NO: 884922
aguucuggugaugacuccg

SEQ ID NO: 884924 - RNA, 19 nt, Artificial Sequence
  Description of Artificial Sequence: Synthetic oligonucleotide
  Sense strand starting at position 1028 of SEQ ID NO: 588723
ccuggacauccuuguucua

SEQ ID NO: 884925 - RNA, 19 nt, Artificial Sequence
  Description of Artificial Sequence: Synthetic oligonucleotide
  Antisense strand to SEQ ID NO: 884924
uagaacaaggauguccagg

SEQ ID NO: 884926 - RNA, 19 nt, Artificial Sequence
  Description of Artificial Sequence: Synthetic oligonucleotide
  Sense strand starting at position 1030 of SEQ ID NO: 588723
uggacauccuuguucuaag

SEQ ID NO: 884927 - RNA, 19 nt, Artificial Sequence
  Description of Artificial Sequence: Synthetic oligonucleotide
  Antisense strand to SEQ ID NO: 884926
cuuagaacaaggaugucca

SEQ ID NO: 884928 - RNA, 19 nt, Artificial Sequence
  Description of Artificial Sequence: Synthetic oligonucleotide
  Sense strand starting at position 1213 of SEQ ID NO: 588723
gagacaggauagcaagaau

SEQ ID NO: 884929 - RNA, 19 nt, Artificial Sequence
  Description of Artificial Sequence: Synthetic oligonucleotide
  Antisense strand to SEQ ID NO: 884928
auucuugcuauccugucuc

SEQ ID NO: 884930 - RNA, 19 nt, Artificial Sequence
  Description of Artificial Sequence: Synthetic oligonucleotide
  Sense strand starting at position 1279 of SEQ ID NO: 588723
ugccucugucgggaaugua

SEQ ID NO: 884931 - RNA, 19 nt, Artificial Sequence
  Description of Artificial Sequence: Synthetic oligonucleotide
  Antisense strand to SEQ ID NO: 884930
uacauucccgacagaggca

SEQ ID NO: 884932 - RNA, 19 nt, Artificial Sequence
  Description of Artificial Sequence: Synthetic oligonucleotide
  Sense strand starting at position 1298 of SEQ ID NO: 588723
aaaguuaucuauggccagu

SEQ ID NO: 884933 - RNA, 19 nt, Artificial Sequence
  Description of Artificial Sequence: Synthetic oligonucleotide
  Antisense strand to SEQ ID NO: 884932
acuggccauagauaacuuu

SEQ ID NO: 884934 - RNA, 19 nt, Artificial Sequence
  Description of Artificial Sequence: Synthetic oligonucleotide
  Sense strand starting at position 1372 of SEQ ID NO: 588723
ucucuaagauccuuccgua

SEQ ID NO: 884935 - RNA, 19 nt, Artificial Sequence
  Description of Artificial Sequence: Synthetic oligonucleotide
  Antisense strand to SEQ ID NO: 884934
uacggaaggaucuuagaga

SEQ ID NO: 884936 - RNA, 19 nt, Artificial Sequence
  Description of Artificial Sequence: Synthetic oligonucleotide
  Sense strand starting at position 1391 of SEQ ID NO: 588723
gcaccuccaucccaguuau

SEQ ID NO: 884937 - RNA, 19 nt, Artificial Sequence
  Description of Artificial Sequence: Synthetic oligonucleotide
  Antisense strand to SEQ ID NO: 884936
auaacugggauggaggugc

SEQ ID NO: 884938 - RNA, 19 nt, Artificial Sequence
  Description of Artificial Sequence: Synthetic oligonucleotide
  Sense strand starting at position 1402 of SEQ ID NO: 588723
ccaguuauuuaagaugaac

SEQ ID NO: 884939 - RNA, 19 nt, Artificial Sequence
  Description of Artificial Sequence: Synthetic oligonucleotide
  Antisense strand to SEQ ID NO: 884938
guucaucuuaaauaacugg

SEQ ID NO: 884940 - RNA, 19 nt, Artificial Sequence
  Description of Artificial Sequence: Synthetic oligonucleotide
  Sense strand starting at position 1522 of SEQ ID NO: 588723
cgggcaguuucccucaaua

SEQ ID NO: 884941 - RNA, 19 nt, Artificial Sequence
  Description of Artificial Sequence: Synthetic oligonucleotide
  Antisense strand to SEQ ID NO: 884940
uauugagggaaacugcccg

SEQ ID NO: 884942 - RNA, 19 nt, Artificial Sequence
  Description of Artificial Sequence: Synthetic oligonucleotide
  Sense strand starting at position 1524 of SEQ ID NO: 588723
ggcaguuucccucaauaaa

SEQ ID NO: 884943 - RNA, 19 nt, Artificial Sequence
  Description of Artificial Sequence: Synthetic oligonucleotide
  Antisense strand to SEQ ID NO: 884942
uuuauugagggaaacugcc

SEQ ID NO: 884944 - RNA, 19 nt, Artificial Sequence
  Description of Artificial Sequence: Synthetic oligonucleotide
  Sense strand starting at position 1650 of SEQ ID NO: 588723
cuaagcagcgacuaauaaa

SEQ ID NO: 884945 - RNA, 19 nt, Artificial Sequence
  Description of Artificial Sequence: Synthetic oligonucleotide
  Antisense strand to SEQ ID NO: 884944
uuuauuagucgcugcuuag

SEQ ID NO: 884946 - RNA, 19 nt, Artificial Sequence
  Description of Artificial Sequence: Synthetic oligonucleotide
  Sense strand starting at position 1721 of SEQ ID NO: 588723
gagucagcagcuuacuuaa

SEQ ID NO: 884947 - RNA, 19 nt, Artificial Sequence
  Description of Artificial Sequence: Synthetic oligonucleotide
  Antisense strand to SEQ ID NO: 884946
uuaaguaagcugcugacuc

SEQ ID NO: 884948 - RNA, 19 nt, Artificial Sequence
  Description of Artificial Sequence: Synthetic oligonucleotide
  Sense strand starting at position 2461 of SEQ ID NO: 588723
uuggguugugcucagccau

SEQ ID NO: 884949 - RNA, 19 nt, Artificial Sequence
  Description of Artificial Sequence: Synthetic oligonucleotide
  Antisense strand to SEQ ID NO: 884948
auggcugagcacaacccaa

SEQ ID NO: 884950 - RNA, 19 nt, Artificial Sequence
  Description of Artificial Sequence: Synthetic oligonucleotide
  Sense strand starting at position 2464 of SEQ ID NO: 588723
gguugugcucagccauguu

SEQ ID NO: 884951 - RNA, 19 nt, Artificial Sequence
  Description of Artificial Sequence: Synthetic oligonucleotide
  Antisense strand to SEQ ID NO: 884950
aacauggcugagcacaacc

SEQ ID NO: 884952 - RNA, 19 nt, Artificial Sequence
  Description of Artificial Sequence: Synthetic oligonucleotide
  Sense strand starting at position 2505 of SEQ ID NO: 588723
cggaguaccaccugucauc

SEQ ID NO: 884953 - RNA, 19 nt, Artificial Sequence
  Description of Artificial Sequence: Synthetic oligonucleotide
  Antisense strand to SEQ ID NO: 884952
gaugacaggugguacuccg

SEQ ID NO: 884954 - RNA, 19 nt, Artificial Sequence
  Description of Artificial Sequence: Synthetic oligonucleotide
  Sense strand starting at position 2518 of SEQ ID NO: 588723
gucaucuuuguggguggua

SEQ ID NO: 884955 - RNA, 19 nt, Artificial Sequence
  Description of Artificial Sequence: Synthetic oligonucleotide
  Antisense strand to SEQ ID NO: 884954
uaccacccacaaagaugac

SEQ ID NO: 884956 - RNA, 19 nt, Artificial Sequence
  Description of Artificial Sequence: Synthetic oligonucleotide
  Sense strand starting at position 2549 of SEQ ID NO: 588723
caaggaauauuagaggaca

SEQ ID NO: 884957 - RNA, 19 nt, Artificial Sequence
  Description of Artificial Sequence: Synthetic oligonucleotide
  Antisense strand to SEQ ID NO: 884956
uguccucuaauauuccuug

SEQ ID NO: 884958 - RNA, 19 nt, Artificial Sequence
  Description of Artificial Sequence: Synthetic oligonucleotide
  Sense strand starting at position 2574 of SEQ ID NO: 588723
ggucaacaugguuguguuu

SEQ ID NO: 884959 - RNA, 19 nt, Artificial Sequence
  Description of Artificial Sequence: Synthetic oligonucleotide
  Antisense strand to SEQ ID NO: 884958
aaacacaaccauguugacc

SEQ ID NO: 884960 - RNA, 19 nt, Artificial Sequence
  Description of Artificial Sequence: Synthetic oligonucleotide
  Sense strand starting at position 2595 of SEQ ID NO: 588723
cuaucacucuaagaguuag

SEQ ID NO: 884961 - RNA, 19 nt, Artificial Sequence
  Description of Artificial Sequence: Synthetic oligonucleotide
  Antisense strand to SEQ ID NO: 884960
cuaacucuuagagugauag

SEQ ID NO: 884962 - RNA, 19 nt, Artificial Sequence
  Description of Artificial Sequence: Synthetic oligonucleotide
  Sense strand starting at position 2601 of SEQ ID NO: 588723
cucuaagaguuaggcucaa

SEQ ID NO: 884963 - RNA, 19 nt, Artificial Sequence
  Description of Artificial Sequence: Synthetic oligonucleotide
  Antisense strand to SEQ ID NO: 884962
uugagccuaacucuuagag

SEQ ID NO: 884964 - RNA, 19 nt, Artificial Sequence
  Description of Artificial Sequence: Synthetic oligonucleotide
  Sense strand starting at position 3049 of SEQ ID NO: 588723
gcuguaacucagcgaccuu

SEQ ID NO: 884965 - RNA, 19 nt, Artificial Sequence
  Description of Artificial Sequence: Synthetic oligonucleotide
  Antisense strand to SEQ ID NO: 884964
aaggucgcugaguuacagc

SEQ ID NO: 884966 - RNA, 19 nt, Artificial Sequence
  Description of Artificial Sequence: Synthetic oligonucleotide
  Sense strand starting at position 3378 of SEQ ID NO: 588723
aggucagaagcgggauuaa

SEQ ID NO: 884967 - RNA, 19 nt, Artificial Sequence
  Description of Artificial Sequence: Synthetic oligonucleotide
  Antisense strand to SEQ ID NO: 884966
uuaaucccgcuucugaccu

SEQ ID NO: 884968 - RNA, 19 nt, Artificial Sequence
  Description of Artificial Sequence: Synthetic oligonucleotide
  Sense strand starting at position 3528 of SEQ ID NO: 588723
agcucacucucccaguuau

SEQ ID NO: 884969 - RNA, 19 nt, Artificial Sequence
  Description of Artificial Sequence: Synthetic oligonucleotide
  Antisense strand to SEQ ID NO: 884968
auaacugggagagugagcu

SEQ ID NO: 884970 - RNA, 19 nt, Artificial Sequence
  Description of Artificial Sequence: Synthetic oligonucleotide
  Sense strand starting at position 3538 of SEQ ID NO: 588723
cccaguuauucuccgauug

SEQ ID NO: 884971 - RNA, 19 nt, Artificial Sequence
  Description of Artificial Sequence: Synthetic oligonucleotide
  Antisense strand to SEQ ID NO: 884970
caaucggagaauaacuggg

SEQ ID NO: 884972 - RNA, 19 nt, Artificial Sequence
  Description of Artificial Sequence: Synthetic oligonucleotide
  Sense strand starting at position 3539 of SEQ ID NO: 588723
ccaguuauucuccgauuga

SEQ ID NO: 884973 - RNA, 19 nt, Artificial Sequence
  Description of Artificial Sequence: Synthetic oligonucleotide
  Antisense strand to SEQ ID NO: 884972
ucaaucggagaauaacugg

SEQ ID NO: 884974 - RNA, 19 nt, Artificial Sequence
  Description of Artificial Sequence: Synthetic oligonucleotide
  Sense strand starting at position 3540 of SEQ ID NO: 588723
caguuauucuccgauugac

SEQ ID NO: 884975 - RNA, 19 nt, Artificial Sequence
  Description of Artificial Sequence: Synthetic oligonucleotide
  Antisense strand to SEQ ID NO: 884974
gucaaucggagaauaacug

SEQ ID NO: 884976 - RNA, 19 nt, Artificial Sequence
  Description of Artificial Sequence: Synthetic oligonucleotide
  Sense strand starting at position 3543 of SEQ ID NO: 588723
uuauucuccgauugacaca

SEQ ID NO: 884977 - RNA, 19 nt, Artificial Sequence
  Description of Artificial Sequence: Synthetic oligonucleotide
  Antisense strand to SEQ ID NO: 884976
ugugucaaucggagaauaa

SEQ ID NO: 884978 - RNA, 19 nt, Artificial Sequence
  Description of Artificial Sequence: Synthetic oligonucleotide
  Sense strand starting at position 3610 of SEQ ID NO: 588723
gucacacuccuuugguuua

SEQ ID NO: 884979 - RNA, 19 nt, Artificial Sequence
  Description of Artificial Sequence: Synthetic oligonucleotide
  Antisense strand to SEQ ID NO: 884978
uaaaccaaaggagugugac

SEQ ID NO: 884980 - RNA, 19 nt, Artificial Sequence
  Description of Artificial Sequence: Synthetic oligonucleotide
  Sense strand starting at position 3615 of SEQ ID NO: 588723
acuccuuugguuuaucaga

SEQ ID NO: 884981 - RNA, 19 nt, Artificial Sequence
  Description of Artificial Sequence: Synthetic oligonucleotide
  Antisense strand to SEQ ID NO: 884980
ucugauaaaccaaaggagu

SEQ ID NO: 884982 - RNA, 19 nt, Artificial Sequence
  Description of Artificial Sequence: Synthetic oligonucleotide
  Sense strand starting at position 3863 of SEQ ID NO: 588723
cccggaugcuagccuaauu

SEQ ID NO: 884983 - RNA, 19 nt, Artificial Sequence
  Description of Artificial Sequence: Synthetic oligonucleotide
  Antisense strand to SEQ ID NO: 884982
aauuaggcuagcauccggg

SEQ ID NO: 884984 - RNA, 19 nt, Artificial Sequence
  Description of Artificial Sequence: Synthetic oligonucleotide
  Sense strand starting at position 3909 of SEQ ID NO: 588723
auauguugcuggugucuca

SEQ ID NO: 884985 - RNA, 19 nt, Artificial Sequence
  Description of Artificial Sequence: Synthetic oligonucleotide
  Antisense strand to SEQ ID NO: 884984
ugagacaccagcaacauau

SEQ ID NO: 884986 - RNA, 19 nt, Artificial Sequence
  Description of Artificial Sequence: Synthetic oligonucleotide
  Sense strand starting at position 654 of SEQ ID NO: 588724
ccuggacauccuuguucua

SEQ ID NO: 884987 - RNA, 19 nt, Artificial Sequence
  Description of Artificial Sequence: Synthetic oligonucleotide
  Antisense strand to SEQ ID NO: 884986
uagaacaaggauguccagg

SEQ ID NO: 884988 - RNA, 19 nt, Artificial Sequence
  Description of Artificial Sequence: Synthetic oligonucleotide
  Sense strand starting at position 656 of SEQ ID NO: 588724
uggacauccuuguucuaag

SEQ ID NO: 884989 - RNA, 19 nt, Artificial Sequence
  Description of Artificial Sequence: Synthetic oligonucleotide
  Antisense strand to SEQ ID NO: 884988
cuuagaacaaggaugucca

SEQ ID NO: 884990 - RNA, 19 nt, Artificial Sequence
  Description of Artificial Sequence: Synthetic oligonucleotide
  Sense strand starting at position 839 of SEQ ID NO: 588724
gagacaggauagcaagaau

SEQ ID NO: 884991 - RNA, 19 nt, Artificial Sequence
  Description of Artificial Sequence: Synthetic oligonucleotide
  Antisense strand to SEQ ID NO: 884990
auucuugcuauccugucuc

SEQ ID NO: 884992 - RNA, 19 nt, Artificial Sequence
  Description of Artificial Sequence: Synthetic oligonucleotide
  Sense strand starting at position 905 of SEQ ID NO: 588724
ugccucugucgggaaugua

SEQ ID NO: 884993 - RNA, 19 nt, Artificial Sequence
  Description of Artificial Sequence: Synthetic oligonucleotide
  Antisense strand to SEQ ID NO: 884992
uacauucccgacagaggca

SEQ ID NO: 884994 - RNA, 19 nt, Artificial Sequence
  Description of Artificial Sequence: Synthetic oligonucleotide
  Sense strand starting at position 924 of SEQ ID NO: 588724
aaaguuaucuauggccagu

SEQ ID NO: 884995 - RNA, 19 nt, Artificial Sequence
  Description of Artificial Sequence: Synthetic oligonucleotide
  Antisense strand to SEQ ID NO: 884994
acuggccauagauaacuuu

SEQ ID NO: 884996 - RNA, 19 nt, Artificial Sequence
  Description of Artificial Sequence: Synthetic oligonucleotide
  Sense strand starting at position 998 of SEQ ID NO: 588724
ucucuaagauccuuccgua

SEQ ID NO: 884997 - RNA, 19 nt, Artificial Sequence
  Description of Artificial Sequence: Synthetic oligonucleotide
  Antisense strand to SEQ ID NO: 884996
uacggaaggaucuuagaga

SEQ ID NO: 884998 - RNA, 19 nt, Artificial Sequence
  Description of Artificial Sequence: Synthetic oligonucleotide
  Sense strand starting at position 1017 of SEQ ID NO: 588724
gcaccuccaucccaguuau

SEQ ID NO: 884999 - RNA, 19 nt, Artificial Sequence
  Description of Artificial Sequence: Synthetic oligonucleotide
  Antisense strand to SEQ ID NO: 884998
auaacugggauggaggugc

SEQ ID NO: 885000 - RNA, 19 nt, Artificial Sequence
  Description of Artificial Sequence: Synthetic oligonucleotide
  Sense strand starting at position 1028 of SEQ ID NO: 588724
ccaguuauuuaagaugaac

SEQ ID NO: 885001 - RNA, 19 nt, Artificial Sequence
  Description of Artificial Sequence: Synthetic oligonucleotide
  Antisense strand to SEQ ID NO: 885000
guucaucuuaaauaacugg

SEQ ID NO: 885002 - RNA, 19 nt, Artificial Sequence
  Description of Artificial Sequence: Synthetic oligonucleotide
  Sense strand starting at position 1148 of SEQ ID NO: 588724
cgggcaguuucccucaaua

SEQ ID NO: 885003 - RNA, 19 nt, Artificial Sequence
  Description of Artificial Sequence: Synthetic oligonucleotide
  Antisense strand to SEQ ID NO: 885002
uauugagggaaacugcccg

SEQ ID NO: 885004 - RNA, 19 nt, Artificial Sequence
  Description of Artificial Sequence: Synthetic oligonucleotide
  Sense strand starting at position 1150 of SEQ ID NO: 588724
ggcaguuucccucaauaaa

SEQ ID NO: 885005 - RNA, 19 nt, Artificial Sequence
  Description of Artificial Sequence: Synthetic oligonucleotide
  Antisense strand to SEQ ID NO: 885004
uuuauugagggaaacugcc

SEQ ID NO: 885006 - RNA, 19 nt, Artificial Sequence
  Description of Artificial Sequence: Synthetic oligonucleotide
  Sense strand starting at position 1276 of SEQ ID NO: 588724
cuaagcagcgacuaauaaa

SEQ ID NO: 885007 - RNA, 19 nt, Artificial Sequence
  Description of Artificial Sequence: Synthetic oligonucleotide
  Antisense strand to SEQ ID NO: 885006
uuuauuagucgcugcuuag

SEQ ID NO: 885008 - RNA, 19 nt, Artificial Sequence
  Description of Artificial Sequence: Synthetic oligonucleotide
  Sense strand starting at position 1347 of SEQ ID NO: 588724
gagucagcagcuuacuuaa

SEQ ID NO: 885009 - RNA, 19 nt, Artificial Sequence
  Description of Artificial Sequence: Synthetic oligonucleotide
  Antisense strand to SEQ ID NO: 885008
uuaaguaagcugcugacuc

SEQ ID NO: 885010 - RNA, 19 nt, Artificial Sequence
  Description of Artificial Sequence: Synthetic oligonucleotide
  Sense strand starting at position 2087 of SEQ ID NO: 588724
uuggguugugcucagccau

SEQ ID NO: 885011 - RNA, 19 nt, Artificial Sequence
  Description of Artificial Sequence: Synthetic oligonucleotide
  Antisense strand to SEQ ID NO: 885010
auggcugagcacaacccaa

SEQ ID NO: 885012 - RNA, 19 nt, Artificial Sequence
  Description of Artificial Sequence: Synthetic oligonucleotide
  Sense strand starting at position 2090 of SEQ ID NO: 588724
gguugugcucagccauguu

SEQ ID NO: 885013 - RNA, 19 nt, Artificial Sequence
  Description of Artificial Sequence: Synthetic oligonucleotide
  Antisense strand to SEQ ID NO: 885012
aacauggcugagcacaacc

SEQ ID NO: 885014 - RNA, 19 nt, Artificial Sequence
  Description of Artificial Sequence: Synthetic oligonucleotide
  Sense strand starting at position 2131 of SEQ ID NO: 588724
cggaguaccaccugucauc

SEQ ID NO: 885015 - RNA, 19 nt, Artificial Sequence
  Description of Artificial Sequence: Synthetic oligonucleotide
  Antisense strand to SEQ ID NO: 885014
gaugacaggugguacuccg

SEQ ID NO: 885016 - RNA, 19 nt, Artificial Sequence
  Description of Artificial Sequence: Synthetic oligonucleotide
  Sense strand starting at position 2144 of SEQ ID NO: 588724
gucaucuuuguggguggua

SEQ ID NO: 885017 - RNA, 19 nt, Artificial Sequence
  Description of Artificial Sequence: Synthetic oligonucleotide
  Antisense strand to SEQ ID NO: 885016
uaccacccacaaagaugac

SEQ ID NO: 885018 - RNA, 19 nt, Artificial Sequence
  Description of Artificial Sequence: Synthetic oligonucleotide
  Sense strand starting at position 2175 of SEQ ID NO: 588724
caaggaauauuagaggaca

SEQ ID NO: 885019 - RNA, 19 nt, Artificial Sequence
  Description of Artificial Sequence: Synthetic oligonucleotide
  Antisense strand to SEQ ID NO: 885018
uguccucuaauauuccuug

SEQ ID NO: 885020 - RNA, 19 nt, Artificial Sequence
  Description of Artificial Sequence: Synthetic oligonucleotide
  Sense strand starting at position 2200 of SEQ ID NO: 588724
ggucaacaugguuguguuu

SEQ ID NO: 885021 - RNA, 19 nt, Artificial Sequence
  Description of Artificial Sequence: Synthetic oligonucleotide
  Antisense strand to SEQ ID NO: 885020
aaacacaaccauguugacc

SEQ ID NO: 885022 - RNA, 19 nt, Artificial Sequence
  Description of Artificial Sequence: Synthetic oligonucleotide
  Sense strand starting at position 2221 of SEQ ID NO: 588724
cuaucacucuaagaguuag

SEQ ID NO: 885023 - RNA, 19 nt, Artificial Sequence
  Description of Artificial Sequence: Synthetic oligonucleotide
  Antisense strand to SEQ ID NO: 885022
cuaacucuuagagugauag

SEQ ID NO: 885024 - RNA, 19 nt, Artificial Sequence
  Description of Artificial Sequence: Synthetic oligonucleotide
  Sense strand starting at position 2227 of SEQ ID NO: 588724
cucuaagaguuaggcucaa

SEQ ID NO: 885025 - RNA, 19 nt, Artificial Sequence
  Description of Artificial Sequence: Synthetic oligonucleotide
  Antisense strand to SEQ ID NO: 885024
uugagccuaacucuuagag

SEQ ID NO: 885026 - RNA, 19 nt, Artificial Sequence
  Description of Artificial Sequence: Synthetic oligonucleotide
  Sense strand starting at position 2675 of SEQ ID NO: 588724
gcuguaacucagcgaccuu

SEQ ID NO: 885027 - RNA, 19 nt, Artificial Sequence
  Description of Artificial Sequence: Synthetic oligonucleotide
  Antisense strand to SEQ ID NO: 885026
aaggucgcugaguuacagc

SEQ ID NO: 885028 - RNA, 19 nt, Artificial Sequence
  Description of Artificial Sequence: Synthetic oligonucleotide
  Sense strand starting at position 3004 of SEQ ID NO: 588724
aggucagaagcgggauuaa

SEQ ID NO: 885029 - RNA, 19 nt, Artificial Sequence
  Description of Artificial Sequence: Synthetic oligonucleotide
  Antisense strand to SEQ ID NO: 885028
uuaaucccgcuucugaccu

SEQ ID NO: 885030 - RNA, 19 nt, Artificial Sequence
  Description of Artificial Sequence: Synthetic oligonucleotide
  Sense strand starting at position 3154 of SEQ ID NO: 588724
agcucacucucccaguuau

SEQ ID NO: 885031 - RNA, 19 nt, Artificial Sequence
  Description of Artificial Sequence: Synthetic oligonucleotide
  Antisense strand to SEQ ID NO: 885030
auaacugggagagugagcu

SEQ ID NO: 885032 - RNA, 19 nt, Artificial Sequence
  Description of Artificial Sequence: Synthetic oligonucleotide
  Sense strand starting at position 3164 of SEQ ID NO: 588724
cccaguuauucuccgauug

SEQ ID NO: 885033 - RNA, 19 nt, Artificial Sequence
  Description of Artificial Sequence: Synthetic oligonucleotide
  Antisense strand to SEQ ID NO: 885032
caaucggagaauaacuggg

SEQ ID NO: 885034 - RNA, 19 nt, Artificial Sequence
  Description of Artificial Sequence: Synthetic oligonucleotide
  Sense strand starting at position 3165 of SEQ ID NO: 588724
ccaguuauucuccgauuga

SEQ ID NO: 885035 - RNA, 19 nt, Artificial Sequence
  Description of Artificial Sequence: Synthetic oligonucleotide
  Antisense strand to SEQ ID NO: 885034
ucaaucggagaauaacugg

SEQ ID NO: 885036 - RNA, 19 nt, Artificial Sequence
  Description of Artificial Sequence: Synthetic oligonucleotide
  Sense strand starting at position 3166 of SEQ ID NO: 588724
caguuauucuccgauugac

SEQ ID NO: 885037 - RNA, 19 nt, Artificial Sequence
  Description of Artificial Sequence: Synthetic oligonucleotide
  Antisense strand to SEQ ID NO: 885036
gucaaucggagaauaacug

SEQ ID NO: 885038 - RNA, 19 nt, Artificial Sequence
  Description of Artificial Sequence: Synthetic oligonucleotide
  Sense strand starting at position 3169 of SEQ ID NO: 588724
uuauucuccgauugacaca

SEQ ID NO: 885039 - RNA, 19 nt, Artificial Sequence
  Description of Artificial Sequence: Synthetic oligonucleotide
  Antisense strand to SEQ ID NO: 885038
ugugucaaucggagaauaa

SEQ ID NO: 885040 - RNA, 19 nt, Artificial Sequence
  Description of Artificial Sequence: Synthetic oligonucleotide
  Sense strand starting at position 3236 of SEQ ID NO: 588724
gucacacuccuuugguuua

SEQ ID NO: 885041 - RNA, 19 nt, Artificial Sequence
  Description of Artificial Sequence: Synthetic oligonucleotide
  Antisense strand to SEQ ID NO: 885040
uaaaccaaaggagugugac

SEQ ID NO: 885042 - RNA, 19 nt, Artificial Sequence
  Description of Artificial Sequence: Synthetic oligonucleotide
  Sense strand starting at position 3241 of SEQ ID NO: 588724
acuccuuugguuuaucaga

SEQ ID NO: 885043 - RNA, 19 nt, Artificial Sequence
  Description of Artificial Sequence: Synthetic oligonucleotide
  Antisense strand to SEQ ID NO: 885042
ucugauaaaccaaaggagu

SEQ ID NO: 885044 - RNA, 19 nt, Artificial Sequence
  Description of Artificial Sequence: Synthetic oligonucleotide
  Sense strand starting at position 3489 of SEQ ID NO: 588724
cccggaugcuagccuaauu

SEQ ID NO: 885045 - RNA, 19 nt, Artificial Sequence
  Description of Artificial Sequence: Synthetic oligonucleotide
  Antisense strand to SEQ ID NO: 885044
aauuaggcuagcauccggg

SEQ ID NO: 885046 - RNA, 19 nt, Artificial Sequence
  Description of Artificial Sequence: Synthetic oligonucleotide
  Sense strand starting at position 3535 of SEQ ID NO: 588724
auauguugcuggugucuca

SEQ ID NO: 885047 - RNA, 19 nt, Artificial Sequence
  Description of Artificial Sequence: Synthetic oligonucleotide
  Antisense strand to SEQ ID NO: 885046
ugagacaccagcaacauau

SEQ ID NO: 885048 - RNA, 19 nt, Artificial Sequence
  Description of Artificial Sequence: Synthetic oligonucleotide
  Sense strand starting at position 3701 of SEQ ID NO: 588724
ucuagaucauccuccagga

SEQ ID NO: 885049 - RNA, 19 nt, Artificial Sequence
  Description of Artificial Sequence: Synthetic oligonucleotide
  Antisense strand to SEQ ID NO: 885048
uccuggaggaugaucuaga

SEQ ID NO: 885050 - RNA, 19 nt, Artificial Sequence
  Description of Artificial Sequence: Synthetic oligonucleotide
  Sense strand starting at position 3736 of SEQ ID NO: 588724
guuaccuuccugcagggaa

SEQ ID NO: 885051 - RNA, 19 nt, Artificial Sequence
  Description of Artificial Sequence: Synthetic oligonucleotide
  Antisense strand to SEQ ID NO: 885050
uucccugcaggaagguaac

SEQ ID NO: 885052 - RNA, 19 nt, Artificial Sequence
  Description of Artificial Sequence: Synthetic oligonucleotide
  Sense strand starting at position 3810 of SEQ ID NO: 588724
gcccaaucccaguguccuu

SEQ ID NO: 885053 - RNA, 19 nt, Artificial Sequence
  Description of Artificial Sequence: Synthetic oligonucleotide
  Antisense strand to SEQ ID NO: 885052
aaggacacugggauugggc

SEQ ID NO: 885054 - RNA, 19 nt, Artificial Sequence
  Description of Artificial Sequence: Synthetic oligonucleotide
  Sense strand starting at position 3819 of SEQ ID NO: 588724
caguguccuuugguuuauu

SEQ ID NO: 885055 - RNA, 19 nt, Artificial Sequence
  Description of Artificial Sequence: Synthetic oligonucleotide
  Antisense strand to SEQ ID NO: 885054
aauaaaccaaaggacacug

SEQ ID NO: 885056 - RNA, 19 nt, Artificial Sequence
  Description of Artificial Sequence: Synthetic oligonucleotide
  Sense strand starting at position 3897 of SEQ ID NO: 588724
aaaugaguguucguagagg

SEQ ID NO: 885057 - RNA, 19 nt, Artificial Sequence
  Description of Artificial Sequence: Synthetic oligonucleotide
  Antisense strand to SEQ ID NO: 885056
ccucuacgaacacucauuu

SEQ ID NO: 885058 - RNA, 19 nt, Artificial Sequence
  Description of Artificial Sequence: Synthetic oligonucleotide
  Sense strand starting at position 3900 of SEQ ID NO: 588724
ugaguguucguagagggau

SEQ ID NO: 885059 - RNA, 19 nt, Artificial Sequence
  Description of Artificial Sequence: Synthetic oligonucleotide
  Antisense strand to SEQ ID NO: 885058
aucccucuacgaacacuca

SEQ ID NO: 885060 - RNA, 19 nt, Artificial Sequence
  Description of Artificial Sequence: Synthetic oligonucleotide
  Sense strand starting at position 3901 of SEQ ID NO: 588724
gaguguucguagagggaug

SEQ ID NO: 885061 - RNA, 19 nt, Artificial Sequence
  Description of Artificial Sequence: Synthetic oligonucleotide
  Antisense strand to SEQ ID NO: 885060
caucccucuacgaacacuc

SEQ ID NO: 885062 - RNA, 19 nt, Artificial Sequence
  Description of Artificial Sequence: Synthetic oligonucleotide
  Sense strand starting at position 289 of SEQ ID NO: 588725
ccuggacauccuuguucua

SEQ ID NO: 885063 - RNA, 19 nt, Artificial Sequence
  Description of Artificial Sequence: Synthetic oligonucleotide
  Antisense strand to SEQ ID NO: 885062
uagaacaaggauguccagg

SEQ ID NO: 885064 - RNA, 19 nt, Artificial Sequence
  Description of Artificial Sequence: Synthetic oligonucleotide
  Sense strand starting at position 291 of SEQ ID NO: 588725
uggacauccuuguucuaag

SEQ ID NO: 885065 - RNA, 19 nt, Artificial Sequence
  Description of Artificial Sequence: Synthetic oligonucleotide
  Antisense strand to SEQ ID NO: 885064
cuuagaacaaggaugucca

SEQ ID NO: 885066 - RNA, 19 nt, Artificial Sequence
  Description of Artificial Sequence: Synthetic oligonucleotide
  Sense strand starting at position 474 of SEQ ID NO: 588725
gagacaggauagcaagaau

SEQ ID NO: 885067 - RNA, 19 nt, Artificial Sequence
  Description of Artificial Sequence: Synthetic oligonucleotide
  Antisense strand to SEQ ID NO: 885066
auucuugcuauccugucuc

SEQ ID NO: 885068 - RNA, 19 nt, Artificial Sequence
  Description of Artificial Sequence: Synthetic oligonucleotide
  Sense strand starting at position 540 of SEQ ID NO: 588725
ugccucugucgggaaugua

SEQ ID NO: 885069 - RNA, 19 nt, Artificial Sequence
  Description of Artificial Sequence: Synthetic oligonucleotide
  Antisense strand to SEQ ID NO: 885068
uacauucccgacagaggca

SEQ ID NO: 885070 - RNA, 19 nt, Artificial Sequence
  Description of Artificial Sequence: Synthetic oligonucleotide
  Sense strand starting at position 559 of SEQ ID NO: 588725
aaaguuaucuauggccagu

SEQ ID NO: 885071 - RNA, 19 nt, Artificial Sequence
  Description of Artificial Sequence: Synthetic oligonucleotide
  Antisense strand to SEQ ID NO: 885070
acuggccauagauaacuuu

SEQ ID NO: 885072 - RNA, 19 nt, Artificial Sequence
  Description of Artificial Sequence: Synthetic oligonucleotide
  Sense strand starting at position 633 of SEQ ID NO: 588725
ucucuaagauccuuccgua

SEQ ID NO: 885073 - RNA, 19 nt, Artificial Sequence
  Description of Artificial Sequence: Synthetic oligonucleotide
  Antisense strand to SEQ ID NO: 885072
uacggaaggaucuuagaga

SEQ ID NO: 885074 - RNA, 19 nt, Artificial Sequence
  Description of Artificial Sequence: Synthetic oligonucleotide
  Sense strand starting at position 652 of SEQ ID NO: 588725
gcaccuccaucccaguuau

SEQ ID NO: 885075 - RNA, 19 nt, Artificial Sequence
  Description of Artificial Sequence: Synthetic oligonucleotide
  Antisense strand to SEQ ID NO: 885074
auaacugggauggaggugc

SEQ ID NO: 885076 - RNA, 19 nt, Artificial Sequence
  Description of Artificial Sequence: Synthetic oligonucleotide
  Sense strand starting at position 663 of SEQ ID NO: 588725
ccaguuauuuaagaugaac

SEQ ID NO: 885077 - RNA, 19 nt, Artificial Sequence
  Description of Artificial Sequence: Synthetic oligonucleotide
  Antisense strand to SEQ ID NO: 885076
guucaucuuaaauaacugg

SEQ ID NO: 885078 - RNA, 19 nt, Artificial Sequence
  Description of Artificial Sequence: Synthetic oligonucleotide
  Sense strand starting at position 783 of SEQ ID NO: 588725
cgggcaguuucccucaaua

SEQ ID NO: 885079 - RNA, 19 nt, Artificial Sequence
  Description of Artificial Sequence: Synthetic oligonucleotide
  Antisense strand to SEQ ID NO: 885078
uauugagggaaacugcccg

SEQ ID NO: 885080 - RNA, 19 nt, Artificial Sequence
  Description of Artificial Sequence: Synthetic oligonucleotide
  Sense strand starting at position 785 of SEQ ID NO: 588725
ggcaguuucccucaauaaa

SEQ ID NO: 885081 - RNA, 19 nt, Artificial Sequence
  Description of Artificial Sequence: Synthetic oligonucleotide
  Antisense strand to SEQ ID NO: 885080
uuuauugagggaaacugcc

SEQ ID NO: 885082 - RNA, 19 nt, Artificial Sequence
  Description of Artificial Sequence: Synthetic oligonucleotide
  Sense strand starting at position 911 of SEQ ID NO: 588725
cuaagcagcgacuaauaaa

SEQ ID NO: 885083 - RNA, 19 nt, Artificial Sequence
  Description of Artificial Sequence: Synthetic oligonucleotide
  Antisense strand to SEQ ID NO: 885082
uuuauuagucgcugcuuag

SEQ ID NO: 885084 - RNA, 19 nt, Artificial Sequence
  Description of Artificial Sequence: Synthetic oligonucleotide
  Sense strand starting at position 982 of SEQ ID NO: 588725
gagucagcagcuuacuuaa

SEQ ID NO: 885085 - RNA, 19 nt, Artificial Sequence
  Description of Artificial Sequence: Synthetic oligonucleotide
  Antisense strand to SEQ ID NO: 885084
uuaaguaagcugcugacuc

SEQ ID NO: 885086 - RNA, 19 nt, Artificial Sequence
  Description of Artificial Sequence: Synthetic oligonucleotide
  Sense strand starting at position 1722 of SEQ ID NO: 588725
uuggguugugcucagccau

SEQ ID NO: 885087 - RNA, 19 nt, Artificial Sequence
  Description of Artificial Sequence: Synthetic oligonucleotide
  Antisense strand to SEQ ID NO: 885086
auggcugagcacaacccaa

SEQ ID NO: 885088 - RNA, 19 nt, Artificial Sequence
  Description of Artificial Sequence: Synthetic oligonucleotide
  Sense strand starting at position 1725 of SEQ ID NO: 588725
gguugugcucagccauguu

SEQ ID NO: 885089 - RNA, 19 nt, Artificial Sequence
  Description of Artificial Sequence: Synthetic oligonucleotide
  Antisense strand to SEQ ID NO: 885088
aacauggcugagcacaacc

SEQ ID NO: 885090 - RNA, 19 nt, Artificial Sequence
  Description of Artificial Sequence: Synthetic oligonucleotide
  Sense strand starting at position 1766 of SEQ ID NO: 588725
cggaguaccaccugucauc

SEQ ID NO: 885091 - RNA, 19 nt, Artificial Sequence
  Description of Artificial Sequence: Synthetic oligonucleotide
  Antisense strand to SEQ ID NO: 885090
gaugacaggugguacuccg

SEQ ID NO: 885092 - RNA, 19 nt, Artificial Sequence
  Description of Artificial Sequence: Synthetic oligonucleotide
  Sense strand starting at position 1779 of SEQ ID NO: 588725
gucaucuuuguggguggua

SEQ ID NO: 885093 - RNA, 19 nt, Artificial Sequence
  Description of Artificial Sequence: Synthetic oligonucleotide
  Antisense strand to SEQ ID NO: 885092
uaccacccacaaagaugac

SEQ ID NO: 885094 - RNA, 19 nt, Artificial Sequence
  Description of Artificial Sequence: Synthetic oligonucleotide
  Sense strand starting at position 1810 of SEQ ID NO: 588725
caaggaauauuagaggaca

SEQ ID NO: 885095 - RNA, 19 nt, Artificial Sequence
  Description of Artificial Sequence: Synthetic oligonucleotide
  Antisense strand to SEQ ID NO: 885094
uguccucuaauauuccuug

SEQ ID NO: 885096 - RNA, 19 nt, Artificial Sequence
  Description of Artificial Sequence: Synthetic oligonucleotide
  Sense strand starting at position 1835 of SEQ ID NO: 588725
ggucaacaugguuguguuu

SEQ ID NO: 885097 - RNA, 19 nt, Artificial Sequence
  Description of Artificial Sequence: Synthetic oligonucleotide
  Antisense strand to SEQ ID NO: 885096
aaacacaaccauguugacc

SEQ ID NO: 885098 - RNA, 19 nt, Artificial Sequence
  Description of Artificial Sequence: Synthetic oligonucleotide
  Sense strand starting at position 1856 of SEQ ID NO: 588725
cuaucacucuaagaguuag

SEQ ID NO: 885099 - RNA, 19 nt, Artificial Sequence
  Description of Artificial Sequence: Synthetic oligonucleotide
  Antisense strand to SEQ ID NO: 885098
cuaacucuuagagugauag

SEQ ID NO: 885100 - RNA, 19 nt, Artificial Sequence
  Description of Artificial Sequence: Synthetic oligonucleotide
  Sense strand starting at position 1862 of SEQ ID NO: 588725
cucuaagaguuaggcucaa

SEQ ID NO: 885101 - RNA, 19 nt, Artificial Sequence
  Description of Artificial Sequence: Synthetic oligonucleotide
  Antisense strand to SEQ ID NO: 885100
uugagccuaacucuuagag

SEQ ID NO: 885102 - RNA, 19 nt, Artificial Sequence
  Description of Artificial Sequence: Synthetic oligonucleotide
  Sense strand starting at position 2310 of SEQ ID NO: 588725
gcuguaacucagcgaccuu

SEQ ID NO: 885103 - RNA, 19 nt, Artificial Sequence
  Description of Artificial Sequence: Synthetic oligonucleotide
  Antisense strand to SEQ ID NO: 885102
aaggucgcugaguuacagc

SEQ ID NO: 885104 - RNA, 19 nt, Artificial Sequence
  Description of Artificial Sequence: Synthetic oligonucleotide
  Sense strand starting at position 2639 of SEQ ID NO: 588725
aggucagaagcgggauuaa

SEQ ID NO: 885105 - RNA, 19 nt, Artificial Sequence
  Description of Artificial Sequence: Synthetic oligonucleotide
  Antisense strand to SEQ ID NO: 885104
uuaaucccgcuucugaccu

SEQ ID NO: 885106 - RNA, 19 nt, Artificial Sequence
  Description of Artificial Sequence: Synthetic oligonucleotide
  Sense strand starting at position 2789 of SEQ ID NO: 588725
agcucacucucccaguuau

SEQ ID NO: 885107 - RNA, 19 nt, Artificial Sequence
  Description of Artificial Sequence: Synthetic oligonucleotide
  Antisense strand to SEQ ID NO: 885106
auaacugggagagugagcu

SEQ ID NO: 885108 - RNA, 19 nt, Artificial Sequence
  Description of Artificial Sequence: Synthetic oligonucleotide
  Sense strand starting at position 2799 of SEQ ID NO: 588725
cccaguuauucuccgauug

SEQ ID NO: 885109 - RNA, 19 nt, Artificial Sequence
  Description of Artificial Sequence: Synthetic oligonucleotide
  Antisense strand to SEQ ID NO: 885108
caaucggagaauaacuggg

SEQ ID NO: 885110 - RNA, 19 nt, Artificial Sequence
  Description of Artificial Sequence: Synthetic oligonucleotide
  Sense strand starting at position 2800 of SEQ ID NO: 588725
ccaguuauucuccgauuga

SEQ ID NO: 885111 - RNA, 19 nt, Artificial Sequence
  Description of Artificial Sequence: Synthetic oligonucleotide
  Antisense strand to SEQ ID NO: 885110
ucaaucggagaauaacugg

SEQ ID NO: 885112 - RNA, 19 nt, Artificial Sequence
  Description of Artificial Sequence: Synthetic oligonucleotide
  Sense strand starting at position 2801 of SEQ ID NO: 588725
caguuauucuccgauugac

SEQ ID NO: 885113 - RNA, 19 nt, Artificial Sequence
  Description of Artificial Sequence: Synthetic oligonucleotide
  Antisense strand to SEQ ID NO: 885112
gucaaucggagaauaacug

SEQ ID NO: 885114 - RNA, 19 nt, Artificial Sequence
  Description of Artificial Sequence: Synthetic oligonucleotide
  Sense strand starting at position 2804 of SEQ ID NO: 588725
uuauucuccgauugacaca

SEQ ID NO: 885115 - RNA, 19 nt, Artificial Sequence
  Description of Artificial Sequence: Synthetic oligonucleotide
  Antisense strand to SEQ ID NO: 885114
ugugucaaucggagaauaa

SEQ ID NO: 885116 - RNA, 19 nt, Artificial Sequence
  Description of Artificial Sequence: Synthetic oligonucleotide
  Sense strand starting at position 2871 of SEQ ID NO: 588725
gucacacuccuuugguuua

SEQ ID NO: 885117 - RNA, 19 nt, Artificial Sequence
  Description of Artificial Sequence: Synthetic oligonucleotide
  Antisense strand to SEQ ID NO: 885116
uaaaccaaaggagugugac

SEQ ID NO: 885118 - RNA, 19 nt, Artificial Sequence
  Description of Artificial Sequence: Synthetic oligonucleotide
  Sense strand starting at position 2876 of SEQ ID NO: 588725
acuccuuugguuuaucaga

SEQ ID NO: 885119 - RNA, 19 nt, Artificial Sequence
  Description of Artificial Sequence: Synthetic oligonucleotide
  Antisense strand to SEQ ID NO: 885118
ucugauaaaccaaaggagu

SEQ ID NO: 885120 - RNA, 19 nt, Artificial Sequence
  Description of Artificial Sequence: Synthetic oligonucleotide
  Sense strand starting at position 3124 of SEQ ID NO: 588725
cccggaugcuagccuaauu

SEQ ID NO: 885121 - RNA, 19 nt, Artificial Sequence
  Description of Artificial Sequence: Synthetic oligonucleotide
  Antisense strand to SEQ ID NO: 885120
aauuaggcuagcauccggg

SEQ ID NO: 885122 - RNA, 19 nt, Artificial Sequence
  Description of Artificial Sequence: Synthetic oligonucleotide
  Sense strand starting at position 3170 of SEQ ID NO: 588725
auauguugcuggugucuca

SEQ ID NO: 885123 - RNA, 19 nt, Artificial Sequence
  Description of Artificial Sequence: Synthetic oligonucleotide
  Antisense strand to SEQ ID NO: 885122
ugagacaccagcaacauau

SEQ ID NO: 885124 - RNA, 19 nt, Artificial Sequence
  Description of Artificial Sequence: Synthetic oligonucleotide
  Sense strand starting at position 3336 of SEQ ID NO: 588725
ucuagaucauccuccagga

SEQ ID NO: 885125 - RNA, 19 nt, Artificial Sequence
  Description of Artificial Sequence: Synthetic oligonucleotide
  Antisense strand to SEQ ID NO: 885124
uccuggaggaugaucuaga

SEQ ID NO: 885126 - RNA, 19 nt, Artificial Sequence
  Description of Artificial Sequence: Synthetic oligonucleotide
  Sense strand starting at position 3371 of SEQ ID NO: 588725
guuaccuuccugcagggaa

SEQ ID NO: 885127 - RNA, 19 nt, Artificial Sequence
  Description of Artificial Sequence: Synthetic oligonucleotide
  Antisense strand to SEQ ID NO: 885126
uucccugcaggaagguaac

SEQ ID NO: 885128 - RNA, 19 nt, Artificial Sequence
  Description of Artificial Sequence: Synthetic oligonucleotide
  Sense strand starting at position 3445 of SEQ ID NO: 588725
gcccaaucccaguguccuu

SEQ ID NO: 885129 - RNA, 19 nt, Artificial Sequence
  Description of Artificial Sequence: Synthetic oligonucleotide
  Antisense strand to SEQ ID NO: 885128
aaggacacugggauugggc

SEQ ID NO: 885130 - RNA, 19 nt, Artificial Sequence
  Description of Artificial Sequence: Synthetic oligonucleotide
  Sense strand starting at position 3454 of SEQ ID NO: 588725
caguguccuuugguuuauu

SEQ ID NO: 885131 - RNA, 19 nt, Artificial Sequence
  Description of Artificial Sequence: Synthetic oligonucleotide
  Antisense strand to SEQ ID NO: 885130
aauaaaccaaaggacacug

SEQ ID NO: 885132 - RNA, 19 nt, Artificial Sequence
  Description of Artificial Sequence: Synthetic oligonucleotide
  Sense strand starting at position 3532 of SEQ ID NO: 588725
aaaugaguguucguagagg

SEQ ID NO: 885133 - RNA, 19 nt, Artificial Sequence
  Description of Artificial Sequence: Synthetic oligonucleotide
  Antisense strand to SEQ ID NO: 885132
ccucuacgaacacucauuu

SEQ ID NO: 885134 - RNA, 19 nt, Artificial Sequence
  Description of Artificial Sequence: Synthetic oligonucleotide
  Sense strand starting at position 3535 of SEQ ID NO: 588725
ugaguguucguagagggau

SEQ ID NO: 885135 - RNA, 19 nt, Artificial Sequence
  Description of Artificial Sequence: Synthetic oligonucleotide
  Antisense strand to SEQ ID NO: 885134
aucccucuacgaacacuca

SEQ ID NO: 885136 - RNA, 19 nt, Artificial Sequence
  Description of Artificial Sequence: Synthetic oligonucleotide
  Sense strand starting at position 3536 of SEQ ID NO: 588725
gaguguucguagagggaug

SEQ ID NO: 885137 - RNA, 19 nt, Artificial Sequence
  Description of Artificial Sequence: Synthetic oligonucleotide
  Antisense strand to SEQ ID NO: 885136
caucccucuacgaacacuc

SEQ ID NO: 885138 - RNA, 19 nt, Artificial Sequence
  Description of Artificial Sequence: Synthetic oligonucleotide
  Sense strand starting at position 3747 of SEQ ID NO: 588725
aaacgaucuucgcagauuc

SEQ ID NO: 885139 - RNA, 19 nt, Artificial Sequence
  Description of Artificial Sequence: Synthetic oligonucleotide
  Antisense strand to SEQ ID NO: 885138
gaaucugcgaagaucguuu

SEQ ID NO: 885140 - RNA, 19 nt, Artificial Sequence
  Description of Artificial Sequence: Synthetic oligonucleotide
  Sense strand starting at position 3833 of SEQ ID NO: 588725
gaaagaacuuuccagguuc

SEQ ID NO: 885141 - RNA, 19 nt, Artificial Sequence
  Description of Artificial Sequence: Synthetic oligonucleotide
  Antisense strand to SEQ ID NO: 885140
gaaccuggaaaguucuuuc

SEQ ID NO: 885142 - RNA, 19 nt, Artificial Sequence
  Description of Artificial Sequence: Synthetic oligonucleotide
  Sense strand starting at position 12 of SEQ ID NO: 588726
ugcucuucugaggacaguu

SEQ ID NO: 885143 - RNA, 19 nt, Artificial Sequence
  Description of Artificial Sequence: Synthetic oligonucleotide
  Antisense strand to SEQ ID NO: 885142
aacuguccucagaagagca

SEQ ID NO: 885144 - RNA, 19 nt, Artificial Sequence
  Description of Artificial Sequence: Synthetic oligonucleotide
  Sense strand starting at position 197 of SEQ ID NO: 588726
ugacauaaaugcgugggaa

SEQ ID NO: 885145 - RNA, 19 nt, Artificial Sequence
  Description of Artificial Sequence: Synthetic oligonucleotide
  Antisense strand to SEQ ID NO: 885144
uucccacgcauuuauguca

SEQ ID NO: 885146 - RNA, 19 nt, Artificial Sequence
  Description of Artificial Sequence: Synthetic oligonucleotide
  Sense strand starting at position 198 of SEQ ID NO: 588726
gacauaaaugcgugggaag

SEQ ID NO: 885147 - RNA, 19 nt, Artificial Sequence
  Description of Artificial Sequence: Synthetic oligonucleotide
  Antisense strand to SEQ ID NO: 885146
cuucccacgcauuuauguc

SEQ ID NO: 885148 - RNA, 19 nt, Artificial Sequence
  Description of Artificial Sequence: Synthetic oligonucleotide
  Sense strand starting at position 199 of SEQ ID NO: 588726
acauaaaugcgugggaaga

SEQ ID NO: 885149 - RNA, 19 nt, Artificial Sequence
  Description of Artificial Sequence: Synthetic oligonucleotide
  Antisense strand to SEQ ID NO: 885148
ucuucccacgcauuuaugu

SEQ ID NO: 885150 - RNA, 19 nt, Artificial Sequence
  Description of Artificial Sequence: Synthetic oligonucleotide
  Sense strand starting at position 272 of SEQ ID NO: 588726
uggagaucuguuagugugu

SEQ ID NO: 885151 - RNA, 19 nt, Artificial Sequence
  Description of Artificial Sequence: Synthetic oligonucleotide
  Antisense strand to SEQ ID NO: 885150
acacacuaacagaucucca

SEQ ID NO: 885152 - RNA, 19 nt, Artificial Sequence
  Description of Artificial Sequence: Synthetic oligonucleotide
  Sense strand starting at position 326 of SEQ ID NO: 588726
ggcuuccuggaaugagaga

SEQ ID NO: 885153 - RNA, 19 nt, Artificial Sequence
  Description of Artificial Sequence: Synthetic oligonucleotide
  Antisense strand to SEQ ID NO: 885152
ucucucauuccaggaagcc

SEQ ID NO: 885154 - RNA, 19 nt, Artificial Sequence
  Description of Artificial Sequence: Synthetic oligonucleotide
  Sense strand starting at position 424 of SEQ ID NO: 588726
uggagacacaauugucagu

SEQ ID NO: 885155 - RNA, 19 nt, Artificial Sequence
  Description of Artificial Sequence: Synthetic oligonucleotide
  Antisense strand to SEQ ID NO: 885154
acugacaauugugucucca

SEQ ID NO: 885156 - RNA, 19 nt, Artificial Sequence
  Description of Artificial Sequence: Synthetic oligonucleotide
  Sense strand starting at position 446 of SEQ ID NO: 588726
ugcaucugugagcaacaga

SEQ ID NO: 885157 - RNA, 19 nt, Artificial Sequence
  Description of Artificial Sequence: Synthetic oligonucleotide
  Antisense strand to SEQ ID NO: 885156
ucuguugcucacagaugca

SEQ ID NO: 885158 - RNA, 19 nt, Artificial Sequence
  Description of Artificial Sequence: Synthetic oligonucleotide
  Sense strand starting at position 449 of SEQ ID NO: 588726
aucugugagcaacagacau

SEQ ID NO: 885159 - RNA, 19 nt, Artificial Sequence
  Description of Artificial Sequence: Synthetic oligonucleotide
  Antisense strand to SEQ ID NO: 885158
augucuguugcucacagau

SEQ ID NO: 885160 - RNA, 19 nt, Artificial Sequence
  Description of Artificial Sequence: Synthetic oligonucleotide
  Sense strand starting at position 476 of SEQ ID NO: 588726
uuuggcauccuagggagau

SEQ ID NO: 885161 - RNA, 19 nt, Artificial Sequence
  Description of Artificial Sequence: Synthetic oligonucleotide
  Antisense strand to SEQ ID NO: 885160
aucucccuaggaugccaaa

SEQ ID NO: 885162 - RNA, 19 nt, Artificial Sequence
  Description of Artificial Sequence: Synthetic oligonucleotide
  Sense strand starting at position 592 of SEQ ID NO: 588726
gagcacuuucugggagaac

SEQ ID NO: 885163 - RNA, 19 nt, Artificial Sequence
  Description of Artificial Sequence: Synthetic oligonucleotide
  Antisense strand to SEQ ID NO: 885162
guucucccagaaagugcuc

SEQ ID NO: 885164 - RNA, 19 nt, Artificial Sequence
  Description of Artificial Sequence: Synthetic oligonucleotide
  Sense strand starting at position 620 of SEQ ID NO: 588726
gcccuauuuagcuggaggu

SEQ ID NO: 885165 - RNA, 19 nt, Artificial Sequence
  Description of Artificial Sequence: Synthetic oligonucleotide
  Antisense strand to SEQ ID NO: 885164
accuccagcuaaauagggc

SEQ ID NO: 885166 - RNA, 19 nt, Artificial Sequence
  Description of Artificial Sequence: Synthetic oligonucleotide
  Sense strand starting at position 678 of SEQ ID NO: 588726
cuggaaacccacugcuaau

SEQ ID NO: 885167 - RNA, 19 nt, Artificial Sequence
  Description of Artificial Sequence: Synthetic oligonucleotide
  Antisense strand to SEQ ID NO: 885166
auuagcaguggguuuccag

SEQ ID NO: 885168 - RNA, 19 nt, Artificial Sequence
  Description of Artificial Sequence: Synthetic oligonucleotide
  Sense strand starting at position 833 of SEQ ID NO: 588726
gcgauuucuggaugcauug

SEQ ID NO: 885169 - RNA, 19 nt, Artificial Sequence
  Description of Artificial Sequence: Synthetic oligonucleotide
  Antisense strand to SEQ ID NO: 885168
caaugcauccagaaaucgc

SEQ ID NO: 885170 - RNA, 19 nt, Artificial Sequence
  Description of Artificial Sequence: Synthetic oligonucleotide
  Sense strand starting at position 864 of SEQ ID NO: 588726
cugcaaucugccgaaggaa

SEQ ID NO: 885171 - RNA, 19 nt, Artificial Sequence
  Description of Artificial Sequence: Synthetic oligonucleotide
  Antisense strand to SEQ ID NO: 885170
uuccuucggcagauugcag

SEQ ID NO: 885172 - RNA, 19 nt, Artificial Sequence
  Description of Artificial Sequence: Synthetic oligonucleotide
  Sense strand starting at position 914 of SEQ ID NO: 588726
uuacgagaugcccagcaaa

SEQ ID NO: 885173 - RNA, 19 nt, Artificial Sequence
  Description of Artificial Sequence: Synthetic oligonucleotide
  Antisense strand to SEQ ID NO: 885172
uuugcugggcaucucguaa

SEQ ID NO: 885174 - RNA, 19 nt, Artificial Sequence
  Description of Artificial Sequence: Synthetic oligonucleotide
  Sense strand starting at position 977 of SEQ ID NO: 588726
cuggcaagauaucugaaca

SEQ ID NO: 885175 - RNA, 19 nt, Artificial Sequence
  Description of Artificial Sequence: Synthetic oligonucleotide
  Antisense strand to SEQ ID NO: 885174
uguucagauaucuugccag

SEQ ID NO: 885176 - RNA, 19 nt, Artificial Sequence
  Description of Artificial Sequence: Synthetic oligonucleotide
  Sense strand starting at position 1333 of SEQ ID NO: 588726
ggacgucuugagcaaaucu

SEQ ID NO: 885177 - RNA, 19 nt, Artificial Sequence
  Description of Artificial Sequence: Synthetic oligonucleotide
  Antisense strand to SEQ ID NO: 885176
agauuugcucaagacgucc

SEQ ID NO: 885178 - RNA, 19 nt, Artificial Sequence
  Description of Artificial Sequence: Synthetic oligonucleotide
  Sense strand starting at position 1491 of SEQ ID NO: 588726
cauccuuguccaggaugau

SEQ ID NO: 885179 - RNA, 19 nt, Artificial Sequence
  Description of Artificial Sequence: Synthetic oligonucleotide
  Antisense strand to SEQ ID NO: 885178
aucauccuggacaaggaug

SEQ ID NO: 885180 - RNA, 19 nt, Artificial Sequence
  Description of Artificial Sequence: Synthetic oligonucleotide
  Sense strand starting at position 1692 of SEQ ID NO: 588726
ggaugaauuccuugaaguc

SEQ ID NO: 885181 - RNA, 19 nt, Artificial Sequence
  Description of Artificial Sequence: Synthetic oligonucleotide
  Antisense strand to SEQ ID NO: 885180
gacuucaaggaauucaucc

SEQ ID NO: 885182 - RNA, 19 nt, Artificial Sequence
  Description of Artificial Sequence: Synthetic oligonucleotide
  Sense strand starting at position 2152 of SEQ ID NO: 588726
ugcugucugggcaggagua

SEQ ID NO: 885183 - RNA, 19 nt, Artificial Sequence
  Description of Artificial Sequence: Synthetic oligonucleotide
  Antisense strand to SEQ ID NO: 885182
uacuccugcccagacagca

SEQ ID NO: 885184 - RNA, 19 nt, Artificial Sequence
  Description of Artificial Sequence: Synthetic oligonucleotide
  Sense strand starting at position 2154 of SEQ ID NO: 588726
cugucugggcaggaguaua

SEQ ID NO: 885185 - RNA, 19 nt, Artificial Sequence
  Description of Artificial Sequence: Synthetic oligonucleotide
  Antisense strand to SEQ ID NO: 885184
uauacuccugcccagacag

SEQ ID NO: 885186 - RNA, 19 nt, Artificial Sequence
  Description of Artificial Sequence: Synthetic oligonucleotide
  Sense strand starting at position 2371 of SEQ ID NO: 588726
guguuauucgcugcaguau

SEQ ID NO: 885187 - RNA, 19 nt, Artificial Sequence
  Description of Artificial Sequence: Synthetic oligonucleotide
  Antisense strand to SEQ ID NO: 885186
auacugcagcgaauaacac

SEQ ID NO: 885188 - RNA, 19 nt, Artificial Sequence
  Description of Artificial Sequence: Synthetic oligonucleotide
  Sense strand starting at position 2427 of SEQ ID NO: 588726
auaaauauacgccgaauga

SEQ ID NO: 885189 - RNA, 19 nt, Artificial Sequence
  Description of Artificial Sequence: Synthetic oligonucleotide
  Antisense strand to SEQ ID NO: 885188
ucauucggcguauauuuau

SEQ ID NO: 885190 - RNA, 19 nt, Artificial Sequence
  Description of Artificial Sequence: Synthetic oligonucleotide
  Sense strand starting at position 2468 of SEQ ID NO: 588726
guauacuugcuuuacagac

SEQ ID NO: 885191 - RNA, 19 nt, Artificial Sequence
  Description of Artificial Sequence: Synthetic oligonucleotide
  Antisense strand to SEQ ID NO: 885190
gucuguaaagcaaguauac

SEQ ID NO: 885192 - RNA, 19 nt, Artificial Sequence
  Description of Artificial Sequence: Synthetic oligonucleotide
  Sense strand starting at position 2513 of SEQ ID NO: 588726
acaucaaggcauugauaua

SEQ ID NO: 885193 - RNA, 19 nt, Artificial Sequence
  Description of Artificial Sequence: Synthetic oligonucleotide
  Antisense strand to SEQ ID NO: 885192
uauaucaaugccuugaugu

SEQ ID NO: 885194 - RNA, 19 nt, Artificial Sequence
  Description of Artificial Sequence: Synthetic oligonucleotide
  Sense strand starting at position 2637 of SEQ ID NO: 588726
cgcgcagaauuucuuacau

SEQ ID NO: 885195 - RNA, 19 nt, Artificial Sequence
  Description of Artificial Sequence: Synthetic oligonucleotide
  Antisense strand to SEQ ID NO: 885194
auguaagaaauucugcgcg

SEQ ID NO: 885196 - RNA, 19 nt, Artificial Sequence
  Description of Artificial Sequence: Synthetic oligonucleotide
  Sense strand starting at position 2850 of SEQ ID NO: 588726
cugcaaugugcccaaagaa

SEQ ID NO: 885197 - RNA, 19 nt, Artificial Sequence
  Description of Artificial Sequence: Synthetic oligonucleotide
  Antisense strand to SEQ ID NO: 885196
uucuuugggcacauugcag

SEQ ID NO: 885198 - RNA, 19 nt, Artificial Sequence
  Description of Artificial Sequence: Synthetic oligonucleotide
  Sense strand starting at position 2935 of SEQ ID NO: 588726
cuagauuuguucuuucugu

SEQ ID NO: 885199 - RNA, 19 nt, Artificial Sequence
  Description of Artificial Sequence: Synthetic oligonucleotide
  Antisense strand to SEQ ID NO: 885198
acagaaagaacaaaucuag

SEQ ID NO: 885200 - RNA, 19 nt, Artificial Sequence
  Description of Artificial Sequence: Synthetic oligonucleotide
  Sense strand starting at position 2946 of SEQ ID NO: 588726
cuuucuguugaagacuaau

SEQ ID NO: 885201 - RNA, 19 nt, Artificial Sequence
  Description of Artificial Sequence: Synthetic oligonucleotide
  Antisense strand to SEQ ID NO: 885200
auuagucuucaacagaaag

SEQ ID NO: 885202 - RNA, 19 nt, Artificial Sequence
  Description of Artificial Sequence: Synthetic oligonucleotide
  Sense strand starting at position 2952 of SEQ ID NO: 588726
guugaagacuaaucucaca

SEQ ID NO: 885203 - RNA, 19 nt, Artificial Sequence
  Description of Artificial Sequence: Synthetic oligonucleotide
  Antisense strand to SEQ ID NO: 885202
ugugagauuagucuucaac

SEQ ID NO: 885204 - RNA, 19 nt, Artificial Sequence
  Description of Artificial Sequence: Synthetic oligonucleotide
  Sense strand starting at position 3286 of SEQ ID NO: 588726
gcugauuaugggcauuaca

SEQ ID NO: 885205 - RNA, 19 nt, Artificial Sequence
  Description of Artificial Sequence: Synthetic oligonucleotide
  Antisense strand to SEQ ID NO: 885204
uguaaugcccauaaucagc

SEQ ID NO: 885206 - RNA, 19 nt, Artificial Sequence
  Description of Artificial Sequence: Synthetic oligonucleotide
  Sense strand starting at position 3388 of SEQ ID NO: 588726
gagaaaugagcaugguaca

SEQ ID NO: 885207 - RNA, 19 nt, Artificial Sequence
  Description of Artificial Sequence: Synthetic oligonucleotide
  Antisense strand to SEQ ID NO: 885206
uguaccaugcucauuucuc

SEQ ID NO: 885208 - RNA, 19 nt, Artificial Sequence
  Description of Artificial Sequence: Synthetic oligonucleotide
  Sense strand starting at position 3410 of SEQ ID NO: 588726
ugcauauaagccuauugaa

SEQ ID NO: 885209 - RNA, 19 nt, Artificial Sequence
  Description of Artificial Sequence: Synthetic oligonucleotide
  Antisense strand to SEQ ID NO: 885208
uucaauaggcuuauaugca

SEQ ID NO: 885210 - RNA, 19 nt, Artificial Sequence
  Description of Artificial Sequence: Synthetic oligonucleotide
  Sense strand starting at position 3481 of SEQ ID NO: 588726
aguguuggucucuaaauga

SEQ ID NO: 885211 - RNA, 19 nt, Artificial Sequence
  Description of Artificial Sequence: Synthetic oligonucleotide
  Antisense strand to SEQ ID NO: 885210
ucauuuagagaccaacacu

SEQ ID NO: 885212 - RNA, 19 nt, Artificial Sequence
  Description of Artificial Sequence: Synthetic oligonucleotide
  Sense strand starting at position 3667 of SEQ ID NO: 588726
uuguguuauuucucucauc

SEQ ID NO: 885213 - RNA, 19 nt, Artificial Sequence
  Description of Artificial Sequence: Synthetic oligonucleotide
  Antisense strand to SEQ ID NO: 885212
gaugagagaaauaacacaa

SEQ ID NO: 885214 - RNA, 19 nt, Artificial Sequence
  Description of Artificial Sequence: Synthetic oligonucleotide
  Sense strand starting at position 3668 of SEQ ID NO: 588726
uguguuauuucucucaucu

SEQ ID NO: 885215 - RNA, 19 nt, Artificial Sequence
  Description of Artificial Sequence: Synthetic oligonucleotide
  Antisense strand to SEQ ID NO: 885214
agaugagagaaauaacaca

SEQ ID NO: 885216 - RNA, 19 nt, Artificial Sequence
  Description of Artificial Sequence: Synthetic oligonucleotide
  Sense strand starting at position 3762 of SEQ ID NO: 588726
aagauaauuuguuggaaga

SEQ ID NO: 885217 - RNA, 19 nt, Artificial Sequence
  Description of Artificial Sequence: Synthetic oligonucleotide
  Antisense strand to SEQ ID NO: 885216
ucuuccaacaaauuaucuu

SEQ ID NO: 885218 - RNA, 19 nt, Artificial Sequence
  Description of Artificial Sequence: Synthetic oligonucleotide
  Sense strand starting at position 3764 of SEQ ID NO: 588726
gauaauuuguuggaagaau

SEQ ID NO: 885219 - RNA, 19 nt, Artificial Sequence
  Description of Artificial Sequence: Synthetic oligonucleotide
  Antisense strand to SEQ ID NO: 885218
auucuuccaacaaauuauc

SEQ ID NO: 885220 - RNA, 19 nt, Artificial Sequence
  Description of Artificial Sequence: Synthetic oligonucleotide
  Sense strand starting at position 3829 of SEQ ID NO: 588726
ugaggaucccacuggguuu

SEQ ID NO: 885221 - RNA, 19 nt, Artificial Sequence
  Description of Artificial Sequence: Synthetic oligonucleotide
  Antisense strand to SEQ ID NO: 885220
aaacccagugggauccuca

SEQ ID NO: 885222 - RNA, 19 nt, Artificial Sequence
  Description of Artificial Sequence: Synthetic oligonucleotide
  Sense strand starting at position 65 of SEQ ID NO: 588727
ugcauacuuguugacugau

SEQ ID NO: 885223 - RNA, 19 nt, Artificial Sequence
  Description of Artificial Sequence: Synthetic oligonucleotide
  Antisense strand to SEQ ID NO: 885222
aucagucaacaaguaugca

SEQ ID NO: 885224 - RNA, 19 nt, Artificial Sequence
  Description of Artificial Sequence: Synthetic oligonucleotide
  Sense strand starting at position 68 of SEQ ID NO: 588727
auacuuguugacugauguu

SEQ ID NO: 885225 - RNA, 19 nt, Artificial Sequence
  Description of Artificial Sequence: Synthetic oligonucleotide
  Antisense strand to SEQ ID NO: 885224
aacaucagucaacaaguau

SEQ ID NO: 885226 - RNA, 19 nt, Artificial Sequence
  Description of Artificial Sequence: Synthetic oligonucleotide
  Sense strand starting at position 77 of SEQ ID NO: 588727
gacugauguuaaguaucaa

SEQ ID NO: 885227 - RNA, 19 nt, Artificial Sequence
  Description of Artificial Sequence: Synthetic oligonucleotide
  Antisense strand to SEQ ID NO: 885226
uugauacuuaacaucaguc

SEQ ID NO: 885228 - RNA, 19 nt, Artificial Sequence
  Description of Artificial Sequence: Synthetic oligonucleotide
  Sense strand starting at position 457 of SEQ ID NO: 588727
auacacugagucgguuaaa

SEQ ID NO: 885229 - RNA, 19 nt, Artificial Sequence
  Description of Artificial Sequence: Synthetic oligonucleotide
  Antisense strand to SEQ ID NO: 885228
uuuaaccgacucaguguau

SEQ ID NO: 885230 - RNA, 19 nt, Artificial Sequence
  Description of Artificial Sequence: Synthetic oligonucleotide
  Sense strand starting at position 458 of SEQ ID NO: 588727
uacacugagucgguuaaau

SEQ ID NO: 885231 - RNA, 19 nt, Artificial Sequence
  Description of Artificial Sequence: Synthetic oligonucleotide
  Antisense strand to SEQ ID NO: 885230
auuuaaccgacucagugua

SEQ ID NO: 885232 - RNA, 19 nt, Artificial Sequence
  Description of Artificial Sequence: Synthetic oligonucleotide
  Sense strand starting at position 460 of SEQ ID NO: 588727
cacugagucgguuaaauac

SEQ ID NO: 885233 - RNA, 19 nt, Artificial Sequence
  Description of Artificial Sequence: Synthetic oligonucleotide
  Antisense strand to SEQ ID NO: 885232
guauuuaaccgacucagug

SEQ ID NO: 885234 - RNA, 19 nt, Artificial Sequence
  Description of Artificial Sequence: Synthetic oligonucleotide
  Sense strand starting at position 830 of SEQ ID NO: 588727
gugagacucuaucucaguu

SEQ ID NO: 885235 - RNA, 19 nt, Artificial Sequence
  Description of Artificial Sequence: Synthetic oligonucleotide
  Antisense strand to SEQ ID NO: 885234
aacugagauagagucucac

SEQ ID NO: 885236 - RNA, 19 nt, Artificial Sequence
  Description of Artificial Sequence: Synthetic oligonucleotide
  Sense strand starting at position 1041 of SEQ ID NO: 588727
uguauuuauugagaaccaa

SEQ ID NO: 885237 - RNA, 19 nt, Artificial Sequence
  Description of Artificial Sequence: Synthetic oligonucleotide
  Antisense strand to SEQ ID NO: 885236
uugguucucaauaaauaca

SEQ ID NO: 885238 - RNA, 19 nt, Artificial Sequence
  Description of Artificial Sequence: Synthetic oligonucleotide
  Sense strand starting at position 1710 of SEQ ID NO: 588727
ggucguucucuggcaggua

SEQ ID NO: 885239 - RNA, 19 nt, Artificial Sequence
  Description of Artificial Sequence: Synthetic oligonucleotide
  Antisense strand to SEQ ID NO: 885238
uaccugccagagaacgacc

SEQ ID NO: 885240 - RNA, 19 nt, Artificial Sequence
  Description of Artificial Sequence: Synthetic oligonucleotide
  Sense strand starting at position 1740 of SEQ ID NO: 588727
gcgcuauuuccacauacuu

SEQ ID NO: 885241 - RNA, 19 nt, Artificial Sequence
  Description of Artificial Sequence: Synthetic oligonucleotide
  Antisense strand to SEQ ID NO: 885240
aaguauguggaaauagcgc

SEQ ID NO: 885242 - RNA, 19 nt, Artificial Sequence
  Description of Artificial Sequence: Synthetic oligonucleotide
  Sense strand starting at position 2273 of SEQ ID NO: 588727
uuuccaagucccugugaaa

SEQ ID NO: 885243 - RNA, 19 nt, Artificial Sequence
  Description of Artificial Sequence: Synthetic oligonucleotide
  Antisense strand to SEQ ID NO: 885242
uuucacagggacuuggaaa

SEQ ID NO: 885244 - RNA, 19 nt, Artificial Sequence
  Description of Artificial Sequence: Synthetic oligonucleotide
  Sense strand starting at position 2374 of SEQ ID NO: 588727
ucugaugcuaaaugcgaua

SEQ ID NO: 885245 - RNA, 19 nt, Artificial Sequence
  Description of Artificial Sequence: Synthetic oligonucleotide
  Antisense strand to SEQ ID NO: 885244
uaucgcauuuagcaucaga

SEQ ID NO: 885246 - RNA, 19 nt, Artificial Sequence
  Description of Artificial Sequence: Synthetic oligonucleotide
  Sense strand starting at position 2379 of SEQ ID NO: 588727
ugcuaaaugcgauacaaau

SEQ ID NO: 885247 - RNA, 19 nt, Artificial Sequence
  Description of Artificial Sequence: Synthetic oligonucleotide
  Antisense strand to SEQ ID NO: 885246
auuuguaucgcauuuagca

SEQ ID NO: 885248 - RNA, 19 nt, Artificial Sequence
  Description of Artificial Sequence: Synthetic oligonucleotide
  Sense strand starting at position 2417 of SEQ ID NO: 588727
uucguaacgauugauagga

SEQ ID NO: 885249 - RNA, 19 nt, Artificial Sequence
  Description of Artificial Sequence: Synthetic oligonucleotide
  Antisense strand to SEQ ID NO: 885248
uccuaucaaucguuacgaa

SEQ ID NO: 885250 - RNA, 19 nt, Artificial Sequence
  Description of Artificial Sequence: Synthetic oligonucleotide
  Sense strand starting at position 2582 of SEQ ID NO: 588727
agaacaguaccugguacua

SEQ ID NO: 885251 - RNA, 19 nt, Artificial Sequence
  Description of Artificial Sequence: Synthetic oligonucleotide
  Antisense strand to SEQ ID NO: 885250
uaguaccagguacuguucu

SEQ ID NO: 885252 - RNA, 19 nt, Artificial Sequence
  Description of Artificial Sequence: Synthetic oligonucleotide
  Sense strand starting at position 2630 of SEQ ID NO: 588727
acucuuugcugagcaacaa

SEQ ID NO: 885253 - RNA, 19 nt, Artificial Sequence
  Description of Artificial Sequence: Synthetic oligonucleotide
  Antisense strand to SEQ ID NO: 885252
uuguugcucagcaaagagu

SEQ ID NO: 885254 - RNA, 19 nt, Artificial Sequence
  Description of Artificial Sequence: Synthetic oligonucleotide
  Sense strand starting at position 2631 of SEQ ID NO: 588727
cucuuugcugagcaacaaa

SEQ ID NO: 885255 - RNA, 19 nt, Artificial Sequence
  Description of Artificial Sequence: Synthetic oligonucleotide
  Antisense strand to SEQ ID NO: 885254
uuuguugcucagcaaagag

SEQ ID NO: 885256 - RNA, 19 nt, Artificial Sequence
  Description of Artificial Sequence: Synthetic oligonucleotide
  Sense strand starting at position 2674 of SEQ ID NO: 588727
gcuugcaguacuucgugaa

SEQ ID NO: 885257 - RNA, 19 nt, Artificial Sequence
  Description of Artificial Sequence: Synthetic oligonucleotide
  Antisense strand to SEQ ID NO: 885256
uucacgaaguacugcaagc

SEQ ID NO: 885258 - RNA, 19 nt, Artificial Sequence
  Description of Artificial Sequence: Synthetic oligonucleotide
  Sense strand starting at position 2799 of SEQ ID NO: 588727
aggagaaccgcuugaguug

SEQ ID NO: 885259 - RNA, 19 nt, Artificial Sequence
  Description of Artificial Sequence: Synthetic oligonucleotide
  Antisense strand to SEQ ID NO: 885258
caacucaagcgguucuccu

SEQ ID NO: 885260 - RNA, 19 nt, Artificial Sequence
  Description of Artificial Sequence: Synthetic oligonucleotide
  Sense strand starting at position 2938 of SEQ ID NO: 588727
gugcaaugccuauagcuaa

SEQ ID NO: 885261 - RNA, 19 nt, Artificial Sequence
  Description of Artificial Sequence: Synthetic oligonucleotide
  Antisense strand to SEQ ID NO: 885260
uuagcuauaggcauugcac

SEQ ID NO: 885262 - RNA, 19 nt, Artificial Sequence
  Description of Artificial Sequence: Synthetic oligonucleotide
  Sense strand starting at position 2962 of SEQ ID NO: 588727
caguuaagagacuguuaug

SEQ ID NO: 885263 - RNA, 19 nt, Artificial Sequence
  Description of Artificial Sequence: Synthetic oligonucleotide
  Antisense strand to SEQ ID NO: 885262
cauaacagucucuuaacug

SEQ ID NO: 885264 - RNA, 19 nt, Artificial Sequence
  Description of Artificial Sequence: Synthetic oligonucleotide
  Sense strand starting at position 2972 of SEQ ID NO: 588727
acuguuauguaauccaaua

SEQ ID NO: 885265 - RNA, 19 nt, Artificial Sequence
  Description of Artificial Sequence: Synthetic oligonucleotide
  Antisense strand to SEQ ID NO: 885264
uauuggauuacauaacagu

SEQ ID NO: 885266 - RNA, 19 nt, Artificial Sequence
  Description of Artificial Sequence: Synthetic oligonucleotide
  Sense strand starting at position 3031 of SEQ ID NO: 588727
uggaauuaauccucuugcu

SEQ ID NO: 885267 - RNA, 19 nt, Artificial Sequence
  Description of Artificial Sequence: Synthetic oligonucleotide
  Antisense strand to SEQ ID NO: 885266
agcaagaggauuaauucca

SEQ ID NO: 885268 - RNA, 19 nt, Artificial Sequence
  Description of Artificial Sequence: Synthetic oligonucleotide
  Sense strand starting at position 3073 of SEQ ID NO: 588727
auuggcuaacccugaauga

SEQ ID NO: 885269 - RNA, 19 nt, Artificial Sequence
  Description of Artificial Sequence: Synthetic oligonucleotide
  Antisense strand to SEQ ID NO: 885268
ucauucaggguuagccaau

SEQ ID NO: 885270 - RNA, 19 nt, Artificial Sequence
  Description of Artificial Sequence: Synthetic oligonucleotide
  Sense strand starting at position 3077 of SEQ ID NO: 588727
gcuaacccugaaugagaua

SEQ ID NO: 885271 - RNA, 19 nt, Artificial Sequence
  Description of Artificial Sequence: Synthetic oligonucleotide
  Antisense strand to SEQ ID NO: 885270
uaucucauucaggguuagc

SEQ ID NO: 885272 - RNA, 19 nt, Artificial Sequence
  Description of Artificial Sequence: Synthetic oligonucleotide
  Sense strand starting at position 3089 of SEQ ID NO: 588727
ugagauaucugggugaacu

SEQ ID NO: 885273 - RNA, 19 nt, Artificial Sequence
  Description of Artificial Sequence: Synthetic oligonucleotide
  Antisense strand to SEQ ID NO: 885272
aguucacccagauaucuca

SEQ ID NO: 885274 - RNA, 19 nt, Artificial Sequence
  Description of Artificial Sequence: Synthetic oligonucleotide
  Sense strand starting at position 3090 of SEQ ID NO: 588727
gagauaucugggugaacuu

SEQ ID NO: 885275 - RNA, 19 nt, Artificial Sequence
  Description of Artificial Sequence: Synthetic oligonucleotide
  Antisense strand to SEQ ID NO: 885274
aaguucacccagauaucuc

SEQ ID NO: 885276 - RNA, 19 nt, Artificial Sequence
  Description of Artificial Sequence: Synthetic oligonucleotide
  Sense strand starting at position 3099 of SEQ ID NO: 588727
gggugaacuucuuuguauu

SEQ ID NO: 885277 - RNA, 19 nt, Artificial Sequence
  Description of Artificial Sequence: Synthetic oligonucleotide
  Antisense strand to SEQ ID NO: 885276
aauacaaagaaguucaccc

SEQ ID NO: 885278 - RNA, 19 nt, Artificial Sequence
  Description of Artificial Sequence: Synthetic oligonucleotide
  Sense strand starting at position 3100 of SEQ ID NO: 588727
ggugaacuucuuuguauua

SEQ ID NO: 885279 - RNA, 19 nt, Artificial Sequence
  Description of Artificial Sequence: Synthetic oligonucleotide
  Antisense strand to SEQ ID NO: 885278
uaauacaaagaaguucacc

SEQ ID NO: 885280 - RNA, 19 nt, Artificial Sequence
  Description of Artificial Sequence: Synthetic oligonucleotide
  Sense strand starting at position 3101 of SEQ ID NO: 588727
gugaacuucuuuguauuau

SEQ ID NO: 885281 - RNA, 19 nt, Artificial Sequence
  Description of Artificial Sequence: Synthetic oligonucleotide
  Antisense strand to SEQ ID NO: 885280
auaauacaaagaaguucac

SEQ ID NO: 885282 - RNA, 19 nt, Artificial Sequence
  Description of Artificial Sequence: Synthetic oligonucleotide
  Sense strand starting at position 3122 of SEQ ID NO: 588727
uuguaacuccucugaaagu

SEQ ID NO: 885283 - RNA, 19 nt, Artificial Sequence
  Description of Artificial Sequence: Synthetic oligonucleotide
  Antisense strand to SEQ ID NO: 885282
acuuucagaggaguuacaa

SEQ ID NO: 885284 - RNA, 19 nt, Artificial Sequence
  Description of Artificial Sequence: Synthetic oligonucleotide
  Sense strand starting at position 3174 of SEQ ID NO: 588727
aaguuuguugcagaaugaa

SEQ ID NO: 885285 - RNA, 19 nt, Artificial Sequence
  Description of Artificial Sequence: Synthetic oligonucleotide
  Antisense strand to SEQ ID NO: 885284
uucauucugcaacaaacuu

SEQ ID NO: 885286 - RNA, 19 nt, Artificial Sequence
  Description of Artificial Sequence: Synthetic oligonucleotide
  Sense strand starting at position 3412 of SEQ ID NO: 588727
acuugaauugcuugaggca

SEQ ID NO: 885287 - RNA, 19 nt, Artificial Sequence
  Description of Artificial Sequence: Synthetic oligonucleotide
  Antisense strand to SEQ ID NO: 885286
ugccucaagcaauucaagu

SEQ ID NO: 885288 - RNA, 19 nt, Artificial Sequence
  Description of Artificial Sequence: Synthetic oligonucleotide
  Sense strand starting at position 3515 of SEQ ID NO: 588727
gagguuacacagugcuuau

SEQ ID NO: 885289 - RNA, 19 nt, Artificial Sequence
  Description of Artificial Sequence: Synthetic oligonucleotide
  Antisense strand to SEQ ID NO: 885288
auaagcacuguguaaccuc

SEQ ID NO: 885290 - RNA, 19 nt, Artificial Sequence
  Description of Artificial Sequence: Synthetic oligonucleotide
  Sense strand starting at position 3518 of SEQ ID NO: 588727
guuacacagugcuuaugau

SEQ ID NO: 885291 - RNA, 19 nt, Artificial Sequence
  Description of Artificial Sequence: Synthetic oligonucleotide
  Antisense strand to SEQ ID NO: 885290
aucauaagcacuguguaac

SEQ ID NO: 885292 - RNA, 19 nt, Artificial Sequence
  Description of Artificial Sequence: Synthetic oligonucleotide
  Sense strand starting at position 3526 of SEQ ID NO: 588727
gugcuuaugaugugaauaa

SEQ ID NO: 885293 - RNA, 19 nt, Artificial Sequence
  Description of Artificial Sequence: Synthetic oligonucleotide
  Antisense strand to SEQ ID NO: 885292
uuauucacaucauaagcac

SEQ ID NO: 885294 - RNA, 19 nt, Artificial Sequence
  Description of Artificial Sequence: Synthetic oligonucleotide
  Sense strand starting at position 3548 of SEQ ID NO: 588727
agauaugaucccugcccua

SEQ ID NO: 885295 - RNA, 19 nt, Artificial Sequence
  Description of Artificial Sequence: Synthetic oligonucleotide
  Antisense strand to SEQ ID NO: 885294
uagggcagggaucauaucu

SEQ ID NO: 885296 - RNA, 19 nt, Artificial Sequence
  Description of Artificial Sequence: Synthetic oligonucleotide
  Sense strand starting at position 3574 of SEQ ID NO: 588727
uuacaaucugcugggaaga

SEQ ID NO: 885297 - RNA, 19 nt, Artificial Sequence
  Description of Artificial Sequence: Synthetic oligonucleotide
  Antisense strand to SEQ ID NO: 885296
ucuucccagcagauuguaa

SEQ ID NO: 885298 - RNA, 19 nt, Artificial Sequence
  Description of Artificial Sequence: Synthetic oligonucleotide
  Sense strand starting at position 3737 of SEQ ID NO: 588727
uuguaaucccaguagugaa

SEQ ID NO: 885299 - RNA, 19 nt, Artificial Sequence
  Description of Artificial Sequence: Synthetic oligonucleotide
  Antisense strand to SEQ ID NO: 885298
uucacuacugggauuacaa

SEQ ID NO: 885300 - RNA, 19 nt, Artificial Sequence
  Description of Artificial Sequence: Synthetic oligonucleotide
  Sense strand starting at position 3765 of SEQ ID NO: 588727
agcagauaucuugaggcua

SEQ ID NO: 885301 - RNA, 19 nt, Artificial Sequence
  Description of Artificial Sequence: Synthetic oligonucleotide
  Antisense strand to SEQ ID NO: 885300
uagccucaagauaucugcu

SEQ ID NO: 885302 - RNA, 19 nt, Artificial Sequence
  Description of Artificial Sequence: Synthetic oligonucleotide
  Sense strand starting at position 246 of SEQ ID NO: 588728
uuuagucucuccgcgaauu

SEQ ID NO: 885303 - RNA, 19 nt, Artificial Sequence
  Description of Artificial Sequence: Synthetic oligonucleotide
  Antisense strand to SEQ ID NO: 885302
aauucgcggagagacuaaa

SEQ ID NO: 885304 - RNA, 19 nt, Artificial Sequence
  Description of Artificial Sequence: Synthetic oligonucleotide
  Sense strand starting at position 247 of SEQ ID NO: 588728
uuagucucuccgcgaauuc

SEQ ID NO: 885305 - RNA, 19 nt, Artificial Sequence
  Description of Artificial Sequence: Synthetic oligonucleotide
  Antisense strand to SEQ ID NO: 885304
gaauucgcggagagacuaa

SEQ ID NO: 885306 - RNA, 19 nt, Artificial Sequence
  Description of Artificial Sequence: Synthetic oligonucleotide
  Sense strand starting at position 248 of SEQ ID NO: 588728
uagucucuccgcgaauucu

SEQ ID NO: 885307 - RNA, 19 nt, Artificial Sequence
  Description of Artificial Sequence: Synthetic oligonucleotide
  Antisense strand to SEQ ID NO: 885306
agaauucgcggagagacua

SEQ ID NO: 885308 - RNA, 19 nt, Artificial Sequence
  Description of Artificial Sequence: Synthetic oligonucleotide
  Sense strand starting at position 394 of SEQ ID NO: 588728
ggagacucuuucgccuagu

SEQ ID NO: 885309 - RNA, 19 nt, Artificial Sequence
  Description of Artificial Sequence: Synthetic oligonucleotide
  Antisense strand to SEQ ID NO: 885308
acuaggcgaaagagucucc

SEQ ID NO: 885310 - RNA, 19 nt, Artificial Sequence
  Description of Artificial Sequence: Synthetic oligonucleotide
  Sense strand starting at position 504 of SEQ ID NO: 588728
agguguuggaggugccaaa

SEQ ID NO: 885311 - RNA, 19 nt, Artificial Sequence
  Description of Artificial Sequence: Synthetic oligonucleotide
  Antisense strand to SEQ ID NO: 885310
uuuggcaccuccaacaccu

SEQ ID NO: 885312 - RNA, 19 nt, Artificial Sequence
  Description of Artificial Sequence: Synthetic oligonucleotide
  Sense strand starting at position 752 of SEQ ID NO: 588728
gcggccuccaugucuuaca

SEQ ID NO: 885313 - RNA, 19 nt, Artificial Sequence
  Description of Artificial Sequence: Synthetic oligonucleotide
  Antisense strand to SEQ ID NO: 885312
uguaagacauggaggccgc

SEQ ID NO: 885314 - RNA, 19 nt, Artificial Sequence
  Description of Artificial Sequence: Synthetic oligonucleotide
  Sense strand starting at position 753 of SEQ ID NO: 588728
cggccuccaugucuuacaa

SEQ ID NO: 885315 - RNA, 19 nt, Artificial Sequence
  Description of Artificial Sequence: Synthetic oligonucleotide
  Antisense strand to SEQ ID NO: 885314
uuguaagacauggaggccg

SEQ ID NO: 885316 - RNA, 19 nt, Artificial Sequence
  Description of Artificial Sequence: Synthetic oligonucleotide
  Sense strand starting at position 757 of SEQ ID NO: 588728
cuccaugucuuacaagguu

SEQ ID NO: 885317 - RNA, 19 nt, Artificial Sequence
  Description of Artificial Sequence: Synthetic oligonucleotide
  Antisense strand to SEQ ID NO: 885316
aaccuuguaagacauggag

SEQ ID NO: 885318 - RNA, 19 nt, Artificial Sequence
  Description of Artificial Sequence: Synthetic oligonucleotide
  Sense strand starting at position 864 of SEQ ID NO: 588728
uuugucacgcuguuaaagu

SEQ ID NO: 885319 - RNA, 19 nt, Artificial Sequence
  Description of Artificial Sequence: Synthetic oligonucleotide
  Antisense strand to SEQ ID NO: 885318
acuuuaacagcgugacaaa

SEQ ID NO: 885320 - RNA, 19 nt, Artificial Sequence
  Description of Artificial Sequence: Synthetic oligonucleotide
  Sense strand starting at position 871 of SEQ ID NO: 588728
cgcuguuaaagugaucgca

SEQ ID NO: 885321 - RNA, 19 nt, Artificial Sequence
  Description of Artificial Sequence: Synthetic oligonucleotide
  Antisense strand to SEQ ID NO: 885320
ugcgaucacuuuaacagcg

SEQ ID NO: 885322 - RNA, 19 nt, Artificial Sequence
  Description of Artificial Sequence: Synthetic oligonucleotide
  Sense strand starting at position 873 of SEQ ID NO: 588728
cuguuaaagugaucgcauu

SEQ ID NO: 885323 - RNA, 19 nt, Artificial Sequence
  Description of Artificial Sequence: Synthetic oligonucleotide
  Antisense strand to SEQ ID NO: 885322
aaugcgaucacuuuaacag

SEQ ID NO: 885324 - RNA, 19 nt, Artificial Sequence
  Description of Artificial Sequence: Synthetic oligonucleotide
  Sense strand starting at position 874 of SEQ ID NO: 588728
uguuaaagugaucgcauuc

SEQ ID NO: 885325 - RNA, 19 nt, Artificial Sequence
  Description of Artificial Sequence: Synthetic oligonucleotide
  Antisense strand to SEQ ID NO: 885324
gaaugcgaucacuuuaaca

SEQ ID NO: 885326 - RNA, 19 nt, Artificial Sequence
  Description of Artificial Sequence: Synthetic oligonucleotide
  Sense strand starting at position 894 of SEQ ID NO: 588728
uucggcuccauucgaaaga

SEQ ID NO: 885327 - RNA, 19 nt, Artificial Sequence
  Description of Artificial Sequence: Synthetic oligonucleotide
  Antisense strand to SEQ ID NO: 885326
ucuuucgaauggagccgaa

SEQ ID NO: 885328 - RNA, 19 nt, Artificial Sequence
  Description of Artificial Sequence: Synthetic oligonucleotide
  Sense strand starting at position 895 of SEQ ID NO: 588728
ucggcuccauucgaaagaa

SEQ ID NO: 885329 - RNA, 19 nt, Artificial Sequence
  Description of Artificial Sequence: Synthetic oligonucleotide
  Antisense strand to SEQ ID NO: 885328
uucuuucgaauggagccga

SEQ ID NO: 885330 - RNA, 19 nt, Artificial Sequence
  Description of Artificial Sequence: Synthetic oligonucleotide
  Sense strand starting at position 941 of SEQ ID NO: 588728
ggaagaaugcuguagcagu

SEQ ID NO: 885331 - RNA, 19 nt, Artificial Sequence
  Description of Artificial Sequence: Synthetic oligonucleotide
  Antisense strand to SEQ ID NO: 885330
acugcuacagcauucuucc

SEQ ID NO: 885332 - RNA, 19 nt, Artificial Sequence
  Description of Artificial Sequence: Synthetic oligonucleotide
  Sense strand starting at position 957 of SEQ ID NO: 588728
aguaaauuguagcucaaug

SEQ ID NO: 885333 - RNA, 19 nt, Artificial Sequence
  Description of Artificial Sequence: Synthetic oligonucleotide
  Antisense strand to SEQ ID NO: 885332
cauugagcuacaauuuacu

SEQ ID NO: 885334 - RNA, 19 nt, Artificial Sequence
  Description of Artificial Sequence: Synthetic oligonucleotide
  Sense strand starting at position 1038 of SEQ ID NO: 588728
uugacauagcgugaaugga

SEQ ID NO: 885335 - RNA, 19 nt, Artificial Sequence
  Description of Artificial Sequence: Synthetic oligonucleotide
  Antisense strand to SEQ ID NO: 885334
uccauucacgcuaugucaa

SEQ ID NO: 885336 - RNA, 19 nt, Artificial Sequence
  Description of Artificial Sequence: Synthetic oligonucleotide
  Sense strand starting at position 1047 of SEQ ID NO: 588728
cgugaauggaaguggaauu

SEQ ID NO: 885337 - RNA, 19 nt, Artificial Sequence
  Description of Artificial Sequence: Synthetic oligonucleotide
  Antisense strand to SEQ ID NO: 885336
aauuccacuuccauucacg

SEQ ID NO: 885338 - RNA, 19 nt, Artificial Sequence
  Description of Artificial Sequence: Synthetic oligonucleotide
  Sense strand starting at position 1048 of SEQ ID NO: 588728
gugaauggaaguggaauua

SEQ ID NO: 885339 - RNA, 19 nt, Artificial Sequence
  Description of Artificial Sequence: Synthetic oligonucleotide
  Antisense strand to SEQ ID NO: 885338
uaauuccacuuccauucac

SEQ ID NO: 885340 - RNA, 19 nt, Artificial Sequence
  Description of Artificial Sequence: Synthetic oligonucleotide
  Sense strand starting at position 1059 of SEQ ID NO: 588728
uggaauuagucuucacggu

SEQ ID NO: 885341 - RNA, 19 nt, Artificial Sequence
  Description of Artificial Sequence: Synthetic oligonucleotide
  Antisense strand to SEQ ID NO: 885340
accgugaagacuaauucca

SEQ ID NO: 885342 - RNA, 19 nt, Artificial Sequence
  Description of Artificial Sequence: Synthetic oligonucleotide
  Sense strand starting at position 1060 of SEQ ID NO: 588728
ggaauuagucuucacggua

SEQ ID NO: 885343 - RNA, 19 nt, Artificial Sequence
  Description of Artificial Sequence: Synthetic oligonucleotide
  Antisense strand to SEQ ID NO: 885342
uaccgugaagacuaauucc

SEQ ID NO: 885344 - RNA, 19 nt, Artificial Sequence
  Description of Artificial Sequence: Synthetic oligonucleotide
  Sense strand starting at position 1148 of SEQ ID NO: 588728
aagauauuguuugcggguu

SEQ ID NO: 885345 - RNA, 19 nt, Artificial Sequence
  Description of Artificial Sequence: Synthetic oligonucleotide
  Antisense strand to SEQ ID NO: 885344
aacccgcaaacaauaucuu

SEQ ID NO: 885346 - RNA, 19 nt, Artificial Sequence
  Description of Artificial Sequence: Synthetic oligonucleotide
  Sense strand starting at position 1154 of SEQ ID NO: 588728
uuguuugcggguugaugaa

SEQ ID NO: 885347 - RNA, 19 nt, Artificial Sequence
  Description of Artificial Sequence: Synthetic oligonucleotide
  Antisense strand to SEQ ID NO: 885346
uucaucaacccgcaaacaa

SEQ ID NO: 885348 - RNA, 19 nt, Artificial Sequence
  Description of Artificial Sequence: Synthetic oligonucleotide
  Sense strand starting at position 1161 of SEQ ID NO: 588728
cggguugaugaaugaggaa

SEQ ID NO: 885349 - RNA, 19 nt, Artificial Sequence
  Description of Artificial Sequence: Synthetic oligonucleotide
  Antisense strand to SEQ ID NO: 885348
uuccucauucaucaacccg

SEQ ID NO: 885350 - RNA, 19 nt, Artificial Sequence
  Description of Artificial Sequence: Synthetic oligonucleotide
  Sense strand starting at position 1164 of SEQ ID NO: 588728
guugaugaaugaggaauaa

SEQ ID NO: 885351 - RNA, 19 nt, Artificial Sequence
  Description of Artificial Sequence: Synthetic oligonucleotide
  Antisense strand to SEQ ID NO: 885350
uuauuccucauucaucaac

SEQ ID NO: 885352 - RNA, 19 nt, Artificial Sequence
  Description of Artificial Sequence: Synthetic oligonucleotide
  Sense strand starting at position 1179 of SEQ ID NO: 588728
auaagaacuugagacaucu

SEQ ID NO: 885353 - RNA, 19 nt, Artificial Sequence
  Description of Artificial Sequence: Synthetic oligonucleotide
  Antisense strand to SEQ ID NO: 885352
agaugucucaaguucuuau

SEQ ID NO: 885354 - RNA, 19 nt, Artificial Sequence
  Description of Artificial Sequence: Synthetic oligonucleotide
  Sense strand starting at position 1306 of SEQ ID NO: 588728
uaaaguucuugguuuaagu

SEQ ID NO: 885355 - RNA, 19 nt, Artificial Sequence
  Description of Artificial Sequence: Synthetic oligonucleotide
  Antisense strand to SEQ ID NO: 885354
acuuaaaccaagaacuuua

SEQ ID NO: 885356 - RNA, 19 nt, Artificial Sequence
  Description of Artificial Sequence: Synthetic oligonucleotide
  Sense strand starting at position 1313 of SEQ ID NO: 588728
cuugguuuaagugggaacu

SEQ ID NO: 885357 - RNA, 19 nt, Artificial Sequence
  Description of Artificial Sequence: Synthetic oligonucleotide
  Antisense strand to SEQ ID NO: 885356
aguucccacuuaaaccaag

SEQ ID NO: 885358 - RNA, 19 nt, Artificial Sequence
  Description of Artificial Sequence: Synthetic oligonucleotide
  Sense strand starting at position 1314 of SEQ ID NO: 588728
uugguuuaagugggaacuu

SEQ ID NO: 885359 - RNA, 19 nt, Artificial Sequence
  Description of Artificial Sequence: Synthetic oligonucleotide
  Antisense strand to SEQ ID NO: 885358
aaguucccacuuaaaccaa

SEQ ID NO: 885360 - RNA, 19 nt, Artificial Sequence
  Description of Artificial Sequence: Synthetic oligonucleotide
  Sense strand starting at position 1325 of SEQ ID NO: 588728
gggaacuuucgugggucaa

SEQ ID NO: 885361 - RNA, 19 nt, Artificial Sequence
  Description of Artificial Sequence: Synthetic oligonucleotide
  Antisense strand to SEQ ID NO: 885360
uugacccacgaaaguuccc

SEQ ID NO: 885362 - RNA, 19 nt, Artificial Sequence
  Description of Artificial Sequence: Synthetic oligonucleotide
  Sense strand starting at position 1326 of SEQ ID NO: 588728
ggaacuuucgugggucaag

SEQ ID NO: 885363 - RNA, 19 nt, Artificial Sequence
  Description of Artificial Sequence: Synthetic oligonucleotide
  Antisense strand to SEQ ID NO: 885362
cuugacccacgaaaguucc

SEQ ID NO: 885364 - RNA, 19 nt, Artificial Sequence
  Description of Artificial Sequence: Synthetic oligonucleotide
  Sense strand starting at position 2151 of SEQ ID NO: 588728
gauggugaaaucuguagag

SEQ ID NO: 885365 - RNA, 19 nt, Artificial Sequence
  Description of Artificial Sequence: Synthetic oligonucleotide
  Antisense strand to SEQ ID NO: 885364
cucuacagauuucaccauc

SEQ ID NO: 885366 - RNA, 19 nt, Artificial Sequence
  Description of Artificial Sequence: Synthetic oligonucleotide
  Sense strand starting at position 2371 of SEQ ID NO: 588728
ccuaauugguuauuaauga

SEQ ID NO: 885367 - RNA, 19 nt, Artificial Sequence
  Description of Artificial Sequence: Synthetic oligonucleotide
  Antisense strand to SEQ ID NO: 885366
ucauuaauaaccaauuagg

SEQ ID NO: 885368 - RNA, 19 nt, Artificial Sequence
  Description of Artificial Sequence: Synthetic oligonucleotide
  Sense strand starting at position 2402 of SEQ ID NO: 588728
ggaggacagacuuguugua

SEQ ID NO: 885369 - RNA, 19 nt, Artificial Sequence
  Description of Artificial Sequence: Synthetic oligonucleotide
  Antisense strand to SEQ ID NO: 885368
uacaacaagucuguccucc

SEQ ID NO: 885370 - RNA, 19 nt, Artificial Sequence
  Description of Artificial Sequence: Synthetic oligonucleotide
  Sense strand starting at position 3142 of SEQ ID NO: 588728
gcagccugucucugggaaa

SEQ ID NO: 885371 - RNA, 19 nt, Artificial Sequence
  Description of Artificial Sequence: Synthetic oligonucleotide
  Antisense strand to SEQ ID NO: 885370
uuucccagagacaggcugc

SEQ ID NO: 885372 - RNA, 19 nt, Artificial Sequence
  Description of Artificial Sequence: Synthetic oligonucleotide
  Sense strand starting at position 3161 of SEQ ID NO: 588728
agaauuuccuacgggauau

SEQ ID NO: 885373 - RNA, 19 nt, Artificial Sequence
  Description of Artificial Sequence: Synthetic oligonucleotide
  Antisense strand to SEQ ID NO: 885372
auaucccguaggaaauucu

SEQ ID NO: 885374 - RNA, 19 nt, Artificial Sequence
  Description of Artificial Sequence: Synthetic oligonucleotide
  Sense strand starting at position 3236 of SEQ ID NO: 588728
agcgaagucccucagaaac

SEQ ID NO: 885375 - RNA, 19 nt, Artificial Sequence
  Description of Artificial Sequence: Synthetic oligonucleotide
  Antisense strand to SEQ ID NO: 885374
guuucugagggacuucgcu

SEQ ID NO: 885376 - RNA, 19 nt, Artificial Sequence
  Description of Artificial Sequence: Synthetic oligonucleotide
  Sense strand starting at position 3709 of SEQ ID NO: 588728
gggucaggcucacggauua

SEQ ID NO: 885377 - RNA, 19 nt, Artificial Sequence
  Description of Artificial Sequence: Synthetic oligonucleotide
  Antisense strand to SEQ ID NO: 885376
uaauccgugagccugaccc

SEQ ID NO: 885378 - RNA, 19 nt, Artificial Sequence
  Description of Artificial Sequence: Synthetic oligonucleotide
  Sense strand starting at position 3721 of SEQ ID NO: 588728
cggauuagucuccgcugga

SEQ ID NO: 885379 - RNA, 19 nt, Artificial Sequence
  Description of Artificial Sequence: Synthetic oligonucleotide
  Antisense strand to SEQ ID NO: 885378
uccagcggagacuaauccg

SEQ ID NO: 885380 - RNA, 19 nt, Artificial Sequence
  Description of Artificial Sequence: Synthetic oligonucleotide
  Sense strand starting at position 3722 of SEQ ID NO: 588728
ggauuagucuccgcuggac

SEQ ID NO: 885381 - RNA, 19 nt, Artificial Sequence
  Description of Artificial Sequence: Synthetic oligonucleotide
  Antisense strand to SEQ ID NO: 885380
guccagcggagacuaaucc

SEQ ID NO: 885382 - RNA, 19 nt, Artificial Sequence
  Description of Artificial Sequence: Synthetic oligonucleotide
  Sense strand starting at position 25 of SEQ ID NO: 588729
ugaagaaagacuugggcuu

SEQ ID NO: 885383 - RNA, 19 nt, Artificial Sequence
  Description of Artificial Sequence: Synthetic oligonucleotide
  Antisense strand to SEQ ID NO: 885382
aagcccaagucuuucuuca

SEQ ID NO: 885384 - RNA, 19 nt, Artificial Sequence
  Description of Artificial Sequence: Synthetic oligonucleotide
  Sense strand starting at position 31 of SEQ ID NO: 588729
aagacuugggcuuggaacu

SEQ ID NO: 885385 - RNA, 19 nt, Artificial Sequence
  Description of Artificial Sequence: Synthetic oligonucleotide
  Antisense strand to SEQ ID NO: 885384
aguuccaagcccaagucuu

SEQ ID NO: 885386 - RNA, 19 nt, Artificial Sequence
  Description of Artificial Sequence: Synthetic oligonucleotide
  Sense strand starting at position 76 of SEQ ID NO: 588729
uccucuuuggcagggagua

SEQ ID NO: 885387 - RNA, 19 nt, Artificial Sequence
  Description of Artificial Sequence: Synthetic oligonucleotide
  Antisense strand to SEQ ID NO: 885386
uacucccugccaaagagga

SEQ ID NO: 885388 - RNA, 19 nt, Artificial Sequence
  Description of Artificial Sequence: Synthetic oligonucleotide
  Sense strand starting at position 181 of SEQ ID NO: 588729
agaccuuugcaagagugau

SEQ ID NO: 885389 - RNA, 19 nt, Artificial Sequence
  Description of Artificial Sequence: Synthetic oligonucleotide
  Antisense strand to SEQ ID NO: 885388
aucacucuugcaaaggucu

SEQ ID NO: 885390 - RNA, 19 nt, Artificial Sequence
  Description of Artificial Sequence: Synthetic oligonucleotide
  Sense strand starting at position 536 of SEQ ID NO: 588729
uguucagggcuggaguuaa

SEQ ID NO: 885391 - RNA, 19 nt, Artificial Sequence
  Description of Artificial Sequence: Synthetic oligonucleotide
  Antisense strand to SEQ ID NO: 885390
uuaacuccagcccugaaca

SEQ ID NO: 885392 - RNA, 19 nt, Artificial Sequence
  Description of Artificial Sequence: Synthetic oligonucleotide
  Sense strand starting at position 616 of SEQ ID NO: 588729
agcugagaaacucguuuaa

SEQ ID NO: 885393 - RNA, 19 nt, Artificial Sequence
  Description of Artificial Sequence: Synthetic oligonucleotide
  Antisense strand to SEQ ID NO: 885392
uuaaacgaguuucucagcu

SEQ ID NO: 885394 - RNA, 19 nt, Artificial Sequence
  Description of Artificial Sequence: Synthetic oligonucleotide
  Sense strand starting at position 1010 of SEQ ID NO: 588729
uguguacuucgggaugaag

SEQ ID NO: 885395 - RNA, 19 nt, Artificial Sequence
  Description of Artificial Sequence: Synthetic oligonucleotide
  Antisense strand to SEQ ID NO: 885394
cuucaucccgaaguacaca

SEQ ID NO: 885396 - RNA, 19 nt, Artificial Sequence
  Description of Artificial Sequence: Synthetic oligonucleotide
  Sense strand starting at position 1114 of SEQ ID NO: 588729
ugagguuuccgaagcgcuu

SEQ ID NO: 885397 - RNA, 19 nt, Artificial Sequence
  Description of Artificial Sequence: Synthetic oligonucleotide
  Antisense strand to SEQ ID NO: 885396
aagcgcuucggaaaccuca

SEQ ID NO: 885398 - RNA, 19 nt, Artificial Sequence
  Description of Artificial Sequence: Synthetic oligonucleotide
  Sense strand starting at position 1171 of SEQ ID NO: 588729
ugaggucagagcugaguuu

SEQ ID NO: 885399 - RNA, 19 nt, Artificial Sequence
  Description of Artificial Sequence: Synthetic oligonucleotide
  Antisense strand to SEQ ID NO: 885398
aaacucagcucugaccuca

SEQ ID NO: 885400 - RNA, 19 nt, Artificial Sequence
  Description of Artificial Sequence: Synthetic oligonucleotide
  Sense strand starting at position 1180 of SEQ ID NO: 588729
agcugaguuuggagggaaa

SEQ ID NO: 885401 - RNA, 19 nt, Artificial Sequence
  Description of Artificial Sequence: Synthetic oligonucleotide
  Antisense strand to SEQ ID NO: 885400
uuucccuccaaacucagcu

SEQ ID NO: 885402 - RNA, 19 nt, Artificial Sequence
  Description of Artificial Sequence: Synthetic oligonucleotide
  Sense strand starting at position 1210 of SEQ ID NO: 588729
cagagacgaucuucucgua

SEQ ID NO: 885403 - RNA, 19 nt, Artificial Sequence
  Description of Artificial Sequence: Synthetic oligonucleotide
  Antisense strand to SEQ ID NO: 885402
uacgagaagaucgucucug

SEQ ID NO: 885404 - RNA, 19 nt, Artificial Sequence
  Description of Artificial Sequence: Synthetic oligonucleotide
  Sense strand starting at position 1325 of SEQ ID NO: 588729
gccuuugcucaggaugauc

SEQ ID NO: 885405 - RNA, 19 nt, Artificial Sequence
  Description of Artificial Sequence: Synthetic oligonucleotide
  Antisense strand to SEQ ID NO: 885404
gaucauccugagcaaaggc

SEQ ID NO: 885406 - RNA, 19 nt, Artificial Sequence
  Description of Artificial Sequence: Synthetic oligonucleotide
  Sense strand starting at position 1681 of SEQ ID NO: 588729
gcaggaugcgcuucucguu

SEQ ID NO: 885407 - RNA, 19 nt, Artificial Sequence
  Description of Artificial Sequence: Synthetic oligonucleotide
  Antisense strand to SEQ ID NO: 885406
aacgagaagcgcauccugc

SEQ ID NO: 885408 - RNA, 19 nt, Artificial Sequence
  Description of Artificial Sequence: Synthetic oligonucleotide
  Sense strand starting at position 1687 of SEQ ID NO: 588729
ugcgcuucucguucaguau

SEQ ID NO: 885409 - RNA, 19 nt, Artificial Sequence
  Description of Artificial Sequence: Synthetic oligonucleotide
  Antisense strand to SEQ ID NO: 885408
auacugaacgagaagcgca

SEQ ID NO: 885410 - RNA, 19 nt, Artificial Sequence
  Description of Artificial Sequence: Synthetic oligonucleotide
  Sense strand starting at position 1886 of SEQ ID NO: 588729
gaggaaaucuccucuggcu

SEQ ID NO: 885411 - RNA, 19 nt, Artificial Sequence
  Description of Artificial Sequence: Synthetic oligonucleotide
  Antisense strand to SEQ ID NO: 885410
agccagaggagauuuccuc

SEQ ID NO: 885412 - RNA, 19 nt, Artificial Sequence
  Description of Artificial Sequence: Synthetic oligonucleotide
  Sense strand starting at position 1888 of SEQ ID NO: 588729
ggaaaucuccucuggcuuu

SEQ ID NO: 885413 - RNA, 19 nt, Artificial Sequence
  Description of Artificial Sequence: Synthetic oligonucleotide
  Antisense strand to SEQ ID NO: 885412
aaagccagaggagauuucc

SEQ ID NO: 885414 - RNA, 19 nt, Artificial Sequence
  Description of Artificial Sequence: Synthetic oligonucleotide
  Sense strand starting at position 2211 of SEQ ID NO: 588729
gcauuaugcaagugagaga

SEQ ID NO: 885415 - RNA, 19 nt, Artificial Sequence
  Description of Artificial Sequence: Synthetic oligonucleotide
  Antisense strand to SEQ ID NO: 885414
ucucucacuugcauaaugc

SEQ ID NO: 885416 - RNA, 19 nt, Artificial Sequence
  Description of Artificial Sequence: Synthetic oligonucleotide
  Sense strand starting at position 2392 of SEQ ID NO: 588729
acauguuuguauccugauu

SEQ ID NO: 885417 - RNA, 19 nt, Artificial Sequence
  Description of Artificial Sequence: Synthetic oligonucleotide
  Antisense strand to SEQ ID NO: 885416
aaucaggauacaaacaugu

SEQ ID NO: 885418 - RNA, 19 nt, Artificial Sequence
  Description of Artificial Sequence: Synthetic oligonucleotide
  Sense strand starting at position 2879 of SEQ ID NO: 588729
ggguuuaauugcucuuauu

SEQ ID NO: 885419 - RNA, 19 nt, Artificial Sequence
  Description of Artificial Sequence: Synthetic oligonucleotide
  Antisense strand to SEQ ID NO: 885418
aauaagagcaauuaaaccc

SEQ ID NO: 885420 - RNA, 19 nt, Artificial Sequence
  Description of Artificial Sequence: Synthetic oligonucleotide
  Sense strand starting at position 2888 of SEQ ID NO: 588729
ugcucuuauuuccuaaggu

SEQ ID NO: 885421 - RNA, 19 nt, Artificial Sequence
  Description of Artificial Sequence: Synthetic oligonucleotide
  Antisense strand to SEQ ID NO: 885420
accuuaggaaauaagagca

SEQ ID NO: 885422 - RNA, 19 nt, Artificial Sequence
  Description of Artificial Sequence: Synthetic oligonucleotide
  Sense strand starting at position 3093 of SEQ ID NO: 588729
guauauuauuucguuucca

SEQ ID NO: 885423 - RNA, 19 nt, Artificial Sequence
  Description of Artificial Sequence: Synthetic oligonucleotide
  Antisense strand to SEQ ID NO: 885422
uggaaacgaaauaauauac

SEQ ID NO: 885424 - RNA, 19 nt, Artificial Sequence
  Description of Artificial Sequence: Synthetic oligonucleotide
  Sense strand starting at position 3174 of SEQ ID NO: 588729
acauacucugugugaccua

SEQ ID NO: 885425 - RNA, 19 nt, Artificial Sequence
  Description of Artificial Sequence: Synthetic oligonucleotide
  Antisense strand to SEQ ID NO: 885424
uaggucacacagaguaugu

SEQ ID NO: 885426 - RNA, 19 nt, Artificial Sequence
  Description of Artificial Sequence: Synthetic oligonucleotide
  Sense strand starting at position 3235 of SEQ ID NO: 588729
augaucuaucuugguagau

SEQ ID NO: 885427 - RNA, 19 nt, Artificial Sequence
  Description of Artificial Sequence: Synthetic oligonucleotide
  Antisense strand to SEQ ID NO: 885426
aucuaccaagauagaucau

SEQ ID NO: 885428 - RNA, 19 nt, Artificial Sequence
  Description of Artificial Sequence: Synthetic oligonucleotide
  Sense strand starting at position 3236 of SEQ ID NO: 588729
ugaucuaucuugguagaug

SEQ ID NO: 885429 - RNA, 19 nt, Artificial Sequence
  Description of Artificial Sequence: Synthetic oligonucleotide
  Antisense strand to SEQ ID NO: 885428
caucuaccaagauagauca

SEQ ID NO: 885430 - RNA, 19 nt, Artificial Sequence
  Description of Artificial Sequence: Synthetic oligonucleotide
  Sense strand starting at position 3291 of SEQ ID NO: 588729
uauucugcuguuugaggau

SEQ ID NO: 885431 - RNA, 19 nt, Artificial Sequence
  Description of Artificial Sequence: Synthetic oligonucleotide
  Antisense strand to SEQ ID NO: 885430
auccucaaacagcagaaua

SEQ ID NO: 885432 - RNA, 19 nt, Artificial Sequence
  Description of Artificial Sequence: Synthetic oligonucleotide
  Sense strand starting at position 3305 of SEQ ID NO: 588729
aggauacaguguucuacaa

SEQ ID NO: 885433 - RNA, 19 nt, Artificial Sequence
  Description of Artificial Sequence: Synthetic oligonucleotide
  Antisense strand to SEQ ID NO: 885432
uuguagaacacuguauccu

SEQ ID NO: 885434 - RNA, 19 nt, Artificial Sequence
  Description of Artificial Sequence: Synthetic oligonucleotide
  Sense strand starting at position 3318 of SEQ ID NO: 588729
cuacaaaugucacuuaggu

SEQ ID NO: 885435 - RNA, 19 nt, Artificial Sequence
  Description of Artificial Sequence: Synthetic oligonucleotide
  Antisense strand to SEQ ID NO: 885434
accuaagugacauuuguag

SEQ ID NO: 885436 - RNA, 19 nt, Artificial Sequence
  Description of Artificial Sequence: Synthetic oligonucleotide
  Sense strand starting at position 3374 of SEQ ID NO: 588729
cuuauugacuuucuguuua

SEQ ID NO: 885437 - RNA, 19 nt, Artificial Sequence
  Description of Artificial Sequence: Synthetic oligonucleotide
  Antisense strand to SEQ ID NO: 885436
uaaacagaaagucaauaag

SEQ ID NO: 885438 - RNA, 19 nt, Artificial Sequence
  Description of Artificial Sequence: Synthetic oligonucleotide
  Sense strand starting at position 3378 of SEQ ID NO: 588729
uugacuuucuguuuacuua

SEQ ID NO: 885439 - RNA, 19 nt, Artificial Sequence
  Description of Artificial Sequence: Synthetic oligonucleotide
  Antisense strand to SEQ ID NO: 885438
uaaguaaacagaaagucaa

SEQ ID NO: 885440 - RNA, 19 nt, Artificial Sequence
  Description of Artificial Sequence: Synthetic oligonucleotide
  Sense strand starting at position 3379 of SEQ ID NO: 588729
ugacuuucuguuuacuuau

SEQ ID NO: 885441 - RNA, 19 nt, Artificial Sequence
  Description of Artificial Sequence: Synthetic oligonucleotide
  Antisense strand to SEQ ID NO: 885440
auaaguaaacagaaaguca

SEQ ID NO: 885442 - RNA, 19 nt, Artificial Sequence
  Description of Artificial Sequence: Synthetic oligonucleotide
  Sense strand starting at position 3562 of SEQ ID NO: 588729
ccagucaauucuguacaaa

SEQ ID NO: 885443 - RNA, 19 nt, Artificial Sequence
  Description of Artificial Sequence: Synthetic oligonucleotide
  Antisense strand to SEQ ID NO: 885442
uuuguacagaauugacugg

SEQ ID NO: 885444 - RNA, 19 nt, Artificial Sequence
  Description of Artificial Sequence: Synthetic oligonucleotide
  Sense strand starting at position 3565 of SEQ ID NO: 588729
gucaauucuguacaaagau

SEQ ID NO: 885445 - RNA, 19 nt, Artificial Sequence
  Description of Artificial Sequence: Synthetic oligonucleotide
  Antisense strand to SEQ ID NO: 885444
aucuuuguacagaauugac

SEQ ID NO: 885446 - RNA, 19 nt, Artificial Sequence
  Description of Artificial Sequence: Synthetic oligonucleotide
  Sense strand starting at position 3794 of SEQ ID NO: 588729
aguagaagguuucuauugu

SEQ ID NO: 885447 - RNA, 19 nt, Artificial Sequence
  Description of Artificial Sequence: Synthetic oligonucleotide
  Antisense strand to SEQ ID NO: 885446
acaauagaaaccuucuacu

SEQ ID NO: 885448 - RNA, 19 nt, Artificial Sequence
  Description of Artificial Sequence: Synthetic oligonucleotide
  Sense strand starting at position 3803 of SEQ ID NO: 588729
uuucuauugugacugugaa

SEQ ID NO: 885449 - RNA, 19 nt, Artificial Sequence
  Description of Artificial Sequence: Synthetic oligonucleotide
  Antisense strand to SEQ ID NO: 885448
uucacagucacaauagaaa

SEQ ID NO: 885450 - RNA, 19 nt, Artificial Sequence
  Description of Artificial Sequence: Synthetic oligonucleotide
  Sense strand starting at position 3804 of SEQ ID NO: 588729
uucuauugugacugugaau

SEQ ID NO: 885451 - RNA, 19 nt, Artificial Sequence
  Description of Artificial Sequence: Synthetic oligonucleotide
  Antisense strand to SEQ ID NO: 885450
auucacagucacaauagaa

SEQ ID NO: 885452 - RNA, 19 nt, Artificial Sequence
  Description of Artificial Sequence: Synthetic oligonucleotide
  Sense strand starting at position 3818 of SEQ ID NO: 588729
ugaauucuugccgcucagu

SEQ ID NO: 885453 - RNA, 19 nt, Artificial Sequence
  Description of Artificial Sequence: Synthetic oligonucleotide
  Antisense strand to SEQ ID NO: 885452
acugagcggcaagaauuca

SEQ ID NO: 885454 - RNA, 19 nt, Artificial Sequence
  Description of Artificial Sequence: Synthetic oligonucleotide
  Sense strand starting at position 3819 of SEQ ID NO: 588729
gaauucuugccgcucaguu

SEQ ID NO: 885455 - RNA, 19 nt, Artificial Sequence
  Description of Artificial Sequence: Synthetic oligonucleotide
  Antisense strand to SEQ ID NO: 885454
aacugagcggcaagaauuc

SEQ ID NO: 885456 - RNA, 19 nt, Artificial Sequence
  Description of Artificial Sequence: Synthetic oligonucleotide
  Sense strand starting at position 3908 of SEQ ID NO: 588729
gccaguacuuggguacuga

SEQ ID NO: 885457 - RNA, 19 nt, Artificial Sequence
  Description of Artificial Sequence: Synthetic oligonucleotide
  Antisense strand to SEQ ID NO: 885456
ucaguacccaaguacuggc

SEQ ID NO: 885458 - RNA, 19 nt, Artificial Sequence
  Description of Artificial Sequence: Synthetic oligonucleotide
  Sense strand starting at position 3916 of SEQ ID NO: 588729
uuggguacugacuguauau

SEQ ID NO: 885459 - RNA, 19 nt, Artificial Sequence
  Description of Artificial Sequence: Synthetic oligonucleotide
  Antisense strand to SEQ ID NO: 885458
auauacagucaguacccaa

SEQ ID NO: 885460 - RNA, 19 nt, Artificial Sequence
  Description of Artificial Sequence: Synthetic oligonucleotide
  Sense strand starting at position 3934 of SEQ ID NO: 588729
uucagagacggucagguua

SEQ ID NO: 885461 - RNA, 19 nt, Artificial Sequence
  Description of Artificial Sequence: Synthetic oligonucleotide
  Antisense strand to SEQ ID NO: 885460
uaaccugaccgucucugaa

SEQ ID NO: 885462 - RNA, 19 nt, Artificial Sequence
  Description of Artificial Sequence: Synthetic oligonucleotide
  Sense strand starting at position 328 of SEQ ID NO: 588730
augccagaacuauguuaga

SEQ ID NO: 885463 - RNA, 19 nt, Artificial Sequence
  Description of Artificial Sequence: Synthetic oligonucleotide
  Antisense strand to SEQ ID NO: 885462
ucuaacauaguucuggcau

SEQ ID NO: 885464 - RNA, 19 nt, Artificial Sequence
  Description of Artificial Sequence: Synthetic oligonucleotide
  Sense strand starting at position 338 of SEQ ID NO: 588730
uauguuagaucuccagaag

SEQ ID NO: 885465 - RNA, 19 nt, Artificial Sequence
  Description of Artificial Sequence: Synthetic oligonucleotide
  Antisense strand to SEQ ID NO: 885464
cuucuggagaucuaacaua

SEQ ID NO: 885466 - RNA, 19 nt, Artificial Sequence
  Description of Artificial Sequence: Synthetic oligonucleotide
  Sense strand starting at position 398 of SEQ ID NO: 588730
ugauaagacugcucacuca

SEQ ID NO: 885467 - RNA, 19 nt, Artificial Sequence
  Description of Artificial Sequence: Synthetic oligonucleotide
  Antisense strand to SEQ ID NO: 885466
ugagugagcagucuuauca

SEQ ID NO: 885468 - RNA, 19 nt, Artificial Sequence
  Description of Artificial Sequence: Synthetic oligonucleotide
  Sense strand starting at position 452 of SEQ ID NO: 588730
ggcucucugcaugauaaua

SEQ ID NO: 885469 - RNA, 19 nt, Artificial Sequence
  Description of Artificial Sequence: Synthetic oligonucleotide
  Antisense strand to SEQ ID NO: 885468
uauuaucaugcagagagcc

SEQ ID NO: 885470 - RNA, 19 nt, Artificial Sequence
  Description of Artificial Sequence: Synthetic oligonucleotide
  Sense strand starting at position 900 of SEQ ID NO: 588730
ugcaucuuaccagagguua

SEQ ID NO: 885471 - RNA, 19 nt, Artificial Sequence
  Description of Artificial Sequence: Synthetic oligonucleotide
  Antisense strand to SEQ ID NO: 885470
uaaccucugguaagaugca

SEQ ID NO: 885472 - RNA, 19 nt, Artificial Sequence
  Description of Artificial Sequence: Synthetic oligonucleotide
  Sense strand starting at position 1117 of SEQ ID NO: 588730
agguuuaaucuuggcaauu

SEQ ID NO: 885473 - RNA, 19 nt, Artificial Sequence
  Description of Artificial Sequence: Synthetic oligonucleotide
  Antisense strand to SEQ ID NO: 885472
aauugccaagauuaaaccu

SEQ ID NO: 885474 - RNA, 19 nt, Artificial Sequence
  Description of Artificial Sequence: Synthetic oligonucleotide
  Sense strand starting at position 1182 of SEQ ID NO: 588730
cuguuuccucuguaauuga

SEQ ID NO: 885475 - RNA, 19 nt, Artificial Sequence
  Description of Artificial Sequence: Synthetic oligonucleotide
  Antisense strand to SEQ ID NO: 885474
ucaauuacagaggaaacag

SEQ ID NO: 885476 - RNA, 19 nt, Artificial Sequence
  Description of Artificial Sequence: Synthetic oligonucleotide
  Sense strand starting at position 1185 of SEQ ID NO: 588730
uuuccucuguaauugaaag

SEQ ID NO: 885477 - RNA, 19 nt, Artificial Sequence
  Description of Artificial Sequence: Synthetic oligonucleotide
  Antisense strand to SEQ ID NO: 885476
cuuucaauuacagaggaaa

SEQ ID NO: 885478 - RNA, 19 nt, Artificial Sequence
  Description of Artificial Sequence: Synthetic oligonucleotide
  Sense strand starting at position 1333 of SEQ ID NO: 588730
uaugaaagguuugcucuga

SEQ ID NO: 885479 - RNA, 19 nt, Artificial Sequence
  Description of Artificial Sequence: Synthetic oligonucleotide
  Antisense strand to SEQ ID NO: 885478
ucagagcaaaccuuucaua

SEQ ID NO: 885480 - RNA, 19 nt, Artificial Sequence
  Description of Artificial Sequence: Synthetic oligonucleotide
  Sense strand starting at position 1334 of SEQ ID NO: 588730
augaaagguuugcucugaa

SEQ ID NO: 885481 - RNA, 19 nt, Artificial Sequence
  Description of Artificial Sequence: Synthetic oligonucleotide
  Antisense strand to SEQ ID NO: 885480
uucagagcaaaccuuucau

SEQ ID NO: 885482 - RNA, 19 nt, Artificial Sequence
  Description of Artificial Sequence: Synthetic oligonucleotide
  Sense strand starting at position 1337 of SEQ ID NO: 588730
aaagguuugcucugaaauc

SEQ ID NO: 885483 - RNA, 19 nt, Artificial Sequence
  Description of Artificial Sequence: Synthetic oligonucleotide
  Antisense strand to SEQ ID NO: 885482
gauuucagagcaaaccuuu

SEQ ID NO: 885484 - RNA, 19 nt, Artificial Sequence
  Description of Artificial Sequence: Synthetic oligonucleotide
  Sense strand starting at position 1395 of SEQ ID NO: 588730
uuaugcuucccggauuacu

SEQ ID NO: 885485 - RNA, 19 nt, Artificial Sequence
  Description of Artificial Sequence: Synthetic oligonucleotide
  Antisense strand to SEQ ID NO: 885484
aguaauccgggaagcauaa

SEQ ID NO: 885486 - RNA, 19 nt, Artificial Sequence
  Description of Artificial Sequence: Synthetic oligonucleotide
  Sense strand starting at position 1405 of SEQ ID NO: 588730
cggauuacugcuuaucacu

SEQ ID NO: 885487 - RNA, 19 nt, Artificial Sequence
  Description of Artificial Sequence: Synthetic oligonucleotide
  Antisense strand to SEQ ID NO: 885486
agugauaagcaguaauccg

SEQ ID NO: 885488 - RNA, 19 nt, Artificial Sequence
  Description of Artificial Sequence: Synthetic oligonucleotide
  Sense strand starting at position 1529 of SEQ ID NO: 588730
aggaguuaguaggucucau

SEQ ID NO: 885489 - RNA, 19 nt, Artificial Sequence
  Description of Artificial Sequence: Synthetic oligonucleotide
  Antisense strand to SEQ ID NO: 885488
augagaccuacuaacuccu

SEQ ID NO: 885490 - RNA, 19 nt, Artificial Sequence
  Description of Artificial Sequence: Synthetic oligonucleotide
  Sense strand starting at position 1569 of SEQ ID NO: 588730
aggcauaaaccuuggccaa

SEQ ID NO: 885491 - RNA, 19 nt, Artificial Sequence
  Description of Artificial Sequence: Synthetic oligonucleotide
  Antisense strand to SEQ ID NO: 885490
uuggccaagguuuaugccu

SEQ ID NO: 885492 - RNA, 19 nt, Artificial Sequence
  Description of Artificial Sequence: Synthetic oligonucleotide
  Sense strand starting at position 1571 of SEQ ID NO: 588730
gcauaaaccuuggccaaga

SEQ ID NO: 885493 - RNA, 19 nt, Artificial Sequence
  Description of Artificial Sequence: Synthetic oligonucleotide
  Antisense strand to SEQ ID NO: 885492
ucuuggccaagguuuaugc

SEQ ID NO: 885494 - RNA, 19 nt, Artificial Sequence
  Description of Artificial Sequence: Synthetic oligonucleotide
  Sense strand starting at position 1684 of SEQ ID NO: 588730
cacgaaagcgcuuagggau

SEQ ID NO: 885495 - RNA, 19 nt, Artificial Sequence
  Description of Artificial Sequence: Synthetic oligonucleotide
  Antisense strand to SEQ ID NO: 885494
aucccuaagcgcuuucgug

SEQ ID NO: 885496 - RNA, 19 nt, Artificial Sequence
  Description of Artificial Sequence: Synthetic oligonucleotide
  Sense strand starting at position 1691 of SEQ ID NO: 588730
gcgcuuagggaucaggaaa

SEQ ID NO: 885497 - RNA, 19 nt, Artificial Sequence
  Description of Artificial Sequence: Synthetic oligonucleotide
  Antisense strand to SEQ ID NO: 885496
uuuccugaucccuaagcgc

SEQ ID NO: 885498 - RNA, 19 nt, Artificial Sequence
  Description of Artificial Sequence: Synthetic oligonucleotide
  Sense strand starting at position 2429 of SEQ ID NO: 588730
gaggacuguucuccuccau

SEQ ID NO: 885499 - RNA, 19 nt, Artificial Sequence
  Description of Artificial Sequence: Synthetic oligonucleotide
  Antisense strand to SEQ ID NO: 885498
auggaggagaacaguccuc

SEQ ID NO: 885500 - RNA, 19 nt, Artificial Sequence
  Description of Artificial Sequence: Synthetic oligonucleotide
  Sense strand starting at position 2512 of SEQ ID NO: 588730
gcgggagauuaagcuagaa

SEQ ID NO: 885501 - RNA, 19 nt, Artificial Sequence
  Description of Artificial Sequence: Synthetic oligonucleotide
  Antisense strand to SEQ ID NO: 885500
uucuagcuuaaucucccgc

SEQ ID NO: 885502 - RNA, 19 nt, Artificial Sequence
  Description of Artificial Sequence: Synthetic oligonucleotide
  Sense strand starting at position 2612 of SEQ ID NO: 588730
uuuguaucagauugagagu

SEQ ID NO: 885503 - RNA, 19 nt, Artificial Sequence
  Description of Artificial Sequence: Synthetic oligonucleotide
  Antisense strand to SEQ ID NO: 885502
acucucaaucugauacaaa

SEQ ID NO: 885504 - RNA, 19 nt, Artificial Sequence
  Description of Artificial Sequence: Synthetic oligonucleotide
  Sense strand starting at position 2645 of SEQ ID NO: 588730
gaaggugucagguaacucu

SEQ ID NO: 885505 - RNA, 19 nt, Artificial Sequence
  Description of Artificial Sequence: Synthetic oligonucleotide
  Antisense strand to SEQ ID NO: 885504
agaguuaccugacaccuuc

SEQ ID NO: 885506 - RNA, 19 nt, Artificial Sequence
  Description of Artificial Sequence: Synthetic oligonucleotide
  Sense strand starting at position 2773 of SEQ ID NO: 588730
uggccagauccucaugcaa

SEQ ID NO: 885507 - RNA, 19 nt, Artificial Sequence
  Description of Artificial Sequence: Synthetic oligonucleotide
  Antisense strand to SEQ ID NO: 885506
uugcaugaggaucuggcca

SEQ ID NO: 885508 - RNA, 19 nt, Artificial Sequence
  Description of Artificial Sequence: Synthetic oligonucleotide
  Sense strand starting at position 2860 of SEQ ID NO: 588730
ccaagagcuuacucuguau

SEQ ID NO: 885509 - RNA, 19 nt, Artificial Sequence
  Description of Artificial Sequence: Synthetic oligonucleotide
  Antisense strand to SEQ ID NO: 885508
auacagaguaagcucuugg

SEQ ID NO: 885510 - RNA, 19 nt, Artificial Sequence
  Description of Artificial Sequence: Synthetic oligonucleotide
  Sense strand starting at position 2863 of SEQ ID NO: 588730
agagcuuacucuguauuac

SEQ ID NO: 885511 - RNA, 19 nt, Artificial Sequence
  Description of Artificial Sequence: Synthetic oligonucleotide
  Antisense strand to SEQ ID NO: 885510
guaauacagaguaagcucu

SEQ ID NO: 885512 - RNA, 19 nt, Artificial Sequence
  Description of Artificial Sequence: Synthetic oligonucleotide
  Sense strand starting at position 2872 of SEQ ID NO: 588730
ucuguauuacguuauugac

SEQ ID NO: 885513 - RNA, 19 nt, Artificial Sequence
  Description of Artificial Sequence: Synthetic oligonucleotide
  Antisense strand to SEQ ID NO: 885512
gucaauaacguaauacaga

SEQ ID NO: 885514 - RNA, 19 nt, Artificial Sequence
  Description of Artificial Sequence: Synthetic oligonucleotide
  Sense strand starting at position 2950 of SEQ ID NO: 588730
cgaauuguucaggaucggu

SEQ ID NO: 885515 - RNA, 19 nt, Artificial Sequence
  Description of Artificial Sequence: Synthetic oligonucleotide
  Antisense strand to SEQ ID NO: 885514
accgauccugaacaauucg

SEQ ID NO: 885516 - RNA, 19 nt, Artificial Sequence
  Description of Artificial Sequence: Synthetic oligonucleotide
  Sense strand starting at position 3166 of SEQ ID NO: 588730
ugcauuggaaucugguaga

SEQ ID NO: 885517 - RNA, 19 nt, Artificial Sequence
  Description of Artificial Sequence: Synthetic oligonucleotide
  Antisense strand to SEQ ID NO: 885516
ucuaccagauuccaaugca

SEQ ID NO: 885518 - RNA, 19 nt, Artificial Sequence
  Description of Artificial Sequence: Synthetic oligonucleotide
  Sense strand starting at position 3242 of SEQ ID NO: 588730
uugauaauaucaccuguag

SEQ ID NO: 885519 - RNA, 19 nt, Artificial Sequence
  Description of Artificial Sequence: Synthetic oligonucleotide
  Antisense strand to SEQ ID NO: 885518
cuacaggugauauuaucaa

SEQ ID NO: 885520 - RNA, 19 nt, Artificial Sequence
  Description of Artificial Sequence: Synthetic oligonucleotide
  Sense strand starting at position 3327 of SEQ ID NO: 588730
ccuagauacguguaauaau

SEQ ID NO: 885521 - RNA, 19 nt, Artificial Sequence
  Description of Artificial Sequence: Synthetic oligonucleotide
  Antisense strand to SEQ ID NO: 885520
auuauuacacguaucuagg

SEQ ID NO: 885522 - RNA, 19 nt, Artificial Sequence
  Description of Artificial Sequence: Synthetic oligonucleotide
  Sense strand starting at position 3345 of SEQ ID NO: 588730
uuuguaucuguacauacuu

SEQ ID NO: 885523 - RNA, 19 nt, Artificial Sequence
  Description of Artificial Sequence: Synthetic oligonucleotide
  Antisense strand to SEQ ID NO: 885522
aaguauguacagauacaaa

SEQ ID NO: 885524 - RNA, 19 nt, Artificial Sequence
  Description of Artificial Sequence: Synthetic oligonucleotide
  Sense strand starting at position 3401 of SEQ ID NO: 588730
uuaucauguugaccuuuau

SEQ ID NO: 885525 - RNA, 19 nt, Artificial Sequence
  Description of Artificial Sequence: Synthetic oligonucleotide
  Antisense strand to SEQ ID NO: 885524
auaaaggucaacaugauaa

SEQ ID NO: 885526 - RNA, 19 nt, Artificial Sequence
  Description of Artificial Sequence: Synthetic oligonucleotide
  Sense strand starting at position 3468 of SEQ ID NO: 588730
cgaugacuucuuuaugugu

SEQ ID NO: 885527 - RNA, 19 nt, Artificial Sequence
  Description of Artificial Sequence: Synthetic oligonucleotide
  Antisense strand to SEQ ID NO: 885526
acacauaaagaagucaucg

SEQ ID NO: 885528 - RNA, 19 nt, Artificial Sequence
  Description of Artificial Sequence: Synthetic oligonucleotide
  Sense strand starting at position 3471 of SEQ ID NO: 588730
ugacuucuuuaugugugaa

SEQ ID NO: 885529 - RNA, 19 nt, Artificial Sequence
  Description of Artificial Sequence: Synthetic oligonucleotide
  Antisense strand to SEQ ID NO: 885528
uucacacauaaagaaguca

SEQ ID NO: 885530 - RNA, 19 nt, Artificial Sequence
  Description of Artificial Sequence: Synthetic oligonucleotide
  Sense strand starting at position 3473 of SEQ ID NO: 588730
acuucuuuaugugugaaau

SEQ ID NO: 885531 - RNA, 19 nt, Artificial Sequence
  Description of Artificial Sequence: Synthetic oligonucleotide
  Antisense strand to SEQ ID NO: 885530
auuucacacauaaagaagu

SEQ ID NO: 885532 - RNA, 19 nt, Artificial Sequence
  Description of Artificial Sequence: Synthetic oligonucleotide
  Sense strand starting at position 3474 of SEQ ID NO: 588730
cuucuuuaugugugaaaua

SEQ ID NO: 885533 - RNA, 19 nt, Artificial Sequence
  Description of Artificial Sequence: Synthetic oligonucleotide
  Antisense strand to SEQ ID NO: 885532
uauuucacacauaaagaag

SEQ ID NO: 885534 - RNA, 19 nt, Artificial Sequence
  Description of Artificial Sequence: Synthetic oligonucleotide
  Sense strand starting at position 3481 of SEQ ID NO: 588730
augugugaaauaggaauca

SEQ ID NO: 885535 - RNA, 19 nt, Artificial Sequence
  Description of Artificial Sequence: Synthetic oligonucleotide
  Antisense strand to SEQ ID NO: 885534
ugauuccuauuucacacau

SEQ ID NO: 885536 - RNA, 19 nt, Artificial Sequence
  Description of Artificial Sequence: Synthetic oligonucleotide
  Sense strand starting at position 3562 of SEQ ID NO: 588730
cagcacggugcucaagaau

SEQ ID NO: 885537 - RNA, 19 nt, Artificial Sequence
  Description of Artificial Sequence: Synthetic oligonucleotide
  Antisense strand to SEQ ID NO: 885536
auucuugagcaccgugcug

SEQ ID NO: 885538 - RNA, 19 nt, Artificial Sequence
  Description of Artificial Sequence: Synthetic oligonucleotide
  Sense strand starting at position 3565 of SEQ ID NO: 588730
cacggugcucaagaaugau

SEQ ID NO: 885539 - RNA, 19 nt, Artificial Sequence
  Description of Artificial Sequence: Synthetic oligonucleotide
  Antisense strand to SEQ ID NO: 885538
aucauucuugagcaccgug

SEQ ID NO: 885540 - RNA, 19 nt, Artificial Sequence
  Description of Artificial Sequence: Synthetic oligonucleotide
  Sense strand starting at position 3743 of SEQ ID NO: 588730
auaguauuaccuugggauu

SEQ ID NO: 885541 - RNA, 19 nt, Artificial Sequence
  Description of Artificial Sequence: Synthetic oligonucleotide
  Antisense strand to SEQ ID NO: 885540
aaucccaagguaauacuau

SEQ ID NO: 885542 - RNA, 19 nt, Artificial Sequence
  Description of Artificial Sequence: Synthetic oligonucleotide
  Sense strand starting at position 1139 of SEQ ID NO: 588731
ggauaacacuaaugccuau

SEQ ID NO: 885543 - RNA, 19 nt, Artificial Sequence
  Description of Artificial Sequence: Synthetic oligonucleotide
  Antisense strand to SEQ ID NO: 885542
auaggcauuaguguuaucc

SEQ ID NO: 885544 - RNA, 19 nt, Artificial Sequence
  Description of Artificial Sequence: Synthetic oligonucleotide
  Sense strand starting at position 1657 of SEQ ID NO: 588731
ugcucaaggcucugaaauc

SEQ ID NO: 885545 - RNA, 19 nt, Artificial Sequence
  Description of Artificial Sequence: Synthetic oligonucleotide
  Antisense strand to SEQ ID NO: 885544
gauuucagagccuugagca

SEQ ID NO: 885546 - RNA, 19 nt, Artificial Sequence
  Description of Artificial Sequence: Synthetic oligonucleotide
  Sense strand starting at position 1658 of SEQ ID NO: 588731
gcucaaggcucugaaauca

SEQ ID NO: 885547 - RNA, 19 nt, Artificial Sequence
  Description of Artificial Sequence: Synthetic oligonucleotide
  Antisense strand to SEQ ID NO: 885546
ugauuucagagccuugagc

SEQ ID NO: 885548 - RNA, 19 nt, Artificial Sequence
  Description of Artificial Sequence: Synthetic oligonucleotide
  Sense strand starting at position 1688 of SEQ ID NO: 588731
ggaaguagagagugauucu

SEQ ID NO: 885549 - RNA, 19 nt, Artificial Sequence
  Description of Artificial Sequence: Synthetic oligonucleotide
  Antisense strand to SEQ ID NO: 885548
agaaucacucucuacuucc

SEQ ID NO: 885550 - RNA, 19 nt, Artificial Sequence
  Description of Artificial Sequence: Synthetic oligonucleotide
  Sense strand starting at position 1691 of SEQ ID NO: 588731
aguagagagugauucuaca

SEQ ID NO: 885551 - RNA, 19 nt, Artificial Sequence
  Description of Artificial Sequence: Synthetic oligonucleotide
  Antisense strand to SEQ ID NO: 885550
uguagaaucacucucuacu

SEQ ID NO: 885552 - RNA, 19 nt, Artificial Sequence
  Description of Artificial Sequence: Synthetic oligonucleotide
  Sense strand starting at position 1767 of SEQ ID NO: 588731
cuggguuucugggauaugu

SEQ ID NO: 885553 - RNA, 19 nt, Artificial Sequence
  Description of Artificial Sequence: Synthetic oligonucleotide
  Antisense strand to SEQ ID NO: 885552
acauaucccagaaacccag

SEQ ID NO: 885554 - RNA, 19 nt, Artificial Sequence
  Description of Artificial Sequence: Synthetic oligonucleotide
  Sense strand starting at position 1769 of SEQ ID NO: 588731
ggguuucugggauauguca

SEQ ID NO: 885555 - RNA, 19 nt, Artificial Sequence
  Description of Artificial Sequence: Synthetic oligonucleotide
  Antisense strand to SEQ ID NO: 885554
ugacauaucccagaaaccc

SEQ ID NO: 885556 - RNA, 19 nt, Artificial Sequence
  Description of Artificial Sequence: Synthetic oligonucleotide
  Sense strand starting at position 1771 of SEQ ID NO: 588731
guuucugggauaugucacu

SEQ ID NO: 885557 - RNA, 19 nt, Artificial Sequence
  Description of Artificial Sequence: Synthetic oligonucleotide
  Antisense strand to SEQ ID NO: 885556
agugacauaucccagaaac

SEQ ID NO: 885558 - RNA, 19 nt, Artificial Sequence
  Description of Artificial Sequence: Synthetic oligonucleotide
  Sense strand starting at position 1778 of SEQ ID NO: 588731
ggauaugucacucggagaa

SEQ ID NO: 885559 - RNA, 19 nt, Artificial Sequence
  Description of Artificial Sequence: Synthetic oligonucleotide
  Antisense strand to SEQ ID NO: 885558
uucuccgagugacauaucc

SEQ ID NO: 885560 - RNA, 19 nt, Artificial Sequence
  Description of Artificial Sequence: Synthetic oligonucleotide
  Sense strand starting at position 1780 of SEQ ID NO: 588731
auaugucacucggagaaag

SEQ ID NO: 885561 - RNA, 19 nt, Artificial Sequence
  Description of Artificial Sequence: Synthetic oligonucleotide
  Antisense strand to SEQ ID NO: 885560
cuuucuccgagugacauau

SEQ ID NO: 885562 - RNA, 19 nt, Artificial Sequence
  Description of Artificial Sequence: Synthetic oligonucleotide
  Sense strand starting at position 1782 of SEQ ID NO: 588731
augucacucggagaaaguu

SEQ ID NO: 885563 - RNA, 19 nt, Artificial Sequence
  Description of Artificial Sequence: Synthetic oligonucleotide
  Antisense strand to SEQ ID NO: 885562
aacuuucuccgagugacau

SEQ ID NO: 885564 - RNA, 19 nt, Artificial Sequence
  Description of Artificial Sequence: Synthetic oligonucleotide
  Sense strand starting at position 1792 of SEQ ID NO: 588731
gagaaaguuugaggaacug

SEQ ID NO: 885565 - RNA, 19 nt, Artificial Sequence
  Description of Artificial Sequence: Synthetic oligonucleotide
  Antisense strand to SEQ ID NO: 885564
caguuccucaaacuuucuc

SEQ ID NO: 885566 - RNA, 19 nt, Artificial Sequence
  Description of Artificial Sequence: Synthetic oligonucleotide
  Sense strand starting at position 1824 of SEQ ID NO: 588731
ggccuuaccugaggaucua

SEQ ID NO: 885567 - RNA, 19 nt, Artificial Sequence
  Description of Artificial Sequence: Synthetic oligonucleotide
  Antisense strand to SEQ ID NO: 885566
uagauccucagguaaggcc

SEQ ID NO: 885568 - RNA, 19 nt, Artificial Sequence
  Description of Artificial Sequence: Synthetic oligonucleotide
  Sense strand starting at position 1825 of SEQ ID NO: 588731
gccuuaccugaggaucuaa

SEQ ID NO: 885569 - RNA, 19 nt, Artificial Sequence
  Description of Artificial Sequence: Synthetic oligonucleotide
  Antisense strand to SEQ ID NO: 885568
uuagauccucagguaaggc

SEQ ID NO: 885570 - RNA, 19 nt, Artificial Sequence
  Description of Artificial Sequence: Synthetic oligonucleotide
  Sense strand starting at position 1993 of SEQ ID NO: 588731
ccgaucugccuuugaaaua

SEQ ID NO: 885571 - RNA, 19 nt, Artificial Sequence
  Description of Artificial Sequence: Synthetic oligonucleotide
  Antisense strand to SEQ ID NO: 885570
uauuucaaaggcagaucgg

SEQ ID NO: 885572 - RNA, 19 nt, Artificial Sequence
  Description of Artificial Sequence: Synthetic oligonucleotide
  Sense strand starting at position 2070 of SEQ ID NO: 588731
cucugauccagaggaguga

SEQ ID NO: 885573 - RNA, 19 nt, Artificial Sequence
  Description of Artificial Sequence: Synthetic oligonucleotide
  Antisense strand to SEQ ID NO: 885572
ucacuccucuggaucagag

SEQ ID NO: 885574 - RNA, 19 nt, Artificial Sequence
  Description of Artificial Sequence: Synthetic oligonucleotide
  Sense strand starting at position 2081 of SEQ ID NO: 588731
aggagugaauccuucacga

SEQ ID NO: 885575 - RNA, 19 nt, Artificial Sequence
  Description of Artificial Sequence: Synthetic oligonucleotide
  Antisense strand to SEQ ID NO: 885574
ucgugaaggauucacuccu

SEQ ID NO: 885576 - RNA, 19 nt, Artificial Sequence
  Description of Artificial Sequence: Synthetic oligonucleotide
  Sense strand starting at position 2111 of SEQ ID NO: 588731
ccuugaagaucugaagaug

SEQ ID NO: 885577 - RNA, 19 nt, Artificial Sequence
  Description of Artificial Sequence: Synthetic oligonucleotide
  Antisense strand to SEQ ID NO: 885576
caucuucagaucuucaagg

SEQ ID NO: 885578 - RNA, 19 nt, Artificial Sequence
  Description of Artificial Sequence: Synthetic oligonucleotide
  Sense strand starting at position 2132 of SEQ ID NO: 588731
uuuggacuguccuuagaaa

SEQ ID NO: 885579 - RNA, 19 nt, Artificial Sequence
  Description of Artificial Sequence: Synthetic oligonucleotide
  Antisense strand to SEQ ID NO: 885578
uuucuaaggacaguccaaa

SEQ ID NO: 885580 - RNA, 19 nt, Artificial Sequence
  Description of Artificial Sequence: Synthetic oligonucleotide
  Sense strand starting at position 2211 of SEQ ID NO: 588731
cgaggcgaucuguggagua

SEQ ID NO: 885581 - RNA, 19 nt, Artificial Sequence
  Description of Artificial Sequence: Synthetic oligonucleotide
  Antisense strand to SEQ ID NO: 885580
uacuccacagaucgccucg

SEQ ID NO: 885582 - RNA, 19 nt, Artificial Sequence
  Description of Artificial Sequence: Synthetic oligonucleotide
  Sense strand starting at position 2267 of SEQ ID NO: 588731
cugaguuggcuggagucua

SEQ ID NO: 885583 - RNA, 19 nt, Artificial Sequence
  Description of Artificial Sequence: Synthetic oligonucleotide
  Antisense strand to SEQ ID NO: 885582
uagacuccagccaacucag

SEQ ID NO: 885584 - RNA, 19 nt, Artificial Sequence
  Description of Artificial Sequence: Synthetic oligonucleotide
  Sense strand starting at position 2738 of SEQ ID NO: 588731
gccacuuucuaaugugcua

SEQ ID NO: 885585 - RNA, 19 nt, Artificial Sequence
  Description of Artificial Sequence: Synthetic oligonucleotide
  Antisense strand to SEQ ID NO: 885584
uagcacauuagaaaguggc

SEQ ID NO: 885586 - RNA, 19 nt, Artificial Sequence
  Description of Artificial Sequence: Synthetic oligonucleotide
  Sense strand starting at position 2753 of SEQ ID NO: 588731
gcuacagguguccaugagu

SEQ ID NO: 885587 - RNA, 19 nt, Artificial Sequence
  Description of Artificial Sequence: Synthetic oligonucleotide
  Antisense strand to SEQ ID NO: 885586
acucauggacaccuguagc

SEQ ID NO: 885588 - RNA, 19 nt, Artificial Sequence
  Description of Artificial Sequence: Synthetic oligonucleotide
  Sense strand starting at position 2761 of SEQ ID NO: 588731
uguccaugagucuacuagu

SEQ ID NO: 885589 - RNA, 19 nt, Artificial Sequence
  Description of Artificial Sequence: Synthetic oligonucleotide
  Antisense strand to SEQ ID NO: 885588
acuaguagacucauggaca

SEQ ID NO: 885590 - RNA, 19 nt, Artificial Sequence
  Description of Artificial Sequence: Synthetic oligonucleotide
  Sense strand starting at position 2764 of SEQ ID NO: 588731
ccaugagucuacuagugcu

SEQ ID NO: 885591 - RNA, 19 nt, Artificial Sequence
  Description of Artificial Sequence: Synthetic oligonucleotide
  Antisense strand to SEQ ID NO: 885590
agcacuaguagacucaugg

SEQ ID NO: 885592 - RNA, 19 nt, Artificial Sequence
  Description of Artificial Sequence: Synthetic oligonucleotide
  Sense strand starting at position 2991 of SEQ ID NO: 588731
guggcagguauauguaauu

SEQ ID NO: 885593 - RNA, 19 nt, Artificial Sequence
  Description of Artificial Sequence: Synthetic oligonucleotide
  Antisense strand to SEQ ID NO: 885592
aauuacauauaccugccac

SEQ ID NO: 885594 - RNA, 19 nt, Artificial Sequence
  Description of Artificial Sequence: Synthetic oligonucleotide
  Sense strand starting at position 3222 of SEQ ID NO: 588731
ggcaauagguucuaagcuu

SEQ ID NO: 885595 - RNA, 19 nt, Artificial Sequence
  Description of Artificial Sequence: Synthetic oligonucleotide
  Antisense strand to SEQ ID NO: 885594
aagcuuagaaccuauugcc

SEQ ID NO: 885596 - RNA, 19 nt, Artificial Sequence
  Description of Artificial Sequence: Synthetic oligonucleotide
  Sense strand starting at position 226 of SEQ ID NO: 588732
cgcugagguccucaaauga

SEQ ID NO: 885597 - RNA, 19 nt, Artificial Sequence
  Description of Artificial Sequence: Synthetic oligonucleotide
  Antisense strand to SEQ ID NO: 885596
ucauuugaggaccucagcg

SEQ ID NO: 885598 - RNA, 19 nt, Artificial Sequence
  Description of Artificial Sequence: Synthetic oligonucleotide
  Sense strand starting at position 2191 of SEQ ID NO: 588732
ccaaguaucugggagguga

SEQ ID NO: 885599 - RNA, 19 nt, Artificial Sequence
  Description of Artificial Sequence: Synthetic oligonucleotide
  Antisense strand to SEQ ID NO: 885598
ucaccucccagauacuugg

SEQ ID NO: 885600 - RNA, 19 nt, Artificial Sequence
  Description of Artificial Sequence: Synthetic oligonucleotide
  Sense strand starting at position 2561 of SEQ ID NO: 588732
aggcgcuucguugcagaau

SEQ ID NO: 885601 - RNA, 19 nt, Artificial Sequence
  Description of Artificial Sequence: Synthetic oligonucleotide
  Antisense strand to SEQ ID NO: 885600
auucugcaacgaagcgccu

SEQ ID NO: 885602 - RNA, 19 nt, Artificial Sequence
  Description of Artificial Sequence: Synthetic oligonucleotide
  Sense strand starting at position 2562 of SEQ ID NO: 588732
ggcgcuucguugcagaauu

SEQ ID NO: 885603 - RNA, 19 nt, Artificial Sequence
  Description of Artificial Sequence: Synthetic oligonucleotide
  Antisense strand to SEQ ID NO: 885602
aauucugcaacgaagcgcc

SEQ ID NO: 885604 - RNA, 19 nt, Artificial Sequence
  Description of Artificial Sequence: Synthetic oligonucleotide
  Sense strand starting at position 2740 of SEQ ID NO: 588732
cugcucuuucuccaggaca

SEQ ID NO: 885605 - RNA, 19 nt, Artificial Sequence
  Description of Artificial Sequence: Synthetic oligonucleotide
  Antisense strand to SEQ ID NO: 885604
uguccuggagaaagagcag

SEQ ID NO: 885606 - RNA, 19 nt, Artificial Sequence
  Description of Artificial Sequence: Synthetic oligonucleotide
  Sense strand starting at position 3156 of SEQ ID NO: 588732
ucugguuuccagcgucuga

SEQ ID NO: 885607 - RNA, 19 nt, Artificial Sequence
  Description of Artificial Sequence: Synthetic oligonucleotide
  Antisense strand to SEQ ID NO: 885606
ucagacgcuggaaaccaga

SEQ ID NO: 885608 - RNA, 19 nt, Artificial Sequence
  Description of Artificial Sequence: Synthetic oligonucleotide
  Sense strand starting at position 3261 of SEQ ID NO: 588732
aggaaagccuagcaauaca

SEQ ID NO: 885609 - RNA, 19 nt, Artificial Sequence
  Description of Artificial Sequence: Synthetic oligonucleotide
  Antisense strand to SEQ ID NO: 885608
uguauugcuaggcuuuccu

SEQ ID NO: 885610 - RNA, 19 nt, Artificial Sequence
  Description of Artificial Sequence: Synthetic oligonucleotide
  Sense strand starting at position 3719 of SEQ ID NO: 588732
ggccgagugucccugaagu

SEQ ID NO: 885611 - RNA, 19 nt, Artificial Sequence
  Description of Artificial Sequence: Synthetic oligonucleotide
  Antisense strand to SEQ ID NO: 885610
acuucagggacacucggcc

SEQ ID NO: 885612 - RNA, 19 nt, Artificial Sequence
  Description of Artificial Sequence: Synthetic oligonucleotide
  Sense strand starting at position 3721 of SEQ ID NO: 588732
ccgagugucccugaagugu

SEQ ID NO: 885613 - RNA, 19 nt, Artificial Sequence
  Description of Artificial Sequence: Synthetic oligonucleotide
  Antisense strand to SEQ ID NO: 885612
acacuucagggacacucgg

SEQ ID NO: 885614 - RNA, 19 nt, Artificial Sequence
  Description of Artificial Sequence: Synthetic oligonucleotide
  Sense strand starting at position 3730 of SEQ ID NO: 588732
ccugaagugucuuuagcca

SEQ ID NO: 885615 - RNA, 19 nt, Artificial Sequence
  Description of Artificial Sequence: Synthetic oligonucleotide
  Antisense strand to SEQ ID NO: 885614
uggcuaaagacacuucagg

SEQ ID NO: 885616 - RNA, 19 nt, Artificial Sequence
  Description of Artificial Sequence: Synthetic oligonucleotide
  Sense strand starting at position 3737 of SEQ ID NO: 588732
ugucuuuagccacagcaau

SEQ ID NO: 885617 - RNA, 19 nt, Artificial Sequence
  Description of Artificial Sequence: Synthetic oligonucleotide
  Antisense strand to SEQ ID NO: 885616
auugcuguggcuaaagaca

SEQ ID NO: 885618 - RNA, 19 nt, Artificial Sequence
  Description of Artificial Sequence: Synthetic oligonucleotide
  Sense strand starting at position 3862 of SEQ ID NO: 588732
gccagucucccucauccua

SEQ ID NO: 885619 - RNA, 19 nt, Artificial Sequence
  Description of Artificial Sequence: Synthetic oligonucleotide
  Antisense strand to SEQ ID NO: 885618
uaggaugagggagacuggc

SEQ ID NO: 885620 - RNA, 19 nt, Artificial Sequence
  Description of Artificial Sequence: Synthetic oligonucleotide
  Sense strand starting at position 3946 of SEQ ID NO: 588732
ugaaccacuuucugaggaa

SEQ ID NO: 885621 - RNA, 19 nt, Artificial Sequence
  Description of Artificial Sequence: Synthetic oligonucleotide
  Antisense strand to SEQ ID NO: 885620
uuccucagaaagugguuca

SEQ ID NO: 885622 - RNA, 19 nt, Artificial Sequence
  Description of Artificial Sequence: Synthetic oligonucleotide
  Sense strand starting at position 42 of SEQ ID NO: 588733
gagugacucugugugguga

SEQ ID NO: 885623 - RNA, 19 nt, Artificial Sequence
  Description of Artificial Sequence: Synthetic oligonucleotide
  Antisense strand to SEQ ID NO: 885622
ucaccacacagagucacuc

SEQ ID NO: 885624 - RNA, 19 nt, Artificial Sequence
  Description of Artificial Sequence: Synthetic oligonucleotide
  Sense strand starting at position 43 of SEQ ID NO: 588733
agugacucuguguggugaa

SEQ ID NO: 885625 - RNA, 19 nt, Artificial Sequence
  Description of Artificial Sequence: Synthetic oligonucleotide
  Antisense strand to SEQ ID NO: 885624
uucaccacacagagucacu

SEQ ID NO: 885626 - RNA, 19 nt, Artificial Sequence
  Description of Artificial Sequence: Synthetic oligonucleotide
  Sense strand starting at position 46 of SEQ ID NO: 588733
gacucuguguggugaaacu

SEQ ID NO: 885627 - RNA, 19 nt, Artificial Sequence
  Description of Artificial Sequence: Synthetic oligonucleotide
  Antisense strand to SEQ ID NO: 885626
aguuucaccacacagaguc

SEQ ID NO: 885628 - RNA, 19 nt, Artificial Sequence
  Description of Artificial Sequence: Synthetic oligonucleotide
  Sense strand starting at position 436 of SEQ ID NO: 588733
gaggucaugccucaccuuu

SEQ ID NO: 885629 - RNA, 19 nt, Artificial Sequence
  Description of Artificial Sequence: Synthetic oligonucleotide
  Antisense strand to SEQ ID NO: 885628
aaaggugaggcaugaccuc

SEQ ID NO: 885630 - RNA, 19 nt, Artificial Sequence
  Description of Artificial Sequence: Synthetic oligonucleotide
  Sense strand starting at position 465 of SEQ ID NO: 588733
aggcaccucugcuuguaaa

SEQ ID NO: 885631 - RNA, 19 nt, Artificial Sequence
  Description of Artificial Sequence: Synthetic oligonucleotide
  Antisense strand to SEQ ID NO: 885630
uuuacaagcagaggugccu

SEQ ID NO: 885632 - RNA, 19 nt, Artificial Sequence
  Description of Artificial Sequence: Synthetic oligonucleotide
  Sense strand starting at position 637 of SEQ ID NO: 588733
uguccugauucuuuccgua

SEQ ID NO: 885633 - RNA, 19 nt, Artificial Sequence
  Description of Artificial Sequence: Synthetic oligonucleotide
  Antisense strand to SEQ ID NO: 885632
uacggaaagaaucaggaca

SEQ ID NO: 885634 - RNA, 19 nt, Artificial Sequence
  Description of Artificial Sequence: Synthetic oligonucleotide
  Sense strand starting at position 639 of SEQ ID NO: 588733
uccugauucuuuccguaau

SEQ ID NO: 885635 - RNA, 19 nt, Artificial Sequence
  Description of Artificial Sequence: Synthetic oligonucleotide
  Antisense strand to SEQ ID NO: 885634
auuacggaaagaaucagga

SEQ ID NO: 885636 - RNA, 19 nt, Artificial Sequence
  Description of Artificial Sequence: Synthetic oligonucleotide
  Sense strand starting at position 641 of SEQ ID NO: 588733
cugauucuuuccguaauuu

SEQ ID NO: 885637 - RNA, 19 nt, Artificial Sequence
  Description of Artificial Sequence: Synthetic oligonucleotide
  Antisense strand to SEQ ID NO: 885636
aaauuacggaaagaaucag

SEQ ID NO: 885638 - RNA, 19 nt, Artificial Sequence
  Description of Artificial Sequence: Synthetic oligonucleotide
  Sense strand starting at position 650 of SEQ ID NO: 588733
uccguaauuucccacugca

SEQ ID NO: 885639 - RNA, 19 nt, Artificial Sequence
  Description of Artificial Sequence: Synthetic oligonucleotide
  Antisense strand to SEQ ID NO: 885638
ugcagugggaaauuacgga

SEQ ID NO: 885640 - RNA, 19 nt, Artificial Sequence
  Description of Artificial Sequence: Synthetic oligonucleotide
  Sense strand starting at position 666 of SEQ ID NO: 588733
gcacaacacccagguuaua

SEQ ID NO: 885641 - RNA, 19 nt, Artificial Sequence
  Description of Artificial Sequence: Synthetic oligonucleotide
  Antisense strand to SEQ ID NO: 885640
uauaaccuggguguugugc

SEQ ID NO: 885642 - RNA, 19 nt, Artificial Sequence
  Description of Artificial Sequence: Synthetic oligonucleotide
  Sense strand starting at position 714 of SEQ ID NO: 588733
aguacacguuucucaugaa

SEQ ID NO: 885643 - RNA, 19 nt, Artificial Sequence
  Description of Artificial Sequence: Synthetic oligonucleotide
  Antisense strand to SEQ ID NO: 885642
uucaugagaaacguguacu

SEQ ID NO: 885644 - RNA, 19 nt, Artificial Sequence
  Description of Artificial Sequence: Synthetic oligonucleotide
  Sense strand starting at position 715 of SEQ ID NO: 588733
guacacguuucucaugaac

SEQ ID NO: 885645 - RNA, 19 nt, Artificial Sequence
  Description of Artificial Sequence: Synthetic oligonucleotide
  Antisense strand to SEQ ID NO: 885644
guucaugagaaacguguac

SEQ ID NO: 885646 - RNA, 19 nt, Artificial Sequence
  Description of Artificial Sequence: Synthetic oligonucleotide
  Sense strand starting at position 717 of SEQ ID NO: 588733
acacguuucucaugaacaa

SEQ ID NO: 885647 - RNA, 19 nt, Artificial Sequence
  Description of Artificial Sequence: Synthetic oligonucleotide
  Antisense strand to SEQ ID NO: 885646
uuguucaugagaaacgugu

SEQ ID NO: 885648 - RNA, 19 nt, Artificial Sequence
  Description of Artificial Sequence: Synthetic oligonucleotide
  Sense strand starting at position 951 of SEQ ID NO: 588733
uucuuaaagugcuagguuu

SEQ ID NO: 885649 - RNA, 19 nt, Artificial Sequence
  Description of Artificial Sequence: Synthetic oligonucleotide
  Antisense strand to SEQ ID NO: 885648
aaaccuagcacuuuaagaa

SEQ ID NO: 885650 - RNA, 19 nt, Artificial Sequence
  Description of Artificial Sequence: Synthetic oligonucleotide
  Sense strand starting at position 962 of SEQ ID NO: 588733
cuagguuucccuggcugaa

SEQ ID NO: 885651 - RNA, 19 nt, Artificial Sequence
  Description of Artificial Sequence: Synthetic oligonucleotide
  Antisense strand to SEQ ID NO: 885650
uucagccagggaaaccuag

SEQ ID NO: 885652 - RNA, 19 nt, Artificial Sequence
  Description of Artificial Sequence: Synthetic oligonucleotide
  Sense strand starting at position 1008 of SEQ ID NO: 588733
ggaucuaagcuucagaggu

SEQ ID NO: 885653 - RNA, 19 nt, Artificial Sequence
  Description of Artificial Sequence: Synthetic oligonucleotide
  Antisense strand to SEQ ID NO: 885652
accucugaagcuuagaucc

SEQ ID NO: 885654 - RNA, 19 nt, Artificial Sequence
  Description of Artificial Sequence: Synthetic oligonucleotide
  Sense strand starting at position 1148 of SEQ ID NO: 588733
cgcccaauguuauuagauu

SEQ ID NO: 885655 - RNA, 19 nt, Artificial Sequence
  Description of Artificial Sequence: Synthetic oligonucleotide
  Antisense strand to SEQ ID NO: 885654
aaucuaauaacauugggcg

SEQ ID NO: 885656 - RNA, 19 nt, Artificial Sequence
  Description of Artificial Sequence: Synthetic oligonucleotide
  Sense strand starting at position 1149 of SEQ ID NO: 588733
gcccaauguuauuagauuc

SEQ ID NO: 885657 - RNA, 19 nt, Artificial Sequence
  Description of Artificial Sequence: Synthetic oligonucleotide
  Antisense strand to SEQ ID NO: 885656
gaaucuaauaacauugggc

SEQ ID NO: 885658 - RNA, 19 nt, Artificial Sequence
  Description of Artificial Sequence: Synthetic oligonucleotide
  Sense strand starting at position 1184 of SEQ ID NO: 588733
aggaaaggaucuggcucau

SEQ ID NO: 885659 - RNA, 19 nt, Artificial Sequence
  Description of Artificial Sequence: Synthetic oligonucleotide
  Antisense strand to SEQ ID NO: 885658
augagccagauccuuuccu

SEQ ID NO: 885660 - RNA, 19 nt, Artificial Sequence
  Description of Artificial Sequence: Synthetic oligonucleotide
  Sense strand starting at position 1188 of SEQ ID NO: 588733
aaggaucuggcucauguau

SEQ ID NO: 885661 - RNA, 19 nt, Artificial Sequence
  Description of Artificial Sequence: Synthetic oligonucleotide
  Antisense strand to SEQ ID NO: 885660
auacaugagccagauccuu

SEQ ID NO: 885662 - RNA, 19 nt, Artificial Sequence
  Description of Artificial Sequence: Synthetic oligonucleotide
  Sense strand starting at position 1190 of SEQ ID NO: 588733
ggaucuggcucauguauuu

SEQ ID NO: 885663 - RNA, 19 nt, Artificial Sequence
  Description of Artificial Sequence: Synthetic oligonucleotide
  Antisense strand to SEQ ID NO: 885662
aaauacaugagccagaucc

SEQ ID NO: 885664 - RNA, 19 nt, Artificial Sequence
  Description of Artificial Sequence: Synthetic oligonucleotide
  Sense strand starting at position 1195 of SEQ ID NO: 588733
uggcucauguauuugugua

SEQ ID NO: 885665 - RNA, 19 nt, Artificial Sequence
  Description of Artificial Sequence: Synthetic oligonucleotide
  Antisense strand to SEQ ID NO: 885664
uacacaaauacaugagcca

SEQ ID NO: 885666 - RNA, 19 nt, Artificial Sequence
  Description of Artificial Sequence: Synthetic oligonucleotide
  Sense strand starting at position 1196 of SEQ ID NO: 588733
ggcucauguauuuguguau

SEQ ID NO: 885667 - RNA, 19 nt, Artificial Sequence
  Description of Artificial Sequence: Synthetic oligonucleotide
  Antisense strand to SEQ ID NO: 885666
auacacaaauacaugagcc

SEQ ID NO: 885668 - RNA, 19 nt, Artificial Sequence
  Description of Artificial Sequence: Synthetic oligonucleotide
  Sense strand starting at position 1200 of SEQ ID NO: 588733
cauguauuuguguaucgca

SEQ ID NO: 885669 - RNA, 19 nt, Artificial Sequence
  Description of Artificial Sequence: Synthetic oligonucleotide
  Antisense strand to SEQ ID NO: 885668
ugcgauacacaaauacaug

SEQ ID NO: 885670 - RNA, 19 nt, Artificial Sequence
  Description of Artificial Sequence: Synthetic oligonucleotide
  Sense strand starting at position 1457 of SEQ ID NO: 588733
gugggaguagugugcgcau

SEQ ID NO: 885671 - RNA, 19 nt, Artificial Sequence
  Description of Artificial Sequence: Synthetic oligonucleotide
  Antisense strand to SEQ ID NO: 885670
augcgcacacuacucccac

SEQ ID NO: 885672 - RNA, 19 nt, Artificial Sequence
  Description of Artificial Sequence: Synthetic oligonucleotide
  Sense strand starting at position 2005 of SEQ ID NO: 588733
ggcugugugcuucaggaga

SEQ ID NO: 885673 - RNA, 19 nt, Artificial Sequence
  Description of Artificial Sequence: Synthetic oligonucleotide
  Antisense strand to SEQ ID NO: 885672
ucuccugaagcacacagcc

SEQ ID NO: 885674 - RNA, 19 nt, Artificial Sequence
  Description of Artificial Sequence: Synthetic oligonucleotide
  Sense strand starting at position 2133 of SEQ ID NO: 588733
ucugaagaguguuuguuac

SEQ ID NO: 885675 - RNA, 19 nt, Artificial Sequence
  Description of Artificial Sequence: Synthetic oligonucleotide
  Antisense strand to SEQ ID NO: 885674
guaacaaacacucuucaga

SEQ ID NO: 885676 - RNA, 19 nt, Artificial Sequence
  Description of Artificial Sequence: Synthetic oligonucleotide
  Sense strand starting at position 2135 of SEQ ID NO: 588733
ugaagaguguuuguuacca

SEQ ID NO: 885677 - RNA, 19 nt, Artificial Sequence
  Description of Artificial Sequence: Synthetic oligonucleotide
  Antisense strand to SEQ ID NO: 885676
ugguaacaaacacucuuca

SEQ ID NO: 885678 - RNA, 19 nt, Artificial Sequence
  Description of Artificial Sequence: Synthetic oligonucleotide
  Sense strand starting at position 2380 of SEQ ID NO: 588733
uggcaauagagcugagaag

SEQ ID NO: 885679 - RNA, 19 nt, Artificial Sequence
  Description of Artificial Sequence: Synthetic oligonucleotide
  Antisense strand to SEQ ID NO: 885678
cuucucagcucuauugcca

SEQ ID NO: 885680 - RNA, 19 nt, Artificial Sequence
  Description of Artificial Sequence: Synthetic oligonucleotide
  Sense strand starting at position 3074 of SEQ ID NO: 588733
ucccacauugugggagauu

SEQ ID NO: 885681 - RNA, 19 nt, Artificial Sequence
  Description of Artificial Sequence: Synthetic oligonucleotide
  Antisense strand to SEQ ID NO: 885680
aaucucccacaauguggga

SEQ ID NO: 885682 - RNA, 19 nt, Artificial Sequence
  Description of Artificial Sequence: Synthetic oligonucleotide
  Sense strand starting at position 3075 of SEQ ID NO: 588733
cccacauugugggagauuu

SEQ ID NO: 885683 - RNA, 19 nt, Artificial Sequence
  Description of Artificial Sequence: Synthetic oligonucleotide
  Antisense strand to SEQ ID NO: 885682
aaaucucccacaauguggg

SEQ ID NO: 885684 - RNA, 19 nt, Artificial Sequence
  Description of Artificial Sequence: Synthetic oligonucleotide
  Sense strand starting at position 3277 of SEQ ID NO: 588733
cuauaagacucacugugaa

SEQ ID NO: 885685 - RNA, 19 nt, Artificial Sequence
  Description of Artificial Sequence: Synthetic oligonucleotide
  Antisense strand to SEQ ID NO: 885684
uucacagugagucuuauag

SEQ ID NO: 885686 - RNA, 19 nt, Artificial Sequence
  Description of Artificial Sequence: Synthetic oligonucleotide
  Sense strand starting at position 3415 of SEQ ID NO: 588733
caugaagucgugcauagac

SEQ ID NO: 885687 - RNA, 19 nt, Artificial Sequence
  Description of Artificial Sequence: Synthetic oligonucleotide
  Antisense strand to SEQ ID NO: 885686
gucuaugcacgacuucaug

SEQ ID NO: 885688 - RNA, 19 nt, Artificial Sequence
  Description of Artificial Sequence: Synthetic oligonucleotide
  Sense strand starting at position 3606 of SEQ ID NO: 588733
uggaaugguucugcacagu

SEQ ID NO: 885689 - RNA, 19 nt, Artificial Sequence
  Description of Artificial Sequence: Synthetic oligonucleotide
  Antisense strand to SEQ ID NO: 885688
acugugcagaaccauucca

SEQ ID NO: 885690 - RNA, 19 nt, Artificial Sequence
  Description of Artificial Sequence: Synthetic oligonucleotide
  Sense strand starting at position 3690 of SEQ ID NO: 588733
cagaccuacugguaagaau

SEQ ID NO: 885691 - RNA, 19 nt, Artificial Sequence
  Description of Artificial Sequence: Synthetic oligonucleotide
  Antisense strand to SEQ ID NO: 885690
auucuuaccaguaggucug

SEQ ID NO: 885692 - RNA, 19 nt, Artificial Sequence
  Description of Artificial Sequence: Synthetic oligonucleotide
  Sense strand starting at position 3773 of SEQ ID NO: 588733
gggucuagaucuccaagau

SEQ ID NO: 885693 - RNA, 19 nt, Artificial Sequence
  Description of Artificial Sequence: Synthetic oligonucleotide
  Antisense strand to SEQ ID NO: 885692
aucuuggagaucuagaccc

SEQ ID NO: 885694 - RNA, 19 nt, Artificial Sequence
  Description of Artificial Sequence: Synthetic oligonucleotide
  Sense strand starting at position 3799 of SEQ ID NO: 588733
aguuuaucccacuguugag

SEQ ID NO: 885695 - RNA, 19 nt, Artificial Sequence
  Description of Artificial Sequence: Synthetic oligonucleotide
  Antisense strand to SEQ ID NO: 885694
cucaacagugggauaaacu

SEQ ID NO: 885696 - RNA, 19 nt, Artificial Sequence
  Description of Artificial Sequence: Synthetic oligonucleotide
  Sense strand starting at position 3847 of SEQ ID NO: 588733
aagagauguucguauuugg

SEQ ID NO: 885697 - RNA, 19 nt, Artificial Sequence
  Description of Artificial Sequence: Synthetic oligonucleotide
  Antisense strand to SEQ ID NO: 885696
ccaaauacgaacaucucuu

SEQ ID NO: 885698 - RNA, 19 nt, Artificial Sequence
  Description of Artificial Sequence: Synthetic oligonucleotide
  Sense strand starting at position 3882 of SEQ ID NO: 588733
acagauagauauuagcagu

SEQ ID NO: 885699 - RNA, 19 nt, Artificial Sequence
  Description of Artificial Sequence: Synthetic oligonucleotide
  Antisense strand to SEQ ID NO: 885698
acugcuaauaucuaucugu

SEQ ID NO: 885700 - RNA, 19 nt, Artificial Sequence
  Description of Artificial Sequence: Synthetic oligonucleotide
  Sense strand starting at position 3885 of SEQ ID NO: 588733
gauagauauuagcagugca

SEQ ID NO: 885701 - RNA, 19 nt, Artificial Sequence
  Description of Artificial Sequence: Synthetic oligonucleotide
  Antisense strand to SEQ ID NO: 885700
ugcacugcuaauaucuauc

SEQ ID NO: 885702 - RNA, 19 nt, Artificial Sequence
  Description of Artificial Sequence: Synthetic oligonucleotide
  Sense strand starting at position 32 of SEQ ID NO: 588734
uguaguuuguggucauuua

SEQ ID NO: 885703 - RNA, 19 nt, Artificial Sequence
  Description of Artificial Sequence: Synthetic oligonucleotide
  Antisense strand to SEQ ID NO: 885702
uaaaugaccacaaacuaca

SEQ ID NO: 885704 - RNA, 19 nt, Artificial Sequence
  Description of Artificial Sequence: Synthetic oligonucleotide
  Sense strand starting at position 98 of SEQ ID NO: 588734
cagauagucucuuuguguu

SEQ ID NO: 885705 - RNA, 19 nt, Artificial Sequence
  Description of Artificial Sequence: Synthetic oligonucleotide
  Antisense strand to SEQ ID NO: 885704
aacacaaagagacuaucug

SEQ ID NO: 885706 - RNA, 19 nt, Artificial Sequence
  Description of Artificial Sequence: Synthetic oligonucleotide
  Sense strand starting at position 165 of SEQ ID NO: 588734
aggguagaagcuuaagagu

SEQ ID NO: 885707 - RNA, 19 nt, Artificial Sequence
  Description of Artificial Sequence: Synthetic oligonucleotide
  Antisense strand to SEQ ID NO: 885706
acucuuaagcuucuacccu

SEQ ID NO: 885708 - RNA, 19 nt, Artificial Sequence
  Description of Artificial Sequence: Synthetic oligonucleotide
  Sense strand starting at position 274 of SEQ ID NO: 588734
gucuuaugaucugucuaca

SEQ ID NO: 885709 - RNA, 19 nt, Artificial Sequence
  Description of Artificial Sequence: Synthetic oligonucleotide
  Antisense strand to SEQ ID NO: 885708
uguagacagaucauaagac

SEQ ID NO: 885710 - RNA, 19 nt, Artificial Sequence
  Description of Artificial Sequence: Synthetic oligonucleotide
  Sense strand starting at position 397 of SEQ ID NO: 588734
gagugacucugugugguga

SEQ ID NO: 885711 - RNA, 19 nt, Artificial Sequence
  Description of Artificial Sequence: Synthetic oligonucleotide
  Antisense strand to SEQ ID NO: 885710
ucaccacacagagucacuc

SEQ ID NO: 885712 - RNA, 19 nt, Artificial Sequence
  Description of Artificial Sequence: Synthetic oligonucleotide
  Sense strand starting at position 398 of SEQ ID NO: 588734
agugacucuguguggugaa

SEQ ID NO: 885713 - RNA, 19 nt, Artificial Sequence
  Description of Artificial Sequence: Synthetic oligonucleotide
  Antisense strand to SEQ ID NO: 885712
uucaccacacagagucacu

SEQ ID NO: 885714 - RNA, 19 nt, Artificial Sequence
  Description of Artificial Sequence: Synthetic oligonucleotide
  Sense strand starting at position 401 of SEQ ID NO: 588734
gacucuguguggugaaacu

SEQ ID NO: 885715 - RNA, 19 nt, Artificial Sequence
  Description of Artificial Sequence: Synthetic oligonucleotide
  Antisense strand to SEQ ID NO: 885714
aguuucaccacacagaguc

SEQ ID NO: 885716 - RNA, 19 nt, Artificial Sequence
  Description of Artificial Sequence: Synthetic oligonucleotide
  Sense strand starting at position 791 of SEQ ID NO: 588734
gaggucaugccucaccuuu

SEQ ID NO: 885717 - RNA, 19 nt, Artificial Sequence
  Description of Artificial Sequence: Synthetic oligonucleotide
  Antisense strand to SEQ ID NO: 885716
aaaggugaggcaugaccuc

SEQ ID NO: 885718 - RNA, 19 nt, Artificial Sequence
  Description of Artificial Sequence: Synthetic oligonucleotide
  Sense strand starting at position 820 of SEQ ID NO: 588734
aggcaccucugcuuguaaa

SEQ ID NO: 885719 - RNA, 19 nt, Artificial Sequence
  Description of Artificial Sequence: Synthetic oligonucleotide
  Antisense strand to SEQ ID NO: 885718
uuuacaagcagaggugccu

SEQ ID NO: 885720 - RNA, 19 nt, Artificial Sequence
  Description of Artificial Sequence: Synthetic oligonucleotide
  Sense strand starting at position 992 of SEQ ID NO: 588734
uguccugauucuuuccgua

SEQ ID NO: 885721 - RNA, 19 nt, Artificial Sequence
  Description of Artificial Sequence: Synthetic oligonucleotide
  Antisense strand to SEQ ID NO: 885720
uacggaaagaaucaggaca

SEQ ID NO: 885722 - RNA, 19 nt, Artificial Sequence
  Description of Artificial Sequence: Synthetic oligonucleotide
  Sense strand starting at position 994 of SEQ ID NO: 588734
uccugauucuuuccguaau

SEQ ID NO: 885723 - RNA, 19 nt, Artificial Sequence
  Description of Artificial Sequence: Synthetic oligonucleotide
  Antisense strand to SEQ ID NO: 885722
auuacggaaagaaucagga

SEQ ID NO: 885724 - RNA, 19 nt, Artificial Sequence
  Description of Artificial Sequence: Synthetic oligonucleotide
  Sense strand starting at position 996 of SEQ ID NO: 588734
cugauucuuuccguaauuu

SEQ ID NO: 885725 - RNA, 19 nt, Artificial Sequence
  Description of Artificial Sequence: Synthetic oligonucleotide
  Antisense strand to SEQ ID NO: 885724
aaauuacggaaagaaucag

SEQ ID NO: 885726 - RNA, 19 nt, Artificial Sequence
  Description of Artificial Sequence: Synthetic oligonucleotide
  Sense strand starting at position 1005 of SEQ ID NO: 588734
uccguaauuucccacugca

SEQ ID NO: 885727 - RNA, 19 nt, Artificial Sequence
  Description of Artificial Sequence: Synthetic oligonucleotide
  Antisense strand to SEQ ID NO: 885726
ugcagugggaaauuacgga

SEQ ID NO: 885728 - RNA, 19 nt, Artificial Sequence
  Description of Artificial Sequence: Synthetic oligonucleotide
  Sense strand starting at position 1021 of SEQ ID NO: 588734
gcacaacacccagguuaua

SEQ ID NO: 885729 - RNA, 19 nt, Artificial Sequence
  Description of Artificial Sequence: Synthetic oligonucleotide
  Antisense strand to SEQ ID NO: 885728
uauaaccuggguguugugc

SEQ ID NO: 885730 - RNA, 19 nt, Artificial Sequence
  Description of Artificial Sequence: Synthetic oligonucleotide
  Sense strand starting at position 1069 of SEQ ID NO: 588734
aguacacguuucucaugaa

SEQ ID NO: 885731 - RNA, 19 nt, Artificial Sequence
  Description of Artificial Sequence: Synthetic oligonucleotide
  Antisense strand to SEQ ID NO: 885730
uucaugagaaacguguacu

SEQ ID NO: 885732 - RNA, 19 nt, Artificial Sequence
  Description of Artificial Sequence: Synthetic oligonucleotide
  Sense strand starting at position 1070 of SEQ ID NO: 588734
guacacguuucucaugaac

SEQ ID NO: 885733 - RNA, 19 nt, Artificial Sequence
  Description of Artificial Sequence: Synthetic oligonucleotide
  Antisense strand to SEQ ID NO: 885732
guucaugagaaacguguac

SEQ ID NO: 885734 - RNA, 19 nt, Artificial Sequence
  Description of Artificial Sequence: Synthetic oligonucleotide
  Sense strand starting at position 1072 of SEQ ID NO: 588734
acacguuucucaugaacaa

SEQ ID NO: 885735 - RNA, 19 nt, Artificial Sequence
  Description of Artificial Sequence: Synthetic oligonucleotide
  Antisense strand to SEQ ID NO: 885734
uuguucaugagaaacgugu

SEQ ID NO: 885736 - RNA, 19 nt, Artificial Sequence
  Description of Artificial Sequence: Synthetic oligonucleotide
  Sense strand starting at position 1306 of SEQ ID NO: 588734
uucuuaaagugcuagguuu

SEQ ID NO: 885737 - RNA, 19 nt, Artificial Sequence
  Description of Artificial Sequence: Synthetic oligonucleotide
  Antisense strand to SEQ ID NO: 885736
aaaccuagcacuuuaagaa

SEQ ID NO: 885738 - RNA, 19 nt, Artificial Sequence
  Description of Artificial Sequence: Synthetic oligonucleotide
  Sense strand starting at position 1317 of SEQ ID NO: 588734
cuagguuucccuggcugaa

SEQ ID NO: 885739 - RNA, 19 nt, Artificial Sequence
  Description of Artificial Sequence: Synthetic oligonucleotide
  Antisense strand to SEQ ID NO: 885738
uucagccagggaaaccuag

SEQ ID NO: 885740 - RNA, 19 nt, Artificial Sequence
  Description of Artificial Sequence: Synthetic oligonucleotide
  Sense strand starting at position 1363 of SEQ ID NO: 588734
ggaucuaagcuucagaggu

SEQ ID NO: 885741 - RNA, 19 nt, Artificial Sequence
  Description of Artificial Sequence: Synthetic oligonucleotide
  Antisense strand to SEQ ID NO: 885740
accucugaagcuuagaucc

SEQ ID NO: 885742 - RNA, 19 nt, Artificial Sequence
  Description of Artificial Sequence: Synthetic oligonucleotide
  Sense strand starting at position 1503 of SEQ ID NO: 588734
cgcccaauguuauuagauu

SEQ ID NO: 885743 - RNA, 19 nt, Artificial Sequence
  Description of Artificial Sequence: Synthetic oligonucleotide
  Antisense strand to SEQ ID NO: 885742
aaucuaauaacauugggcg

SEQ ID NO: 885744 - RNA, 19 nt, Artificial Sequence
  Description of Artificial Sequence: Synthetic oligonucleotide
  Sense strand starting at position 1504 of SEQ ID NO: 588734
gcccaauguuauuagauuc

SEQ ID NO: 885745 - RNA, 19 nt, Artificial Sequence
  Description of Artificial Sequence: Synthetic oligonucleotide
  Antisense strand to SEQ ID NO: 885744
gaaucuaauaacauugggc

SEQ ID NO: 885746 - RNA, 19 nt, Artificial Sequence
  Description of Artificial Sequence: Synthetic oligonucleotide
  Sense strand starting at position 1539 of SEQ ID NO: 588734
aggaaaggaucuggcucau

SEQ ID NO: 885747 - RNA, 19 nt, Artificial Sequence
  Description of Artificial Sequence: Synthetic oligonucleotide
  Antisense strand to SEQ ID NO: 885746
augagccagauccuuuccu

SEQ ID NO: 885748 - RNA, 19 nt, Artificial Sequence
  Description of Artificial Sequence: Synthetic oligonucleotide
  Sense strand starting at position 1543 of SEQ ID NO: 588734
aaggaucuggcucauguau

SEQ ID NO: 885749 - RNA, 19 nt, Artificial Sequence
  Description of Artificial Sequence: Synthetic oligonucleotide
  Antisense strand to SEQ ID NO: 885748
auacaugagccagauccuu

SEQ ID NO: 885750 - RNA, 19 nt, Artificial Sequence
  Description of Artificial Sequence: Synthetic oligonucleotide
  Sense strand starting at position 1545 of SEQ ID NO: 588734
ggaucuggcucauguauuu

SEQ ID NO: 885751 - RNA, 19 nt, Artificial Sequence
  Description of Artificial Sequence: Synthetic oligonucleotide
  Antisense strand to SEQ ID NO: 885750
aaauacaugagccagaucc

SEQ ID NO: 885752 - RNA, 19 nt, Artificial Sequence
  Description of Artificial Sequence: Synthetic oligonucleotide
  Sense strand starting at position 1550 of SEQ ID NO: 588734
uggcucauguauuugugua

SEQ ID NO: 885753 - RNA, 19 nt, Artificial Sequence
  Description of Artificial Sequence: Synthetic oligonucleotide
  Antisense strand to SEQ ID NO: 885752
uacacaaauacaugagcca

SEQ ID NO: 885754 - RNA, 19 nt, Artificial Sequence
  Description of Artificial Sequence: Synthetic oligonucleotide
  Sense strand starting at position 1551 of SEQ ID NO: 588734
ggcucauguauuuguguau

SEQ ID NO: 885755 - RNA, 19 nt, Artificial Sequence
  Description of Artificial Sequence: Synthetic oligonucleotide
  Antisense strand to SEQ ID NO: 885754
auacacaaauacaugagcc

SEQ ID NO: 885756 - RNA, 19 nt, Artificial Sequence
  Description of Artificial Sequence: Synthetic oligonucleotide
  Sense strand starting at position 1555 of SEQ ID NO: 588734
cauguauuuguguaucgca

SEQ ID NO: 885757 - RNA, 19 nt, Artificial Sequence
  Description of Artificial Sequence: Synthetic oligonucleotide
  Antisense strand to SEQ ID NO: 885756
ugcgauacacaaauacaug

SEQ ID NO: 885758 - RNA, 19 nt, Artificial Sequence
  Description of Artificial Sequence: Synthetic oligonucleotide
  Sense strand starting at position 1812 of SEQ ID NO: 588734
gugggaguagugugcgcau

SEQ ID NO: 885759 - RNA, 19 nt, Artificial Sequence
  Description of Artificial Sequence: Synthetic oligonucleotide
  Antisense strand to SEQ ID NO: 885758
augcgcacacuacucccac

SEQ ID NO: 885760 - RNA, 19 nt, Artificial Sequence
  Description of Artificial Sequence: Synthetic oligonucleotide
  Sense strand starting at position 2360 of SEQ ID NO: 588734
ggcugugugcuucaggaga

SEQ ID NO: 885761 - RNA, 19 nt, Artificial Sequence
  Description of Artificial Sequence: Synthetic oligonucleotide
  Antisense strand to SEQ ID NO: 885760
ucuccugaagcacacagcc

SEQ ID NO: 885762 - RNA, 19 nt, Artificial Sequence
  Description of Artificial Sequence: Synthetic oligonucleotide
  Sense strand starting at position 2479 of SEQ ID NO: 588734
ggcuguggcucugaagagu

SEQ ID NO: 885763 - RNA, 19 nt, Artificial Sequence
  Description of Artificial Sequence: Synthetic oligonucleotide
  Antisense strand to SEQ ID NO: 885762
acucuucagagccacagcc

SEQ ID NO: 885764 - RNA, 19 nt, Artificial Sequence
  Description of Artificial Sequence: Synthetic oligonucleotide
  Sense strand starting at position 2488 of SEQ ID NO: 588734
ucugaagaguguuuguuac

SEQ ID NO: 885765 - RNA, 19 nt, Artificial Sequence
  Description of Artificial Sequence: Synthetic oligonucleotide
  Antisense strand to SEQ ID NO: 885764
guaacaaacacucuucaga

SEQ ID NO: 885766 - RNA, 19 nt, Artificial Sequence
  Description of Artificial Sequence: Synthetic oligonucleotide
  Sense strand starting at position 2490 of SEQ ID NO: 588734
ugaagaguguuuguuacca

SEQ ID NO: 885767 - RNA, 19 nt, Artificial Sequence
  Description of Artificial Sequence: Synthetic oligonucleotide
  Antisense strand to SEQ ID NO: 885766
ugguaacaaacacucuuca

SEQ ID NO: 885768 - RNA, 19 nt, Artificial Sequence
  Description of Artificial Sequence: Synthetic oligonucleotide
  Sense strand starting at position 2735 of SEQ ID NO: 588734
uggcaauagagcugagaag

SEQ ID NO: 885769 - RNA, 19 nt, Artificial Sequence
  Description of Artificial Sequence: Synthetic oligonucleotide
  Antisense strand to SEQ ID NO: 885768
cuucucagcucuauugcca

SEQ ID NO: 885770 - RNA, 19 nt, Artificial Sequence
  Description of Artificial Sequence: Synthetic oligonucleotide
  Sense strand starting at position 3429 of SEQ ID NO: 588734
ucccacauugugggagauu

SEQ ID NO: 885771 - RNA, 19 nt, Artificial Sequence
  Description of Artificial Sequence: Synthetic oligonucleotide
  Antisense strand to SEQ ID NO: 885770
aaucucccacaauguggga

SEQ ID NO: 885772 - RNA, 19 nt, Artificial Sequence
  Description of Artificial Sequence: Synthetic oligonucleotide
  Sense strand starting at position 3430 of SEQ ID NO: 588734
cccacauugugggagauuu

SEQ ID NO: 885773 - RNA, 19 nt, Artificial Sequence
  Description of Artificial Sequence: Synthetic oligonucleotide
  Antisense strand to SEQ ID NO: 885772
aaaucucccacaauguggg

SEQ ID NO: 885774 - RNA, 19 nt, Artificial Sequence
  Description of Artificial Sequence: Synthetic oligonucleotide
  Sense strand starting at position 3632 of SEQ ID NO: 588734
cuauaagacucacugugaa

SEQ ID NO: 885775 - RNA, 19 nt, Artificial Sequence
  Description of Artificial Sequence: Synthetic oligonucleotide
  Antisense strand to SEQ ID NO: 885774
uucacagugagucuuauag

SEQ ID NO: 885776 - RNA, 19 nt, Artificial Sequence
  Description of Artificial Sequence: Synthetic oligonucleotide
  Sense strand starting at position 3770 of SEQ ID NO: 588734
caugaagucgugcauagac

SEQ ID NO: 885777 - RNA, 19 nt, Artificial Sequence
  Description of Artificial Sequence: Synthetic oligonucleotide
  Antisense strand to SEQ ID NO: 885776
gucuaugcacgacuucaug

SEQ ID NO: 885778 - RNA, 19 nt, Artificial Sequence
  Description of Artificial Sequence: Synthetic oligonucleotide
  Sense strand starting at position 3960 of SEQ ID NO: 588734
guggaaugguucugcacag

SEQ ID NO: 885779 - RNA, 19 nt, Artificial Sequence
  Description of Artificial Sequence: Synthetic oligonucleotide
  Antisense strand to SEQ ID NO: 885778
cugugcagaaccauuccac

SEQ ID NO: 885780 - RNA, 19 nt, Artificial Sequence
  Description of Artificial Sequence: Synthetic oligonucleotide
  Sense strand starting at position 3961 of SEQ ID NO: 588734
uggaaugguucugcacagu

SEQ ID NO: 885781 - RNA, 19 nt, Artificial Sequence
  Description of Artificial Sequence: Synthetic oligonucleotide
  Antisense strand to SEQ ID NO: 885780
acugugcagaaccauucca

SEQ ID NO: 885782 - RNA, 19 nt, Artificial Sequence
  Description of Artificial Sequence: Synthetic oligonucleotide
  Sense strand starting at position 264 of SEQ ID NO: 588735
agugauuugugcuuuaaua

SEQ ID NO: 885783 - RNA, 19 nt, Artificial Sequence
  Description of Artificial Sequence: Synthetic oligonucleotide
  Antisense strand to SEQ ID NO: 885782
uauuaaagcacaaaucacu

SEQ ID NO: 885784 - RNA, 19 nt, Artificial Sequence
  Description of Artificial Sequence: Synthetic oligonucleotide
  Sense strand starting at position 383 of SEQ ID NO: 588735
guguuaaauacucacuggu

SEQ ID NO: 885785 - RNA, 19 nt, Artificial Sequence
  Description of Artificial Sequence: Synthetic oligonucleotide
  Antisense strand to SEQ ID NO: 885784
accagugaguauuuaacac

SEQ ID NO: 885786 - RNA, 19 nt, Artificial Sequence
  Description of Artificial Sequence: Synthetic oligonucleotide
  Sense strand starting at position 385 of SEQ ID NO: 588735
guuaaauacucacugguau

SEQ ID NO: 885787 - RNA, 19 nt, Artificial Sequence
  Description of Artificial Sequence: Synthetic oligonucleotide
  Antisense strand to SEQ ID NO: 885786
auaccagugaguauuuaac

SEQ ID NO: 885788 - RNA, 19 nt, Artificial Sequence
  Description of Artificial Sequence: Synthetic oligonucleotide
  Sense strand starting at position 407 of SEQ ID NO: 588735
cacugucuuccugagaagu

SEQ ID NO: 885789 - RNA, 19 nt, Artificial Sequence
  Description of Artificial Sequence: Synthetic oligonucleotide
  Antisense strand to SEQ ID NO: 885788
acuucucaggaagacagug

SEQ ID NO: 885790 - RNA, 19 nt, Artificial Sequence
  Description of Artificial Sequence: Synthetic oligonucleotide
  Sense strand starting at position 415 of SEQ ID NO: 588735
uccugagaaguuugaguua

SEQ ID NO: 885791 - RNA, 19 nt, Artificial Sequence
  Description of Artificial Sequence: Synthetic oligonucleotide
  Antisense strand to SEQ ID NO: 885790
uaacucaaacuucucagga

SEQ ID NO: 885792 - RNA, 19 nt, Artificial Sequence
  Description of Artificial Sequence: Synthetic oligonucleotide
  Sense strand starting at position 418 of SEQ ID NO: 588735
ugagaaguuugaguuaauu

SEQ ID NO: 885793 - RNA, 19 nt, Artificial Sequence
  Description of Artificial Sequence: Synthetic oligonucleotide
  Antisense strand to SEQ ID NO: 885792
aauuaacucaaacuucuca

SEQ ID NO: 885794 - RNA, 19 nt, Artificial Sequence
  Description of Artificial Sequence: Synthetic oligonucleotide
  Sense strand starting at position 1294 of SEQ ID NO: 588735
ggauacuuuggcuaagcua

SEQ ID NO: 885795 - RNA, 19 nt, Artificial Sequence
  Description of Artificial Sequence: Synthetic oligonucleotide
  Antisense strand to SEQ ID NO: 885794
uagcuuagccaaaguaucc

SEQ ID NO: 885796 - RNA, 19 nt, Artificial Sequence
  Description of Artificial Sequence: Synthetic oligonucleotide
  Sense strand starting at position 1432 of SEQ ID NO: 588735
uuuguuauuggccaauaga

SEQ ID NO: 885797 - RNA, 19 nt, Artificial Sequence
  Description of Artificial Sequence: Synthetic oligonucleotide
  Antisense strand to SEQ ID NO: 885796
ucuauuggccaauaacaaa

SEQ ID NO: 885798 - RNA, 19 nt, Artificial Sequence
  Description of Artificial Sequence: Synthetic oligonucleotide
  Sense strand starting at position 1560 of SEQ ID NO: 588735
agaguugaaucucuggcau

SEQ ID NO: 885799 - RNA, 19 nt, Artificial Sequence
  Description of Artificial Sequence: Synthetic oligonucleotide
  Antisense strand to SEQ ID NO: 885798
augccagagauucaacucu

SEQ ID NO: 885800 - RNA, 19 nt, Artificial Sequence
  Description of Artificial Sequence: Synthetic oligonucleotide
  Sense strand starting at position 1566 of SEQ ID NO: 588735
gaaucucuggcaugaguaa

SEQ ID NO: 885801 - RNA, 19 nt, Artificial Sequence
  Description of Artificial Sequence: Synthetic oligonucleotide
  Antisense strand to SEQ ID NO: 885800
uuacucaugccagagauuc

SEQ ID NO: 885802 - RNA, 19 nt, Artificial Sequence
  Description of Artificial Sequence: Synthetic oligonucleotide
  Sense strand starting at position 1567 of SEQ ID NO: 588735
aaucucuggcaugaguaau

SEQ ID NO: 885803 - RNA, 19 nt, Artificial Sequence
  Description of Artificial Sequence: Synthetic oligonucleotide
  Antisense strand to SEQ ID NO: 885802
auuacucaugccagagauu

SEQ ID NO: 885804 - RNA, 19 nt, Artificial Sequence
  Description of Artificial Sequence: Synthetic oligonucleotide
  Sense strand starting at position 2322 of SEQ ID NO: 588735
gggagaauggccugggugu

SEQ ID NO: 885805 - RNA, 19 nt, Artificial Sequence
  Description of Artificial Sequence: Synthetic oligonucleotide
  Antisense strand to SEQ ID NO: 885804
acacccaggccauucuccc

SEQ ID NO: 885806 - RNA, 19 nt, Artificial Sequence
  Description of Artificial Sequence: Synthetic oligonucleotide
  Sense strand starting at position 2391 of SEQ ID NO: 588735
agggcaagcauugguaaca

SEQ ID NO: 885807 - RNA, 19 nt, Artificial Sequence
  Description of Artificial Sequence: Synthetic oligonucleotide
  Antisense strand to SEQ ID NO: 885806
uguuaccaaugcuugcccu

SEQ ID NO: 885808 - RNA, 19 nt, Artificial Sequence
  Description of Artificial Sequence: Synthetic oligonucleotide
  Sense strand starting at position 2392 of SEQ ID NO: 588735
gggcaagcauugguaacaa

SEQ ID NO: 885809 - RNA, 19 nt, Artificial Sequence
  Description of Artificial Sequence: Synthetic oligonucleotide
  Antisense strand to SEQ ID NO: 885808
uuguuaccaaugcuugccc

SEQ ID NO: 885810 - RNA, 19 nt, Artificial Sequence
  Description of Artificial Sequence: Synthetic oligonucleotide
  Sense strand starting at position 2475 of SEQ ID NO: 588735
ugugaauaugaauaugcuu

SEQ ID NO: 885811 - RNA, 19 nt, Artificial Sequence
  Description of Artificial Sequence: Synthetic oligonucleotide
  Antisense strand to SEQ ID NO: 885810
aagcauauucauauucaca

SEQ ID NO: 885812 - RNA, 19 nt, Artificial Sequence
  Description of Artificial Sequence: Synthetic oligonucleotide
  Sense strand starting at position 2483 of SEQ ID NO: 588735
ugaauaugcuucuuugcag

SEQ ID NO: 885813 - RNA, 19 nt, Artificial Sequence
  Description of Artificial Sequence: Synthetic oligonucleotide
  Antisense strand to SEQ ID NO: 885812
cugcaaagaagcauauuca

SEQ ID NO: 885814 - RNA, 19 nt, Artificial Sequence
  Description of Artificial Sequence: Synthetic oligonucleotide
  Sense strand starting at position 2521 of SEQ ID NO: 588735
aauccaagacuuuggguau

SEQ ID NO: 885815 - RNA, 19 nt, Artificial Sequence
  Description of Artificial Sequence: Synthetic oligonucleotide
  Antisense strand to SEQ ID NO: 885814
auacccaaagucuuggauu

SEQ ID NO: 885816 - RNA, 19 nt, Artificial Sequence
  Description of Artificial Sequence: Synthetic oligonucleotide
  Sense strand starting at position 2524 of SEQ ID NO: 588735
ccaagacuuuggguaucca

SEQ ID NO: 885817 - RNA, 19 nt, Artificial Sequence
  Description of Artificial Sequence: Synthetic oligonucleotide
  Antisense strand to SEQ ID NO: 885816
uggauacccaaagucuugg

SEQ ID NO: 885818 - RNA, 19 nt, Artificial Sequence
  Description of Artificial Sequence: Synthetic oligonucleotide
  Sense strand starting at position 2528 of SEQ ID NO: 588735
gacuuuggguauccagaau

SEQ ID NO: 885819 - RNA, 19 nt, Artificial Sequence
  Description of Artificial Sequence: Synthetic oligonucleotide
  Antisense strand to SEQ ID NO: 885818
auucuggauacccaaaguc

SEQ ID NO: 885820 - RNA, 19 nt, Artificial Sequence
  Description of Artificial Sequence: Synthetic oligonucleotide
  Sense strand starting at position 2577 of SEQ ID NO: 588735
cuuagcauuccauaggauu

SEQ ID NO: 885821 - RNA, 19 nt, Artificial Sequence
  Description of Artificial Sequence: Synthetic oligonucleotide
  Antisense strand to SEQ ID NO: 885820
aauccuauggaaugcuaag

SEQ ID NO: 885822 - RNA, 19 nt, Artificial Sequence
  Description of Artificial Sequence: Synthetic oligonucleotide
  Sense strand starting at position 2912 of SEQ ID NO: 588735
ugguaaaucuggguuacca

SEQ ID NO: 885823 - RNA, 19 nt, Artificial Sequence
  Description of Artificial Sequence: Synthetic oligonucleotide
  Antisense strand to SEQ ID NO: 885822
ugguaacccagauuuacca

SEQ ID NO: 885824 - RNA, 19 nt, Artificial Sequence
  Description of Artificial Sequence: Synthetic oligonucleotide
  Sense strand starting at position 2914 of SEQ ID NO: 588735
guaaaucuggguuaccauc

SEQ ID NO: 885825 - RNA, 19 nt, Artificial Sequence
  Description of Artificial Sequence: Synthetic oligonucleotide
  Antisense strand to SEQ ID NO: 885824
gaugguaacccagauuuac

SEQ ID NO: 885826 - RNA, 19 nt, Artificial Sequence
  Description of Artificial Sequence: Synthetic oligonucleotide
  Sense strand starting at position 2924 of SEQ ID NO: 588735
guuaccaucugaucugaga

SEQ ID NO: 885827 - RNA, 19 nt, Artificial Sequence
  Description of Artificial Sequence: Synthetic oligonucleotide
  Antisense strand to SEQ ID NO: 885826
ucucagaucagaugguaac

SEQ ID NO: 885828 - RNA, 19 nt, Artificial Sequence
  Description of Artificial Sequence: Synthetic oligonucleotide
  Sense strand starting at position 3036 of SEQ ID NO: 588735
uuuagaugcagugagauua

SEQ ID NO: 885829 - RNA, 19 nt, Artificial Sequence
  Description of Artificial Sequence: Synthetic oligonucleotide
  Antisense strand to SEQ ID NO: 885828
uaaucucacugcaucuaaa

SEQ ID NO: 885830 - RNA, 19 nt, Artificial Sequence
  Description of Artificial Sequence: Synthetic oligonucleotide
  Sense strand starting at position 3047 of SEQ ID NO: 588735
ugagauuaugcugggcuua

SEQ ID NO: 885831 - RNA, 19 nt, Artificial Sequence
  Description of Artificial Sequence: Synthetic oligonucleotide
  Antisense strand to SEQ ID NO: 885830
uaagcccagcauaaucuca

SEQ ID NO: 885832 - RNA, 19 nt, Artificial Sequence
  Description of Artificial Sequence: Synthetic oligonucleotide
  Sense strand starting at position 3069 of SEQ ID NO: 588735
ucaagugaaucuucccaga

SEQ ID NO: 885833 - RNA, 19 nt, Artificial Sequence
  Description of Artificial Sequence: Synthetic oligonucleotide
  Antisense strand to SEQ ID NO: 885832
ucugggaagauucacuuga

SEQ ID NO: 885834 - RNA, 19 nt, Artificial Sequence
  Description of Artificial Sequence: Synthetic oligonucleotide
  Sense strand starting at position 3071 of SEQ ID NO: 588735
aagugaaucuucccagaga

SEQ ID NO: 885835 - RNA, 19 nt, Artificial Sequence
  Description of Artificial Sequence: Synthetic oligonucleotide
  Antisense strand to SEQ ID NO: 885834
ucucugggaagauucacuu

SEQ ID NO: 885836 - RNA, 19 nt, Artificial Sequence
  Description of Artificial Sequence: Synthetic oligonucleotide
  Sense strand starting at position 3157 of SEQ ID NO: 588735
gccagaguaguguggagau

SEQ ID NO: 885837 - RNA, 19 nt, Artificial Sequence
  Description of Artificial Sequence: Synthetic oligonucleotide
  Antisense strand to SEQ ID NO: 885836
aucuccacacuacucuggc

SEQ ID NO: 885838 - RNA, 19 nt, Artificial Sequence
  Description of Artificial Sequence: Synthetic oligonucleotide
  Sense strand starting at position 3160 of SEQ ID NO: 588735
agaguaguguggagaugga

SEQ ID NO: 885839 - RNA, 19 nt, Artificial Sequence
  Description of Artificial Sequence: Synthetic oligonucleotide
  Antisense strand to SEQ ID NO: 885838
uccaucuccacacuacucu

SEQ ID NO: 885840 - RNA, 19 nt, Artificial Sequence
  Description of Artificial Sequence: Synthetic oligonucleotide
  Sense strand starting at position 3175 of SEQ ID NO: 588735
uggagaugcugucugugau

SEQ ID NO: 885841 - RNA, 19 nt, Artificial Sequence
  Description of Artificial Sequence: Synthetic oligonucleotide
  Antisense strand to SEQ ID NO: 885840
aucacagacagcaucucca

SEQ ID NO: 885842 - RNA, 19 nt, Artificial Sequence
  Description of Artificial Sequence: Synthetic oligonucleotide
  Sense strand starting at position 3176 of SEQ ID NO: 588735
ggagaugcugucugugauc

SEQ ID NO: 885843 - RNA, 19 nt, Artificial Sequence
  Description of Artificial Sequence: Synthetic oligonucleotide
  Antisense strand to SEQ ID NO: 885842
gaucacagacagcaucucc

SEQ ID NO: 885844 - RNA, 19 nt, Artificial Sequence
  Description of Artificial Sequence: Synthetic oligonucleotide
  Sense strand starting at position 3178 of SEQ ID NO: 588735
agaugcugucugugaucaa

SEQ ID NO: 885845 - RNA, 19 nt, Artificial Sequence
  Description of Artificial Sequence: Synthetic oligonucleotide
  Antisense strand to SEQ ID NO: 885844
uugaucacagacagcaucu

SEQ ID NO: 885846 - RNA, 19 nt, Artificial Sequence
  Description of Artificial Sequence: Synthetic oligonucleotide
  Sense strand starting at position 3188 of SEQ ID NO: 588735
ugugaucaagucuaaugau

SEQ ID NO: 885847 - RNA, 19 nt, Artificial Sequence
  Description of Artificial Sequence: Synthetic oligonucleotide
  Antisense strand to SEQ ID NO: 885846
aucauuagacuugaucaca

SEQ ID NO: 885848 - RNA, 19 nt, Artificial Sequence
  Description of Artificial Sequence: Synthetic oligonucleotide
  Sense strand starting at position 3366 of SEQ ID NO: 588735
cucagaaacuucguguuga

SEQ ID NO: 885849 - RNA, 19 nt, Artificial Sequence
  Description of Artificial Sequence: Synthetic oligonucleotide
  Antisense strand to SEQ ID NO: 885848
ucaacacgaaguuucugag

SEQ ID NO: 885850 - RNA, 19 nt, Artificial Sequence
  Description of Artificial Sequence: Synthetic oligonucleotide
  Sense strand starting at position 3543 of SEQ ID NO: 588735
gagauccacugcucagaga

SEQ ID NO: 885851 - RNA, 19 nt, Artificial Sequence
  Description of Artificial Sequence: Synthetic oligonucleotide
  Antisense strand to SEQ ID NO: 885850
ucucugagcaguggaucuc

SEQ ID NO: 885852 - RNA, 19 nt, Artificial Sequence
  Description of Artificial Sequence: Synthetic oligonucleotide
  Sense strand starting at position 3639 of SEQ ID NO: 588735
gccugacagcuuuacaaga

SEQ ID NO: 885853 - RNA, 19 nt, Artificial Sequence
  Description of Artificial Sequence: Synthetic oligonucleotide
  Antisense strand to SEQ ID NO: 885852
ucuuguaaagcugucaggc

SEQ ID NO: 885854 - RNA, 19 nt, Artificial Sequence
  Description of Artificial Sequence: Synthetic oligonucleotide
  Sense strand starting at position 3737 of SEQ ID NO: 588735
uugugauuugugcagagca

SEQ ID NO: 885855 - RNA, 19 nt, Artificial Sequence
  Description of Artificial Sequence: Synthetic oligonucleotide
  Antisense strand to SEQ ID NO: 885854
ugcucugcacaaaucacaa

SEQ ID NO: 885856 - RNA, 19 nt, Artificial Sequence
  Description of Artificial Sequence: Synthetic oligonucleotide
  Sense strand starting at position 3858 of SEQ ID NO: 588735
cauggagaucauugugaac

SEQ ID NO: 885857 - RNA, 19 nt, Artificial Sequence
  Description of Artificial Sequence: Synthetic oligonucleotide
  Antisense strand to SEQ ID NO: 885856
guucacaaugaucuccaug

SEQ ID NO: 885858 - RNA, 19 nt, Artificial Sequence
  Description of Artificial Sequence: Synthetic oligonucleotide
  Sense strand starting at position 3867 of SEQ ID NO: 588735
cauugugaacugugggaau

SEQ ID NO: 885859 - RNA, 19 nt, Artificial Sequence
  Description of Artificial Sequence: Synthetic oligonucleotide
  Antisense strand to SEQ ID NO: 885858
auucccacaguucacaaug

SEQ ID NO: 885860 - RNA, 19 nt, Artificial Sequence
  Description of Artificial Sequence: Synthetic oligonucleotide
  Sense strand starting at position 3943 of SEQ ID NO: 588735
ggacaaacugugcaucuga

SEQ ID NO: 885861 - RNA, 19 nt, Artificial Sequence
  Description of Artificial Sequence: Synthetic oligonucleotide
  Antisense strand to SEQ ID NO: 885860
ucagaugcacaguuugucc

SEQ ID NO: 885862 - RNA, 19 nt, Artificial Sequence
  Description of Artificial Sequence: Synthetic oligonucleotide
  Sense strand starting at position 16 of SEQ ID NO: 588736
cuggaugugaaagguuaau

SEQ ID NO: 885863 - RNA, 19 nt, Artificial Sequence
  Description of Artificial Sequence: Synthetic oligonucleotide
  Antisense strand to SEQ ID NO: 885862
auuaaccuuucacauccag

SEQ ID NO: 885864 - RNA, 19 nt, Artificial Sequence
  Description of Artificial Sequence: Synthetic oligonucleotide
  Sense strand starting at position 22 of SEQ ID NO: 588736
gugaaagguuaaucaugau

SEQ ID NO: 885865 - RNA, 19 nt, Artificial Sequence
  Description of Artificial Sequence: Synthetic oligonucleotide
  Antisense strand to SEQ ID NO: 885864
aucaugauuaaccuuucac

SEQ ID NO: 885866 - RNA, 19 nt, Artificial Sequence
  Description of Artificial Sequence: Synthetic oligonucleotide
  Sense strand starting at position 51 of SEQ ID NO: 588736
agcuuauuccaagaaacga

SEQ ID NO: 885867 - RNA, 19 nt, Artificial Sequence
  Description of Artificial Sequence: Synthetic oligonucleotide
  Antisense strand to SEQ ID NO: 885866
ucguuucuuggaauaagcu

SEQ ID NO: 885868 - RNA, 19 nt, Artificial Sequence
  Description of Artificial Sequence: Synthetic oligonucleotide
  Sense strand starting at position 83 of SEQ ID NO: 588736
aauuguucuggcuaagaca

SEQ ID NO: 885869 - RNA, 19 nt, Artificial Sequence
  Description of Artificial Sequence: Synthetic oligonucleotide
  Antisense strand to SEQ ID NO: 885868
ugucuuagccagaacaauu

SEQ ID NO: 885870 - RNA, 19 nt, Artificial Sequence
  Description of Artificial Sequence: Synthetic oligonucleotide
  Sense strand starting at position 155 of SEQ ID NO: 588736
uuuaaugauguagagcaau

SEQ ID NO: 885871 - RNA, 19 nt, Artificial Sequence
  Description of Artificial Sequence: Synthetic oligonucleotide
  Antisense strand to SEQ ID NO: 885870
auugcucuacaucauuaaa

SEQ ID NO: 885872 - RNA, 19 nt, Artificial Sequence
  Description of Artificial Sequence: Synthetic oligonucleotide
  Sense strand starting at position 177 of SEQ ID NO: 588736
ucgucuaaugaaggguaaa

SEQ ID NO: 885873 - RNA, 19 nt, Artificial Sequence
  Description of Artificial Sequence: Synthetic oligonucleotide
  Antisense strand to SEQ ID NO: 885872
uuuacccuucauuagacga

SEQ ID NO: 885874 - RNA, 19 nt, Artificial Sequence
  Description of Artificial Sequence: Synthetic oligonucleotide
  Sense strand starting at position 178 of SEQ ID NO: 588736
cgucuaaugaaggguaaau

SEQ ID NO: 885875 - RNA, 19 nt, Artificial Sequence
  Description of Artificial Sequence: Synthetic oligonucleotide
  Antisense strand to SEQ ID NO: 885874
auuuacccuucauuagacg

SEQ ID NO: 885876 - RNA, 19 nt, Artificial Sequence
  Description of Artificial Sequence: Synthetic oligonucleotide
  Sense strand starting at position 213 of SEQ ID NO: 588736
ucaacucauuacucggaaa

SEQ ID NO: 885877 - RNA, 19 nt, Artificial Sequence
  Description of Artificial Sequence: Synthetic oligonucleotide
  Antisense strand to SEQ ID NO: 885876
uuuccgaguaaugaguuga

SEQ ID NO: 885878 - RNA, 19 nt, Artificial Sequence
  Description of Artificial Sequence: Synthetic oligonucleotide
  Sense strand starting at position 251 of SEQ ID NO: 588736
gcaacugcuccucagaauu

SEQ ID NO: 885879 - RNA, 19 nt, Artificial Sequence
  Description of Artificial Sequence: Synthetic oligonucleotide
  Antisense strand to SEQ ID NO: 885878
aauucugaggagcaguugc

SEQ ID NO: 885880 - RNA, 19 nt, Artificial Sequence
  Description of Artificial Sequence: Synthetic oligonucleotide
  Sense strand starting at position 334 of SEQ ID NO: 588736
auaaauguuaugggaguga

SEQ ID NO: 885881 - RNA, 19 nt, Artificial Sequence
  Description of Artificial Sequence: Synthetic oligonucleotide
  Antisense strand to SEQ ID NO: 885880
ucacucccauaacauuuau

SEQ ID NO: 885882 - RNA, 19 nt, Artificial Sequence
  Description of Artificial Sequence: Synthetic oligonucleotide
  Sense strand starting at position 380 of SEQ ID NO: 588736
uuugucauugauuaccauu

SEQ ID NO: 885883 - RNA, 19 nt, Artificial Sequence
  Description of Artificial Sequence: Synthetic oligonucleotide
  Antisense strand to SEQ ID NO: 885882
aaugguaaucaaugacaaa

SEQ ID NO: 885884 - RNA, 19 nt, Artificial Sequence
  Description of Artificial Sequence: Synthetic oligonucleotide
  Sense strand starting at position 512 of SEQ ID NO: 588736
uuacuugaguuucugaaau

SEQ ID NO: 885885 - RNA, 19 nt, Artificial Sequence
  Description of Artificial Sequence: Synthetic oligonucleotide
  Antisense strand to SEQ ID NO: 885884
auuucagaaacucaaguaa

SEQ ID NO: 885886 - RNA, 19 nt, Artificial Sequence
  Description of Artificial Sequence: Synthetic oligonucleotide
  Sense strand starting at position 609 of SEQ ID NO: 588736
cggaaaucuccacaaacgu

SEQ ID NO: 885887 - RNA, 19 nt, Artificial Sequence
  Description of Artificial Sequence: Synthetic oligonucleotide
  Antisense strand to SEQ ID NO: 885886
acguuuguggagauuuccg

SEQ ID NO: 885888 - RNA, 19 nt, Artificial Sequence
  Description of Artificial Sequence: Synthetic oligonucleotide
  Sense strand starting at position 641 of SEQ ID NO: 588736
agguuucagguagaaaguu

SEQ ID NO: 885889 - RNA, 19 nt, Artificial Sequence
  Description of Artificial Sequence: Synthetic oligonucleotide
  Antisense strand to SEQ ID NO: 885888
aacuuucuaccugaaaccu

SEQ ID NO: 885890 - RNA, 19 nt, Artificial Sequence
  Description of Artificial Sequence: Synthetic oligonucleotide
  Sense strand starting at position 691 of SEQ ID NO: 588736
uuuacaagauaguuacagu

SEQ ID NO: 885891 - RNA, 19 nt, Artificial Sequence
  Description of Artificial Sequence: Synthetic oligonucleotide
  Antisense strand to SEQ ID NO: 885890
acuguaacuaucuuguaaa

SEQ ID NO: 885892 - RNA, 19 nt, Artificial Sequence
  Description of Artificial Sequence: Synthetic oligonucleotide
  Sense strand starting at position 791 of SEQ ID NO: 588736
cuuuguugugcgaggguaa

SEQ ID NO: 885893 - RNA, 19 nt, Artificial Sequence
  Description of Artificial Sequence: Synthetic oligonucleotide
  Antisense strand to SEQ ID NO: 885892
uuacccucgcacaacaaag

SEQ ID NO: 885894 - RNA, 19 nt, Artificial Sequence
  Description of Artificial Sequence: Synthetic oligonucleotide
  Sense strand starting at position 804 of SEQ ID NO: 588736
ggguaaaugaguuacagua

SEQ ID NO: 885895 - RNA, 19 nt, Artificial Sequence
  Description of Artificial Sequence: Synthetic oligonucleotide
  Antisense strand to SEQ ID NO: 885894
uacuguaacucauuuaccc

SEQ ID NO: 885896 - RNA, 19 nt, Artificial Sequence
  Description of Artificial Sequence: Synthetic oligonucleotide
  Sense strand starting at position 1159 of SEQ ID NO: 588736
cuguuuggacagugauaug

SEQ ID NO: 885897 - RNA, 19 nt, Artificial Sequence
  Description of Artificial Sequence: Synthetic oligonucleotide
  Antisense strand to SEQ ID NO: 885896
cauaucacuguccaaacag

SEQ ID NO: 885898 - RNA, 19 nt, Artificial Sequence
  Description of Artificial Sequence: Synthetic oligonucleotide
  Sense strand starting at position 1164 of SEQ ID NO: 588736
uggacagugauaugguaaa

SEQ ID NO: 885899 - RNA, 19 nt, Artificial Sequence
  Description of Artificial Sequence: Synthetic oligonucleotide
  Antisense strand to SEQ ID NO: 885898
uuuaccauaucacugucca

SEQ ID NO: 885900 - RNA, 19 nt, Artificial Sequence
  Description of Artificial Sequence: Synthetic oligonucleotide
  Sense strand starting at position 1211 of SEQ ID NO: 588736
ggagaacgaugaucuggua

SEQ ID NO: 885901 - RNA, 19 nt, Artificial Sequence
  Description of Artificial Sequence: Synthetic oligonucleotide
  Antisense strand to SEQ ID NO: 885900
uaccagaucaucguucucc

SEQ ID NO: 885902 - RNA, 19 nt, Artificial Sequence
  Description of Artificial Sequence: Synthetic oligonucleotide
  Sense strand starting at position 1363 of SEQ ID NO: 588736
uggauucuccaguaccaca

SEQ ID NO: 885903 - RNA, 19 nt, Artificial Sequence
  Description of Artificial Sequence: Synthetic oligonucleotide
  Antisense strand to SEQ ID NO: 885902
ugugguacuggagaaucca

SEQ ID NO: 885904 - RNA, 19 nt, Artificial Sequence
  Description of Artificial Sequence: Synthetic oligonucleotide
  Sense strand starting at position 1504 of SEQ ID NO: 588736
ucuuuaucucaaggaagac

SEQ ID NO: 885905 - RNA, 19 nt, Artificial Sequence
  Description of Artificial Sequence: Synthetic oligonucleotide
  Antisense strand to SEQ ID NO: 885904
gucuuccuugagauaaaga

SEQ ID NO: 885906 - RNA, 19 nt, Artificial Sequence
  Description of Artificial Sequence: Synthetic oligonucleotide
  Sense strand starting at position 1672 of SEQ ID NO: 588736
agcuuuaagagccagaguu

SEQ ID NO: 885907 - RNA, 19 nt, Artificial Sequence
  Description of Artificial Sequence: Synthetic oligonucleotide
  Antisense strand to SEQ ID NO: 885906
aacucuggcucuuaaagcu

SEQ ID NO: 885908 - RNA, 19 nt, Artificial Sequence
  Description of Artificial Sequence: Synthetic oligonucleotide
  Sense strand starting at position 1680 of SEQ ID NO: 588736
gagccagaguuccugagau

SEQ ID NO: 885909 - RNA, 19 nt, Artificial Sequence
  Description of Artificial Sequence: Synthetic oligonucleotide
  Antisense strand to SEQ ID NO: 885908
aucucaggaacucuggcuc

SEQ ID NO: 885910 - RNA, 19 nt, Artificial Sequence
  Description of Artificial Sequence: Synthetic oligonucleotide
  Sense strand starting at position 1693 of SEQ ID NO: 588736
ugagauuucuuccaggaga

SEQ ID NO: 885911 - RNA, 19 nt, Artificial Sequence
  Description of Artificial Sequence: Synthetic oligonucleotide
  Antisense strand to SEQ ID NO: 885910
ucuccuggaagaaaucuca

SEQ ID NO: 885912 - RNA, 19 nt, Artificial Sequence
  Description of Artificial Sequence: Synthetic oligonucleotide
  Sense strand starting at position 2103 of SEQ ID NO: 588736
ccgacucugcccuaauaag

SEQ ID NO: 885913 - RNA, 19 nt, Artificial Sequence
  Description of Artificial Sequence: Synthetic oligonucleotide
  Antisense strand to SEQ ID NO: 885912
cuuauuagggcagagucgg

SEQ ID NO: 885914 - RNA, 19 nt, Artificial Sequence
  Description of Artificial Sequence: Synthetic oligonucleotide
  Sense strand starting at position 2556 of SEQ ID NO: 588736
ggaguuacugcugagcuaa

SEQ ID NO: 885915 - RNA, 19 nt, Artificial Sequence
  Description of Artificial Sequence: Synthetic oligonucleotide
  Antisense strand to SEQ ID NO: 885914
uuagcucagcaguaacucc

SEQ ID NO: 885916 - RNA, 19 nt, Artificial Sequence
  Description of Artificial Sequence: Synthetic oligonucleotide
  Sense strand starting at position 2791 of SEQ ID NO: 588736
gcaauagaaccuugcuaag

SEQ ID NO: 885917 - RNA, 19 nt, Artificial Sequence
  Description of Artificial Sequence: Synthetic oligonucleotide
  Antisense strand to SEQ ID NO: 885916
cuuagcaagguucuauugc

SEQ ID NO: 885918 - RNA, 19 nt, Artificial Sequence
  Description of Artificial Sequence: Synthetic oligonucleotide
  Sense strand starting at position 2928 of SEQ ID NO: 588736
gaugauuucuaugcuuguu

SEQ ID NO: 885919 - RNA, 19 nt, Artificial Sequence
  Description of Artificial Sequence: Synthetic oligonucleotide
  Antisense strand to SEQ ID NO: 885918
aacaagcauagaaaucauc

SEQ ID NO: 885920 - RNA, 19 nt, Artificial Sequence
  Description of Artificial Sequence: Synthetic oligonucleotide
  Sense strand starting at position 2930 of SEQ ID NO: 588736
ugauuucuaugcuuguuaa

SEQ ID NO: 885921 - RNA, 19 nt, Artificial Sequence
  Description of Artificial Sequence: Synthetic oligonucleotide
  Antisense strand to SEQ ID NO: 885920
uuaacaagcauagaaauca

SEQ ID NO: 885922 - RNA, 19 nt, Artificial Sequence
  Description of Artificial Sequence: Synthetic oligonucleotide
  Sense strand starting at position 3133 of SEQ ID NO: 588736
agcuguucuacagaaguag

SEQ ID NO: 885923 - RNA, 19 nt, Artificial Sequence
  Description of Artificial Sequence: Synthetic oligonucleotide
  Antisense strand to SEQ ID NO: 885922
cuacuucuguagaacagcu

SEQ ID NO: 885924 - RNA, 19 nt, Artificial Sequence
  Description of Artificial Sequence: Synthetic oligonucleotide
  Sense strand starting at position 3182 of SEQ ID NO: 588736
ucguaaucaccugagacuu

SEQ ID NO: 885925 - RNA, 19 nt, Artificial Sequence
  Description of Artificial Sequence: Synthetic oligonucleotide
  Antisense strand to SEQ ID NO: 885924
aagucucaggugauuacga

SEQ ID NO: 885926 - RNA, 19 nt, Artificial Sequence
  Description of Artificial Sequence: Synthetic oligonucleotide
  Sense strand starting at position 3208 of SEQ ID NO: 588736
uacugauaccagggcuuua

SEQ ID NO: 885927 - RNA, 19 nt, Artificial Sequence
  Description of Artificial Sequence: Synthetic oligonucleotide
  Antisense strand to SEQ ID NO: 885926
uaaagcccugguaucagua

SEQ ID NO: 885928 - RNA, 19 nt, Artificial Sequence
  Description of Artificial Sequence: Synthetic oligonucleotide
  Sense strand starting at position 3285 of SEQ ID NO: 588736
ugacccaagugauucuaau

SEQ ID NO: 885929 - RNA, 19 nt, Artificial Sequence
  Description of Artificial Sequence: Synthetic oligonucleotide
  Antisense strand to SEQ ID NO: 885928
auuagaaucacuuggguca

SEQ ID NO: 885930 - RNA, 19 nt, Artificial Sequence
  Description of Artificial Sequence: Synthetic oligonucleotide
  Sense strand starting at position 3325 of SEQ ID NO: 588736
cugauucucgaugaacuuu

SEQ ID NO: 885931 - RNA, 19 nt, Artificial Sequence
  Description of Artificial Sequence: Synthetic oligonucleotide
  Antisense strand to SEQ ID NO: 885930
aaaguucaucgagaaucag

SEQ ID NO: 885932 - RNA, 19 nt, Artificial Sequence
  Description of Artificial Sequence: Synthetic oligonucleotide
  Sense strand starting at position 3348 of SEQ ID NO: 588736
guaucuaaaucacuuagag

SEQ ID NO: 885933 - RNA, 19 nt, Artificial Sequence
  Description of Artificial Sequence: Synthetic oligonucleotide
  Antisense strand to SEQ ID NO: 885932
cucuaagugauuuagauac

SEQ ID NO: 885934 - RNA, 19 nt, Artificial Sequence
  Description of Artificial Sequence: Synthetic oligonucleotide
  Sense strand starting at position 3439 of SEQ ID NO: 588736
ugagaauguccauguauac

SEQ ID NO: 885935 - RNA, 19 nt, Artificial Sequence
  Description of Artificial Sequence: Synthetic oligonucleotide
  Antisense strand to SEQ ID NO: 885934
guauacauggacauucuca

SEQ ID NO: 885936 - RNA, 19 nt, Artificial Sequence
  Description of Artificial Sequence: Synthetic oligonucleotide
  Sense strand starting at position 3523 of SEQ ID NO: 588736
guucucuuucuccagaaag

SEQ ID NO: 885937 - RNA, 19 nt, Artificial Sequence
  Description of Artificial Sequence: Synthetic oligonucleotide
  Antisense strand to SEQ ID NO: 885936
cuuucuggagaaagagaac

SEQ ID NO: 885938 - RNA, 19 nt, Artificial Sequence
  Description of Artificial Sequence: Synthetic oligonucleotide
  Sense strand starting at position 3672 of SEQ ID NO: 588736
cugugagcucuguaaagac

SEQ ID NO: 885939 - RNA, 19 nt, Artificial Sequence
  Description of Artificial Sequence: Synthetic oligonucleotide
  Antisense strand to SEQ ID NO: 885938
gucuuuacagagcucacag

SEQ ID NO: 885940 - RNA, 19 nt, Artificial Sequence
  Description of Artificial Sequence: Synthetic oligonucleotide
  Sense strand starting at position 3967 of SEQ ID NO: 588736
aauauuaagcuccagguga

SEQ ID NO: 885941 - RNA, 19 nt, Artificial Sequence
  Description of Artificial Sequence: Synthetic oligonucleotide
  Antisense strand to SEQ ID NO: 885940
ucaccuggagcuuaauauu

SEQ ID NO: 885942 - RNA, 19 nt, Artificial Sequence
  Description of Artificial Sequence: Synthetic oligonucleotide
  Sense strand starting at position 141 of SEQ ID NO: 588737
guguaugucacagguaauu

SEQ ID NO: 885943 - RNA, 19 nt, Artificial Sequence
  Description of Artificial Sequence: Synthetic oligonucleotide
  Antisense strand to SEQ ID NO: 885942
aauuaccugugacauacac

SEQ ID NO: 885944 - RNA, 19 nt, Artificial Sequence
  Description of Artificial Sequence: Synthetic oligonucleotide
  Sense strand starting at position 143 of SEQ ID NO: 588737
guaugucacagguaauuag

SEQ ID NO: 885945 - RNA, 19 nt, Artificial Sequence
  Description of Artificial Sequence: Synthetic oligonucleotide
  Antisense strand to SEQ ID NO: 885944
cuaauuaccugugacauac

SEQ ID NO: 885946 - RNA, 19 nt, Artificial Sequence
  Description of Artificial Sequence: Synthetic oligonucleotide
  Sense strand starting at position 152 of SEQ ID NO: 588737
agguaauuaggcuacacau

SEQ ID NO: 885947 - RNA, 19 nt, Artificial Sequence
  Description of Artificial Sequence: Synthetic oligonucleotide
  Antisense strand to SEQ ID NO: 885946
auguguagccuaauuaccu

SEQ ID NO: 885948 - RNA, 19 nt, Artificial Sequence
  Description of Artificial Sequence: Synthetic oligonucleotide
  Sense strand starting at position 154 of SEQ ID NO: 588737
guaauuaggcuacacauca

SEQ ID NO: 885949 - RNA, 19 nt, Artificial Sequence
  Description of Artificial Sequence: Synthetic oligonucleotide
  Antisense strand to SEQ ID NO: 885948
ugauguguagccuaauuac

SEQ ID NO: 885950 - RNA, 19 nt, Artificial Sequence
  Description of Artificial Sequence: Synthetic oligonucleotide
  Sense strand starting at position 194 of SEQ ID NO: 588737
guuacaauugaauguguau

SEQ ID NO: 885951 - RNA, 19 nt, Artificial Sequence
  Description of Artificial Sequence: Synthetic oligonucleotide
  Antisense strand to SEQ ID NO: 885950
auacacauucaauuguaac

SEQ ID NO: 885952 - RNA, 19 nt, Artificial Sequence
  Description of Artificial Sequence: Synthetic oligonucleotide
  Sense strand starting at position 203 of SEQ ID NO: 588737
gaauguguauacuuuguca

SEQ ID NO: 885953 - RNA, 19 nt, Artificial Sequence
  Description of Artificial Sequence: Synthetic oligonucleotide
  Antisense strand to SEQ ID NO: 885952
ugacaaaguauacacauuc

SEQ ID NO: 885954 - RNA, 19 nt, Artificial Sequence
  Description of Artificial Sequence: Synthetic oligonucleotide
  Sense strand starting at position 205 of SEQ ID NO: 588737
auguguauacuuugucauu

SEQ ID NO: 885955 - RNA, 19 nt, Artificial Sequence
  Description of Artificial Sequence: Synthetic oligonucleotide
  Antisense strand to SEQ ID NO: 885954
aaugacaaaguauacacau

SEQ ID NO: 885956 - RNA, 19 nt, Artificial Sequence
  Description of Artificial Sequence: Synthetic oligonucleotide
  Sense strand starting at position 206 of SEQ ID NO: 588737
uguguauacuuugucauuu

SEQ ID NO: 885957 - RNA, 19 nt, Artificial Sequence
  Description of Artificial Sequence: Synthetic oligonucleotide
  Antisense strand to SEQ ID NO: 885956
aaaugacaaaguauacaca

SEQ ID NO: 885958 - RNA, 19 nt, Artificial Sequence
  Description of Artificial Sequence: Synthetic oligonucleotide
  Sense strand starting at position 461 of SEQ ID NO: 588737
cgaaauacauagggaacaa

SEQ ID NO: 885959 - RNA, 19 nt, Artificial Sequence
  Description of Artificial Sequence: Synthetic oligonucleotide
  Antisense strand to SEQ ID NO: 885958
uuguucccuauguauuucg

SEQ ID NO: 885960 - RNA, 19 nt, Artificial Sequence
  Description of Artificial Sequence: Synthetic oligonucleotide
  Sense strand starting at position 659 of SEQ ID NO: 588737
auuggauucucuguucuua

SEQ ID NO: 885961 - RNA, 19 nt, Artificial Sequence
  Description of Artificial Sequence: Synthetic oligonucleotide
  Antisense strand to SEQ ID NO: 885960
uaagaacagagaauccaau

SEQ ID NO: 885962 - RNA, 19 nt, Artificial Sequence
  Description of Artificial Sequence: Synthetic oligonucleotide
  Sense strand starting at position 781 of SEQ ID NO: 588737
cagcucuauccugguuaga

SEQ ID NO: 885963 - RNA, 19 nt, Artificial Sequence
  Description of Artificial Sequence: Synthetic oligonucleotide
  Antisense strand to SEQ ID NO: 885962
ucuaaccaggauagagcug

SEQ ID NO: 885964 - RNA, 19 nt, Artificial Sequence
  Description of Artificial Sequence: Synthetic oligonucleotide
  Sense strand starting at position 783 of SEQ ID NO: 588737
gcucuauccugguuagaaa

SEQ ID NO: 885965 - RNA, 19 nt, Artificial Sequence
  Description of Artificial Sequence: Synthetic oligonucleotide
  Antisense strand to SEQ ID NO: 885964
uuucuaaccaggauagagc

SEQ ID NO: 885966 - RNA, 19 nt, Artificial Sequence
  Description of Artificial Sequence: Synthetic oligonucleotide
  Sense strand starting at position 1000 of SEQ ID NO: 588737
cgguuuacuccagaacgaa

SEQ ID NO: 885967 - RNA, 19 nt, Artificial Sequence
  Description of Artificial Sequence: Synthetic oligonucleotide
  Antisense strand to SEQ ID NO: 885966
uucguucuggaguaaaccg

SEQ ID NO: 885968 - RNA, 19 nt, Artificial Sequence
  Description of Artificial Sequence: Synthetic oligonucleotide
  Sense strand starting at position 1063 of SEQ ID NO: 588737
agaauacucgaacgccuuu

SEQ ID NO: 885969 - RNA, 19 nt, Artificial Sequence
  Description of Artificial Sequence: Synthetic oligonucleotide
  Antisense strand to SEQ ID NO: 885968
aaaggcguucgaguauucu

SEQ ID NO: 885970 - RNA, 19 nt, Artificial Sequence
  Description of Artificial Sequence: Synthetic oligonucleotide
  Sense strand starting at position 1211 of SEQ ID NO: 588737
uuccuaagugcuggcuaaa

SEQ ID NO: 885971 - RNA, 19 nt, Artificial Sequence
  Description of Artificial Sequence: Synthetic oligonucleotide
  Antisense strand to SEQ ID NO: 885970
uuuagccagcacuuaggaa

SEQ ID NO: 885972 - RNA, 19 nt, Artificial Sequence
  Description of Artificial Sequence: Synthetic oligonucleotide
  Sense strand starting at position 1214 of SEQ ID NO: 588737
cuaagugcuggcuaaagca

SEQ ID NO: 885973 - RNA, 19 nt, Artificial Sequence
  Description of Artificial Sequence: Synthetic oligonucleotide
  Antisense strand to SEQ ID NO: 885972
ugcuuuagccagcacuuag

SEQ ID NO: 885974 - RNA, 19 nt, Artificial Sequence
  Description of Artificial Sequence: Synthetic oligonucleotide
  Sense strand starting at position 2069 of SEQ ID NO: 588737
gcuucugagccgagucgaa

SEQ ID NO: 885975 - RNA, 19 nt, Artificial Sequence
  Description of Artificial Sequence: Synthetic oligonucleotide
  Antisense strand to SEQ ID NO: 885974
uucgacucggcucagaagc

SEQ ID NO: 885976 - RNA, 19 nt, Artificial Sequence
  Description of Artificial Sequence: Synthetic oligonucleotide
  Sense strand starting at position 2321 of SEQ ID NO: 588737
gcaguugccgagcagauuu

SEQ ID NO: 885977 - RNA, 19 nt, Artificial Sequence
  Description of Artificial Sequence: Synthetic oligonucleotide
  Antisense strand to SEQ ID NO: 885976
aaaucugcucggcaacugc

SEQ ID NO: 885978 - RNA, 19 nt, Artificial Sequence
  Description of Artificial Sequence: Synthetic oligonucleotide
  Sense strand starting at position 2386 of SEQ ID NO: 588737
cugugauguauuuguucca

SEQ ID NO: 885979 - RNA, 19 nt, Artificial Sequence
  Description of Artificial Sequence: Synthetic oligonucleotide
  Antisense strand to SEQ ID NO: 885978
uggaacaaauacaucacag

SEQ ID NO: 885980 - RNA, 19 nt, Artificial Sequence
  Description of Artificial Sequence: Synthetic oligonucleotide
  Sense strand starting at position 2528 of SEQ ID NO: 588737
uggauacgguucuuuguau

SEQ ID NO: 885981 - RNA, 19 nt, Artificial Sequence
  Description of Artificial Sequence: Synthetic oligonucleotide
  Antisense strand to SEQ ID NO: 885980
auacaaagaaccguaucca

SEQ ID NO: 885982 - RNA, 19 nt, Artificial Sequence
  Description of Artificial Sequence: Synthetic oligonucleotide
  Sense strand starting at position 2529 of SEQ ID NO: 588737
ggauacgguucuuuguauu

SEQ ID NO: 885983 - RNA, 19 nt, Artificial Sequence
  Description of Artificial Sequence: Synthetic oligonucleotide
  Antisense strand to SEQ ID NO: 885982
aauacaaagaaccguaucc

SEQ ID NO: 885984 - RNA, 19 nt, Artificial Sequence
  Description of Artificial Sequence: Synthetic oligonucleotide
  Sense strand starting at position 2561 of SEQ ID NO: 588737
ugaguuccugcaggauuaa

SEQ ID NO: 885985 - RNA, 19 nt, Artificial Sequence
  Description of Artificial Sequence: Synthetic oligonucleotide
  Antisense strand to SEQ ID NO: 885984
uuaauccugcaggaacuca

SEQ ID NO: 885986 - RNA, 19 nt, Artificial Sequence
  Description of Artificial Sequence: Synthetic oligonucleotide
  Sense strand starting at position 2562 of SEQ ID NO: 588737
gaguuccugcaggauuaaa

SEQ ID NO: 885987 - RNA, 19 nt, Artificial Sequence
  Description of Artificial Sequence: Synthetic oligonucleotide
  Antisense strand to SEQ ID NO: 885986
uuuaauccugcaggaacuc

SEQ ID NO: 885988 - RNA, 19 nt, Artificial Sequence
  Description of Artificial Sequence: Synthetic oligonucleotide
  Sense strand starting at position 2639 of SEQ ID NO: 588737
ccaggcaaguccuuuaaag

SEQ ID NO: 885989 - RNA, 19 nt, Artificial Sequence
  Description of Artificial Sequence: Synthetic oligonucleotide
  Antisense strand to SEQ ID NO: 885988
cuuuaaaggacuugccugg

SEQ ID NO: 885990 - RNA, 19 nt, Artificial Sequence
  Description of Artificial Sequence: Synthetic oligonucleotide
  Sense strand starting at position 2641 of SEQ ID NO: 588737
aggcaaguccuuuaaaguc

SEQ ID NO: 885991 - RNA, 19 nt, Artificial Sequence
  Description of Artificial Sequence: Synthetic oligonucleotide
  Antisense strand to SEQ ID NO: 885990
gacuuuaaaggacuugccu

SEQ ID NO: 885992 - RNA, 19 nt, Artificial Sequence
  Description of Artificial Sequence: Synthetic oligonucleotide
  Sense strand starting at position 2760 of SEQ ID NO: 588737
aggagauauuaacaagaac

SEQ ID NO: 885993 - RNA, 19 nt, Artificial Sequence
  Description of Artificial Sequence: Synthetic oligonucleotide
  Antisense strand to SEQ ID NO: 885992
guucuuguuaauaucuccu

SEQ ID NO: 885994 - RNA, 19 nt, Artificial Sequence
  Description of Artificial Sequence: Synthetic oligonucleotide
  Sense strand starting at position 2845 of SEQ ID NO: 588737
gccagagcugcucaaacuu

SEQ ID NO: 885995 - RNA, 19 nt, Artificial Sequence
  Description of Artificial Sequence: Synthetic oligonucleotide
  Antisense strand to SEQ ID NO: 885994
aaguuugagcagcucuggc

SEQ ID NO: 885996 - RNA, 19 nt, Artificial Sequence
  Description of Artificial Sequence: Synthetic oligonucleotide
  Sense strand starting at position 2868 of SEQ ID NO: 588737
acagaaguguccuucucaa

SEQ ID NO: 885997 - RNA, 19 nt, Artificial Sequence
  Description of Artificial Sequence: Synthetic oligonucleotide
  Antisense strand to SEQ ID NO: 885996
uugagaaggacacuucugu

SEQ ID NO: 885998 - RNA, 19 nt, Artificial Sequence
  Description of Artificial Sequence: Synthetic oligonucleotide
  Sense strand starting at position 3067 of SEQ ID NO: 588737
auugaugcgccaggaauau

SEQ ID NO: 885999 - RNA, 19 nt, Artificial Sequence
  Description of Artificial Sequence: Synthetic oligonucleotide
  Antisense strand to SEQ ID NO: 885998
auauuccuggcgcaucaau

SEQ ID NO: 886000 - RNA, 19 nt, Artificial Sequence
  Description of Artificial Sequence: Synthetic oligonucleotide
  Sense strand starting at position 3111 of SEQ ID NO: 588737
gaaggcuuguaacuggaca

SEQ ID NO: 886001 - RNA, 19 nt, Artificial Sequence
  Description of Artificial Sequence: Synthetic oligonucleotide
  Antisense strand to SEQ ID NO: 886000
uguccaguuacaagccuuc

SEQ ID NO: 886002 - RNA, 19 nt, Artificial Sequence
  Description of Artificial Sequence: Synthetic oligonucleotide
  Sense strand starting at position 3158 of SEQ ID NO: 588737
augagaaugugggcgguau

SEQ ID NO: 886003 - RNA, 19 nt, Artificial Sequence
  Description of Artificial Sequence: Synthetic oligonucleotide
  Antisense strand to SEQ ID NO: 886002
auaccgcccacauucucau

SEQ ID NO: 886004 - RNA, 19 nt, Artificial Sequence
  Description of Artificial Sequence: Synthetic oligonucleotide
  Sense strand starting at position 3196 of SEQ ID NO: 588737
cugcucuggaucugggaau

SEQ ID NO: 886005 - RNA, 19 nt, Artificial Sequence
  Description of Artificial Sequence: Synthetic oligonucleotide
  Antisense strand to SEQ ID NO: 886004
auucccagauccagagcag

SEQ ID NO: 886006 - RNA, 19 nt, Artificial Sequence
  Description of Artificial Sequence: Synthetic oligonucleotide
  Sense strand starting at position 3322 of SEQ ID NO: 588737
gaaacucaggcaugcaaga

SEQ ID NO: 886007 - RNA, 19 nt, Artificial Sequence
  Description of Artificial Sequence: Synthetic oligonucleotide
  Antisense strand to SEQ ID NO: 886006
ucuugcaugccugaguuuc

SEQ ID NO: 886008 - RNA, 19 nt, Artificial Sequence
  Description of Artificial Sequence: Synthetic oligonucleotide
  Sense strand starting at position 3407 of SEQ ID NO: 588737
gcuuaucuacuggagacua

SEQ ID NO: 886009 - RNA, 19 nt, Artificial Sequence
  Description of Artificial Sequence: Synthetic oligonucleotide
  Antisense strand to SEQ ID NO: 886008
uagucuccaguagauaagc

SEQ ID NO: 886010 - RNA, 19 nt, Artificial Sequence
  Description of Artificial Sequence: Synthetic oligonucleotide
  Sense strand starting at position 3449 of SEQ ID NO: 588737
uggaguuaguuccuaacac

SEQ ID NO: 886011 - RNA, 19 nt, Artificial Sequence
  Description of Artificial Sequence: Synthetic oligonucleotide
  Antisense strand to SEQ ID NO: 886010
guguuaggaacuaacucca

SEQ ID NO: 886012 - RNA, 19 nt, Artificial Sequence
  Description of Artificial Sequence: Synthetic oligonucleotide
  Sense strand starting at position 3539 of SEQ ID NO: 588737
aaagauauggcugaguugu

SEQ ID NO: 886013 - RNA, 19 nt, Artificial Sequence
  Description of Artificial Sequence: Synthetic oligonucleotide
  Antisense strand to SEQ ID NO: 886012
acaacucagccauaucuuu

SEQ ID NO: 886014 - RNA, 19 nt, Artificial Sequence
  Description of Artificial Sequence: Synthetic oligonucleotide
  Sense strand starting at position 3541 of SEQ ID NO: 588737
agauauggcugaguuguuu

SEQ ID NO: 886015 - RNA, 19 nt, Artificial Sequence
  Description of Artificial Sequence: Synthetic oligonucleotide
  Antisense strand to SEQ ID NO: 886014
aaacaacucagccauaucu

SEQ ID NO: 886016 - RNA, 19 nt, Artificial Sequence
  Description of Artificial Sequence: Synthetic oligonucleotide
  Sense strand starting at position 3552 of SEQ ID NO: 588737
aguuguuuccacugcccaa

SEQ ID NO: 886017 - RNA, 19 nt, Artificial Sequence
  Description of Artificial Sequence: Synthetic oligonucleotide
  Antisense strand to SEQ ID NO: 886016
uugggcaguggaaacaacu

SEQ ID NO: 886018 - RNA, 19 nt, Artificial Sequence
  Description of Artificial Sequence: Synthetic oligonucleotide
  Sense strand starting at position 3659 of SEQ ID NO: 588737
auugucucaucugcuaaga

SEQ ID NO: 886019 - RNA, 19 nt, Artificial Sequence
  Description of Artificial Sequence: Synthetic oligonucleotide
  Antisense strand to SEQ ID NO: 886018
ucuuagcagaugagacaau

SEQ ID NO: 886020 - RNA, 19 nt, Artificial Sequence
  Description of Artificial Sequence: Synthetic oligonucleotide
  Sense strand starting at position 3709 of SEQ ID NO: 588737
ugcaguuuccaagauggua

SEQ ID NO: 886021 - RNA, 19 nt, Artificial Sequence
  Description of Artificial Sequence: Synthetic oligonucleotide
  Antisense strand to SEQ ID NO: 886020
uaccaucuuggaaacugca

SEQ ID NO: 886022 - RNA, 19 nt, Artificial Sequence
  Description of Artificial Sequence: Synthetic oligonucleotide
  Sense strand starting at position 73 of SEQ ID NO: 588738
acaggacuccguuaucuaa

SEQ ID NO: 886023 - RNA, 19 nt, Artificial Sequence
  Description of Artificial Sequence: Synthetic oligonucleotide
  Antisense strand to SEQ ID NO: 886022
uuagauaacggaguccugu

SEQ ID NO: 886024 - RNA, 19 nt, Artificial Sequence
  Description of Artificial Sequence: Synthetic oligonucleotide
  Sense strand starting at position 75 of SEQ ID NO: 588738
aggacuccguuaucuaaug

SEQ ID NO: 886025 - RNA, 19 nt, Artificial Sequence
  Description of Artificial Sequence: Synthetic oligonucleotide
  Antisense strand to SEQ ID NO: 886024
cauuagauaacggaguccu

SEQ ID NO: 886026 - RNA, 19 nt, Artificial Sequence
  Description of Artificial Sequence: Synthetic oligonucleotide
  Sense strand starting at position 171 of SEQ ID NO: 588738
gacaguaaauuagucgaaa

SEQ ID NO: 886027 - RNA, 19 nt, Artificial Sequence
  Description of Artificial Sequence: Synthetic oligonucleotide
  Antisense strand to SEQ ID NO: 886026
uuucgacuaauuuacuguc

SEQ ID NO: 886028 - RNA, 19 nt, Artificial Sequence
  Description of Artificial Sequence: Synthetic oligonucleotide
  Sense strand starting at position 290 of SEQ ID NO: 588738
ccuaucuaucucuguuuga

SEQ ID NO: 886029 - RNA, 19 nt, Artificial Sequence
  Description of Artificial Sequence: Synthetic oligonucleotide
  Antisense strand to SEQ ID NO: 886028
ucaaacagagauagauagg

SEQ ID NO: 886030 - RNA, 19 nt, Artificial Sequence
  Description of Artificial Sequence: Synthetic oligonucleotide
  Sense strand starting at position 293 of SEQ ID NO: 588738
aucuaucucuguuugagag

SEQ ID NO: 886031 - RNA, 19 nt, Artificial Sequence
  Description of Artificial Sequence: Synthetic oligonucleotide
  Antisense strand to SEQ ID NO: 886030
cucucaaacagagauagau

SEQ ID NO: 886032 - RNA, 19 nt, Artificial Sequence
  Description of Artificial Sequence: Synthetic oligonucleotide
  Sense strand starting at position 356 of SEQ ID NO: 588738
gagcguagaucuuuaaaca

SEQ ID NO: 886033 - RNA, 19 nt, Artificial Sequence
  Description of Artificial Sequence: Synthetic oligonucleotide
  Antisense strand to SEQ ID NO: 886032
uguuuaaagaucuacgcuc

SEQ ID NO: 886034 - RNA, 19 nt, Artificial Sequence
  Description of Artificial Sequence: Synthetic oligonucleotide
  Sense strand starting at position 357 of SEQ ID NO: 588738
agcguagaucuuuaaacag

SEQ ID NO: 886035 - RNA, 19 nt, Artificial Sequence
  Description of Artificial Sequence: Synthetic oligonucleotide
  Antisense strand to SEQ ID NO: 886034
cuguuuaaagaucuacgcu

SEQ ID NO: 886036 - RNA, 19 nt, Artificial Sequence
  Description of Artificial Sequence: Synthetic oligonucleotide
  Sense strand starting at position 374 of SEQ ID NO: 588738
agucucaauuccucaaugu

SEQ ID NO: 886037 - RNA, 19 nt, Artificial Sequence
  Description of Artificial Sequence: Synthetic oligonucleotide
  Antisense strand to SEQ ID NO: 886036
acauugaggaauugagacu

SEQ ID NO: 886038 - RNA, 19 nt, Artificial Sequence
  Description of Artificial Sequence: Synthetic oligonucleotide
  Sense strand starting at position 375 of SEQ ID NO: 588738
gucucaauuccucaauguc

SEQ ID NO: 886039 - RNA, 19 nt, Artificial Sequence
  Description of Artificial Sequence: Synthetic oligonucleotide
  Antisense strand to SEQ ID NO: 886038
gacauugaggaauugagac

SEQ ID NO: 886040 - RNA, 19 nt, Artificial Sequence
  Description of Artificial Sequence: Synthetic oligonucleotide
  Sense strand starting at position 444 of SEQ ID NO: 588738
ugaggaaucugguccacac

SEQ ID NO: 886041 - RNA, 19 nt, Artificial Sequence
  Description of Artificial Sequence: Synthetic oligonucleotide
  Antisense strand to SEQ ID NO: 886040
guguggaccagauuccuca

SEQ ID NO: 886042 - RNA, 19 nt, Artificial Sequence
  Description of Artificial Sequence: Synthetic oligonucleotide
  Sense strand starting at position 717 of SEQ ID NO: 588738
guguguaaucugcacaaau

SEQ ID NO: 886043 - RNA, 19 nt, Artificial Sequence
  Description of Artificial Sequence: Synthetic oligonucleotide
  Antisense strand to SEQ ID NO: 886042
auuugugcagauuacacac

SEQ ID NO: 886044 - RNA, 19 nt, Artificial Sequence
  Description of Artificial Sequence: Synthetic oligonucleotide
  Sense strand starting at position 719 of SEQ ID NO: 588738
guguaaucugcacaaauuc

SEQ ID NO: 886045 - RNA, 19 nt, Artificial Sequence
  Description of Artificial Sequence: Synthetic oligonucleotide
  Antisense strand to SEQ ID NO: 886044
gaauuugugcagauuacac

SEQ ID NO: 886046 - RNA, 19 nt, Artificial Sequence
  Description of Artificial Sequence: Synthetic oligonucleotide
  Sense strand starting at position 854 of SEQ ID NO: 588738
uuaaauauuuccuaggaag

SEQ ID NO: 886047 - RNA, 19 nt, Artificial Sequence
  Description of Artificial Sequence: Synthetic oligonucleotide
  Antisense strand to SEQ ID NO: 886046
cuuccuaggaaauauuuaa

SEQ ID NO: 886048 - RNA, 19 nt, Artificial Sequence
  Description of Artificial Sequence: Synthetic oligonucleotide
  Sense strand starting at position 904 of SEQ ID NO: 588738
gggaaauacacagguaugu

SEQ ID NO: 886049 - RNA, 19 nt, Artificial Sequence
  Description of Artificial Sequence: Synthetic oligonucleotide
  Antisense strand to SEQ ID NO: 886048
acauaccuguguauuuccc

SEQ ID NO: 886050 - RNA, 19 nt, Artificial Sequence
  Description of Artificial Sequence: Synthetic oligonucleotide
  Sense strand starting at position 939 of SEQ ID NO: 588738
ucauaauuacacgggagau

SEQ ID NO: 886051 - RNA, 19 nt, Artificial Sequence
  Description of Artificial Sequence: Synthetic oligonucleotide
  Antisense strand to SEQ ID NO: 886050
aucucccguguaauuauga

SEQ ID NO: 886052 - RNA, 19 nt, Artificial Sequence
  Description of Artificial Sequence: Synthetic oligonucleotide
  Sense strand starting at position 1150 of SEQ ID NO: 588738
agaugaggucuccagguuu

SEQ ID NO: 886053 - RNA, 19 nt, Artificial Sequence
  Description of Artificial Sequence: Synthetic oligonucleotide
  Antisense strand to SEQ ID NO: 886052
aaaccuggagaccucaucu

SEQ ID NO: 886054 - RNA, 19 nt, Artificial Sequence
  Description of Artificial Sequence: Synthetic oligonucleotide
  Sense strand starting at position 1156 of SEQ ID NO: 588738
ggucuccagguuugaaauc

SEQ ID NO: 886055 - RNA, 19 nt, Artificial Sequence
  Description of Artificial Sequence: Synthetic oligonucleotide
  Antisense strand to SEQ ID NO: 886054
gauuucaaaccuggagacc

SEQ ID NO: 886056 - RNA, 19 nt, Artificial Sequence
  Description of Artificial Sequence: Synthetic oligonucleotide
  Sense strand starting at position 1631 of SEQ ID NO: 588738
cagggauuccgagaagcga

SEQ ID NO: 886057 - RNA, 19 nt, Artificial Sequence
  Description of Artificial Sequence: Synthetic oligonucleotide
  Antisense strand to SEQ ID NO: 886056
ucgcuucucggaaucccug

SEQ ID NO: 886058 - RNA, 19 nt, Artificial Sequence
  Description of Artificial Sequence: Synthetic oligonucleotide
  Sense strand starting at position 2253 of SEQ ID NO: 588738
guguauuuguauguguacu

SEQ ID NO: 886059 - RNA, 19 nt, Artificial Sequence
  Description of Artificial Sequence: Synthetic oligonucleotide
  Antisense strand to SEQ ID NO: 886058
aguacacauacaaauacac

SEQ ID NO: 886060 - RNA, 19 nt, Artificial Sequence
  Description of Artificial Sequence: Synthetic oligonucleotide
  Sense strand starting at position 2255 of SEQ ID NO: 588738
guauuuguauguguacugu

SEQ ID NO: 886061 - RNA, 19 nt, Artificial Sequence
  Description of Artificial Sequence: Synthetic oligonucleotide
  Antisense strand to SEQ ID NO: 886060
acaguacacauacaaauac

SEQ ID NO: 886062 - RNA, 19 nt, Artificial Sequence
  Description of Artificial Sequence: Synthetic oligonucleotide
  Sense strand starting at position 2293 of SEQ ID NO: 588738
aggaaaugauuguugugga

SEQ ID NO: 886063 - RNA, 19 nt, Artificial Sequence
  Description of Artificial Sequence: Synthetic oligonucleotide
  Antisense strand to SEQ ID NO: 886062
uccacaacaaucauuuccu

SEQ ID NO: 886064 - RNA, 19 nt, Artificial Sequence
  Description of Artificial Sequence: Synthetic oligonucleotide
  Sense strand starting at position 2702 of SEQ ID NO: 588738
uuagauaggaugugaguuu

SEQ ID NO: 886065 - RNA, 19 nt, Artificial Sequence
  Description of Artificial Sequence: Synthetic oligonucleotide
  Antisense strand to SEQ ID NO: 886064
aaacucacauccuaucuaa

SEQ ID NO: 886066 - RNA, 19 nt, Artificial Sequence
  Description of Artificial Sequence: Synthetic oligonucleotide
  Sense strand starting at position 2715 of SEQ ID NO: 588738
gaguuugggcccuaacuaa

SEQ ID NO: 886067 - RNA, 19 nt, Artificial Sequence
  Description of Artificial Sequence: Synthetic oligonucleotide
  Antisense strand to SEQ ID NO: 886066
uuaguuagggcccaaacuc

SEQ ID NO: 886068 - RNA, 19 nt, Artificial Sequence
  Description of Artificial Sequence: Synthetic oligonucleotide
  Sense strand starting at position 3116 of SEQ ID NO: 588738
cuaaguauaccugggcaau

SEQ ID NO: 886069 - RNA, 19 nt, Artificial Sequence
  Description of Artificial Sequence: Synthetic oligonucleotide
  Antisense strand to SEQ ID NO: 886068
auugcccagguauacuuag

SEQ ID NO: 886070 - RNA, 19 nt, Artificial Sequence
  Description of Artificial Sequence: Synthetic oligonucleotide
  Sense strand starting at position 3117 of SEQ ID NO: 588738
uaaguauaccugggcaaua

SEQ ID NO: 886071 - RNA, 19 nt, Artificial Sequence
  Description of Artificial Sequence: Synthetic oligonucleotide
  Antisense strand to SEQ ID NO: 886070
uauugcccagguauacuua

SEQ ID NO: 886072 - RNA, 19 nt, Artificial Sequence
  Description of Artificial Sequence: Synthetic oligonucleotide
  Sense strand starting at position 3118 of SEQ ID NO: 588738
aaguauaccugggcaauau

SEQ ID NO: 886073 - RNA, 19 nt, Artificial Sequence
  Description of Artificial Sequence: Synthetic oligonucleotide
  Antisense strand to SEQ ID NO: 886072
auauugcccagguauacuu

SEQ ID NO: 886074 - RNA, 19 nt, Artificial Sequence
  Description of Artificial Sequence: Synthetic oligonucleotide
  Sense strand starting at position 3128 of SEQ ID NO: 588738
gggcaauaugcagagaguu

SEQ ID NO: 886075 - RNA, 19 nt, Artificial Sequence
  Description of Artificial Sequence: Synthetic oligonucleotide
  Antisense strand to SEQ ID NO: 886074
aacucucugcauauugccc

SEQ ID NO: 886076 - RNA, 19 nt, Artificial Sequence
  Description of Artificial Sequence: Synthetic oligonucleotide
  Sense strand starting at position 3140 of SEQ ID NO: 588738
gagaguuccaaguggagca

SEQ ID NO: 886077 - RNA, 19 nt, Artificial Sequence
  Description of Artificial Sequence: Synthetic oligonucleotide
  Antisense strand to SEQ ID NO: 886076
ugcuccacuuggaacucuc

SEQ ID NO: 886078 - RNA, 19 nt, Artificial Sequence
  Description of Artificial Sequence: Synthetic oligonucleotide
  Sense strand starting at position 3183 of SEQ ID NO: 588738
ggaaggguuggugaaaugu

SEQ ID NO: 886079 - RNA, 19 nt, Artificial Sequence
  Description of Artificial Sequence: Synthetic oligonucleotide
  Antisense strand to SEQ ID NO: 886078
acauuucaccaacccuucc

SEQ ID NO: 886080 - RNA, 19 nt, Artificial Sequence
  Description of Artificial Sequence: Synthetic oligonucleotide
  Sense strand starting at position 3193 of SEQ ID NO: 588738
gugaaaugucuugaagcuu

SEQ ID NO: 886081 - RNA, 19 nt, Artificial Sequence
  Description of Artificial Sequence: Synthetic oligonucleotide
  Antisense strand to SEQ ID NO: 886080
aagcuucaagacauuucac

SEQ ID NO: 886082 - RNA, 19 nt, Artificial Sequence
  Description of Artificial Sequence: Synthetic oligonucleotide
  Sense strand starting at position 3204 of SEQ ID NO: 588738
ugaagcuucucauucugaa

SEQ ID NO: 886083 - RNA, 19 nt, Artificial Sequence
  Description of Artificial Sequence: Synthetic oligonucleotide
  Antisense strand to SEQ ID NO: 886082
uucagaaugagaagcuuca

SEQ ID NO: 886084 - RNA, 19 nt, Artificial Sequence
  Description of Artificial Sequence: Synthetic oligonucleotide
  Sense strand starting at position 3225 of SEQ ID NO: 588738
ugaauuuaauguguguagu

SEQ ID NO: 886085 - RNA, 19 nt, Artificial Sequence
  Description of Artificial Sequence: Synthetic oligonucleotide
  Antisense strand to SEQ ID NO: 886084
acuacacacauuaaauuca

SEQ ID NO: 886086 - RNA, 19 nt, Artificial Sequence
  Description of Artificial Sequence: Synthetic oligonucleotide
  Sense strand starting at position 3239 of SEQ ID NO: 588738
guaguaggaagcuacuaua

SEQ ID NO: 886087 - RNA, 19 nt, Artificial Sequence
  Description of Artificial Sequence: Synthetic oligonucleotide
  Antisense strand to SEQ ID NO: 886086
uauaguagcuuccuacuac

SEQ ID NO: 886088 - RNA, 19 nt, Artificial Sequence
  Description of Artificial Sequence: Synthetic oligonucleotide
  Sense strand starting at position 3255 of SEQ ID NO: 588738
auagguugcucagcaagaa

SEQ ID NO: 886089 - RNA, 19 nt, Artificial Sequence
  Description of Artificial Sequence: Synthetic oligonucleotide
  Antisense strand to SEQ ID NO: 886088
uucuugcugagcaaccuau

SEQ ID NO: 886090 - RNA, 19 nt, Artificial Sequence
  Description of Artificial Sequence: Synthetic oligonucleotide
  Sense strand starting at position 3341 of SEQ ID NO: 588738
ggguaacuggaguacucau

SEQ ID NO: 886091 - RNA, 19 nt, Artificial Sequence
  Description of Artificial Sequence: Synthetic oligonucleotide
  Antisense strand to SEQ ID NO: 886090
augaguacuccaguuaccc

SEQ ID NO: 886092 - RNA, 19 nt, Artificial Sequence
  Description of Artificial Sequence: Synthetic oligonucleotide
  Sense strand starting at position 3367 of SEQ ID NO: 588738
cgcauuucucagugagaau

SEQ ID NO: 886093 - RNA, 19 nt, Artificial Sequence
  Description of Artificial Sequence: Synthetic oligonucleotide
  Antisense strand to SEQ ID NO: 886092
auucucacugagaaaugcg

SEQ ID NO: 886094 - RNA, 19 nt, Artificial Sequence
  Description of Artificial Sequence: Synthetic oligonucleotide
  Sense strand starting at position 3444 of SEQ ID NO: 588738
ucagguguuggcuauaaau

SEQ ID NO: 886095 - RNA, 19 nt, Artificial Sequence
  Description of Artificial Sequence: Synthetic oligonucleotide
  Antisense strand to SEQ ID NO: 886094
auuuauagccaacaccuga

SEQ ID NO: 886096 - RNA, 19 nt, Artificial Sequence
  Description of Artificial Sequence: Synthetic oligonucleotide
  Sense strand starting at position 3446 of SEQ ID NO: 588738
agguguuggcuauaaauua

SEQ ID NO: 886097 - RNA, 19 nt, Artificial Sequence
  Description of Artificial Sequence: Synthetic oligonucleotide
  Antisense strand to SEQ ID NO: 886096
uaauuuauagccaacaccu

SEQ ID NO: 886098 - RNA, 19 nt, Artificial Sequence
  Description of Artificial Sequence: Synthetic oligonucleotide
  Sense strand starting at position 3737 of SEQ ID NO: 588738
uugagaaacugcuuuagag

SEQ ID NO: 886099 - RNA, 19 nt, Artificial Sequence
  Description of Artificial Sequence: Synthetic oligonucleotide
  Antisense strand to SEQ ID NO: 886098
cucuaaagcaguuucucaa

SEQ ID NO: 886100 - RNA, 19 nt, Artificial Sequence
  Description of Artificial Sequence: Synthetic oligonucleotide
  Sense strand starting at position 3840 of SEQ ID NO: 588738
guacuaaugguaggauuaa

SEQ ID NO: 886101 - RNA, 19 nt, Artificial Sequence
  Description of Artificial Sequence: Synthetic oligonucleotide
  Antisense strand to SEQ ID NO: 886100
uuaauccuaccauuaguac

SEQ ID NO: 886102 - RNA, 19 nt, Artificial Sequence
  Description of Artificial Sequence: Synthetic oligonucleotide
  Sense strand starting at position 49 of SEQ ID NO: 588739
acacuaaauggagguguuu

SEQ ID NO: 886103 - RNA, 19 nt, Artificial Sequence
  Description of Artificial Sequence: Synthetic oligonucleotide
  Antisense strand to SEQ ID NO: 886102
aaacaccuccauuuagugu

SEQ ID NO: 886104 - RNA, 19 nt, Artificial Sequence
  Description of Artificial Sequence: Synthetic oligonucleotide
  Sense strand starting at position 234 of SEQ ID NO: 588739
ggagggugauuugggagau

SEQ ID NO: 886105 - RNA, 19 nt, Artificial Sequence
  Description of Artificial Sequence: Synthetic oligonucleotide
  Antisense strand to SEQ ID NO: 886104
aucucccaaaucacccucc

SEQ ID NO: 886106 - RNA, 19 nt, Artificial Sequence
  Description of Artificial Sequence: Synthetic oligonucleotide
  Sense strand starting at position 235 of SEQ ID NO: 588739
gagggugauuugggagauu

SEQ ID NO: 886107 - RNA, 19 nt, Artificial Sequence
  Description of Artificial Sequence: Synthetic oligonucleotide
  Antisense strand to SEQ ID NO: 886106
aaucucccaaaucacccuc

SEQ ID NO: 886108 - RNA, 19 nt, Artificial Sequence
  Description of Artificial Sequence: Synthetic oligonucleotide
  Sense strand starting at position 391 of SEQ ID NO: 588739
ggccuuaaaccugaucagu

SEQ ID NO: 886109 - RNA, 19 nt, Artificial Sequence
  Description of Artificial Sequence: Synthetic oligonucleotide
  Antisense strand to SEQ ID NO: 886108
acugaucagguuuaaggcc

SEQ ID NO: 886110 - RNA, 19 nt, Artificial Sequence
  Description of Artificial Sequence: Synthetic oligonucleotide
  Sense strand starting at position 418 of SEQ ID NO: 588739
gcuccauuugaacgugaau

SEQ ID NO: 886111 - RNA, 19 nt, Artificial Sequence
  Description of Artificial Sequence: Synthetic oligonucleotide
  Antisense strand to SEQ ID NO: 886110
auucacguucaaauggagc

SEQ ID NO: 886112 - RNA, 19 nt, Artificial Sequence
  Description of Artificial Sequence: Synthetic oligonucleotide
  Sense strand starting at position 454 of SEQ ID NO: 588739
ucauauauacuacggacua

SEQ ID NO: 886113 - RNA, 19 nt, Artificial Sequence
  Description of Artificial Sequence: Synthetic oligonucleotide
  Antisense strand to SEQ ID NO: 886112
uaguccguaguauauauga

SEQ ID NO: 886114 - RNA, 19 nt, Artificial Sequence
  Description of Artificial Sequence: Synthetic oligonucleotide
  Sense strand starting at position 466 of SEQ ID NO: 588739
cggacuauggaggguauaa

SEQ ID NO: 886115 - RNA, 19 nt, Artificial Sequence
  Description of Artificial Sequence: Synthetic oligonucleotide
  Antisense strand to SEQ ID NO: 886114
uuauacccuccauaguccg

SEQ ID NO: 886116 - RNA, 19 nt, Artificial Sequence
  Description of Artificial Sequence: Synthetic oligonucleotide
  Sense strand starting at position 519 of SEQ ID NO: 588739
acaauauauuuggagguca

SEQ ID NO: 886117 - RNA, 19 nt, Artificial Sequence
  Description of Artificial Sequence: Synthetic oligonucleotide
  Antisense strand to SEQ ID NO: 886116
ugaccuccaaauauauugu

SEQ ID NO: 886118 - RNA, 19 nt, Artificial Sequence
  Description of Artificial Sequence: Synthetic oligonucleotide
  Sense strand starting at position 789 of SEQ ID NO: 588739
acaggacuccguuaucuaa

SEQ ID NO: 886119 - RNA, 19 nt, Artificial Sequence
  Description of Artificial Sequence: Synthetic oligonucleotide
  Antisense strand to SEQ ID NO: 886118
uuagauaacggaguccugu

SEQ ID NO: 886120 - RNA, 19 nt, Artificial Sequence
  Description of Artificial Sequence: Synthetic oligonucleotide
  Sense strand starting at position 791 of SEQ ID NO: 588739
aggacuccguuaucuaaug

SEQ ID NO: 886121 - RNA, 19 nt, Artificial Sequence
  Description of Artificial Sequence: Synthetic oligonucleotide
  Antisense strand to SEQ ID NO: 886120
cauuagauaacggaguccu

SEQ ID NO: 886122 - RNA, 19 nt, Artificial Sequence
  Description of Artificial Sequence: Synthetic oligonucleotide
  Sense strand starting at position 887 of SEQ ID NO: 588739
gacaguaaauuagucgaaa

SEQ ID NO: 886123 - RNA, 19 nt, Artificial Sequence
  Description of Artificial Sequence: Synthetic oligonucleotide
  Antisense strand to SEQ ID NO: 886122
uuucgacuaauuuacuguc

SEQ ID NO: 886124 - RNA, 19 nt, Artificial Sequence
  Description of Artificial Sequence: Synthetic oligonucleotide
  Sense strand starting at position 1009 of SEQ ID NO: 588739
aucuaucucuguuugagag

SEQ ID NO: 886125 - RNA, 19 nt, Artificial Sequence
  Description of Artificial Sequence: Synthetic oligonucleotide
  Antisense strand to SEQ ID NO: 886124
cucucaaacagagauagau

SEQ ID NO: 886126 - RNA, 19 nt, Artificial Sequence
  Description of Artificial Sequence: Synthetic oligonucleotide
  Sense strand starting at position 1072 of SEQ ID NO: 588739
gagcguagaucuuuaaaca

SEQ ID NO: 886127 - RNA, 19 nt, Artificial Sequence
  Description of Artificial Sequence: Synthetic oligonucleotide
  Antisense strand to SEQ ID NO: 886126
uguuuaaagaucuacgcuc

SEQ ID NO: 886128 - RNA, 19 nt, Artificial Sequence
  Description of Artificial Sequence: Synthetic oligonucleotide
  Sense strand starting at position 1073 of SEQ ID NO: 588739
agcguagaucuuuaaacag

SEQ ID NO: 886129 - RNA, 19 nt, Artificial Sequence
  Description of Artificial Sequence: Synthetic oligonucleotide
  Antisense strand to SEQ ID NO: 886128
cuguuuaaagaucuacgcu

SEQ ID NO: 886130 - RNA, 19 nt, Artificial Sequence
  Description of Artificial Sequence: Synthetic oligonucleotide
  Sense strand starting at position 1091 of SEQ ID NO: 588739
gucucaauuccucaauguc

SEQ ID NO: 886131 - RNA, 19 nt, Artificial Sequence
  Description of Artificial Sequence: Synthetic oligonucleotide
  Antisense strand to SEQ ID NO: 886130
gacauugaggaauugagac

SEQ ID NO: 886132 - RNA, 19 nt, Artificial Sequence
  Description of Artificial Sequence: Synthetic oligonucleotide
  Sense strand starting at position 1160 of SEQ ID NO: 588739
ugaggaaucugguccacac

SEQ ID NO: 886133 - RNA, 19 nt, Artificial Sequence
  Description of Artificial Sequence: Synthetic oligonucleotide
  Antisense strand to SEQ ID NO: 886132
guguggaccagauuccuca

SEQ ID NO: 886134 - RNA, 19 nt, Artificial Sequence
  Description of Artificial Sequence: Synthetic oligonucleotide
  Sense strand starting at position 1433 of SEQ ID NO: 588739
guguguaaucugcacaaau

SEQ ID NO: 886135 - RNA, 19 nt, Artificial Sequence
  Description of Artificial Sequence: Synthetic oligonucleotide
  Antisense strand to SEQ ID NO: 886134
auuugugcagauuacacac

SEQ ID NO: 886136 - RNA, 19 nt, Artificial Sequence
  Description of Artificial Sequence: Synthetic oligonucleotide
  Sense strand starting at position 1435 of SEQ ID NO: 588739
guguaaucugcacaaauuc

SEQ ID NO: 886137 - RNA, 19 nt, Artificial Sequence
  Description of Artificial Sequence: Synthetic oligonucleotide
  Antisense strand to SEQ ID NO: 886136
gaauuugugcagauuacac

SEQ ID NO: 886138 - RNA, 19 nt, Artificial Sequence
  Description of Artificial Sequence: Synthetic oligonucleotide
  Sense strand starting at position 1570 of SEQ ID NO: 588739
uuaaauauuuccuaggaag

SEQ ID NO: 886139 - RNA, 19 nt, Artificial Sequence
  Description of Artificial Sequence: Synthetic oligonucleotide
  Antisense strand to SEQ ID NO: 886138
cuuccuaggaaauauuuaa

SEQ ID NO: 886140 - RNA, 19 nt, Artificial Sequence
  Description of Artificial Sequence: Synthetic oligonucleotide
  Sense strand starting at position 1620 of SEQ ID NO: 588739
gggaaauacacagguaugu

SEQ ID NO: 886141 - RNA, 19 nt, Artificial Sequence
  Description of Artificial Sequence: Synthetic oligonucleotide
  Antisense strand to SEQ ID NO: 886140
acauaccuguguauuuccc

SEQ ID NO: 886142 - RNA, 19 nt, Artificial Sequence
  Description of Artificial Sequence: Synthetic oligonucleotide
  Sense strand starting at position 1655 of SEQ ID NO: 588739
ucauaauuacacgggagau

SEQ ID NO: 886143 - RNA, 19 nt, Artificial Sequence
  Description of Artificial Sequence: Synthetic oligonucleotide
  Antisense strand to SEQ ID NO: 886142
aucucccguguaauuauga

SEQ ID NO: 886144 - RNA, 19 nt, Artificial Sequence
  Description of Artificial Sequence: Synthetic oligonucleotide
  Sense strand starting at position 1866 of SEQ ID NO: 588739
agaugaggucuccagguuu

SEQ ID NO: 886145 - RNA, 19 nt, Artificial Sequence
  Description of Artificial Sequence: Synthetic oligonucleotide
  Antisense strand to SEQ ID NO: 886144
aaaccuggagaccucaucu

SEQ ID NO: 886146 - RNA, 19 nt, Artificial Sequence
  Description of Artificial Sequence: Synthetic oligonucleotide
  Sense strand starting at position 1872 of SEQ ID NO: 588739
ggucuccagguuugaaauc

SEQ ID NO: 886147 - RNA, 19 nt, Artificial Sequence
  Description of Artificial Sequence: Synthetic oligonucleotide
  Antisense strand to SEQ ID NO: 886146
gauuucaaaccuggagacc

SEQ ID NO: 886148 - RNA, 19 nt, Artificial Sequence
  Description of Artificial Sequence: Synthetic oligonucleotide
  Sense strand starting at position 2347 of SEQ ID NO: 588739
cagggauuccgagaagcga

SEQ ID NO: 886149 - RNA, 19 nt, Artificial Sequence
  Description of Artificial Sequence: Synthetic oligonucleotide
  Antisense strand to SEQ ID NO: 886148
ucgcuucucggaaucccug

SEQ ID NO: 886150 - RNA, 19 nt, Artificial Sequence
  Description of Artificial Sequence: Synthetic oligonucleotide
  Sense strand starting at position 2969 of SEQ ID NO: 588739
guguauuuguauguguacu

SEQ ID NO: 886151 - RNA, 19 nt, Artificial Sequence
  Description of Artificial Sequence: Synthetic oligonucleotide
  Antisense strand to SEQ ID NO: 886150
aguacacauacaaauacac

SEQ ID NO: 886152 - RNA, 19 nt, Artificial Sequence
  Description of Artificial Sequence: Synthetic oligonucleotide
  Sense strand starting at position 2971 of SEQ ID NO: 588739
guauuuguauguguacugu

SEQ ID NO: 886153 - RNA, 19 nt, Artificial Sequence
  Description of Artificial Sequence: Synthetic oligonucleotide
  Antisense strand to SEQ ID NO: 886152
acaguacacauacaaauac

SEQ ID NO: 886154 - RNA, 19 nt, Artificial Sequence
  Description of Artificial Sequence: Synthetic oligonucleotide
  Sense strand starting at position 3009 of SEQ ID NO: 588739
aggaaaugauuguugugga

SEQ ID NO: 886155 - RNA, 19 nt, Artificial Sequence
  Description of Artificial Sequence: Synthetic oligonucleotide
  Antisense strand to SEQ ID NO: 886154
uccacaacaaucauuuccu

SEQ ID NO: 886156 - RNA, 19 nt, Artificial Sequence
  Description of Artificial Sequence: Synthetic oligonucleotide
  Sense strand starting at position 3418 of SEQ ID NO: 588739
uuagauaggaugugaguuu

SEQ ID NO: 886157 - RNA, 19 nt, Artificial Sequence
  Description of Artificial Sequence: Synthetic oligonucleotide
  Antisense strand to SEQ ID NO: 886156
aaacucacauccuaucuaa

SEQ ID NO: 886158 - RNA, 19 nt, Artificial Sequence
  Description of Artificial Sequence: Synthetic oligonucleotide
  Sense strand starting at position 3431 of SEQ ID NO: 588739
gaguuugggcccuaacuaa

SEQ ID NO: 886159 - RNA, 19 nt, Artificial Sequence
  Description of Artificial Sequence: Synthetic oligonucleotide
  Antisense strand to SEQ ID NO: 886158
uuaguuagggcccaaacuc

SEQ ID NO: 886160 - RNA, 19 nt, Artificial Sequence
  Description of Artificial Sequence: Synthetic oligonucleotide
  Sense strand starting at position 3832 of SEQ ID NO: 588739
cuaaguauaccugggcaau

SEQ ID NO: 886161 - RNA, 19 nt, Artificial Sequence
  Description of Artificial Sequence: Synthetic oligonucleotide
  Antisense strand to SEQ ID NO: 886160
auugcccagguauacuuag

SEQ ID NO: 886162 - RNA, 19 nt, Artificial Sequence
  Description of Artificial Sequence: Synthetic oligonucleotide
  Sense strand starting at position 3833 of SEQ ID NO: 588739
uaaguauaccugggcaaua

SEQ ID NO: 886163 - RNA, 19 nt, Artificial Sequence
  Description of Artificial Sequence: Synthetic oligonucleotide
  Antisense strand to SEQ ID NO: 886162
uauugcccagguauacuua

SEQ ID NO: 886164 - RNA, 19 nt, Artificial Sequence
  Description of Artificial Sequence: Synthetic oligonucleotide
  Sense strand starting at position 3834 of SEQ ID NO: 588739
aaguauaccugggcaauau

SEQ ID NO: 886165 - RNA, 19 nt, Artificial Sequence
  Description of Artificial Sequence: Synthetic oligonucleotide
  Antisense strand to SEQ ID NO: 886164
auauugcccagguauacuu

SEQ ID NO: 886166 - RNA, 19 nt, Artificial Sequence
  Description of Artificial Sequence: Synthetic oligonucleotide
  Sense strand starting at position 3844 of SEQ ID NO: 588739
gggcaauaugcagagaguu

SEQ ID NO: 886167 - RNA, 19 nt, Artificial Sequence
  Description of Artificial Sequence: Synthetic oligonucleotide
  Antisense strand to SEQ ID NO: 886166
aacucucugcauauugccc

SEQ ID NO: 886168 - RNA, 19 nt, Artificial Sequence
  Description of Artificial Sequence: Synthetic oligonucleotide
  Sense strand starting at position 3856 of SEQ ID NO: 588739
gagaguuccaaguggagca

SEQ ID NO: 886169 - RNA, 19 nt, Artificial Sequence
  Description of Artificial Sequence: Synthetic oligonucleotide
  Antisense strand to SEQ ID NO: 886168
ugcuccacuuggaacucuc

SEQ ID NO: 886170 - RNA, 19 nt, Artificial Sequence
  Description of Artificial Sequence: Synthetic oligonucleotide
  Sense strand starting at position 3899 of SEQ ID NO: 588739
ggaaggguuggugaaaugu

SEQ ID NO: 886171 - RNA, 19 nt, Artificial Sequence
  Description of Artificial Sequence: Synthetic oligonucleotide
  Antisense strand to SEQ ID NO: 886170
acauuucaccaacccuucc

SEQ ID NO: 886172 - RNA, 19 nt, Artificial Sequence
  Description of Artificial Sequence: Synthetic oligonucleotide
  Sense strand starting at position 3909 of SEQ ID NO: 588739
gugaaaugucuugaagcuu

SEQ ID NO: 886173 - RNA, 19 nt, Artificial Sequence
  Description of Artificial Sequence: Synthetic oligonucleotide
  Antisense strand to SEQ ID NO: 886172
aagcuucaagacauuucac

SEQ ID NO: 886174 - RNA, 19 nt, Artificial Sequence
  Description of Artificial Sequence: Synthetic oligonucleotide
  Sense strand starting at position 3920 of SEQ ID NO: 588739
ugaagcuucucauucugaa

SEQ ID NO: 886175 - RNA, 19 nt, Artificial Sequence
  Description of Artificial Sequence: Synthetic oligonucleotide
  Antisense strand to SEQ ID NO: 886174
uucagaaugagaagcuuca

SEQ ID NO: 886176 - RNA, 19 nt, Artificial Sequence
  Description of Artificial Sequence: Synthetic oligonucleotide
  Sense strand starting at position 3941 of SEQ ID NO: 588739
ugaauuuaauguguguagu

SEQ ID NO: 886177 - RNA, 19 nt, Artificial Sequence
  Description of Artificial Sequence: Synthetic oligonucleotide
  Antisense strand to SEQ ID NO: 886176
acuacacacauuaaauuca

SEQ ID NO: 886178 - RNA, 19 nt, Artificial Sequence
  Description of Artificial Sequence: Synthetic oligonucleotide
  Sense strand starting at position 3955 of SEQ ID NO: 588739
guaguaggaagcuacuaua

SEQ ID NO: 886179 - RNA, 19 nt, Artificial Sequence
  Description of Artificial Sequence: Synthetic oligonucleotide
  Antisense strand to SEQ ID NO: 886178
uauaguagcuuccuacuac

SEQ ID NO: 886180 - RNA, 19 nt, Artificial Sequence
  Description of Artificial Sequence: Synthetic oligonucleotide
  Sense strand starting at position 3971 of SEQ ID NO: 588739
auagguugcucagcaagaa

SEQ ID NO: 886181 - RNA, 19 nt, Artificial Sequence
  Description of Artificial Sequence: Synthetic oligonucleotide
  Antisense strand to SEQ ID NO: 886180
uucuugcugagcaaccuau

SEQ ID NO: 886182 - RNA, 19 nt, Artificial Sequence
  Description of Artificial Sequence: Synthetic oligonucleotide
  Sense strand starting at position 30 of SEQ ID NO: 588740
uccaguauggcagaagagu

SEQ ID NO: 886183 - RNA, 19 nt, Artificial Sequence
  Description of Artificial Sequence: Synthetic oligonucleotide
  Antisense strand to SEQ ID NO: 886182
acucuucugccauacugga

SEQ ID NO: 886184 - RNA, 19 nt, Artificial Sequence
  Description of Artificial Sequence: Synthetic oligonucleotide
  Sense strand starting at position 76 of SEQ ID NO: 588740
auuaaaugguaacugcaau

SEQ ID NO: 886185 - RNA, 19 nt, Artificial Sequence
  Description of Artificial Sequence: Synthetic oligonucleotide
  Antisense strand to SEQ ID NO: 886184
auugcaguuaccauuuaau

SEQ ID NO: 886186 - RNA, 19 nt, Artificial Sequence
  Description of Artificial Sequence: Synthetic oligonucleotide
  Sense strand starting at position 87 of SEQ ID NO: 588740
acugcaauaguccagcuaa

SEQ ID NO: 886187 - RNA, 19 nt, Artificial Sequence
  Description of Artificial Sequence: Synthetic oligonucleotide
  Antisense strand to SEQ ID NO: 886186
uuagcuggacuauugcagu

SEQ ID NO: 886188 - RNA, 19 nt, Artificial Sequence
  Description of Artificial Sequence: Synthetic oligonucleotide
  Sense strand starting at position 292 of SEQ ID NO: 588740
guaacagguggcuggaaau

SEQ ID NO: 886189 - RNA, 19 nt, Artificial Sequence
  Description of Artificial Sequence: Synthetic oligonucleotide
  Antisense strand to SEQ ID NO: 886188
auuuccagccaccuguuac

SEQ ID NO: 886190 - RNA, 19 nt, Artificial Sequence
  Description of Artificial Sequence: Synthetic oligonucleotide
  Sense strand starting at position 469 of SEQ ID NO: 588740
aguucuugucagcaacaac

SEQ ID NO: 886191 - RNA, 19 nt, Artificial Sequence
  Description of Artificial Sequence: Synthetic oligonucleotide
  Antisense strand to SEQ ID NO: 886190
guuguugcugacaagaacu

SEQ ID NO: 886192 - RNA, 19 nt, Artificial Sequence
  Description of Artificial Sequence: Synthetic oligonucleotide
  Sense strand starting at position 505 of SEQ ID NO: 588740
uuguaucugcuccaagaac

SEQ ID NO: 886193 - RNA, 19 nt, Artificial Sequence
  Description of Artificial Sequence: Synthetic oligonucleotide
  Antisense strand to SEQ ID NO: 886192
guucuuggagcagauacaa

SEQ ID NO: 886194 - RNA, 19 nt, Artificial Sequence
  Description of Artificial Sequence: Synthetic oligonucleotide
  Sense strand starting at position 604 of SEQ ID NO: 588740
gaauacuauguuggccaua

SEQ ID NO: 886195 - RNA, 19 nt, Artificial Sequence
  Description of Artificial Sequence: Synthetic oligonucleotide
  Antisense strand to SEQ ID NO: 886194
uauggccaacauaguauuc

SEQ ID NO: 886196 - RNA, 19 nt, Artificial Sequence
  Description of Artificial Sequence: Synthetic oligonucleotide
  Sense strand starting at position 609 of SEQ ID NO: 588740
cuauguuggccauaccaca

SEQ ID NO: 886197 - RNA, 19 nt, Artificial Sequence
  Description of Artificial Sequence: Synthetic oligonucleotide
  Antisense strand to SEQ ID NO: 886196
ugugguauggccaacauag

SEQ ID NO: 886198 - RNA, 19 nt, Artificial Sequence
  Description of Artificial Sequence: Synthetic oligonucleotide
  Sense strand starting at position 700 of SEQ ID NO: 588740
aaagguuucuuaguaaaug

SEQ ID NO: 886199 - RNA, 19 nt, Artificial Sequence
  Description of Artificial Sequence: Synthetic oligonucleotide
  Antisense strand to SEQ ID NO: 886198
cauuuacuaagaaaccuuu

SEQ ID NO: 886200 - RNA, 19 nt, Artificial Sequence
  Description of Artificial Sequence: Synthetic oligonucleotide
  Sense strand starting at position 725 of SEQ ID NO: 588740
auugaauccugaguaggua

SEQ ID NO: 886201 - RNA, 19 nt, Artificial Sequence
  Description of Artificial Sequence: Synthetic oligonucleotide
  Antisense strand to SEQ ID NO: 886200
uaccuacucaggauucaau

SEQ ID NO: 886202 - RNA, 19 nt, Artificial Sequence
  Description of Artificial Sequence: Synthetic oligonucleotide
  Sense strand starting at position 728 of SEQ ID NO: 588740
gaauccugaguagguaaga

SEQ ID NO: 886203 - RNA, 19 nt, Artificial Sequence
  Description of Artificial Sequence: Synthetic oligonucleotide
  Antisense strand to SEQ ID NO: 886202
ucuuaccuacucaggauuc

SEQ ID NO: 886204 - RNA, 19 nt, Artificial Sequence
  Description of Artificial Sequence: Synthetic oligonucleotide
  Sense strand starting at position 729 of SEQ ID NO: 588740
aauccugaguagguaagaa

SEQ ID NO: 886205 - RNA, 19 nt, Artificial Sequence
  Description of Artificial Sequence: Synthetic oligonucleotide
  Antisense strand to SEQ ID NO: 886204
uucuuaccuacucaggauu

SEQ ID NO: 886206 - RNA, 19 nt, Artificial Sequence
  Description of Artificial Sequence: Synthetic oligonucleotide
  Sense strand starting at position 739 of SEQ ID NO: 588740
agguaagaauuauucccau

SEQ ID NO: 886207 - RNA, 19 nt, Artificial Sequence
  Description of Artificial Sequence: Synthetic oligonucleotide
  Antisense strand to SEQ ID NO: 886206
augggaauaauucuuaccu

SEQ ID NO: 886208 - RNA, 19 nt, Artificial Sequence
  Description of Artificial Sequence: Synthetic oligonucleotide
  Sense strand starting at position 771 of SEQ ID NO: 588740
ucaggugucggguaaauuc

SEQ ID NO: 886209 - RNA, 19 nt, Artificial Sequence
  Description of Artificial Sequence: Synthetic oligonucleotide
  Antisense strand to SEQ ID NO: 886208
gaauuuacccgacaccuga

SEQ ID NO: 886210 - RNA, 19 nt, Artificial Sequence
  Description of Artificial Sequence: Synthetic oligonucleotide
  Sense strand starting at position 779 of SEQ ID NO: 588740
cggguaaauuccuuguaaa

SEQ ID NO: 886211 - RNA, 19 nt, Artificial Sequence
  Description of Artificial Sequence: Synthetic oligonucleotide
  Antisense strand to SEQ ID NO: 886210
uuuacaaggaauuuacccg

SEQ ID NO: 886212 - RNA, 19 nt, Artificial Sequence
  Description of Artificial Sequence: Synthetic oligonucleotide
  Sense strand starting at position 780 of SEQ ID NO: 588740
ggguaaauuccuuguaaau

SEQ ID NO: 886213 - RNA, 19 nt, Artificial Sequence
  Description of Artificial Sequence: Synthetic oligonucleotide
  Antisense strand to SEQ ID NO: 886212
auuuacaaggaauuuaccc

SEQ ID NO: 886214 - RNA, 19 nt, Artificial Sequence
  Description of Artificial Sequence: Synthetic oligonucleotide
  Sense strand starting at position 899 of SEQ ID NO: 588740
aaacauguugcacagguaa

SEQ ID NO: 886215 - RNA, 19 nt, Artificial Sequence
  Description of Artificial Sequence: Synthetic oligonucleotide
  Antisense strand to SEQ ID NO: 886214
uuaccugugcaacauguuu

SEQ ID NO: 886216 - RNA, 19 nt, Artificial Sequence
  Description of Artificial Sequence: Synthetic oligonucleotide
  Sense strand starting at position 1022 of SEQ ID NO: 588740
gaaucagcacuauagaguu

SEQ ID NO: 886217 - RNA, 19 nt, Artificial Sequence
  Description of Artificial Sequence: Synthetic oligonucleotide
  Antisense strand to SEQ ID NO: 886216
aacucuauagugcugauuc

SEQ ID NO: 886218 - RNA, 19 nt, Artificial Sequence
  Description of Artificial Sequence: Synthetic oligonucleotide
  Sense strand starting at position 1046 of SEQ ID NO: 588740
gugagacagaccugucuga

SEQ ID NO: 886219 - RNA, 19 nt, Artificial Sequence
  Description of Artificial Sequence: Synthetic oligonucleotide
  Antisense strand to SEQ ID NO: 886218
ucagacaggucugucucac

SEQ ID NO: 886220 - RNA, 19 nt, Artificial Sequence
  Description of Artificial Sequence: Synthetic oligonucleotide
  Sense strand starting at position 1252 of SEQ ID NO: 588740
ugauguauucuauagcauu

SEQ ID NO: 886221 - RNA, 19 nt, Artificial Sequence
  Description of Artificial Sequence: Synthetic oligonucleotide
  Antisense strand to SEQ ID NO: 886220
aaugcuauagaauacauca

SEQ ID NO: 886222 - RNA, 19 nt, Artificial Sequence
  Description of Artificial Sequence: Synthetic oligonucleotide
  Sense strand starting at position 1570 of SEQ ID NO: 588740
cgcccaucuguuuaaugaa

SEQ ID NO: 886223 - RNA, 19 nt, Artificial Sequence
  Description of Artificial Sequence: Synthetic oligonucleotide
  Antisense strand to SEQ ID NO: 886222
uucauuaaacagaugggcg

SEQ ID NO: 886224 - RNA, 19 nt, Artificial Sequence
  Description of Artificial Sequence: Synthetic oligonucleotide
  Sense strand starting at position 1656 of SEQ ID NO: 588740
gccuuaggagacggagaua

SEQ ID NO: 886225 - RNA, 19 nt, Artificial Sequence
  Description of Artificial Sequence: Synthetic oligonucleotide
  Antisense strand to SEQ ID NO: 886224
uaucuccgucuccuaaggc

SEQ ID NO: 886226 - RNA, 19 nt, Artificial Sequence
  Description of Artificial Sequence: Synthetic oligonucleotide
  Sense strand starting at position 2060 of SEQ ID NO: 588740
uagaacgauugaucuuaga

SEQ ID NO: 886227 - RNA, 19 nt, Artificial Sequence
  Description of Artificial Sequence: Synthetic oligonucleotide
  Antisense strand to SEQ ID NO: 886226
ucuaagaucaaucguucua

SEQ ID NO: 886228 - RNA, 19 nt, Artificial Sequence
  Description of Artificial Sequence: Synthetic oligonucleotide
  Sense strand starting at position 2075 of SEQ ID NO: 588740
uagagauucugguuccuag

SEQ ID NO: 886229 - RNA, 19 nt, Artificial Sequence
  Description of Artificial Sequence: Synthetic oligonucleotide
  Antisense strand to SEQ ID NO: 886228
cuaggaaccagaaucucua

SEQ ID NO: 886230 - RNA, 19 nt, Artificial Sequence
  Description of Artificial Sequence: Synthetic oligonucleotide
  Sense strand starting at position 2078 of SEQ ID NO: 588740
agauucugguuccuagaga

SEQ ID NO: 886231 - RNA, 19 nt, Artificial Sequence
  Description of Artificial Sequence: Synthetic oligonucleotide
  Antisense strand to SEQ ID NO: 886230
ucucuaggaaccagaaucu

SEQ ID NO: 886232 - RNA, 19 nt, Artificial Sequence
  Description of Artificial Sequence: Synthetic oligonucleotide
  Sense strand starting at position 2098 of SEQ ID NO: 588740
gccagagauguuugaagua

SEQ ID NO: 886233 - RNA, 19 nt, Artificial Sequence
  Description of Artificial Sequence: Synthetic oligonucleotide
  Antisense strand to SEQ ID NO: 886232
uacuucaaacaucucuggc

SEQ ID NO: 886234 - RNA, 19 nt, Artificial Sequence
  Description of Artificial Sequence: Synthetic oligonucleotide
  Sense strand starting at position 2159 of SEQ ID NO: 588740
cgggaaaggacuuguccaa

SEQ ID NO: 886235 - RNA, 19 nt, Artificial Sequence
  Description of Artificial Sequence: Synthetic oligonucleotide
  Antisense strand to SEQ ID NO: 886234
uuggacaaguccuuucccg

SEQ ID NO: 886236 - RNA, 19 nt, Artificial Sequence
  Description of Artificial Sequence: Synthetic oligonucleotide
  Sense strand starting at position 2166 of SEQ ID NO: 588740
ggacuuguccaaggugaac

SEQ ID NO: 886237 - RNA, 19 nt, Artificial Sequence
  Description of Artificial Sequence: Synthetic oligonucleotide
  Antisense strand to SEQ ID NO: 886236
guucaccuuggacaagucc

SEQ ID NO: 886238 - RNA, 19 nt, Artificial Sequence
  Description of Artificial Sequence: Synthetic oligonucleotide
  Sense strand starting at position 2342 of SEQ ID NO: 588740
uccgcuaucagauggagau

SEQ ID NO: 886239 - RNA, 19 nt, Artificial Sequence
  Description of Artificial Sequence: Synthetic oligonucleotide
  Antisense strand to SEQ ID NO: 886238
aucuccaucugauagcgga

SEQ ID NO: 886240 - RNA, 19 nt, Artificial Sequence
  Description of Artificial Sequence: Synthetic oligonucleotide
  Sense strand starting at position 2343 of SEQ ID NO: 588740
ccgcuaucagauggagauu

SEQ ID NO: 886241 - RNA, 19 nt, Artificial Sequence
  Description of Artificial Sequence: Synthetic oligonucleotide
  Antisense strand to SEQ ID NO: 886240
aaucuccaucugauagcgg

SEQ ID NO: 886242 - RNA, 19 nt, Artificial Sequence
  Description of Artificial Sequence: Synthetic oligonucleotide
  Sense strand starting at position 2344 of SEQ ID NO: 588740
cgcuaucagauggagauua

SEQ ID NO: 886243 - RNA, 19 nt, Artificial Sequence
  Description of Artificial Sequence: Synthetic oligonucleotide
  Antisense strand to SEQ ID NO: 886242
uaaucuccaucugauagcg

SEQ ID NO: 886244 - RNA, 19 nt, Artificial Sequence
  Description of Artificial Sequence: Synthetic oligonucleotide
  Sense strand starting at position 2423 of SEQ ID NO: 588740
ugauuagucauagggugaa

SEQ ID NO: 886245 - RNA, 19 nt, Artificial Sequence
  Description of Artificial Sequence: Synthetic oligonucleotide
  Antisense strand to SEQ ID NO: 886244
uucacccuaugacuaauca

SEQ ID NO: 886246 - RNA, 19 nt, Artificial Sequence
  Description of Artificial Sequence: Synthetic oligonucleotide
  Sense strand starting at position 2642 of SEQ ID NO: 588740
ccgagaggguugaagacau

SEQ ID NO: 886247 - RNA, 19 nt, Artificial Sequence
  Description of Artificial Sequence: Synthetic oligonucleotide
  Antisense strand to SEQ ID NO: 886246
augucuucaacccucucgg

SEQ ID NO: 886248 - RNA, 19 nt, Artificial Sequence
  Description of Artificial Sequence: Synthetic oligonucleotide
  Sense strand starting at position 2719 of SEQ ID NO: 588740
ggcugagauaccugaccaa

SEQ ID NO: 886249 - RNA, 19 nt, Artificial Sequence
  Description of Artificial Sequence: Synthetic oligonucleotide
  Antisense strand to SEQ ID NO: 886248
uuggucagguaucucagcc

SEQ ID NO: 886250 - RNA, 19 nt, Artificial Sequence
  Description of Artificial Sequence: Synthetic oligonucleotide
  Sense strand starting at position 2771 of SEQ ID NO: 588740
agcugucuucccuaagacu

SEQ ID NO: 886251 - RNA, 19 nt, Artificial Sequence
  Description of Artificial Sequence: Synthetic oligonucleotide
  Antisense strand to SEQ ID NO: 886250
agucuuagggaagacagcu

SEQ ID NO: 886252 - RNA, 19 nt, Artificial Sequence
  Description of Artificial Sequence: Synthetic oligonucleotide
  Sense strand starting at position 2896 of SEQ ID NO: 588740
ccuagaaaugccugcauaa

SEQ ID NO: 886253 - RNA, 19 nt, Artificial Sequence
  Description of Artificial Sequence: Synthetic oligonucleotide
  Antisense strand to SEQ ID NO: 886252
uuaugcaggcauuucuagg

SEQ ID NO: 886254 - RNA, 19 nt, Artificial Sequence
  Description of Artificial Sequence: Synthetic oligonucleotide
  Sense strand starting at position 3654 of SEQ ID NO: 588740
ggccacauaguguaucauu

SEQ ID NO: 886255 - RNA, 19 nt, Artificial Sequence
  Description of Artificial Sequence: Synthetic oligonucleotide
  Antisense strand to SEQ ID NO: 886254
aaugauacacuauguggcc

SEQ ID NO: 886256 - RNA, 19 nt, Artificial Sequence
  Description of Artificial Sequence: Synthetic oligonucleotide
  Sense strand starting at position 3830 of SEQ ID NO: 588740
uugguugcacgauauuaug

SEQ ID NO: 886257 - RNA, 19 nt, Artificial Sequence
  Description of Artificial Sequence: Synthetic oligonucleotide
  Antisense strand to SEQ ID NO: 886256
cauaauaucgugcaaccaa

SEQ ID NO: 886258 - RNA, 19 nt, Artificial Sequence
  Description of Artificial Sequence: Synthetic oligonucleotide
  Sense strand starting at position 3897 of SEQ ID NO: 588740
ugacuucuacguuagguga

SEQ ID NO: 886259 - RNA, 19 nt, Artificial Sequence
  Description of Artificial Sequence: Synthetic oligonucleotide
  Antisense strand to SEQ ID NO: 886258
ucaccuaacguagaaguca

SEQ ID NO: 886260 - RNA, 19 nt, Artificial Sequence
  Description of Artificial Sequence: Synthetic oligonucleotide
  Sense strand starting at position 3901 of SEQ ID NO: 588740
uucuacguuaggugaauuu

SEQ ID NO: 886261 - RNA, 19 nt, Artificial Sequence
  Description of Artificial Sequence: Synthetic oligonucleotide
  Antisense strand to SEQ ID NO: 886260
aaauucaccuaacguagaa

SEQ ID NO: 886262 - RNA, 19 nt, Artificial Sequence
  Description of Artificial Sequence: Synthetic oligonucleotide
  Sense strand starting at position 49 of SEQ ID NO: 588741
aaacacuacggauguguaa

SEQ ID NO: 886263 - RNA, 19 nt, Artificial Sequence
  Description of Artificial Sequence: Synthetic oligonucleotide
  Antisense strand to SEQ ID NO: 886262
uuacacauccguaguguuu

SEQ ID NO: 886264 - RNA, 19 nt, Artificial Sequence
  Description of Artificial Sequence: Synthetic oligonucleotide
  Sense strand starting at position 127 of SEQ ID NO: 588741
ugguguaccuuugcagaua

SEQ ID NO: 886265 - RNA, 19 nt, Artificial Sequence
  Description of Artificial Sequence: Synthetic oligonucleotide
  Antisense strand to SEQ ID NO: 886264
uaucugcaaagguacacca

SEQ ID NO: 886266 - RNA, 19 nt, Artificial Sequence
  Description of Artificial Sequence: Synthetic oligonucleotide
  Sense strand starting at position 230 of SEQ ID NO: 588741
auugauauacccugcgauu

SEQ ID NO: 886267 - RNA, 19 nt, Artificial Sequence
  Description of Artificial Sequence: Synthetic oligonucleotide
  Antisense strand to SEQ ID NO: 886266
aaucgcaggguauaucaau

SEQ ID NO: 886268 - RNA, 19 nt, Artificial Sequence
  Description of Artificial Sequence: Synthetic oligonucleotide
  Sense strand starting at position 649 of SEQ ID NO: 588741
auaacugcacaguguuaca

SEQ ID NO: 886269 - RNA, 19 nt, Artificial Sequence
  Description of Artificial Sequence: Synthetic oligonucleotide
  Antisense strand to SEQ ID NO: 886268
uguaacacugugcaguuau

SEQ ID NO: 886270 - RNA, 19 nt, Artificial Sequence
  Description of Artificial Sequence: Synthetic oligonucleotide
  Sense strand starting at position 667 of SEQ ID NO: 588741
agaguaauagcgcauaauu

SEQ ID NO: 886271 - RNA, 19 nt, Artificial Sequence
  Description of Artificial Sequence: Synthetic oligonucleotide
  Antisense strand to SEQ ID NO: 886270
aauuaugcgcuauuacucu

SEQ ID NO: 886272 - RNA, 19 nt, Artificial Sequence
  Description of Artificial Sequence: Synthetic oligonucleotide
  Sense strand starting at position 684 of SEQ ID NO: 588741
uuuggaauccucuguuaac

SEQ ID NO: 886273 - RNA, 19 nt, Artificial Sequence
  Description of Artificial Sequence: Synthetic oligonucleotide
  Antisense strand to SEQ ID NO: 886272
guuaacagaggauuccaaa

SEQ ID NO: 886274 - RNA, 19 nt, Artificial Sequence
  Description of Artificial Sequence: Synthetic oligonucleotide
  Sense strand starting at position 700 of SEQ ID NO: 588741
aacggauauuuagauuguu

SEQ ID NO: 886275 - RNA, 19 nt, Artificial Sequence
  Description of Artificial Sequence: Synthetic oligonucleotide
  Antisense strand to SEQ ID NO: 886274
aacaaucuaaauauccguu

SEQ ID NO: 886276 - RNA, 19 nt, Artificial Sequence
  Description of Artificial Sequence: Synthetic oligonucleotide
  Sense strand starting at position 732 of SEQ ID NO: 588741
ugccacacacgauauguua

SEQ ID NO: 886277 - RNA, 19 nt, Artificial Sequence
  Description of Artificial Sequence: Synthetic oligonucleotide
  Antisense strand to SEQ ID NO: 886276
uaacauaucguguguggca

SEQ ID NO: 886278 - RNA, 19 nt, Artificial Sequence
  Description of Artificial Sequence: Synthetic oligonucleotide
  Sense strand starting at position 796 of SEQ ID NO: 588741
uuucucuguccugauggaa

SEQ ID NO: 886279 - RNA, 19 nt, Artificial Sequence
  Description of Artificial Sequence: Synthetic oligonucleotide
  Antisense strand to SEQ ID NO: 886278
uuccaucaggacagagaaa

SEQ ID NO: 886280 - RNA, 19 nt, Artificial Sequence
  Description of Artificial Sequence: Synthetic oligonucleotide
  Sense strand starting at position 814 of SEQ ID NO: 588741
aaaucagagugccuugauu

SEQ ID NO: 886281 - RNA, 19 nt, Artificial Sequence
  Description of Artificial Sequence: Synthetic oligonucleotide
  Antisense strand to SEQ ID NO: 886280
aaucaaggcacucugauuu

SEQ ID NO: 886282 - RNA, 19 nt, Artificial Sequence
  Description of Artificial Sequence: Synthetic oligonucleotide
  Sense strand starting at position 827 of SEQ ID NO: 588741
uugauugcucucugaccua

SEQ ID NO: 886283 - RNA, 19 nt, Artificial Sequence
  Description of Artificial Sequence: Synthetic oligonucleotide
  Antisense strand to SEQ ID NO: 886282
uaggucagagagcaaucaa

SEQ ID NO: 886284 - RNA, 19 nt, Artificial Sequence
  Description of Artificial Sequence: Synthetic oligonucleotide
  Sense strand starting at position 1044 of SEQ ID NO: 588741
cccgguguccgucuugaca

SEQ ID NO: 886285 - RNA, 19 nt, Artificial Sequence
  Description of Artificial Sequence: Synthetic oligonucleotide
  Antisense strand to SEQ ID NO: 886284
ugucaagacggacaccggg

SEQ ID NO: 886286 - RNA, 19 nt, Artificial Sequence
  Description of Artificial Sequence: Synthetic oligonucleotide
  Sense strand starting at position 1047 of SEQ ID NO: 588741
gguguccgucuugacaauu

SEQ ID NO: 886287 - RNA, 19 nt, Artificial Sequence
  Description of Artificial Sequence: Synthetic oligonucleotide
  Antisense strand to SEQ ID NO: 886286
aauugucaagacggacacc

SEQ ID NO: 886288 - RNA, 19 nt, Artificial Sequence
  Description of Artificial Sequence: Synthetic oligonucleotide
  Sense strand starting at position 1152 of SEQ ID NO: 588741
gccacaucucgggaagguu

SEQ ID NO: 886289 - RNA, 19 nt, Artificial Sequence
  Description of Artificial Sequence: Synthetic oligonucleotide
  Antisense strand to SEQ ID NO: 886288
aaccuucccgagauguggc

SEQ ID NO: 886290 - RNA, 19 nt, Artificial Sequence
  Description of Artificial Sequence: Synthetic oligonucleotide
  Sense strand starting at position 1262 of SEQ ID NO: 588741
gcgcguauacuugcauuaa

SEQ ID NO: 886291 - RNA, 19 nt, Artificial Sequence
  Description of Artificial Sequence: Synthetic oligonucleotide
  Antisense strand to SEQ ID NO: 886290
uuaaugcaaguauacgcgc

SEQ ID NO: 886292 - RNA, 19 nt, Artificial Sequence
  Description of Artificial Sequence: Synthetic oligonucleotide
  Sense strand starting at position 1406 of SEQ ID NO: 588741
guggaaugcuccuuguaag

SEQ ID NO: 886293 - RNA, 19 nt, Artificial Sequence
  Description of Artificial Sequence: Synthetic oligonucleotide
  Antisense strand to SEQ ID NO: 886292
cuuacaaggagcauuccac

SEQ ID NO: 886294 - RNA, 19 nt, Artificial Sequence
  Description of Artificial Sequence: Synthetic oligonucleotide
  Sense strand starting at position 1589 of SEQ ID NO: 588741
cugcaaauuucggcuacuu

SEQ ID NO: 886295 - RNA, 19 nt, Artificial Sequence
  Description of Artificial Sequence: Synthetic oligonucleotide
  Antisense strand to SEQ ID NO: 886294
aaguagccgaaauuugcag

SEQ ID NO: 886296 - RNA, 19 nt, Artificial Sequence
  Description of Artificial Sequence: Synthetic oligonucleotide
  Sense strand starting at position 1723 of SEQ ID NO: 588741
ucucguuaagcagggagaa

SEQ ID NO: 886297 - RNA, 19 nt, Artificial Sequence
  Description of Artificial Sequence: Synthetic oligonucleotide
  Antisense strand to SEQ ID NO: 886296
uucucccugcuuaacgaga

SEQ ID NO: 886298 - RNA, 19 nt, Artificial Sequence
  Description of Artificial Sequence: Synthetic oligonucleotide
  Sense strand starting at position 1968 of SEQ ID NO: 588741
ccuccuugucccugagaug

SEQ ID NO: 886299 - RNA, 19 nt, Artificial Sequence
  Description of Artificial Sequence: Synthetic oligonucleotide
  Antisense strand to SEQ ID NO: 886298
caucucagggacaaggagg

SEQ ID NO: 886300 - RNA, 19 nt, Artificial Sequence
  Description of Artificial Sequence: Synthetic oligonucleotide
  Sense strand starting at position 2006 of SEQ ID NO: 588741
ucgcgagaagccuccguua

SEQ ID NO: 886301 - RNA, 19 nt, Artificial Sequence
  Description of Artificial Sequence: Synthetic oligonucleotide
  Antisense strand to SEQ ID NO: 886300
uaacggaggcuucucgcga

SEQ ID NO: 886302 - RNA, 19 nt, Artificial Sequence
  Description of Artificial Sequence: Synthetic oligonucleotide
  Sense strand starting at position 2409 of SEQ ID NO: 588741
ugacgaaggcgugaguaau

SEQ ID NO: 886303 - RNA, 19 nt, Artificial Sequence
  Description of Artificial Sequence: Synthetic oligonucleotide
  Antisense strand to SEQ ID NO: 886302
auuacucacgccuucguca

SEQ ID NO: 886304 - RNA, 19 nt, Artificial Sequence
  Description of Artificial Sequence: Synthetic oligonucleotide
  Sense strand starting at position 2869 of SEQ ID NO: 588741
uaauguaaacaucgugaag

SEQ ID NO: 886305 - RNA, 19 nt, Artificial Sequence
  Description of Artificial Sequence: Synthetic oligonucleotide
  Antisense strand to SEQ ID NO: 886304
cuucacgauguuuacauua

SEQ ID NO: 886306 - RNA, 19 nt, Artificial Sequence
  Description of Artificial Sequence: Synthetic oligonucleotide
  Sense strand starting at position 3021 of SEQ ID NO: 588741
auaaguaucaugcgagcaa

SEQ ID NO: 886307 - RNA, 19 nt, Artificial Sequence
  Description of Artificial Sequence: Synthetic oligonucleotide
  Antisense strand to SEQ ID NO: 886306
uugcucgcaugauacuuau

SEQ ID NO: 886308 - RNA, 19 nt, Artificial Sequence
  Description of Artificial Sequence: Synthetic oligonucleotide
  Sense strand starting at position 3025 of SEQ ID NO: 588741
guaucaugcgagcaaggga

SEQ ID NO: 886309 - RNA, 19 nt, Artificial Sequence
  Description of Artificial Sequence: Synthetic oligonucleotide
  Antisense strand to SEQ ID NO: 886308
ucccuugcucgcaugauac

SEQ ID NO: 886310 - RNA, 19 nt, Artificial Sequence
  Description of Artificial Sequence: Synthetic oligonucleotide
  Sense strand starting at position 3109 of SEQ ID NO: 588741
cuuaaauccugagugggua

SEQ ID NO: 886311 - RNA, 19 nt, Artificial Sequence
  Description of Artificial Sequence: Synthetic oligonucleotide
  Antisense strand to SEQ ID NO: 886310
uacccacucaggauuuaag

SEQ ID NO: 886312 - RNA, 19 nt, Artificial Sequence
  Description of Artificial Sequence: Synthetic oligonucleotide
  Sense strand starting at position 3110 of SEQ ID NO: 588741
uuaaauccugaguggguau

SEQ ID NO: 886313 - RNA, 19 nt, Artificial Sequence
  Description of Artificial Sequence: Synthetic oligonucleotide
  Antisense strand to SEQ ID NO: 886312
auacccacucaggauuuaa

SEQ ID NO: 886314 - RNA, 19 nt, Artificial Sequence
  Description of Artificial Sequence: Synthetic oligonucleotide
  Sense strand starting at position 3121 of SEQ ID NO: 588741
guggguaucgaguauucca

SEQ ID NO: 886315 - RNA, 19 nt, Artificial Sequence
  Description of Artificial Sequence: Synthetic oligonucleotide
  Antisense strand to SEQ ID NO: 886314
uggaauacucgauacccac

SEQ ID NO: 886316 - RNA, 19 nt, Artificial Sequence
  Description of Artificial Sequence: Synthetic oligonucleotide
  Sense strand starting at position 3485 of SEQ ID NO: 588741
uggaaaucagaauguugcu

SEQ ID NO: 886317 - RNA, 19 nt, Artificial Sequence
  Description of Artificial Sequence: Synthetic oligonucleotide
  Antisense strand to SEQ ID NO: 886316
agcaacauucugauuucca

SEQ ID NO: 886318 - RNA, 19 nt, Artificial Sequence
  Description of Artificial Sequence: Synthetic oligonucleotide
  Sense strand starting at position 3494 of SEQ ID NO: 588741
gaauguugcuaacugugga

SEQ ID NO: 886319 - RNA, 19 nt, Artificial Sequence
  Description of Artificial Sequence: Synthetic oligonucleotide
  Antisense strand to SEQ ID NO: 886318
uccacaguuagcaacauuc

SEQ ID NO: 886320 - RNA, 19 nt, Artificial Sequence
  Description of Artificial Sequence: Synthetic oligonucleotide
  Sense strand starting at position 3566 of SEQ ID NO: 588741
cuguguuucucccucagga

SEQ ID NO: 886321 - RNA, 19 nt, Artificial Sequence
  Description of Artificial Sequence: Synthetic oligonucleotide
  Antisense strand to SEQ ID NO: 886320
uccugagggagaaacacag

SEQ ID NO: 886322 - RNA, 19 nt, Artificial Sequence
  Description of Artificial Sequence: Synthetic oligonucleotide
  Sense strand starting at position 3568 of SEQ ID NO: 588741
guguuucucccucaggaag

SEQ ID NO: 886323 - RNA, 19 nt, Artificial Sequence
  Description of Artificial Sequence: Synthetic oligonucleotide
  Antisense strand to SEQ ID NO: 886322
cuuccugagggagaaacac

SEQ ID NO: 886324 - RNA, 19 nt, Artificial Sequence
  Description of Artificial Sequence: Synthetic oligonucleotide
  Sense strand starting at position 3646 of SEQ ID NO: 588741
gcauauguuugaccacuuu

SEQ ID NO: 886325 - RNA, 19 nt, Artificial Sequence
  Description of Artificial Sequence: Synthetic oligonucleotide
  Antisense strand to SEQ ID NO: 886324
aaaguggucaaacauaugc

SEQ ID NO: 886326 - RNA, 19 nt, Artificial Sequence
  Description of Artificial Sequence: Synthetic oligonucleotide
  Sense strand starting at position 3661 of SEQ ID NO: 588741
cuuugcugacuguauugaa

SEQ ID NO: 886327 - RNA, 19 nt, Artificial Sequence
  Description of Artificial Sequence: Synthetic oligonucleotide
  Antisense strand to SEQ ID NO: 886326
uucaauacagucagcaaag

SEQ ID NO: 886328 - RNA, 19 nt, Artificial Sequence
  Description of Artificial Sequence: Synthetic oligonucleotide
  Sense strand starting at position 3750 of SEQ ID NO: 588741
agaggugaugggugauaua

SEQ ID NO: 886329 - RNA, 19 nt, Artificial Sequence
  Description of Artificial Sequence: Synthetic oligonucleotide
  Antisense strand to SEQ ID NO: 886328
uauaucacccaucaccucu

SEQ ID NO: 886330 - RNA, 19 nt, Artificial Sequence
  Description of Artificial Sequence: Synthetic oligonucleotide
  Sense strand starting at position 3779 of SEQ ID NO: 588741
cucuuaagcuugcuggaaa

SEQ ID NO: 886331 - RNA, 19 nt, Artificial Sequence
  Description of Artificial Sequence: Synthetic oligonucleotide
  Antisense strand to SEQ ID NO: 886330
uuuccagcaagcuuaagag

SEQ ID NO: 886332 - RNA, 19 nt, Artificial Sequence
  Description of Artificial Sequence: Synthetic oligonucleotide
  Sense strand starting at position 3801 of SEQ ID NO: 588741
ugggaggaugugugaauga

SEQ ID NO: 886333 - RNA, 19 nt, Artificial Sequence
  Description of Artificial Sequence: Synthetic oligonucleotide
  Antisense strand to SEQ ID NO: 886332
ucauucacacauccuccca

SEQ ID NO: 886334 - RNA, 19 nt, Artificial Sequence
  Description of Artificial Sequence: Synthetic oligonucleotide
  Sense strand starting at position 3806 of SEQ ID NO: 588741
ggaugugugaaugaugcau

SEQ ID NO: 886335 - RNA, 19 nt, Artificial Sequence
  Description of Artificial Sequence: Synthetic oligonucleotide
  Antisense strand to SEQ ID NO: 886334
augcaucauucacacaucc

SEQ ID NO: 886336 - RNA, 19 nt, Artificial Sequence
  Description of Artificial Sequence: Synthetic oligonucleotide
  Sense strand starting at position 3937 of SEQ ID NO: 588741
ugucuuuggucaucacuga

SEQ ID NO: 886337 - RNA, 19 nt, Artificial Sequence
  Description of Artificial Sequence: Synthetic oligonucleotide
  Antisense strand to SEQ ID NO: 886336
ucagugaugaccaaagaca

SEQ ID NO: 886338 - RNA, 19 nt, Artificial Sequence
  Description of Artificial Sequence: Synthetic oligonucleotide
  Sense strand starting at position 3941 of SEQ ID NO: 588741
uuuggucaucacugagagu

SEQ ID NO: 886339 - RNA, 19 nt, Artificial Sequence
  Description of Artificial Sequence: Synthetic oligonucleotide
  Antisense strand to SEQ ID NO: 886338
acucucagugaugaccaaa

SEQ ID NO: 886340 - RNA, 19 nt, Artificial Sequence
  Description of Artificial Sequence: Synthetic oligonucleotide
  Sense strand starting at position 3955 of SEQ ID NO: 588741
agagucuauuuccauagga

SEQ ID NO: 886341 - RNA, 19 nt, Artificial Sequence
  Description of Artificial Sequence: Synthetic oligonucleotide
  Antisense strand to SEQ ID NO: 886340
uccuauggaaauagacucu

SEQ ID NO: 886342 - RNA, 19 nt, Artificial Sequence
  Description of Artificial Sequence: Synthetic oligonucleotide
  Sense strand starting at position 158 of SEQ ID NO: 588742
gcauuaaaguccuuuaaga

SEQ ID NO: 886343 - RNA, 19 nt, Artificial Sequence
  Description of Artificial Sequence: Synthetic oligonucleotide
  Antisense strand to SEQ ID NO: 886342
ucuuaaaggacuuuaaugc

SEQ ID NO: 886344 - RNA, 19 nt, Artificial Sequence
  Description of Artificial Sequence: Synthetic oligonucleotide
  Sense strand starting at position 160 of SEQ ID NO: 588742
auuaaaguccuuuaagagu

SEQ ID NO: 886345 - RNA, 19 nt, Artificial Sequence
  Description of Artificial Sequence: Synthetic oligonucleotide
  Antisense strand to SEQ ID NO: 886344
acucuuaaaggacuuuaau

SEQ ID NO: 886346 - RNA, 19 nt, Artificial Sequence
  Description of Artificial Sequence: Synthetic oligonucleotide
  Sense strand starting at position 355 of SEQ ID NO: 588742
ugcuguaauuucuucuaga

SEQ ID NO: 886347 - RNA, 19 nt, Artificial Sequence
  Description of Artificial Sequence: Synthetic oligonucleotide
  Antisense strand to SEQ ID NO: 886346
ucuagaagaaauuacagca

SEQ ID NO: 886348 - RNA, 19 nt, Artificial Sequence
  Description of Artificial Sequence: Synthetic oligonucleotide
  Sense strand starting at position 535 of SEQ ID NO: 588742
uggauacugccaggaaauc

SEQ ID NO: 886349 - RNA, 19 nt, Artificial Sequence
  Description of Artificial Sequence: Synthetic oligonucleotide
  Antisense strand to SEQ ID NO: 886348
gauuuccuggcaguaucca

SEQ ID NO: 886350 - RNA, 19 nt, Artificial Sequence
  Description of Artificial Sequence: Synthetic oligonucleotide
  Sense strand starting at position 680 of SEQ ID NO: 588742
cuccaauugugugccacaa

SEQ ID NO: 886351 - RNA, 19 nt, Artificial Sequence
  Description of Artificial Sequence: Synthetic oligonucleotide
  Antisense strand to SEQ ID NO: 886350
uuguggcacacaauuggag

SEQ ID NO: 886352 - RNA, 19 nt, Artificial Sequence
  Description of Artificial Sequence: Synthetic oligonucleotide
  Sense strand starting at position 684 of SEQ ID NO: 588742
aauugugugccacaaggga

SEQ ID NO: 886353 - RNA, 19 nt, Artificial Sequence
  Description of Artificial Sequence: Synthetic oligonucleotide
  Antisense strand to SEQ ID NO: 886352
ucccuuguggcacacaauu

SEQ ID NO: 886354 - RNA, 19 nt, Artificial Sequence
  Description of Artificial Sequence: Synthetic oligonucleotide
  Sense strand starting at position 803 of SEQ ID NO: 588742
agcugaaccgguuagaaua

SEQ ID NO: 886355 - RNA, 19 nt, Artificial Sequence
  Description of Artificial Sequence: Synthetic oligonucleotide
  Antisense strand to SEQ ID NO: 886354
uauucuaaccgguucagcu

SEQ ID NO: 886356 - RNA, 19 nt, Artificial Sequence
  Description of Artificial Sequence: Synthetic oligonucleotide
  Sense strand starting at position 839 of SEQ ID NO: 588742
ugagcuccagucuaaagaa

SEQ ID NO: 886357 - RNA, 19 nt, Artificial Sequence
  Description of Artificial Sequence: Synthetic oligonucleotide
  Antisense strand to SEQ ID NO: 886356
uucuuuagacuggagcuca

SEQ ID NO: 886358 - RNA, 19 nt, Artificial Sequence
  Description of Artificial Sequence: Synthetic oligonucleotide
  Sense strand starting at position 1122 of SEQ ID NO: 588742
gguaucuucccacaguacu

SEQ ID NO: 886359 - RNA, 19 nt, Artificial Sequence
  Description of Artificial Sequence: Synthetic oligonucleotide
  Antisense strand to SEQ ID NO: 886358
aguacugugggaagauacc

SEQ ID NO: 886360 - RNA, 19 nt, Artificial Sequence
  Description of Artificial Sequence: Synthetic oligonucleotide
  Sense strand starting at position 1155 of SEQ ID NO: 588742
agagauacauaugucaguu

SEQ ID NO: 886361 - RNA, 19 nt, Artificial Sequence
  Description of Artificial Sequence: Synthetic oligonucleotide
  Antisense strand to SEQ ID NO: 886360
aacugacauauguaucucu

SEQ ID NO: 886362 - RNA, 19 nt, Artificial Sequence
  Description of Artificial Sequence: Synthetic oligonucleotide
  Sense strand starting at position 1195 of SEQ ID NO: 588742
ggcagcaguguugggauaa

SEQ ID NO: 886363 - RNA, 19 nt, Artificial Sequence
  Description of Artificial Sequence: Synthetic oligonucleotide
  Antisense strand to SEQ ID NO: 886362
uuaucccaacacugcugcc

SEQ ID NO: 886364 - RNA, 19 nt, Artificial Sequence
  Description of Artificial Sequence: Synthetic oligonucleotide
  Sense strand starting at position 1227 of SEQ ID NO: 588742
ugcuccuuguaacuaugaa

SEQ ID NO: 886365 - RNA, 19 nt, Artificial Sequence
  Description of Artificial Sequence: Synthetic oligonucleotide
  Antisense strand to SEQ ID NO: 886364
uucauaguuacaaggagca

SEQ ID NO: 886366 - RNA, 19 nt, Artificial Sequence
  Description of Artificial Sequence: Synthetic oligonucleotide
  Sense strand starting at position 1308 of SEQ ID NO: 588742
acagaagcuucucuugaga

SEQ ID NO: 886367 - RNA, 19 nt, Artificial Sequence
  Description of Artificial Sequence: Synthetic oligonucleotide
  Antisense strand to SEQ ID NO: 886366
ucucaagagaagcuucugu

SEQ ID NO: 886368 - RNA, 19 nt, Artificial Sequence
  Description of Artificial Sequence: Synthetic oligonucleotide
  Sense strand starting at position 1319 of SEQ ID NO: 588742
ucuugagaauguucuguuc

SEQ ID NO: 886369 - RNA, 19 nt, Artificial Sequence
  Description of Artificial Sequence: Synthetic oligonucleotide
  Antisense strand to SEQ ID NO: 886368
gaacagaacauucucaaga

SEQ ID NO: 886370 - RNA, 19 nt, Artificial Sequence
  Description of Artificial Sequence: Synthetic oligonucleotide
  Sense strand starting at position 1349 of SEQ ID NO: 588742
cacaauguauuaucggagu

SEQ ID NO: 886371 - RNA, 19 nt, Artificial Sequence
  Description of Artificial Sequence: Synthetic oligonucleotide
  Antisense strand to SEQ ID NO: 886370
acuccgauaauacauugug

SEQ ID NO: 886372 - RNA, 19 nt, Artificial Sequence
  Description of Artificial Sequence: Synthetic oligonucleotide
  Sense strand starting at position 1441 of SEQ ID NO: 588742
ggguuugaggcucauuaaa

SEQ ID NO: 886373 - RNA, 19 nt, Artificial Sequence
  Description of Artificial Sequence: Synthetic oligonucleotide
  Antisense strand to SEQ ID NO: 886372
uuuaaugagccucaaaccc

SEQ ID NO: 886374 - RNA, 19 nt, Artificial Sequence
  Description of Artificial Sequence: Synthetic oligonucleotide
  Sense strand starting at position 1486 of SEQ ID NO: 588742
gccaacguccgggaugaau

SEQ ID NO: 886375 - RNA, 19 nt, Artificial Sequence
  Description of Artificial Sequence: Synthetic oligonucleotide
  Antisense strand to SEQ ID NO: 886374
auucaucccggacguuggc

SEQ ID NO: 886376 - RNA, 19 nt, Artificial Sequence
  Description of Artificial Sequence: Synthetic oligonucleotide
  Sense strand starting at position 1508 of SEQ ID NO: 588742
aagaguuguguuuacaagg

SEQ ID NO: 886377 - RNA, 19 nt, Artificial Sequence
  Description of Artificial Sequence: Synthetic oligonucleotide
  Antisense strand to SEQ ID NO: 886376
ccuuguaaacacaacucuu

SEQ ID NO: 886378 - RNA, 19 nt, Artificial Sequence
  Description of Artificial Sequence: Synthetic oligonucleotide
  Sense strand starting at position 1642 of SEQ ID NO: 588742
cagagaaaguaguuccguu

SEQ ID NO: 886379 - RNA, 19 nt, Artificial Sequence
  Description of Artificial Sequence: Synthetic oligonucleotide
  Antisense strand to SEQ ID NO: 886378
aacggaacuacuuucucug

SEQ ID NO: 886380 - RNA, 19 nt, Artificial Sequence
  Description of Artificial Sequence: Synthetic oligonucleotide
  Sense strand starting at position 1906 of SEQ ID NO: 588742
uccugaaggcguuagugau

SEQ ID NO: 886381 - RNA, 19 nt, Artificial Sequence
  Description of Artificial Sequence: Synthetic oligonucleotide
  Antisense strand to SEQ ID NO: 886380
aucacuaacgccuucagga

SEQ ID NO: 886382 - RNA, 19 nt, Artificial Sequence
  Description of Artificial Sequence: Synthetic oligonucleotide
  Sense strand starting at position 2214 of SEQ ID NO: 588742
ggacuuucuaagcgucaga

SEQ ID NO: 886383 - RNA, 19 nt, Artificial Sequence
  Description of Artificial Sequence: Synthetic oligonucleotide
  Antisense strand to SEQ ID NO: 886382
ucugacgcuuagaaagucc

SEQ ID NO: 886384 - RNA, 19 nt, Artificial Sequence
  Description of Artificial Sequence: Synthetic oligonucleotide
  Sense strand starting at position 2239 of SEQ ID NO: 588742
gcuggacauuuguuugcaa

SEQ ID NO: 886385 - RNA, 19 nt, Artificial Sequence
  Description of Artificial Sequence: Synthetic oligonucleotide
  Antisense strand to SEQ ID NO: 886384
uugcaaacaaauguccagc

SEQ ID NO: 886386 - RNA, 19 nt, Artificial Sequence
  Description of Artificial Sequence: Synthetic oligonucleotide
  Sense strand starting at position 2361 of SEQ ID NO: 588742
ccgggcauuccugaaggaa

SEQ ID NO: 886387 - RNA, 19 nt, Artificial Sequence
  Description of Artificial Sequence: Synthetic oligonucleotide
  Antisense strand to SEQ ID NO: 886386
uuccuucaggaaugcccgg

SEQ ID NO: 886388 - RNA, 19 nt, Artificial Sequence
  Description of Artificial Sequence: Synthetic oligonucleotide
  Sense strand starting at position 2364 of SEQ ID NO: 588742
ggcauuccugaaggaaugu

SEQ ID NO: 886389 - RNA, 19 nt, Artificial Sequence
  Description of Artificial Sequence: Synthetic oligonucleotide
  Antisense strand to SEQ ID NO: 886388
acauuccuucaggaaugcc

SEQ ID NO: 886390 - RNA, 19 nt, Artificial Sequence
  Description of Artificial Sequence: Synthetic oligonucleotide
  Sense strand starting at position 2365 of SEQ ID NO: 588742
gcauuccugaaggaauguu

SEQ ID NO: 886391 - RNA, 19 nt, Artificial Sequence
  Description of Artificial Sequence: Synthetic oligonucleotide
  Antisense strand to SEQ ID NO: 886390
aacauuccuucaggaaugc

SEQ ID NO: 886392 - RNA, 19 nt, Artificial Sequence
  Description of Artificial Sequence: Synthetic oligonucleotide
  Sense strand starting at position 2432 of SEQ ID NO: 588742
gagcuugucugcuuuauuu

SEQ ID NO: 886393 - RNA, 19 nt, Artificial Sequence
  Description of Artificial Sequence: Synthetic oligonucleotide
  Antisense strand to SEQ ID NO: 886392
aaauaaagcagacaagcuc

SEQ ID NO: 886394 - RNA, 19 nt, Artificial Sequence
  Description of Artificial Sequence: Synthetic oligonucleotide
  Sense strand starting at position 2548 of SEQ ID NO: 588742
gucucugaacuugaaagca

SEQ ID NO: 886395 - RNA, 19 nt, Artificial Sequence
  Description of Artificial Sequence: Synthetic oligonucleotide
  Antisense strand to SEQ ID NO: 886394
ugcuuucaaguucagagac

SEQ ID NO: 886396 - RNA, 19 nt, Artificial Sequence
  Description of Artificial Sequence: Synthetic oligonucleotide
  Sense strand starting at position 2641 of SEQ ID NO: 588742
uugccaucuguauguagga

SEQ ID NO: 886397 - RNA, 19 nt, Artificial Sequence
  Description of Artificial Sequence: Synthetic oligonucleotide
  Antisense strand to SEQ ID NO: 886396
uccuacauacagauggcaa

SEQ ID NO: 886398 - RNA, 19 nt, Artificial Sequence
  Description of Artificial Sequence: Synthetic oligonucleotide
  Sense strand starting at position 2642 of SEQ ID NO: 588742
ugccaucuguauguaggaa

SEQ ID NO: 886399 - RNA, 19 nt, Artificial Sequence
  Description of Artificial Sequence: Synthetic oligonucleotide
  Antisense strand to SEQ ID NO: 886398
uuccuacauacagauggca

SEQ ID NO: 886400 - RNA, 19 nt, Artificial Sequence
  Description of Artificial Sequence: Synthetic oligonucleotide
  Sense strand starting at position 2650 of SEQ ID NO: 588742
guauguaggaaguagaagu

SEQ ID NO: 886401 - RNA, 19 nt, Artificial Sequence
  Description of Artificial Sequence: Synthetic oligonucleotide
  Antisense strand to SEQ ID NO: 886400
acuucuacuuccuacauac

SEQ ID NO: 886402 - RNA, 19 nt, Artificial Sequence
  Description of Artificial Sequence: Synthetic oligonucleotide
  Sense strand starting at position 2807 of SEQ ID NO: 588742
cgagcuuucuaguuuauuu

SEQ ID NO: 886403 - RNA, 19 nt, Artificial Sequence
  Description of Artificial Sequence: Synthetic oligonucleotide
  Antisense strand to SEQ ID NO: 886402
aaauaaacuagaaagcucg

SEQ ID NO: 886404 - RNA, 19 nt, Artificial Sequence
  Description of Artificial Sequence: Synthetic oligonucleotide
  Sense strand starting at position 3512 of SEQ ID NO: 588742
aaauaaacucauggugugu

SEQ ID NO: 886405 - RNA, 19 nt, Artificial Sequence
  Description of Artificial Sequence: Synthetic oligonucleotide
  Antisense strand to SEQ ID NO: 886404
acacaccaugaguuuauuu

SEQ ID NO: 886406 - RNA, 19 nt, Artificial Sequence
  Description of Artificial Sequence: Synthetic oligonucleotide
  Sense strand starting at position 3516 of SEQ ID NO: 588742
aaacucaugguguguuuaa

SEQ ID NO: 886407 - RNA, 19 nt, Artificial Sequence
  Description of Artificial Sequence: Synthetic oligonucleotide
  Antisense strand to SEQ ID NO: 886406
uuaaacacaccaugaguuu

SEQ ID NO: 886408 - RNA, 19 nt, Artificial Sequence
  Description of Artificial Sequence: Synthetic oligonucleotide
  Sense strand starting at position 3517 of SEQ ID NO: 588742
aacucaugguguguuuaau

SEQ ID NO: 886409 - RNA, 19 nt, Artificial Sequence
  Description of Artificial Sequence: Synthetic oligonucleotide
  Antisense strand to SEQ ID NO: 886408
auuaaacacaccaugaguu

SEQ ID NO: 886410 - RNA, 19 nt, Artificial Sequence
  Description of Artificial Sequence: Synthetic oligonucleotide
  Sense strand starting at position 3588 of SEQ ID NO: 588742
cuaucuauugcauguaaag

SEQ ID NO: 886411 - RNA, 19 nt, Artificial Sequence
  Description of Artificial Sequence: Synthetic oligonucleotide
  Antisense strand to SEQ ID NO: 886410
cuuuacaugcaauagauag

SEQ ID NO: 886412 - RNA, 19 nt, Artificial Sequence
  Description of Artificial Sequence: Synthetic oligonucleotide
  Sense strand starting at position 3595 of SEQ ID NO: 588742
uugcauguaaagugaauga

SEQ ID NO: 886413 - RNA, 19 nt, Artificial Sequence
  Description of Artificial Sequence: Synthetic oligonucleotide
  Antisense strand to SEQ ID NO: 886412
ucauucacuuuacaugcaa

SEQ ID NO: 886414 - RNA, 19 nt, Artificial Sequence
  Description of Artificial Sequence: Synthetic oligonucleotide
  Sense strand starting at position 3655 of SEQ ID NO: 588742
caguauuuccuguggguau

SEQ ID NO: 886415 - RNA, 19 nt, Artificial Sequence
  Description of Artificial Sequence: Synthetic oligonucleotide
  Antisense strand to SEQ ID NO: 886414
auacccacaggaaauacug

SEQ ID NO: 886416 - RNA, 19 nt, Artificial Sequence
  Description of Artificial Sequence: Synthetic oligonucleotide
  Sense strand starting at position 3662 of SEQ ID NO: 588742
uccuguggguauguuuaua

SEQ ID NO: 886417 - RNA, 19 nt, Artificial Sequence
  Description of Artificial Sequence: Synthetic oligonucleotide
  Antisense strand to SEQ ID NO: 886416
uauaaacauacccacagga

SEQ ID NO: 886418 - RNA, 19 nt, Artificial Sequence
  Description of Artificial Sequence: Synthetic oligonucleotide
  Sense strand starting at position 3674 of SEQ ID NO: 588742
guuuauaaaggcuggaguu

SEQ ID NO: 886419 - RNA, 19 nt, Artificial Sequence
  Description of Artificial Sequence: Synthetic oligonucleotide
  Antisense strand to SEQ ID NO: 886418
aacuccagccuuuauaaac

SEQ ID NO: 886420 - RNA, 19 nt, Artificial Sequence
  Description of Artificial Sequence: Synthetic oligonucleotide
  Sense strand starting at position 3675 of SEQ ID NO: 588742
uuuauaaaggcuggaguua

SEQ ID NO: 886421 - RNA, 19 nt, Artificial Sequence
  Description of Artificial Sequence: Synthetic oligonucleotide
  Antisense strand to SEQ ID NO: 886420
uaacuccagccuuuauaaa

SEQ ID NO: 886422 - RNA, 19 nt, Artificial Sequence
  Description of Artificial Sequence: Synthetic oligonucleotide
  Sense strand starting at position 39 of SEQ ID NO: 588743
uccagucaguaucuguaua

SEQ ID NO: 886423 - RNA, 19 nt, Artificial Sequence
  Description of Artificial Sequence: Synthetic oligonucleotide
  Antisense strand to SEQ ID NO: 886422
uauacagauacugacugga

SEQ ID NO: 886424 - RNA, 19 nt, Artificial Sequence
  Description of Artificial Sequence: Synthetic oligonucleotide
  Sense strand starting at position 53 of SEQ ID NO: 588743
guauaacugccuugcauau

SEQ ID NO: 886425 - RNA, 19 nt, Artificial Sequence
  Description of Artificial Sequence: Synthetic oligonucleotide
  Antisense strand to SEQ ID NO: 886424
auaugcaaggcaguuauac

SEQ ID NO: 886426 - RNA, 19 nt, Artificial Sequence
  Description of Artificial Sequence: Synthetic oligonucleotide
  Sense strand starting at position 167 of SEQ ID NO: 588743
acaguuauccuacaguuua

SEQ ID NO: 886427 - RNA, 19 nt, Artificial Sequence
  Description of Artificial Sequence: Synthetic oligonucleotide
  Antisense strand to SEQ ID NO: 886426
uaaacuguaggauaacugu

SEQ ID NO: 886428 - RNA, 19 nt, Artificial Sequence
  Description of Artificial Sequence: Synthetic oligonucleotide
  Sense strand starting at position 394 of SEQ ID NO: 588743
ugaauaagguaaugugaaa

SEQ ID NO: 886429 - RNA, 19 nt, Artificial Sequence
  Description of Artificial Sequence: Synthetic oligonucleotide
  Antisense strand to SEQ ID NO: 886428
uuucacauuaccuuauuca

SEQ ID NO: 886430 - RNA, 19 nt, Artificial Sequence
  Description of Artificial Sequence: Synthetic oligonucleotide
  Sense strand starting at position 401 of SEQ ID NO: 588743
gguaaugugaaauaaguuu

SEQ ID NO: 886431 - RNA, 19 nt, Artificial Sequence
  Description of Artificial Sequence: Synthetic oligonucleotide
  Antisense strand to SEQ ID NO: 886430
aaacuuauuucacauuacc

SEQ ID NO: 886432 - RNA, 19 nt, Artificial Sequence
  Description of Artificial Sequence: Synthetic oligonucleotide
  Sense strand starting at position 420 of SEQ ID NO: 588743
ucaacaauguucucgaaga

SEQ ID NO: 886433 - RNA, 19 nt, Artificial Sequence
  Description of Artificial Sequence: Synthetic oligonucleotide
  Antisense strand to SEQ ID NO: 886432
ucuucgagaacauuguuga

SEQ ID NO: 886434 - RNA, 19 nt, Artificial Sequence
  Description of Artificial Sequence: Synthetic oligonucleotide
  Sense strand starting at position 592 of SEQ ID NO: 588743
cacuuugaugucuguagca

SEQ ID NO: 886435 - RNA, 19 nt, Artificial Sequence
  Description of Artificial Sequence: Synthetic oligonucleotide
  Antisense strand to SEQ ID NO: 886434
ugcuacagacaucaaagug

SEQ ID NO: 886436 - RNA, 19 nt, Artificial Sequence
  Description of Artificial Sequence: Synthetic oligonucleotide
  Sense strand starting at position 594 of SEQ ID NO: 588743
cuuugaugucuguagcagu

SEQ ID NO: 886437 - RNA, 19 nt, Artificial Sequence
  Description of Artificial Sequence: Synthetic oligonucleotide
  Antisense strand to SEQ ID NO: 886436
acugcuacagacaucaaag

SEQ ID NO: 886438 - RNA, 19 nt, Artificial Sequence
  Description of Artificial Sequence: Synthetic oligonucleotide
  Sense strand starting at position 601 of SEQ ID NO: 588743
gucuguagcagugugcaau

SEQ ID NO: 886439 - RNA, 19 nt, Artificial Sequence
  Description of Artificial Sequence: Synthetic oligonucleotide
  Antisense strand to SEQ ID NO: 886438
auugcacacugcuacagac

SEQ ID NO: 886440 - RNA, 19 nt, Artificial Sequence
  Description of Artificial Sequence: Synthetic oligonucleotide
  Sense strand starting at position 607 of SEQ ID NO: 588743
agcagugugcaaucugcau

SEQ ID NO: 886441 - RNA, 19 nt, Artificial Sequence
  Description of Artificial Sequence: Synthetic oligonucleotide
  Antisense strand to SEQ ID NO: 886440
augcagauugcacacugcu

SEQ ID NO: 886442 - RNA, 19 nt, Artificial Sequence
  Description of Artificial Sequence: Synthetic oligonucleotide
  Sense strand starting at position 630 of SEQ ID NO: 588743
augaaucaauccgaaaugu

SEQ ID NO: 886443 - RNA, 19 nt, Artificial Sequence
  Description of Artificial Sequence: Synthetic oligonucleotide
  Antisense strand to SEQ ID NO: 886442
acauuucggauugauucau

SEQ ID NO: 886444 - RNA, 19 nt, Artificial Sequence
  Description of Artificial Sequence: Synthetic oligonucleotide
  Sense strand starting at position 749 of SEQ ID NO: 588743
gcaacaugugaacgacuuu

SEQ ID NO: 886445 - RNA, 19 nt, Artificial Sequence
  Description of Artificial Sequence: Synthetic oligonucleotide
  Antisense strand to SEQ ID NO: 886444
aaagucguucacauguugc

SEQ ID NO: 886446 - RNA, 19 nt, Artificial Sequence
  Description of Artificial Sequence: Synthetic oligonucleotide
  Sense strand starting at position 849 of SEQ ID NO: 588743
ucaaauacauaaugggaau

SEQ ID NO: 886447 - RNA, 19 nt, Artificial Sequence
  Description of Artificial Sequence: Synthetic oligonucleotide
  Antisense strand to SEQ ID NO: 886446
auucccauuauguauuuga

SEQ ID NO: 886448 - RNA, 19 nt, Artificial Sequence
  Description of Artificial Sequence: Synthetic oligonucleotide
  Sense strand starting at position 939 of SEQ ID NO: 588743
cuaacauaguuguuacuuu

SEQ ID NO: 886449 - RNA, 19 nt, Artificial Sequence
  Description of Artificial Sequence: Synthetic oligonucleotide
  Antisense strand to SEQ ID NO: 886448
aaaguaacaacuauguuag

SEQ ID NO: 886450 - RNA, 19 nt, Artificial Sequence
  Description of Artificial Sequence: Synthetic oligonucleotide
  Sense strand starting at position 1200 of SEQ ID NO: 588743
uggugucgagaaagcguua

SEQ ID NO: 886451 - RNA, 19 nt, Artificial Sequence
  Description of Artificial Sequence: Synthetic oligonucleotide
  Antisense strand to SEQ ID NO: 886450
uaacgcuuucucgacacca

SEQ ID NO: 886452 - RNA, 19 nt, Artificial Sequence
  Description of Artificial Sequence: Synthetic oligonucleotide
  Sense strand starting at position 1204 of SEQ ID NO: 588743
gucgagaaagcguuaacgu

SEQ ID NO: 886453 - RNA, 19 nt, Artificial Sequence
  Description of Artificial Sequence: Synthetic oligonucleotide
  Antisense strand to SEQ ID NO: 886452
acguuaacgcuuucucgac

SEQ ID NO: 886454 - RNA, 19 nt, Artificial Sequence
  Description of Artificial Sequence: Synthetic oligonucleotide
  Sense strand starting at position 1205 of SEQ ID NO: 588743
ucgagaaagcguuaacgua

SEQ ID NO: 886455 - RNA, 19 nt, Artificial Sequence
  Description of Artificial Sequence: Synthetic oligonucleotide
  Antisense strand to SEQ ID NO: 886454
uacguuaacgcuuucucga

SEQ ID NO: 886456 - RNA, 19 nt, Artificial Sequence
  Description of Artificial Sequence: Synthetic oligonucleotide
  Sense strand starting at position 1544 of SEQ ID NO: 588743
gggugugucgaguaaggcu

SEQ ID NO: 886457 - RNA, 19 nt, Artificial Sequence
  Description of Artificial Sequence: Synthetic oligonucleotide
  Antisense strand to SEQ ID NO: 886456
agccuuacucgacacaccc

SEQ ID NO: 886458 - RNA, 19 nt, Artificial Sequence
  Description of Artificial Sequence: Synthetic oligonucleotide
  Sense strand starting at position 2366 of SEQ ID NO: 588743
ggaccugacucccaagagu

SEQ ID NO: 886459 - RNA, 19 nt, Artificial Sequence
  Description of Artificial Sequence: Synthetic oligonucleotide
  Antisense strand to SEQ ID NO: 886458
acucuugggagucaggucc

SEQ ID NO: 886460 - RNA, 19 nt, Artificial Sequence
  Description of Artificial Sequence: Synthetic oligonucleotide
  Sense strand starting at position 2409 of SEQ ID NO: 588743
ccagaaacgagguggaauu

SEQ ID NO: 886461 - RNA, 19 nt, Artificial Sequence
  Description of Artificial Sequence: Synthetic oligonucleotide
  Antisense strand to SEQ ID NO: 886460
aauuccaccucguuucugg

SEQ ID NO: 886462 - RNA, 19 nt, Artificial Sequence
  Description of Artificial Sequence: Synthetic oligonucleotide
  Sense strand starting at position 2585 of SEQ ID NO: 588743
uuaaguaucugagugcauu

SEQ ID NO: 886463 - RNA, 19 nt, Artificial Sequence
  Description of Artificial Sequence: Synthetic oligonucleotide
  Antisense strand to SEQ ID NO: 886462
aaugcacucagauacuuaa

SEQ ID NO: 886464 - RNA, 19 nt, Artificial Sequence
  Description of Artificial Sequence: Synthetic oligonucleotide
  Sense strand starting at position 2586 of SEQ ID NO: 588743
uaaguaucugagugcauuu

SEQ ID NO: 886465 - RNA, 19 nt, Artificial Sequence
  Description of Artificial Sequence: Synthetic oligonucleotide
  Antisense strand to SEQ ID NO: 886464
aaaugcacucagauacuua

SEQ ID NO: 886466 - RNA, 19 nt, Artificial Sequence
  Description of Artificial Sequence: Synthetic oligonucleotide
  Sense strand starting at position 2606 of SEQ ID NO: 588743
gaccuaaccgucuaguauu

SEQ ID NO: 886467 - RNA, 19 nt, Artificial Sequence
  Description of Artificial Sequence: Synthetic oligonucleotide
  Antisense strand to SEQ ID NO: 886466
aauacuagacgguuagguc

SEQ ID NO: 886468 - RNA, 19 nt, Artificial Sequence
  Description of Artificial Sequence: Synthetic oligonucleotide
  Sense strand starting at position 2737 of SEQ ID NO: 588743
gugauuugcucacaguuuc

SEQ ID NO: 886469 - RNA, 19 nt, Artificial Sequence
  Description of Artificial Sequence: Synthetic oligonucleotide
  Antisense strand to SEQ ID NO: 886468
gaaacugugagcaaaucac

SEQ ID NO: 886470 - RNA, 19 nt, Artificial Sequence
  Description of Artificial Sequence: Synthetic oligonucleotide
  Sense strand starting at position 2858 of SEQ ID NO: 588743
gugagaaauugaguacuuu

SEQ ID NO: 886471 - RNA, 19 nt, Artificial Sequence
  Description of Artificial Sequence: Synthetic oligonucleotide
  Antisense strand to SEQ ID NO: 886470
aaaguacucaauuucucac

SEQ ID NO: 886472 - RNA, 19 nt, Artificial Sequence
  Description of Artificial Sequence: Synthetic oligonucleotide
  Sense strand starting at position 2966 of SEQ ID NO: 588743
guggcuucgucauuugaaa

SEQ ID NO: 886473 - RNA, 19 nt, Artificial Sequence
  Description of Artificial Sequence: Synthetic oligonucleotide
  Antisense strand to SEQ ID NO: 886472
uuucaaaugacgaagccac

SEQ ID NO: 886474 - RNA, 19 nt, Artificial Sequence
  Description of Artificial Sequence: Synthetic oligonucleotide
  Sense strand starting at position 3172 of SEQ ID NO: 588743
caguccguuuauguauauu

SEQ ID NO: 886475 - RNA, 19 nt, Artificial Sequence
  Description of Artificial Sequence: Synthetic oligonucleotide
  Antisense strand to SEQ ID NO: 886474
aauauacauaaacggacug

SEQ ID NO: 886476 - RNA, 19 nt, Artificial Sequence
  Description of Artificial Sequence: Synthetic oligonucleotide
  Sense strand starting at position 3214 of SEQ ID NO: 588743
gguagaguaauucggugag

SEQ ID NO: 886477 - RNA, 19 nt, Artificial Sequence
  Description of Artificial Sequence: Synthetic oligonucleotide
  Antisense strand to SEQ ID NO: 886476
cucaccgaauuacucuacc

SEQ ID NO: 886478 - RNA, 19 nt, Artificial Sequence
  Description of Artificial Sequence: Synthetic oligonucleotide
  Sense strand starting at position 3216 of SEQ ID NO: 588743
uagaguaauucggugaggu

SEQ ID NO: 886479 - RNA, 19 nt, Artificial Sequence
  Description of Artificial Sequence: Synthetic oligonucleotide
  Antisense strand to SEQ ID NO: 886478
accucaccgaauuacucua

SEQ ID NO: 886480 - RNA, 19 nt, Artificial Sequence
  Description of Artificial Sequence: Synthetic oligonucleotide
  Sense strand starting at position 3217 of SEQ ID NO: 588743
agaguaauucggugaggua

SEQ ID NO: 886481 - RNA, 19 nt, Artificial Sequence
  Description of Artificial Sequence: Synthetic oligonucleotide
  Antisense strand to SEQ ID NO: 886480
uaccucaccgaauuacucu

SEQ ID NO: 886482 - RNA, 19 nt, Artificial Sequence
  Description of Artificial Sequence: Synthetic oligonucleotide
  Sense strand starting at position 3218 of SEQ ID NO: 588743
gaguaauucggugagguaa

SEQ ID NO: 886483 - RNA, 19 nt, Artificial Sequence
  Description of Artificial Sequence: Synthetic oligonucleotide
  Antisense strand to SEQ ID NO: 886482
uuaccucaccgaauuacuc

SEQ ID NO: 886484 - RNA, 19 nt, Artificial Sequence
  Description of Artificial Sequence: Synthetic oligonucleotide
  Sense strand starting at position 3326 of SEQ ID NO: 588743
uuguaaacauugccagaug

SEQ ID NO: 886485 - RNA, 19 nt, Artificial Sequence
  Description of Artificial Sequence: Synthetic oligonucleotide
  Antisense strand to SEQ ID NO: 886484
caucuggcaauguuuacaa

SEQ ID NO: 886486 - RNA, 19 nt, Artificial Sequence
  Description of Artificial Sequence: Synthetic oligonucleotide
  Sense strand starting at position 3337 of SEQ ID NO: 588743
gccagauggaaauguagaa

SEQ ID NO: 886487 - RNA, 19 nt, Artificial Sequence
  Description of Artificial Sequence: Synthetic oligonucleotide
  Antisense strand to SEQ ID NO: 886486
uucuacauuuccaucuggc

SEQ ID NO: 886488 - RNA, 19 nt, Artificial Sequence
  Description of Artificial Sequence: Synthetic oligonucleotide
  Sense strand starting at position 3382 of SEQ ID NO: 588743
gucuuucuaucacuguauu

SEQ ID NO: 886489 - RNA, 19 nt, Artificial Sequence
  Description of Artificial Sequence: Synthetic oligonucleotide
  Antisense strand to SEQ ID NO: 886488
aauacagugauagaaagac

SEQ ID NO: 886490 - RNA, 19 nt, Artificial Sequence
  Description of Artificial Sequence: Synthetic oligonucleotide
  Sense strand starting at position 3390 of SEQ ID NO: 588743
aucacuguauuugggauau

SEQ ID NO: 886491 - RNA, 19 nt, Artificial Sequence
  Description of Artificial Sequence: Synthetic oligonucleotide
  Antisense strand to SEQ ID NO: 886490
auaucccaaauacagugau

SEQ ID NO: 886492 - RNA, 19 nt, Artificial Sequence
  Description of Artificial Sequence: Synthetic oligonucleotide
  Sense strand starting at position 3392 of SEQ ID NO: 588743
cacuguauuugggauauau

SEQ ID NO: 886493 - RNA, 19 nt, Artificial Sequence
  Description of Artificial Sequence: Synthetic oligonucleotide
  Antisense strand to SEQ ID NO: 886492
auauaucccaaauacagug

SEQ ID NO: 886494 - RNA, 19 nt, Artificial Sequence
  Description of Artificial Sequence: Synthetic oligonucleotide
  Sense strand starting at position 3402 of SEQ ID NO: 588743
gggauauauucuguugaug

SEQ ID NO: 886495 - RNA, 19 nt, Artificial Sequence
  Description of Artificial Sequence: Synthetic oligonucleotide
  Antisense strand to SEQ ID NO: 886494
caucaacagaauauauccc

SEQ ID NO: 886496 - RNA, 19 nt, Artificial Sequence
  Description of Artificial Sequence: Synthetic oligonucleotide
  Sense strand starting at position 3453 of SEQ ID NO: 588743
guaauaucagcauaaaugc

SEQ ID NO: 886497 - RNA, 19 nt, Artificial Sequence
  Description of Artificial Sequence: Synthetic oligonucleotide
  Antisense strand to SEQ ID NO: 886496
gcauuuaugcugauauuac

SEQ ID NO: 886498 - RNA, 19 nt, Artificial Sequence
  Description of Artificial Sequence: Synthetic oligonucleotide
  Sense strand starting at position 3563 of SEQ ID NO: 588743
uaacaauucugcgugcauc

SEQ ID NO: 886499 - RNA, 19 nt, Artificial Sequence
  Description of Artificial Sequence: Synthetic oligonucleotide
  Antisense strand to SEQ ID NO: 886498
gaugcacgcagaauuguua

SEQ ID NO: 886500 - RNA, 19 nt, Artificial Sequence
  Description of Artificial Sequence: Synthetic oligonucleotide
  Sense strand starting at position 3968 of SEQ ID NO: 588743
cuggauuauagcugggcau

SEQ ID NO: 886501 - RNA, 19 nt, Artificial Sequence
  Description of Artificial Sequence: Synthetic oligonucleotide
  Antisense strand to SEQ ID NO: 886500
augcccagcuauaauccag

SEQ ID NO: 886502 - RNA, 19 nt, Artificial Sequence
  Description of Artificial Sequence: Synthetic oligonucleotide
  Sense strand starting at position 35 of SEQ ID NO: 588744
auuaucucuuaggaggaaa

SEQ ID NO: 886503 - RNA, 19 nt, Artificial Sequence
  Description of Artificial Sequence: Synthetic oligonucleotide
  Antisense strand to SEQ ID NO: 886502
uuuccuccuaagagauaau

SEQ ID NO: 886504 - RNA, 19 nt, Artificial Sequence
  Description of Artificial Sequence: Synthetic oligonucleotide
  Sense strand starting at position 99 of SEQ ID NO: 588744
acgagagacaguugggauu

SEQ ID NO: 886505 - RNA, 19 nt, Artificial Sequence
  Description of Artificial Sequence: Synthetic oligonucleotide
  Antisense strand to SEQ ID NO: 886504
aaucccaacugucucucgu

SEQ ID NO: 886506 - RNA, 19 nt, Artificial Sequence
  Description of Artificial Sequence: Synthetic oligonucleotide
  Sense strand starting at position 128 of SEQ ID NO: 588744
cuagaaagauauguugacu

SEQ ID NO: 886507 - RNA, 19 nt, Artificial Sequence
  Description of Artificial Sequence: Synthetic oligonucleotide
  Antisense strand to SEQ ID NO: 886506
agucaacauaucuuucuag

SEQ ID NO: 886508 - RNA, 19 nt, Artificial Sequence
  Description of Artificial Sequence: Synthetic oligonucleotide
  Sense strand starting at position 223 of SEQ ID NO: 588744
uuuaauuagucuccugaag

SEQ ID NO: 886509 - RNA, 19 nt, Artificial Sequence
  Description of Artificial Sequence: Synthetic oligonucleotide
  Antisense strand to SEQ ID NO: 886508
cuucaggagacuaauuaaa

SEQ ID NO: 886510 - RNA, 19 nt, Artificial Sequence
  Description of Artificial Sequence: Synthetic oligonucleotide
  Sense strand starting at position 340 of SEQ ID NO: 588744
ccaagaaacugucuucgau

SEQ ID NO: 886511 - RNA, 19 nt, Artificial Sequence
  Description of Artificial Sequence: Synthetic oligonucleotide
  Antisense strand to SEQ ID NO: 886510
aucgaagacaguuucuugg

SEQ ID NO: 886512 - RNA, 19 nt, Artificial Sequence
  Description of Artificial Sequence: Synthetic oligonucleotide
  Sense strand starting at position 342 of SEQ ID NO: 588744
aagaaacugucuucgauua

SEQ ID NO: 886513 - RNA, 19 nt, Artificial Sequence
  Description of Artificial Sequence: Synthetic oligonucleotide
  Antisense strand to SEQ ID NO: 886512
uaaucgaagacaguuucuu

SEQ ID NO: 886514 - RNA, 19 nt, Artificial Sequence
  Description of Artificial Sequence: Synthetic oligonucleotide
  Sense strand starting at position 343 of SEQ ID NO: 588744
agaaacugucuucgauuaa

SEQ ID NO: 886515 - RNA, 19 nt, Artificial Sequence
  Description of Artificial Sequence: Synthetic oligonucleotide
  Antisense strand to SEQ ID NO: 886514
uuaaucgaagacaguuucu

SEQ ID NO: 886516 - RNA, 19 nt, Artificial Sequence
  Description of Artificial Sequence: Synthetic oligonucleotide
  Sense strand starting at position 347 of SEQ ID NO: 588744
acugucuucgauuaauguu

SEQ ID NO: 886517 - RNA, 19 nt, Artificial Sequence
  Description of Artificial Sequence: Synthetic oligonucleotide
  Antisense strand to SEQ ID NO: 886516
aacauuaaucgaagacagu

SEQ ID NO: 886518 - RNA, 19 nt, Artificial Sequence
  Description of Artificial Sequence: Synthetic oligonucleotide
  Sense strand starting at position 413 of SEQ ID NO: 588744
guuaauaaccuaugucauc

SEQ ID NO: 886519 - RNA, 19 nt, Artificial Sequence
  Description of Artificial Sequence: Synthetic oligonucleotide
  Antisense strand to SEQ ID NO: 886518
gaugacauagguuauuaac

SEQ ID NO: 886520 - RNA, 19 nt, Artificial Sequence
  Description of Artificial Sequence: Synthetic oligonucleotide
  Sense strand starting at position 600 of SEQ ID NO: 588744
gguguaacacuaugguuau

SEQ ID NO: 886521 - RNA, 19 nt, Artificial Sequence
  Description of Artificial Sequence: Synthetic oligonucleotide
  Antisense strand to SEQ ID NO: 886520
auaaccauaguguuacacc

SEQ ID NO: 886522 - RNA, 19 nt, Artificial Sequence
  Description of Artificial Sequence: Synthetic oligonucleotide
  Sense strand starting at position 610 of SEQ ID NO: 588744
uaugguuauugguucugau

SEQ ID NO: 886523 - RNA, 19 nt, Artificial Sequence
  Description of Artificial Sequence: Synthetic oligonucleotide
  Antisense strand to SEQ ID NO: 886522
aucagaaccaauaaccaua

SEQ ID NO: 886524 - RNA, 19 nt, Artificial Sequence
  Description of Artificial Sequence: Synthetic oligonucleotide
  Sense strand starting at position 635 of SEQ ID NO: 588744
ggcaaaucaugcuccgacu

SEQ ID NO: 886525 - RNA, 19 nt, Artificial Sequence
  Description of Artificial Sequence: Synthetic oligonucleotide
  Antisense strand to SEQ ID NO: 886524
agucggagcaugauuugcc

SEQ ID NO: 886526 - RNA, 19 nt, Artificial Sequence
  Description of Artificial Sequence: Synthetic oligonucleotide
  Sense strand starting at position 677 of SEQ ID NO: 588744
uccagucaguaucuguaua

SEQ ID NO: 886527 - RNA, 19 nt, Artificial Sequence
  Description of Artificial Sequence: Synthetic oligonucleotide
  Antisense strand to SEQ ID NO: 886526
uauacagauacugacugga

SEQ ID NO: 886528 - RNA, 19 nt, Artificial Sequence
  Description of Artificial Sequence: Synthetic oligonucleotide
  Sense strand starting at position 691 of SEQ ID NO: 588744
guauaacugccuugcauau

SEQ ID NO: 886529 - RNA, 19 nt, Artificial Sequence
  Description of Artificial Sequence: Synthetic oligonucleotide
  Antisense strand to SEQ ID NO: 886528
auaugcaaggcaguuauac

SEQ ID NO: 886530 - RNA, 19 nt, Artificial Sequence
  Description of Artificial Sequence: Synthetic oligonucleotide
  Sense strand starting at position 805 of SEQ ID NO: 588744
acaguuauccuacaguuua

SEQ ID NO: 886531 - RNA, 19 nt, Artificial Sequence
  Description of Artificial Sequence: Synthetic oligonucleotide
  Antisense strand to SEQ ID NO: 886530
uaaacuguaggauaacugu

SEQ ID NO: 886532 - RNA, 19 nt, Artificial Sequence
  Description of Artificial Sequence: Synthetic oligonucleotide
  Sense strand starting at position 1039 of SEQ ID NO: 588744
gguaaugugaaauaaguuu

SEQ ID NO: 886533 - RNA, 19 nt, Artificial Sequence
  Description of Artificial Sequence: Synthetic oligonucleotide
  Antisense strand to SEQ ID NO: 886532
aaacuuauuucacauuacc

SEQ ID NO: 886534 - RNA, 19 nt, Artificial Sequence
  Description of Artificial Sequence: Synthetic oligonucleotide
  Sense strand starting at position 1058 of SEQ ID NO: 588744
ucaacaauguucucgaaga

SEQ ID NO: 886535 - RNA, 19 nt, Artificial Sequence
  Description of Artificial Sequence: Synthetic oligonucleotide
  Antisense strand to SEQ ID NO: 886534
ucuucgagaacauuguuga

SEQ ID NO: 886536 - RNA, 19 nt, Artificial Sequence
  Description of Artificial Sequence: Synthetic oligonucleotide
  Sense strand starting at position 1230 of SEQ ID NO: 588744
cacuuugaugucuguagca

SEQ ID NO: 886537 - RNA, 19 nt, Artificial Sequence
  Description of Artificial Sequence: Synthetic oligonucleotide
  Antisense strand to SEQ ID NO: 886536
ugcuacagacaucaaagug

SEQ ID NO: 886538 - RNA, 19 nt, Artificial Sequence
  Description of Artificial Sequence: Synthetic oligonucleotide
  Sense strand starting at position 1232 of SEQ ID NO: 588744
cuuugaugucuguagcagu

SEQ ID NO: 886539 - RNA, 19 nt, Artificial Sequence
  Description of Artificial Sequence: Synthetic oligonucleotide
  Antisense strand to SEQ ID NO: 886538
acugcuacagacaucaaag

SEQ ID NO: 886540 - RNA, 19 nt, Artificial Sequence
  Description of Artificial Sequence: Synthetic oligonucleotide
  Sense strand starting at position 1239 of SEQ ID NO: 588744
gucuguagcagugugcaau

SEQ ID NO: 886541 - RNA, 19 nt, Artificial Sequence
  Description of Artificial Sequence: Synthetic oligonucleotide
  Antisense strand to SEQ ID NO: 886540
auugcacacugcuacagac

SEQ ID NO: 886542 - RNA, 19 nt, Artificial Sequence
  Description of Artificial Sequence: Synthetic oligonucleotide
  Sense strand starting at position 1245 of SEQ ID NO: 588744
agcagugugcaaucugcau

SEQ ID NO: 886543 - RNA, 19 nt, Artificial Sequence
  Description of Artificial Sequence: Synthetic oligonucleotide
  Antisense strand to SEQ ID NO: 886542
augcagauugcacacugcu

SEQ ID NO: 886544 - RNA, 19 nt, Artificial Sequence
  Description of Artificial Sequence: Synthetic oligonucleotide
  Sense strand starting at position 1387 of SEQ ID NO: 588744
gcaacaugugaacgacuuu

SEQ ID NO: 886545 - RNA, 19 nt, Artificial Sequence
  Description of Artificial Sequence: Synthetic oligonucleotide
  Antisense strand to SEQ ID NO: 886544
aaagucguucacauguugc

SEQ ID NO: 886546 - RNA, 19 nt, Artificial Sequence
  Description of Artificial Sequence: Synthetic oligonucleotide
  Sense strand starting at position 1487 of SEQ ID NO: 588744
ucaaauacauaaugggaau

SEQ ID NO: 886547 - RNA, 19 nt, Artificial Sequence
  Description of Artificial Sequence: Synthetic oligonucleotide
  Antisense strand to SEQ ID NO: 886546
auucccauuauguauuuga

SEQ ID NO: 886548 - RNA, 19 nt, Artificial Sequence
  Description of Artificial Sequence: Synthetic oligonucleotide
  Sense strand starting at position 1577 of SEQ ID NO: 588744
cuaacauaguuguuacuuu

SEQ ID NO: 886549 - RNA, 19 nt, Artificial Sequence
  Description of Artificial Sequence: Synthetic oligonucleotide
  Antisense strand to SEQ ID NO: 886548
aaaguaacaacuauguuag

SEQ ID NO: 886550 - RNA, 19 nt, Artificial Sequence
  Description of Artificial Sequence: Synthetic oligonucleotide
  Sense strand starting at position 1838 of SEQ ID NO: 588744
uggugucgagaaagcguua

SEQ ID NO: 886551 - RNA, 19 nt, Artificial Sequence
  Description of Artificial Sequence: Synthetic oligonucleotide
  Antisense strand to SEQ ID NO: 886550
uaacgcuuucucgacacca

SEQ ID NO: 886552 - RNA, 19 nt, Artificial Sequence
  Description of Artificial Sequence: Synthetic oligonucleotide
  Sense strand starting at position 1842 of SEQ ID NO: 588744
gucgagaaagcguuaacgu

SEQ ID NO: 886553 - RNA, 19 nt, Artificial Sequence
  Description of Artificial Sequence: Synthetic oligonucleotide
  Antisense strand to SEQ ID NO: 886552
acguuaacgcuuucucgac

SEQ ID NO: 886554 - RNA, 19 nt, Artificial Sequence
  Description of Artificial Sequence: Synthetic oligonucleotide
  Sense strand starting at position 1843 of SEQ ID NO: 588744
ucgagaaagcguuaacgua

SEQ ID NO: 886555 - RNA, 19 nt, Artificial Sequence
  Description of Artificial Sequence: Synthetic oligonucleotide
  Antisense strand to SEQ ID NO: 886554
uacguuaacgcuuucucga

SEQ ID NO: 886556 - RNA, 19 nt, Artificial Sequence
  Description of Artificial Sequence: Synthetic oligonucleotide
  Sense strand starting at position 2182 of SEQ ID NO: 588744
gggugugucgaguaaggcu

SEQ ID NO: 886557 - RNA, 19 nt, Artificial Sequence
  Description of Artificial Sequence: Synthetic oligonucleotide
  Antisense strand to SEQ ID NO: 886556
agccuuacucgacacaccc

SEQ ID NO: 886558 - RNA, 19 nt, Artificial Sequence
  Description of Artificial Sequence: Synthetic oligonucleotide
  Sense strand starting at position 3047 of SEQ ID NO: 588744
ccagaaacgagguggaauu

SEQ ID NO: 886559 - RNA, 19 nt, Artificial Sequence
  Description of Artificial Sequence: Synthetic oligonucleotide
  Antisense strand to SEQ ID NO: 886558
aauuccaccucguuucugg

SEQ ID NO: 886560 - RNA, 19 nt, Artificial Sequence
  Description of Artificial Sequence: Synthetic oligonucleotide
  Sense strand starting at position 3223 of SEQ ID NO: 588744
uuaaguaucugagugcauu

SEQ ID NO: 886561 - RNA, 19 nt, Artificial Sequence
  Description of Artificial Sequence: Synthetic oligonucleotide
  Antisense strand to SEQ ID NO: 886560
aaugcacucagauacuuaa

SEQ ID NO: 886562 - RNA, 19 nt, Artificial Sequence
  Description of Artificial Sequence: Synthetic oligonucleotide
  Sense strand starting at position 3224 of SEQ ID NO: 588744
uaaguaucugagugcauuu

SEQ ID NO: 886563 - RNA, 19 nt, Artificial Sequence
  Description of Artificial Sequence: Synthetic oligonucleotide
  Antisense strand to SEQ ID NO: 886562
aaaugcacucagauacuua

SEQ ID NO: 886564 - RNA, 19 nt, Artificial Sequence
  Description of Artificial Sequence: Synthetic oligonucleotide
  Sense strand starting at position 3244 of SEQ ID NO: 588744
gaccuaaccgucuaguauu

SEQ ID NO: 886565 - RNA, 19 nt, Artificial Sequence
  Description of Artificial Sequence: Synthetic oligonucleotide
  Antisense strand to SEQ ID NO: 886564
aauacuagacgguuagguc

SEQ ID NO: 886566 - RNA, 19 nt, Artificial Sequence
  Description of Artificial Sequence: Synthetic oligonucleotide
  Sense strand starting at position 3496 of SEQ ID NO: 588744
gugagaaauugaguacuuu

SEQ ID NO: 886567 - RNA, 19 nt, Artificial Sequence
  Description of Artificial Sequence: Synthetic oligonucleotide
  Antisense strand to SEQ ID NO: 886566
aaaguacucaauuucucac

SEQ ID NO: 886568 - RNA, 19 nt, Artificial Sequence
  Description of Artificial Sequence: Synthetic oligonucleotide
  Sense strand starting at position 3604 of SEQ ID NO: 588744
guggcuucgucauuugaaa

SEQ ID NO: 886569 - RNA, 19 nt, Artificial Sequence
  Description of Artificial Sequence: Synthetic oligonucleotide
  Antisense strand to SEQ ID NO: 886568
uuucaaaugacgaagccac

SEQ ID NO: 886570 - RNA, 19 nt, Artificial Sequence
  Description of Artificial Sequence: Synthetic oligonucleotide
  Sense strand starting at position 3852 of SEQ ID NO: 588744
gguagaguaauucggugag

SEQ ID NO: 886571 - RNA, 19 nt, Artificial Sequence
  Description of Artificial Sequence: Synthetic oligonucleotide
  Antisense strand to SEQ ID NO: 886570
cucaccgaauuacucuacc

SEQ ID NO: 886572 - RNA, 19 nt, Artificial Sequence
  Description of Artificial Sequence: Synthetic oligonucleotide
  Sense strand starting at position 3854 of SEQ ID NO: 588744
uagaguaauucggugaggu

SEQ ID NO: 886573 - RNA, 19 nt, Artificial Sequence
  Description of Artificial Sequence: Synthetic oligonucleotide
  Antisense strand to SEQ ID NO: 886572
accucaccgaauuacucua

SEQ ID NO: 886574 - RNA, 19 nt, Artificial Sequence
  Description of Artificial Sequence: Synthetic oligonucleotide
  Sense strand starting at position 3855 of SEQ ID NO: 588744
agaguaauucggugaggua

SEQ ID NO: 886575 - RNA, 19 nt, Artificial Sequence
  Description of Artificial Sequence: Synthetic oligonucleotide
  Antisense strand to SEQ ID NO: 886574
uaccucaccgaauuacucu

SEQ ID NO: 886576 - RNA, 19 nt, Artificial Sequence
  Description of Artificial Sequence: Synthetic oligonucleotide
  Sense strand starting at position 3856 of SEQ ID NO: 588744
gaguaauucggugagguaa

SEQ ID NO: 886577 - RNA, 19 nt, Artificial Sequence
  Description of Artificial Sequence: Synthetic oligonucleotide
  Antisense strand to SEQ ID NO: 886576
uuaccucaccgaauuacuc

SEQ ID NO: 886578 - RNA, 19 nt, Artificial Sequence
  Description of Artificial Sequence: Synthetic oligonucleotide
  Sense strand starting at position 3964 of SEQ ID NO: 588744
uuguaaacauugccagaug

SEQ ID NO: 886579 - RNA, 19 nt, Artificial Sequence
  Description of Artificial Sequence: Synthetic oligonucleotide
  Antisense strand to SEQ ID NO: 886578
caucuggcaauguuuacaa

SEQ ID NO: 886580 - RNA, 19 nt, Artificial Sequence
  Description of Artificial Sequence: Synthetic oligonucleotide
  Sense strand starting at position 3975 of SEQ ID NO: 588744
gccagauggaaauguagaa

SEQ ID NO: 886581 - RNA, 19 nt, Artificial Sequence
  Description of Artificial Sequence: Synthetic oligonucleotide
  Antisense strand to SEQ ID NO: 886580
uucuacauuuccaucuggc

SEQ ID NO: 886582 - RNA, 19 nt, Artificial Sequence
  Description of Artificial Sequence: Synthetic oligonucleotide
  Sense strand starting at position 291 of SEQ ID NO: 588745
gcgggaucccugagcgacu

SEQ ID NO: 886583 - RNA, 19 nt, Artificial Sequence
  Description of Artificial Sequence: Synthetic oligonucleotide
  Antisense strand to SEQ ID NO: 886582
agucgcucagggaucccgc

SEQ ID NO: 886584 - RNA, 19 nt, Artificial Sequence
  Description of Artificial Sequence: Synthetic oligonucleotide
  Sense strand starting at position 496 of SEQ ID NO: 588745
gggcgagcgcucuuuggaa

SEQ ID NO: 886585 - RNA, 19 nt, Artificial Sequence
  Description of Artificial Sequence: Synthetic oligonucleotide
  Antisense strand to SEQ ID NO: 886584
uuccaaagagcgcucgccc

SEQ ID NO: 886586 - RNA, 19 nt, Artificial Sequence
  Description of Artificial Sequence: Synthetic oligonucleotide
  Sense strand starting at position 503 of SEQ ID NO: 588745
cgcucuuuggaacaacaua

SEQ ID NO: 886587 - RNA, 19 nt, Artificial Sequence
  Description of Artificial Sequence: Synthetic oligonucleotide
  Antisense strand to SEQ ID NO: 886586
uauguuguuccaaagagcg

SEQ ID NO: 886588 - RNA, 19 nt, Artificial Sequence
  Description of Artificial Sequence: Synthetic oligonucleotide
  Sense strand starting at position 631 of SEQ ID NO: 588745
gaggcugugugagcugaau

SEQ ID NO: 886589 - RNA, 19 nt, Artificial Sequence
  Description of Artificial Sequence: Synthetic oligonucleotide
  Antisense strand to SEQ ID NO: 886588
auucagcucacacagccuc

SEQ ID NO: 886590 - RNA, 19 nt, Artificial Sequence
  Description of Artificial Sequence: Synthetic oligonucleotide
  Sense strand starting at position 633 of SEQ ID NO: 588745
ggcugugugagcugaauua

SEQ ID NO: 886591 - RNA, 19 nt, Artificial Sequence
  Description of Artificial Sequence: Synthetic oligonucleotide
  Antisense strand to SEQ ID NO: 886590
uaauucagcucacacagcc

SEQ ID NO: 886592 - RNA, 19 nt, Artificial Sequence
  Description of Artificial Sequence: Synthetic oligonucleotide
  Sense strand starting at position 670 of SEQ ID NO: 588745
ugcaacuuacgacaauauu

SEQ ID NO: 886593 - RNA, 19 nt, Artificial Sequence
  Description of Artificial Sequence: Synthetic oligonucleotide
  Antisense strand to SEQ ID NO: 886592
aauauugucguaaguugca

SEQ ID NO: 886594 - RNA, 19 nt, Artificial Sequence
  Description of Artificial Sequence: Synthetic oligonucleotide
  Sense strand starting at position 680 of SEQ ID NO: 588745
gacaauauuugugaucgga

SEQ ID NO: 886595 - RNA, 19 nt, Artificial Sequence
  Description of Artificial Sequence: Synthetic oligonucleotide
  Antisense strand to SEQ ID NO: 886594
uccgaucacaaauauuguc

SEQ ID NO: 886596 - RNA, 19 nt, Artificial Sequence
  Description of Artificial Sequence: Synthetic oligonucleotide
  Sense strand starting at position 734 of SEQ ID NO: 588745
uuccuuucugguuaaacgu

SEQ ID NO: 886597 - RNA, 19 nt, Artificial Sequence
  Description of Artificial Sequence: Synthetic oligonucleotide
  Antisense strand to SEQ ID NO: 886596
acguuuaaccagaaaggaa

SEQ ID NO: 886598 - RNA, 19 nt, Artificial Sequence
  Description of Artificial Sequence: Synthetic oligonucleotide
  Sense strand starting at position 937 of SEQ ID NO: 588745
gcgaauuuaagguggcaau

SEQ ID NO: 886599 - RNA, 19 nt, Artificial Sequence
  Description of Artificial Sequence: Synthetic oligonucleotide
  Antisense strand to SEQ ID NO: 886598
auugccaccuuaaauucgc

SEQ ID NO: 886600 - RNA, 19 nt, Artificial Sequence
  Description of Artificial Sequence: Synthetic oligonucleotide
  Sense strand starting at position 948 of SEQ ID NO: 588745
guggcaauuuguuuacaac

SEQ ID NO: 886601 - RNA, 19 nt, Artificial Sequence
  Description of Artificial Sequence: Synthetic oligonucleotide
  Antisense strand to SEQ ID NO: 886600
guuguaaacaaauugccac

SEQ ID NO: 886602 - RNA, 19 nt, Artificial Sequence
  Description of Artificial Sequence: Synthetic oligonucleotide
  Sense strand starting at position 1168 of SEQ ID NO: 588745
ccuccaagauguuaagaaa

SEQ ID NO: 886603 - RNA, 19 nt, Artificial Sequence
  Description of Artificial Sequence: Synthetic oligonucleotide
  Antisense strand to SEQ ID NO: 886602
uuucuuaacaucuuggagg

SEQ ID NO: 886604 - RNA, 19 nt, Artificial Sequence
  Description of Artificial Sequence: Synthetic oligonucleotide
  Sense strand starting at position 1201 of SEQ ID NO: 588745
aggaguuuaggcugcaaau

SEQ ID NO: 886605 - RNA, 19 nt, Artificial Sequence
  Description of Artificial Sequence: Synthetic oligonucleotide
  Antisense strand to SEQ ID NO: 886604
auuugcagccuaaacuccu

SEQ ID NO: 886606 - RNA, 19 nt, Artificial Sequence
  Description of Artificial Sequence: Synthetic oligonucleotide
  Sense strand starting at position 1203 of SEQ ID NO: 588745
gaguuuaggcugcaaauag

SEQ ID NO: 886607 - RNA, 19 nt, Artificial Sequence
  Description of Artificial Sequence: Synthetic oligonucleotide
  Antisense strand to SEQ ID NO: 886606
cuauuugcagccuaaacuc

SEQ ID NO: 886608 - RNA, 19 nt, Artificial Sequence
  Description of Artificial Sequence: Synthetic oligonucleotide
  Sense strand starting at position 1602 of SEQ ID NO: 588745
ugaaaugcaccuuggaaau

SEQ ID NO: 886609 - RNA, 19 nt, Artificial Sequence
  Description of Artificial Sequence: Synthetic oligonucleotide
  Antisense strand to SEQ ID NO: 886608
auuuccaaggugcauuuca

SEQ ID NO: 886610 - RNA, 19 nt, Artificial Sequence
  Description of Artificial Sequence: Synthetic oligonucleotide
  Sense strand starting at position 1613 of SEQ ID NO: 588745
uuggaaaucugcuccagag

SEQ ID NO: 886611 - RNA, 19 nt, Artificial Sequence
  Description of Artificial Sequence: Synthetic oligonucleotide
  Antisense strand to SEQ ID NO: 886610
cucuggagcagauuuccaa

SEQ ID NO: 886612 - RNA, 19 nt, Artificial Sequence
  Description of Artificial Sequence: Synthetic oligonucleotide
  Sense strand starting at position 1617 of SEQ ID NO: 588745
aaaucugcuccagagcgaa

SEQ ID NO: 886613 - RNA, 19 nt, Artificial Sequence
  Description of Artificial Sequence: Synthetic oligonucleotide
  Antisense strand to SEQ ID NO: 886612
uucgcucuggagcagauuu

SEQ ID NO: 886614 - RNA, 19 nt, Artificial Sequence
  Description of Artificial Sequence: Synthetic oligonucleotide
  Sense strand starting at position 2672 of SEQ ID NO: 588745
cucucuccauuuggagaaa

SEQ ID NO: 886615 - RNA, 19 nt, Artificial Sequence
  Description of Artificial Sequence: Synthetic oligonucleotide
  Antisense strand to SEQ ID NO: 886614
uuucuccaaauggagagag

SEQ ID NO: 886616 - RNA, 19 nt, Artificial Sequence
  Description of Artificial Sequence: Synthetic oligonucleotide
  Sense strand starting at position 2816 of SEQ ID NO: 588745
ggcagaaauuacucagcaa

SEQ ID NO: 886617 - RNA, 19 nt, Artificial Sequence
  Description of Artificial Sequence: Synthetic oligonucleotide
  Antisense strand to SEQ ID NO: 886616
uugcugaguaauuucugcc

SEQ ID NO: 886618 - RNA, 19 nt, Artificial Sequence
  Description of Artificial Sequence: Synthetic oligonucleotide
  Sense strand starting at position 2843 of SEQ ID NO: 588745
auuauuagcugcuuagcaa

SEQ ID NO: 886619 - RNA, 19 nt, Artificial Sequence
  Description of Artificial Sequence: Synthetic oligonucleotide
  Antisense strand to SEQ ID NO: 886618
uugcuaagcagcuaauaau

SEQ ID NO: 886620 - RNA, 19 nt, Artificial Sequence
  Description of Artificial Sequence: Synthetic oligonucleotide
  Sense strand starting at position 3076 of SEQ ID NO: 588745
gaacauuugccucgcggua

SEQ ID NO: 886621 - RNA, 19 nt, Artificial Sequence
  Description of Artificial Sequence: Synthetic oligonucleotide
  Antisense strand to SEQ ID NO: 886620
uaccgcgaggcaaauguuc

SEQ ID NO: 886622 - RNA, 19 nt, Artificial Sequence
  Description of Artificial Sequence: Synthetic oligonucleotide
  Sense strand starting at position 3334 of SEQ ID NO: 588745
ggaacaacgccucgcauua

SEQ ID NO: 886623 - RNA, 19 nt, Artificial Sequence
  Description of Artificial Sequence: Synthetic oligonucleotide
  Antisense strand to SEQ ID NO: 886622
uaaugcgaggcguuguucc

SEQ ID NO: 886624 - RNA, 19 nt, Artificial Sequence
  Description of Artificial Sequence: Synthetic oligonucleotide
  Sense strand starting at position 3339 of SEQ ID NO: 588745
aacgccucgcauuaagaua

SEQ ID NO: 886625 - RNA, 19 nt, Artificial Sequence
  Description of Artificial Sequence: Synthetic oligonucleotide
  Antisense strand to SEQ ID NO: 886624
uaucuuaaugcgaggcguu

SEQ ID NO: 886626 - RNA, 19 nt, Artificial Sequence
  Description of Artificial Sequence: Synthetic oligonucleotide
  Sense strand starting at position 3466 of SEQ ID NO: 588745
aacacagucuugguuugaa

SEQ ID NO: 886627 - RNA, 19 nt, Artificial Sequence
  Description of Artificial Sequence: Synthetic oligonucleotide
  Antisense strand to SEQ ID NO: 886626
uucaaaccaagacuguguu

SEQ ID NO: 886628 - RNA, 19 nt, Artificial Sequence
  Description of Artificial Sequence: Synthetic oligonucleotide
  Sense strand starting at position 3469 of SEQ ID NO: 588745
acagucuugguuugaagga

SEQ ID NO: 886629 - RNA, 19 nt, Artificial Sequence
  Description of Artificial Sequence: Synthetic oligonucleotide
  Antisense strand to SEQ ID NO: 886628
uccuucaaaccaagacugu

SEQ ID NO: 886630 - RNA, 19 nt, Artificial Sequence
  Description of Artificial Sequence: Synthetic oligonucleotide
  Sense strand starting at position 3478 of SEQ ID NO: 588745
guuugaaggagucaguguu

SEQ ID NO: 886631 - RNA, 19 nt, Artificial Sequence
  Description of Artificial Sequence: Synthetic oligonucleotide
  Antisense strand to SEQ ID NO: 886630
aacacugacuccuucaaac

SEQ ID NO: 886632 - RNA, 19 nt, Artificial Sequence
  Description of Artificial Sequence: Synthetic oligonucleotide
  Sense strand starting at position 3484 of SEQ ID NO: 588745
aggagucaguguucuauaa

SEQ ID NO: 886633 - RNA, 19 nt, Artificial Sequence
  Description of Artificial Sequence: Synthetic oligonucleotide
  Antisense strand to SEQ ID NO: 886632
uuauagaacacugacuccu

SEQ ID NO: 886634 - RNA, 19 nt, Artificial Sequence
  Description of Artificial Sequence: Synthetic oligonucleotide
  Sense strand starting at position 3488 of SEQ ID NO: 588745
gucaguguucuauaaacgu

SEQ ID NO: 886635 - RNA, 19 nt, Artificial Sequence
  Description of Artificial Sequence: Synthetic oligonucleotide
  Antisense strand to SEQ ID NO: 886634
acguuuauagaacacugac

SEQ ID NO: 886636 - RNA, 19 nt, Artificial Sequence
  Description of Artificial Sequence: Synthetic oligonucleotide
  Sense strand starting at position 3492 of SEQ ID NO: 588745
guguucuauaaacguggaa

SEQ ID NO: 886637 - RNA, 19 nt, Artificial Sequence
  Description of Artificial Sequence: Synthetic oligonucleotide
  Antisense strand to SEQ ID NO: 886636
uuccacguuuauagaacac

SEQ ID NO: 886638 - RNA, 19 nt, Artificial Sequence
  Description of Artificial Sequence: Synthetic oligonucleotide
  Sense strand starting at position 3494 of SEQ ID NO: 588745
guucuauaaacguggaauc

SEQ ID NO: 886639 - RNA, 19 nt, Artificial Sequence
  Description of Artificial Sequence: Synthetic oligonucleotide
  Antisense strand to SEQ ID NO: 886638
gauuccacguuuauagaac

SEQ ID NO: 886640 - RNA, 19 nt, Artificial Sequence
  Description of Artificial Sequence: Synthetic oligonucleotide
  Sense strand starting at position 3496 of SEQ ID NO: 588745
ucuauaaacguggaaucca

SEQ ID NO: 886641 - RNA, 19 nt, Artificial Sequence
  Description of Artificial Sequence: Synthetic oligonucleotide
  Antisense strand to SEQ ID NO: 886640
uggauuccacguuuauaga

SEQ ID NO: 886642 - RNA, 19 nt, Artificial Sequence
  Description of Artificial Sequence: Synthetic oligonucleotide
  Sense strand starting at position 3550 of SEQ ID NO: 588745
uuauuugaaucucgaaugu

SEQ ID NO: 886643 - RNA, 19 nt, Artificial Sequence
  Description of Artificial Sequence: Synthetic oligonucleotide
  Antisense strand to SEQ ID NO: 886642
acauucgagauucaaauaa

SEQ ID NO: 886644 - RNA, 19 nt, Artificial Sequence
  Description of Artificial Sequence: Synthetic oligonucleotide
  Sense strand starting at position 3554 of SEQ ID NO: 588745
uugaaucucgaaugugaca

SEQ ID NO: 886645 - RNA, 19 nt, Artificial Sequence
  Description of Artificial Sequence: Synthetic oligonucleotide
  Antisense strand to SEQ ID NO: 886644
ugucacauucgagauucaa

SEQ ID NO: 886646 - RNA, 19 nt, Artificial Sequence
  Description of Artificial Sequence: Synthetic oligonucleotide
  Sense strand starting at position 3561 of SEQ ID NO: 588745
ucgaaugugacauaaguaa

SEQ ID NO: 886647 - RNA, 19 nt, Artificial Sequence
  Description of Artificial Sequence: Synthetic oligonucleotide
  Antisense strand to SEQ ID NO: 886646
uuacuuaugucacauucga

SEQ ID NO: 886648 - RNA, 19 nt, Artificial Sequence
  Description of Artificial Sequence: Synthetic oligonucleotide
  Sense strand starting at position 3618 of SEQ ID NO: 588745
acggaauuguuuccuugag

SEQ ID NO: 886649 - RNA, 19 nt, Artificial Sequence
  Description of Artificial Sequence: Synthetic oligonucleotide
  Antisense strand to SEQ ID NO: 886648
cucaaggaaacaauuccgu

SEQ ID NO: 886650 - RNA, 19 nt, Artificial Sequence
  Description of Artificial Sequence: Synthetic oligonucleotide
  Sense strand starting at position 3619 of SEQ ID NO: 588745
cggaauuguuuccuugaga

SEQ ID NO: 886651 - RNA, 19 nt, Artificial Sequence
  Description of Artificial Sequence: Synthetic oligonucleotide
  Antisense strand to SEQ ID NO: 886650
ucucaaggaaacaauuccg

SEQ ID NO: 886652 - RNA, 19 nt, Artificial Sequence
  Description of Artificial Sequence: Synthetic oligonucleotide
  Sense strand starting at position 3620 of SEQ ID NO: 588745
ggaauuguuuccuugagag

SEQ ID NO: 886653 - RNA, 19 nt, Artificial Sequence
  Description of Artificial Sequence: Synthetic oligonucleotide
  Antisense strand to SEQ ID NO: 886652
cucucaaggaaacaauucc

SEQ ID NO: 886654 - RNA, 19 nt, Artificial Sequence
  Description of Artificial Sequence: Synthetic oligonucleotide
  Sense strand starting at position 3754 of SEQ ID NO: 588745
uaguaugacguaggagauu

SEQ ID NO: 886655 - RNA, 19 nt, Artificial Sequence
  Description of Artificial Sequence: Synthetic oligonucleotide
  Antisense strand to SEQ ID NO: 886654
aaucuccuacgucauacua

SEQ ID NO: 886656 - RNA, 19 nt, Artificial Sequence
  Description of Artificial Sequence: Synthetic oligonucleotide
  Sense strand starting at position 3911 of SEQ ID NO: 588745
gguggauucuggagccaga

SEQ ID NO: 886657 - RNA, 19 nt, Artificial Sequence
  Description of Artificial Sequence: Synthetic oligonucleotide
  Antisense strand to SEQ ID NO: 886656
ucuggcuccagaauccacc

SEQ ID NO: 886658 - RNA, 19 nt, Artificial Sequence
  Description of Artificial Sequence: Synthetic oligonucleotide
  Sense strand starting at position 3924 of SEQ ID NO: 588745
gccagacacgucuacacaa

SEQ ID NO: 886659 - RNA, 19 nt, Artificial Sequence
  Description of Artificial Sequence: Synthetic oligonucleotide
  Antisense strand to SEQ ID NO: 886658
uuguguagacgugucuggc

SEQ ID NO: 886660 - RNA, 19 nt, Artificial Sequence
  Description of Artificial Sequence: Synthetic oligonucleotide
  Sense strand starting at position 3975 of SEQ ID NO: 588745
cggaaaguggaauguguuu

SEQ ID NO: 886661 - RNA, 19 nt, Artificial Sequence
  Description of Artificial Sequence: Synthetic oligonucleotide
  Antisense strand to SEQ ID NO: 886660
aaacacauuccacuuuccg

SEQ ID NO: 886662 - RNA, 19 nt, Artificial Sequence
  Description of Artificial Sequence: Synthetic oligonucleotide
  Sense strand starting at position 181 of SEQ ID NO: 588746
cuuuguggaggcgauuaau

SEQ ID NO: 886663 - RNA, 19 nt, Artificial Sequence
  Description of Artificial Sequence: Synthetic oligonucleotide
  Antisense strand to SEQ ID NO: 886662
auuaaucgccuccacaaag

SEQ ID NO: 886664 - RNA, 19 nt, Artificial Sequence
  Description of Artificial Sequence: Synthetic oligonucleotide
  Sense strand starting at position 298 of SEQ ID NO: 588746
ucaagaccucagugaucca

SEQ ID NO: 886665 - RNA, 19 nt, Artificial Sequence
  Description of Artificial Sequence: Synthetic oligonucleotide
  Antisense strand to SEQ ID NO: 886664
uggaucacugaggucuuga

SEQ ID NO: 886666 - RNA, 19 nt, Artificial Sequence
  Description of Artificial Sequence: Synthetic oligonucleotide
  Sense strand starting at position 301 of SEQ ID NO: 588746
agaccucagugauccaauu

SEQ ID NO: 886667 - RNA, 19 nt, Artificial Sequence
  Description of Artificial Sequence: Synthetic oligonucleotide
  Antisense strand to SEQ ID NO: 886666
aauuggaucacugaggucu

SEQ ID NO: 886668 - RNA, 19 nt, Artificial Sequence
  Description of Artificial Sequence: Synthetic oligonucleotide
  Sense strand starting at position 343 of SEQ ID NO: 588746
uguggcucuuuauuauuua

SEQ ID NO: 886669 - RNA, 19 nt, Artificial Sequence
  Description of Artificial Sequence: Synthetic oligonucleotide
  Antisense strand to SEQ ID NO: 886668
uaaauaauaaagagccaca

SEQ ID NO: 886670 - RNA, 19 nt, Artificial Sequence
  Description of Artificial Sequence: Synthetic oligonucleotide
  Sense strand starting at position 489 of SEQ ID NO: 588746
guucuucuuaggugaugga

SEQ ID NO: 886671 - RNA, 19 nt, Artificial Sequence
  Description of Artificial Sequence: Synthetic oligonucleotide
  Antisense strand to SEQ ID NO: 886670
uccaucaccuaagaagaac

SEQ ID NO: 886672 - RNA, 19 nt, Artificial Sequence
  Description of Artificial Sequence: Synthetic oligonucleotide
  Sense strand starting at position 493 of SEQ ID NO: 588746
uucuuaggugauggaaaca

SEQ ID NO: 886673 - RNA, 19 nt, Artificial Sequence
  Description of Artificial Sequence: Synthetic oligonucleotide
  Antisense strand to SEQ ID NO: 886672
uguuuccaucaccuaagaa

SEQ ID NO: 886674 - RNA, 19 nt, Artificial Sequence
  Description of Artificial Sequence: Synthetic oligonucleotide
  Sense strand starting at position 510 of SEQ ID NO: 588746
cagaucaguuucccugaga

SEQ ID NO: 886675 - RNA, 19 nt, Artificial Sequence
  Description of Artificial Sequence: Synthetic oligonucleotide
  Antisense strand to SEQ ID NO: 886674
ucucagggaaacugaucug

SEQ ID NO: 886676 - RNA, 19 nt, Artificial Sequence
  Description of Artificial Sequence: Synthetic oligonucleotide
  Sense strand starting at position 511 of SEQ ID NO: 588746
agaucaguuucccugagag

SEQ ID NO: 886677 - RNA, 19 nt, Artificial Sequence
  Description of Artificial Sequence: Synthetic oligonucleotide
  Antisense strand to SEQ ID NO: 886676
cucucagggaaacugaucu

SEQ ID NO: 886678 - RNA, 19 nt, Artificial Sequence
  Description of Artificial Sequence: Synthetic oligonucleotide
  Sense strand starting at position 513 of SEQ ID NO: 588746
aucaguuucccugagagug

SEQ ID NO: 886679 - RNA, 19 nt, Artificial Sequence
  Description of Artificial Sequence: Synthetic oligonucleotide
  Antisense strand to SEQ ID NO: 886678
cacucucagggaaacugau

SEQ ID NO: 886680 - RNA, 19 nt, Artificial Sequence
  Description of Artificial Sequence: Synthetic oligonucleotide
  Sense strand starting at position 569 of SEQ ID NO: 588746
guacuaaauacguggagac

SEQ ID NO: 886681 - RNA, 19 nt, Artificial Sequence
  Description of Artificial Sequence: Synthetic oligonucleotide
  Antisense strand to SEQ ID NO: 886680
gucuccacguauuuaguac

SEQ ID NO: 886682 - RNA, 19 nt, Artificial Sequence
  Description of Artificial Sequence: Synthetic oligonucleotide
  Sense strand starting at position 570 of SEQ ID NO: 588746
uacuaaauacguggagaca

SEQ ID NO: 886683 - RNA, 19 nt, Artificial Sequence
  Description of Artificial Sequence: Synthetic oligonucleotide
  Antisense strand to SEQ ID NO: 886682
ugucuccacguauuuagua

SEQ ID NO: 886684 - RNA, 19 nt, Artificial Sequence
  Description of Artificial Sequence: Synthetic oligonucleotide
  Sense strand starting at position 647 of SEQ ID NO: 588746
gggccuguaaagugagaau

SEQ ID NO: 886685 - RNA, 19 nt, Artificial Sequence
  Description of Artificial Sequence: Synthetic oligonucleotide
  Antisense strand to SEQ ID NO: 886684
auucucacuuuacaggccc

SEQ ID NO: 886686 - RNA, 19 nt, Artificial Sequence
  Description of Artificial Sequence: Synthetic oligonucleotide
  Sense strand starting at position 763 of SEQ ID NO: 588746
ccugaaucggugggcauaa

SEQ ID NO: 886687 - RNA, 19 nt, Artificial Sequence
  Description of Artificial Sequence: Synthetic oligonucleotide
  Antisense strand to SEQ ID NO: 886686
uuaugcccaccgauucagg

SEQ ID NO: 886688 - RNA, 19 nt, Artificial Sequence
  Description of Artificial Sequence: Synthetic oligonucleotide
  Sense strand starting at position 1958 of SEQ ID NO: 588746
aaguaaacucgaggaacgu

SEQ ID NO: 886689 - RNA, 19 nt, Artificial Sequence
  Description of Artificial Sequence: Synthetic oligonucleotide
  Antisense strand to SEQ ID NO: 886688
acguuccucgaguuuacuu

SEQ ID NO: 886690 - RNA, 19 nt, Artificial Sequence
  Description of Artificial Sequence: Synthetic oligonucleotide
  Sense strand starting at position 2549 of SEQ ID NO: 588746
agauuuguaccugguccga

SEQ ID NO: 886691 - RNA, 19 nt, Artificial Sequence
  Description of Artificial Sequence: Synthetic oligonucleotide
  Antisense strand to SEQ ID NO: 886690
ucggaccagguacaaaucu

SEQ ID NO: 886692 - RNA, 19 nt, Artificial Sequence
  Description of Artificial Sequence: Synthetic oligonucleotide
  Sense strand starting at position 2568 of SEQ ID NO: 588746
agaaucacggauugacauu

SEQ ID NO: 886693 - RNA, 19 nt, Artificial Sequence
  Description of Artificial Sequence: Synthetic oligonucleotide
  Antisense strand to SEQ ID NO: 886692
aaugucaauccgugauucu

SEQ ID NO: 886694 - RNA, 19 nt, Artificial Sequence
  Description of Artificial Sequence: Synthetic oligonucleotide
  Sense strand starting at position 2676 of SEQ ID NO: 588746
gggugacuggccuaaaccu

SEQ ID NO: 886695 - RNA, 19 nt, Artificial Sequence
  Description of Artificial Sequence: Synthetic oligonucleotide
  Antisense strand to SEQ ID NO: 886694
agguuuaggccagucaccc

SEQ ID NO: 886696 - RNA, 19 nt, Artificial Sequence
  Description of Artificial Sequence: Synthetic oligonucleotide
  Sense strand starting at position 2832 of SEQ ID NO: 588746
cuuuaaaugggccacauua

SEQ ID NO: 886697 - RNA, 19 nt, Artificial Sequence
  Description of Artificial Sequence: Synthetic oligonucleotide
  Antisense strand to SEQ ID NO: 886696
uaauguggcccauuuaaag

SEQ ID NO: 886698 - RNA, 19 nt, Artificial Sequence
  Description of Artificial Sequence: Synthetic oligonucleotide
  Sense strand starting at position 2922 of SEQ ID NO: 588746
cugacuagcuggucuugaa

SEQ ID NO: 886699 - RNA, 19 nt, Artificial Sequence
  Description of Artificial Sequence: Synthetic oligonucleotide
  Antisense strand to SEQ ID NO: 886698
uucaagaccagcuagucag

SEQ ID NO: 886700 - RNA, 19 nt, Artificial Sequence
  Description of Artificial Sequence: Synthetic oligonucleotide
  Sense strand starting at position 2926 of SEQ ID NO: 588746
cuagcuggucuugaaauaa

SEQ ID NO: 886701 - RNA, 19 nt, Artificial Sequence
  Description of Artificial Sequence: Synthetic oligonucleotide
  Antisense strand to SEQ ID NO: 886700
uuauuucaagaccagcuag

SEQ ID NO: 886702 - RNA, 19 nt, Artificial Sequence
  Description of Artificial Sequence: Synthetic oligonucleotide
  Sense strand starting at position 3062 of SEQ ID NO: 588746
auaaucauccuaggaguuu

SEQ ID NO: 886703 - RNA, 19 nt, Artificial Sequence
  Description of Artificial Sequence: Synthetic oligonucleotide
  Antisense strand to SEQ ID NO: 886702
aaacuccuaggaugauuau

SEQ ID NO: 886704 - RNA, 19 nt, Artificial Sequence
  Description of Artificial Sequence: Synthetic oligonucleotide
  Sense strand starting at position 3107 of SEQ ID NO: 588746
guagccauucuugagcaga

SEQ ID NO: 886705 - RNA, 19 nt, Artificial Sequence
  Description of Artificial Sequence: Synthetic oligonucleotide
  Antisense strand to SEQ ID NO: 886704
ucugcucaagaauggcuac

SEQ ID NO: 886706 - RNA, 19 nt, Artificial Sequence
  Description of Artificial Sequence: Synthetic oligonucleotide
  Sense strand starting at position 3112 of SEQ ID NO: 588746
cauucuugagcagagucau

SEQ ID NO: 886707 - RNA, 19 nt, Artificial Sequence
  Description of Artificial Sequence: Synthetic oligonucleotide
  Antisense strand to SEQ ID NO: 886706
augacucugcucaagaaug

SEQ ID NO: 886708 - RNA, 19 nt, Artificial Sequence
  Description of Artificial Sequence: Synthetic oligonucleotide
  Sense strand starting at position 3133 of SEQ ID NO: 588746
gaguuuccagaauguaugu

SEQ ID NO: 886709 - RNA, 19 nt, Artificial Sequence
  Description of Artificial Sequence: Synthetic oligonucleotide
  Antisense strand to SEQ ID NO: 886708
acauacauucuggaaacuc

SEQ ID NO: 886710 - RNA, 19 nt, Artificial Sequence
  Description of Artificial Sequence: Synthetic oligonucleotide
  Sense strand starting at position 3139 of SEQ ID NO: 588746
ccagaauguauguguuuga

SEQ ID NO: 886711 - RNA, 19 nt, Artificial Sequence
  Description of Artificial Sequence: Synthetic oligonucleotide
  Antisense strand to SEQ ID NO: 886710
ucaaacacauacauucugg

SEQ ID NO: 886712 - RNA, 19 nt, Artificial Sequence
  Description of Artificial Sequence: Synthetic oligonucleotide
  Sense strand starting at position 3148 of SEQ ID NO: 588746
auguguuugagacacguua

SEQ ID NO: 886713 - RNA, 19 nt, Artificial Sequence
  Description of Artificial Sequence: Synthetic oligonucleotide
  Antisense strand to SEQ ID NO: 886712
uaacgugucucaaacacau

SEQ ID NO: 886714 - RNA, 19 nt, Artificial Sequence
  Description of Artificial Sequence: Synthetic oligonucleotide
  Sense strand starting at position 3156 of SEQ ID NO: 588746
gagacacguuaaguaauua

SEQ ID NO: 886715 - RNA, 19 nt, Artificial Sequence
  Description of Artificial Sequence: Synthetic oligonucleotide
  Antisense strand to SEQ ID NO: 886714
uaauuacuuaacgugucuc

SEQ ID NO: 886716 - RNA, 19 nt, Artificial Sequence
  Description of Artificial Sequence: Synthetic oligonucleotide
  Sense strand starting at position 3197 of SEQ ID NO: 588746
ugugaauuuggcuggucca

SEQ ID NO: 886717 - RNA, 19 nt, Artificial Sequence
  Description of Artificial Sequence: Synthetic oligonucleotide
  Antisense strand to SEQ ID NO: 886716
uggaccagccaaauucaca

SEQ ID NO: 886718 - RNA, 19 nt, Artificial Sequence
  Description of Artificial Sequence: Synthetic oligonucleotide
  Sense strand starting at position 3369 of SEQ ID NO: 588746
aucaaagggcccuguuuau

SEQ ID NO: 886719 - RNA, 19 nt, Artificial Sequence
  Description of Artificial Sequence: Synthetic oligonucleotide
  Antisense strand to SEQ ID NO: 886718
auaaacagggcccuuugau

SEQ ID NO: 886720 - RNA, 19 nt, Artificial Sequence
  Description of Artificial Sequence: Synthetic oligonucleotide
  Sense strand starting at position 3375 of SEQ ID NO: 588746
gggcccuguuuaucuauaa

SEQ ID NO: 886721 - RNA, 19 nt, Artificial Sequence
  Description of Artificial Sequence: Synthetic oligonucleotide
  Antisense strand to SEQ ID NO: 886720
uuauagauaaacagggccc

SEQ ID NO: 886722 - RNA, 19 nt, Artificial Sequence
  Description of Artificial Sequence: Synthetic oligonucleotide
  Sense strand starting at position 3376 of SEQ ID NO: 588746
ggcccuguuuaucuauaaa

SEQ ID NO: 886723 - RNA, 19 nt, Artificial Sequence
  Description of Artificial Sequence: Synthetic oligonucleotide
  Antisense strand to SEQ ID NO: 886722
uuuauagauaaacagggcc

SEQ ID NO: 886724 - RNA, 19 nt, Artificial Sequence
  Description of Artificial Sequence: Synthetic oligonucleotide
  Sense strand starting at position 3379 of SEQ ID NO: 588746
ccuguuuaucuauaaaugu

SEQ ID NO: 886725 - RNA, 19 nt, Artificial Sequence
  Description of Artificial Sequence: Synthetic oligonucleotide
  Antisense strand to SEQ ID NO: 886724
acauuuauagauaaacagg

SEQ ID NO: 886726 - RNA, 19 nt, Artificial Sequence
  Description of Artificial Sequence: Synthetic oligonucleotide
  Sense strand starting at position 3403 of SEQ ID NO: 588746
ggguuaugaacaggaaggu

SEQ ID NO: 886727 - RNA, 19 nt, Artificial Sequence
  Description of Artificial Sequence: Synthetic oligonucleotide
  Antisense strand to SEQ ID NO: 886726
accuuccuguucauaaccc

SEQ ID NO: 886728 - RNA, 19 nt, Artificial Sequence
  Description of Artificial Sequence: Synthetic oligonucleotide
  Sense strand starting at position 3889 of SEQ ID NO: 588746
cuuaguuaggacugaaugu

SEQ ID NO: 886729 - RNA, 19 nt, Artificial Sequence
  Description of Artificial Sequence: Synthetic oligonucleotide
  Antisense strand to SEQ ID NO: 886728
acauucaguccuaacuaag

SEQ ID NO: 886730 - RNA, 19 nt, Artificial Sequence
  Description of Artificial Sequence: Synthetic oligonucleotide
  Sense strand starting at position 3912 of SEQ ID NO: 588746
auaugagucuuaucuuagu

SEQ ID NO: 886731 - RNA, 19 nt, Artificial Sequence
  Description of Artificial Sequence: Synthetic oligonucleotide
  Antisense strand to SEQ ID NO: 886730
acuaagauaagacucauau

SEQ ID NO: 886732 - RNA, 19 nt, Artificial Sequence
  Description of Artificial Sequence: Synthetic oligonucleotide
  Sense strand starting at position 3917 of SEQ ID NO: 588746
agucuuaucuuaguccaag

SEQ ID NO: 886733 - RNA, 19 nt, Artificial Sequence
  Description of Artificial Sequence: Synthetic oligonucleotide
  Antisense strand to SEQ ID NO: 886732
cuuggacuaagauaagacu

SEQ ID NO: 886734 - RNA, 19 nt, Artificial Sequence
  Description of Artificial Sequence: Synthetic oligonucleotide
  Sense strand starting at position 3923 of SEQ ID NO: 588746
aucuuaguccaaggcuuua

SEQ ID NO: 886735 - RNA, 19 nt, Artificial Sequence
  Description of Artificial Sequence: Synthetic oligonucleotide
  Antisense strand to SEQ ID NO: 886734
uaaagccuuggacuaagau

SEQ ID NO: 886736 - RNA, 19 nt, Artificial Sequence
  Description of Artificial Sequence: Synthetic oligonucleotide
  Sense strand starting at position 3928 of SEQ ID NO: 588746
aguccaaggcuuuacaauu

SEQ ID NO: 886737 - RNA, 19 nt, Artificial Sequence
  Description of Artificial Sequence: Synthetic oligonucleotide
  Antisense strand to SEQ ID NO: 886736
aauuguaaagccuuggacu

SEQ ID NO: 886738 - RNA, 19 nt, Artificial Sequence
  Description of Artificial Sequence: Synthetic oligonucleotide
  Sense strand starting at position 3972 of SEQ ID NO: 588746
acaagaguguaaguacuua

SEQ ID NO: 886739 - RNA, 19 nt, Artificial Sequence
  Description of Artificial Sequence: Synthetic oligonucleotide
  Antisense strand to SEQ ID NO: 886738
uaaguacuuacacucuugu

SEQ ID NO: 886740 - RNA, 19 nt, Artificial Sequence
  Description of Artificial Sequence: Synthetic oligonucleotide
  Sense strand starting at position 3976 of SEQ ID NO: 588746
gaguguaaguacuuagagu

SEQ ID NO: 886741 - RNA, 19 nt, Artificial Sequence
  Description of Artificial Sequence: Synthetic oligonucleotide
  Antisense strand to SEQ ID NO: 886740
acucuaaguacuuacacuc

SEQ ID NO: 886742 - RNA, 19 nt, Artificial Sequence
  Description of Artificial Sequence: Synthetic oligonucleotide
  Sense strand starting at position 286 of SEQ ID NO: 588747
aggugugcgcuggcgaaua

SEQ ID NO: 886743 - RNA, 19 nt, Artificial Sequence
  Description of Artificial Sequence: Synthetic oligonucleotide
  Antisense strand to SEQ ID NO: 886742
uauucgccagcgcacaccu

SEQ ID NO: 886744 - RNA, 19 nt, Artificial Sequence
  Description of Artificial Sequence: Synthetic oligonucleotide
  Sense strand starting at position 287 of SEQ ID NO: 588747
ggugugcgcuggcgaauau

SEQ ID NO: 886745 - RNA, 19 nt, Artificial Sequence
  Description of Artificial Sequence: Synthetic oligonucleotide
  Antisense strand to SEQ ID NO: 886744
auauucgccagcgcacacc

SEQ ID NO: 886746 - RNA, 19 nt, Artificial Sequence
  Description of Artificial Sequence: Synthetic oligonucleotide
  Sense strand starting at position 296 of SEQ ID NO: 588747
uggcgaauaucucuaucaa

SEQ ID NO: 886747 - RNA, 19 nt, Artificial Sequence
  Description of Artificial Sequence: Synthetic oligonucleotide
  Antisense strand to SEQ ID NO: 886746
uugauagagauauucgcca

SEQ ID NO: 886748 - RNA, 19 nt, Artificial Sequence
  Description of Artificial Sequence: Synthetic oligonucleotide
  Sense strand starting at position 297 of SEQ ID NO: 588747
ggcgaauaucucuaucaac

SEQ ID NO: 886749 - RNA, 19 nt, Artificial Sequence
  Description of Artificial Sequence: Synthetic oligonucleotide
  Antisense strand to SEQ ID NO: 886748
guugauagagauauucgcc

SEQ ID NO: 886750 - RNA, 19 nt, Artificial Sequence
  Description of Artificial Sequence: Synthetic oligonucleotide
  Sense strand starting at position 385 of SEQ ID NO: 588747
ccacguuggucucgagguu

SEQ ID NO: 886751 - RNA, 19 nt, Artificial Sequence
  Description of Artificial Sequence: Synthetic oligonucleotide
  Antisense strand to SEQ ID NO: 886750
aaccucgagaccaacgugg

SEQ ID NO: 886752 - RNA, 19 nt, Artificial Sequence
  Description of Artificial Sequence: Synthetic oligonucleotide
  Sense strand starting at position 499 of SEQ ID NO: 588747
auaagagucucugaaacuu

SEQ ID NO: 886753 - RNA, 19 nt, Artificial Sequence
  Description of Artificial Sequence: Synthetic oligonucleotide
  Antisense strand to SEQ ID NO: 886752
aaguuucagagacucuuau

SEQ ID NO: 886754 - RNA, 19 nt, Artificial Sequence
  Description of Artificial Sequence: Synthetic oligonucleotide
  Sense strand starting at position 507 of SEQ ID NO: 588747
cucugaaacuucgcucuca

SEQ ID NO: 886755 - RNA, 19 nt, Artificial Sequence
  Description of Artificial Sequence: Synthetic oligonucleotide
  Antisense strand to SEQ ID NO: 886754
ugagagcgaaguuucagag

SEQ ID NO: 886756 - RNA, 19 nt, Artificial Sequence
  Description of Artificial Sequence: Synthetic oligonucleotide
  Sense strand starting at position 800 of SEQ ID NO: 588747
gcgggaucccugagcgacu

SEQ ID NO: 886757 - RNA, 19 nt, Artificial Sequence
  Description of Artificial Sequence: Synthetic oligonucleotide
  Antisense strand to SEQ ID NO: 886756
agucgcucagggaucccgc

SEQ ID NO: 886758 - RNA, 19 nt, Artificial Sequence
  Description of Artificial Sequence: Synthetic oligonucleotide
  Sense strand starting at position 921 of SEQ ID NO: 588747
gcguaaucccagcgaugga

SEQ ID NO: 886759 - RNA, 19 nt, Artificial Sequence
  Description of Artificial Sequence: Synthetic oligonucleotide
  Antisense strand to SEQ ID NO: 886758
uccaucgcugggauuacgc

SEQ ID NO: 886760 - RNA, 19 nt, Artificial Sequence
  Description of Artificial Sequence: Synthetic oligonucleotide
  Sense strand starting at position 1005 of SEQ ID NO: 588747
gggcgagcgcucuuuggaa

SEQ ID NO: 886761 - RNA, 19 nt, Artificial Sequence
  Description of Artificial Sequence: Synthetic oligonucleotide
  Antisense strand to SEQ ID NO: 886760
uuccaaagagcgcucgccc

SEQ ID NO: 886762 - RNA, 19 nt, Artificial Sequence
  Description of Artificial Sequence: Synthetic oligonucleotide
  Sense strand starting at position 1007 of SEQ ID NO: 588747
gcgagcgcucuuuggaaca

SEQ ID NO: 886763 - RNA, 19 nt, Artificial Sequence
  Description of Artificial Sequence: Synthetic oligonucleotide
  Antisense strand to SEQ ID NO: 886762
uguuccaaagagcgcucgc

SEQ ID NO: 886764 - RNA, 19 nt, Artificial Sequence
  Description of Artificial Sequence: Synthetic oligonucleotide
  Sense strand starting at position 1012 of SEQ ID NO: 588747
cgcucuuuggaacaacaua

SEQ ID NO: 886765 - RNA, 19 nt, Artificial Sequence
  Description of Artificial Sequence: Synthetic oligonucleotide
  Antisense strand to SEQ ID NO: 886764
uauguuguuccaaagagcg

SEQ ID NO: 886766 - RNA, 19 nt, Artificial Sequence
  Description of Artificial Sequence: Synthetic oligonucleotide
  Sense strand starting at position 1056 of SEQ ID NO: 588747
cgccgagaaugguaguaag

SEQ ID NO: 886767 - RNA, 19 nt, Artificial Sequence
  Description of Artificial Sequence: Synthetic oligonucleotide
  Antisense strand to SEQ ID NO: 886766
cuuacuaccauucucggcg

SEQ ID NO: 886768 - RNA, 19 nt, Artificial Sequence
  Description of Artificial Sequence: Synthetic oligonucleotide
  Sense strand starting at position 1140 of SEQ ID NO: 588747
gaggcugugugagcugaau

SEQ ID NO: 886769 - RNA, 19 nt, Artificial Sequence
  Description of Artificial Sequence: Synthetic oligonucleotide
  Antisense strand to SEQ ID NO: 886768
auucagcucacacagccuc

SEQ ID NO: 886770 - RNA, 19 nt, Artificial Sequence
  Description of Artificial Sequence: Synthetic oligonucleotide
  Sense strand starting at position 1142 of SEQ ID NO: 588747
ggcugugugagcugaauua

SEQ ID NO: 886771 - RNA, 19 nt, Artificial Sequence
  Description of Artificial Sequence: Synthetic oligonucleotide
  Antisense strand to SEQ ID NO: 886770
uaauucagcucacacagcc

SEQ ID NO: 886772 - RNA, 19 nt, Artificial Sequence
  Description of Artificial Sequence: Synthetic oligonucleotide
  Sense strand starting at position 1177 of SEQ ID NO: 588747
gcugcaacuuacgacaaua

SEQ ID NO: 886773 - RNA, 19 nt, Artificial Sequence
  Description of Artificial Sequence: Synthetic oligonucleotide
  Antisense strand to SEQ ID NO: 886772
uauugucguaaguugcagc

SEQ ID NO: 886774 - RNA, 19 nt, Artificial Sequence
  Description of Artificial Sequence: Synthetic oligonucleotide
  Sense strand starting at position 1179 of SEQ ID NO: 588747
ugcaacuuacgacaauauu

SEQ ID NO: 886775 - RNA, 19 nt, Artificial Sequence
  Description of Artificial Sequence: Synthetic oligonucleotide
  Antisense strand to SEQ ID NO: 886774
aauauugucguaaguugca

SEQ ID NO: 886776 - RNA, 19 nt, Artificial Sequence
  Description of Artificial Sequence: Synthetic oligonucleotide
  Sense strand starting at position 1189 of SEQ ID NO: 588747
gacaauauuugugaucgga

SEQ ID NO: 886777 - RNA, 19 nt, Artificial Sequence
  Description of Artificial Sequence: Synthetic oligonucleotide
  Antisense strand to SEQ ID NO: 886776
uccgaucacaaauauuguc

SEQ ID NO: 886778 - RNA, 19 nt, Artificial Sequence
  Description of Artificial Sequence: Synthetic oligonucleotide
  Sense strand starting at position 1243 of SEQ ID NO: 588747
uuccuuucugguuaaacgu

SEQ ID NO: 886779 - RNA, 19 nt, Artificial Sequence
  Description of Artificial Sequence: Synthetic oligonucleotide
  Antisense strand to SEQ ID NO: 886778
acguuuaaccagaaaggaa

SEQ ID NO: 886780 - RNA, 19 nt, Artificial Sequence
  Description of Artificial Sequence: Synthetic oligonucleotide
  Sense strand starting at position 1446 of SEQ ID NO: 588747
gcgaauuuaagguggcaau

SEQ ID NO: 886781 - RNA, 19 nt, Artificial Sequence
  Description of Artificial Sequence: Synthetic oligonucleotide
  Antisense strand to SEQ ID NO: 886780
auugccaccuuaaauucgc

SEQ ID NO: 886782 - RNA, 19 nt, Artificial Sequence
  Description of Artificial Sequence: Synthetic oligonucleotide
  Sense strand starting at position 1457 of SEQ ID NO: 588747
guggcaauuuguuuacaac

SEQ ID NO: 886783 - RNA, 19 nt, Artificial Sequence
  Description of Artificial Sequence: Synthetic oligonucleotide
  Antisense strand to SEQ ID NO: 886782
guuguaaacaaauugccac

SEQ ID NO: 886784 - RNA, 19 nt, Artificial Sequence
  Description of Artificial Sequence: Synthetic oligonucleotide
  Sense strand starting at position 1677 of SEQ ID NO: 588747
ccuccaagauguuaagaaa

SEQ ID NO: 886785 - RNA, 19 nt, Artificial Sequence
  Description of Artificial Sequence: Synthetic oligonucleotide
  Antisense strand to SEQ ID NO: 886784
uuucuuaacaucuuggagg

SEQ ID NO: 886786 - RNA, 19 nt, Artificial Sequence
  Description of Artificial Sequence: Synthetic oligonucleotide
  Sense strand starting at position 1680 of SEQ ID NO: 588747
ccaagauguuaagaaaugu

SEQ ID NO: 886787 - RNA, 19 nt, Artificial Sequence
  Description of Artificial Sequence: Synthetic oligonucleotide
  Antisense strand to SEQ ID NO: 886786
acauuucuuaacaucuugg

SEQ ID NO: 886788 - RNA, 19 nt, Artificial Sequence
  Description of Artificial Sequence: Synthetic oligonucleotide
  Sense strand starting at position 1710 of SEQ ID NO: 588747
aggaguuuaggcugcaaau

SEQ ID NO: 886789 - RNA, 19 nt, Artificial Sequence
  Description of Artificial Sequence: Synthetic oligonucleotide
  Antisense strand to SEQ ID NO: 886788
auuugcagccuaaacuccu

SEQ ID NO: 886790 - RNA, 19 nt, Artificial Sequence
  Description of Artificial Sequence: Synthetic oligonucleotide
  Sense strand starting at position 1712 of SEQ ID NO: 588747
gaguuuaggcugcaaauag

SEQ ID NO: 886791 - RNA, 19 nt, Artificial Sequence
  Description of Artificial Sequence: Synthetic oligonucleotide
  Antisense strand to SEQ ID NO: 886790
cuauuugcagccuaaacuc

SEQ ID NO: 886792 - RNA, 19 nt, Artificial Sequence
  Description of Artificial Sequence: Synthetic oligonucleotide
  Sense strand starting at position 2111 of SEQ ID NO: 588747
ugaaaugcaccuuggaaau

SEQ ID NO: 886793 - RNA, 19 nt, Artificial Sequence
  Description of Artificial Sequence: Synthetic oligonucleotide
  Antisense strand to SEQ ID NO: 886792
auuuccaaggugcauuuca

SEQ ID NO: 886794 - RNA, 19 nt, Artificial Sequence
  Description of Artificial Sequence: Synthetic oligonucleotide
  Sense strand starting at position 2122 of SEQ ID NO: 588747
uuggaaaucugcuccagag

SEQ ID NO: 886795 - RNA, 19 nt, Artificial Sequence
  Description of Artificial Sequence: Synthetic oligonucleotide
  Antisense strand to SEQ ID NO: 886794
cucuggagcagauuuccaa

SEQ ID NO: 886796 - RNA, 19 nt, Artificial Sequence
  Description of Artificial Sequence: Synthetic oligonucleotide
  Sense strand starting at position 2126 of SEQ ID NO: 588747
aaaucugcuccagagcgaa

SEQ ID NO: 886797 - RNA, 19 nt, Artificial Sequence
  Description of Artificial Sequence: Synthetic oligonucleotide
  Antisense strand to SEQ ID NO: 886796
uucgcucuggagcagauuu

SEQ ID NO: 886798 - RNA, 19 nt, Artificial Sequence
  Description of Artificial Sequence: Synthetic oligonucleotide
  Sense strand starting at position 3181 of SEQ ID NO: 588747
cucucuccauuuggagaaa

SEQ ID NO: 886799 - RNA, 19 nt, Artificial Sequence
  Description of Artificial Sequence: Synthetic oligonucleotide
  Antisense strand to SEQ ID NO: 886798
uuucuccaaauggagagag

SEQ ID NO: 886800 - RNA, 19 nt, Artificial Sequence
  Description of Artificial Sequence: Synthetic oligonucleotide
  Sense strand starting at position 3295 of SEQ ID NO: 588747
ggguuucugcgacgcgauu

SEQ ID NO: 886801 - RNA, 19 nt, Artificial Sequence
  Description of Artificial Sequence: Synthetic oligonucleotide
  Antisense strand to SEQ ID NO: 886800
aaucgcgucgcagaaaccc

SEQ ID NO: 886802 - RNA, 19 nt, Artificial Sequence
  Description of Artificial Sequence: Synthetic oligonucleotide
  Sense strand starting at position 3325 of SEQ ID NO: 588747
ggcagaaauuacucagcaa

SEQ ID NO: 886803 - RNA, 19 nt, Artificial Sequence
  Description of Artificial Sequence: Synthetic oligonucleotide
  Antisense strand to SEQ ID NO: 886802
uugcugaguaauuucugcc

SEQ ID NO: 886804 - RNA, 19 nt, Artificial Sequence
  Description of Artificial Sequence: Synthetic oligonucleotide
  Sense strand starting at position 3352 of SEQ ID NO: 588747
auuauuagcugcuuagcaa

SEQ ID NO: 886805 - RNA, 19 nt, Artificial Sequence
  Description of Artificial Sequence: Synthetic oligonucleotide
  Antisense strand to SEQ ID NO: 886804
uugcuaagcagcuaauaau

SEQ ID NO: 886806 - RNA, 19 nt, Artificial Sequence
  Description of Artificial Sequence: Synthetic oligonucleotide
  Sense strand starting at position 3451 of SEQ ID NO: 588747
ccaaccuucucgcaugcaa

SEQ ID NO: 886807 - RNA, 19 nt, Artificial Sequence
  Description of Artificial Sequence: Synthetic oligonucleotide
  Antisense strand to SEQ ID NO: 886806
uugcaugcgagaagguugg

SEQ ID NO: 886808 - RNA, 19 nt, Artificial Sequence
  Description of Artificial Sequence: Synthetic oligonucleotide
  Sense strand starting at position 3585 of SEQ ID NO: 588747
gaacauuugccucgcggua

SEQ ID NO: 886809 - RNA, 19 nt, Artificial Sequence
  Description of Artificial Sequence: Synthetic oligonucleotide
  Antisense strand to SEQ ID NO: 886808
uaccgcgaggcaaauguuc

SEQ ID NO: 886810 - RNA, 19 nt, Artificial Sequence
  Description of Artificial Sequence: Synthetic oligonucleotide
  Sense strand starting at position 3587 of SEQ ID NO: 588747
acauuugccucgcgguaga

SEQ ID NO: 886811 - RNA, 19 nt, Artificial Sequence
  Description of Artificial Sequence: Synthetic oligonucleotide
  Antisense strand to SEQ ID NO: 886810
ucuaccgcgaggcaaaugu

SEQ ID NO: 886812 - RNA, 19 nt, Artificial Sequence
  Description of Artificial Sequence: Synthetic oligonucleotide
  Sense strand starting at position 3769 of SEQ ID NO: 588747
gccagugugugccagauuu

SEQ ID NO: 886813 - RNA, 19 nt, Artificial Sequence
  Description of Artificial Sequence: Synthetic oligonucleotide
  Antisense strand to SEQ ID NO: 886812
aaaucuggcacacacuggc

SEQ ID NO: 886814 - RNA, 19 nt, Artificial Sequence
  Description of Artificial Sequence: Synthetic oligonucleotide
  Sense strand starting at position 3843 of SEQ ID NO: 588747
ggaacaacgccucgcauua

SEQ ID NO: 886815 - RNA, 19 nt, Artificial Sequence
  Description of Artificial Sequence: Synthetic oligonucleotide
  Antisense strand to SEQ ID NO: 886814
uaaugcgaggcguuguucc

SEQ ID NO: 886816 - RNA, 19 nt, Artificial Sequence
  Description of Artificial Sequence: Synthetic oligonucleotide
  Sense strand starting at position 3848 of SEQ ID NO: 588747
aacgccucgcauuaagaua

SEQ ID NO: 886817 - RNA, 19 nt, Artificial Sequence
  Description of Artificial Sequence: Synthetic oligonucleotide
  Antisense strand to SEQ ID NO: 886816
uaucuuaaugcgaggcguu

SEQ ID NO: 886818 - RNA, 19 nt, Artificial Sequence
  Description of Artificial Sequence: Synthetic oligonucleotide
  Sense strand starting at position 3975 of SEQ ID NO: 588747
aacacagucuugguuugaa

SEQ ID NO: 886819 - RNA, 19 nt, Artificial Sequence
  Description of Artificial Sequence: Synthetic oligonucleotide
  Antisense strand to SEQ ID NO: 886818
uucaaaccaagacuguguu

SEQ ID NO: 886820 - RNA, 19 nt, Artificial Sequence
  Description of Artificial Sequence: Synthetic oligonucleotide
  Sense strand starting at position 3978 of SEQ ID NO: 588747
acagucuugguuugaagga

SEQ ID NO: 886821 - RNA, 19 nt, Artificial Sequence
  Description of Artificial Sequence: Synthetic oligonucleotide
  Antisense strand to SEQ ID NO: 886820
uccuucaaaccaagacugu

SEQ ID NO: 886822 - RNA, 19 nt, Artificial Sequence
  Description of Artificial Sequence: Synthetic oligonucleotide
  Sense strand starting at position 117 of SEQ ID NO: 588748
uugcuaaggucucaagaac

SEQ ID NO: 886823 - RNA, 19 nt, Artificial Sequence
  Description of Artificial Sequence: Synthetic oligonucleotide
  Antisense strand to SEQ ID NO: 886822
guucuugagaccuuagcaa

SEQ ID NO: 886824 - RNA, 19 nt, Artificial Sequence
  Description of Artificial Sequence: Synthetic oligonucleotide
  Sense strand starting at position 301 of SEQ ID NO: 588748
ugcaaacaugcguuccagu

SEQ ID NO: 886825 - RNA, 19 nt, Artificial Sequence
  Description of Artificial Sequence: Synthetic oligonucleotide
  Antisense strand to SEQ ID NO: 886824
acuggaacgcauguuugca

SEQ ID NO: 886826 - RNA, 19 nt, Artificial Sequence
  Description of Artificial Sequence: Synthetic oligonucleotide
  Sense strand starting at position 314 of SEQ ID NO: 588748
uccagucugugccuuacua

SEQ ID NO: 886827 - RNA, 19 nt, Artificial Sequence
  Description of Artificial Sequence: Synthetic oligonucleotide
  Antisense strand to SEQ ID NO: 886826
uaguaaggcacagacugga

SEQ ID NO: 886828 - RNA, 19 nt, Artificial Sequence
  Description of Artificial Sequence: Synthetic oligonucleotide
  Sense strand starting at position 370 of SEQ ID NO: 588748
uuuguaccuugagacaaau

SEQ ID NO: 886829 - RNA, 19 nt, Artificial Sequence
  Description of Artificial Sequence: Synthetic oligonucleotide
  Antisense strand to SEQ ID NO: 886828
auuugucucaagguacaaa

SEQ ID NO: 886830 - RNA, 19 nt, Artificial Sequence
  Description of Artificial Sequence: Synthetic oligonucleotide
  Sense strand starting at position 402 of SEQ ID NO: 588748
agaguugaaagcuguccaa

SEQ ID NO: 886831 - RNA, 19 nt, Artificial Sequence
  Description of Artificial Sequence: Synthetic oligonucleotide
  Antisense strand to SEQ ID NO: 886830
uuggacagcuuucaacucu

SEQ ID NO: 886832 - RNA, 19 nt, Artificial Sequence
  Description of Artificial Sequence: Synthetic oligonucleotide
  Sense strand starting at position 909 of SEQ ID NO: 588748
aggugugcgcuggcgaaua

SEQ ID NO: 886833 - RNA, 19 nt, Artificial Sequence
  Description of Artificial Sequence: Synthetic oligonucleotide
  Antisense strand to SEQ ID NO: 886832
uauucgccagcgcacaccu

SEQ ID NO: 886834 - RNA, 19 nt, Artificial Sequence
  Description of Artificial Sequence: Synthetic oligonucleotide
  Sense strand starting at position 910 of SEQ ID NO: 588748
ggugugcgcuggcgaauau

SEQ ID NO: 886835 - RNA, 19 nt, Artificial Sequence
  Description of Artificial Sequence: Synthetic oligonucleotide
  Antisense strand to SEQ ID NO: 886834
auauucgccagcgcacacc

SEQ ID NO: 886836 - RNA, 19 nt, Artificial Sequence
  Description of Artificial Sequence: Synthetic oligonucleotide
  Sense strand starting at position 919 of SEQ ID NO: 588748
uggcgaauaucucuaucaa

SEQ ID NO: 886837 - RNA, 19 nt, Artificial Sequence
  Description of Artificial Sequence: Synthetic oligonucleotide
  Antisense strand to SEQ ID NO: 886836
uugauagagauauucgcca

SEQ ID NO: 886838 - RNA, 19 nt, Artificial Sequence
  Description of Artificial Sequence: Synthetic oligonucleotide
  Sense strand starting at position 920 of SEQ ID NO: 588748
ggcgaauaucucuaucaac

SEQ ID NO: 886839 - RNA, 19 nt, Artificial Sequence
  Description of Artificial Sequence: Synthetic oligonucleotide
  Antisense strand to SEQ ID NO: 886838
guugauagagauauucgcc

SEQ ID NO: 886840 - RNA, 19 nt, Artificial Sequence
  Description of Artificial Sequence: Synthetic oligonucleotide
  Sense strand starting at position 1008 of SEQ ID NO: 588748
ccacguuggucucgagguu

SEQ ID NO: 886841 - RNA, 19 nt, Artificial Sequence
  Description of Artificial Sequence: Synthetic oligonucleotide
  Antisense strand to SEQ ID NO: 886840
aaccucgagaccaacgugg

SEQ ID NO: 886842 - RNA, 19 nt, Artificial Sequence
  Description of Artificial Sequence: Synthetic oligonucleotide
  Sense strand starting at position 1122 of SEQ ID NO: 588748
auaagagucucugaaacuu

SEQ ID NO: 886843 - RNA, 19 nt, Artificial Sequence
  Description of Artificial Sequence: Synthetic oligonucleotide
  Antisense strand to SEQ ID NO: 886842
aaguuucagagacucuuau

SEQ ID NO: 886844 - RNA, 19 nt, Artificial Sequence
  Description of Artificial Sequence: Synthetic oligonucleotide
  Sense strand starting at position 1130 of SEQ ID NO: 588748
cucugaaacuucgcucuca

SEQ ID NO: 886845 - RNA, 19 nt, Artificial Sequence
  Description of Artificial Sequence: Synthetic oligonucleotide
  Antisense strand to SEQ ID NO: 886844
ugagagcgaaguuucagag

SEQ ID NO: 886846 - RNA, 19 nt, Artificial Sequence
  Description of Artificial Sequence: Synthetic oligonucleotide
  Sense strand starting at position 1423 of SEQ ID NO: 588748
gcgggaucccugagcgacu

SEQ ID NO: 886847 - RNA, 19 nt, Artificial Sequence
  Description of Artificial Sequence: Synthetic oligonucleotide
  Antisense strand to SEQ ID NO: 886846
agucgcucagggaucccgc

SEQ ID NO: 886848 - RNA, 19 nt, Artificial Sequence
  Description of Artificial Sequence: Synthetic oligonucleotide
  Sense strand starting at position 1544 of SEQ ID NO: 588748
gcguaaucccagcgaugga

SEQ ID NO: 886849 - RNA, 19 nt, Artificial Sequence
  Description of Artificial Sequence: Synthetic oligonucleotide
  Antisense strand to SEQ ID NO: 886848
uccaucgcugggauuacgc

SEQ ID NO: 886850 - RNA, 19 nt, Artificial Sequence
  Description of Artificial Sequence: Synthetic oligonucleotide
  Sense strand starting at position 1628 of SEQ ID NO: 588748
gggcgagcgcucuuuggaa

SEQ ID NO: 886851 - RNA, 19 nt, Artificial Sequence
  Description of Artificial Sequence: Synthetic oligonucleotide
  Antisense strand to SEQ ID NO: 886850
uuccaaagagcgcucgccc

SEQ ID NO: 886852 - RNA, 19 nt, Artificial Sequence
  Description of Artificial Sequence: Synthetic oligonucleotide
  Sense strand starting at position 1630 of SEQ ID NO: 588748
gcgagcgcucuuuggaaca

SEQ ID NO: 886853 - RNA, 19 nt, Artificial Sequence
  Description of Artificial Sequence: Synthetic oligonucleotide
  Antisense strand to SEQ ID NO: 886852
uguuccaaagagcgcucgc

SEQ ID NO: 886854 - RNA, 19 nt, Artificial Sequence
  Description of Artificial Sequence: Synthetic oligonucleotide
  Sense strand starting at position 1635 of SEQ ID NO: 588748
cgcucuuuggaacaacaua

SEQ ID NO: 886855 - RNA, 19 nt, Artificial Sequence
  Description of Artificial Sequence: Synthetic oligonucleotide
  Antisense strand to SEQ ID NO: 886854
uauguuguuccaaagagcg

SEQ ID NO: 886856 - RNA, 19 nt, Artificial Sequence
  Description of Artificial Sequence: Synthetic oligonucleotide
  Sense strand starting at position 1679 of SEQ ID NO: 588748
cgccgagaaugguaguaag

SEQ ID NO: 886857 - RNA, 19 nt, Artificial Sequence
  Description of Artificial Sequence: Synthetic oligonucleotide
  Antisense strand to SEQ ID NO: 886856
cuuacuaccauucucggcg

SEQ ID NO: 886858 - RNA, 19 nt, Artificial Sequence
  Description of Artificial Sequence: Synthetic oligonucleotide
  Sense strand starting at position 1763 of SEQ ID NO: 588748
gaggcugugugagcugaau

SEQ ID NO: 886859 - RNA, 19 nt, Artificial Sequence
  Description of Artificial Sequence: Synthetic oligonucleotide
  Antisense strand to SEQ ID NO: 886858
auucagcucacacagccuc

SEQ ID NO: 886860 - RNA, 19 nt, Artificial Sequence
  Description of Artificial Sequence: Synthetic oligonucleotide
  Sense strand starting at position 1765 of SEQ ID NO: 588748
ggcugugugagcugaauua

SEQ ID NO: 886861 - RNA, 19 nt, Artificial Sequence
  Description of Artificial Sequence: Synthetic oligonucleotide
  Antisense strand to SEQ ID NO: 886860
uaauucagcucacacagcc

SEQ ID NO: 886862 - RNA, 19 nt, Artificial Sequence
  Description of Artificial Sequence: Synthetic oligonucleotide
  Sense strand starting at position 1800 of SEQ ID NO: 588748
gcugcaacuuacgacaaua

SEQ ID NO: 886863 - RNA, 19 nt, Artificial Sequence
  Description of Artificial Sequence: Synthetic oligonucleotide
  Antisense strand to SEQ ID NO: 886862
uauugucguaaguugcagc

SEQ ID NO: 886864 - RNA, 19 nt, Artificial Sequence
  Description of Artificial Sequence: Synthetic oligonucleotide
  Sense strand starting at position 1802 of SEQ ID NO: 588748
ugcaacuuacgacaauauu

SEQ ID NO: 886865 - RNA, 19 nt, Artificial Sequence
  Description of Artificial Sequence: Synthetic oligonucleotide
  Antisense strand to SEQ ID NO: 886864
aauauugucguaaguugca

SEQ ID NO: 886866 - RNA, 19 nt, Artificial Sequence
  Description of Artificial Sequence: Synthetic oligonucleotide
  Sense strand starting at position 1812 of SEQ ID NO: 588748
gacaauauuugugaucgga

SEQ ID NO: 886867 - RNA, 19 nt, Artificial Sequence
  Description of Artificial Sequence: Synthetic oligonucleotide
  Antisense strand to SEQ ID NO: 886866
uccgaucacaaauauuguc

SEQ ID NO: 886868 - RNA, 19 nt, Artificial Sequence
  Description of Artificial Sequence: Synthetic oligonucleotide
  Sense strand starting at position 1866 of SEQ ID NO: 588748
uuccuuucugguuaaacgu

SEQ ID NO: 886869 - RNA, 19 nt, Artificial Sequence
  Description of Artificial Sequence: Synthetic oligonucleotide
  Antisense strand to SEQ ID NO: 886868
acguuuaaccagaaaggaa

SEQ ID NO: 886870 - RNA, 19 nt, Artificial Sequence
  Description of Artificial Sequence: Synthetic oligonucleotide
  Sense strand starting at position 2069 of SEQ ID NO: 588748
gcgaauuuaagguggcaau

SEQ ID NO: 886871 - RNA, 19 nt, Artificial Sequence
  Description of Artificial Sequence: Synthetic oligonucleotide
  Antisense strand to SEQ ID NO: 886870
auugccaccuuaaauucgc

SEQ ID NO: 886872 - RNA, 19 nt, Artificial Sequence
  Description of Artificial Sequence: Synthetic oligonucleotide
  Sense strand starting at position 2080 of SEQ ID NO: 588748
guggcaauuuguuuacaac

SEQ ID NO: 886873 - RNA, 19 nt, Artificial Sequence
  Description of Artificial Sequence: Synthetic oligonucleotide
  Antisense strand to SEQ ID NO: 886872
guuguaaacaaauugccac

SEQ ID NO: 886874 - RNA, 19 nt, Artificial Sequence
  Description of Artificial Sequence: Synthetic oligonucleotide
  Sense strand starting at position 2300 of SEQ ID NO: 588748
ccuccaagauguuaagaaa

SEQ ID NO: 886875 - RNA, 19 nt, Artificial Sequence
  Description of Artificial Sequence: Synthetic oligonucleotide
  Antisense strand to SEQ ID NO: 886874
uuucuuaacaucuuggagg

SEQ ID NO: 886876 - RNA, 19 nt, Artificial Sequence
  Description of Artificial Sequence: Synthetic oligonucleotide
  Sense strand starting at position 2303 of SEQ ID NO: 588748
ccaagauguuaagaaaugu

SEQ ID NO: 886877 - RNA, 19 nt, Artificial Sequence
  Description of Artificial Sequence: Synthetic oligonucleotide
  Antisense strand to SEQ ID NO: 886876
acauuucuuaacaucuugg

SEQ ID NO: 886878 - RNA, 19 nt, Artificial Sequence
  Description of Artificial Sequence: Synthetic oligonucleotide
  Sense strand starting at position 2333 of SEQ ID NO: 588748
aggaguuuaggcugcaaau

SEQ ID NO: 886879 - RNA, 19 nt, Artificial Sequence
  Description of Artificial Sequence: Synthetic oligonucleotide
  Antisense strand to SEQ ID NO: 886878
auuugcagccuaaacuccu

SEQ ID NO: 886880 - RNA, 19 nt, Artificial Sequence
  Description of Artificial Sequence: Synthetic oligonucleotide
  Sense strand starting at position 2335 of SEQ ID NO: 588748
gaguuuaggcugcaaauag

SEQ ID NO: 886881 - RNA, 19 nt, Artificial Sequence
  Description of Artificial Sequence: Synthetic oligonucleotide
  Antisense strand to SEQ ID NO: 886880
cuauuugcagccuaaacuc

SEQ ID NO: 886882 - RNA, 19 nt, Artificial Sequence
  Description of Artificial Sequence: Synthetic oligonucleotide
  Sense strand starting at position 2734 of SEQ ID NO: 588748
ugaaaugcaccuuggaaau

SEQ ID NO: 886883 - RNA, 19 nt, Artificial Sequence
  Description of Artificial Sequence: Synthetic oligonucleotide
  Antisense strand to SEQ ID NO: 886882
auuuccaaggugcauuuca

SEQ ID NO: 886884 - RNA, 19 nt, Artificial Sequence
  Description of Artificial Sequence: Synthetic oligonucleotide
  Sense strand starting at position 2745 of SEQ ID NO: 588748
uuggaaaucugcuccagag

SEQ ID NO: 886885 - RNA, 19 nt, Artificial Sequence
  Description of Artificial Sequence: Synthetic oligonucleotide
  Antisense strand to SEQ ID NO: 886884
cucuggagcagauuuccaa

SEQ ID NO: 886886 - RNA, 19 nt, Artificial Sequence
  Description of Artificial Sequence: Synthetic oligonucleotide
  Sense strand starting at position 2749 of SEQ ID NO: 588748
aaaucugcuccagagcgaa

SEQ ID NO: 886887 - RNA, 19 nt, Artificial Sequence
  Description of Artificial Sequence: Synthetic oligonucleotide
  Antisense strand to SEQ ID NO: 886886
uucgcucuggagcagauuu

SEQ ID NO: 886888 - RNA, 19 nt, Artificial Sequence
  Description of Artificial Sequence: Synthetic oligonucleotide
  Sense strand starting at position 3804 of SEQ ID NO: 588748
cucucuccauuuggagaaa

SEQ ID NO: 886889 - RNA, 19 nt, Artificial Sequence
  Description of Artificial Sequence: Synthetic oligonucleotide
  Antisense strand to SEQ ID NO: 886888
uuucuccaaauggagagag

SEQ ID NO: 886890 - RNA, 19 nt, Artificial Sequence
  Description of Artificial Sequence: Synthetic oligonucleotide
  Sense strand starting at position 3918 of SEQ ID NO: 588748
ggguuucugcgacgcgauu

SEQ ID NO: 886891 - RNA, 19 nt, Artificial Sequence
  Description of Artificial Sequence: Synthetic oligonucleotide
  Antisense strand to SEQ ID NO: 886890
aaucgcgucgcagaaaccc

SEQ ID NO: 886892 - RNA, 19 nt, Artificial Sequence
  Description of Artificial Sequence: Synthetic oligonucleotide
  Sense strand starting at position 3948 of SEQ ID NO: 588748
ggcagaaauuacucagcaa

SEQ ID NO: 886893 - RNA, 19 nt, Artificial Sequence
  Description of Artificial Sequence: Synthetic oligonucleotide
  Antisense strand to SEQ ID NO: 886892
uugcugaguaauuucugcc

SEQ ID NO: 886894 - RNA, 19 nt, Artificial Sequence
  Description of Artificial Sequence: Synthetic oligonucleotide
  Sense strand starting at position 3975 of SEQ ID NO: 588748
auuauuagcugcuuagcaa

SEQ ID NO: 886895 - RNA, 19 nt, Artificial Sequence
  Description of Artificial Sequence: Synthetic oligonucleotide
  Antisense strand to SEQ ID NO: 886894
uugcuaagcagcuaauaau

SEQ ID NO: 886896 - RNA, 19 nt, Artificial Sequence
  Description of Artificial Sequence: Synthetic oligonucleotide
  Sense strand starting at position 28 of SEQ ID NO: 588749
ggaucacugaagcgauuau

SEQ ID NO: 886897 - RNA, 19 nt, Artificial Sequence
  Description of Artificial Sequence: Synthetic oligonucleotide
  Antisense strand to SEQ ID NO: 886896
auaaucgcuucagugaucc

SEQ ID NO: 886898 - RNA, 19 nt, Artificial Sequence
  Description of Artificial Sequence: Synthetic oligonucleotide
  Sense strand starting at position 37 of SEQ ID NO: 588749
aagcgauuaugcgcauaac

SEQ ID NO: 886899 - RNA, 19 nt, Artificial Sequence
  Description of Artificial Sequence: Synthetic oligonucleotide
  Antisense strand to SEQ ID NO: 886898
guuaugcgcauaaucgcuu

SEQ ID NO: 886900 - RNA, 19 nt, Artificial Sequence
  Description of Artificial Sequence: Synthetic oligonucleotide
  Sense strand starting at position 38 of SEQ ID NO: 588749
agcgauuaugcgcauaacu

SEQ ID NO: 886901 - RNA, 19 nt, Artificial Sequence
  Description of Artificial Sequence: Synthetic oligonucleotide
  Antisense strand to SEQ ID NO: 886900
aguuaugcgcauaaucgcu

SEQ ID NO: 886902 - RNA, 19 nt, Artificial Sequence
  Description of Artificial Sequence: Synthetic oligonucleotide
  Sense strand starting at position 40 of SEQ ID NO: 588749
cgauuaugcgcauaacucu

SEQ ID NO: 886903 - RNA, 19 nt, Artificial Sequence
  Description of Artificial Sequence: Synthetic oligonucleotide
  Antisense strand to SEQ ID NO: 886902
agaguuaugcgcauaaucg

SEQ ID NO: 886904 - RNA, 19 nt, Artificial Sequence
  Description of Artificial Sequence: Synthetic oligonucleotide
  Sense strand starting at position 68 of SEQ ID NO: 588749
acaugcuguccggaggaau

SEQ ID NO: 886905 - RNA, 19 nt, Artificial Sequence
  Description of Artificial Sequence: Synthetic oligonucleotide
  Antisense strand to SEQ ID NO: 886904
auuccuccggacagcaugu

SEQ ID NO: 886906 - RNA, 19 nt, Artificial Sequence
  Description of Artificial Sequence: Synthetic oligonucleotide
  Sense strand starting at position 79 of SEQ ID NO: 588749
ggaggaaugcuccagguau

SEQ ID NO: 886907 - RNA, 19 nt, Artificial Sequence
  Description of Artificial Sequence: Synthetic oligonucleotide
  Antisense strand to SEQ ID NO: 886906
auaccuggagcauuccucc

SEQ ID NO: 886908 - RNA, 19 nt, Artificial Sequence
  Description of Artificial Sequence: Synthetic oligonucleotide
  Sense strand starting at position 100 of SEQ ID NO: 588749
ugguuugaauuaucuaccu

SEQ ID NO: 886909 - RNA, 19 nt, Artificial Sequence
  Description of Artificial Sequence: Synthetic oligonucleotide
  Antisense strand to SEQ ID NO: 886908
agguagauaauucaaacca

SEQ ID NO: 886910 - RNA, 19 nt, Artificial Sequence
  Description of Artificial Sequence: Synthetic oligonucleotide
  Sense strand starting at position 139 of SEQ ID NO: 588749
acuacccucuuguaaggua

SEQ ID NO: 886911 - RNA, 19 nt, Artificial Sequence
  Description of Artificial Sequence: Synthetic oligonucleotide
  Antisense strand to SEQ ID NO: 886910
uaccuuacaagaggguagu

SEQ ID NO: 886912 - RNA, 19 nt, Artificial Sequence
  Description of Artificial Sequence: Synthetic oligonucleotide
  Sense strand starting at position 173 of SEQ ID NO: 588749
gguguuuaggguuaaagug

SEQ ID NO: 886913 - RNA, 19 nt, Artificial Sequence
  Description of Artificial Sequence: Synthetic oligonucleotide
  Antisense strand to SEQ ID NO: 886912
cacuuuaacccuaaacacc

SEQ ID NO: 886914 - RNA, 19 nt, Artificial Sequence
  Description of Artificial Sequence: Synthetic oligonucleotide
  Sense strand starting at position 181 of SEQ ID NO: 588749
ggguuaaaguguuuccaaa

SEQ ID NO: 886915 - RNA, 19 nt, Artificial Sequence
  Description of Artificial Sequence: Synthetic oligonucleotide
  Antisense strand to SEQ ID NO: 886914
uuuggaaacacuuuaaccc

SEQ ID NO: 886916 - RNA, 19 nt, Artificial Sequence
  Description of Artificial Sequence: Synthetic oligonucleotide
  Sense strand starting at position 183 of SEQ ID NO: 588749
guuaaaguguuuccaaaua

SEQ ID NO: 886917 - RNA, 19 nt, Artificial Sequence
  Description of Artificial Sequence: Synthetic oligonucleotide
  Antisense strand to SEQ ID NO: 886916
uauuuggaaacacuuuaac

SEQ ID NO: 886918 - RNA, 19 nt, Artificial Sequence
  Description of Artificial Sequence: Synthetic oligonucleotide
  Sense strand starting at position 335 of SEQ ID NO: 588749
uugcuaaggucucaagaac

SEQ ID NO: 886919 - RNA, 19 nt, Artificial Sequence
  Description of Artificial Sequence: Synthetic oligonucleotide
  Antisense strand to SEQ ID NO: 886918
guucuugagaccuuagcaa

SEQ ID NO: 886920 - RNA, 19 nt, Artificial Sequence
  Description of Artificial Sequence: Synthetic oligonucleotide
  Sense strand starting at position 519 of SEQ ID NO: 588749
ugcaaacaugcguuccagu

SEQ ID NO: 886921 - RNA, 19 nt, Artificial Sequence
  Description of Artificial Sequence: Synthetic oligonucleotide
  Antisense strand to SEQ ID NO: 886920
acuggaacgcauguuugca

SEQ ID NO: 886922 - RNA, 19 nt, Artificial Sequence
  Description of Artificial Sequence: Synthetic oligonucleotide
  Sense strand starting at position 532 of SEQ ID NO: 588749
uccagucugugccuuacua

SEQ ID NO: 886923 - RNA, 19 nt, Artificial Sequence
  Description of Artificial Sequence: Synthetic oligonucleotide
  Antisense strand to SEQ ID NO: 886922
uaguaaggcacagacugga

SEQ ID NO: 886924 - RNA, 19 nt, Artificial Sequence
  Description of Artificial Sequence: Synthetic oligonucleotide
  Sense strand starting at position 588 of SEQ ID NO: 588749
uuuguaccuugagacaaau

SEQ ID NO: 886925 - RNA, 19 nt, Artificial Sequence
  Description of Artificial Sequence: Synthetic oligonucleotide
  Antisense strand to SEQ ID NO: 886924
auuugucucaagguacaaa

SEQ ID NO: 886926 - RNA, 19 nt, Artificial Sequence
  Description of Artificial Sequence: Synthetic oligonucleotide
  Sense strand starting at position 620 of SEQ ID NO: 588749
agaguugaaagcuguccaa

SEQ ID NO: 886927 - RNA, 19 nt, Artificial Sequence
  Description of Artificial Sequence: Synthetic oligonucleotide
  Antisense strand to SEQ ID NO: 886926
uuggacagcuuucaacucu

SEQ ID NO: 886928 - RNA, 19 nt, Artificial Sequence
  Description of Artificial Sequence: Synthetic oligonucleotide
  Sense strand starting at position 1127 of SEQ ID NO: 588749
aggugugcgcuggcgaaua

SEQ ID NO: 886929 - RNA, 19 nt, Artificial Sequence
  Description of Artificial Sequence: Synthetic oligonucleotide
  Antisense strand to SEQ ID NO: 886928
uauucgccagcgcacaccu

SEQ ID NO: 886930 - RNA, 19 nt, Artificial Sequence
  Description of Artificial Sequence: Synthetic oligonucleotide
  Sense strand starting at position 1137 of SEQ ID NO: 588749
uggcgaauaucucuaucaa

SEQ ID NO: 886931 - RNA, 19 nt, Artificial Sequence
  Description of Artificial Sequence: Synthetic oligonucleotide
  Antisense strand to SEQ ID NO: 886930
uugauagagauauucgcca

SEQ ID NO: 886932 - RNA, 19 nt, Artificial Sequence
  Description of Artificial Sequence: Synthetic oligonucleotide
  Sense strand starting at position 1138 of SEQ ID NO: 588749
ggcgaauaucucuaucaac

SEQ ID NO: 886933 - RNA, 19 nt, Artificial Sequence
  Description of Artificial Sequence: Synthetic oligonucleotide
  Antisense strand to SEQ ID NO: 886932
guugauagagauauucgcc

SEQ ID NO: 886934 - RNA, 19 nt, Artificial Sequence
  Description of Artificial Sequence: Synthetic oligonucleotide
  Sense strand starting at position 1340 of SEQ ID NO: 588749
auaagagucucugaaacuu

SEQ ID NO: 886935 - RNA, 19 nt, Artificial Sequence
  Description of Artificial Sequence: Synthetic oligonucleotide
  Antisense strand to SEQ ID NO: 886934
aaguuucagagacucuuau

SEQ ID NO: 886936 - RNA, 19 nt, Artificial Sequence
  Description of Artificial Sequence: Synthetic oligonucleotide
  Sense strand starting at position 1348 of SEQ ID NO: 588749
cucugaaacuucgcucuca

SEQ ID NO: 886937 - RNA, 19 nt, Artificial Sequence
  Description of Artificial Sequence: Synthetic oligonucleotide
  Antisense strand to SEQ ID NO: 886936
ugagagcgaaguuucagag

SEQ ID NO: 886938 - RNA, 19 nt, Artificial Sequence
  Description of Artificial Sequence: Synthetic oligonucleotide
  Sense strand starting at position 1641 of SEQ ID NO: 588749
gcgggaucccugagcgacu

SEQ ID NO: 886939 - RNA, 19 nt, Artificial Sequence
  Description of Artificial Sequence: Synthetic oligonucleotide
  Antisense strand to SEQ ID NO: 886938
agucgcucagggaucccgc

SEQ ID NO: 886940 - RNA, 19 nt, Artificial Sequence
  Description of Artificial Sequence: Synthetic oligonucleotide
  Sense strand starting at position 1762 of SEQ ID NO: 588749
gcguaaucccagcgaugga

SEQ ID NO: 886941 - RNA, 19 nt, Artificial Sequence
  Description of Artificial Sequence: Synthetic oligonucleotide
  Antisense strand to SEQ ID NO: 886940
uccaucgcugggauuacgc

SEQ ID NO: 886942 - RNA, 19 nt, Artificial Sequence
  Description of Artificial Sequence: Synthetic oligonucleotide
  Sense strand starting at position 1846 of SEQ ID NO: 588749
gggcgagcgcucuuuggaa

SEQ ID NO: 886943 - RNA, 19 nt, Artificial Sequence
  Description of Artificial Sequence: Synthetic oligonucleotide
  Antisense strand to SEQ ID NO: 886942
uuccaaagagcgcucgccc

SEQ ID NO: 886944 - RNA, 19 nt, Artificial Sequence
  Description of Artificial Sequence: Synthetic oligonucleotide
  Sense strand starting at position 1848 of SEQ ID NO: 588749
gcgagcgcucuuuggaaca

SEQ ID NO: 886945 - RNA, 19 nt, Artificial Sequence
  Description of Artificial Sequence: Synthetic oligonucleotide
  Antisense strand to SEQ ID NO: 886944
uguuccaaagagcgcucgc

SEQ ID NO: 886946 - RNA, 19 nt, Artificial Sequence
  Description of Artificial Sequence: Synthetic oligonucleotide
  Sense strand starting at position 1853 of SEQ ID NO: 588749
cgcucuuuggaacaacaua

SEQ ID NO: 886947 - RNA, 19 nt, Artificial Sequence
  Description of Artificial Sequence: Synthetic oligonucleotide
  Antisense strand to SEQ ID NO: 886946
uauguuguuccaaagagcg

SEQ ID NO: 886948 - RNA, 19 nt, Artificial Sequence
  Description of Artificial Sequence: Synthetic oligonucleotide
  Sense strand starting at position 1981 of SEQ ID NO: 588749
gaggcugugugagcugaau

SEQ ID NO: 886949 - RNA, 19 nt, Artificial Sequence
  Description of Artificial Sequence: Synthetic oligonucleotide
  Antisense strand to SEQ ID NO: 886948
auucagcucacacagccuc

SEQ ID NO: 886950 - RNA, 19 nt, Artificial Sequence
  Description of Artificial Sequence: Synthetic oligonucleotide
  Sense strand starting at position 1983 of SEQ ID NO: 588749
ggcugugugagcugaauua

SEQ ID NO: 886951 - RNA, 19 nt, Artificial Sequence
  Description of Artificial Sequence: Synthetic oligonucleotide
  Antisense strand to SEQ ID NO: 886950
uaauucagcucacacagcc

SEQ ID NO: 886952 - RNA, 19 nt, Artificial Sequence
  Description of Artificial Sequence: Synthetic oligonucleotide
  Sense strand starting at position 2020 of SEQ ID NO: 588749
ugcaacuuacgacaauauu

SEQ ID NO: 886953 - RNA, 19 nt, Artificial Sequence
  Description of Artificial Sequence: Synthetic oligonucleotide
  Antisense strand to SEQ ID NO: 886952
aauauugucguaaguugca

SEQ ID NO: 886954 - RNA, 19 nt, Artificial Sequence
  Description of Artificial Sequence: Synthetic oligonucleotide
  Sense strand starting at position 2030 of SEQ ID NO: 588749
gacaauauuugugaucgga

SEQ ID NO: 886955 - RNA, 19 nt, Artificial Sequence
  Description of Artificial Sequence: Synthetic oligonucleotide
  Antisense strand to SEQ ID NO: 886954
uccgaucacaaauauuguc

SEQ ID NO: 886956 - RNA, 19 nt, Artificial Sequence
  Description of Artificial Sequence: Synthetic oligonucleotide
  Sense strand starting at position 2084 of SEQ ID NO: 588749
uuccuuucugguuaaacgu

SEQ ID NO: 886957 - RNA, 19 nt, Artificial Sequence
  Description of Artificial Sequence: Synthetic oligonucleotide
  Antisense strand to SEQ ID NO: 886956
acguuuaaccagaaaggaa

SEQ ID NO: 886958 - RNA, 19 nt, Artificial Sequence
  Description of Artificial Sequence: Synthetic oligonucleotide
  Sense strand starting at position 2287 of SEQ ID NO: 588749
gcgaauuuaagguggcaau

SEQ ID NO: 886959 - RNA, 19 nt, Artificial Sequence
  Description of Artificial Sequence: Synthetic oligonucleotide
  Antisense strand to SEQ ID NO: 886958
auugccaccuuaaauucgc

SEQ ID NO: 886960 - RNA, 19 nt, Artificial Sequence
  Description of Artificial Sequence: Synthetic oligonucleotide
  Sense strand starting at position 2298 of SEQ ID NO: 588749
guggcaauuuguuuacaac

SEQ ID NO: 886961 - RNA, 19 nt, Artificial Sequence
  Description of Artificial Sequence: Synthetic oligonucleotide
  Antisense strand to SEQ ID NO: 886960
guuguaaacaaauugccac

SEQ ID NO: 886962 - RNA, 19 nt, Artificial Sequence
  Description of Artificial Sequence: Synthetic oligonucleotide
  Sense strand starting at position 2518 of SEQ ID NO: 588749
ccuccaagauguuaagaaa

SEQ ID NO: 886963 - RNA, 19 nt, Artificial Sequence
  Description of Artificial Sequence: Synthetic oligonucleotide
  Antisense strand to SEQ ID NO: 886962
uuucuuaacaucuuggagg

SEQ ID NO: 886964 - RNA, 19 nt, Artificial Sequence
  Description of Artificial Sequence: Synthetic oligonucleotide
  Sense strand starting at position 2521 of SEQ ID NO: 588749
ccaagauguuaagaaaugu

SEQ ID NO: 886965 - RNA, 19 nt, Artificial Sequence
  Description of Artificial Sequence: Synthetic oligonucleotide
  Antisense strand to SEQ ID NO: 886964
acauuucuuaacaucuugg

SEQ ID NO: 886966 - RNA, 19 nt, Artificial Sequence
  Description of Artificial Sequence: Synthetic oligonucleotide
  Sense strand starting at position 2551 of SEQ ID NO: 588749
aggaguuuaggcugcaaau

SEQ ID NO: 886967 - RNA, 19 nt, Artificial Sequence
  Description of Artificial Sequence: Synthetic oligonucleotide
  Antisense strand to SEQ ID NO: 886966
auuugcagccuaaacuccu

SEQ ID NO: 886968 - RNA, 19 nt, Artificial Sequence
  Description of Artificial Sequence: Synthetic oligonucleotide
  Sense strand starting at position 2553 of SEQ ID NO: 588749
gaguuuaggcugcaaauag

SEQ ID NO: 886969 - RNA, 19 nt, Artificial Sequence
  Description of Artificial Sequence: Synthetic oligonucleotide
  Antisense strand to SEQ ID NO: 886968
cuauuugcagccuaaacuc

SEQ ID NO: 886970 - RNA, 19 nt, Artificial Sequence
  Description of Artificial Sequence: Synthetic oligonucleotide
  Sense strand starting at position 2952 of SEQ ID NO: 588749
ugaaaugcaccuuggaaau

SEQ ID NO: 886971 - RNA, 19 nt, Artificial Sequence
  Description of Artificial Sequence: Synthetic oligonucleotide
  Antisense strand to SEQ ID NO: 886970
auuuccaaggugcauuuca

SEQ ID NO: 886972 - RNA, 19 nt, Artificial Sequence
  Description of Artificial Sequence: Synthetic oligonucleotide
  Sense strand starting at position 2963 of SEQ ID NO: 588749
uuggaaaucugcuccagag

SEQ ID NO: 886973 - RNA, 19 nt, Artificial Sequence
  Description of Artificial Sequence: Synthetic oligonucleotide
  Antisense strand to SEQ ID NO: 886972
cucuggagcagauuuccaa

SEQ ID NO: 886974 - RNA, 19 nt, Artificial Sequence
  Description of Artificial Sequence: Synthetic oligonucleotide
  Sense strand starting at position 2967 of SEQ ID NO: 588749
aaaucugcuccagagcgaa

SEQ ID NO: 886975 - RNA, 19 nt, Artificial Sequence
  Description of Artificial Sequence: Synthetic oligonucleotide
  Antisense strand to SEQ ID NO: 886974
uucgcucuggagcagauuu

SEQ ID NO: 886976 - RNA, 19 nt, Artificial Sequence
  Description of Artificial Sequence: Synthetic oligonucleotide
  Sense strand starting at position 141 of SEQ ID NO: 588750
cagagucgucccggcaagu

SEQ ID NO: 886977 - RNA, 19 nt, Artificial Sequence
  Description of Artificial Sequence: Synthetic oligonucleotide
  Antisense strand to SEQ ID NO: 886976
acuugccgggacgacucug

SEQ ID NO: 886978 - RNA, 19 nt, Artificial Sequence
  Description of Artificial Sequence: Synthetic oligonucleotide
  Sense strand starting at position 362 of SEQ ID NO: 588750
cgcugucccaccugaggaa

SEQ ID NO: 886979 - RNA, 19 nt, Artificial Sequence
  Description of Artificial Sequence: Synthetic oligonucleotide
  Antisense strand to SEQ ID NO: 886978
uuccucaggugggacagcg

SEQ ID NO: 886980 - RNA, 19 nt, Artificial Sequence
  Description of Artificial Sequence: Synthetic oligonucleotide
  Sense strand starting at position 1435 of SEQ ID NO: 588750
cggaguguuugucgccauc

SEQ ID NO: 886981 - RNA, 19 nt, Artificial Sequence
  Description of Artificial Sequence: Synthetic oligonucleotide
  Antisense strand to SEQ ID NO: 886980
gauggcgacaaacacuccg

SEQ ID NO: 886982 - RNA, 19 nt, Artificial Sequence
  Description of Artificial Sequence: Synthetic oligonucleotide
  Sense strand starting at position 2070 of SEQ ID NO: 588750
acugaacacucgugaugcu

SEQ ID NO: 886983 - RNA, 19 nt, Artificial Sequence
  Description of Artificial Sequence: Synthetic oligonucleotide
  Antisense strand to SEQ ID NO: 886982
agcaucacgaguguucagu

SEQ ID NO: 886984 - RNA, 19 nt, Artificial Sequence
  Description of Artificial Sequence: Synthetic oligonucleotide
  Sense strand starting at position 2296 of SEQ ID NO: 588750
ggcuguguuccucagccau

SEQ ID NO: 886985 - RNA, 19 nt, Artificial Sequence
  Description of Artificial Sequence: Synthetic oligonucleotide
  Antisense strand to SEQ ID NO: 886984
auggcugaggaacacagcc

SEQ ID NO: 886986 - RNA, 19 nt, Artificial Sequence
  Description of Artificial Sequence: Synthetic oligonucleotide
  Sense strand starting at position 2427 of SEQ ID NO: 588750
ccacuuccacccugagagu

SEQ ID NO: 886987 - RNA, 19 nt, Artificial Sequence
  Description of Artificial Sequence: Synthetic oligonucleotide
  Antisense strand to SEQ ID NO: 886986
acucucaggguggaagugg

SEQ ID NO: 886988 - RNA, 19 nt, Artificial Sequence
  Description of Artificial Sequence: Synthetic oligonucleotide
  Sense strand starting at position 2438 of SEQ ID NO: 588750
cugagaguuugguccugaa

SEQ ID NO: 886989 - RNA, 19 nt, Artificial Sequence
  Description of Artificial Sequence: Synthetic oligonucleotide
  Antisense strand to SEQ ID NO: 886988
uucaggaccaaacucucag

SEQ ID NO: 886990 - RNA, 19 nt, Artificial Sequence
  Description of Artificial Sequence: Synthetic oligonucleotide
  Sense strand starting at position 2441 of SEQ ID NO: 588750
agaguuugguccugaaacg

SEQ ID NO: 886991 - RNA, 19 nt, Artificial Sequence
  Description of Artificial Sequence: Synthetic oligonucleotide
  Antisense strand to SEQ ID NO: 886990
cguuucaggaccaaacucu

SEQ ID NO: 886992 - RNA, 19 nt, Artificial Sequence
  Description of Artificial Sequence: Synthetic oligonucleotide
  Sense strand starting at position 2462 of SEQ ID NO: 588750
cagcaagugaaguguugau

SEQ ID NO: 886993 - RNA, 19 nt, Artificial Sequence
  Description of Artificial Sequence: Synthetic oligonucleotide
  Antisense strand to SEQ ID NO: 886992
aucaacacuucacuugcug

SEQ ID NO: 886994 - RNA, 19 nt, Artificial Sequence
  Description of Artificial Sequence: Synthetic oligonucleotide
  Sense strand starting at position 2638 of SEQ ID NO: 588750
ggcccuaucccuugccaga

SEQ ID NO: 886995 - RNA, 19 nt, Artificial Sequence
  Description of Artificial Sequence: Synthetic oligonucleotide
  Antisense strand to SEQ ID NO: 886994
ucuggcaagggauagggcc

SEQ ID NO: 886996 - RNA, 19 nt, Artificial Sequence
  Description of Artificial Sequence: Synthetic oligonucleotide
  Sense strand starting at position 2872 of SEQ ID NO: 588750
ucuggauucuguugggacu

SEQ ID NO: 886997 - RNA, 19 nt, Artificial Sequence
  Description of Artificial Sequence: Synthetic oligonucleotide
  Antisense strand to SEQ ID NO: 886996
agucccaacagaauccaga

SEQ ID NO: 886998 - RNA, 19 nt, Artificial Sequence
  Description of Artificial Sequence: Synthetic oligonucleotide
  Sense strand starting at position 2874 of SEQ ID NO: 588750
uggauucuguugggacuga

SEQ ID NO: 886999 - RNA, 19 nt, Artificial Sequence
  Description of Artificial Sequence: Synthetic oligonucleotide
  Antisense strand to SEQ ID NO: 886998
ucagucccaacagaaucca

SEQ ID NO: 887000 - RNA, 19 nt, Artificial Sequence
  Description of Artificial Sequence: Synthetic oligonucleotide
  Sense strand starting at position 2953 of SEQ ID NO: 588750
ggagcugggaaauguacau

SEQ ID NO: 887001 - RNA, 19 nt, Artificial Sequence
  Description of Artificial Sequence: Synthetic oligonucleotide
  Antisense strand to SEQ ID NO: 887000
auguacauuucccagcucc

SEQ ID NO: 887002 - RNA, 19 nt, Artificial Sequence
  Description of Artificial Sequence: Synthetic oligonucleotide
  Sense strand starting at position 2959 of SEQ ID NO: 588750
gggaaauguacaugagagc

SEQ ID NO: 887003 - RNA, 19 nt, Artificial Sequence
  Description of Artificial Sequence: Synthetic oligonucleotide
  Antisense strand to SEQ ID NO: 887002
gcucucauguacauuuccc

SEQ ID NO: 887004 - RNA, 19 nt, Artificial Sequence
  Description of Artificial Sequence: Synthetic oligonucleotide
  Sense strand starting at position 3057 of SEQ ID NO: 588750
ccuggauucuguggcccau

SEQ ID NO: 887005 - RNA, 19 nt, Artificial Sequence
  Description of Artificial Sequence: Synthetic oligonucleotide
  Antisense strand to SEQ ID NO: 887004
augggccacagaauccagg

SEQ ID NO: 887006 - RNA, 19 nt, Artificial Sequence
  Description of Artificial Sequence: Synthetic oligonucleotide
  Sense strand starting at position 3449 of SEQ ID NO: 588750
gggagagucuguuggaaca

SEQ ID NO: 887007 - RNA, 19 nt, Artificial Sequence
  Description of Artificial Sequence: Synthetic oligonucleotide
  Antisense strand to SEQ ID NO: 887006
uguuccaacagacucuccc

SEQ ID NO: 887008 - RNA, 19 nt, Artificial Sequence
  Description of Artificial Sequence: Synthetic oligonucleotide
  Sense strand starting at position 3451 of SEQ ID NO: 588750
gagagucuguuggaacaga

SEQ ID NO: 887009 - RNA, 19 nt, Artificial Sequence
  Description of Artificial Sequence: Synthetic oligonucleotide
  Antisense strand to SEQ ID NO: 887008
ucuguuccaacagacucuc

SEQ ID NO: 887010 - RNA, 19 nt, Artificial Sequence
  Description of Artificial Sequence: Synthetic oligonucleotide
  Sense strand starting at position 3568 of SEQ ID NO: 588750
gagaguugcggcugggaua

SEQ ID NO: 887011 - RNA, 19 nt, Artificial Sequence
  Description of Artificial Sequence: Synthetic oligonucleotide
  Antisense strand to SEQ ID NO: 887010
uaucccagccgcaacucuc

SEQ ID NO: 887012 - RNA, 19 nt, Artificial Sequence
  Description of Artificial Sequence: Synthetic oligonucleotide
  Sense strand starting at position 3569 of SEQ ID NO: 588750
agaguugcggcugggauau

SEQ ID NO: 887013 - RNA, 19 nt, Artificial Sequence
  Description of Artificial Sequence: Synthetic oligonucleotide
  Antisense strand to SEQ ID NO: 887012
auaucccagccgcaacucu

SEQ ID NO: 887014 - RNA, 19 nt, Artificial Sequence
  Description of Artificial Sequence: Synthetic oligonucleotide
  Sense strand starting at position 3620 of SEQ ID NO: 588750
cugaguccuggcugucauu

SEQ ID NO: 887015 - RNA, 19 nt, Artificial Sequence
  Description of Artificial Sequence: Synthetic oligonucleotide
  Antisense strand to SEQ ID NO: 887014
aaugacagccaggacucag

SEQ ID NO: 887016 - RNA, 19 nt, Artificial Sequence
  Description of Artificial Sequence: Synthetic oligonucleotide
  Sense strand starting at position 3964 of SEQ ID NO: 588750
uuucuagugggcugcagaa

SEQ ID NO: 887017 - RNA, 19 nt, Artificial Sequence
  Description of Artificial Sequence: Synthetic oligonucleotide
  Antisense strand to SEQ ID NO: 887016
uucugcagcccacuagaaa

SEQ ID NO: 887018 - RNA, 19 nt, Artificial Sequence
  Description of Artificial Sequence: Synthetic oligonucleotide
  Sense strand starting at position 202 of SEQ ID NO: 588751
gagcuaugaucgcacaauu

SEQ ID NO: 887019 - RNA, 19 nt, Artificial Sequence
  Description of Artificial Sequence: Synthetic oligonucleotide
  Antisense strand to SEQ ID NO: 887018
aauugugcgaucauagcuc

SEQ ID NO: 887020 - RNA, 19 nt, Artificial Sequence
  Description of Artificial Sequence: Synthetic oligonucleotide
  Sense strand starting at position 693 of SEQ ID NO: 588751
agugaugucuccucucuga

SEQ ID NO: 887021 - RNA, 19 nt, Artificial Sequence
  Description of Artificial Sequence: Synthetic oligonucleotide
  Antisense strand to SEQ ID NO: 887020
ucagagaggagacaucacu

SEQ ID NO: 887022 - RNA, 19 nt, Artificial Sequence
  Description of Artificial Sequence: Synthetic oligonucleotide
  Sense strand starting at position 714 of SEQ ID NO: 588751
ccagguuccucaccuagaa

SEQ ID NO: 887023 - RNA, 19 nt, Artificial Sequence
  Description of Artificial Sequence: Synthetic oligonucleotide
  Antisense strand to SEQ ID NO: 887022
uucuaggugaggaaccugg

SEQ ID NO: 887024 - RNA, 19 nt, Artificial Sequence
  Description of Artificial Sequence: Synthetic oligonucleotide
  Sense strand starting at position 806 of SEQ ID NO: 588751
ucgguccucugggaaggau

SEQ ID NO: 887025 - RNA, 19 nt, Artificial Sequence
  Description of Artificial Sequence: Synthetic oligonucleotide
  Antisense strand to SEQ ID NO: 887024
auccuucccagaggaccga

SEQ ID NO: 887026 - RNA, 19 nt, Artificial Sequence
  Description of Artificial Sequence: Synthetic oligonucleotide
  Sense strand starting at position 831 of SEQ ID NO: 588751
agugaaugcagcuguucua

SEQ ID NO: 887027 - RNA, 19 nt, Artificial Sequence
  Description of Artificial Sequence: Synthetic oligonucleotide
  Antisense strand to SEQ ID NO: 887026
uagaacagcugcauucacu

SEQ ID NO: 887028 - RNA, 19 nt, Artificial Sequence
  Description of Artificial Sequence: Synthetic oligonucleotide
  Sense strand starting at position 834 of SEQ ID NO: 588751
gaaugcagcuguucuacuu

SEQ ID NO: 887029 - RNA, 19 nt, Artificial Sequence
  Description of Artificial Sequence: Synthetic oligonucleotide
  Antisense strand to SEQ ID NO: 887028
aaguagaacagcugcauuc

SEQ ID NO: 887030 - RNA, 19 nt, Artificial Sequence
  Description of Artificial Sequence: Synthetic oligonucleotide
  Sense strand starting at position 902 of SEQ ID NO: 588751
aagcuaucagugugcugua

SEQ ID NO: 887031 - RNA, 19 nt, Artificial Sequence
  Description of Artificial Sequence: Synthetic oligonucleotide
  Antisense strand to SEQ ID NO: 887030
uacagcacacugauagcuu

SEQ ID NO: 887032 - RNA, 19 nt, Artificial Sequence
  Description of Artificial Sequence: Synthetic oligonucleotide
  Sense strand starting at position 993 of SEQ ID NO: 588751
ccuggcuuguggccaagau

SEQ ID NO: 887033 - RNA, 19 nt, Artificial Sequence
  Description of Artificial Sequence: Synthetic oligonucleotide
  Antisense strand to SEQ ID NO: 887032
aucuuggccacaagccagg

SEQ ID NO: 887034 - RNA, 19 nt, Artificial Sequence
  Description of Artificial Sequence: Synthetic oligonucleotide
  Sense strand starting at position 1105 of SEQ ID NO: 588751
ucaggaaaugauugcuuua

SEQ ID NO: 887035 - RNA, 19 nt, Artificial Sequence
  Description of Artificial Sequence: Synthetic oligonucleotide
  Antisense strand to SEQ ID NO: 887034
uaaagcaaucauuuccuga

SEQ ID NO: 887036 - RNA, 19 nt, Artificial Sequence
  Description of Artificial Sequence: Synthetic oligonucleotide
  Sense strand starting at position 1107 of SEQ ID NO: 588751
aggaaaugauugcuuuauu

SEQ ID NO: 887037 - RNA, 19 nt, Artificial Sequence
  Description of Artificial Sequence: Synthetic oligonucleotide
  Antisense strand to SEQ ID NO: 887036
aauaaagcaaucauuuccu

SEQ ID NO: 887038 - RNA, 19 nt, Artificial Sequence
  Description of Artificial Sequence: Synthetic oligonucleotide
  Sense strand starting at position 1108 of SEQ ID NO: 588751
ggaaaugauugcuuuauua

SEQ ID NO: 887039 - RNA, 19 nt, Artificial Sequence
  Description of Artificial Sequence: Synthetic oligonucleotide
  Antisense strand to SEQ ID NO: 887038
uaauaaagcaaucauuucc

SEQ ID NO: 887040 - RNA, 19 nt, Artificial Sequence
  Description of Artificial Sequence: Synthetic oligonucleotide
  Sense strand starting at position 1200 of SEQ ID NO: 588751
gccuaugacuuugcagacu

SEQ ID NO: 887041 - RNA, 19 nt, Artificial Sequence
  Description of Artificial Sequence: Synthetic oligonucleotide
  Antisense strand to SEQ ID NO: 887040
agucugcaaagucauaggc

SEQ ID NO: 887042 - RNA, 19 nt, Artificial Sequence
  Description of Artificial Sequence: Synthetic oligonucleotide
  Sense strand starting at position 1262 of SEQ ID NO: 588751
agcucugggacucguuaau

SEQ ID NO: 887043 - RNA, 19 nt, Artificial Sequence
  Description of Artificial Sequence: Synthetic oligonucleotide
  Antisense strand to SEQ ID NO: 887042
auuaacgagucccagagcu

SEQ ID NO: 887044 - RNA, 19 nt, Artificial Sequence
  Description of Artificial Sequence: Synthetic oligonucleotide
  Sense strand starting at position 1268 of SEQ ID NO: 588751
gggacucguuaauguuguu

SEQ ID NO: 887045 - RNA, 19 nt, Artificial Sequence
  Description of Artificial Sequence: Synthetic oligonucleotide
  Antisense strand to SEQ ID NO: 887044
aacaacauuaacgaguccc

SEQ ID NO: 887046 - RNA, 19 nt, Artificial Sequence
  Description of Artificial Sequence: Synthetic oligonucleotide
  Sense strand starting at position 1312 of SEQ ID NO: 588751
ggaaauuccucgcugagca

SEQ ID NO: 887047 - RNA, 19 nt, Artificial Sequence
  Description of Artificial Sequence: Synthetic oligonucleotide
  Antisense strand to SEQ ID NO: 887046
ugcucagcgaggaauuucc

SEQ ID NO: 887048 - RNA, 19 nt, Artificial Sequence
  Description of Artificial Sequence: Synthetic oligonucleotide
  Sense strand starting at position 1313 of SEQ ID NO: 588751
gaaauuccucgcugagcac

SEQ ID NO: 887049 - RNA, 19 nt, Artificial Sequence
  Description of Artificial Sequence: Synthetic oligonucleotide
  Antisense strand to SEQ ID NO: 887048
gugcucagcgaggaauuuc

SEQ ID NO: 887050 - RNA, 19 nt, Artificial Sequence
  Description of Artificial Sequence: Synthetic oligonucleotide
  Sense strand starting at position 1373 of SEQ ID NO: 588751
gugggcuuguuagugacau

SEQ ID NO: 887051 - RNA, 19 nt, Artificial Sequence
  Description of Artificial Sequence: Synthetic oligonucleotide
  Antisense strand to SEQ ID NO: 887050
augucacuaacaagcccac

SEQ ID NO: 887052 - RNA, 19 nt, Artificial Sequence
  Description of Artificial Sequence: Synthetic oligonucleotide
  Sense strand starting at position 1374 of SEQ ID NO: 588751
ugggcuuguuagugacauu

SEQ ID NO: 887053 - RNA, 19 nt, Artificial Sequence
  Description of Artificial Sequence: Synthetic oligonucleotide
  Antisense strand to SEQ ID NO: 887052
aaugucacuaacaagccca

SEQ ID NO: 887054 - RNA, 19 nt, Artificial Sequence
  Description of Artificial Sequence: Synthetic oligonucleotide
  Sense strand starting at position 1384 of SEQ ID NO: 588751
agugacauuugccaggagu

SEQ ID NO: 887055 - RNA, 19 nt, Artificial Sequence
  Description of Artificial Sequence: Synthetic oligonucleotide
  Antisense strand to SEQ ID NO: 887054
acuccuggcaaaugucacu

SEQ ID NO: 887056 - RNA, 19 nt, Artificial Sequence
  Description of Artificial Sequence: Synthetic oligonucleotide
  Sense strand starting at position 1611 of SEQ ID NO: 588751
gcgaguaagugcucuuaag

SEQ ID NO: 887057 - RNA, 19 nt, Artificial Sequence
  Description of Artificial Sequence: Synthetic oligonucleotide
  Antisense strand to SEQ ID NO: 887056
cuuaagagcacuuacucgc

SEQ ID NO: 887058 - RNA, 19 nt, Artificial Sequence
  Description of Artificial Sequence: Synthetic oligonucleotide
  Sense strand starting at position 1621 of SEQ ID NO: 588751
gcucuuaagccagagagga

SEQ ID NO: 887059 - RNA, 19 nt, Artificial Sequence
  Description of Artificial Sequence: Synthetic oligonucleotide
  Antisense strand to SEQ ID NO: 887058
uccucucuggcuuaagagc

SEQ ID NO: 887060 - RNA, 19 nt, Artificial Sequence
  Description of Artificial Sequence: Synthetic oligonucleotide
  Sense strand starting at position 1836 of SEQ ID NO: 588751
ucacuuggcccgugaugau

SEQ ID NO: 887061 - RNA, 19 nt, Artificial Sequence
  Description of Artificial Sequence: Synthetic oligonucleotide
  Antisense strand to SEQ ID NO: 887060
aucaucacgggccaaguga

SEQ ID NO: 887062 - RNA, 19 nt, Artificial Sequence
  Description of Artificial Sequence: Synthetic oligonucleotide
  Sense strand starting at position 1974 of SEQ ID NO: 588751
gugugaucagcucgacaga

SEQ ID NO: 887063 - RNA, 19 nt, Artificial Sequence
  Description of Artificial Sequence: Synthetic oligonucleotide
  Antisense strand to SEQ ID NO: 887062
ucugucgagcugaucacac

SEQ ID NO: 887064 - RNA, 19 nt, Artificial Sequence
  Description of Artificial Sequence: Synthetic oligonucleotide
  Sense strand starting at position 2088 of SEQ ID NO: 588751
cccuucuccugugaagaga

SEQ ID NO: 887065 - RNA, 19 nt, Artificial Sequence
  Description of Artificial Sequence: Synthetic oligonucleotide
  Antisense strand to SEQ ID NO: 887064
ucucuucacaggagaaggg

SEQ ID NO: 887066 - RNA, 19 nt, Artificial Sequence
  Description of Artificial Sequence: Synthetic oligonucleotide
  Sense strand starting at position 2263 of SEQ ID NO: 588751
gugccugccuucuagggaa

SEQ ID NO: 887067 - RNA, 19 nt, Artificial Sequence
  Description of Artificial Sequence: Synthetic oligonucleotide
  Antisense strand to SEQ ID NO: 887066
uucccuagaaggcaggcac

SEQ ID NO: 887068 - RNA, 19 nt, Artificial Sequence
  Description of Artificial Sequence: Synthetic oligonucleotide
  Sense strand starting at position 2266 of SEQ ID NO: 588751
ccugccuucuagggaauga

SEQ ID NO: 887069 - RNA, 19 nt, Artificial Sequence
  Description of Artificial Sequence: Synthetic oligonucleotide
  Antisense strand to SEQ ID NO: 887068
ucauucccuagaaggcagg

SEQ ID NO: 887070 - RNA, 19 nt, Artificial Sequence
  Description of Artificial Sequence: Synthetic oligonucleotide
  Sense strand starting at position 2267 of SEQ ID NO: 588751
cugccuucuagggaaugau

SEQ ID NO: 887071 - RNA, 19 nt, Artificial Sequence
  Description of Artificial Sequence: Synthetic oligonucleotide
  Antisense strand to SEQ ID NO: 887070
aucauucccuagaaggcag

SEQ ID NO: 887072 - RNA, 19 nt, Artificial Sequence
  Description of Artificial Sequence: Synthetic oligonucleotide
  Sense strand starting at position 2423 of SEQ ID NO: 588751
gccacaauggcaugacuuu

SEQ ID NO: 887073 - RNA, 19 nt, Artificial Sequence
  Description of Artificial Sequence: Synthetic oligonucleotide
  Antisense strand to SEQ ID NO: 887072
aaagucaugccauuguggc

SEQ ID NO: 887074 - RNA, 19 nt, Artificial Sequence
  Description of Artificial Sequence: Synthetic oligonucleotide
  Sense strand starting at position 2432 of SEQ ID NO: 588751
gcaugacuuugccaucugu

SEQ ID NO: 887075 - RNA, 19 nt, Artificial Sequence
  Description of Artificial Sequence: Synthetic oligonucleotide
  Antisense strand to SEQ ID NO: 887074
acagauggcaaagucaugc

SEQ ID NO: 887076 - RNA, 19 nt, Artificial Sequence
  Description of Artificial Sequence: Synthetic oligonucleotide
  Sense strand starting at position 2547 of SEQ ID NO: 588751
gggauuucguaaggauuug

SEQ ID NO: 887077 - RNA, 19 nt, Artificial Sequence
  Description of Artificial Sequence: Synthetic oligonucleotide
  Antisense strand to SEQ ID NO: 887076
caaauccuuacgaaauccc

SEQ ID NO: 887078 - RNA, 19 nt, Artificial Sequence
  Description of Artificial Sequence: Synthetic oligonucleotide
  Sense strand starting at position 2570 of SEQ ID NO: 588751
gggagaaauuauccuaguu

SEQ ID NO: 887079 - RNA, 19 nt, Artificial Sequence
  Description of Artificial Sequence: Synthetic oligonucleotide
  Antisense strand to SEQ ID NO: 887078
aacuaggauaauuucuccc

SEQ ID NO: 887080 - RNA, 19 nt, Artificial Sequence
  Description of Artificial Sequence: Synthetic oligonucleotide
  Sense strand starting at position 2727 of SEQ ID NO: 588751
accugcuggccuugaagau

SEQ ID NO: 887081 - RNA, 19 nt, Artificial Sequence
  Description of Artificial Sequence: Synthetic oligonucleotide
  Antisense strand to SEQ ID NO: 887080
aucuucaaggccagcaggu

SEQ ID NO: 887082 - RNA, 19 nt, Artificial Sequence
  Description of Artificial Sequence: Synthetic oligonucleotide
  Sense strand starting at position 2804 of SEQ ID NO: 588751
gaaacaaacucucugcguu

SEQ ID NO: 887083 - RNA, 19 nt, Artificial Sequence
  Description of Artificial Sequence: Synthetic oligonucleotide
  Antisense strand to SEQ ID NO: 887082
aacgcagagaguuuguuuc

SEQ ID NO: 887084 - RNA, 19 nt, Artificial Sequence
  Description of Artificial Sequence: Synthetic oligonucleotide
  Sense strand starting at position 2904 of SEQ ID NO: 588751
gaaugaagcuguguuguuu

SEQ ID NO: 887085 - RNA, 19 nt, Artificial Sequence
  Description of Artificial Sequence: Synthetic oligonucleotide
  Antisense strand to SEQ ID NO: 887084
aaacaacacagcuucauuc

SEQ ID NO: 887086 - RNA, 19 nt, Artificial Sequence
  Description of Artificial Sequence: Synthetic oligonucleotide
  Sense strand starting at position 2999 of SEQ ID NO: 588751
ucacuugacuauccuggaa

SEQ ID NO: 887087 - RNA, 19 nt, Artificial Sequence
  Description of Artificial Sequence: Synthetic oligonucleotide
  Antisense strand to SEQ ID NO: 887086
uuccaggauagucaaguga

SEQ ID NO: 887088 - RNA, 19 nt, Artificial Sequence
  Description of Artificial Sequence: Synthetic oligonucleotide
  Sense strand starting at position 3001 of SEQ ID NO: 588751
acuugacuauccuggaacu

SEQ ID NO: 887089 - RNA, 19 nt, Artificial Sequence
  Description of Artificial Sequence: Synthetic oligonucleotide
  Antisense strand to SEQ ID NO: 887088
aguuccaggauagucaagu

SEQ ID NO: 887090 - RNA, 19 nt, Artificial Sequence
  Description of Artificial Sequence: Synthetic oligonucleotide
  Sense strand starting at position 3026 of SEQ ID NO: 588751
ccagucaaaugcuuugauu

SEQ ID NO: 887091 - RNA, 19 nt, Artificial Sequence
  Description of Artificial Sequence: Synthetic oligonucleotide
  Antisense strand to SEQ ID NO: 887090
aaucaaagcauuugacugg

SEQ ID NO: 887092 - RNA, 19 nt, Artificial Sequence
  Description of Artificial Sequence: Synthetic oligonucleotide
  Sense strand starting at position 3028 of SEQ ID NO: 588751
agucaaaugcuuugauucu

SEQ ID NO: 887093 - RNA, 19 nt, Artificial Sequence
  Description of Artificial Sequence: Synthetic oligonucleotide
  Antisense strand to SEQ ID NO: 887092
agaaucaaagcauuugacu

SEQ ID NO: 887094 - RNA, 19 nt, Artificial Sequence
  Description of Artificial Sequence: Synthetic oligonucleotide
  Sense strand starting at position 3029 of SEQ ID NO: 588751
gucaaaugcuuugauucuu

SEQ ID NO: 887095 - RNA, 19 nt, Artificial Sequence
  Description of Artificial Sequence: Synthetic oligonucleotide
  Antisense strand to SEQ ID NO: 887094
aagaaucaaagcauuugac

SEQ ID NO: 887096 - RNA, 19 nt, Artificial Sequence
  Description of Artificial Sequence: Synthetic oligonucleotide
  Sense strand starting at position 3828 of SEQ ID NO: 588751
gagacagacuccugcucua

SEQ ID NO: 887097 - RNA, 19 nt, Artificial Sequence
  Description of Artificial Sequence: Synthetic oligonucleotide
  Antisense strand to SEQ ID NO: 887096
uagagcaggagucugucuc

SEQ ID NO: 887098 - RNA, 19 nt, Artificial Sequence
  Description of Artificial Sequence: Synthetic oligonucleotide
  Sense strand starting at position 123 of SEQ ID NO: 588752
guagguauaaagugucuca

SEQ ID NO: 887099 - RNA, 19 nt, Artificial Sequence
  Description of Artificial Sequence: Synthetic oligonucleotide
  Antisense strand to SEQ ID NO: 887098
ugagacacuuuauaccuac

SEQ ID NO: 887100 - RNA, 19 nt, Artificial Sequence
  Description of Artificial Sequence: Synthetic oligonucleotide
  Sense strand starting at position 211 of SEQ ID NO: 588752
ccuggagucuaagucauca

SEQ ID NO: 887101 - RNA, 19 nt, Artificial Sequence
  Description of Artificial Sequence: Synthetic oligonucleotide
  Antisense strand to SEQ ID NO: 887100
ugaugacuuagacuccagg

SEQ ID NO: 887102 - RNA, 19 nt, Artificial Sequence
  Description of Artificial Sequence: Synthetic oligonucleotide
  Sense strand starting at position 213 of SEQ ID NO: 588752
uggagucuaagucaucagu

SEQ ID NO: 887103 - RNA, 19 nt, Artificial Sequence
  Description of Artificial Sequence: Synthetic oligonucleotide
  Antisense strand to SEQ ID NO: 887102
acugaugacuuagacucca

SEQ ID NO: 887104 - RNA, 19 nt, Artificial Sequence
  Description of Artificial Sequence: Synthetic oligonucleotide
  Sense strand starting at position 215 of SEQ ID NO: 588752
gagucuaagucaucaguuc

SEQ ID NO: 887105 - RNA, 19 nt, Artificial Sequence
  Description of Artificial Sequence: Synthetic oligonucleotide
  Antisense strand to SEQ ID NO: 887104
gaacugaugacuuagacuc

SEQ ID NO: 887106 - RNA, 19 nt, Artificial Sequence
  Description of Artificial Sequence: Synthetic oligonucleotide
  Sense strand starting at position 222 of SEQ ID NO: 588752
agucaucaguuccauaaag

SEQ ID NO: 887107 - RNA, 19 nt, Artificial Sequence
  Description of Artificial Sequence: Synthetic oligonucleotide
  Antisense strand to SEQ ID NO: 887106
cuuuauggaacugaugacu

SEQ ID NO: 887108 - RNA, 19 nt, Artificial Sequence
  Description of Artificial Sequence: Synthetic oligonucleotide
  Sense strand starting at position 224 of SEQ ID NO: 588752
ucaucaguuccauaaaggu

SEQ ID NO: 887109 - RNA, 19 nt, Artificial Sequence
  Description of Artificial Sequence: Synthetic oligonucleotide
  Antisense strand to SEQ ID NO: 887108
accuuuauggaacugauga

SEQ ID NO: 887110 - RNA, 19 nt, Artificial Sequence
  Description of Artificial Sequence: Synthetic oligonucleotide
  Sense strand starting at position 304 of SEQ ID NO: 588752
ugaugaacguuuggaaagu

SEQ ID NO: 887111 - RNA, 19 nt, Artificial Sequence
  Description of Artificial Sequence: Synthetic oligonucleotide
  Antisense strand to SEQ ID NO: 887110
acuuuccaaacguucauca

SEQ ID NO: 887112 - RNA, 19 nt, Artificial Sequence
  Description of Artificial Sequence: Synthetic oligonucleotide
  Sense strand starting at position 1056 of SEQ ID NO: 588752
cgaacaauuccagguagua

SEQ ID NO: 887113 - RNA, 19 nt, Artificial Sequence
  Description of Artificial Sequence: Synthetic oligonucleotide
  Antisense strand to SEQ ID NO: 887112
uacuaccuggaauuguucg

SEQ ID NO: 887114 - RNA, 19 nt, Artificial Sequence
  Description of Artificial Sequence: Synthetic oligonucleotide
  Sense strand starting at position 1198 of SEQ ID NO: 588752
ucccgaguucggcgcugau

SEQ ID NO: 887115 - RNA, 19 nt, Artificial Sequence
  Description of Artificial Sequence: Synthetic oligonucleotide
  Antisense strand to SEQ ID NO: 887114
aucagcgccgaacucggga

SEQ ID NO: 887116 - RNA, 19 nt, Artificial Sequence
  Description of Artificial Sequence: Synthetic oligonucleotide
  Sense strand starting at position 1200 of SEQ ID NO: 588752
ccgaguucggcgcugauca

SEQ ID NO: 887117 - RNA, 19 nt, Artificial Sequence
  Description of Artificial Sequence: Synthetic oligonucleotide
  Antisense strand to SEQ ID NO: 887116
ugaucagcgccgaacucgg

SEQ ID NO: 887118 - RNA, 19 nt, Artificial Sequence
  Description of Artificial Sequence: Synthetic oligonucleotide
  Sense strand starting at position 1841 of SEQ ID NO: 588752
gcggcguggccgucuguaa

SEQ ID NO: 887119 - RNA, 19 nt, Artificial Sequence
  Description of Artificial Sequence: Synthetic oligonucleotide
  Antisense strand to SEQ ID NO: 887118
uuacagacggccacgccgc

SEQ ID NO: 887120 - RNA, 19 nt, Artificial Sequence
  Description of Artificial Sequence: Synthetic oligonucleotide
  Sense strand starting at position 30 of SEQ ID NO: 588753
ugaugaacguuuggaaagu

SEQ ID NO: 887121 - RNA, 19 nt, Artificial Sequence
  Description of Artificial Sequence: Synthetic oligonucleotide
  Antisense strand to SEQ ID NO: 887120
acuuuccaaacguucauca

SEQ ID NO: 887122 - RNA, 19 nt, Artificial Sequence
  Description of Artificial Sequence: Synthetic oligonucleotide
  Sense strand starting at position 782 of SEQ ID NO: 588753
cgaacaauuccagguagua

SEQ ID NO: 887123 - RNA, 19 nt, Artificial Sequence
  Description of Artificial Sequence: Synthetic oligonucleotide
  Antisense strand to SEQ ID NO: 887122
uacuaccuggaauuguucg

SEQ ID NO: 887124 - RNA, 19 nt, Artificial Sequence
  Description of Artificial Sequence: Synthetic oligonucleotide
  Sense strand starting at position 924 of SEQ ID NO: 588753
ucccgaguucggcgcugau

SEQ ID NO: 887125 - RNA, 19 nt, Artificial Sequence
  Description of Artificial Sequence: Synthetic oligonucleotide
  Antisense strand to SEQ ID NO: 887124
aucagcgccgaacucggga

SEQ ID NO: 887126 - RNA, 19 nt, Artificial Sequence
  Description of Artificial Sequence: Synthetic oligonucleotide
  Sense strand starting at position 926 of SEQ ID NO: 588753
ccgaguucggcgcugauca

SEQ ID NO: 887127 - RNA, 19 nt, Artificial Sequence
  Description of Artificial Sequence: Synthetic oligonucleotide
  Antisense strand to SEQ ID NO: 887126
ugaucagcgccgaacucgg

SEQ ID NO: 887128 - RNA, 19 nt, Artificial Sequence
  Description of Artificial Sequence: Synthetic oligonucleotide
  Sense strand starting at position 1567 of SEQ ID NO: 588753
gcggcguggccgucuguaa

SEQ ID NO: 887129 - RNA, 19 nt, Artificial Sequence
  Description of Artificial Sequence: Synthetic oligonucleotide
  Antisense strand to SEQ ID NO: 887128
uuacagacggccacgccgc

SEQ ID NO: 887130 - RNA, 19 nt, Artificial Sequence
  Description of Artificial Sequence: Synthetic oligonucleotide
  Sense strand starting at position 27 of SEQ ID NO: 588754
gauagaaguccaugcaccu

SEQ ID NO: 887131 - RNA, 19 nt, Artificial Sequence
  Description of Artificial Sequence: Synthetic oligonucleotide
  Antisense strand to SEQ ID NO: 887130
aggugcauggacuucuauc

SEQ ID NO: 887132 - RNA, 19 nt, Artificial Sequence
  Description of Artificial Sequence: Synthetic oligonucleotide
  Sense strand starting at position 184 of SEQ ID NO: 588754
agaggagccucacuguguu

SEQ ID NO: 887133 - RNA, 19 nt, Artificial Sequence
  Description of Artificial Sequence: Synthetic oligonucleotide
  Antisense strand to SEQ ID NO: 887132
aacacagugaggcuccucu

SEQ ID NO: 887134 - RNA, 19 nt, Artificial Sequence
  Description of Artificial Sequence: Synthetic oligonucleotide
  Sense strand starting at position 402 of SEQ ID NO: 588754
gauguucugcuuggacuga

SEQ ID NO: 887135 - RNA, 19 nt, Artificial Sequence
  Description of Artificial Sequence: Synthetic oligonucleotide
  Antisense strand to SEQ ID NO: 887134
ucaguccaagcagaacauc

SEQ ID NO: 887136 - RNA, 19 nt, Artificial Sequence
  Description of Artificial Sequence: Synthetic oligonucleotide
  Sense strand starting at position 956 of SEQ ID NO: 588754
cggugagacauuugcaguu

SEQ ID NO: 887137 - RNA, 19 nt, Artificial Sequence
  Description of Artificial Sequence: Synthetic oligonucleotide
  Antisense strand to SEQ ID NO: 887136
aacugcaaaugucucaccg

SEQ ID NO: 887138 - RNA, 19 nt, Artificial Sequence
  Description of Artificial Sequence: Synthetic oligonucleotide
  Sense strand starting at position 958 of SEQ ID NO: 588754
gugagacauuugcaguuua

SEQ ID NO: 887139 - RNA, 19 nt, Artificial Sequence
  Description of Artificial Sequence: Synthetic oligonucleotide
  Antisense strand to SEQ ID NO: 887138
uaaacugcaaaugucucac

SEQ ID NO: 887140 - RNA, 19 nt, Artificial Sequence
  Description of Artificial Sequence: Synthetic oligonucleotide
  Sense strand starting at position 969 of SEQ ID NO: 588754
gcaguuuacucuguuauuu

SEQ ID NO: 887141 - RNA, 19 nt, Artificial Sequence
  Description of Artificial Sequence: Synthetic oligonucleotide
  Antisense strand to SEQ ID NO: 887140
aaauaacagaguaaacugc

SEQ ID NO: 887142 - RNA, 19 nt, Artificial Sequence
  Description of Artificial Sequence: Synthetic oligonucleotide
  Sense strand starting at position 977 of SEQ ID NO: 588754
cucuguuauuucgaaauac

SEQ ID NO: 887143 - RNA, 19 nt, Artificial Sequence
  Description of Artificial Sequence: Synthetic oligonucleotide
  Antisense strand to SEQ ID NO: 887142
guauuucgaaauaacagag

SEQ ID NO: 887144 - RNA, 19 nt, Artificial Sequence
  Description of Artificial Sequence: Synthetic oligonucleotide
  Sense strand starting at position 994 of SEQ ID NO: 588754
acacauuauuggcucuagu

SEQ ID NO: 887145 - RNA, 19 nt, Artificial Sequence
  Description of Artificial Sequence: Synthetic oligonucleotide
  Antisense strand to SEQ ID NO: 887144
acuagagccaauaaugugu

SEQ ID NO: 887146 - RNA, 19 nt, Artificial Sequence
  Description of Artificial Sequence: Synthetic oligonucleotide
  Sense strand starting at position 1123 of SEQ ID NO: 588754
ccaucauucuagucguuau

SEQ ID NO: 887147 - RNA, 19 nt, Artificial Sequence
  Description of Artificial Sequence: Synthetic oligonucleotide
  Antisense strand to SEQ ID NO: 887146
auaacgacuagaaugaugg

SEQ ID NO: 887148 - RNA, 19 nt, Artificial Sequence
  Description of Artificial Sequence: Synthetic oligonucleotide
  Sense strand starting at position 1126 of SEQ ID NO: 588754
ucauucuagucguuauuuc

SEQ ID NO: 887149 - RNA, 19 nt, Artificial Sequence
  Description of Artificial Sequence: Synthetic oligonucleotide
  Antisense strand to SEQ ID NO: 887148
gaaauaacgacuagaauga

SEQ ID NO: 887150 - RNA, 19 nt, Artificial Sequence
  Description of Artificial Sequence: Synthetic oligonucleotide
  Sense strand starting at position 1135 of SEQ ID NO: 588754
ucguuauuucuaugaguuc

SEQ ID NO: 887151 - RNA, 19 nt, Artificial Sequence
  Description of Artificial Sequence: Synthetic oligonucleotide
  Antisense strand to SEQ ID NO: 887150
gaacucauagaaauaacga

SEQ ID NO: 887152 - RNA, 19 nt, Artificial Sequence
  Description of Artificial Sequence: Synthetic oligonucleotide
  Sense strand starting at position 1211 of SEQ ID NO: 588754
uuccaaacucgcuacaagu

SEQ ID NO: 887153 - RNA, 19 nt, Artificial Sequence
  Description of Artificial Sequence: Synthetic oligonucleotide
  Antisense strand to SEQ ID NO: 887152
acuuguagcgaguuuggaa

SEQ ID NO: 887154 - RNA, 19 nt, Artificial Sequence
  Description of Artificial Sequence: Synthetic oligonucleotide
  Sense strand starting at position 1484 of SEQ ID NO: 588754
cgggugucccggguuguaa

SEQ ID NO: 887155 - RNA, 19 nt, Artificial Sequence
  Description of Artificial Sequence: Synthetic oligonucleotide
  Antisense strand to SEQ ID NO: 887154
uuacaacccgggacacccg

SEQ ID NO: 887156 - RNA, 19 nt, Artificial Sequence
  Description of Artificial Sequence: Synthetic oligonucleotide
  Sense strand starting at position 1588 of SEQ ID NO: 588754
agauccuccgagugcaaga

SEQ ID NO: 887157 - RNA, 19 nt, Artificial Sequence
  Description of Artificial Sequence: Synthetic oligonucleotide
  Antisense strand to SEQ ID NO: 887156
ucuugcacucggaggaucu

SEQ ID NO: 887158 - RNA, 19 nt, Artificial Sequence
  Description of Artificial Sequence: Synthetic oligonucleotide
  Sense strand starting at position 1612 of SEQ ID NO: 588754
cggucauuucgacguaagg

SEQ ID NO: 887159 - RNA, 19 nt, Artificial Sequence
  Description of Artificial Sequence: Synthetic oligonucleotide
  Antisense strand to SEQ ID NO: 887158
ccuuacgucgaaaugaccg

SEQ ID NO: 887160 - RNA, 19 nt, Artificial Sequence
  Description of Artificial Sequence: Synthetic oligonucleotide
  Sense strand starting at position 1668 of SEQ ID NO: 588754
ucuagaaacuuggcaggaa

SEQ ID NO: 887161 - RNA, 19 nt, Artificial Sequence
  Description of Artificial Sequence: Synthetic oligonucleotide
  Antisense strand to SEQ ID NO: 887160
uuccugccaaguuucuaga

SEQ ID NO: 887162 - RNA, 19 nt, Artificial Sequence
  Description of Artificial Sequence: Synthetic oligonucleotide
  Sense strand starting at position 1813 of SEQ ID NO: 588754
cgacuuaugacagguccca

SEQ ID NO: 887163 - RNA, 19 nt, Artificial Sequence
  Description of Artificial Sequence: Synthetic oligonucleotide
  Antisense strand to SEQ ID NO: 887162
ugggaccugucauaagucg

SEQ ID NO: 887164 - RNA, 19 nt, Artificial Sequence
  Description of Artificial Sequence: Synthetic oligonucleotide
  Sense strand starting at position 1818 of SEQ ID NO: 588754
uaugacaggucccaagaga

SEQ ID NO: 887165 - RNA, 19 nt, Artificial Sequence
  Description of Artificial Sequence: Synthetic oligonucleotide
  Antisense strand to SEQ ID NO: 887164
ucucuugggaccugucaua

SEQ ID NO: 887166 - RNA, 19 nt, Artificial Sequence
  Description of Artificial Sequence: Synthetic oligonucleotide
  Sense strand starting at position 1918 of SEQ ID NO: 588754
ccgggaaaucugagugcgu

SEQ ID NO: 887167 - RNA, 19 nt, Artificial Sequence
  Description of Artificial Sequence: Synthetic oligonucleotide
  Antisense strand to SEQ ID NO: 887166
acgcacucagauuucccgg

SEQ ID NO: 887168 - RNA, 19 nt, Artificial Sequence
  Description of Artificial Sequence: Synthetic oligonucleotide
  Sense strand starting at position 1920 of SEQ ID NO: 588754
gggaaaucugagugcguuu

SEQ ID NO: 887169 - RNA, 19 nt, Artificial Sequence
  Description of Artificial Sequence: Synthetic oligonucleotide
  Antisense strand to SEQ ID NO: 887168
aaacgcacucagauuuccc

SEQ ID NO: 887170 - RNA, 19 nt, Artificial Sequence
  Description of Artificial Sequence: Synthetic oligonucleotide
  Sense strand starting at position 2057 of SEQ ID NO: 588754
agggacuccugauaggaaa

SEQ ID NO: 887171 - RNA, 19 nt, Artificial Sequence
  Description of Artificial Sequence: Synthetic oligonucleotide
  Antisense strand to SEQ ID NO: 887170
uuuccuaucaggagucccu

SEQ ID NO: 887172 - RNA, 19 nt, Artificial Sequence
  Description of Artificial Sequence: Synthetic oligonucleotide
  Sense strand starting at position 2084 of SEQ ID NO: 588754
cagagcuuuguccagcuga

SEQ ID NO: 887173 - RNA, 19 nt, Artificial Sequence
  Description of Artificial Sequence: Synthetic oligonucleotide
  Antisense strand to SEQ ID NO: 887172
ucagcuggacaaagcucug

SEQ ID NO: 887174 - RNA, 19 nt, Artificial Sequence
  Description of Artificial Sequence: Synthetic oligonucleotide
  Sense strand starting at position 2387 of SEQ ID NO: 588754
caaggucaccucugugaac

SEQ ID NO: 887175 - RNA, 19 nt, Artificial Sequence
  Description of Artificial Sequence: Synthetic oligonucleotide
  Antisense strand to SEQ ID NO: 887174
guucacagaggugaccuug

SEQ ID NO: 887176 - RNA, 19 nt, Artificial Sequence
  Description of Artificial Sequence: Synthetic oligonucleotide
  Sense strand starting at position 2771 of SEQ ID NO: 588754
gugcaauggugggcaucau

SEQ ID NO: 887177 - RNA, 19 nt, Artificial Sequence
  Description of Artificial Sequence: Synthetic oligonucleotide
  Antisense strand to SEQ ID NO: 887176
augaugcccaccauugcac

SEQ ID NO: 887178 - RNA, 19 nt, Artificial Sequence
  Description of Artificial Sequence: Synthetic oligonucleotide
  Sense strand starting at position 2772 of SEQ ID NO: 588754
ugcaauggugggcaucaua

SEQ ID NO: 887179 - RNA, 19 nt, Artificial Sequence
  Description of Artificial Sequence: Synthetic oligonucleotide
  Antisense strand to SEQ ID NO: 887178
uaugaugcccaccauugca

SEQ ID NO: 887180 - RNA, 19 nt, Artificial Sequence
  Description of Artificial Sequence: Synthetic oligonucleotide
  Sense strand starting at position 2879 of SEQ ID NO: 588754
cucaaugucucuccuugua

SEQ ID NO: 887181 - RNA, 19 nt, Artificial Sequence
  Description of Artificial Sequence: Synthetic oligonucleotide
  Antisense strand to SEQ ID NO: 887180
uacaaggagagacauugag

SEQ ID NO: 887182 - RNA, 19 nt, Artificial Sequence
  Description of Artificial Sequence: Synthetic oligonucleotide
  Sense strand starting at position 2933 of SEQ ID NO: 588754
ucagccuccguuuaacuua

SEQ ID NO: 887183 - RNA, 19 nt, Artificial Sequence
  Description of Artificial Sequence: Synthetic oligonucleotide
  Antisense strand to SEQ ID NO: 887182
uaaguuaaacggaggcuga

SEQ ID NO: 887184 - RNA, 19 nt, Artificial Sequence
  Description of Artificial Sequence: Synthetic oligonucleotide
  Sense strand starting at position 3005 of SEQ ID NO: 588754
cuaauauggccucauguaa

SEQ ID NO: 887185 - RNA, 19 nt, Artificial Sequence
  Description of Artificial Sequence: Synthetic oligonucleotide
  Antisense strand to SEQ ID NO: 887184
uuacaugaggccauauuag

SEQ ID NO: 887186 - RNA, 19 nt, Artificial Sequence
  Description of Artificial Sequence: Synthetic oligonucleotide
  Sense strand starting at position 3157 of SEQ ID NO: 588754
ggacgcaugccacaggaua

SEQ ID NO: 887187 - RNA, 19 nt, Artificial Sequence
  Description of Artificial Sequence: Synthetic oligonucleotide
  Antisense strand to SEQ ID NO: 887186
uauccuguggcaugcgucc

SEQ ID NO: 887188 - RNA, 19 nt, Artificial Sequence
  Description of Artificial Sequence: Synthetic oligonucleotide
  Sense strand starting at position 3159 of SEQ ID NO: 588754
acgcaugccacaggauaua

SEQ ID NO: 887189 - RNA, 19 nt, Artificial Sequence
  Description of Artificial Sequence: Synthetic oligonucleotide
  Antisense strand to SEQ ID NO: 887188
uauauccuguggcaugcgu

SEQ ID NO: 887190 - RNA, 19 nt, Artificial Sequence
  Description of Artificial Sequence: Synthetic oligonucleotide
  Sense strand starting at position 3236 of SEQ ID NO: 588754
acacaaugccgagaguuga

SEQ ID NO: 887191 - RNA, 19 nt, Artificial Sequence
  Description of Artificial Sequence: Synthetic oligonucleotide
  Antisense strand to SEQ ID NO: 887190
ucaacucucggcauugugu

SEQ ID NO: 887192 - RNA, 19 nt, Artificial Sequence
  Description of Artificial Sequence: Synthetic oligonucleotide
  Sense strand starting at position 3456 of SEQ ID NO: 588754
ucaagacuugcgugggcaa

SEQ ID NO: 887193 - RNA, 19 nt, Artificial Sequence
  Description of Artificial Sequence: Synthetic oligonucleotide
  Antisense strand to SEQ ID NO: 887192
uugcccacgcaagucuuga

SEQ ID NO: 887194 - RNA, 19 nt, Artificial Sequence
  Description of Artificial Sequence: Synthetic oligonucleotide
  Sense strand starting at position 3537 of SEQ ID NO: 588754
cugggugucuaagugagau

SEQ ID NO: 887195 - RNA, 19 nt, Artificial Sequence
  Description of Artificial Sequence: Synthetic oligonucleotide
  Antisense strand to SEQ ID NO: 887194
aucucacuuagacacccag

SEQ ID NO: 887196 - RNA, 19 nt, Artificial Sequence
  Description of Artificial Sequence: Synthetic oligonucleotide
  Sense strand starting at position 3612 of SEQ ID NO: 588754
agguaacuacugugaugua

SEQ ID NO: 887197 - RNA, 19 nt, Artificial Sequence
  Description of Artificial Sequence: Synthetic oligonucleotide
  Antisense strand to SEQ ID NO: 887196
uacaucacaguaguuaccu

SEQ ID NO: 887198 - RNA, 19 nt, Artificial Sequence
  Description of Artificial Sequence: Synthetic oligonucleotide
  Sense strand starting at position 3628 of SEQ ID NO: 588754
guauuugauuugcauacag

SEQ ID NO: 887199 - RNA, 19 nt, Artificial Sequence
  Description of Artificial Sequence: Synthetic oligonucleotide
  Antisense strand to SEQ ID NO: 887198
cuguaugcaaaucaaauac

SEQ ID NO: 887200 - RNA, 19 nt, Artificial Sequence
  Description of Artificial Sequence: Synthetic oligonucleotide
  Sense strand starting at position 3672 of SEQ ID NO: 588754
ugugcacuguggucauaua

SEQ ID NO: 887201 - RNA, 19 nt, Artificial Sequence
  Description of Artificial Sequence: Synthetic oligonucleotide
  Antisense strand to SEQ ID NO: 887200
uauaugaccacagugcaca

SEQ ID NO: 887202 - RNA, 19 nt, Artificial Sequence
  Description of Artificial Sequence: Synthetic oligonucleotide
  Sense strand starting at position 3707 of SEQ ID NO: 588754
acgguauuggguuacauau

SEQ ID NO: 887203 - RNA, 19 nt, Artificial Sequence
  Description of Artificial Sequence: Synthetic oligonucleotide
  Antisense strand to SEQ ID NO: 887202
auauguaacccaauaccgu

SEQ ID NO: 887204 - RNA, 19 nt, Artificial Sequence
  Description of Artificial Sequence: Synthetic oligonucleotide
  Sense strand starting at position 3791 of SEQ ID NO: 588754
ggauauuagaaguguuaau

SEQ ID NO: 887205 - RNA, 19 nt, Artificial Sequence
  Description of Artificial Sequence: Synthetic oligonucleotide
  Antisense strand to SEQ ID NO: 887204
auuaacacuucuaauaucc

SEQ ID NO: 887206 - RNA, 19 nt, Artificial Sequence
  Description of Artificial Sequence: Synthetic oligonucleotide
  Sense strand starting at position 3869 of SEQ ID NO: 588754
cacagaguggcucacauau

SEQ ID NO: 887207 - RNA, 19 nt, Artificial Sequence
  Description of Artificial Sequence: Synthetic oligonucleotide
  Antisense strand to SEQ ID NO: 887206
auaugugagccacucugug

SEQ ID NO: 887208 - RNA, 19 nt, Artificial Sequence
  Description of Artificial Sequence: Synthetic oligonucleotide
  Sense strand starting at position 3871 of SEQ ID NO: 588754
cagaguggcucacauauuu

SEQ ID NO: 887209 - RNA, 19 nt, Artificial Sequence
  Description of Artificial Sequence: Synthetic oligonucleotide
  Antisense strand to SEQ ID NO: 887208
aaauaugugagccacucug

SEQ ID NO: 887210 - RNA, 19 nt, Artificial Sequence
  Description of Artificial Sequence: Synthetic oligonucleotide
  Sense strand starting at position 12 of SEQ ID NO: 588755
guaaauauguagucaacug

SEQ ID NO: 887211 - RNA, 19 nt, Artificial Sequence
  Description of Artificial Sequence: Synthetic oligonucleotide
  Antisense strand to SEQ ID NO: 887210
caguugacuacauauuuac

SEQ ID NO: 887212 - RNA, 19 nt, Artificial Sequence
  Description of Artificial Sequence: Synthetic oligonucleotide
  Sense strand starting at position 52 of SEQ ID NO: 588755
acaguucucuagccgucaa

SEQ ID NO: 887213 - RNA, 19 nt, Artificial Sequence
  Description of Artificial Sequence: Synthetic oligonucleotide
  Antisense strand to SEQ ID NO: 887212
uugacggcuagagaacugu

SEQ ID NO: 887214 - RNA, 19 nt, Artificial Sequence
  Description of Artificial Sequence: Synthetic oligonucleotide
  Sense strand starting at position 339 of SEQ ID NO: 588755
agaguuucucuacggcacu

SEQ ID NO: 887215 - RNA, 19 nt, Artificial Sequence
  Description of Artificial Sequence: Synthetic oligonucleotide
  Antisense strand to SEQ ID NO: 887214
agugccguagagaaacucu

SEQ ID NO: 887216 - RNA, 19 nt, Artificial Sequence
  Description of Artificial Sequence: Synthetic oligonucleotide
  Sense strand starting at position 387 of SEQ ID NO: 588755
uuccguuucucaucucaca

SEQ ID NO: 887217 - RNA, 19 nt, Artificial Sequence
  Description of Artificial Sequence: Synthetic oligonucleotide
  Antisense strand to SEQ ID NO: 887216
ugugagaugagaaacggaa

SEQ ID NO: 887218 - RNA, 19 nt, Artificial Sequence
  Description of Artificial Sequence: Synthetic oligonucleotide
  Sense strand starting at position 406 of SEQ ID NO: 588755
uggagugaauucuaagaaa

SEQ ID NO: 887219 - RNA, 19 nt, Artificial Sequence
  Description of Artificial Sequence: Synthetic oligonucleotide
  Antisense strand to SEQ ID NO: 887218
uuucuuagaauucacucca

SEQ ID NO: 887220 - RNA, 19 nt, Artificial Sequence
  Description of Artificial Sequence: Synthetic oligonucleotide
  Sense strand starting at position 451 of SEQ ID NO: 588755
gauagaaguccaugcaccu

SEQ ID NO: 887221 - RNA, 19 nt, Artificial Sequence
  Description of Artificial Sequence: Synthetic oligonucleotide
  Antisense strand to SEQ ID NO: 887220
aggugcauggacuucuauc

SEQ ID NO: 887222 - RNA, 19 nt, Artificial Sequence
  Description of Artificial Sequence: Synthetic oligonucleotide
  Sense strand starting at position 608 of SEQ ID NO: 588755
agaggagccucacuguguu

SEQ ID NO: 887223 - RNA, 19 nt, Artificial Sequence
  Description of Artificial Sequence: Synthetic oligonucleotide
  Antisense strand to SEQ ID NO: 887222
aacacagugaggcuccucu

SEQ ID NO: 887224 - RNA, 19 nt, Artificial Sequence
  Description of Artificial Sequence: Synthetic oligonucleotide
  Sense strand starting at position 826 of SEQ ID NO: 588755
gauguucugcuuggacuga

SEQ ID NO: 887225 - RNA, 19 nt, Artificial Sequence
  Description of Artificial Sequence: Synthetic oligonucleotide
  Antisense strand to SEQ ID NO: 887224
ucaguccaagcagaacauc

SEQ ID NO: 887226 - RNA, 19 nt, Artificial Sequence
  Description of Artificial Sequence: Synthetic oligonucleotide
  Sense strand starting at position 1380 of SEQ ID NO: 588755
cggugagacauuugcaguu

SEQ ID NO: 887227 - RNA, 19 nt, Artificial Sequence
  Description of Artificial Sequence: Synthetic oligonucleotide
  Antisense strand to SEQ ID NO: 887226
aacugcaaaugucucaccg

SEQ ID NO: 887228 - RNA, 19 nt, Artificial Sequence
  Description of Artificial Sequence: Synthetic oligonucleotide
  Sense strand starting at position 1382 of SEQ ID NO: 588755
gugagacauuugcaguuua

SEQ ID NO: 887229 - RNA, 19 nt, Artificial Sequence
  Description of Artificial Sequence: Synthetic oligonucleotide
  Antisense strand to SEQ ID NO: 887228
uaaacugcaaaugucucac

SEQ ID NO: 887230 - RNA, 19 nt, Artificial Sequence
  Description of Artificial Sequence: Synthetic oligonucleotide
  Sense strand starting at position 1390 of SEQ ID NO: 588755
uuugcaguuuacucuguua

SEQ ID NO: 887231 - RNA, 19 nt, Artificial Sequence
  Description of Artificial Sequence: Synthetic oligonucleotide
  Antisense strand to SEQ ID NO: 887230
uaacagaguaaacugcaaa

SEQ ID NO: 887232 - RNA, 19 nt, Artificial Sequence
  Description of Artificial Sequence: Synthetic oligonucleotide
  Sense strand starting at position 1393 of SEQ ID NO: 588755
gcaguuuacucuguuauuu

SEQ ID NO: 887233 - RNA, 19 nt, Artificial Sequence
  Description of Artificial Sequence: Synthetic oligonucleotide
  Antisense strand to SEQ ID NO: 887232
aaauaacagaguaaacugc

SEQ ID NO: 887234 - RNA, 19 nt, Artificial Sequence
  Description of Artificial Sequence: Synthetic oligonucleotide
  Sense strand starting at position 1401 of SEQ ID NO: 588755
cucuguuauuucgaaauac

SEQ ID NO: 887235 - RNA, 19 nt, Artificial Sequence
  Description of Artificial Sequence: Synthetic oligonucleotide
  Antisense strand to SEQ ID NO: 887234
guauuucgaaauaacagag

SEQ ID NO: 887236 - RNA, 19 nt, Artificial Sequence
  Description of Artificial Sequence: Synthetic oligonucleotide
  Sense strand starting at position 1418 of SEQ ID NO: 588755
acacauuauuggcucuagu

SEQ ID NO: 887237 - RNA, 19 nt, Artificial Sequence
  Description of Artificial Sequence: Synthetic oligonucleotide
  Antisense strand to SEQ ID NO: 887236
acuagagccaauaaugugu

SEQ ID NO: 887238 - RNA, 19 nt, Artificial Sequence
  Description of Artificial Sequence: Synthetic oligonucleotide
  Sense strand starting at position 1547 of SEQ ID NO: 588755
ccaucauucuagucguuau

SEQ ID NO: 887239 - RNA, 19 nt, Artificial Sequence
  Description of Artificial Sequence: Synthetic oligonucleotide
  Antisense strand to SEQ ID NO: 887238
auaacgacuagaaugaugg

SEQ ID NO: 887240 - RNA, 19 nt, Artificial Sequence
  Description of Artificial Sequence: Synthetic oligonucleotide
  Sense strand starting at position 1550 of SEQ ID NO: 588755
ucauucuagucguuauuuc

SEQ ID NO: 887241 - RNA, 19 nt, Artificial Sequence
  Description of Artificial Sequence: Synthetic oligonucleotide
  Antisense strand to SEQ ID NO: 887240
gaaauaacgacuagaauga

SEQ ID NO: 887242 - RNA, 19 nt, Artificial Sequence
  Description of Artificial Sequence: Synthetic oligonucleotide
  Sense strand starting at position 1559 of SEQ ID NO: 588755
ucguuauuucuaugaguuc

SEQ ID NO: 887243 - RNA, 19 nt, Artificial Sequence
  Description of Artificial Sequence: Synthetic oligonucleotide
  Antisense strand to SEQ ID NO: 887242
gaacucauagaaauaacga

SEQ ID NO: 887244 - RNA, 19 nt, Artificial Sequence
  Description of Artificial Sequence: Synthetic oligonucleotide
  Sense strand starting at position 1635 of SEQ ID NO: 588755
uuccaaacucgcuacaagu

SEQ ID NO: 887245 - RNA, 19 nt, Artificial Sequence
  Description of Artificial Sequence: Synthetic oligonucleotide
  Antisense strand to SEQ ID NO: 887244
acuuguagcgaguuuggaa

SEQ ID NO: 887246 - RNA, 19 nt, Artificial Sequence
  Description of Artificial Sequence: Synthetic oligonucleotide
  Sense strand starting at position 1908 of SEQ ID NO: 588755
cgggugucccggguuguaa

SEQ ID NO: 887247 - RNA, 19 nt, Artificial Sequence
  Description of Artificial Sequence: Synthetic oligonucleotide
  Antisense strand to SEQ ID NO: 887246
uuacaacccgggacacccg

SEQ ID NO: 887248 - RNA, 19 nt, Artificial Sequence
  Description of Artificial Sequence: Synthetic oligonucleotide
  Sense strand starting at position 2012 of SEQ ID NO: 588755
agauccuccgagugcaaga

SEQ ID NO: 887249 - RNA, 19 nt, Artificial Sequence
  Description of Artificial Sequence: Synthetic oligonucleotide
  Antisense strand to SEQ ID NO: 887248
ucuugcacucggaggaucu

SEQ ID NO: 887250 - RNA, 19 nt, Artificial Sequence
  Description of Artificial Sequence: Synthetic oligonucleotide
  Sense strand starting at position 2036 of SEQ ID NO: 588755
cggucauuucgacguaagg

SEQ ID NO: 887251 - RNA, 19 nt, Artificial Sequence
  Description of Artificial Sequence: Synthetic oligonucleotide
  Antisense strand to SEQ ID NO: 887250
ccuuacgucgaaaugaccg

SEQ ID NO: 887252 - RNA, 19 nt, Artificial Sequence
  Description of Artificial Sequence: Synthetic oligonucleotide
  Sense strand starting at position 2092 of SEQ ID NO: 588755
ucuagaaacuuggcaggaa

SEQ ID NO: 887253 - RNA, 19 nt, Artificial Sequence
  Description of Artificial Sequence: Synthetic oligonucleotide
  Antisense strand to SEQ ID NO: 887252
uuccugccaaguuucuaga

SEQ ID NO: 887254 - RNA, 19 nt, Artificial Sequence
  Description of Artificial Sequence: Synthetic oligonucleotide
  Sense strand starting at position 2237 of SEQ ID NO: 588755
cgacuuaugacagguccca

SEQ ID NO: 887255 - RNA, 19 nt, Artificial Sequence
  Description of Artificial Sequence: Synthetic oligonucleotide
  Antisense strand to SEQ ID NO: 887254
ugggaccugucauaagucg

SEQ ID NO: 887256 - RNA, 19 nt, Artificial Sequence
  Description of Artificial Sequence: Synthetic oligonucleotide
  Sense strand starting at position 2242 of SEQ ID NO: 588755
uaugacaggucccaagaga

SEQ ID NO: 887257 - RNA, 19 nt, Artificial Sequence
  Description of Artificial Sequence: Synthetic oligonucleotide
  Antisense strand to SEQ ID NO: 887256
ucucuugggaccugucaua

SEQ ID NO: 887258 - RNA, 19 nt, Artificial Sequence
  Description of Artificial Sequence: Synthetic oligonucleotide
  Sense strand starting at position 2342 of SEQ ID NO: 588755
ccgggaaaucugagugcgu

SEQ ID NO: 887259 - RNA, 19 nt, Artificial Sequence
  Description of Artificial Sequence: Synthetic oligonucleotide
  Antisense strand to SEQ ID NO: 887258
acgcacucagauuucccgg

SEQ ID NO: 887260 - RNA, 19 nt, Artificial Sequence
  Description of Artificial Sequence: Synthetic oligonucleotide
  Sense strand starting at position 2344 of SEQ ID NO: 588755
gggaaaucugagugcguuu

SEQ ID NO: 887261 - RNA, 19 nt, Artificial Sequence
  Description of Artificial Sequence: Synthetic oligonucleotide
  Antisense strand to SEQ ID NO: 887260
aaacgcacucagauuuccc

SEQ ID NO: 887262 - RNA, 19 nt, Artificial Sequence
  Description of Artificial Sequence: Synthetic oligonucleotide
  Sense strand starting at position 2481 of SEQ ID NO: 588755
agggacuccugauaggaaa

SEQ ID NO: 887263 - RNA, 19 nt, Artificial Sequence
  Description of Artificial Sequence: Synthetic oligonucleotide
  Antisense strand to SEQ ID NO: 887262
uuuccuaucaggagucccu

SEQ ID NO: 887264 - RNA, 19 nt, Artificial Sequence
  Description of Artificial Sequence: Synthetic oligonucleotide
  Sense strand starting at position 2508 of SEQ ID NO: 588755
cagagcuuuguccagcuga

SEQ ID NO: 887265 - RNA, 19 nt, Artificial Sequence
  Description of Artificial Sequence: Synthetic oligonucleotide
  Antisense strand to SEQ ID NO: 887264
ucagcuggacaaagcucug

SEQ ID NO: 887266 - RNA, 19 nt, Artificial Sequence
  Description of Artificial Sequence: Synthetic oligonucleotide
  Sense strand starting at position 2811 of SEQ ID NO: 588755
caaggucaccucugugaac

SEQ ID NO: 887267 - RNA, 19 nt, Artificial Sequence
  Description of Artificial Sequence: Synthetic oligonucleotide
  Antisense strand to SEQ ID NO: 887266
guucacagaggugaccuug

SEQ ID NO: 887268 - RNA, 19 nt, Artificial Sequence
  Description of Artificial Sequence: Synthetic oligonucleotide
  Sense strand starting at position 2961 of SEQ ID NO: 588755
gaagcuaagucguugguau

SEQ ID NO: 887269 - RNA, 19 nt, Artificial Sequence
  Description of Artificial Sequence: Synthetic oligonucleotide
  Antisense strand to SEQ ID NO: 887268
auaccaacgacuuagcuuc

SEQ ID NO: 887270 - RNA, 19 nt, Artificial Sequence
  Description of Artificial Sequence: Synthetic oligonucleotide
  Sense strand starting at position 3195 of SEQ ID NO: 588755
gugcaauggugggcaucau

SEQ ID NO: 887271 - RNA, 19 nt, Artificial Sequence
  Description of Artificial Sequence: Synthetic oligonucleotide
  Antisense strand to SEQ ID NO: 887270
augaugcccaccauugcac

SEQ ID NO: 887272 - RNA, 19 nt, Artificial Sequence
  Description of Artificial Sequence: Synthetic oligonucleotide
  Sense strand starting at position 3196 of SEQ ID NO: 588755
ugcaauggugggcaucaua

SEQ ID NO: 887273 - RNA, 19 nt, Artificial Sequence
  Description of Artificial Sequence: Synthetic oligonucleotide
  Antisense strand to SEQ ID NO: 887272
uaugaugcccaccauugca

SEQ ID NO: 887274 - RNA, 19 nt, Artificial Sequence
  Description of Artificial Sequence: Synthetic oligonucleotide
  Sense strand starting at position 3303 of SEQ ID NO: 588755
cucaaugucucuccuugua

SEQ ID NO: 887275 - RNA, 19 nt, Artificial Sequence
  Description of Artificial Sequence: Synthetic oligonucleotide
  Antisense strand to SEQ ID NO: 887274
uacaaggagagacauugag

SEQ ID NO: 887276 - RNA, 19 nt, Artificial Sequence
  Description of Artificial Sequence: Synthetic oligonucleotide
  Sense strand starting at position 3357 of SEQ ID NO: 588755
ucagccuccguuuaacuua

SEQ ID NO: 887277 - RNA, 19 nt, Artificial Sequence
  Description of Artificial Sequence: Synthetic oligonucleotide
  Antisense strand to SEQ ID NO: 887276
uaaguuaaacggaggcuga

SEQ ID NO: 887278 - RNA, 19 nt, Artificial Sequence
  Description of Artificial Sequence: Synthetic oligonucleotide
  Sense strand starting at position 3429 of SEQ ID NO: 588755
cuaauauggccucauguaa

SEQ ID NO: 887279 - RNA, 19 nt, Artificial Sequence
  Description of Artificial Sequence: Synthetic oligonucleotide
  Antisense strand to SEQ ID NO: 887278
uuacaugaggccauauuag

SEQ ID NO: 887280 - RNA, 19 nt, Artificial Sequence
  Description of Artificial Sequence: Synthetic oligonucleotide
  Sense strand starting at position 3581 of SEQ ID NO: 588755
ggacgcaugccacaggaua

SEQ ID NO: 887281 - RNA, 19 nt, Artificial Sequence
  Description of Artificial Sequence: Synthetic oligonucleotide
  Antisense strand to SEQ ID NO: 887280
uauccuguggcaugcgucc

SEQ ID NO: 887282 - RNA, 19 nt, Artificial Sequence
  Description of Artificial Sequence: Synthetic oligonucleotide
  Sense strand starting at position 3583 of SEQ ID NO: 588755
acgcaugccacaggauaua

SEQ ID NO: 887283 - RNA, 19 nt, Artificial Sequence
  Description of Artificial Sequence: Synthetic oligonucleotide
  Antisense strand to SEQ ID NO: 887282
uauauccuguggcaugcgu

SEQ ID NO: 887284 - RNA, 19 nt, Artificial Sequence
  Description of Artificial Sequence: Synthetic oligonucleotide
  Sense strand starting at position 3660 of SEQ ID NO: 588755
acacaaugccgagaguuga

SEQ ID NO: 887285 - RNA, 19 nt, Artificial Sequence
  Description of Artificial Sequence: Synthetic oligonucleotide
  Antisense strand to SEQ ID NO: 887284
ucaacucucggcauugugu

SEQ ID NO: 887286 - RNA, 19 nt, Artificial Sequence
  Description of Artificial Sequence: Synthetic oligonucleotide
  Sense strand starting at position 3880 of SEQ ID NO: 588755
ucaagacuugcgugggcaa

SEQ ID NO: 887287 - RNA, 19 nt, Artificial Sequence
  Description of Artificial Sequence: Synthetic oligonucleotide
  Antisense strand to SEQ ID NO: 887286
uugcccacgcaagucuuga

SEQ ID NO: 887288 - RNA, 19 nt, Artificial Sequence
  Description of Artificial Sequence: Synthetic oligonucleotide
  Sense strand starting at position 3961 of SEQ ID NO: 588755
cugggugucuaagugagau

SEQ ID NO: 887289 - RNA, 19 nt, Artificial Sequence
  Description of Artificial Sequence: Synthetic oligonucleotide
  Antisense strand to SEQ ID NO: 887288
aucucacuuagacacccag

SEQ ID NO: 887290 - RNA, 19 nt, Artificial Sequence
  Description of Artificial Sequence: Synthetic oligonucleotide
  Sense strand starting at position 142 of SEQ ID NO: 588756
gccaaagacuggcauaaau

SEQ ID NO: 887291 - RNA, 19 nt, Artificial Sequence
  Description of Artificial Sequence: Synthetic oligonucleotide
  Antisense strand to SEQ ID NO: 887290
auuuaugccagucuuuggc

SEQ ID NO: 887292 - RNA, 19 nt, Artificial Sequence
  Description of Artificial Sequence: Synthetic oligonucleotide
  Sense strand starting at position 254 of SEQ ID NO: 588756
cucauugugcauuagugaa

SEQ ID NO: 887293 - RNA, 19 nt, Artificial Sequence
  Description of Artificial Sequence: Synthetic oligonucleotide
  Antisense strand to SEQ ID NO: 887292
uucacuaaugcacaaugag

SEQ ID NO: 887294 - RNA, 19 nt, Artificial Sequence
  Description of Artificial Sequence: Synthetic oligonucleotide
  Sense strand starting at position 261 of SEQ ID NO: 588756
ugcauuagugaauggacua

SEQ ID NO: 887295 - RNA, 19 nt, Artificial Sequence
  Description of Artificial Sequence: Synthetic oligonucleotide
  Antisense strand to SEQ ID NO: 887294
uaguccauucacuaaugca

SEQ ID NO: 887296 - RNA, 19 nt, Artificial Sequence
  Description of Artificial Sequence: Synthetic oligonucleotide
  Sense strand starting at position 262 of SEQ ID NO: 588756
gcauuagugaauggacuaa

SEQ ID NO: 887297 - RNA, 19 nt, Artificial Sequence
  Description of Artificial Sequence: Synthetic oligonucleotide
  Antisense strand to SEQ ID NO: 887296
uuaguccauucacuaaugc

SEQ ID NO: 887298 - RNA, 19 nt, Artificial Sequence
  Description of Artificial Sequence: Synthetic oligonucleotide
  Sense strand starting at position 300 of SEQ ID NO: 588756
ggaccuguauaccaagagu

SEQ ID NO: 887299 - RNA, 19 nt, Artificial Sequence
  Description of Artificial Sequence: Synthetic oligonucleotide
  Antisense strand to SEQ ID NO: 887298
acucuugguauacaggucc

SEQ ID NO: 887300 - RNA, 19 nt, Artificial Sequence
  Description of Artificial Sequence: Synthetic oligonucleotide
  Sense strand starting at position 484 of SEQ ID NO: 588756
uucuguagacugggucuaa

SEQ ID NO: 887301 - RNA, 19 nt, Artificial Sequence
  Description of Artificial Sequence: Synthetic oligonucleotide
  Antisense strand to SEQ ID NO: 887300
uuagacccagucuacagaa

SEQ ID NO: 887302 - RNA, 19 nt, Artificial Sequence
  Description of Artificial Sequence: Synthetic oligonucleotide
  Sense strand starting at position 574 of SEQ ID NO: 588756
aagugcuggccacaugagu

SEQ ID NO: 887303 - RNA, 19 nt, Artificial Sequence
  Description of Artificial Sequence: Synthetic oligonucleotide
  Antisense strand to SEQ ID NO: 887302
acucauguggccagcacuu

SEQ ID NO: 887304 - RNA, 19 nt, Artificial Sequence
  Description of Artificial Sequence: Synthetic oligonucleotide
  Sense strand starting at position 705 of SEQ ID NO: 588756
caggaaacuuggucugauc

SEQ ID NO: 887305 - RNA, 19 nt, Artificial Sequence
  Description of Artificial Sequence: Synthetic oligonucleotide
  Antisense strand to SEQ ID NO: 887304
gaucagaccaaguuuccug

SEQ ID NO: 887306 - RNA, 19 nt, Artificial Sequence
  Description of Artificial Sequence: Synthetic oligonucleotide
  Sense strand starting at position 707 of SEQ ID NO: 588756
ggaaacuuggucugaucca

SEQ ID NO: 887307 - RNA, 19 nt, Artificial Sequence
  Description of Artificial Sequence: Synthetic oligonucleotide
  Antisense strand to SEQ ID NO: 887306
uggaucagaccaaguuucc

SEQ ID NO: 887308 - RNA, 19 nt, Artificial Sequence
  Description of Artificial Sequence: Synthetic oligonucleotide
  Sense strand starting at position 708 of SEQ ID NO: 588756
gaaacuuggucugauccaa

SEQ ID NO: 887309 - RNA, 19 nt, Artificial Sequence
  Description of Artificial Sequence: Synthetic oligonucleotide
  Antisense strand to SEQ ID NO: 887308
uuggaucagaccaaguuuc

SEQ ID NO: 887310 - RNA, 19 nt, Artificial Sequence
  Description of Artificial Sequence: Synthetic oligonucleotide
  Sense strand starting at position 760 of SEQ ID NO: 588756
gcaccagauccuuagagca

SEQ ID NO: 887311 - RNA, 19 nt, Artificial Sequence
  Description of Artificial Sequence: Synthetic oligonucleotide
  Antisense strand to SEQ ID NO: 887310
ugcucuaaggaucuggugc

SEQ ID NO: 887312 - RNA, 19 nt, Artificial Sequence
  Description of Artificial Sequence: Synthetic oligonucleotide
  Sense strand starting at position 1045 of SEQ ID NO: 588756
ggguccauuguggguagaa

SEQ ID NO: 887313 - RNA, 19 nt, Artificial Sequence
  Description of Artificial Sequence: Synthetic oligonucleotide
  Antisense strand to SEQ ID NO: 887312
uucuacccacaauggaccc

SEQ ID NO: 887314 - RNA, 19 nt, Artificial Sequence
  Description of Artificial Sequence: Synthetic oligonucleotide
  Sense strand starting at position 1046 of SEQ ID NO: 588756
gguccauuguggguagaag

SEQ ID NO: 887315 - RNA, 19 nt, Artificial Sequence
  Description of Artificial Sequence: Synthetic oligonucleotide
  Antisense strand to SEQ ID NO: 887314
cuucuacccacaauggacc

SEQ ID NO: 887316 - RNA, 19 nt, Artificial Sequence
  Description of Artificial Sequence: Synthetic oligonucleotide
  Sense strand starting at position 1063 of SEQ ID NO: 588756
agcagcuuucuguggaaag

SEQ ID NO: 887317 - RNA, 19 nt, Artificial Sequence
  Description of Artificial Sequence: Synthetic oligonucleotide
  Antisense strand to SEQ ID NO: 887316
cuuuccacagaaagcugcu

SEQ ID NO: 887318 - RNA, 19 nt, Artificial Sequence
  Description of Artificial Sequence: Synthetic oligonucleotide
  Sense strand starting at position 1065 of SEQ ID NO: 588756
cagcuuucuguggaaagac

SEQ ID NO: 887319 - RNA, 19 nt, Artificial Sequence
  Description of Artificial Sequence: Synthetic oligonucleotide
  Antisense strand to SEQ ID NO: 887318
gucuuuccacagaaagcug

SEQ ID NO: 887320 - RNA, 19 nt, Artificial Sequence
  Description of Artificial Sequence: Synthetic oligonucleotide
  Sense strand starting at position 1529 of SEQ ID NO: 588756
agaacuagauagcccauua

SEQ ID NO: 887321 - RNA, 19 nt, Artificial Sequence
  Description of Artificial Sequence: Synthetic oligonucleotide
  Antisense strand to SEQ ID NO: 887320
uaaugggcuaucuaguucu

SEQ ID NO: 887322 - RNA, 19 nt, Artificial Sequence
  Description of Artificial Sequence: Synthetic oligonucleotide
  Sense strand starting at position 1809 of SEQ ID NO: 588756
gcaagagacucccugcaga

SEQ ID NO: 887323 - RNA, 19 nt, Artificial Sequence
  Description of Artificial Sequence: Synthetic oligonucleotide
  Antisense strand to SEQ ID NO: 887322
ucugcagggagucucuugc

SEQ ID NO: 887324 - RNA, 19 nt, Artificial Sequence
  Description of Artificial Sequence: Synthetic oligonucleotide
  Sense strand starting at position 2109 of SEQ ID NO: 588756
uaguguaugcucgccgcua

SEQ ID NO: 887325 - RNA, 19 nt, Artificial Sequence
  Description of Artificial Sequence: Synthetic oligonucleotide
  Antisense strand to SEQ ID NO: 887324
uagcggcgagcauacacua

SEQ ID NO: 887326 - RNA, 19 nt, Artificial Sequence
  Description of Artificial Sequence: Synthetic oligonucleotide
  Sense strand starting at position 2140 of SEQ ID NO: 588756
acccaagauccuugaagca

SEQ ID NO: 887327 - RNA, 19 nt, Artificial Sequence
  Description of Artificial Sequence: Synthetic oligonucleotide
  Antisense strand to SEQ ID NO: 887326
ugcuucaaggaucuugggu

SEQ ID NO: 887328 - RNA, 19 nt, Artificial Sequence
  Description of Artificial Sequence: Synthetic oligonucleotide
  Sense strand starting at position 2541 of SEQ ID NO: 588756
acaggucucugccagaaau

SEQ ID NO: 887329 - RNA, 19 nt, Artificial Sequence
  Description of Artificial Sequence: Synthetic oligonucleotide
  Antisense strand to SEQ ID NO: 887328
auuucuggcagagaccugu

SEQ ID NO: 887330 - RNA, 19 nt, Artificial Sequence
  Description of Artificial Sequence: Synthetic oligonucleotide
  Sense strand starting at position 2543 of SEQ ID NO: 588756
aggucucugccagaaauga

SEQ ID NO: 887331 - RNA, 19 nt, Artificial Sequence
  Description of Artificial Sequence: Synthetic oligonucleotide
  Antisense strand to SEQ ID NO: 887330
ucauuucuggcagagaccu

SEQ ID NO: 887332 - RNA, 19 nt, Artificial Sequence
  Description of Artificial Sequence: Synthetic oligonucleotide
  Sense strand starting at position 2758 of SEQ ID NO: 588756
caguguccagcauguagua

SEQ ID NO: 887333 - RNA, 19 nt, Artificial Sequence
  Description of Artificial Sequence: Synthetic oligonucleotide
  Antisense strand to SEQ ID NO: 887332
uacuacaugcuggacacug

SEQ ID NO: 887334 - RNA, 19 nt, Artificial Sequence
  Description of Artificial Sequence: Synthetic oligonucleotide
  Sense strand starting at position 2770 of SEQ ID NO: 588756
uguaguaggugcucaguua

SEQ ID NO: 887335 - RNA, 19 nt, Artificial Sequence
  Description of Artificial Sequence: Synthetic oligonucleotide
  Antisense strand to SEQ ID NO: 887334
uaacugagcaccuacuaca

SEQ ID NO: 887336 - RNA, 19 nt, Artificial Sequence
  Description of Artificial Sequence: Synthetic oligonucleotide
  Sense strand starting at position 2771 of SEQ ID NO: 588756
guaguaggugcucaguuau

SEQ ID NO: 887337 - RNA, 19 nt, Artificial Sequence
  Description of Artificial Sequence: Synthetic oligonucleotide
  Antisense strand to SEQ ID NO: 887336
auaacugagcaccuacuac

SEQ ID NO: 887338 - RNA, 19 nt, Artificial Sequence
  Description of Artificial Sequence: Synthetic oligonucleotide
  Sense strand starting at position 3095 of SEQ ID NO: 588756
cugggugcaggguagaaau

SEQ ID NO: 887339 - RNA, 19 nt, Artificial Sequence
  Description of Artificial Sequence: Synthetic oligonucleotide
  Antisense strand to SEQ ID NO: 887338
auuucuacccugcacccag

SEQ ID NO: 887340 - RNA, 19 nt, Artificial Sequence
  Description of Artificial Sequence: Synthetic oligonucleotide
  Sense strand starting at position 3097 of SEQ ID NO: 588756
gggugcaggguagaaauua

SEQ ID NO: 887341 - RNA, 19 nt, Artificial Sequence
  Description of Artificial Sequence: Synthetic oligonucleotide
  Antisense strand to SEQ ID NO: 887340
uaauuucuacccugcaccc

SEQ ID NO: 887342 - RNA, 19 nt, Artificial Sequence
  Description of Artificial Sequence: Synthetic oligonucleotide
  Sense strand starting at position 3105 of SEQ ID NO: 588756
gguagaaauuaugccaggu

SEQ ID NO: 887343 - RNA, 19 nt, Artificial Sequence
  Description of Artificial Sequence: Synthetic oligonucleotide
  Antisense strand to SEQ ID NO: 887342
accuggcauaauuucuacc

SEQ ID NO: 887344 - RNA, 19 nt, Artificial Sequence
  Description of Artificial Sequence: Synthetic oligonucleotide
  Sense strand starting at position 3109 of SEQ ID NO: 588756
gaaauuaugccagguggga

SEQ ID NO: 887345 - RNA, 19 nt, Artificial Sequence
  Description of Artificial Sequence: Synthetic oligonucleotide
  Antisense strand to SEQ ID NO: 887344
ucccaccuggcauaauuuc

SEQ ID NO: 887346 - RNA, 19 nt, Artificial Sequence
  Description of Artificial Sequence: Synthetic oligonucleotide
  Sense strand starting at position 3111 of SEQ ID NO: 588756
aauuaugccaggugggaga

SEQ ID NO: 887347 - RNA, 19 nt, Artificial Sequence
  Description of Artificial Sequence: Synthetic oligonucleotide
  Antisense strand to SEQ ID NO: 887346
ucucccaccuggcauaauu

SEQ ID NO: 887348 - RNA, 19 nt, Artificial Sequence
  Description of Artificial Sequence: Synthetic oligonucleotide
  Sense strand starting at position 3396 of SEQ ID NO: 588756
ggguccaguuguccaaaga

SEQ ID NO: 887349 - RNA, 19 nt, Artificial Sequence
  Description of Artificial Sequence: Synthetic oligonucleotide
  Antisense strand to SEQ ID NO: 887348
ucuuuggacaacuggaccc

SEQ ID NO: 887350 - RNA, 19 nt, Artificial Sequence
  Description of Artificial Sequence: Synthetic oligonucleotide
  Sense strand starting at position 3397 of SEQ ID NO: 588756
gguccaguuguccaaagaa

SEQ ID NO: 887351 - RNA, 19 nt, Artificial Sequence
  Description of Artificial Sequence: Synthetic oligonucleotide
  Antisense strand to SEQ ID NO: 887350
uucuuuggacaacuggacc

SEQ ID NO: 887352 - RNA, 19 nt, Artificial Sequence
  Description of Artificial Sequence: Synthetic oligonucleotide
  Sense strand starting at position 3422 of SEQ ID NO: 588756
aguuucuggugagaagaaa

SEQ ID NO: 887353 - RNA, 19 nt, Artificial Sequence
  Description of Artificial Sequence: Synthetic oligonucleotide
  Antisense strand to SEQ ID NO: 887352
uuucuucucaccagaaacu

SEQ ID NO: 887354 - RNA, 19 nt, Artificial Sequence
  Description of Artificial Sequence: Synthetic oligonucleotide
  Sense strand starting at position 3442 of SEQ ID NO: 588756
gagagacgggcuugaauga

SEQ ID NO: 887355 - RNA, 19 nt, Artificial Sequence
  Description of Artificial Sequence: Synthetic oligonucleotide
  Antisense strand to SEQ ID NO: 887354
ucauucaagcccgucucuc

SEQ ID NO: 887356 - RNA, 19 nt, Artificial Sequence
  Description of Artificial Sequence: Synthetic oligonucleotide
  Sense strand starting at position 3645 of SEQ ID NO: 588756
cuuccauagcgugaccuua

SEQ ID NO: 887357 - RNA, 19 nt, Artificial Sequence
  Description of Artificial Sequence: Synthetic oligonucleotide
  Antisense strand to SEQ ID NO: 887356
uaaggucacgcuauggaag

SEQ ID NO: 887358 - RNA, 19 nt, Artificial Sequence
  Description of Artificial Sequence: Synthetic oligonucleotide
  Sense strand starting at position 3647 of SEQ ID NO: 588756
uccauagcgugaccuuaaa

SEQ ID NO: 887359 - RNA, 19 nt, Artificial Sequence
  Description of Artificial Sequence: Synthetic oligonucleotide
  Antisense strand to SEQ ID NO: 887358
uuuaaggucacgcuaugga

SEQ ID NO: 887360 - RNA, 19 nt, Artificial Sequence
  Description of Artificial Sequence: Synthetic oligonucleotide
  Sense strand starting at position 3723 of SEQ ID NO: 588756
aucagauggucucugagga

SEQ ID NO: 887361 - RNA, 19 nt, Artificial Sequence
  Description of Artificial Sequence: Synthetic oligonucleotide
  Antisense strand to SEQ ID NO: 887360
uccucagagaccaucugau

SEQ ID NO: 887362 - RNA, 19 nt, Artificial Sequence
  Description of Artificial Sequence: Synthetic oligonucleotide
  Sense strand starting at position 3915 of SEQ ID NO: 588756
gaagguagaugagagaaau

SEQ ID NO: 887363 - RNA, 19 nt, Artificial Sequence
  Description of Artificial Sequence: Synthetic oligonucleotide
  Antisense strand to SEQ ID NO: 887362
auuucucucaucuaccuuc

SEQ ID NO: 887364 - RNA, 19 nt, Artificial Sequence
  Description of Artificial Sequence: Synthetic oligonucleotide
  Sense strand starting at position 3937 of SEQ ID NO: 588756
ggcagaagugccagggcuu

SEQ ID NO: 887365 - RNA, 19 nt, Artificial Sequence
  Description of Artificial Sequence: Synthetic oligonucleotide
  Antisense strand to SEQ ID NO: 887364
aagcccuggcacuucugcc

SEQ ID NO: 887366 - RNA, 19 nt, Artificial Sequence
  Description of Artificial Sequence: Synthetic oligonucleotide
  Sense strand starting at position 3949 of SEQ ID NO: 588756
agggcuuggugaccgauua

SEQ ID NO: 887367 - RNA, 19 nt, Artificial Sequence
  Description of Artificial Sequence: Synthetic oligonucleotide
  Antisense strand to SEQ ID NO: 887366
uaaucggucaccaagcccu

SEQ ID NO: 887368 - RNA, 19 nt, Artificial Sequence
  Description of Artificial Sequence: Synthetic oligonucleotide
  Sense strand starting at position 3962 of SEQ ID NO: 588756
cgauuagcacuagagcuua

SEQ ID NO: 887369 - RNA, 19 nt, Artificial Sequence
  Description of Artificial Sequence: Synthetic oligonucleotide
  Antisense strand to SEQ ID NO: 887368
uaagcucuagugcuaaucg

SEQ ID NO: 887370 - RNA, 19 nt, Artificial Sequence
  Description of Artificial Sequence: Synthetic oligonucleotide
  Sense strand starting at position 199 of SEQ ID NO: 588757
cccauuccugauggaauca

SEQ ID NO: 887371 - RNA, 19 nt, Artificial Sequence
  Description of Artificial Sequence: Synthetic oligonucleotide
  Antisense strand to SEQ ID NO: 887370
ugauuccaucaggaauggg

SEQ ID NO: 887372 - RNA, 19 nt, Artificial Sequence
  Description of Artificial Sequence: Synthetic oligonucleotide
  Sense strand starting at position 420 of SEQ ID NO: 588757
cuaaaucugccucagugau

SEQ ID NO: 887373 - RNA, 19 nt, Artificial Sequence
  Description of Artificial Sequence: Synthetic oligonucleotide
  Antisense strand to SEQ ID NO: 887372
aucacugaggcagauuuag

SEQ ID NO: 887374 - RNA, 19 nt, Artificial Sequence
  Description of Artificial Sequence: Synthetic oligonucleotide
  Sense strand starting at position 426 of SEQ ID NO: 588757
cugccucagugauucuuua

SEQ ID NO: 887375 - RNA, 19 nt, Artificial Sequence
  Description of Artificial Sequence: Synthetic oligonucleotide
  Antisense strand to SEQ ID NO: 887374
uaaagaaucacugaggcag

SEQ ID NO: 887376 - RNA, 19 nt, Artificial Sequence
  Description of Artificial Sequence: Synthetic oligonucleotide
  Sense strand starting at position 430 of SEQ ID NO: 588757
cucagugauucuuuagcag

SEQ ID NO: 887377 - RNA, 19 nt, Artificial Sequence
  Description of Artificial Sequence: Synthetic oligonucleotide
  Antisense strand to SEQ ID NO: 887376
cugcuaaagaaucacugag

SEQ ID NO: 887378 - RNA, 19 nt, Artificial Sequence
  Description of Artificial Sequence: Synthetic oligonucleotide
  Sense strand starting at position 433 of SEQ ID NO: 588757
agugauucuuuagcagcaa

SEQ ID NO: 887379 - RNA, 19 nt, Artificial Sequence
  Description of Artificial Sequence: Synthetic oligonucleotide
  Antisense strand to SEQ ID NO: 887378
uugcugcuaaagaaucacu

SEQ ID NO: 887380 - RNA, 19 nt, Artificial Sequence
  Description of Artificial Sequence: Synthetic oligonucleotide
  Sense strand starting at position 437 of SEQ ID NO: 588757
auucuuuagcagcaaaguu

SEQ ID NO: 887381 - RNA, 19 nt, Artificial Sequence
  Description of Artificial Sequence: Synthetic oligonucleotide
  Antisense strand to SEQ ID NO: 887380
aacuuugcugcuaaagaau

SEQ ID NO: 887382 - RNA, 19 nt, Artificial Sequence
  Description of Artificial Sequence: Synthetic oligonucleotide
  Sense strand starting at position 453 of SEQ ID NO: 588757
guuacagacuccucagguu

SEQ ID NO: 887383 - RNA, 19 nt, Artificial Sequence
  Description of Artificial Sequence: Synthetic oligonucleotide
  Antisense strand to SEQ ID NO: 887382
aaccugaggagucuguaac

SEQ ID NO: 887384 - RNA, 19 nt, Artificial Sequence
  Description of Artificial Sequence: Synthetic oligonucleotide
  Sense strand starting at position 522 of SEQ ID NO: 588757
gguucagggacaggugaua

SEQ ID NO: 887385 - RNA, 19 nt, Artificial Sequence
  Description of Artificial Sequence: Synthetic oligonucleotide
  Antisense strand to SEQ ID NO: 887384
uaucaccugucccugaacc

SEQ ID NO: 887386 - RNA, 19 nt, Artificial Sequence
  Description of Artificial Sequence: Synthetic oligonucleotide
  Sense strand starting at position 533 of SEQ ID NO: 588757
aggugauaacuuggccaag

SEQ ID NO: 887387 - RNA, 19 nt, Artificial Sequence
  Description of Artificial Sequence: Synthetic oligonucleotide
  Antisense strand to SEQ ID NO: 887386
cuuggccaaguuaucaccu

SEQ ID NO: 887388 - RNA, 19 nt, Artificial Sequence
  Description of Artificial Sequence: Synthetic oligonucleotide
  Sense strand starting at position 535 of SEQ ID NO: 588757
gugauaacuuggccaagga

SEQ ID NO: 887389 - RNA, 19 nt, Artificial Sequence
  Description of Artificial Sequence: Synthetic oligonucleotide
  Antisense strand to SEQ ID NO: 887388
uccuuggccaaguuaucac

SEQ ID NO: 887390 - RNA, 19 nt, Artificial Sequence
  Description of Artificial Sequence: Synthetic oligonucleotide
  Sense strand starting at position 631 of SEQ ID NO: 588757
ccgggcuccuuucugcaaa

SEQ ID NO: 887391 - RNA, 19 nt, Artificial Sequence
  Description of Artificial Sequence: Synthetic oligonucleotide
  Antisense strand to SEQ ID NO: 887390
uuugcagaaaggagcccgg

SEQ ID NO: 887392 - RNA, 19 nt, Artificial Sequence
  Description of Artificial Sequence: Synthetic oligonucleotide
  Sense strand starting at position 633 of SEQ ID NO: 588757
gggcuccuuucugcaaaca

SEQ ID NO: 887393 - RNA, 19 nt, Artificial Sequence
  Description of Artificial Sequence: Synthetic oligonucleotide
  Antisense strand to SEQ ID NO: 887392
uguuugcagaaaggagccc

SEQ ID NO: 887394 - RNA, 19 nt, Artificial Sequence
  Description of Artificial Sequence: Synthetic oligonucleotide
  Sense strand starting at position 634 of SEQ ID NO: 588757
ggcuccuuucugcaaacau

SEQ ID NO: 887395 - RNA, 19 nt, Artificial Sequence
  Description of Artificial Sequence: Synthetic oligonucleotide
  Antisense strand to SEQ ID NO: 887394
auguuugcagaaaggagcc

SEQ ID NO: 887396 - RNA, 19 nt, Artificial Sequence
  Description of Artificial Sequence: Synthetic oligonucleotide
  Sense strand starting at position 655 of SEQ ID NO: 588757
uuccuuaucugggcucaga

SEQ ID NO: 887397 - RNA, 19 nt, Artificial Sequence
  Description of Artificial Sequence: Synthetic oligonucleotide
  Antisense strand to SEQ ID NO: 887396
ucugagcccagauaaggaa

SEQ ID NO: 887398 - RNA, 19 nt, Artificial Sequence
  Description of Artificial Sequence: Synthetic oligonucleotide
  Sense strand starting at position 674 of SEQ ID NO: 588757
gccaacguuacagggaaua

SEQ ID NO: 887399 - RNA, 19 nt, Artificial Sequence
  Description of Artificial Sequence: Synthetic oligonucleotide
  Antisense strand to SEQ ID NO: 887398
uauucccuguaacguuggc

SEQ ID NO: 887400 - RNA, 19 nt, Artificial Sequence
  Description of Artificial Sequence: Synthetic oligonucleotide
  Sense strand starting at position 691 of SEQ ID NO: 588757
uauggauucuuugugcaac

SEQ ID NO: 887401 - RNA, 19 nt, Artificial Sequence
  Description of Artificial Sequence: Synthetic oligonucleotide
  Antisense strand to SEQ ID NO: 887400
guugcacaaagaauccaua

SEQ ID NO: 887402 - RNA, 19 nt, Artificial Sequence
  Description of Artificial Sequence: Synthetic oligonucleotide
  Sense strand starting at position 709 of SEQ ID NO: 588757
cugguuauugcaggucaaa

SEQ ID NO: 887403 - RNA, 19 nt, Artificial Sequence
  Description of Artificial Sequence: Synthetic oligonucleotide
  Antisense strand to SEQ ID NO: 887402
uuugaccugcaauaaccag

SEQ ID NO: 887404 - RNA, 19 nt, Artificial Sequence
  Description of Artificial Sequence: Synthetic oligonucleotide
  Sense strand starting at position 765 of SEQ ID NO: 588757
cugucaucucagggugcua

SEQ ID NO: 887405 - RNA, 19 nt, Artificial Sequence
  Description of Artificial Sequence: Synthetic oligonucleotide
  Antisense strand to SEQ ID NO: 887404
uagcacccugagaugacag

SEQ ID NO: 887406 - RNA, 19 nt, Artificial Sequence
  Description of Artificial Sequence: Synthetic oligonucleotide
  Sense strand starting at position 1710 of SEQ ID NO: 588757
accauaagcuuccaggaga

SEQ ID NO: 887407 - RNA, 19 nt, Artificial Sequence
  Description of Artificial Sequence: Synthetic oligonucleotide
  Antisense strand to SEQ ID NO: 887406
ucuccuggaagcuuauggu

SEQ ID NO: 887408 - RNA, 19 nt, Artificial Sequence
  Description of Artificial Sequence: Synthetic oligonucleotide
  Sense strand starting at position 1803 of SEQ ID NO: 588757
cugggauccagauguggua

SEQ ID NO: 887409 - RNA, 19 nt, Artificial Sequence
  Description of Artificial Sequence: Synthetic oligonucleotide
  Antisense strand to SEQ ID NO: 887408
uaccacaucuggaucccag

SEQ ID NO: 887410 - RNA, 19 nt, Artificial Sequence
  Description of Artificial Sequence: Synthetic oligonucleotide
  Sense strand starting at position 1819 of SEQ ID NO: 588757
guagccagagcuuaacgaa

SEQ ID NO: 887411 - RNA, 19 nt, Artificial Sequence
  Description of Artificial Sequence: Synthetic oligonucleotide
  Antisense strand to SEQ ID NO: 887410
uucguuaagcucuggcuac

SEQ ID NO: 887412 - RNA, 19 nt, Artificial Sequence
  Description of Artificial Sequence: Synthetic oligonucleotide
  Sense strand starting at position 1826 of SEQ ID NO: 588757
gagcuuaacgaauguuugu

SEQ ID NO: 887413 - RNA, 19 nt, Artificial Sequence
  Description of Artificial Sequence: Synthetic oligonucleotide
  Antisense strand to SEQ ID NO: 887412
acaaacauucguuaagcuc

SEQ ID NO: 887414 - RNA, 19 nt, Artificial Sequence
  Description of Artificial Sequence: Synthetic oligonucleotide
  Sense strand starting at position 1831 of SEQ ID NO: 588757
uaacgaauguuuguggaau

SEQ ID NO: 887415 - RNA, 19 nt, Artificial Sequence
  Description of Artificial Sequence: Synthetic oligonucleotide
  Antisense strand to SEQ ID NO: 887414
auuccacaaacauucguua

SEQ ID NO: 887416 - RNA, 19 nt, Artificial Sequence
  Description of Artificial Sequence: Synthetic oligonucleotide
  Sense strand starting at position 2335 of SEQ ID NO: 588757
cccagcacucccuaagaga

SEQ ID NO: 887417 - RNA, 19 nt, Artificial Sequence
  Description of Artificial Sequence: Synthetic oligonucleotide
  Antisense strand to SEQ ID NO: 887416
ucucuuagggagugcuggg

SEQ ID NO: 887418 - RNA, 19 nt, Artificial Sequence
  Description of Artificial Sequence: Synthetic oligonucleotide
  Sense strand starting at position 2467 of SEQ ID NO: 588757
ccuccuacuccuggaggua

SEQ ID NO: 887419 - RNA, 19 nt, Artificial Sequence
  Description of Artificial Sequence: Synthetic oligonucleotide
  Antisense strand to SEQ ID NO: 887418
uaccuccaggaguaggagg

SEQ ID NO: 887420 - RNA, 19 nt, Artificial Sequence
  Description of Artificial Sequence: Synthetic oligonucleotide
  Sense strand starting at position 2515 of SEQ ID NO: 588757
aagggagagucgcuuugau

SEQ ID NO: 887421 - RNA, 19 nt, Artificial Sequence
  Description of Artificial Sequence: Synthetic oligonucleotide
  Antisense strand to SEQ ID NO: 887420
aucaaagcgacucucccuu

SEQ ID NO: 887422 - RNA, 19 nt, Artificial Sequence
  Description of Artificial Sequence: Synthetic oligonucleotide
  Sense strand starting at position 2543 of SEQ ID NO: 588757
ggaugacccaguugaguug

SEQ ID NO: 887423 - RNA, 19 nt, Artificial Sequence
  Description of Artificial Sequence: Synthetic oligonucleotide
  Antisense strand to SEQ ID NO: 887422
caacucaacugggucaucc

SEQ ID NO: 887424 - RNA, 19 nt, Artificial Sequence
  Description of Artificial Sequence: Synthetic oligonucleotide
  Sense strand starting at position 2559 of SEQ ID NO: 588757
uuggauuugucacauuccu

SEQ ID NO: 887425 - RNA, 19 nt, Artificial Sequence
  Description of Artificial Sequence: Synthetic oligonucleotide
  Antisense strand to SEQ ID NO: 887424
aggaaugugacaaauccaa

SEQ ID NO: 887426 - RNA, 19 nt, Artificial Sequence
  Description of Artificial Sequence: Synthetic oligonucleotide
  Sense strand starting at position 2661 of SEQ ID NO: 588757
gaaguauucguacaggaag

SEQ ID NO: 887427 - RNA, 19 nt, Artificial Sequence
  Description of Artificial Sequence: Synthetic oligonucleotide
  Antisense strand to SEQ ID NO: 887426
cuuccuguacgaauacuuc

SEQ ID NO: 887428 - RNA, 19 nt, Artificial Sequence
  Description of Artificial Sequence: Synthetic oligonucleotide
  Sense strand starting at position 2729 of SEQ ID NO: 588757
uucuaugcucaguggagga

SEQ ID NO: 887429 - RNA, 19 nt, Artificial Sequence
  Description of Artificial Sequence: Synthetic oligonucleotide
  Antisense strand to SEQ ID NO: 887428
uccuccacugagcauagaa

SEQ ID NO: 887430 - RNA, 19 nt, Artificial Sequence
  Description of Artificial Sequence: Synthetic oligonucleotide
  Sense strand starting at position 2840 of SEQ ID NO: 588757
caaguaguugcuugggaga

SEQ ID NO: 887431 - RNA, 19 nt, Artificial Sequence
  Description of Artificial Sequence: Synthetic oligonucleotide
  Antisense strand to SEQ ID NO: 887430
ucucccaagcaacuacuug

SEQ ID NO: 887432 - RNA, 19 nt, Artificial Sequence
  Description of Artificial Sequence: Synthetic oligonucleotide
  Sense strand starting at position 2851 of SEQ ID NO: 588757
uugggagagcuguauuaga

SEQ ID NO: 887433 - RNA, 19 nt, Artificial Sequence
  Description of Artificial Sequence: Synthetic oligonucleotide
  Antisense strand to SEQ ID NO: 887432
ucuaauacagcucucccaa

SEQ ID NO: 887434 - RNA, 19 nt, Artificial Sequence
  Description of Artificial Sequence: Synthetic oligonucleotide
  Sense strand starting at position 2868 of SEQ ID NO: 588757
gagaguggcugcucuuacu

SEQ ID NO: 887435 - RNA, 19 nt, Artificial Sequence
  Description of Artificial Sequence: Synthetic oligonucleotide
  Antisense strand to SEQ ID NO: 887434
aguaagagcagccacucuc

SEQ ID NO: 887436 - RNA, 19 nt, Artificial Sequence
  Description of Artificial Sequence: Synthetic oligonucleotide
  Sense strand starting at position 3359 of SEQ ID NO: 588757
ggugucaggcugcaagauu

SEQ ID NO: 887437 - RNA, 19 nt, Artificial Sequence
  Description of Artificial Sequence: Synthetic oligonucleotide
  Antisense strand to SEQ ID NO: 887436
aaucuugcagccugacacc

SEQ ID NO: 887438 - RNA, 19 nt, Artificial Sequence
  Description of Artificial Sequence: Synthetic oligonucleotide
  Sense strand starting at position 3368 of SEQ ID NO: 588757
cugcaagauugcccaguga

SEQ ID NO: 887439 - RNA, 19 nt, Artificial Sequence
  Description of Artificial Sequence: Synthetic oligonucleotide
  Antisense strand to SEQ ID NO: 887438
ucacugggcaaucuugcag

SEQ ID NO: 887440 - RNA, 19 nt, Artificial Sequence
  Description of Artificial Sequence: Synthetic oligonucleotide
  Sense strand starting at position 3372 of SEQ ID NO: 588757
aagauugcccagugaagag

SEQ ID NO: 887441 - RNA, 19 nt, Artificial Sequence
  Description of Artificial Sequence: Synthetic oligonucleotide
  Antisense strand to SEQ ID NO: 887440
cucuucacugggcaaucuu

SEQ ID NO: 887442 - RNA, 19 nt, Artificial Sequence
  Description of Artificial Sequence: Synthetic oligonucleotide
  Sense strand starting at position 3406 of SEQ ID NO: 588757
ccuaaagaguaauauuuag

SEQ ID NO: 887443 - RNA, 19 nt, Artificial Sequence
  Description of Artificial Sequence: Synthetic oligonucleotide
  Antisense strand to SEQ ID NO: 887442
cuaaauauuacucuuuagg

SEQ ID NO: 887444 - RNA, 19 nt, Artificial Sequence
  Description of Artificial Sequence: Synthetic oligonucleotide
  Sense strand starting at position 3412 of SEQ ID NO: 588757
gaguaauauuuagagaguc

SEQ ID NO: 887445 - RNA, 19 nt, Artificial Sequence
  Description of Artificial Sequence: Synthetic oligonucleotide
  Antisense strand to SEQ ID NO: 887444
gacucucuaaauauuacuc

SEQ ID NO: 887446 - RNA, 19 nt, Artificial Sequence
  Description of Artificial Sequence: Synthetic oligonucleotide
  Sense strand starting at position 3980 of SEQ ID NO: 588757
guagcuuggcccucaguuu

SEQ ID NO: 887447 - RNA, 19 nt, Artificial Sequence
  Description of Artificial Sequence: Synthetic oligonucleotide
  Antisense strand to SEQ ID NO: 887446
aaacugagggccaagcuac

SEQ ID NO: 887448 - RNA, 19 nt, Artificial Sequence
  Description of Artificial Sequence: Synthetic oligonucleotide
  Sense strand starting at position 3981 of SEQ ID NO: 588757
uagcuuggcccucaguuua

SEQ ID NO: 887449 - RNA, 19 nt, Artificial Sequence
  Description of Artificial Sequence: Synthetic oligonucleotide
  Antisense strand to SEQ ID NO: 887448
uaaacugagggccaagcua

SEQ ID NO: 887450 - RNA, 19 nt, Artificial Sequence
  Description of Artificial Sequence: Synthetic oligonucleotide
  Sense strand starting at position 9 of SEQ ID NO: 588758
uucuguagacugggucuaa

SEQ ID NO: 887451 - RNA, 19 nt, Artificial Sequence
  Description of Artificial Sequence: Synthetic oligonucleotide
  Antisense strand to SEQ ID NO: 887450
uuagacccagucuacagaa

SEQ ID NO: 887452 - RNA, 19 nt, Artificial Sequence
  Description of Artificial Sequence: Synthetic oligonucleotide
  Sense strand starting at position 99 of SEQ ID NO: 588758
aagugcuggccacaugagu

SEQ ID NO: 887453 - RNA, 19 nt, Artificial Sequence
  Description of Artificial Sequence: Synthetic oligonucleotide
  Antisense strand to SEQ ID NO: 887452
acucauguggccagcacuu

SEQ ID NO: 887454 - RNA, 19 nt, Artificial Sequence
  Description of Artificial Sequence: Synthetic oligonucleotide
  Sense strand starting at position 230 of SEQ ID NO: 588758
caggaaacuuggucugauc

SEQ ID NO: 887455 - RNA, 19 nt, Artificial Sequence
  Description of Artificial Sequence: Synthetic oligonucleotide
  Antisense strand to SEQ ID NO: 887454
gaucagaccaaguuuccug

SEQ ID NO: 887456 - RNA, 19 nt, Artificial Sequence
  Description of Artificial Sequence: Synthetic oligonucleotide
  Sense strand starting at position 232 of SEQ ID NO: 588758
ggaaacuuggucugaucca

SEQ ID NO: 887457 - RNA, 19 nt, Artificial Sequence
  Description of Artificial Sequence: Synthetic oligonucleotide
  Antisense strand to SEQ ID NO: 887456
uggaucagaccaaguuucc

SEQ ID NO: 887458 - RNA, 19 nt, Artificial Sequence
  Description of Artificial Sequence: Synthetic oligonucleotide
  Sense strand starting at position 233 of SEQ ID NO: 588758
gaaacuuggucugauccaa

SEQ ID NO: 887459 - RNA, 19 nt, Artificial Sequence
  Description of Artificial Sequence: Synthetic oligonucleotide
  Antisense strand to SEQ ID NO: 887458
uuggaucagaccaaguuuc

SEQ ID NO: 887460 - RNA, 19 nt, Artificial Sequence
  Description of Artificial Sequence: Synthetic oligonucleotide
  Sense strand starting at position 285 of SEQ ID NO: 588758
gcaccagauccuuagagca

SEQ ID NO: 887461 - RNA, 19 nt, Artificial Sequence
  Description of Artificial Sequence: Synthetic oligonucleotide
  Antisense strand to SEQ ID NO: 887460
ugcucuaaggaucuggugc

SEQ ID NO: 887462 - RNA, 19 nt, Artificial Sequence
  Description of Artificial Sequence: Synthetic oligonucleotide
  Sense strand starting at position 570 of SEQ ID NO: 588758
ggguccauuguggguagaa

SEQ ID NO: 887463 - RNA, 19 nt, Artificial Sequence
  Description of Artificial Sequence: Synthetic oligonucleotide
  Antisense strand to SEQ ID NO: 887462
uucuacccacaauggaccc

SEQ ID NO: 887464 - RNA, 19 nt, Artificial Sequence
  Description of Artificial Sequence: Synthetic oligonucleotide
  Sense strand starting at position 571 of SEQ ID NO: 588758
gguccauuguggguagaag

SEQ ID NO: 887465 - RNA, 19 nt, Artificial Sequence
  Description of Artificial Sequence: Synthetic oligonucleotide
  Antisense strand to SEQ ID NO: 887464
cuucuacccacaauggacc

SEQ ID NO: 887466 - RNA, 19 nt, Artificial Sequence
  Description of Artificial Sequence: Synthetic oligonucleotide
  Sense strand starting at position 588 of SEQ ID NO: 588758
agcagcuuucuguggaaag

SEQ ID NO: 887467 - RNA, 19 nt, Artificial Sequence
  Description of Artificial Sequence: Synthetic oligonucleotide
  Antisense strand to SEQ ID NO: 887466
cuuuccacagaaagcugcu

SEQ ID NO: 887468 - RNA, 19 nt, Artificial Sequence
  Description of Artificial Sequence: Synthetic oligonucleotide
  Sense strand starting at position 590 of SEQ ID NO: 588758
cagcuuucuguggaaagac

SEQ ID NO: 887469 - RNA, 19 nt, Artificial Sequence
  Description of Artificial Sequence: Synthetic oligonucleotide
  Antisense strand to SEQ ID NO: 887468
gucuuuccacagaaagcug

SEQ ID NO: 887470 - RNA, 19 nt, Artificial Sequence
  Description of Artificial Sequence: Synthetic oligonucleotide
  Sense strand starting at position 1054 of SEQ ID NO: 588758
agaacuagauagcccauua

SEQ ID NO: 887471 - RNA, 19 nt, Artificial Sequence
  Description of Artificial Sequence: Synthetic oligonucleotide
  Antisense strand to SEQ ID NO: 887470
uaaugggcuaucuaguucu

SEQ ID NO: 887472 - RNA, 19 nt, Artificial Sequence
  Description of Artificial Sequence: Synthetic oligonucleotide
  Sense strand starting at position 1334 of SEQ ID NO: 588758
gcaagagacucccugcaga

SEQ ID NO: 887473 - RNA, 19 nt, Artificial Sequence
  Description of Artificial Sequence: Synthetic oligonucleotide
  Antisense strand to SEQ ID NO: 887472
ucugcagggagucucuugc

SEQ ID NO: 887474 - RNA, 19 nt, Artificial Sequence
  Description of Artificial Sequence: Synthetic oligonucleotide
  Sense strand starting at position 1634 of SEQ ID NO: 588758
uaguguaugcucgccgcua

SEQ ID NO: 887475 - RNA, 19 nt, Artificial Sequence
  Description of Artificial Sequence: Synthetic oligonucleotide
  Antisense strand to SEQ ID NO: 887474
uagcggcgagcauacacua

SEQ ID NO: 887476 - RNA, 19 nt, Artificial Sequence
  Description of Artificial Sequence: Synthetic oligonucleotide
  Sense strand starting at position 1665 of SEQ ID NO: 588758
acccaagauccuugaagca

SEQ ID NO: 887477 - RNA, 19 nt, Artificial Sequence
  Description of Artificial Sequence: Synthetic oligonucleotide
  Antisense strand to SEQ ID NO: 887476
ugcuucaaggaucuugggu

SEQ ID NO: 887478 - RNA, 19 nt, Artificial Sequence
  Description of Artificial Sequence: Synthetic oligonucleotide
  Sense strand starting at position 2066 of SEQ ID NO: 588758
acaggucucugccagaaau

SEQ ID NO: 887479 - RNA, 19 nt, Artificial Sequence
  Description of Artificial Sequence: Synthetic oligonucleotide
  Antisense strand to SEQ ID NO: 887478
auuucuggcagagaccugu

SEQ ID NO: 887480 - RNA, 19 nt, Artificial Sequence
  Description of Artificial Sequence: Synthetic oligonucleotide
  Sense strand starting at position 2068 of SEQ ID NO: 588758
aggucucugccagaaauga

SEQ ID NO: 887481 - RNA, 19 nt, Artificial Sequence
  Description of Artificial Sequence: Synthetic oligonucleotide
  Antisense strand to SEQ ID NO: 887480
ucauuucuggcagagaccu

SEQ ID NO: 887482 - RNA, 19 nt, Artificial Sequence
  Description of Artificial Sequence: Synthetic oligonucleotide
  Sense strand starting at position 2283 of SEQ ID NO: 588758
caguguccagcauguagua

SEQ ID NO: 887483 - RNA, 19 nt, Artificial Sequence
  Description of Artificial Sequence: Synthetic oligonucleotide
  Antisense strand to SEQ ID NO: 887482
uacuacaugcuggacacug

SEQ ID NO: 887484 - RNA, 19 nt, Artificial Sequence
  Description of Artificial Sequence: Synthetic oligonucleotide
  Sense strand starting at position 2295 of SEQ ID NO: 588758
uguaguaggugcucaguua

SEQ ID NO: 887485 - RNA, 19 nt, Artificial Sequence
  Description of Artificial Sequence: Synthetic oligonucleotide
  Antisense strand to SEQ ID NO: 887484
uaacugagcaccuacuaca

SEQ ID NO: 887486 - RNA, 19 nt, Artificial Sequence
  Description of Artificial Sequence: Synthetic oligonucleotide
  Sense strand starting at position 2296 of SEQ ID NO: 588758
guaguaggugcucaguuau

SEQ ID NO: 887487 - RNA, 19 nt, Artificial Sequence
  Description of Artificial Sequence: Synthetic oligonucleotide
  Antisense strand to SEQ ID NO: 887486
auaacugagcaccuacuac

SEQ ID NO: 887488 - RNA, 19 nt, Artificial Sequence
  Description of Artificial Sequence: Synthetic oligonucleotide
  Sense strand starting at position 2620 of SEQ ID NO: 588758
cugggugcaggguagaaau

SEQ ID NO: 887489 - RNA, 19 nt, Artificial Sequence
  Description of Artificial Sequence: Synthetic oligonucleotide
  Antisense strand to SEQ ID NO: 887488
auuucuacccugcacccag

SEQ ID NO: 887490 - RNA, 19 nt, Artificial Sequence
  Description of Artificial Sequence: Synthetic oligonucleotide
  Sense strand starting at position 2622 of SEQ ID NO: 588758
gggugcaggguagaaauua

SEQ ID NO: 887491 - RNA, 19 nt, Artificial Sequence
  Description of Artificial Sequence: Synthetic oligonucleotide
  Antisense strand to SEQ ID NO: 887490
uaauuucuacccugcaccc

SEQ ID NO: 887492 - RNA, 19 nt, Artificial Sequence
  Description of Artificial Sequence: Synthetic oligonucleotide
  Sense strand starting at position 2630 of SEQ ID NO: 588758
gguagaaauuaugccaggu

SEQ ID NO: 887493 - RNA, 19 nt, Artificial Sequence
  Description of Artificial Sequence: Synthetic oligonucleotide
  Antisense strand to SEQ ID NO: 887492
accuggcauaauuucuacc

SEQ ID NO: 887494 - RNA, 19 nt, Artificial Sequence
  Description of Artificial Sequence: Synthetic oligonucleotide
  Sense strand starting at position 2634 of SEQ ID NO: 588758
gaaauuaugccagguggga

SEQ ID NO: 887495 - RNA, 19 nt, Artificial Sequence
  Description of Artificial Sequence: Synthetic oligonucleotide
  Antisense strand to SEQ ID NO: 887494
ucccaccuggcauaauuuc

SEQ ID NO: 887496 - RNA, 19 nt, Artificial Sequence
  Description of Artificial Sequence: Synthetic oligonucleotide
  Sense strand starting at position 2636 of SEQ ID NO: 588758
aauuaugccaggugggaga

SEQ ID NO: 887497 - RNA, 19 nt, Artificial Sequence
  Description of Artificial Sequence: Synthetic oligonucleotide
  Antisense strand to SEQ ID NO: 887496
ucucccaccuggcauaauu

SEQ ID NO: 887498 - RNA, 19 nt, Artificial Sequence
  Description of Artificial Sequence: Synthetic oligonucleotide
  Sense strand starting at position 2921 of SEQ ID NO: 588758
ggguccaguuguccaaaga

SEQ ID NO: 887499 - RNA, 19 nt, Artificial Sequence
  Description of Artificial Sequence: Synthetic oligonucleotide
  Antisense strand to SEQ ID NO: 887498
ucuuuggacaacuggaccc

SEQ ID NO: 887500 - RNA, 19 nt, Artificial Sequence
  Description of Artificial Sequence: Synthetic oligonucleotide
  Sense strand starting at position 2922 of SEQ ID NO: 588758
gguccaguuguccaaagaa

SEQ ID NO: 887501 - RNA, 19 nt, Artificial Sequence
  Description of Artificial Sequence: Synthetic oligonucleotide
  Antisense strand to SEQ ID NO: 887500
uucuuuggacaacuggacc

SEQ ID NO: 887502 - RNA, 19 nt, Artificial Sequence
  Description of Artificial Sequence: Synthetic oligonucleotide
  Sense strand starting at position 2947 of SEQ ID NO: 588758
aguuucuggugagaagaaa

SEQ ID NO: 887503 - RNA, 19 nt, Artificial Sequence
  Description of Artificial Sequence: Synthetic oligonucleotide
  Antisense strand to SEQ ID NO: 887502
uuucuucucaccagaaacu

SEQ ID NO: 887504 - RNA, 19 nt, Artificial Sequence
  Description of Artificial Sequence: Synthetic oligonucleotide
  Sense strand starting at position 2967 of SEQ ID NO: 588758
gagagacgggcuugaauga

SEQ ID NO: 887505 - RNA, 19 nt, Artificial Sequence
  Description of Artificial Sequence: Synthetic oligonucleotide
  Antisense strand to SEQ ID NO: 887504
ucauucaagcccgucucuc

SEQ ID NO: 887506 - RNA, 19 nt, Artificial Sequence
  Description of Artificial Sequence: Synthetic oligonucleotide
  Sense strand starting at position 3170 of SEQ ID NO: 588758
cuuccauagcgugaccuua

SEQ ID NO: 887507 - RNA, 19 nt, Artificial Sequence
  Description of Artificial Sequence: Synthetic oligonucleotide
  Antisense strand to SEQ ID NO: 887506
uaaggucacgcuauggaag

SEQ ID NO: 887508 - RNA, 19 nt, Artificial Sequence
  Description of Artificial Sequence: Synthetic oligonucleotide
  Sense strand starting at position 3172 of SEQ ID NO: 588758
uccauagcgugaccuuaaa

SEQ ID NO: 887509 - RNA, 19 nt, Artificial Sequence
  Description of Artificial Sequence: Synthetic oligonucleotide
  Antisense strand to SEQ ID NO: 887508
uuuaaggucacgcuaugga

SEQ ID NO: 887510 - RNA, 19 nt, Artificial Sequence
  Description of Artificial Sequence: Synthetic oligonucleotide
  Sense strand starting at position 3248 of SEQ ID NO: 588758
aucagauggucucugagga

SEQ ID NO: 887511 - RNA, 19 nt, Artificial Sequence
  Description of Artificial Sequence: Synthetic oligonucleotide
  Antisense strand to SEQ ID NO: 887510
uccucagagaccaucugau

SEQ ID NO: 887512 - RNA, 19 nt, Artificial Sequence
  Description of Artificial Sequence: Synthetic oligonucleotide
  Sense strand starting at position 3440 of SEQ ID NO: 588758
gaagguagaugagagaaau

SEQ ID NO: 887513 - RNA, 19 nt, Artificial Sequence
  Description of Artificial Sequence: Synthetic oligonucleotide
  Antisense strand to SEQ ID NO: 887512
auuucucucaucuaccuuc

SEQ ID NO: 887514 - RNA, 19 nt, Artificial Sequence
  Description of Artificial Sequence: Synthetic oligonucleotide
  Sense strand starting at position 3462 of SEQ ID NO: 588758
ggcagaagugccagggcuu

SEQ ID NO: 887515 - RNA, 19 nt, Artificial Sequence
  Description of Artificial Sequence: Synthetic oligonucleotide
  Antisense strand to SEQ ID NO: 887514
aagcccuggcacuucugcc

SEQ ID NO: 887516 - RNA, 19 nt, Artificial Sequence
  Description of Artificial Sequence: Synthetic oligonucleotide
  Sense strand starting at position 3474 of SEQ ID NO: 588758
agggcuuggugaccgauua

SEQ ID NO: 887517 - RNA, 19 nt, Artificial Sequence
  Description of Artificial Sequence: Synthetic oligonucleotide
  Antisense strand to SEQ ID NO: 887516
uaaucggucaccaagcccu

SEQ ID NO: 887518 - RNA, 19 nt, Artificial Sequence
  Description of Artificial Sequence: Synthetic oligonucleotide
  Sense strand starting at position 3487 of SEQ ID NO: 588758
cgauuagcacuagagcuua

SEQ ID NO: 887519 - RNA, 19 nt, Artificial Sequence
  Description of Artificial Sequence: Synthetic oligonucleotide
  Antisense strand to SEQ ID NO: 887518
uaagcucuagugcuaaucg

SEQ ID NO: 887520 - RNA, 19 nt, Artificial Sequence
  Description of Artificial Sequence: Synthetic oligonucleotide
  Sense strand starting at position 3539 of SEQ ID NO: 588758
uggcucaaugcugguggua

SEQ ID NO: 887521 - RNA, 19 nt, Artificial Sequence
  Description of Artificial Sequence: Synthetic oligonucleotide
  Antisense strand to SEQ ID NO: 887520
uaccaccagcauugagcca

SEQ ID NO: 887522 - RNA, 19 nt, Artificial Sequence
  Description of Artificial Sequence: Synthetic oligonucleotide
  Sense strand starting at position 3602 of SEQ ID NO: 588758
uugggcuucuuguauuuga

SEQ ID NO: 887523 - RNA, 19 nt, Artificial Sequence
  Description of Artificial Sequence: Synthetic oligonucleotide
  Antisense strand to SEQ ID NO: 887522
ucaaauacaagaagcccaa

SEQ ID NO: 887524 - RNA, 19 nt, Artificial Sequence
  Description of Artificial Sequence: Synthetic oligonucleotide
  Sense strand starting at position 3798 of SEQ ID NO: 588758
acugcaaagcuauagucua

SEQ ID NO: 887525 - RNA, 19 nt, Artificial Sequence
  Description of Artificial Sequence: Synthetic oligonucleotide
  Antisense strand to SEQ ID NO: 887524
uagacuauagcuuugcagu

SEQ ID NO: 887526 - RNA, 19 nt, Artificial Sequence
  Description of Artificial Sequence: Synthetic oligonucleotide
  Sense strand starting at position 3811 of SEQ ID NO: 588758
agucuaaaugccuaggacu

SEQ ID NO: 887527 - RNA, 19 nt, Artificial Sequence
  Description of Artificial Sequence: Synthetic oligonucleotide
  Antisense strand to SEQ ID NO: 887526
aguccuaggcauuuagacu

SEQ ID NO: 887528 - RNA, 19 nt, Artificial Sequence
  Description of Artificial Sequence: Synthetic oligonucleotide
  Sense strand starting at position 3849 of SEQ ID NO: 588758
ucaagauugugagcuucca

SEQ ID NO: 887529 - RNA, 19 nt, Artificial Sequence
  Description of Artificial Sequence: Synthetic oligonucleotide
  Antisense strand to SEQ ID NO: 887528
uggaagcucacaaucuuga

SEQ ID NO: 887530 - RNA, 19 nt, Artificial Sequence
  Description of Artificial Sequence: Synthetic oligonucleotide
  Sense strand starting at position 61 of SEQ ID NO: 588759
uuuagucagcaauaaagca

SEQ ID NO: 887531 - RNA, 19 nt, Artificial Sequence
  Description of Artificial Sequence: Synthetic oligonucleotide
  Antisense strand to SEQ ID NO: 887530
ugcuuuauugcugacuaaa

SEQ ID NO: 887532 - RNA, 19 nt, Artificial Sequence
  Description of Artificial Sequence: Synthetic oligonucleotide
  Sense strand starting at position 117 of SEQ ID NO: 588759
uuucuugucugacuaugaa

SEQ ID NO: 887533 - RNA, 19 nt, Artificial Sequence
  Description of Artificial Sequence: Synthetic oligonucleotide
  Antisense strand to SEQ ID NO: 887532
uucauagucagacaagaaa

SEQ ID NO: 887534 - RNA, 19 nt, Artificial Sequence
  Description of Artificial Sequence: Synthetic oligonucleotide
  Sense strand starting at position 177 of SEQ ID NO: 588759
gaauaugaccuguggugaa

SEQ ID NO: 887535 - RNA, 19 nt, Artificial Sequence
  Description of Artificial Sequence: Synthetic oligonucleotide
  Antisense strand to SEQ ID NO: 887534
uucaccacaggucauauuc

SEQ ID NO: 887536 - RNA, 19 nt, Artificial Sequence
  Description of Artificial Sequence: Synthetic oligonucleotide
  Sense strand starting at position 277 of SEQ ID NO: 588759
ggauaagccaguugacaaa

SEQ ID NO: 887537 - RNA, 19 nt, Artificial Sequence
  Description of Artificial Sequence: Synthetic oligonucleotide
  Antisense strand to SEQ ID NO: 887536
uuugucaacuggcuuaucc

SEQ ID NO: 887538 - RNA, 19 nt, Artificial Sequence
  Description of Artificial Sequence: Synthetic oligonucleotide
  Sense strand starting at position 353 of SEQ ID NO: 588759
agugaauuccucuaaguau

SEQ ID NO: 887539 - RNA, 19 nt, Artificial Sequence
  Description of Artificial Sequence: Synthetic oligonucleotide
  Antisense strand to SEQ ID NO: 887538
auacuuagaggaauucacu

SEQ ID NO: 887540 - RNA, 19 nt, Artificial Sequence
  Description of Artificial Sequence: Synthetic oligonucleotide
  Sense strand starting at position 713 of SEQ ID NO: 588759
ucugaaauuuaagagcuau

SEQ ID NO: 887541 - RNA, 19 nt, Artificial Sequence
  Description of Artificial Sequence: Synthetic oligonucleotide
  Antisense strand to SEQ ID NO: 887540
auagcucuuaaauuucaga

SEQ ID NO: 887542 - RNA, 19 nt, Artificial Sequence
  Description of Artificial Sequence: Synthetic oligonucleotide
  Sense strand starting at position 872 of SEQ ID NO: 588759
gccagaacugacuggcaaa

SEQ ID NO: 887543 - RNA, 19 nt, Artificial Sequence
  Description of Artificial Sequence: Synthetic oligonucleotide
  Antisense strand to SEQ ID NO: 887542
uuugccagucaguucuggc

SEQ ID NO: 887544 - RNA, 19 nt, Artificial Sequence
  Description of Artificial Sequence: Synthetic oligonucleotide
  Sense strand starting at position 1255 of SEQ ID NO: 588759
uuuaucucaggaugguaga

SEQ ID NO: 887545 - RNA, 19 nt, Artificial Sequence
  Description of Artificial Sequence: Synthetic oligonucleotide
  Antisense strand to SEQ ID NO: 887544
ucuaccauccugagauaaa

SEQ ID NO: 887546 - RNA, 19 nt, Artificial Sequence
  Description of Artificial Sequence: Synthetic oligonucleotide
  Sense strand starting at position 1429 of SEQ ID NO: 588759
uuuacaagagaaugaguuu

SEQ ID NO: 887547 - RNA, 19 nt, Artificial Sequence
  Description of Artificial Sequence: Synthetic oligonucleotide
  Antisense strand to SEQ ID NO: 887546
aaacucauucucuuguaaa

SEQ ID NO: 887548 - RNA, 19 nt, Artificial Sequence
  Description of Artificial Sequence: Synthetic oligonucleotide
  Sense strand starting at position 1619 of SEQ ID NO: 588759
uauacauagguauggcaau

SEQ ID NO: 887549 - RNA, 19 nt, Artificial Sequence
  Description of Artificial Sequence: Synthetic oligonucleotide
  Antisense strand to SEQ ID NO: 887548
auugccauaccuauguaua

SEQ ID NO: 887550 - RNA, 19 nt, Artificial Sequence
  Description of Artificial Sequence: Synthetic oligonucleotide
  Sense strand starting at position 2312 of SEQ ID NO: 588759
acaaccugucucuggauau

SEQ ID NO: 887551 - RNA, 19 nt, Artificial Sequence
  Description of Artificial Sequence: Synthetic oligonucleotide
  Antisense strand to SEQ ID NO: 887550
auauccagagacagguugu

SEQ ID NO: 887552 - RNA, 19 nt, Artificial Sequence
  Description of Artificial Sequence: Synthetic oligonucleotide
  Sense strand starting at position 2384 of SEQ ID NO: 588759
auuguaauaaagugggaua

SEQ ID NO: 887553 - RNA, 19 nt, Artificial Sequence
  Description of Artificial Sequence: Synthetic oligonucleotide
  Antisense strand to SEQ ID NO: 887552
uaucccacuuuauuacaau

SEQ ID NO: 887554 - RNA, 19 nt, Artificial Sequence
  Description of Artificial Sequence: Synthetic oligonucleotide
  Sense strand starting at position 2385 of SEQ ID NO: 588759
uuguaauaaagugggauau

SEQ ID NO: 887555 - RNA, 19 nt, Artificial Sequence
  Description of Artificial Sequence: Synthetic oligonucleotide
  Antisense strand to SEQ ID NO: 887554
auaucccacuuuauuacaa

SEQ ID NO: 887556 - RNA, 19 nt, Artificial Sequence
  Description of Artificial Sequence: Synthetic oligonucleotide
  Sense strand starting at position 2691 of SEQ ID NO: 588759
caauaaugucuuggcagag

SEQ ID NO: 887557 - RNA, 19 nt, Artificial Sequence
  Description of Artificial Sequence: Synthetic oligonucleotide
  Antisense strand to SEQ ID NO: 887556
cucugccaagacauuauug

SEQ ID NO: 887558 - RNA, 19 nt, Artificial Sequence
  Description of Artificial Sequence: Synthetic oligonucleotide
  Sense strand starting at position 2930 of SEQ ID NO: 588759
acuguacugcuacagauaa

SEQ ID NO: 887559 - RNA, 19 nt, Artificial Sequence
  Description of Artificial Sequence: Synthetic oligonucleotide
  Antisense strand to SEQ ID NO: 887558
uuaucuguagcaguacagu

SEQ ID NO: 887560 - RNA, 19 nt, Artificial Sequence
  Description of Artificial Sequence: Synthetic oligonucleotide
  Sense strand starting at position 3070 of SEQ ID NO: 588759
ccgauuugguguccaaauu

SEQ ID NO: 887561 - RNA, 19 nt, Artificial Sequence
  Description of Artificial Sequence: Synthetic oligonucleotide
  Antisense strand to SEQ ID NO: 887560
aauuuggacaccaaaucgg

SEQ ID NO: 887562 - RNA, 19 nt, Artificial Sequence
  Description of Artificial Sequence: Synthetic oligonucleotide
  Sense strand starting at position 3110 of SEQ ID NO: 588759
ugccuuuguuauuuagaau

SEQ ID NO: 887563 - RNA, 19 nt, Artificial Sequence
  Description of Artificial Sequence: Synthetic oligonucleotide
  Antisense strand to SEQ ID NO: 887562
auucuaaauaacaaaggca

SEQ ID NO: 887564 - RNA, 19 nt, Artificial Sequence
  Description of Artificial Sequence: Synthetic oligonucleotide
  Sense strand starting at position 3125 of SEQ ID NO: 588759
gaaugcagccauggaagaa

SEQ ID NO: 887565 - RNA, 19 nt, Artificial Sequence
  Description of Artificial Sequence: Synthetic oligonucleotide
  Antisense strand to SEQ ID NO: 887564
uucuuccauggcugcauuc

SEQ ID NO: 887566 - RNA, 19 nt, Artificial Sequence
  Description of Artificial Sequence: Synthetic oligonucleotide
  Sense strand starting at position 3152 of SEQ ID NO: 588759
uuuccugucggaggaauua

SEQ ID NO: 887567 - RNA, 19 nt, Artificial Sequence
  Description of Artificial Sequence: Synthetic oligonucleotide
  Antisense strand to SEQ ID NO: 887566
uaauuccuccgacaggaaa

SEQ ID NO: 887568 - RNA, 19 nt, Artificial Sequence
  Description of Artificial Sequence: Synthetic oligonucleotide
  Sense strand starting at position 3232 of SEQ ID NO: 588759
cacagaggucugcaugaca

SEQ ID NO: 887569 - RNA, 19 nt, Artificial Sequence
  Description of Artificial Sequence: Synthetic oligonucleotide
  Antisense strand to SEQ ID NO: 887568
ugucaugcagaccucugug

SEQ ID NO: 887570 - RNA, 19 nt, Artificial Sequence
  Description of Artificial Sequence: Synthetic oligonucleotide
  Sense strand starting at position 3295 of SEQ ID NO: 588759
ggagcuguguauuugcuau

SEQ ID NO: 887571 - RNA, 19 nt, Artificial Sequence
  Description of Artificial Sequence: Synthetic oligonucleotide
  Antisense strand to SEQ ID NO: 887570
auagcaaauacacagcucc

SEQ ID NO: 887572 - RNA, 19 nt, Artificial Sequence
  Description of Artificial Sequence: Synthetic oligonucleotide
  Sense strand starting at position 3302 of SEQ ID NO: 588759
uguauuugcuaucugugua

SEQ ID NO: 887573 - RNA, 19 nt, Artificial Sequence
  Description of Artificial Sequence: Synthetic oligonucleotide
  Antisense strand to SEQ ID NO: 887572
uacacagauagcaaauaca

SEQ ID NO: 887574 - RNA, 19 nt, Artificial Sequence
  Description of Artificial Sequence: Synthetic oligonucleotide
  Sense strand starting at position 3303 of SEQ ID NO: 588759
guauuugcuaucuguguaa

SEQ ID NO: 887575 - RNA, 19 nt, Artificial Sequence
  Description of Artificial Sequence: Synthetic oligonucleotide
  Antisense strand to SEQ ID NO: 887574
uuacacagauagcaaauac

SEQ ID NO: 887576 - RNA, 19 nt, Artificial Sequence
  Description of Artificial Sequence: Synthetic oligonucleotide
  Sense strand starting at position 3305 of SEQ ID NO: 588759
auuugcuaucuguguaaga

SEQ ID NO: 887577 - RNA, 19 nt, Artificial Sequence
  Description of Artificial Sequence: Synthetic oligonucleotide
  Antisense strand to SEQ ID NO: 887576
ucuuacacagauagcaaau

SEQ ID NO: 887578 - RNA, 19 nt, Artificial Sequence
  Description of Artificial Sequence: Synthetic oligonucleotide
  Sense strand starting at position 3307 of SEQ ID NO: 588759
uugcuaucuguguaagagg

SEQ ID NO: 887579 - RNA, 19 nt, Artificial Sequence
  Description of Artificial Sequence: Synthetic oligonucleotide
  Antisense strand to SEQ ID NO: 887578
ccucuuacacagauagcaa

SEQ ID NO: 887580 - RNA, 19 nt, Artificial Sequence
  Description of Artificial Sequence: Synthetic oligonucleotide
  Sense strand starting at position 3376 of SEQ ID NO: 588759
ccagaauguuaacuuagcu

SEQ ID NO: 887581 - RNA, 19 nt, Artificial Sequence
  Description of Artificial Sequence: Synthetic oligonucleotide
  Antisense strand to SEQ ID NO: 887580
agcuaaguuaacauucugg

SEQ ID NO: 887582 - RNA, 19 nt, Artificial Sequence
  Description of Artificial Sequence: Synthetic oligonucleotide
  Sense strand starting at position 3410 of SEQ ID NO: 588759
uggugagcucugcagaaac

SEQ ID NO: 887583 - RNA, 19 nt, Artificial Sequence
  Description of Artificial Sequence: Synthetic oligonucleotide
  Antisense strand to SEQ ID NO: 887582
guuucugcagagcucacca

SEQ ID NO: 887584 - RNA, 19 nt, Artificial Sequence
  Description of Artificial Sequence: Synthetic oligonucleotide
  Sense strand starting at position 3412 of SEQ ID NO: 588759
gugagcucugcagaaacaa

SEQ ID NO: 887585 - RNA, 19 nt, Artificial Sequence
  Description of Artificial Sequence: Synthetic oligonucleotide
  Antisense strand to SEQ ID NO: 887584
uuguuucugcagagcucac

SEQ ID NO: 887586 - RNA, 19 nt, Artificial Sequence
  Description of Artificial Sequence: Synthetic oligonucleotide
  Sense strand starting at position 3575 of SEQ ID NO: 588759
ugguuuauagaucaccuca

SEQ ID NO: 887587 - RNA, 19 nt, Artificial Sequence
  Description of Artificial Sequence: Synthetic oligonucleotide
  Antisense strand to SEQ ID NO: 887586
ugaggugaucuauaaacca

SEQ ID NO: 887588 - RNA, 19 nt, Artificial Sequence
  Description of Artificial Sequence: Synthetic oligonucleotide
  Sense strand starting at position 3577 of SEQ ID NO: 588759
guuuauagaucaccucaag

SEQ ID NO: 887589 - RNA, 19 nt, Artificial Sequence
  Description of Artificial Sequence: Synthetic oligonucleotide
  Antisense strand to SEQ ID NO: 887588
cuugaggugaucuauaaac

SEQ ID NO: 887590 - RNA, 19 nt, Artificial Sequence
  Description of Artificial Sequence: Synthetic oligonucleotide
  Sense strand starting at position 3592 of SEQ ID NO: 588759
caagaauaaucucuguggu

SEQ ID NO: 887591 - RNA, 19 nt, Artificial Sequence
  Description of Artificial Sequence: Synthetic oligonucleotide
  Antisense strand to SEQ ID NO: 887590
accacagagauuauucuug

SEQ ID NO: 887592 - RNA, 19 nt, Artificial Sequence
  Description of Artificial Sequence: Synthetic oligonucleotide
  Sense strand starting at position 3593 of SEQ ID NO: 588759
aagaauaaucucuguggug

SEQ ID NO: 887593 - RNA, 19 nt, Artificial Sequence
  Description of Artificial Sequence: Synthetic oligonucleotide
  Antisense strand to SEQ ID NO: 887592
caccacagagauuauucuu

SEQ ID NO: 887594 - RNA, 19 nt, Artificial Sequence
  Description of Artificial Sequence: Synthetic oligonucleotide
  Sense strand starting at position 3594 of SEQ ID NO: 588759
agaauaaucucugugguga

SEQ ID NO: 887595 - RNA, 19 nt, Artificial Sequence
  Description of Artificial Sequence: Synthetic oligonucleotide
  Antisense strand to SEQ ID NO: 887594
ucaccacagagauuauucu

SEQ ID NO: 887596 - RNA, 19 nt, Artificial Sequence
  Description of Artificial Sequence: Synthetic oligonucleotide
  Sense strand starting at position 3595 of SEQ ID NO: 588759
gaauaaucucuguggugaa

SEQ ID NO: 887597 - RNA, 19 nt, Artificial Sequence
  Description of Artificial Sequence: Synthetic oligonucleotide
  Antisense strand to SEQ ID NO: 887596
uucaccacagagauuauuc

SEQ ID NO: 887598 - RNA, 19 nt, Artificial Sequence
  Description of Artificial Sequence: Synthetic oligonucleotide
  Sense strand starting at position 3599 of SEQ ID NO: 588759
aaucucuguggugaaaucu

SEQ ID NO: 887599 - RNA, 19 nt, Artificial Sequence
  Description of Artificial Sequence: Synthetic oligonucleotide
  Antisense strand to SEQ ID NO: 887598
agauuucaccacagagauu

SEQ ID NO: 887600 - RNA, 19 nt, Artificial Sequence
  Description of Artificial Sequence: Synthetic oligonucleotide
  Sense strand starting at position 3607 of SEQ ID NO: 588759
uggugaaaucuugagcccu

SEQ ID NO: 887601 - RNA, 19 nt, Artificial Sequence
  Description of Artificial Sequence: Synthetic oligonucleotide
  Antisense strand to SEQ ID NO: 887600
agggcucaagauuucacca

SEQ ID NO: 887602 - RNA, 19 nt, Artificial Sequence
  Description of Artificial Sequence: Synthetic oligonucleotide
  Sense strand starting at position 3690 of SEQ ID NO: 588759
ugugucaaugucuaaggaa

SEQ ID NO: 887603 - RNA, 19 nt, Artificial Sequence
  Description of Artificial Sequence: Synthetic oligonucleotide
  Antisense strand to SEQ ID NO: 887602
uuccuuagacauugacaca

SEQ ID NO: 887604 - RNA, 19 nt, Artificial Sequence
  Description of Artificial Sequence: Synthetic oligonucleotide
  Sense strand starting at position 3727 of SEQ ID NO: 588759
aggauucugcaaggugaaa

SEQ ID NO: 887605 - RNA, 19 nt, Artificial Sequence
  Description of Artificial Sequence: Synthetic oligonucleotide
  Antisense strand to SEQ ID NO: 887604
uuucaccuugcagaauccu

SEQ ID NO: 887606 - RNA, 19 nt, Artificial Sequence
  Description of Artificial Sequence: Synthetic oligonucleotide
  Sense strand starting at position 3762 of SEQ ID NO: 588759
gcuugcucaguguucccaa

SEQ ID NO: 887607 - RNA, 19 nt, Artificial Sequence
  Description of Artificial Sequence: Synthetic oligonucleotide
  Antisense strand to SEQ ID NO: 887606
uugggaacacugagcaagc

SEQ ID NO: 887608 - RNA, 19 nt, Artificial Sequence
  Description of Artificial Sequence: Synthetic oligonucleotide
  Sense strand starting at position 3769 of SEQ ID NO: 588759
caguguucccaacaaugag

SEQ ID NO: 887609 - RNA, 19 nt, Artificial Sequence
  Description of Artificial Sequence: Synthetic oligonucleotide
  Antisense strand to SEQ ID NO: 887608
cucauuguugggaacacug

SEQ ID NO: 887610 - RNA, 19 nt, Artificial Sequence
  Description of Artificial Sequence: Synthetic oligonucleotide
  Sense strand starting at position 174 of SEQ ID NO: 588760
ggaucagaauaucacagaa

SEQ ID NO: 887611 - RNA, 19 nt, Artificial Sequence
  Description of Artificial Sequence: Synthetic oligonucleotide
  Antisense strand to SEQ ID NO: 887610
uucugugauauucugaucc

SEQ ID NO: 887612 - RNA, 19 nt, Artificial Sequence
  Description of Artificial Sequence: Synthetic oligonucleotide
  Sense strand starting at position 317 of SEQ ID NO: 588760
cuugaauggucacuugucu

SEQ ID NO: 887613 - RNA, 19 nt, Artificial Sequence
  Description of Artificial Sequence: Synthetic oligonucleotide
  Antisense strand to SEQ ID NO: 887612
agacaagugaccauucaag

SEQ ID NO: 887614 - RNA, 19 nt, Artificial Sequence
  Description of Artificial Sequence: Synthetic oligonucleotide
  Sense strand starting at position 321 of SEQ ID NO: 588760
aauggucacuugucuggaa

SEQ ID NO: 887615 - RNA, 19 nt, Artificial Sequence
  Description of Artificial Sequence: Synthetic oligonucleotide
  Antisense strand to SEQ ID NO: 887614
uuccagacaagugaccauu

SEQ ID NO: 887616 - RNA, 19 nt, Artificial Sequence
  Description of Artificial Sequence: Synthetic oligonucleotide
  Sense strand starting at position 322 of SEQ ID NO: 588760
auggucacuugucuggaaa

SEQ ID NO: 887617 - RNA, 19 nt, Artificial Sequence
  Description of Artificial Sequence: Synthetic oligonucleotide
  Antisense strand to SEQ ID NO: 887616
uuuccagacaagugaccau

SEQ ID NO: 887618 - RNA, 19 nt, Artificial Sequence
  Description of Artificial Sequence: Synthetic oligonucleotide
  Sense strand starting at position 353 of SEQ ID NO: 588760
cucuguuugggaggagaaa

SEQ ID NO: 887619 - RNA, 19 nt, Artificial Sequence
  Description of Artificial Sequence: Synthetic oligonucleotide
  Antisense strand to SEQ ID NO: 887618
uuucuccucccaaacagag

SEQ ID NO: 887620 - RNA, 19 nt, Artificial Sequence
  Description of Artificial Sequence: Synthetic oligonucleotide
  Sense strand starting at position 394 of SEQ ID NO: 588760
ccacgaagacuuugggauu

SEQ ID NO: 887621 - RNA, 19 nt, Artificial Sequence
  Description of Artificial Sequence: Synthetic oligonucleotide
  Antisense strand to SEQ ID NO: 887620
aaucccaaagucuucgugg

SEQ ID NO: 887622 - RNA, 19 nt, Artificial Sequence
  Description of Artificial Sequence: Synthetic oligonucleotide
  Sense strand starting at position 451 of SEQ ID NO: 588760
gucccugggucaccaauau

SEQ ID NO: 887623 - RNA, 19 nt, Artificial Sequence
  Description of Artificial Sequence: Synthetic oligonucleotide
  Antisense strand to SEQ ID NO: 887622
auauuggugacccagggac

SEQ ID NO: 887624 - RNA, 19 nt, Artificial Sequence
  Description of Artificial Sequence: Synthetic oligonucleotide
  Sense strand starting at position 477 of SEQ ID NO: 588760
auccuagaagggugugaaa

SEQ ID NO: 887625 - RNA, 19 nt, Artificial Sequence
  Description of Artificial Sequence: Synthetic oligonucleotide
  Antisense strand to SEQ ID NO: 887624
uuucacacccuucuaggau

SEQ ID NO: 887626 - RNA, 19 nt, Artificial Sequence
  Description of Artificial Sequence: Synthetic oligonucleotide
  Sense strand starting at position 540 of SEQ ID NO: 588760
uggagugggagcugagauu

SEQ ID NO: 887627 - RNA, 19 nt, Artificial Sequence
  Description of Artificial Sequence: Synthetic oligonucleotide
  Antisense strand to SEQ ID NO: 887626
aaucucagcucccacucca

SEQ ID NO: 887628 - RNA, 19 nt, Artificial Sequence
  Description of Artificial Sequence: Synthetic oligonucleotide
  Sense strand starting at position 583 of SEQ ID NO: 588760
uggaauucuugugcacuaa

SEQ ID NO: 887629 - RNA, 19 nt, Artificial Sequence
  Description of Artificial Sequence: Synthetic oligonucleotide
  Antisense strand to SEQ ID NO: 887628
uuagugcacaagaauucca

SEQ ID NO: 887630 - RNA, 19 nt, Artificial Sequence
  Description of Artificial Sequence: Synthetic oligonucleotide
  Sense strand starting at position 584 of SEQ ID NO: 588760
ggaauucuugugcacuaag

SEQ ID NO: 887631 - RNA, 19 nt, Artificial Sequence
  Description of Artificial Sequence: Synthetic oligonucleotide
  Antisense strand to SEQ ID NO: 887630
cuuagugcacaagaauucc

SEQ ID NO: 887632 - RNA, 19 nt, Artificial Sequence
  Description of Artificial Sequence: Synthetic oligonucleotide
  Sense strand starting at position 705 of SEQ ID NO: 588760
aauagcucugacugugaca

SEQ ID NO: 887633 - RNA, 19 nt, Artificial Sequence
  Description of Artificial Sequence: Synthetic oligonucleotide
  Antisense strand to SEQ ID NO: 887632
ugucacagucagagcuauu

SEQ ID NO: 887634 - RNA, 19 nt, Artificial Sequence
  Description of Artificial Sequence: Synthetic oligonucleotide
  Sense strand starting at position 773 of SEQ ID NO: 588760
cacuuuguuguggagauca

SEQ ID NO: 887635 - RNA, 19 nt, Artificial Sequence
  Description of Artificial Sequence: Synthetic oligonucleotide
  Antisense strand to SEQ ID NO: 887634
ugaucuccacaacaaagug

SEQ ID NO: 887636 - RNA, 19 nt, Artificial Sequence
  Description of Artificial Sequence: Synthetic oligonucleotide
  Sense strand starting at position 775 of SEQ ID NO: 588760
cuuuguuguggagaucaaa

SEQ ID NO: 887637 - RNA, 19 nt, Artificial Sequence
  Description of Artificial Sequence: Synthetic oligonucleotide
  Antisense strand to SEQ ID NO: 887636
uuugaucuccacaacaaag

SEQ ID NO: 887638 - RNA, 19 nt, Artificial Sequence
  Description of Artificial Sequence: Synthetic oligonucleotide
  Sense strand starting at position 881 of SEQ ID NO: 588760
agaugaccucucggaguuu

SEQ ID NO: 887639 - RNA, 19 nt, Artificial Sequence
  Description of Artificial Sequence: Synthetic oligonucleotide
  Antisense strand to SEQ ID NO: 887638
aaacuccgagaggucaucu

SEQ ID NO: 887640 - RNA, 19 nt, Artificial Sequence
  Description of Artificial Sequence: Synthetic oligonucleotide
  Sense strand starting at position 949 of SEQ ID NO: 588760
auaacuaucgcaggaucau

SEQ ID NO: 887641 - RNA, 19 nt, Artificial Sequence
  Description of Artificial Sequence: Synthetic oligonucleotide
  Antisense strand to SEQ ID NO: 887640
augauccugcgauaguuau

SEQ ID NO: 887642 - RNA, 19 nt, Artificial Sequence
  Description of Artificial Sequence: Synthetic oligonucleotide
  Sense strand starting at position 960 of SEQ ID NO: 588760
aggaucaucugcuuaucca

SEQ ID NO: 887643 - RNA, 19 nt, Artificial Sequence
  Description of Artificial Sequence: Synthetic oligonucleotide
  Antisense strand to SEQ ID NO: 887642
uggauaagcagaugauccu

SEQ ID NO: 887644 - RNA, 19 nt, Artificial Sequence
  Description of Artificial Sequence: Synthetic oligonucleotide
  Sense strand starting at position 1085 of SEQ ID NO: 588760
augacauagguauaacgua

SEQ ID NO: 887645 - RNA, 19 nt, Artificial Sequence
  Description of Artificial Sequence: Synthetic oligonucleotide
  Antisense strand to SEQ ID NO: 887644
uacguuauaccuaugucau

SEQ ID NO: 887646 - RNA, 19 nt, Artificial Sequence
  Description of Artificial Sequence: Synthetic oligonucleotide
  Sense strand starting at position 1180 of SEQ ID NO: 588760
ugagcaauaucacccaugu

SEQ ID NO: 887647 - RNA, 19 nt, Artificial Sequence
  Description of Artificial Sequence: Synthetic oligonucleotide
  Antisense strand to SEQ ID NO: 887646
acaugggugauauugcuca

SEQ ID NO: 887648 - RNA, 19 nt, Artificial Sequence
  Description of Artificial Sequence: Synthetic oligonucleotide
  Sense strand starting at position 1204 of SEQ ID NO: 588760
augcauguccgagagauaa

SEQ ID NO: 887649 - RNA, 19 nt, Artificial Sequence
  Description of Artificial Sequence: Synthetic oligonucleotide
  Antisense strand to SEQ ID NO: 887648
uuaucucucggacaugcau

SEQ ID NO: 887650 - RNA, 19 nt, Artificial Sequence
  Description of Artificial Sequence: Synthetic oligonucleotide
  Sense strand starting at position 1206 of SEQ ID NO: 588760
gcauguccgagagauaaau

SEQ ID NO: 887651 - RNA, 19 nt, Artificial Sequence
  Description of Artificial Sequence: Synthetic oligonucleotide
  Antisense strand to SEQ ID NO: 887650
auuuaucucucggacaugc

SEQ ID NO: 887652 - RNA, 19 nt, Artificial Sequence
  Description of Artificial Sequence: Synthetic oligonucleotide
  Sense strand starting at position 1602 of SEQ ID NO: 588760
acuuaauaucuagacguuu

SEQ ID NO: 887653 - RNA, 19 nt, Artificial Sequence
  Description of Artificial Sequence: Synthetic oligonucleotide
  Antisense strand to SEQ ID NO: 887652
aaacgucuagauauuaagu

SEQ ID NO: 887654 - RNA, 19 nt, Artificial Sequence
  Description of Artificial Sequence: Synthetic oligonucleotide
  Sense strand starting at position 2544 of SEQ ID NO: 588760
cccagauuccaguauccua

SEQ ID NO: 887655 - RNA, 19 nt, Artificial Sequence
  Description of Artificial Sequence: Synthetic oligonucleotide
  Antisense strand to SEQ ID NO: 887654
uaggauacuggaaucuggg

SEQ ID NO: 887656 - RNA, 19 nt, Artificial Sequence
  Description of Artificial Sequence: Synthetic oligonucleotide
  Sense strand starting at position 2620 of SEQ ID NO: 588760
ggucguucggcucugucau

SEQ ID NO: 887657 - RNA, 19 nt, Artificial Sequence
  Description of Artificial Sequence: Synthetic oligonucleotide
  Antisense strand to SEQ ID NO: 887656
augacagagccgaacgacc

SEQ ID NO: 887658 - RNA, 19 nt, Artificial Sequence
  Description of Artificial Sequence: Synthetic oligonucleotide
  Sense strand starting at position 2773 of SEQ ID NO: 588760
acucgaauuuaguaucaug

SEQ ID NO: 887659 - RNA, 19 nt, Artificial Sequence
  Description of Artificial Sequence: Synthetic oligonucleotide
  Antisense strand to SEQ ID NO: 887658
caugauacuaaauucgagu

SEQ ID NO: 887660 - RNA, 19 nt, Artificial Sequence
  Description of Artificial Sequence: Synthetic oligonucleotide
  Sense strand starting at position 2804 of SEQ ID NO: 588760
uggaaacuguaaucuuaac

SEQ ID NO: 887661 - RNA, 19 nt, Artificial Sequence
  Description of Artificial Sequence: Synthetic oligonucleotide
  Antisense strand to SEQ ID NO: 887660
guuaagauuacaguuucca

SEQ ID NO: 887662 - RNA, 19 nt, Artificial Sequence
  Description of Artificial Sequence: Synthetic oligonucleotide
  Sense strand starting at position 2810 of SEQ ID NO: 588760
cuguaaucuuaacuuggca

SEQ ID NO: 887663 - RNA, 19 nt, Artificial Sequence
  Description of Artificial Sequence: Synthetic oligonucleotide
  Antisense strand to SEQ ID NO: 887662
ugccaaguuaagauuacag

SEQ ID NO: 887664 - RNA, 19 nt, Artificial Sequence
  Description of Artificial Sequence: Synthetic oligonucleotide
  Sense strand starting at position 2826 of SEQ ID NO: 588760
gcacauugaugcccuuaaa

SEQ ID NO: 887665 - RNA, 19 nt, Artificial Sequence
  Description of Artificial Sequence: Synthetic oligonucleotide
  Antisense strand to SEQ ID NO: 887664
uuuaagggcaucaaugugc

SEQ ID NO: 887666 - RNA, 19 nt, Artificial Sequence
  Description of Artificial Sequence: Synthetic oligonucleotide
  Sense strand starting at position 2934 of SEQ ID NO: 588760
ggucucauggcucaguaga

SEQ ID NO: 887667 - RNA, 19 nt, Artificial Sequence
  Description of Artificial Sequence: Synthetic oligonucleotide
  Antisense strand to SEQ ID NO: 887666
ucuacugagccaugagacc

SEQ ID NO: 887668 - RNA, 19 nt, Artificial Sequence
  Description of Artificial Sequence: Synthetic oligonucleotide
  Sense strand starting at position 2939 of SEQ ID NO: 588760
cauggcucaguagaaguaa

SEQ ID NO: 887669 - RNA, 19 nt, Artificial Sequence
  Description of Artificial Sequence: Synthetic oligonucleotide
  Antisense strand to SEQ ID NO: 887668
uuacuucuacugagccaug

SEQ ID NO: 887670 - RNA, 19 nt, Artificial Sequence
  Description of Artificial Sequence: Synthetic oligonucleotide
  Sense strand starting at position 2996 of SEQ ID NO: 588760
auacauacucuguggcaga

SEQ ID NO: 887671 - RNA, 19 nt, Artificial Sequence
  Description of Artificial Sequence: Synthetic oligonucleotide
  Antisense strand to SEQ ID NO: 887670
ucugccacagaguauguau

SEQ ID NO: 887672 - RNA, 19 nt, Artificial Sequence
  Description of Artificial Sequence: Synthetic oligonucleotide
  Sense strand starting at position 3134 of SEQ ID NO: 588760
ggcuguuagauugaccaga

SEQ ID NO: 887673 - RNA, 19 nt, Artificial Sequence
  Description of Artificial Sequence: Synthetic oligonucleotide
  Antisense strand to SEQ ID NO: 887672
ucuggucaaucuaacagcc

SEQ ID NO: 887674 - RNA, 19 nt, Artificial Sequence
  Description of Artificial Sequence: Synthetic oligonucleotide
  Sense strand starting at position 3136 of SEQ ID NO: 588760
cuguuagauugaccagaug

SEQ ID NO: 887675 - RNA, 19 nt, Artificial Sequence
  Description of Artificial Sequence: Synthetic oligonucleotide
  Antisense strand to SEQ ID NO: 887674
caucuggucaaucuaacag

SEQ ID NO: 887676 - RNA, 19 nt, Artificial Sequence
  Description of Artificial Sequence: Synthetic oligonucleotide
  Sense strand starting at position 3144 of SEQ ID NO: 588760
uugaccagauggucugaua

SEQ ID NO: 887677 - RNA, 19 nt, Artificial Sequence
  Description of Artificial Sequence: Synthetic oligonucleotide
  Antisense strand to SEQ ID NO: 887676
uaucagaccaucuggucaa

SEQ ID NO: 887678 - RNA, 19 nt, Artificial Sequence
  Description of Artificial Sequence: Synthetic oligonucleotide
  Sense strand starting at position 3190 of SEQ ID NO: 588760
uggaccuaagaauguaauu

SEQ ID NO: 887679 - RNA, 19 nt, Artificial Sequence
  Description of Artificial Sequence: Synthetic oligonucleotide
  Antisense strand to SEQ ID NO: 887678
aauuacauucuuaggucca

SEQ ID NO: 887680 - RNA, 19 nt, Artificial Sequence
  Description of Artificial Sequence: Synthetic oligonucleotide
  Sense strand starting at position 3342 of SEQ ID NO: 588760
ucuaaacaccaguauggua

SEQ ID NO: 887681 - RNA, 19 nt, Artificial Sequence
  Description of Artificial Sequence: Synthetic oligonucleotide
  Antisense strand to SEQ ID NO: 887680
uaccauacugguguuuaga

SEQ ID NO: 887682 - RNA, 19 nt, Artificial Sequence
  Description of Artificial Sequence: Synthetic oligonucleotide
  Sense strand starting at position 3421 of SEQ ID NO: 588760
ugguauuucucagcacugu

SEQ ID NO: 887683 - RNA, 19 nt, Artificial Sequence
  Description of Artificial Sequence: Synthetic oligonucleotide
  Antisense strand to SEQ ID NO: 887682
acagugcugagaaauacca

SEQ ID NO: 887684 - RNA, 19 nt, Artificial Sequence
  Description of Artificial Sequence: Synthetic oligonucleotide
  Sense strand starting at position 3432 of SEQ ID NO: 588760
agcacuguccuacagagaa

SEQ ID NO: 887685 - RNA, 19 nt, Artificial Sequence
  Description of Artificial Sequence: Synthetic oligonucleotide
  Antisense strand to SEQ ID NO: 887684
uucucuguaggacagugcu

SEQ ID NO: 887686 - RNA, 19 nt, Artificial Sequence
  Description of Artificial Sequence: Synthetic oligonucleotide
  Sense strand starting at position 3446 of SEQ ID NO: 588760
gagaacagugcccauacuu

SEQ ID NO: 887687 - RNA, 19 nt, Artificial Sequence
  Description of Artificial Sequence: Synthetic oligonucleotide
  Antisense strand to SEQ ID NO: 887686
aaguaugggcacuguucuc

SEQ ID NO: 887688 - RNA, 19 nt, Artificial Sequence
  Description of Artificial Sequence: Synthetic oligonucleotide
  Sense strand starting at position 3458 of SEQ ID NO: 588760
cauacuugggcuuguuaau

SEQ ID NO: 887689 - RNA, 19 nt, Artificial Sequence
  Description of Artificial Sequence: Synthetic oligonucleotide
  Antisense strand to SEQ ID NO: 887688
auuaacaagcccaaguaug

SEQ ID NO: 887690 - RNA, 19 nt, Artificial Sequence
  Description of Artificial Sequence: Synthetic oligonucleotide
  Sense strand starting at position 159 of SEQ ID NO: 588761
ggaucagaauaucacagaa

SEQ ID NO: 887691 - RNA, 19 nt, Artificial Sequence
  Description of Artificial Sequence: Synthetic oligonucleotide
  Antisense strand to SEQ ID NO: 887690
uucugugauauucugaucc

SEQ ID NO: 887692 - RNA, 19 nt, Artificial Sequence
  Description of Artificial Sequence: Synthetic oligonucleotide
  Sense strand starting at position 302 of SEQ ID NO: 588761
cuugaauggucacuugucu

SEQ ID NO: 887693 - RNA, 19 nt, Artificial Sequence
  Description of Artificial Sequence: Synthetic oligonucleotide
  Antisense strand to SEQ ID NO: 887692
agacaagugaccauucaag

SEQ ID NO: 887694 - RNA, 19 nt, Artificial Sequence
  Description of Artificial Sequence: Synthetic oligonucleotide
  Sense strand starting at position 306 of SEQ ID NO: 588761
aauggucacuugucuggaa

SEQ ID NO: 887695 - RNA, 19 nt, Artificial Sequence
  Description of Artificial Sequence: Synthetic oligonucleotide
  Antisense strand to SEQ ID NO: 887694
uuccagacaagugaccauu

SEQ ID NO: 887696 - RNA, 19 nt, Artificial Sequence
  Description of Artificial Sequence: Synthetic oligonucleotide
  Sense strand starting at position 307 of SEQ ID NO: 588761
auggucacuugucuggaaa

SEQ ID NO: 887697 - RNA, 19 nt, Artificial Sequence
  Description of Artificial Sequence: Synthetic oligonucleotide
  Antisense strand to SEQ ID NO: 887696
uuuccagacaagugaccau

SEQ ID NO: 887698 - RNA, 19 nt, Artificial Sequence
  Description of Artificial Sequence: Synthetic oligonucleotide
  Sense strand starting at position 338 of SEQ ID NO: 588761
cucuguuugggaggagaaa

SEQ ID NO: 887699 - RNA, 19 nt, Artificial Sequence
  Description of Artificial Sequence: Synthetic oligonucleotide
  Antisense strand to SEQ ID NO: 887698
uuucuccucccaaacagag

SEQ ID NO: 887700 - RNA, 19 nt, Artificial Sequence
  Description of Artificial Sequence: Synthetic oligonucleotide
  Sense strand starting at position 379 of SEQ ID NO: 588761
ccacgaagacuuugggauu

SEQ ID NO: 887701 - RNA, 19 nt, Artificial Sequence
  Description of Artificial Sequence: Synthetic oligonucleotide
  Antisense strand to SEQ ID NO: 887700
aaucccaaagucuucgugg

SEQ ID NO: 887702 - RNA, 19 nt, Artificial Sequence
  Description of Artificial Sequence: Synthetic oligonucleotide
  Sense strand starting at position 436 of SEQ ID NO: 588761
gucccugggucaccaauau

SEQ ID NO: 887703 - RNA, 19 nt, Artificial Sequence
  Description of Artificial Sequence: Synthetic oligonucleotide
  Antisense strand to SEQ ID NO: 887702
auauuggugacccagggac

SEQ ID NO: 887704 - RNA, 19 nt, Artificial Sequence
  Description of Artificial Sequence: Synthetic oligonucleotide
  Sense strand starting at position 462 of SEQ ID NO: 588761
auccuagaagggugugaaa

SEQ ID NO: 887705 - RNA, 19 nt, Artificial Sequence
  Description of Artificial Sequence: Synthetic oligonucleotide
  Antisense strand to SEQ ID NO: 887704
uuucacacccuucuaggau

SEQ ID NO: 887706 - RNA, 19 nt, Artificial Sequence
  Description of Artificial Sequence: Synthetic oligonucleotide
  Sense strand starting at position 525 of SEQ ID NO: 588761
uggagugggagcugagauu

SEQ ID NO: 887707 - RNA, 19 nt, Artificial Sequence
  Description of Artificial Sequence: Synthetic oligonucleotide
  Antisense strand to SEQ ID NO: 887706
aaucucagcucccacucca

SEQ ID NO: 887708 - RNA, 19 nt, Artificial Sequence
  Description of Artificial Sequence: Synthetic oligonucleotide
  Sense strand starting at position 568 of SEQ ID NO: 588761
uggaauucuugugcacuaa

SEQ ID NO: 887709 - RNA, 19 nt, Artificial Sequence
  Description of Artificial Sequence: Synthetic oligonucleotide
  Antisense strand to SEQ ID NO: 887708
uuagugcacaagaauucca

SEQ ID NO: 887710 - RNA, 19 nt, Artificial Sequence
  Description of Artificial Sequence: Synthetic oligonucleotide
  Sense strand starting at position 569 of SEQ ID NO: 588761
ggaauucuugugcacuaag

SEQ ID NO: 887711 - RNA, 19 nt, Artificial Sequence
  Description of Artificial Sequence: Synthetic oligonucleotide
  Antisense strand to SEQ ID NO: 887710
cuuagugcacaagaauucc

SEQ ID NO: 887712 - RNA, 19 nt, Artificial Sequence
  Description of Artificial Sequence: Synthetic oligonucleotide
  Sense strand starting at position 690 of SEQ ID NO: 588761
aauagcucugacugugaca

SEQ ID NO: 887713 - RNA, 19 nt, Artificial Sequence
  Description of Artificial Sequence: Synthetic oligonucleotide
  Antisense strand to SEQ ID NO: 887712
ugucacagucagagcuauu

SEQ ID NO: 887714 - RNA, 19 nt, Artificial Sequence
  Description of Artificial Sequence: Synthetic oligonucleotide
  Sense strand starting at position 758 of SEQ ID NO: 588761
cacuuuguuguggagauca

SEQ ID NO: 887715 - RNA, 19 nt, Artificial Sequence
  Description of Artificial Sequence: Synthetic oligonucleotide
  Antisense strand to SEQ ID NO: 887714
ugaucuccacaacaaagug

SEQ ID NO: 887716 - RNA, 19 nt, Artificial Sequence
  Description of Artificial Sequence: Synthetic oligonucleotide
  Sense strand starting at position 760 of SEQ ID NO: 588761
cuuuguuguggagaucaaa

SEQ ID NO: 887717 - RNA, 19 nt, Artificial Sequence
  Description of Artificial Sequence: Synthetic oligonucleotide
  Antisense strand to SEQ ID NO: 887716
uuugaucuccacaacaaag

SEQ ID NO: 887718 - RNA, 19 nt, Artificial Sequence
  Description of Artificial Sequence: Synthetic oligonucleotide
  Sense strand starting at position 866 of SEQ ID NO: 588761
agaugaccucucggaguuu

SEQ ID NO: 887719 - RNA, 19 nt, Artificial Sequence
  Description of Artificial Sequence: Synthetic oligonucleotide
  Antisense strand to SEQ ID NO: 887718
aaacuccgagaggucaucu

SEQ ID NO: 887720 - RNA, 19 nt, Artificial Sequence
  Description of Artificial Sequence: Synthetic oligonucleotide
  Sense strand starting at position 934 of SEQ ID NO: 588761
auaacuaucgcaggaucau

SEQ ID NO: 887721 - RNA, 19 nt, Artificial Sequence
  Description of Artificial Sequence: Synthetic oligonucleotide
  Antisense strand to SEQ ID NO: 887720
augauccugcgauaguuau

SEQ ID NO: 887722 - RNA, 19 nt, Artificial Sequence
  Description of Artificial Sequence: Synthetic oligonucleotide
  Sense strand starting at position 945 of SEQ ID NO: 588761
aggaucaucugcuuaucca

SEQ ID NO: 887723 - RNA, 19 nt, Artificial Sequence
  Description of Artificial Sequence: Synthetic oligonucleotide
  Antisense strand to SEQ ID NO: 887722
uggauaagcagaugauccu

SEQ ID NO: 887724 - RNA, 19 nt, Artificial Sequence
  Description of Artificial Sequence: Synthetic oligonucleotide
  Sense strand starting at position 1070 of SEQ ID NO: 588761
augacauagguauaacgua

SEQ ID NO: 887725 - RNA, 19 nt, Artificial Sequence
  Description of Artificial Sequence: Synthetic oligonucleotide
  Antisense strand to SEQ ID NO: 887724
uacguuauaccuaugucau

SEQ ID NO: 887726 - RNA, 19 nt, Artificial Sequence
  Description of Artificial Sequence: Synthetic oligonucleotide
  Sense strand starting at position 1165 of SEQ ID NO: 588761
ugagcaauaucacccaugu

SEQ ID NO: 887727 - RNA, 19 nt, Artificial Sequence
  Description of Artificial Sequence: Synthetic oligonucleotide
  Antisense strand to SEQ ID NO: 887726
acaugggugauauugcuca

SEQ ID NO: 887728 - RNA, 19 nt, Artificial Sequence
  Description of Artificial Sequence: Synthetic oligonucleotide
  Sense strand starting at position 1189 of SEQ ID NO: 588761
augcauguccgagagauaa

SEQ ID NO: 887729 - RNA, 19 nt, Artificial Sequence
  Description of Artificial Sequence: Synthetic oligonucleotide
  Antisense strand to SEQ ID NO: 887728
uuaucucucggacaugcau

SEQ ID NO: 887730 - RNA, 19 nt, Artificial Sequence
  Description of Artificial Sequence: Synthetic oligonucleotide
  Sense strand starting at position 1191 of SEQ ID NO: 588761
gcauguccgagagauaaau

SEQ ID NO: 887731 - RNA, 19 nt, Artificial Sequence
  Description of Artificial Sequence: Synthetic oligonucleotide
  Antisense strand to SEQ ID NO: 887730
auuuaucucucggacaugc

SEQ ID NO: 887732 - RNA, 19 nt, Artificial Sequence
  Description of Artificial Sequence: Synthetic oligonucleotide
  Sense strand starting at position 1587 of SEQ ID NO: 588761
acuuaauaucuagacguuu

SEQ ID NO: 887733 - RNA, 19 nt, Artificial Sequence
  Description of Artificial Sequence: Synthetic oligonucleotide
  Antisense strand to SEQ ID NO: 887732
aaacgucuagauauuaagu

SEQ ID NO: 887734 - RNA, 19 nt, Artificial Sequence
  Description of Artificial Sequence: Synthetic oligonucleotide
  Sense strand starting at position 2529 of SEQ ID NO: 588761
cccagauuccaguauccua

SEQ ID NO: 887735 - RNA, 19 nt, Artificial Sequence
  Description of Artificial Sequence: Synthetic oligonucleotide
  Antisense strand to SEQ ID NO: 887734
uaggauacuggaaucuggg

SEQ ID NO: 887736 - RNA, 19 nt, Artificial Sequence
  Description of Artificial Sequence: Synthetic oligonucleotide
  Sense strand starting at position 2605 of SEQ ID NO: 588761
ggucguucggcucugucau

SEQ ID NO: 887737 - RNA, 19 nt, Artificial Sequence
  Description of Artificial Sequence: Synthetic oligonucleotide
  Antisense strand to SEQ ID NO: 887736
augacagagccgaacgacc

SEQ ID NO: 887738 - RNA, 19 nt, Artificial Sequence
  Description of Artificial Sequence: Synthetic oligonucleotide
  Sense strand starting at position 2758 of SEQ ID NO: 588761
acucgaauuuaguaucaug

SEQ ID NO: 887739 - RNA, 19 nt, Artificial Sequence
  Description of Artificial Sequence: Synthetic oligonucleotide
  Antisense strand to SEQ ID NO: 887738
caugauacuaaauucgagu

SEQ ID NO: 887740 - RNA, 19 nt, Artificial Sequence
  Description of Artificial Sequence: Synthetic oligonucleotide
  Sense strand starting at position 2789 of SEQ ID NO: 588761
uggaaacuguaaucuuaac

SEQ ID NO: 887741 - RNA, 19 nt, Artificial Sequence
  Description of Artificial Sequence: Synthetic oligonucleotide
  Antisense strand to SEQ ID NO: 887740
guuaagauuacaguuucca

SEQ ID NO: 887742 - RNA, 19 nt, Artificial Sequence
  Description of Artificial Sequence: Synthetic oligonucleotide
  Sense strand starting at position 2795 of SEQ ID NO: 588761
cuguaaucuuaacuuggca

SEQ ID NO: 887743 - RNA, 19 nt, Artificial Sequence
  Description of Artificial Sequence: Synthetic oligonucleotide
  Antisense strand to SEQ ID NO: 887742
ugccaaguuaagauuacag

SEQ ID NO: 887744 - RNA, 19 nt, Artificial Sequence
  Description of Artificial Sequence: Synthetic oligonucleotide
  Sense strand starting at position 2811 of SEQ ID NO: 588761
gcacauugaugcccuuaaa

SEQ ID NO: 887745 - RNA, 19 nt, Artificial Sequence
  Description of Artificial Sequence: Synthetic oligonucleotide
  Antisense strand to SEQ ID NO: 887744
uuuaagggcaucaaugugc

SEQ ID NO: 887746 - RNA, 19 nt, Artificial Sequence
  Description of Artificial Sequence: Synthetic oligonucleotide
  Sense strand starting at position 2919 of SEQ ID NO: 588761
ggucucauggcucaguaga

SEQ ID NO: 887747 - RNA, 19 nt, Artificial Sequence
  Description of Artificial Sequence: Synthetic oligonucleotide
  Antisense strand to SEQ ID NO: 887746
ucuacugagccaugagacc

SEQ ID NO: 887748 - RNA, 19 nt, Artificial Sequence
  Description of Artificial Sequence: Synthetic oligonucleotide
  Sense strand starting at position 2924 of SEQ ID NO: 588761
cauggcucaguagaaguaa

SEQ ID NO: 887749 - RNA, 19 nt, Artificial Sequence
  Description of Artificial Sequence: Synthetic oligonucleotide
  Antisense strand to SEQ ID NO: 887748
uuacuucuacugagccaug

SEQ ID NO: 887750 - RNA, 19 nt, Artificial Sequence
  Description of Artificial Sequence: Synthetic oligonucleotide
  Sense strand starting at position 2981 of SEQ ID NO: 588761
auacauacucuguggcaga

SEQ ID NO: 887751 - RNA, 19 nt, Artificial Sequence
  Description of Artificial Sequence: Synthetic oligonucleotide
  Antisense strand to SEQ ID NO: 887750
ucugccacagaguauguau

SEQ ID NO: 887752 - RNA, 19 nt, Artificial Sequence
  Description of Artificial Sequence: Synthetic oligonucleotide
  Sense strand starting at position 3119 of SEQ ID NO: 588761
ggcuguuagauugaccaga

SEQ ID NO: 887753 - RNA, 19 nt, Artificial Sequence
  Description of Artificial Sequence: Synthetic oligonucleotide
  Antisense strand to SEQ ID NO: 887752
ucuggucaaucuaacagcc

SEQ ID NO: 887754 - RNA, 19 nt, Artificial Sequence
  Description of Artificial Sequence: Synthetic oligonucleotide
  Sense strand starting at position 3121 of SEQ ID NO: 588761
cuguuagauugaccagaug

SEQ ID NO: 887755 - RNA, 19 nt, Artificial Sequence
  Description of Artificial Sequence: Synthetic oligonucleotide
  Antisense strand to SEQ ID NO: 887754
caucuggucaaucuaacag

SEQ ID NO: 887756 - RNA, 19 nt, Artificial Sequence
  Description of Artificial Sequence: Synthetic oligonucleotide
  Sense strand starting at position 3129 of SEQ ID NO: 588761
uugaccagauggucugaua

SEQ ID NO: 887757 - RNA, 19 nt, Artificial Sequence
  Description of Artificial Sequence: Synthetic oligonucleotide
  Antisense strand to SEQ ID NO: 887756
uaucagaccaucuggucaa

SEQ ID NO: 887758 - RNA, 19 nt, Artificial Sequence
  Description of Artificial Sequence: Synthetic oligonucleotide
  Sense strand starting at position 3175 of SEQ ID NO: 588761
uggaccuaagaauguaauu

SEQ ID NO: 887759 - RNA, 19 nt, Artificial Sequence
  Description of Artificial Sequence: Synthetic oligonucleotide
  Antisense strand to SEQ ID NO: 887758
aauuacauucuuaggucca

SEQ ID NO: 887760 - RNA, 19 nt, Artificial Sequence
  Description of Artificial Sequence: Synthetic oligonucleotide
  Sense strand starting at position 3327 of SEQ ID NO: 588761
ucuaaacaccaguauggua

SEQ ID NO: 887761 - RNA, 19 nt, Artificial Sequence
  Description of Artificial Sequence: Synthetic oligonucleotide
  Antisense strand to SEQ ID NO: 887760
uaccauacugguguuuaga

SEQ ID NO: 887762 - RNA, 19 nt, Artificial Sequence
  Description of Artificial Sequence: Synthetic oligonucleotide
  Sense strand starting at position 3406 of SEQ ID NO: 588761
ugguauuucucagcacugu

SEQ ID NO: 887763 - RNA, 19 nt, Artificial Sequence
  Description of Artificial Sequence: Synthetic oligonucleotide
  Antisense strand to SEQ ID NO: 887762
acagugcugagaaauacca

SEQ ID NO: 887764 - RNA, 19 nt, Artificial Sequence
  Description of Artificial Sequence: Synthetic oligonucleotide
  Sense strand starting at position 3417 of SEQ ID NO: 588761
agcacuguccuacagagaa

SEQ ID NO: 887765 - RNA, 19 nt, Artificial Sequence
  Description of Artificial Sequence: Synthetic oligonucleotide
  Antisense strand to SEQ ID NO: 887764
uucucuguaggacagugcu

SEQ ID NO: 887766 - RNA, 19 nt, Artificial Sequence
  Description of Artificial Sequence: Synthetic oligonucleotide
  Sense strand starting at position 3431 of SEQ ID NO: 588761
gagaacagugcccauacuu

SEQ ID NO: 887767 - RNA, 19 nt, Artificial Sequence
  Description of Artificial Sequence: Synthetic oligonucleotide
  Antisense strand to SEQ ID NO: 887766
aaguaugggcacuguucuc

SEQ ID NO: 887768 - RNA, 19 nt, Artificial Sequence
  Description of Artificial Sequence: Synthetic oligonucleotide
  Sense strand starting at position 3443 of SEQ ID NO: 588761
cauacuugggcuuguuaau

SEQ ID NO: 887769 - RNA, 19 nt, Artificial Sequence
  Description of Artificial Sequence: Synthetic oligonucleotide
  Antisense strand to SEQ ID NO: 887768
auuaacaagcccaaguaug

SEQ ID NO: 887770 - RNA, 19 nt, Artificial Sequence
  Description of Artificial Sequence: Synthetic oligonucleotide
  Sense strand starting at position 118 of SEQ ID NO: 588762
ccuacauuagcuuacaguu

SEQ ID NO: 887771 - RNA, 19 nt, Artificial Sequence
  Description of Artificial Sequence: Synthetic oligonucleotide
  Antisense strand to SEQ ID NO: 887770
aacuguaagcuaauguagg

SEQ ID NO: 887772 - RNA, 19 nt, Artificial Sequence
  Description of Artificial Sequence: Synthetic oligonucleotide
  Sense strand starting at position 130 of SEQ ID NO: 588762
uacaguuggguggaaucau

SEQ ID NO: 887773 - RNA, 19 nt, Artificial Sequence
  Description of Artificial Sequence: Synthetic oligonucleotide
  Antisense strand to SEQ ID NO: 887772
augauuccacccaacugua

SEQ ID NO: 887774 - RNA, 19 nt, Artificial Sequence
  Description of Artificial Sequence: Synthetic oligonucleotide
  Sense strand starting at position 138 of SEQ ID NO: 588762
gguggaaucaucuggcaac

SEQ ID NO: 887775 - RNA, 19 nt, Artificial Sequence
  Description of Artificial Sequence: Synthetic oligonucleotide
  Antisense strand to SEQ ID NO: 887774
guugccagaugauuccacc

SEQ ID NO: 887776 - RNA, 19 nt, Artificial Sequence
  Description of Artificial Sequence: Synthetic oligonucleotide
  Sense strand starting at position 247 of SEQ ID NO: 588762
aggauaucauaccugcaca

SEQ ID NO: 887777 - RNA, 19 nt, Artificial Sequence
  Description of Artificial Sequence: Synthetic oligonucleotide
  Antisense strand to SEQ ID NO: 887776
ugugcagguaugauauccu

SEQ ID NO: 887778 - RNA, 19 nt, Artificial Sequence
  Description of Artificial Sequence: Synthetic oligonucleotide
  Sense strand starting at position 358 of SEQ ID NO: 588762
uugugagucauggaccauc

SEQ ID NO: 887779 - RNA, 19 nt, Artificial Sequence
  Description of Artificial Sequence: Synthetic oligonucleotide
  Antisense strand to SEQ ID NO: 887778
gaugguccaugacucacaa

SEQ ID NO: 887780 - RNA, 19 nt, Artificial Sequence
  Description of Artificial Sequence: Synthetic oligonucleotide
  Sense strand starting at position 454 of SEQ ID NO: 588762
gcugcucaccaaggaauaa

SEQ ID NO: 887781 - RNA, 19 nt, Artificial Sequence
  Description of Artificial Sequence: Synthetic oligonucleotide
  Antisense strand to SEQ ID NO: 887780
uuauuccuuggugagcagc

SEQ ID NO: 887782 - RNA, 19 nt, Artificial Sequence
  Description of Artificial Sequence: Synthetic oligonucleotide
  Sense strand starting at position 489 of SEQ ID NO: 588762
gguggcuuugaauauucuu

SEQ ID NO: 887783 - RNA, 19 nt, Artificial Sequence
  Description of Artificial Sequence: Synthetic oligonucleotide
  Antisense strand to SEQ ID NO: 887782
aagaauauucaaagccacc

SEQ ID NO: 887784 - RNA, 19 nt, Artificial Sequence
  Description of Artificial Sequence: Synthetic oligonucleotide
  Sense strand starting at position 492 of SEQ ID NO: 588762
ggcuuugaauauucuuuaa

SEQ ID NO: 887785 - RNA, 19 nt, Artificial Sequence
  Description of Artificial Sequence: Synthetic oligonucleotide
  Antisense strand to SEQ ID NO: 887784
uuaaagaauauucaaagcc

SEQ ID NO: 887786 - RNA, 19 nt, Artificial Sequence
  Description of Artificial Sequence: Synthetic oligonucleotide
  Sense strand starting at position 652 of SEQ ID NO: 588762
gccggaugugguaacguau

SEQ ID NO: 887787 - RNA, 19 nt, Artificial Sequence
  Description of Artificial Sequence: Synthetic oligonucleotide
  Antisense strand to SEQ ID NO: 887786
auacguuaccacauccggc

SEQ ID NO: 887788 - RNA, 19 nt, Artificial Sequence
  Description of Artificial Sequence: Synthetic oligonucleotide
  Sense strand starting at position 855 of SEQ ID NO: 588762
ccaugugugcagagugguu

SEQ ID NO: 887789 - RNA, 19 nt, Artificial Sequence
  Description of Artificial Sequence: Synthetic oligonucleotide
  Antisense strand to SEQ ID NO: 887788
aaccacucugcacacaugg

SEQ ID NO: 887790 - RNA, 19 nt, Artificial Sequence
  Description of Artificial Sequence: Synthetic oligonucleotide
  Sense strand starting at position 872 of SEQ ID NO: 588762
uugacaugucacuaugugu

SEQ ID NO: 887791 - RNA, 19 nt, Artificial Sequence
  Description of Artificial Sequence: Synthetic oligonucleotide
  Antisense strand to SEQ ID NO: 887790
acacauagugacaugucaa

SEQ ID NO: 887792 - RNA, 19 nt, Artificial Sequence
  Description of Artificial Sequence: Synthetic oligonucleotide
  Sense strand starting at position 966 of SEQ ID NO: 588762
aauccaaauguuggguaau

SEQ ID NO: 887793 - RNA, 19 nt, Artificial Sequence
  Description of Artificial Sequence: Synthetic oligonucleotide
  Antisense strand to SEQ ID NO: 887792
auuacccaacauuuggauu

SEQ ID NO: 887794 - RNA, 19 nt, Artificial Sequence
  Description of Artificial Sequence: Synthetic oligonucleotide
  Sense strand starting at position 1014 of SEQ ID NO: 588762
cacauuaugugauugaggu

SEQ ID NO: 887795 - RNA, 19 nt, Artificial Sequence
  Description of Artificial Sequence: Synthetic oligonucleotide
  Antisense strand to SEQ ID NO: 887794
accucaaucacauaaugug

SEQ ID NO: 887796 - RNA, 19 nt, Artificial Sequence
  Description of Artificial Sequence: Synthetic oligonucleotide
  Sense strand starting at position 1015 of SEQ ID NO: 588762
acauuaugugauugagguu

SEQ ID NO: 887797 - RNA, 19 nt, Artificial Sequence
  Description of Artificial Sequence: Synthetic oligonucleotide
  Antisense strand to SEQ ID NO: 887796
aaccucaaucacauaaugu

SEQ ID NO: 887798 - RNA, 19 nt, Artificial Sequence
  Description of Artificial Sequence: Synthetic oligonucleotide
  Sense strand starting at position 1021 of SEQ ID NO: 588762
ugugauugagguuaguauu

SEQ ID NO: 887799 - RNA, 19 nt, Artificial Sequence
  Description of Artificial Sequence: Synthetic oligonucleotide
  Antisense strand to SEQ ID NO: 887798
aauacuaaccucaaucaca

SEQ ID NO: 887800 - RNA, 19 nt, Artificial Sequence
  Description of Artificial Sequence: Synthetic oligonucleotide
  Sense strand starting at position 1136 of SEQ ID NO: 588762
ggaagucaagcuggguuua

SEQ ID NO: 887801 - RNA, 19 nt, Artificial Sequence
  Description of Artificial Sequence: Synthetic oligonucleotide
  Antisense strand to SEQ ID NO: 887800
uaaacccagcuugacuucc

SEQ ID NO: 887802 - RNA, 19 nt, Artificial Sequence
  Description of Artificial Sequence: Synthetic oligonucleotide
  Sense strand starting at position 1137 of SEQ ID NO: 588762
gaagucaagcuggguuuaa

SEQ ID NO: 887803 - RNA, 19 nt, Artificial Sequence
  Description of Artificial Sequence: Synthetic oligonucleotide
  Antisense strand to SEQ ID NO: 887802
uuaaacccagcuugacuuc

SEQ ID NO: 887804 - RNA, 19 nt, Artificial Sequence
  Description of Artificial Sequence: Synthetic oligonucleotide
  Sense strand starting at position 1141 of SEQ ID NO: 588762
ucaagcuggguuuaacaau

SEQ ID NO: 887805 - RNA, 19 nt, Artificial Sequence
  Description of Artificial Sequence: Synthetic oligonucleotide
  Antisense strand to SEQ ID NO: 887804
auuguuaaacccagcuuga

SEQ ID NO: 887806 - RNA, 19 nt, Artificial Sequence
  Description of Artificial Sequence: Synthetic oligonucleotide
  Sense strand starting at position 1177 of SEQ ID NO: 588762
ggagaugacuaagagaaga

SEQ ID NO: 887807 - RNA, 19 nt, Artificial Sequence
  Description of Artificial Sequence: Synthetic oligonucleotide
  Antisense strand to SEQ ID NO: 887806
ucuucucuuagucaucucc

SEQ ID NO: 887808 - RNA, 19 nt, Artificial Sequence
  Description of Artificial Sequence: Synthetic oligonucleotide
  Sense strand starting at position 1203 of SEQ ID NO: 588762
auagaugguuugagggagu

SEQ ID NO: 887809 - RNA, 19 nt, Artificial Sequence
  Description of Artificial Sequence: Synthetic oligonucleotide
  Antisense strand to SEQ ID NO: 887808
acucccucaaaccaucuau

SEQ ID NO: 887810 - RNA, 19 nt, Artificial Sequence
  Description of Artificial Sequence: Synthetic oligonucleotide
  Sense strand starting at position 1236 of SEQ ID NO: 588762
uuugaaauguucccuggga

SEQ ID NO: 887811 - RNA, 19 nt, Artificial Sequence
  Description of Artificial Sequence: Synthetic oligonucleotide
  Antisense strand to SEQ ID NO: 887810
ucccagggaacauuucaaa

SEQ ID NO: 887812 - RNA, 19 nt, Artificial Sequence
  Description of Artificial Sequence: Synthetic oligonucleotide
  Sense strand starting at position 1237 of SEQ ID NO: 588762
uugaaauguucccugggag

SEQ ID NO: 887813 - RNA, 19 nt, Artificial Sequence
  Description of Artificial Sequence: Synthetic oligonucleotide
  Antisense strand to SEQ ID NO: 887812
cucccagggaacauuucaa

SEQ ID NO: 887814 - RNA, 19 nt, Artificial Sequence
  Description of Artificial Sequence: Synthetic oligonucleotide
  Sense strand starting at position 1240 of SEQ ID NO: 588762
aaauguucccugggaguuc

SEQ ID NO: 887815 - RNA, 19 nt, Artificial Sequence
  Description of Artificial Sequence: Synthetic oligonucleotide
  Antisense strand to SEQ ID NO: 887814
gaacucccagggaacauuu

SEQ ID NO: 887816 - RNA, 19 nt, Artificial Sequence
  Description of Artificial Sequence: Synthetic oligonucleotide
  Sense strand starting at position 1455 of SEQ ID NO: 588762
uggcuuguggguuaaacau

SEQ ID NO: 887817 - RNA, 19 nt, Artificial Sequence
  Description of Artificial Sequence: Synthetic oligonucleotide
  Antisense strand to SEQ ID NO: 887816
auguuuaacccacaagcca

SEQ ID NO: 887818 - RNA, 19 nt, Artificial Sequence
  Description of Artificial Sequence: Synthetic oligonucleotide
  Sense strand starting at position 1521 of SEQ ID NO: 588762
ggaacuaggcccugaaauc

SEQ ID NO: 887819 - RNA, 19 nt, Artificial Sequence
  Description of Artificial Sequence: Synthetic oligonucleotide
  Antisense strand to SEQ ID NO: 887818
gauuucagggccuaguucc

SEQ ID NO: 887820 - RNA, 19 nt, Artificial Sequence
  Description of Artificial Sequence: Synthetic oligonucleotide
  Sense strand starting at position 1528 of SEQ ID NO: 588762
ggcccugaaaucuauacgu

SEQ ID NO: 887821 - RNA, 19 nt, Artificial Sequence
  Description of Artificial Sequence: Synthetic oligonucleotide
  Antisense strand to SEQ ID NO: 887820
acguauagauuucagggcc

SEQ ID NO: 887822 - RNA, 19 nt, Artificial Sequence
  Description of Artificial Sequence: Synthetic oligonucleotide
  Sense strand starting at position 1530 of SEQ ID NO: 588762
cccugaaaucuauacgugu

SEQ ID NO: 887823 - RNA, 19 nt, Artificial Sequence
  Description of Artificial Sequence: Synthetic oligonucleotide
  Antisense strand to SEQ ID NO: 887822
acacguauagauuucaggg

SEQ ID NO: 887824 - RNA, 19 nt, Artificial Sequence
  Description of Artificial Sequence: Synthetic oligonucleotide
  Sense strand starting at position 1533 of SEQ ID NO: 588762
ugaaaucuauacgugugau

SEQ ID NO: 887825 - RNA, 19 nt, Artificial Sequence
  Description of Artificial Sequence: Synthetic oligonucleotide
  Antisense strand to SEQ ID NO: 887824
aucacacguauagauuuca

SEQ ID NO: 887826 - RNA, 19 nt, Artificial Sequence
  Description of Artificial Sequence: Synthetic oligonucleotide
  Sense strand starting at position 1536 of SEQ ID NO: 588762
aaucuauacgugugauagg

SEQ ID NO: 887827 - RNA, 19 nt, Artificial Sequence
  Description of Artificial Sequence: Synthetic oligonucleotide
  Antisense strand to SEQ ID NO: 887826
ccuaucacacguauagauu

SEQ ID NO: 887828 - RNA, 19 nt, Artificial Sequence
  Description of Artificial Sequence: Synthetic oligonucleotide
  Sense strand starting at position 1553 of SEQ ID NO: 588762
gguguuuccacggcuguua

SEQ ID NO: 887829 - RNA, 19 nt, Artificial Sequence
  Description of Artificial Sequence: Synthetic oligonucleotide
  Antisense strand to SEQ ID NO: 887828
uaacagccguggaaacacc

SEQ ID NO: 887830 - RNA, 19 nt, Artificial Sequence
  Description of Artificial Sequence: Synthetic oligonucleotide
  Sense strand starting at position 1588 of SEQ ID NO: 588762
cgcaacucugcgucugaga

SEQ ID NO: 887831 - RNA, 19 nt, Artificial Sequence
  Description of Artificial Sequence: Synthetic oligonucleotide
  Antisense strand to SEQ ID NO: 887830
ucucagacgcagaguugcg

SEQ ID NO: 887832 - RNA, 19 nt, Artificial Sequence
  Description of Artificial Sequence: Synthetic oligonucleotide
  Sense strand starting at position 2113 of SEQ ID NO: 588762
aacgaaguucucgaaguuu

SEQ ID NO: 887833 - RNA, 19 nt, Artificial Sequence
  Description of Artificial Sequence: Synthetic oligonucleotide
  Antisense strand to SEQ ID NO: 887832
aaacuucgagaacuucguu

SEQ ID NO: 887834 - RNA, 19 nt, Artificial Sequence
  Description of Artificial Sequence: Synthetic oligonucleotide
  Sense strand starting at position 2244 of SEQ ID NO: 588762
gcaagccuucuggaaauua

SEQ ID NO: 887835 - RNA, 19 nt, Artificial Sequence
  Description of Artificial Sequence: Synthetic oligonucleotide
  Antisense strand to SEQ ID NO: 887834
uaauuuccagaaggcuugc

SEQ ID NO: 887836 - RNA, 19 nt, Artificial Sequence
  Description of Artificial Sequence: Synthetic oligonucleotide
  Sense strand starting at position 2261 of SEQ ID NO: 588762
uaaugcaucugggcgauuu

SEQ ID NO: 887837 - RNA, 19 nt, Artificial Sequence
  Description of Artificial Sequence: Synthetic oligonucleotide
  Antisense strand to SEQ ID NO: 887836
aaaucgcccagaugcauua

SEQ ID NO: 887838 - RNA, 19 nt, Artificial Sequence
  Description of Artificial Sequence: Synthetic oligonucleotide
  Sense strand starting at position 2312 of SEQ ID NO: 588762
caaaccucccgagaugagu

SEQ ID NO: 887839 - RNA, 19 nt, Artificial Sequence
  Description of Artificial Sequence: Synthetic oligonucleotide
  Antisense strand to SEQ ID NO: 887838
acucaucucgggagguuug

SEQ ID NO: 887840 - RNA, 19 nt, Artificial Sequence
  Description of Artificial Sequence: Synthetic oligonucleotide
  Sense strand starting at position 2320 of SEQ ID NO: 588762
ccgagaugaguggauucca

SEQ ID NO: 887841 - RNA, 19 nt, Artificial Sequence
  Description of Artificial Sequence: Synthetic oligonucleotide
  Antisense strand to SEQ ID NO: 887840
uggaauccacucaucucgg

SEQ ID NO: 887842 - RNA, 19 nt, Artificial Sequence
  Description of Artificial Sequence: Synthetic oligonucleotide
  Sense strand starting at position 2820 of SEQ ID NO: 588762
guguuaauuucucuagccu

SEQ ID NO: 887843 - RNA, 19 nt, Artificial Sequence
  Description of Artificial Sequence: Synthetic oligonucleotide
  Antisense strand to SEQ ID NO: 887842
aggcuagagaaauuaacac

SEQ ID NO: 887844 - RNA, 19 nt, Artificial Sequence
  Description of Artificial Sequence: Synthetic oligonucleotide
  Sense strand starting at position 2868 of SEQ ID NO: 588762
aucucucaggcuuaugaca

SEQ ID NO: 887845 - RNA, 19 nt, Artificial Sequence
  Description of Artificial Sequence: Synthetic oligonucleotide
  Antisense strand to SEQ ID NO: 887844
ugucauaagccugagagau

SEQ ID NO: 887846 - RNA, 19 nt, Artificial Sequence
  Description of Artificial Sequence: Synthetic oligonucleotide
  Sense strand starting at position 3584 of SEQ ID NO: 588762
guccgcgagcauguuaauu

SEQ ID NO: 887847 - RNA, 19 nt, Artificial Sequence
  Description of Artificial Sequence: Synthetic oligonucleotide
  Antisense strand to SEQ ID NO: 887846
aauuaacaugcucgcggac

SEQ ID NO: 887848 - RNA, 19 nt, Artificial Sequence
  Description of Artificial Sequence: Synthetic oligonucleotide
  Sense strand starting at position 3712 of SEQ ID NO: 588762
gcuaucucugaucagguua

SEQ ID NO: 887849 - RNA, 19 nt, Artificial Sequence
  Description of Artificial Sequence: Synthetic oligonucleotide
  Antisense strand to SEQ ID NO: 887848
uaaccugaucagagauagc

SEQ ID NO: 887850 - RNA, 19 nt, Artificial Sequence
  Description of Artificial Sequence: Synthetic oligonucleotide
  Sense strand starting at position 43 of SEQ ID NO: 588763
uuuaaucauccggaaaguc

SEQ ID NO: 887851 - RNA, 19 nt, Artificial Sequence
  Description of Artificial Sequence: Synthetic oligonucleotide
  Antisense strand to SEQ ID NO: 887850
gacuuuccggaugauuaaa

SEQ ID NO: 887852 - RNA, 19 nt, Artificial Sequence
  Description of Artificial Sequence: Synthetic oligonucleotide
  Sense strand starting at position 51 of SEQ ID NO: 588763
uccggaaagucauccauau

SEQ ID NO: 887853 - RNA, 19 nt, Artificial Sequence
  Description of Artificial Sequence: Synthetic oligonucleotide
  Antisense strand to SEQ ID NO: 887852
auauggaugacuuuccgga

SEQ ID NO: 887854 - RNA, 19 nt, Artificial Sequence
  Description of Artificial Sequence: Synthetic oligonucleotide
  Sense strand starting at position 96 of SEQ ID NO: 588763
ggcagcuugaugcagaaga

SEQ ID NO: 887855 - RNA, 19 nt, Artificial Sequence
  Description of Artificial Sequence: Synthetic oligonucleotide
  Antisense strand to SEQ ID NO: 887854
ucuucugcaucaagcugcc

SEQ ID NO: 887856 - RNA, 19 nt, Artificial Sequence
  Description of Artificial Sequence: Synthetic oligonucleotide
  Sense strand starting at position 233 of SEQ ID NO: 588763
ucacaagggaguuguaaag

SEQ ID NO: 887857 - RNA, 19 nt, Artificial Sequence
  Description of Artificial Sequence: Synthetic oligonucleotide
  Antisense strand to SEQ ID NO: 887856
cuuuacaacucccuuguga

SEQ ID NO: 887858 - RNA, 19 nt, Artificial Sequence
  Description of Artificial Sequence: Synthetic oligonucleotide
  Sense strand starting at position 260 of SEQ ID NO: 588763
agacgauacaggugaaugu

SEQ ID NO: 887859 - RNA, 19 nt, Artificial Sequence
  Description of Artificial Sequence: Synthetic oligonucleotide
  Antisense strand to SEQ ID NO: 887858
acauucaccuguaucgucu

SEQ ID NO: 887860 - RNA, 19 nt, Artificial Sequence
  Description of Artificial Sequence: Synthetic oligonucleotide
  Sense strand starting at position 261 of SEQ ID NO: 588763
gacgauacaggugaaugua

SEQ ID NO: 887861 - RNA, 19 nt, Artificial Sequence
  Description of Artificial Sequence: Synthetic oligonucleotide
  Antisense strand to SEQ ID NO: 887860
uacauucaccuguaucguc

SEQ ID NO: 887862 - RNA, 19 nt, Artificial Sequence
  Description of Artificial Sequence: Synthetic oligonucleotide
  Sense strand starting at position 269 of SEQ ID NO: 588763
aggugaauguacucuguaa

SEQ ID NO: 887863 - RNA, 19 nt, Artificial Sequence
  Description of Artificial Sequence: Synthetic oligonucleotide
  Antisense strand to SEQ ID NO: 887862
uuacagaguacauucaccu

SEQ ID NO: 887864 - RNA, 19 nt, Artificial Sequence
  Description of Artificial Sequence: Synthetic oligonucleotide
  Sense strand starting at position 273 of SEQ ID NO: 588763
gaauguacucuguaaguuc

SEQ ID NO: 887865 - RNA, 19 nt, Artificial Sequence
  Description of Artificial Sequence: Synthetic oligonucleotide
  Antisense strand to SEQ ID NO: 887864
gaacuuacagaguacauuc

SEQ ID NO: 887866 - RNA, 19 nt, Artificial Sequence
  Description of Artificial Sequence: Synthetic oligonucleotide
  Sense strand starting at position 282 of SEQ ID NO: 588763
cuguaaguucuauaaggcu

SEQ ID NO: 887867 - RNA, 19 nt, Artificial Sequence
  Description of Artificial Sequence: Synthetic oligonucleotide
  Antisense strand to SEQ ID NO: 887866
agccuuauagaacuuacag

SEQ ID NO: 887868 - RNA, 19 nt, Artificial Sequence
  Description of Artificial Sequence: Synthetic oligonucleotide
  Sense strand starting at position 288 of SEQ ID NO: 588763
guucuauaaggcuaugcaa

SEQ ID NO: 887869 - RNA, 19 nt, Artificial Sequence
  Description of Artificial Sequence: Synthetic oligonucleotide
  Antisense strand to SEQ ID NO: 887868
uugcauagccuuauagaac

SEQ ID NO: 887870 - RNA, 19 nt, Artificial Sequence
  Description of Artificial Sequence: Synthetic oligonucleotide
  Sense strand starting at position 299 of SEQ ID NO: 588763
cuaugcaaagguuaguuau

SEQ ID NO: 887871 - RNA, 19 nt, Artificial Sequence
  Description of Artificial Sequence: Synthetic oligonucleotide
  Antisense strand to SEQ ID NO: 887870
auaacuaaccuuugcauag

SEQ ID NO: 887872 - RNA, 19 nt, Artificial Sequence
  Description of Artificial Sequence: Synthetic oligonucleotide
  Sense strand starting at position 373 of SEQ ID NO: 588763
aauuaaauuggugguucua

SEQ ID NO: 887873 - RNA, 19 nt, Artificial Sequence
  Description of Artificial Sequence: Synthetic oligonucleotide
  Antisense strand to SEQ ID NO: 887872
uagaaccaccaauuuaauu

SEQ ID NO: 887874 - RNA, 19 nt, Artificial Sequence
  Description of Artificial Sequence: Synthetic oligonucleotide
  Sense strand starting at position 551 of SEQ ID NO: 588763
ccuaaaugucaauagugca

SEQ ID NO: 887875 - RNA, 19 nt, Artificial Sequence
  Description of Artificial Sequence: Synthetic oligonucleotide
  Antisense strand to SEQ ID NO: 887874
ugcacuauugacauuuagg

SEQ ID NO: 887876 - RNA, 19 nt, Artificial Sequence
  Description of Artificial Sequence: Synthetic oligonucleotide
  Sense strand starting at position 584 of SEQ ID NO: 588763
ugaucuaaauaaucgcuua

SEQ ID NO: 887877 - RNA, 19 nt, Artificial Sequence
  Description of Artificial Sequence: Synthetic oligonucleotide
  Antisense strand to SEQ ID NO: 887876
uaagcgauuauuuagauca

SEQ ID NO: 887878 - RNA, 19 nt, Artificial Sequence
  Description of Artificial Sequence: Synthetic oligonucleotide
  Sense strand starting at position 587 of SEQ ID NO: 588763
ucuaaauaaucgcuuaaag

SEQ ID NO: 887879 - RNA, 19 nt, Artificial Sequence
  Description of Artificial Sequence: Synthetic oligonucleotide
  Antisense strand to SEQ ID NO: 887878
cuuuaagcgauuauuuaga

SEQ ID NO: 887880 - RNA, 19 nt, Artificial Sequence
  Description of Artificial Sequence: Synthetic oligonucleotide
  Sense strand starting at position 741 of SEQ ID NO: 588763
ggaguuucugaauguauaa

SEQ ID NO: 887881 - RNA, 19 nt, Artificial Sequence
  Description of Artificial Sequence: Synthetic oligonucleotide
  Antisense strand to SEQ ID NO: 887880
uuauacauucagaaacucc

SEQ ID NO: 887882 - RNA, 19 nt, Artificial Sequence
  Description of Artificial Sequence: Synthetic oligonucleotide
  Sense strand starting at position 788 of SEQ ID NO: 588763
uuacaauucggcuaaauug

SEQ ID NO: 887883 - RNA, 19 nt, Artificial Sequence
  Description of Artificial Sequence: Synthetic oligonucleotide
  Antisense strand to SEQ ID NO: 887882
caauuuagccgaauuguaa

SEQ ID NO: 887884 - RNA, 19 nt, Artificial Sequence
  Description of Artificial Sequence: Synthetic oligonucleotide
  Sense strand starting at position 832 of SEQ ID NO: 588763
agaaguucuccugggcaca

SEQ ID NO: 887885 - RNA, 19 nt, Artificial Sequence
  Description of Artificial Sequence: Synthetic oligonucleotide
  Antisense strand to SEQ ID NO: 887884
ugugcccaggagaacuucu

SEQ ID NO: 887886 - RNA, 19 nt, Artificial Sequence
  Description of Artificial Sequence: Synthetic oligonucleotide
  Sense strand starting at position 834 of SEQ ID NO: 588763
aaguucuccugggcacaga

SEQ ID NO: 887887 - RNA, 19 nt, Artificial Sequence
  Description of Artificial Sequence: Synthetic oligonucleotide
  Antisense strand to SEQ ID NO: 887886
ucugugcccaggagaacuu

SEQ ID NO: 887888 - RNA, 19 nt, Artificial Sequence
  Description of Artificial Sequence: Synthetic oligonucleotide
  Sense strand starting at position 871 of SEQ ID NO: 588763
accacuaggcccugaagau

SEQ ID NO: 887889 - RNA, 19 nt, Artificial Sequence
  Description of Artificial Sequence: Synthetic oligonucleotide
  Antisense strand to SEQ ID NO: 887888
aucuucagggccuaguggu

SEQ ID NO: 887890 - RNA, 19 nt, Artificial Sequence
  Description of Artificial Sequence: Synthetic oligonucleotide
  Sense strand starting at position 880 of SEQ ID NO: 588763
cccugaagaugguuuccua

SEQ ID NO: 887891 - RNA, 19 nt, Artificial Sequence
  Description of Artificial Sequence: Synthetic oligonucleotide
  Antisense strand to SEQ ID NO: 887890
uaggaaaccaucuucaggg

SEQ ID NO: 887892 - RNA, 19 nt, Artificial Sequence
  Description of Artificial Sequence: Synthetic oligonucleotide
  Sense strand starting at position 883 of SEQ ID NO: 588763
ugaagaugguuuccuaauu

SEQ ID NO: 887893 - RNA, 19 nt, Artificial Sequence
  Description of Artificial Sequence: Synthetic oligonucleotide
  Antisense strand to SEQ ID NO: 887892
aauuaggaaaccaucuuca

SEQ ID NO: 887894 - RNA, 19 nt, Artificial Sequence
  Description of Artificial Sequence: Synthetic oligonucleotide
  Sense strand starting at position 884 of SEQ ID NO: 588763
gaagaugguuuccuaauuc

SEQ ID NO: 887895 - RNA, 19 nt, Artificial Sequence
  Description of Artificial Sequence: Synthetic oligonucleotide
  Antisense strand to SEQ ID NO: 887894
gaauuaggaaaccaucuuc

SEQ ID NO: 887896 - RNA, 19 nt, Artificial Sequence
  Description of Artificial Sequence: Synthetic oligonucleotide
  Sense strand starting at position 930 of SEQ ID NO: 588763
agggucucuaaacgaauua

SEQ ID NO: 887897 - RNA, 19 nt, Artificial Sequence
  Description of Artificial Sequence: Synthetic oligonucleotide
  Antisense strand to SEQ ID NO: 887896
uaauucguuuagagacccu

SEQ ID NO: 887898 - RNA, 19 nt, Artificial Sequence
  Description of Artificial Sequence: Synthetic oligonucleotide
  Sense strand starting at position 1249 of SEQ ID NO: 588763
gcaacuucucaguaaguuu

SEQ ID NO: 887899 - RNA, 19 nt, Artificial Sequence
  Description of Artificial Sequence: Synthetic oligonucleotide
  Antisense strand to SEQ ID NO: 887898
aaacuuacugagaaguugc

SEQ ID NO: 887900 - RNA, 19 nt, Artificial Sequence
  Description of Artificial Sequence: Synthetic oligonucleotide
  Sense strand starting at position 1339 of SEQ ID NO: 588763
accgcagguaccugauaaa

SEQ ID NO: 887901 - RNA, 19 nt, Artificial Sequence
  Description of Artificial Sequence: Synthetic oligonucleotide
  Antisense strand to SEQ ID NO: 887900
uuuaucagguaccugcggu

SEQ ID NO: 887902 - RNA, 19 nt, Artificial Sequence
  Description of Artificial Sequence: Synthetic oligonucleotide
  Sense strand starting at position 2646 of SEQ ID NO: 588763
ugaccaccuuccucgauua

SEQ ID NO: 887903 - RNA, 19 nt, Artificial Sequence
  Description of Artificial Sequence: Synthetic oligonucleotide
  Antisense strand to SEQ ID NO: 887902
uaaucgaggaaggugguca

SEQ ID NO: 887904 - RNA, 19 nt, Artificial Sequence
  Description of Artificial Sequence: Synthetic oligonucleotide
  Sense strand starting at position 2981 of SEQ ID NO: 588763
ggacggucugauuggguga

SEQ ID NO: 887905 - RNA, 19 nt, Artificial Sequence
  Description of Artificial Sequence: Synthetic oligonucleotide
  Antisense strand to SEQ ID NO: 887904
ucacccaaucagaccgucc

SEQ ID NO: 887906 - RNA, 19 nt, Artificial Sequence
  Description of Artificial Sequence: Synthetic oligonucleotide
  Sense strand starting at position 3133 of SEQ ID NO: 588763
agaugagguuggucacuuu

SEQ ID NO: 887907 - RNA, 19 nt, Artificial Sequence
  Description of Artificial Sequence: Synthetic oligonucleotide
  Antisense strand to SEQ ID NO: 887906
aaagugaccaaccucaucu

SEQ ID NO: 887908 - RNA, 19 nt, Artificial Sequence
  Description of Artificial Sequence: Synthetic oligonucleotide
  Sense strand starting at position 3158 of SEQ ID NO: 588763
uccuccgauuuguuuaauu

SEQ ID NO: 887909 - RNA, 19 nt, Artificial Sequence
  Description of Artificial Sequence: Synthetic oligonucleotide
  Antisense strand to SEQ ID NO: 887908
aauuaaacaaaucggagga

SEQ ID NO: 887910 - RNA, 19 nt, Artificial Sequence
  Description of Artificial Sequence: Synthetic oligonucleotide
  Sense strand starting at position 3181 of SEQ ID NO: 588763
uguuguauuucccuccuaa

SEQ ID NO: 887911 - RNA, 19 nt, Artificial Sequence
  Description of Artificial Sequence: Synthetic oligonucleotide
  Antisense strand to SEQ ID NO: 887910
uuaggagggaaauacaaca

SEQ ID NO: 887912 - RNA, 19 nt, Artificial Sequence
  Description of Artificial Sequence: Synthetic oligonucleotide
  Sense strand starting at position 3217 of SEQ ID NO: 588763
guagcucugcuugucuuua

SEQ ID NO: 887913 - RNA, 19 nt, Artificial Sequence
  Description of Artificial Sequence: Synthetic oligonucleotide
  Antisense strand to SEQ ID NO: 887912
uaaagacaagcagagcuac

SEQ ID NO: 887914 - RNA, 19 nt, Artificial Sequence
  Description of Artificial Sequence: Synthetic oligonucleotide
  Sense strand starting at position 3269 of SEQ ID NO: 588763
acacuaggcgcucaaacau

SEQ ID NO: 887915 - RNA, 19 nt, Artificial Sequence
  Description of Artificial Sequence: Synthetic oligonucleotide
  Antisense strand to SEQ ID NO: 887914
auguuugagcgccuagugu

SEQ ID NO: 887916 - RNA, 19 nt, Artificial Sequence
  Description of Artificial Sequence: Synthetic oligonucleotide
  Sense strand starting at position 3368 of SEQ ID NO: 588763
agucguuccagggauagac

SEQ ID NO: 887917 - RNA, 19 nt, Artificial Sequence
  Description of Artificial Sequence: Synthetic oligonucleotide
  Antisense strand to SEQ ID NO: 887916
gucuaucccuggaacgacu

SEQ ID NO: 887918 - RNA, 19 nt, Artificial Sequence
  Description of Artificial Sequence: Synthetic oligonucleotide
  Sense strand starting at position 3820 of SEQ ID NO: 588763
aguggaaguugagugaaau

SEQ ID NO: 887919 - RNA, 19 nt, Artificial Sequence
  Description of Artificial Sequence: Synthetic oligonucleotide
  Antisense strand to SEQ ID NO: 887918
auuucacucaacuuccacu

SEQ ID NO: 887920 - RNA, 19 nt, Artificial Sequence
  Description of Artificial Sequence: Synthetic oligonucleotide
  Sense strand starting at position 3821 of SEQ ID NO: 588763
guggaaguugagugaaaua

SEQ ID NO: 887921 - RNA, 19 nt, Artificial Sequence
  Description of Artificial Sequence: Synthetic oligonucleotide
  Antisense strand to SEQ ID NO: 887920
uauuucacucaacuuccac

SEQ ID NO: 887922 - RNA, 19 nt, Artificial Sequence
  Description of Artificial Sequence: Synthetic oligonucleotide
  Sense strand starting at position 3850 of SEQ ID NO: 588763
acguguuuagaccaccuua

SEQ ID NO: 887923 - RNA, 19 nt, Artificial Sequence
  Description of Artificial Sequence: Synthetic oligonucleotide
  Antisense strand to SEQ ID NO: 887922
uaagguggucuaaacacgu

SEQ ID NO: 887924 - RNA, 19 nt, Artificial Sequence
  Description of Artificial Sequence: Synthetic oligonucleotide
  Sense strand starting at position 3873 of SEQ ID NO: 588763
uccauuucuugagugccua

SEQ ID NO: 887925 - RNA, 19 nt, Artificial Sequence
  Description of Artificial Sequence: Synthetic oligonucleotide
  Antisense strand to SEQ ID NO: 887924
uaggcacucaagaaaugga

SEQ ID NO: 887926 - RNA, 19 nt, Artificial Sequence
  Description of Artificial Sequence: Synthetic oligonucleotide
  Sense strand starting at position 3921 of SEQ ID NO: 588763
uugccaacugcugagauga

SEQ ID NO: 887927 - RNA, 19 nt, Artificial Sequence
  Description of Artificial Sequence: Synthetic oligonucleotide
  Antisense strand to SEQ ID NO: 887926
ucaucucagcaguuggcaa

SEQ ID NO: 887928 - RNA, 19 nt, Artificial Sequence
  Description of Artificial Sequence: Synthetic oligonucleotide
  Sense strand starting at position 3953 of SEQ ID NO: 588763
aacggaggaugugugaauu

SEQ ID NO: 887929 - RNA, 19 nt, Artificial Sequence
  Description of Artificial Sequence: Synthetic oligonucleotide
  Antisense strand to SEQ ID NO: 887928
aauucacacauccuccguu

SEQ ID NO: 887930 - RNA, 19 nt, Artificial Sequence
  Description of Artificial Sequence: Synthetic oligonucleotide
  Sense strand starting at position 62 of SEQ ID NO: 588764
agcugaauucugcacucau

SEQ ID NO: 887931 - RNA, 19 nt, Artificial Sequence
  Description of Artificial Sequence: Synthetic oligonucleotide
  Antisense strand to SEQ ID NO: 887930
augagugcagaauucagcu

SEQ ID NO: 887932 - RNA, 19 nt, Artificial Sequence
  Description of Artificial Sequence: Synthetic oligonucleotide
  Sense strand starting at position 324 of SEQ ID NO: 588764
uccauugucuggccaagau

SEQ ID NO: 887933 - RNA, 19 nt, Artificial Sequence
  Description of Artificial Sequence: Synthetic oligonucleotide
  Antisense strand to SEQ ID NO: 887932
aucuuggccagacaaugga

SEQ ID NO: 887934 - RNA, 19 nt, Artificial Sequence
  Description of Artificial Sequence: Synthetic oligonucleotide
  Sense strand starting at position 542 of SEQ ID NO: 588764
augguacuacuuuguaacu

SEQ ID NO: 887935 - RNA, 19 nt, Artificial Sequence
  Description of Artificial Sequence: Synthetic oligonucleotide
  Antisense strand to SEQ ID NO: 887934
aguuacaaaguaguaccau

SEQ ID NO: 887936 - RNA, 19 nt, Artificial Sequence
  Description of Artificial Sequence: Synthetic oligonucleotide
  Sense strand starting at position 577 of SEQ ID NO: 588764
ccucauaacucuguaaggu

SEQ ID NO: 887937 - RNA, 19 nt, Artificial Sequence
  Description of Artificial Sequence: Synthetic oligonucleotide
  Antisense strand to SEQ ID NO: 887936
accuuacagaguuaugagg

SEQ ID NO: 887938 - RNA, 19 nt, Artificial Sequence
  Description of Artificial Sequence: Synthetic oligonucleotide
  Sense strand starting at position 578 of SEQ ID NO: 588764
cucauaacucuguaaggua

SEQ ID NO: 887939 - RNA, 19 nt, Artificial Sequence
  Description of Artificial Sequence: Synthetic oligonucleotide
  Antisense strand to SEQ ID NO: 887938
uaccuuacagaguuaugag

SEQ ID NO: 887940 - RNA, 19 nt, Artificial Sequence
  Description of Artificial Sequence: Synthetic oligonucleotide
  Sense strand starting at position 655 of SEQ ID NO: 588764
ggucaauugugucuuauuu

SEQ ID NO: 887941 - RNA, 19 nt, Artificial Sequence
  Description of Artificial Sequence: Synthetic oligonucleotide
  Antisense strand to SEQ ID NO: 887940
aaauaagacacaauugacc

SEQ ID NO: 887942 - RNA, 19 nt, Artificial Sequence
  Description of Artificial Sequence: Synthetic oligonucleotide
  Sense strand starting at position 855 of SEQ ID NO: 588764
acaccuauuugguauugga

SEQ ID NO: 887943 - RNA, 19 nt, Artificial Sequence
  Description of Artificial Sequence: Synthetic oligonucleotide
  Antisense strand to SEQ ID NO: 887942
uccaauaccaaauaggugu

SEQ ID NO: 887944 - RNA, 19 nt, Artificial Sequence
  Description of Artificial Sequence: Synthetic oligonucleotide
  Sense strand starting at position 921 of SEQ ID NO: 588764
uguuucuauguuuauccaa

SEQ ID NO: 887945 - RNA, 19 nt, Artificial Sequence
  Description of Artificial Sequence: Synthetic oligonucleotide
  Antisense strand to SEQ ID NO: 887944
uuggauaaacauagaaaca

SEQ ID NO: 887946 - RNA, 19 nt, Artificial Sequence
  Description of Artificial Sequence: Synthetic oligonucleotide
  Sense strand starting at position 1003 of SEQ ID NO: 588764
aaaggagaguuauagauaa

SEQ ID NO: 887947 - RNA, 19 nt, Artificial Sequence
  Description of Artificial Sequence: Synthetic oligonucleotide
  Antisense strand to SEQ ID NO: 887946
uuaucuauaacucuccuuu

SEQ ID NO: 887948 - RNA, 19 nt, Artificial Sequence
  Description of Artificial Sequence: Synthetic oligonucleotide
  Sense strand starting at position 1064 of SEQ ID NO: 588764
caguaugucuuccuaggga

SEQ ID NO: 887949 - RNA, 19 nt, Artificial Sequence
  Description of Artificial Sequence: Synthetic oligonucleotide
  Antisense strand to SEQ ID NO: 887948
ucccuaggaagacauacug

SEQ ID NO: 887950 - RNA, 19 nt, Artificial Sequence
  Description of Artificial Sequence: Synthetic oligonucleotide
  Sense strand starting at position 1067 of SEQ ID NO: 588764
uaugucuuccuagggauau

SEQ ID NO: 887951 - RNA, 19 nt, Artificial Sequence
  Description of Artificial Sequence: Synthetic oligonucleotide
  Antisense strand to SEQ ID NO: 887950
auaucccuaggaagacaua

SEQ ID NO: 887952 - RNA, 19 nt, Artificial Sequence
  Description of Artificial Sequence: Synthetic oligonucleotide
  Sense strand starting at position 1080 of SEQ ID NO: 588764
ggauauaaaugagaagaua

SEQ ID NO: 887953 - RNA, 19 nt, Artificial Sequence
  Description of Artificial Sequence: Synthetic oligonucleotide
  Antisense strand to SEQ ID NO: 887952
uaucuucucauuuauaucc

SEQ ID NO: 887954 - RNA, 19 nt, Artificial Sequence
  Description of Artificial Sequence: Synthetic oligonucleotide
  Sense strand starting at position 1133 of SEQ ID NO: 588764
gucauauauugagcaaagu

SEQ ID NO: 887955 - RNA, 19 nt, Artificial Sequence
  Description of Artificial Sequence: Synthetic oligonucleotide
  Antisense strand to SEQ ID NO: 887954
acuuugcucaauauaugac

SEQ ID NO: 887956 - RNA, 19 nt, Artificial Sequence
  Description of Artificial Sequence: Synthetic oligonucleotide
  Sense strand starting at position 1134 of SEQ ID NO: 588764
ucauauauugagcaaaguu

SEQ ID NO: 887957 - RNA, 19 nt, Artificial Sequence
  Description of Artificial Sequence: Synthetic oligonucleotide
  Antisense strand to SEQ ID NO: 887956
aacuuugcucaauauauga

SEQ ID NO: 887958 - RNA, 19 nt, Artificial Sequence
  Description of Artificial Sequence: Synthetic oligonucleotide
  Sense strand starting at position 1252 of SEQ ID NO: 588764
ugagauugccaguauauaa

SEQ ID NO: 887959 - RNA, 19 nt, Artificial Sequence
  Description of Artificial Sequence: Synthetic oligonucleotide
  Antisense strand to SEQ ID NO: 887958
uuauauacuggcaaucuca

SEQ ID NO: 887960 - RNA, 19 nt, Artificial Sequence
  Description of Artificial Sequence: Synthetic oligonucleotide
  Sense strand starting at position 1357 of SEQ ID NO: 588764
acaggauaguucuuuagaa

SEQ ID NO: 887961 - RNA, 19 nt, Artificial Sequence
  Description of Artificial Sequence: Synthetic oligonucleotide
  Antisense strand to SEQ ID NO: 887960
uucuaaagaacuauccugu

SEQ ID NO: 887962 - RNA, 19 nt, Artificial Sequence
  Description of Artificial Sequence: Synthetic oligonucleotide
  Sense strand starting at position 1358 of SEQ ID NO: 588764
caggauaguucuuuagaag

SEQ ID NO: 887963 - RNA, 19 nt, Artificial Sequence
  Description of Artificial Sequence: Synthetic oligonucleotide
  Antisense strand to SEQ ID NO: 887962
cuucuaaagaacuauccug

SEQ ID NO: 887964 - RNA, 19 nt, Artificial Sequence
  Description of Artificial Sequence: Synthetic oligonucleotide
  Sense strand starting at position 1594 of SEQ ID NO: 588764
guaagauaacuauguucca

SEQ ID NO: 887965 - RNA, 19 nt, Artificial Sequence
  Description of Artificial Sequence: Synthetic oligonucleotide
  Antisense strand to SEQ ID NO: 887964
uggaacauaguuaucuuac

SEQ ID NO: 887966 - RNA, 19 nt, Artificial Sequence
  Description of Artificial Sequence: Synthetic oligonucleotide
  Sense strand starting at position 1597 of SEQ ID NO: 588764
agauaacuauguuccagga

SEQ ID NO: 887967 - RNA, 19 nt, Artificial Sequence
  Description of Artificial Sequence: Synthetic oligonucleotide
  Antisense strand to SEQ ID NO: 887966
uccuggaacauaguuaucu

SEQ ID NO: 887968 - RNA, 19 nt, Artificial Sequence
  Description of Artificial Sequence: Synthetic oligonucleotide
  Sense strand starting at position 1680 of SEQ ID NO: 588764
augugaauuaaugguagaa

SEQ ID NO: 887969 - RNA, 19 nt, Artificial Sequence
  Description of Artificial Sequence: Synthetic oligonucleotide
  Antisense strand to SEQ ID NO: 887968
uucuaccauuaauucacau

SEQ ID NO: 887970 - RNA, 19 nt, Artificial Sequence
  Description of Artificial Sequence: Synthetic oligonucleotide
  Sense strand starting at position 1693 of SEQ ID NO: 588764
guagaagccugguccaaga

SEQ ID NO: 887971 - RNA, 19 nt, Artificial Sequence
  Description of Artificial Sequence: Synthetic oligonucleotide
  Antisense strand to SEQ ID NO: 887970
ucuuggaccaggcuucuac

SEQ ID NO: 887972 - RNA, 19 nt, Artificial Sequence
  Description of Artificial Sequence: Synthetic oligonucleotide
  Sense strand starting at position 1725 of SEQ ID NO: 588764
cagcuagucguggugguau

SEQ ID NO: 887973 - RNA, 19 nt, Artificial Sequence
  Description of Artificial Sequence: Synthetic oligonucleotide
  Antisense strand to SEQ ID NO: 887972
auaccaccacgacuagcug

SEQ ID NO: 887974 - RNA, 19 nt, Artificial Sequence
  Description of Artificial Sequence: Synthetic oligonucleotide
  Sense strand starting at position 1873 of SEQ ID NO: 588764
gcccaccagcucuauaaga

SEQ ID NO: 887975 - RNA, 19 nt, Artificial Sequence
  Description of Artificial Sequence: Synthetic oligonucleotide
  Antisense strand to SEQ ID NO: 887974
ucuuauagagcuggugggc

SEQ ID NO: 887976 - RNA, 19 nt, Artificial Sequence
  Description of Artificial Sequence: Synthetic oligonucleotide
  Sense strand starting at position 1875 of SEQ ID NO: 588764
ccaccagcucuauaagagu

SEQ ID NO: 887977 - RNA, 19 nt, Artificial Sequence
  Description of Artificial Sequence: Synthetic oligonucleotide
  Antisense strand to SEQ ID NO: 887976
acucuuauagagcuggugg

SEQ ID NO: 887978 - RNA, 19 nt, Artificial Sequence
  Description of Artificial Sequence: Synthetic oligonucleotide
  Sense strand starting at position 2164 of SEQ ID NO: 588764
caugacuacucuucggaca

SEQ ID NO: 887979 - RNA, 19 nt, Artificial Sequence
  Description of Artificial Sequence: Synthetic oligonucleotide
  Antisense strand to SEQ ID NO: 887978
uguccgaagaguagucaug

SEQ ID NO: 887980 - RNA, 19 nt, Artificial Sequence
  Description of Artificial Sequence: Synthetic oligonucleotide
  Sense strand starting at position 2197 of SEQ ID NO: 588764
ucauuugugcccgaggcuu

SEQ ID NO: 887981 - RNA, 19 nt, Artificial Sequence
  Description of Artificial Sequence: Synthetic oligonucleotide
  Antisense strand to SEQ ID NO: 887980
aagccucgggcacaaauga

SEQ ID NO: 887982 - RNA, 19 nt, Artificial Sequence
  Description of Artificial Sequence: Synthetic oligonucleotide
  Sense strand starting at position 2392 of SEQ ID NO: 588764
ggaaaccucucccucaagu

SEQ ID NO: 887983 - RNA, 19 nt, Artificial Sequence
  Description of Artificial Sequence: Synthetic oligonucleotide
  Antisense strand to SEQ ID NO: 887982
acuugagggagagguuucc

SEQ ID NO: 887984 - RNA, 19 nt, Artificial Sequence
  Description of Artificial Sequence: Synthetic oligonucleotide
  Sense strand starting at position 2486 of SEQ ID NO: 588764
gcaggugacaaucacuagu

SEQ ID NO: 887985 - RNA, 19 nt, Artificial Sequence
  Description of Artificial Sequence: Synthetic oligonucleotide
  Antisense strand to SEQ ID NO: 887984
acuagugauugucaccugc

SEQ ID NO: 887986 - RNA, 19 nt, Artificial Sequence
  Description of Artificial Sequence: Synthetic oligonucleotide
  Sense strand starting at position 2488 of SEQ ID NO: 588764
aggugacaaucacuaguuu

SEQ ID NO: 887987 - RNA, 19 nt, Artificial Sequence
  Description of Artificial Sequence: Synthetic oligonucleotide
  Antisense strand to SEQ ID NO: 887986
aaacuagugauugucaccu

SEQ ID NO: 887988 - RNA, 19 nt, Artificial Sequence
  Description of Artificial Sequence: Synthetic oligonucleotide
  Sense strand starting at position 2489 of SEQ ID NO: 588764
ggugacaaucacuaguuua

SEQ ID NO: 887989 - RNA, 19 nt, Artificial Sequence
  Description of Artificial Sequence: Synthetic oligonucleotide
  Antisense strand to SEQ ID NO: 887988
uaaacuagugauugucacc

SEQ ID NO: 887990 - RNA, 19 nt, Artificial Sequence
  Description of Artificial Sequence: Synthetic oligonucleotide
  Sense strand starting at position 2986 of SEQ ID NO: 588764
uguguacuguauucugaaa

SEQ ID NO: 887991 - RNA, 19 nt, Artificial Sequence
  Description of Artificial Sequence: Synthetic oligonucleotide
  Antisense strand to SEQ ID NO: 887990
uuucagaauacaguacaca

SEQ ID NO: 887992 - RNA, 19 nt, Artificial Sequence
  Description of Artificial Sequence: Synthetic oligonucleotide
  Sense strand starting at position 3017 of SEQ ID NO: 588764
uuacuuuggaguugugauu

SEQ ID NO: 887993 - RNA, 19 nt, Artificial Sequence
  Description of Artificial Sequence: Synthetic oligonucleotide
  Antisense strand to SEQ ID NO: 887992
aaucacaacuccaaaguaa

SEQ ID NO: 887994 - RNA, 19 nt, Artificial Sequence
  Description of Artificial Sequence: Synthetic oligonucleotide
  Sense strand starting at position 3217 of SEQ ID NO: 588764
gaucacuuaggcuggagua

SEQ ID NO: 887995 - RNA, 19 nt, Artificial Sequence
  Description of Artificial Sequence: Synthetic oligonucleotide
  Antisense strand to SEQ ID NO: 887994
uacuccagccuaagugauc

SEQ ID NO: 887996 - RNA, 19 nt, Artificial Sequence
  Description of Artificial Sequence: Synthetic oligonucleotide
  Sense strand starting at position 3231 of SEQ ID NO: 588764
gaguacauggcuugaucau

SEQ ID NO: 887997 - RNA, 19 nt, Artificial Sequence
  Description of Artificial Sequence: Synthetic oligonucleotide
  Antisense strand to SEQ ID NO: 887996
augaucaagccauguacuc

SEQ ID NO: 887998 - RNA, 19 nt, Artificial Sequence
  Description of Artificial Sequence: Synthetic oligonucleotide
  Sense strand starting at position 3476 of SEQ ID NO: 588764
ggcccagaguguguuauuu

SEQ ID NO: 887999 - RNA, 19 nt, Artificial Sequence
  Description of Artificial Sequence: Synthetic oligonucleotide
  Antisense strand to SEQ ID NO: 887998
aaauaacacacucugggcc

SEQ ID NO: 888000 - RNA, 19 nt, Artificial Sequence
  Description of Artificial Sequence: Synthetic oligonucleotide
  Sense strand starting at position 3480 of SEQ ID NO: 588764
cagaguguguuauuuagua

SEQ ID NO: 888001 - RNA, 19 nt, Artificial Sequence
  Description of Artificial Sequence: Synthetic oligonucleotide
  Antisense strand to SEQ ID NO: 888000
uacuaaauaacacacucug

SEQ ID NO: 888002 - RNA, 19 nt, Artificial Sequence
  Description of Artificial Sequence: Synthetic oligonucleotide
  Sense strand starting at position 3493 of SEQ ID NO: 588764
uuaguacuggccugaggaa

SEQ ID NO: 888003 - RNA, 19 nt, Artificial Sequence
  Description of Artificial Sequence: Synthetic oligonucleotide
  Antisense strand to SEQ ID NO: 888002
uuccucaggccaguacuaa

SEQ ID NO: 888004 - RNA, 19 nt, Artificial Sequence
  Description of Artificial Sequence: Synthetic oligonucleotide
  Sense strand starting at position 3617 of SEQ ID NO: 588764
ccaguuuaccagcauaaag

SEQ ID NO: 888005 - RNA, 19 nt, Artificial Sequence
  Description of Artificial Sequence: Synthetic oligonucleotide
  Antisense strand to SEQ ID NO: 888004
cuuuaugcugguaaacugg

SEQ ID NO: 888006 - RNA, 19 nt, Artificial Sequence
  Description of Artificial Sequence: Synthetic oligonucleotide
  Sense strand starting at position 3698 of SEQ ID NO: 588764
accagacaccuuggacauu

SEQ ID NO: 888007 - RNA, 19 nt, Artificial Sequence
  Description of Artificial Sequence: Synthetic oligonucleotide
  Antisense strand to SEQ ID NO: 888006
aauguccaaggugucuggu

SEQ ID NO: 888008 - RNA, 19 nt, Artificial Sequence
  Description of Artificial Sequence: Synthetic oligonucleotide
  Sense strand starting at position 3752 of SEQ ID NO: 588764
cagugucugcuauaguaga

SEQ ID NO: 888009 - RNA, 19 nt, Artificial Sequence
  Description of Artificial Sequence: Synthetic oligonucleotide
  Antisense strand to SEQ ID NO: 888008
ucuacuauagcagacacug

SEQ ID NO: 888010 - RNA, 19 nt, Artificial Sequence
  Description of Artificial Sequence: Synthetic oligonucleotide
  Sense strand starting at position 57 of SEQ ID NO: 588765
acaauauguucccuggauu

SEQ ID NO: 888011 - RNA, 19 nt, Artificial Sequence
  Description of Artificial Sequence: Synthetic oligonucleotide
  Antisense strand to SEQ ID NO: 888010
aauccagggaacauauugu

SEQ ID NO: 888012 - RNA, 19 nt, Artificial Sequence
  Description of Artificial Sequence: Synthetic oligonucleotide
  Sense strand starting at position 70 of SEQ ID NO: 588765
uggauucagccugggagga

SEQ ID NO: 888013 - RNA, 19 nt, Artificial Sequence
  Description of Artificial Sequence: Synthetic oligonucleotide
  Antisense strand to SEQ ID NO: 888012
uccucccaggcugaaucca

SEQ ID NO: 888014 - RNA, 19 nt, Artificial Sequence
  Description of Artificial Sequence: Synthetic oligonucleotide
  Sense strand starting at position 71 of SEQ ID NO: 588765
ggauucagccugggaggaa

SEQ ID NO: 888015 - RNA, 19 nt, Artificial Sequence
  Description of Artificial Sequence: Synthetic oligonucleotide
  Antisense strand to SEQ ID NO: 888014
uuccucccaggcugaaucc

SEQ ID NO: 888016 - RNA, 19 nt, Artificial Sequence
  Description of Artificial Sequence: Synthetic oligonucleotide
  Sense strand starting at position 216 of SEQ ID NO: 588765
accaguguaccggaauauu

SEQ ID NO: 888017 - RNA, 19 nt, Artificial Sequence
  Description of Artificial Sequence: Synthetic oligonucleotide
  Antisense strand to SEQ ID NO: 888016
aauauuccgguacacuggu

SEQ ID NO: 888018 - RNA, 19 nt, Artificial Sequence
  Description of Artificial Sequence: Synthetic oligonucleotide
  Sense strand starting at position 243 of SEQ ID NO: 588765
cgauuuguuaaccgucuuu

SEQ ID NO: 888019 - RNA, 19 nt, Artificial Sequence
  Description of Artificial Sequence: Synthetic oligonucleotide
  Antisense strand to SEQ ID NO: 888018
aaagacgguuaacaaaucg

SEQ ID NO: 888020 - RNA, 19 nt, Artificial Sequence
  Description of Artificial Sequence: Synthetic oligonucleotide
  Sense strand starting at position 255 of SEQ ID NO: 588765
cgucuuuaugaacauggua

SEQ ID NO: 888021 - RNA, 19 nt, Artificial Sequence
  Description of Artificial Sequence: Synthetic oligonucleotide
  Antisense strand to SEQ ID NO: 888020
uaccauguucauaaagacg

SEQ ID NO: 888022 - RNA, 19 nt, Artificial Sequence
  Description of Artificial Sequence: Synthetic oligonucleotide
  Sense strand starting at position 258 of SEQ ID NO: 588765
cuuuaugaacaugguaaua

SEQ ID NO: 888023 - RNA, 19 nt, Artificial Sequence
  Description of Artificial Sequence: Synthetic oligonucleotide
  Antisense strand to SEQ ID NO: 888022
uauuaccauguucauaaag

SEQ ID NO: 888024 - RNA, 19 nt, Artificial Sequence
  Description of Artificial Sequence: Synthetic oligonucleotide
  Sense strand starting at position 359 of SEQ ID NO: 588765
uggauacauuuggagcaau

SEQ ID NO: 888025 - RNA, 19 nt, Artificial Sequence
  Description of Artificial Sequence: Synthetic oligonucleotide
  Antisense strand to SEQ ID NO: 888024
auugcuccaaauguaucca

SEQ ID NO: 888026 - RNA, 19 nt, Artificial Sequence
  Description of Artificial Sequence: Synthetic oligonucleotide
  Sense strand starting at position 933 of SEQ ID NO: 588765
ucuacaucucuguauggau

SEQ ID NO: 888027 - RNA, 19 nt, Artificial Sequence
  Description of Artificial Sequence: Synthetic oligonucleotide
  Antisense strand to SEQ ID NO: 888026
auccauacagagauguaga

SEQ ID NO: 888028 - RNA, 19 nt, Artificial Sequence
  Description of Artificial Sequence: Synthetic oligonucleotide
  Sense strand starting at position 935 of SEQ ID NO: 588765
uacaucucuguauggauga

SEQ ID NO: 888029 - RNA, 19 nt, Artificial Sequence
  Description of Artificial Sequence: Synthetic oligonucleotide
  Antisense strand to SEQ ID NO: 888028
ucauccauacagagaugua

SEQ ID NO: 888030 - RNA, 19 nt, Artificial Sequence
  Description of Artificial Sequence: Synthetic oligonucleotide
  Sense strand starting at position 940 of SEQ ID NO: 588765
cucuguauggaugagcaaa

SEQ ID NO: 888031 - RNA, 19 nt, Artificial Sequence
  Description of Artificial Sequence: Synthetic oligonucleotide
  Antisense strand to SEQ ID NO: 888030
uuugcucauccauacagag

SEQ ID NO: 888032 - RNA, 19 nt, Artificial Sequence
  Description of Artificial Sequence: Synthetic oligonucleotide
  Sense strand starting at position 948 of SEQ ID NO: 588765
ggaugagcaaauggaguua

SEQ ID NO: 888033 - RNA, 19 nt, Artificial Sequence
  Description of Artificial Sequence: Synthetic oligonucleotide
  Antisense strand to SEQ ID NO: 888032
uaacuccauuugcucaucc

SEQ ID NO: 888034 - RNA, 19 nt, Artificial Sequence
  Description of Artificial Sequence: Synthetic oligonucleotide
  Sense strand starting at position 1274 of SEQ ID NO: 588765
accagcuaagcagaauuau

SEQ ID NO: 888035 - RNA, 19 nt, Artificial Sequence
  Description of Artificial Sequence: Synthetic oligonucleotide
  Antisense strand to SEQ ID NO: 888034
auaauucugcuuagcuggu

SEQ ID NO: 888036 - RNA, 19 nt, Artificial Sequence
  Description of Artificial Sequence: Synthetic oligonucleotide
  Sense strand starting at position 1726 of SEQ ID NO: 588765
cuccaugauccugaugagu

SEQ ID NO: 888037 - RNA, 19 nt, Artificial Sequence
  Description of Artificial Sequence: Synthetic oligonucleotide
  Antisense strand to SEQ ID NO: 888036
acucaucaggaucauggag

SEQ ID NO: 888038 - RNA, 19 nt, Artificial Sequence
  Description of Artificial Sequence: Synthetic oligonucleotide
  Sense strand starting at position 1765 of SEQ ID NO: 588765
aguuuacuucucuguagaa

SEQ ID NO: 888039 - RNA, 19 nt, Artificial Sequence
  Description of Artificial Sequence: Synthetic oligonucleotide
  Antisense strand to SEQ ID NO: 888038
uucuacagagaaguaaacu

SEQ ID NO: 888040 - RNA, 19 nt, Artificial Sequence
  Description of Artificial Sequence: Synthetic oligonucleotide
  Sense strand starting at position 1766 of SEQ ID NO: 588765
guuuacuucucuguagaaa

SEQ ID NO: 888041 - RNA, 19 nt, Artificial Sequence
  Description of Artificial Sequence: Synthetic oligonucleotide
  Antisense strand to SEQ ID NO: 888040
uuucuacagagaaguaaac

SEQ ID NO: 888042 - RNA, 19 nt, Artificial Sequence
  Description of Artificial Sequence: Synthetic oligonucleotide
  Sense strand starting at position 1855 of SEQ ID NO: 588765
uggauuaugauguagcuuu

SEQ ID NO: 888043 - RNA, 19 nt, Artificial Sequence
  Description of Artificial Sequence: Synthetic oligonucleotide
  Antisense strand to SEQ ID NO: 888042
aaagcuacaucauaaucca

SEQ ID NO: 888044 - RNA, 19 nt, Artificial Sequence
  Description of Artificial Sequence: Synthetic oligonucleotide
  Sense strand starting at position 2045 of SEQ ID NO: 588765
ugucaaguagccuacuuaa

SEQ ID NO: 888045 - RNA, 19 nt, Artificial Sequence
  Description of Artificial Sequence: Synthetic oligonucleotide
  Antisense strand to SEQ ID NO: 888044
uuaaguaggcuacuugaca

SEQ ID NO: 888046 - RNA, 19 nt, Artificial Sequence
  Description of Artificial Sequence: Synthetic oligonucleotide
  Sense strand starting at position 2231 of SEQ ID NO: 588765
ucaccaaagugcucaagau

SEQ ID NO: 888047 - RNA, 19 nt, Artificial Sequence
  Description of Artificial Sequence: Synthetic oligonucleotide
  Antisense strand to SEQ ID NO: 888046
aucuugagcacuuugguga

SEQ ID NO: 888048 - RNA, 19 nt, Artificial Sequence
  Description of Artificial Sequence: Synthetic oligonucleotide
  Sense strand starting at position 2257 of SEQ ID NO: 588765
cuagaaauuccuggagcca

SEQ ID NO: 888049 - RNA, 19 nt, Artificial Sequence
  Description of Artificial Sequence: Synthetic oligonucleotide
  Antisense strand to SEQ ID NO: 888048
uggcuccaggaauuucuag

SEQ ID NO: 888050 - RNA, 19 nt, Artificial Sequence
  Description of Artificial Sequence: Synthetic oligonucleotide
  Sense strand starting at position 2378 of SEQ ID NO: 588765
cggccuugugaggauucaa

SEQ ID NO: 888051 - RNA, 19 nt, Artificial Sequence
  Description of Artificial Sequence: Synthetic oligonucleotide
  Antisense strand to SEQ ID NO: 888050
uugaauccucacaaggccg

SEQ ID NO: 888052 - RNA, 19 nt, Artificial Sequence
  Description of Artificial Sequence: Synthetic oligonucleotide
  Sense strand starting at position 2489 of SEQ ID NO: 588765
acaguugacccuugauuaa

SEQ ID NO: 888053 - RNA, 19 nt, Artificial Sequence
  Description of Artificial Sequence: Synthetic oligonucleotide
  Antisense strand to SEQ ID NO: 888052
uuaaucaagggucaacugu

SEQ ID NO: 888054 - RNA, 19 nt, Artificial Sequence
  Description of Artificial Sequence: Synthetic oligonucleotide
  Sense strand starting at position 2492 of SEQ ID NO: 588765
guugacccuugauuaacaa

SEQ ID NO: 888055 - RNA, 19 nt, Artificial Sequence
  Description of Artificial Sequence: Synthetic oligonucleotide
  Antisense strand to SEQ ID NO: 888054
uuguuaaucaagggucaac

SEQ ID NO: 888056 - RNA, 19 nt, Artificial Sequence
  Description of Artificial Sequence: Synthetic oligonucleotide
  Sense strand starting at position 2576 of SEQ ID NO: 588765
guauuugcaggaugcgaaa

SEQ ID NO: 888057 - RNA, 19 nt, Artificial Sequence
  Description of Artificial Sequence: Synthetic oligonucleotide
  Antisense strand to SEQ ID NO: 888056
uuucgcauccugcaaauac

SEQ ID NO: 888058 - RNA, 19 nt, Artificial Sequence
  Description of Artificial Sequence: Synthetic oligonucleotide
  Sense strand starting at position 2680 of SEQ ID NO: 588765
acaaguggucuuggaacca

SEQ ID NO: 888059 - RNA, 19 nt, Artificial Sequence
  Description of Artificial Sequence: Synthetic oligonucleotide
  Antisense strand to SEQ ID NO: 888058
ugguuccaagaccacuugu

SEQ ID NO: 888060 - RNA, 19 nt, Artificial Sequence
  Description of Artificial Sequence: Synthetic oligonucleotide
  Sense strand starting at position 2767 of SEQ ID NO: 588765
ugcauauuucucugcugga

SEQ ID NO: 888061 - RNA, 19 nt, Artificial Sequence
  Description of Artificial Sequence: Synthetic oligonucleotide
  Antisense strand to SEQ ID NO: 888060
uccagcagagaaauaugca

SEQ ID NO: 888062 - RNA, 19 nt, Artificial Sequence
  Description of Artificial Sequence: Synthetic oligonucleotide
  Sense strand starting at position 2768 of SEQ ID NO: 588765
gcauauuucucugcuggaa

SEQ ID NO: 888063 - RNA, 19 nt, Artificial Sequence
  Description of Artificial Sequence: Synthetic oligonucleotide
  Antisense strand to SEQ ID NO: 888062
uuccagcagagaaauaugc

SEQ ID NO: 888064 - RNA, 19 nt, Artificial Sequence
  Description of Artificial Sequence: Synthetic oligonucleotide
  Sense strand starting at position 2782 of SEQ ID NO: 588765
uggaaucuuuacuucugaa

SEQ ID NO: 888065 - RNA, 19 nt, Artificial Sequence
  Description of Artificial Sequence: Synthetic oligonucleotide
  Antisense strand to SEQ ID NO: 888064
uucagaaguaaagauucca

SEQ ID NO: 888066 - RNA, 19 nt, Artificial Sequence
  Description of Artificial Sequence: Synthetic oligonucleotide
  Sense strand starting at position 2924 of SEQ ID NO: 588765
ccagauggaucagcaauau

SEQ ID NO: 888067 - RNA, 19 nt, Artificial Sequence
  Description of Artificial Sequence: Synthetic oligonucleotide
  Antisense strand to SEQ ID NO: 888066
auauugcugauccaucugg

SEQ ID NO: 888068 - RNA, 19 nt, Artificial Sequence
  Description of Artificial Sequence: Synthetic oligonucleotide
  Sense strand starting at position 2998 of SEQ ID NO: 588765
gguagauguaacugugaag

SEQ ID NO: 888069 - RNA, 19 nt, Artificial Sequence
  Description of Artificial Sequence: Synthetic oligonucleotide
  Antisense strand to SEQ ID NO: 888068
cuucacaguuacaucuacc

SEQ ID NO: 888070 - RNA, 19 nt, Artificial Sequence
  Description of Artificial Sequence: Synthetic oligonucleotide
  Sense strand starting at position 3030 of SEQ ID NO: 588765
gugacuacagguuaauagu

SEQ ID NO: 888071 - RNA, 19 nt, Artificial Sequence
  Description of Artificial Sequence: Synthetic oligonucleotide
  Antisense strand to SEQ ID NO: 888070
acuauuaaccuguagucac

SEQ ID NO: 888072 - RNA, 19 nt, Artificial Sequence
  Description of Artificial Sequence: Synthetic oligonucleotide
  Sense strand starting at position 3084 of SEQ ID NO: 588765
uggagauacucuuccuagu

SEQ ID NO: 888073 - RNA, 19 nt, Artificial Sequence
  Description of Artificial Sequence: Synthetic oligonucleotide
  Antisense strand to SEQ ID NO: 888072
acuaggaagaguaucucca

SEQ ID NO: 888074 - RNA, 19 nt, Artificial Sequence
  Description of Artificial Sequence: Synthetic oligonucleotide
  Sense strand starting at position 3104 of SEQ ID NO: 588765
uguguuacugcucugccau

SEQ ID NO: 888075 - RNA, 19 nt, Artificial Sequence
  Description of Artificial Sequence: Synthetic oligonucleotide
  Antisense strand to SEQ ID NO: 888074
auggcagagcaguaacaca

SEQ ID NO: 888076 - RNA, 19 nt, Artificial Sequence
  Description of Artificial Sequence: Synthetic oligonucleotide
  Sense strand starting at position 3408 of SEQ ID NO: 588765
ugucaaaucugauuaugca

SEQ ID NO: 888077 - RNA, 19 nt, Artificial Sequence
  Description of Artificial Sequence: Synthetic oligonucleotide
  Antisense strand to SEQ ID NO: 888076
ugcauaaucagauuugaca

SEQ ID NO: 888078 - RNA, 19 nt, Artificial Sequence
  Description of Artificial Sequence: Synthetic oligonucleotide
  Sense strand starting at position 3409 of SEQ ID NO: 588765
gucaaaucugauuaugcac

SEQ ID NO: 888079 - RNA, 19 nt, Artificial Sequence
  Description of Artificial Sequence: Synthetic oligonucleotide
  Antisense strand to SEQ ID NO: 888078
gugcauaaucagauuugac

SEQ ID NO: 888080 - RNA, 19 nt, Artificial Sequence
  Description of Artificial Sequence: Synthetic oligonucleotide
  Sense strand starting at position 3415 of SEQ ID NO: 588765
ucugauuaugcacagacau

SEQ ID NO: 888081 - RNA, 19 nt, Artificial Sequence
  Description of Artificial Sequence: Synthetic oligonucleotide
  Antisense strand to SEQ ID NO: 888080
augucugugcauaaucaga

SEQ ID NO: 888082 - RNA, 19 nt, Artificial Sequence
  Description of Artificial Sequence: Synthetic oligonucleotide
  Sense strand starting at position 3597 of SEQ ID NO: 588765
cuuauaauccagugaggga

SEQ ID NO: 888083 - RNA, 19 nt, Artificial Sequence
  Description of Artificial Sequence: Synthetic oligonucleotide
  Antisense strand to SEQ ID NO: 888082
ucccucacuggauuauaag

SEQ ID NO: 888084 - RNA, 19 nt, Artificial Sequence
  Description of Artificial Sequence: Synthetic oligonucleotide
  Sense strand starting at position 3631 of SEQ ID NO: 588765
aagaaugaugcauggaagu

SEQ ID NO: 888085 - RNA, 19 nt, Artificial Sequence
  Description of Artificial Sequence: Synthetic oligonucleotide
  Antisense strand to SEQ ID NO: 888084
acuuccaugcaucauucuu

SEQ ID NO: 888086 - RNA, 19 nt, Artificial Sequence
  Description of Artificial Sequence: Synthetic oligonucleotide
  Sense strand starting at position 3644 of SEQ ID NO: 588765
ggaaguaaaucacuguaac

SEQ ID NO: 888087 - RNA, 19 nt, Artificial Sequence
  Description of Artificial Sequence: Synthetic oligonucleotide
  Antisense strand to SEQ ID NO: 888086
guuacagugauuuacuucc

SEQ ID NO: 888088 - RNA, 19 nt, Artificial Sequence
  Description of Artificial Sequence: Synthetic oligonucleotide
  Sense strand starting at position 3647 of SEQ ID NO: 588765
aguaaaucacuguaacugu

SEQ ID NO: 888089 - RNA, 19 nt, Artificial Sequence
  Description of Artificial Sequence: Synthetic oligonucleotide
  Antisense strand to SEQ ID NO: 888088
acaguuacagugauuuacu

SEQ ID NO: 888090 - RNA, 19 nt, Artificial Sequence
  Description of Artificial Sequence: Synthetic oligonucleotide
  Sense strand starting at position 476 of SEQ ID NO: 588768
acggaugugguccaagauc

SEQ ID NO: 888091 - RNA, 19 nt, Artificial Sequence
  Description of Artificial Sequence: Synthetic oligonucleotide
  Antisense strand to SEQ ID NO: 888090
gaucuuggaccacauccgu

SEQ ID NO: 888092 - RNA, 19 nt, Artificial Sequence
  Description of Artificial Sequence: Synthetic oligonucleotide
  Sense strand starting at position 617 of SEQ ID NO: 588768
uggcauugccugugggaga

SEQ ID NO: 888093 - RNA, 19 nt, Artificial Sequence
  Description of Artificial Sequence: Synthetic oligonucleotide
  Antisense strand to SEQ ID NO: 888092
ucucccacaggcaaugcca

SEQ ID NO: 888094 - RNA, 19 nt, Artificial Sequence
  Description of Artificial Sequence: Synthetic oligonucleotide
  Sense strand starting at position 712 of SEQ ID NO: 588768
guagacucacauuggaguu

SEQ ID NO: 888095 - RNA, 19 nt, Artificial Sequence
  Description of Artificial Sequence: Synthetic oligonucleotide
  Antisense strand to SEQ ID NO: 888094
aacuccaaugugagucuac

SEQ ID NO: 888096 - RNA, 19 nt, Artificial Sequence
  Description of Artificial Sequence: Synthetic oligonucleotide
  Sense strand starting at position 852 of SEQ ID NO: 588768
cccauuuccuguggagacu

SEQ ID NO: 888097 - RNA, 19 nt, Artificial Sequence
  Description of Artificial Sequence: Synthetic oligonucleotide
  Antisense strand to SEQ ID NO: 888096
agucuccacaggaaauggg

SEQ ID NO: 888098 - RNA, 19 nt, Artificial Sequence
  Description of Artificial Sequence: Synthetic oligonucleotide
  Sense strand starting at position 1010 of SEQ ID NO: 588768
gguagacuuccucggcagu

SEQ ID NO: 888099 - RNA, 19 nt, Artificial Sequence
  Description of Artificial Sequence: Synthetic oligonucleotide
  Antisense strand to SEQ ID NO: 888098
acugccgaggaagucuacc

SEQ ID NO: 888100 - RNA, 19 nt, Artificial Sequence
  Description of Artificial Sequence: Synthetic oligonucleotide
  Sense strand starting at position 1012 of SEQ ID NO: 588768
uagacuuccucggcaguca

SEQ ID NO: 888101 - RNA, 19 nt, Artificial Sequence
  Description of Artificial Sequence: Synthetic oligonucleotide
  Antisense strand to SEQ ID NO: 888100
ugacugccgaggaagucua

SEQ ID NO: 888102 - RNA, 19 nt, Artificial Sequence
  Description of Artificial Sequence: Synthetic oligonucleotide
  Sense strand starting at position 1336 of SEQ ID NO: 588768
gcccguuggcguucauaag

SEQ ID NO: 888103 - RNA, 19 nt, Artificial Sequence
  Description of Artificial Sequence: Synthetic oligonucleotide
  Antisense strand to SEQ ID NO: 888102
cuuaugaacgccaacgggc

SEQ ID NO: 888104 - RNA, 19 nt, Artificial Sequence
  Description of Artificial Sequence: Synthetic oligonucleotide
  Sense strand starting at position 2032 of SEQ ID NO: 588768
cagccaaucguguugccaa

SEQ ID NO: 888105 - RNA, 19 nt, Artificial Sequence
  Description of Artificial Sequence: Synthetic oligonucleotide
  Antisense strand to SEQ ID NO: 888104
uuggcaacacgauuggcug

SEQ ID NO: 888106 - RNA, 19 nt, Artificial Sequence
  Description of Artificial Sequence: Synthetic oligonucleotide
  Sense strand starting at position 2210 of SEQ ID NO: 588768
ggagcucuugcuugaccuu

SEQ ID NO: 888107 - RNA, 19 nt, Artificial Sequence
  Description of Artificial Sequence: Synthetic oligonucleotide
  Antisense strand to SEQ ID NO: 888106
aaggucaagcaagagcucc

SEQ ID NO: 888108 - RNA, 19 nt, Artificial Sequence
  Description of Artificial Sequence: Synthetic oligonucleotide
  Sense strand starting at position 2408 of SEQ ID NO: 588768
uggugauggugccuagcaa

SEQ ID NO: 888109 - RNA, 19 nt, Artificial Sequence
  Description of Artificial Sequence: Synthetic oligonucleotide
  Antisense strand to SEQ ID NO: 888108
uugcuaggcaccaucacca

SEQ ID NO: 888110 - RNA, 19 nt, Artificial Sequence
  Description of Artificial Sequence: Synthetic oligonucleotide
  Sense strand starting at position 2643 of SEQ ID NO: 588768
aagaaccaggcaugugaaa

SEQ ID NO: 888111 - RNA, 19 nt, Artificial Sequence
  Description of Artificial Sequence: Synthetic oligonucleotide
  Antisense strand to SEQ ID NO: 888110
uuucacaugccugguucuu

SEQ ID NO: 888112 - RNA, 19 nt, Artificial Sequence
  Description of Artificial Sequence: Synthetic oligonucleotide
  Sense strand starting at position 2655 of SEQ ID NO: 588768
ugugaaagauccuuguaag

SEQ ID NO: 888113 - RNA, 19 nt, Artificial Sequence
  Description of Artificial Sequence: Synthetic oligonucleotide
  Antisense strand to SEQ ID NO: 888112
cuuacaaggaucuuucaca

SEQ ID NO: 888114 - RNA, 19 nt, Artificial Sequence
  Description of Artificial Sequence: Synthetic oligonucleotide
  Sense strand starting at position 2656 of SEQ ID NO: 588768
gugaaagauccuuguaagg

SEQ ID NO: 888115 - RNA, 19 nt, Artificial Sequence
  Description of Artificial Sequence: Synthetic oligonucleotide
  Antisense strand to SEQ ID NO: 888114
ccuuacaaggaucuuucac

SEQ ID NO: 888116 - RNA, 19 nt, Artificial Sequence
  Description of Artificial Sequence: Synthetic oligonucleotide
  Sense strand starting at position 2658 of SEQ ID NO: 588768
gaaagauccuuguaaggcu

SEQ ID NO: 888117 - RNA, 19 nt, Artificial Sequence
  Description of Artificial Sequence: Synthetic oligonucleotide
  Antisense strand to SEQ ID NO: 888116
agccuuacaaggaucuuuc

SEQ ID NO: 888118 - RNA, 19 nt, Artificial Sequence
  Description of Artificial Sequence: Synthetic oligonucleotide
  Sense strand starting at position 2791 of SEQ ID NO: 588768
gagugaggguccugaaggu

SEQ ID NO: 888119 - RNA, 19 nt, Artificial Sequence
  Description of Artificial Sequence: Synthetic oligonucleotide
  Antisense strand to SEQ ID NO: 888118
accuucaggacccucacuc

SEQ ID NO: 888120 - RNA, 19 nt, Artificial Sequence
  Description of Artificial Sequence: Synthetic oligonucleotide
  Sense strand starting at position 2924 of SEQ ID NO: 588768
gagaacagacgguguugua

SEQ ID NO: 888121 - RNA, 19 nt, Artificial Sequence
  Description of Artificial Sequence: Synthetic oligonucleotide
  Antisense strand to SEQ ID NO: 888120
uacaacaccgucuguucuc

SEQ ID NO: 888122 - RNA, 19 nt, Artificial Sequence
  Description of Artificial Sequence: Synthetic oligonucleotide
  Sense strand starting at position 3859 of SEQ ID NO: 588768
ccaagucccugaugggaau

SEQ ID NO: 888123 - RNA, 19 nt, Artificial Sequence
  Description of Artificial Sequence: Synthetic oligonucleotide
  Antisense strand to SEQ ID NO: 888122
auucccaucagggacuugg

SEQ ID NO: 888124 - RNA, 19 nt, Artificial Sequence
  Description of Artificial Sequence: Synthetic oligonucleotide
  Sense strand starting at position 65 of SEQ ID NO: 588769
cuaguuucugugugggaag

SEQ ID NO: 888125 - RNA, 19 nt, Artificial Sequence
  Description of Artificial Sequence: Synthetic oligonucleotide
  Antisense strand to SEQ ID NO: 888124
cuucccacacagaaacuag

SEQ ID NO: 888126 - RNA, 19 nt, Artificial Sequence
  Description of Artificial Sequence: Synthetic oligonucleotide
  Sense strand starting at position 125 of SEQ ID NO: 588769
uuucauaccgggugauguu

SEQ ID NO: 888127 - RNA, 19 nt, Artificial Sequence
  Description of Artificial Sequence: Synthetic oligonucleotide
  Antisense strand to SEQ ID NO: 888126
aacaucacccgguaugaaa

SEQ ID NO: 888128 - RNA, 19 nt, Artificial Sequence
  Description of Artificial Sequence: Synthetic oligonucleotide
  Sense strand starting at position 198 of SEQ ID NO: 588769
gguucuuuguggcucagau

SEQ ID NO: 888129 - RNA, 19 nt, Artificial Sequence
  Description of Artificial Sequence: Synthetic oligonucleotide
  Antisense strand to SEQ ID NO: 888128
aucugagccacaaagaacc

SEQ ID NO: 888130 - RNA, 19 nt, Artificial Sequence
  Description of Artificial Sequence: Synthetic oligonucleotide
  Sense strand starting at position 263 of SEQ ID NO: 588769
gcugcuacugaggaguaua

SEQ ID NO: 888131 - RNA, 19 nt, Artificial Sequence
  Description of Artificial Sequence: Synthetic oligonucleotide
  Antisense strand to SEQ ID NO: 888130
uauacuccucaguagcagc

SEQ ID NO: 888132 - RNA, 19 nt, Artificial Sequence
  Description of Artificial Sequence: Synthetic oligonucleotide
  Sense strand starting at position 266 of SEQ ID NO: 588769
gcuacugaggaguauaagu

SEQ ID NO: 888133 - RNA, 19 nt, Artificial Sequence
  Description of Artificial Sequence: Synthetic oligonucleotide
  Antisense strand to SEQ ID NO: 888132
acuuauacuccucaguagc

SEQ ID NO: 888134 - RNA, 19 nt, Artificial Sequence
  Description of Artificial Sequence: Synthetic oligonucleotide
  Sense strand starting at position 271 of SEQ ID NO: 588769
ugaggaguauaagucacua

SEQ ID NO: 888135 - RNA, 19 nt, Artificial Sequence
  Description of Artificial Sequence: Synthetic oligonucleotide
  Antisense strand to SEQ ID NO: 888134
uagugacuuauacuccuca

SEQ ID NO: 888136 - RNA, 19 nt, Artificial Sequence
  Description of Artificial Sequence: Synthetic oligonucleotide
  Sense strand starting at position 275 of SEQ ID NO: 588769
gaguauaagucacuaauag

SEQ ID NO: 888137 - RNA, 19 nt, Artificial Sequence
  Description of Artificial Sequence: Synthetic oligonucleotide
  Antisense strand to SEQ ID NO: 888136
cuauuagugacuuauacuc

SEQ ID NO: 888138 - RNA, 19 nt, Artificial Sequence
  Description of Artificial Sequence: Synthetic oligonucleotide
  Sense strand starting at position 338 of SEQ ID NO: 588769
agcccagugugguucuaaa

SEQ ID NO: 888139 - RNA, 19 nt, Artificial Sequence
  Description of Artificial Sequence: Synthetic oligonucleotide
  Antisense strand to SEQ ID NO: 888138
uuuagaaccacacugggcu

SEQ ID NO: 888140 - RNA, 19 nt, Artificial Sequence
  Description of Artificial Sequence: Synthetic oligonucleotide
  Sense strand starting at position 384 of SEQ ID NO: 588769
gugacagcucaaugggaaa

SEQ ID NO: 888141 - RNA, 19 nt, Artificial Sequence
  Description of Artificial Sequence: Synthetic oligonucleotide
  Antisense strand to SEQ ID NO: 888140
uuucccauugagcugucac

SEQ ID NO: 888142 - RNA, 19 nt, Artificial Sequence
  Description of Artificial Sequence: Synthetic oligonucleotide
  Sense strand starting at position 467 of SEQ ID NO: 588769
acaucaauguaaguucuca

SEQ ID NO: 888143 - RNA, 19 nt, Artificial Sequence
  Description of Artificial Sequence: Synthetic oligonucleotide
  Antisense strand to SEQ ID NO: 888142
ugagaacuuacauugaugu

SEQ ID NO: 888144 - RNA, 19 nt, Artificial Sequence
  Description of Artificial Sequence: Synthetic oligonucleotide
  Sense strand starting at position 571 of SEQ ID NO: 588769
gcguuugaaacagaugcuu

SEQ ID NO: 888145 - RNA, 19 nt, Artificial Sequence
  Description of Artificial Sequence: Synthetic oligonucleotide
  Antisense strand to SEQ ID NO: 888144
aagcaucuguuucaaacgc

SEQ ID NO: 888146 - RNA, 19 nt, Artificial Sequence
  Description of Artificial Sequence: Synthetic oligonucleotide
  Sense strand starting at position 573 of SEQ ID NO: 588769
guuugaaacagaugcuuug

SEQ ID NO: 888147 - RNA, 19 nt, Artificial Sequence
  Description of Artificial Sequence: Synthetic oligonucleotide
  Antisense strand to SEQ ID NO: 888146
caaagcaucuguuucaaac

SEQ ID NO: 888148 - RNA, 19 nt, Artificial Sequence
  Description of Artificial Sequence: Synthetic oligonucleotide
  Sense strand starting at position 661 of SEQ ID NO: 588769
gaauguuccuugcucuuag

SEQ ID NO: 888149 - RNA, 19 nt, Artificial Sequence
  Description of Artificial Sequence: Synthetic oligonucleotide
  Antisense strand to SEQ ID NO: 888148
cuaagagcaaggaacauuc

SEQ ID NO: 888150 - RNA, 19 nt, Artificial Sequence
  Description of Artificial Sequence: Synthetic oligonucleotide
  Sense strand starting at position 778 of SEQ ID NO: 588769
gguguuuggguccagucaa

SEQ ID NO: 888151 - RNA, 19 nt, Artificial Sequence
  Description of Artificial Sequence: Synthetic oligonucleotide
  Antisense strand to SEQ ID NO: 888150
uugacuggacccaaacacc

SEQ ID NO: 888152 - RNA, 19 nt, Artificial Sequence
  Description of Artificial Sequence: Synthetic oligonucleotide
  Sense strand starting at position 852 of SEQ ID NO: 588769
ccagcauuccaguaugguu

SEQ ID NO: 888153 - RNA, 19 nt, Artificial Sequence
  Description of Artificial Sequence: Synthetic oligonucleotide
  Antisense strand to SEQ ID NO: 888152
aaccauacuggaaugcugg

SEQ ID NO: 888154 - RNA, 19 nt, Artificial Sequence
  Description of Artificial Sequence: Synthetic oligonucleotide
  Sense strand starting at position 938 of SEQ ID NO: 588769
gcaaccuugcuauagcaaa

SEQ ID NO: 888155 - RNA, 19 nt, Artificial Sequence
  Description of Artificial Sequence: Synthetic oligonucleotide
  Antisense strand to SEQ ID NO: 888154
uuugcuauagcaagguugc

SEQ ID NO: 888156 - RNA, 19 nt, Artificial Sequence
  Description of Artificial Sequence: Synthetic oligonucleotide
  Sense strand starting at position 1075 of SEQ ID NO: 588769
ggaucuugugcucauggca

SEQ ID NO: 888157 - RNA, 19 nt, Artificial Sequence
  Description of Artificial Sequence: Synthetic oligonucleotide
  Antisense strand to SEQ ID NO: 888156
ugccaugagcacaagaucc

SEQ ID NO: 888158 - RNA, 19 nt, Artificial Sequence
  Description of Artificial Sequence: Synthetic oligonucleotide
  Sense strand starting at position 1198 of SEQ ID NO: 588769
gccuauagagacugucaca

SEQ ID NO: 888159 - RNA, 19 nt, Artificial Sequence
  Description of Artificial Sequence: Synthetic oligonucleotide
  Antisense strand to SEQ ID NO: 888158
ugugacagucucuauaggc

SEQ ID NO: 888160 - RNA, 19 nt, Artificial Sequence
  Description of Artificial Sequence: Synthetic oligonucleotide
  Sense strand starting at position 1547 of SEQ ID NO: 588769
gggugaguccaagaagcaa

SEQ ID NO: 888161 - RNA, 19 nt, Artificial Sequence
  Description of Artificial Sequence: Synthetic oligonucleotide
  Antisense strand to SEQ ID NO: 888160
uugcuucuuggacucaccc

SEQ ID NO: 888162 - RNA, 19 nt, Artificial Sequence
  Description of Artificial Sequence: Synthetic oligonucleotide
  Sense strand starting at position 1923 of SEQ ID NO: 588769
cucucuucuguccaguaga

SEQ ID NO: 888163 - RNA, 19 nt, Artificial Sequence
  Description of Artificial Sequence: Synthetic oligonucleotide
  Antisense strand to SEQ ID NO: 888162
ucuacuggacagaagagag

SEQ ID NO: 888164 - RNA, 19 nt, Artificial Sequence
  Description of Artificial Sequence: Synthetic oligonucleotide
  Sense strand starting at position 2162 of SEQ ID NO: 588769
gcaggaucaggaggugauu

SEQ ID NO: 888165 - RNA, 19 nt, Artificial Sequence
  Description of Artificial Sequence: Synthetic oligonucleotide
  Antisense strand to SEQ ID NO: 888164
aaucaccuccugauccugc

SEQ ID NO: 888166 - RNA, 19 nt, Artificial Sequence
  Description of Artificial Sequence: Synthetic oligonucleotide
  Sense strand starting at position 2171 of SEQ ID NO: 588769
ggaggugauugugccaguu

SEQ ID NO: 888167 - RNA, 19 nt, Artificial Sequence
  Description of Artificial Sequence: Synthetic oligonucleotide
  Antisense strand to SEQ ID NO: 888166
aacuggcacaaucaccucc

SEQ ID NO: 888168 - RNA, 19 nt, Artificial Sequence
  Description of Artificial Sequence: Synthetic oligonucleotide
  Sense strand starting at position 2174 of SEQ ID NO: 588769
ggugauugugccaguuagg

SEQ ID NO: 888169 - RNA, 19 nt, Artificial Sequence
  Description of Artificial Sequence: Synthetic oligonucleotide
  Antisense strand to SEQ ID NO: 888168
ccuaacuggcacaaucacc

SEQ ID NO: 888170 - RNA, 19 nt, Artificial Sequence
  Description of Artificial Sequence: Synthetic oligonucleotide
  Sense strand starting at position 2299 of SEQ ID NO: 588769
ucagcaaauguaugcucau

SEQ ID NO: 888171 - RNA, 19 nt, Artificial Sequence
  Description of Artificial Sequence: Synthetic oligonucleotide
  Antisense strand to SEQ ID NO: 888170
augagcauacauuugcuga

SEQ ID NO: 888172 - RNA, 19 nt, Artificial Sequence
  Description of Artificial Sequence: Synthetic oligonucleotide
  Sense strand starting at position 2335 of SEQ ID NO: 588769
auggccauaucauugcaga

SEQ ID NO: 888173 - RNA, 19 nt, Artificial Sequence
  Description of Artificial Sequence: Synthetic oligonucleotide
  Antisense strand to SEQ ID NO: 888172
ucugcaaugauauggccau

SEQ ID NO: 888174 - RNA, 19 nt, Artificial Sequence
  Description of Artificial Sequence: Synthetic oligonucleotide
  Sense strand starting at position 2376 of SEQ ID NO: 588769
gcaucaaucucccuuagug

SEQ ID NO: 888175 - RNA, 19 nt, Artificial Sequence
  Description of Artificial Sequence: Synthetic oligonucleotide
  Antisense strand to SEQ ID NO: 888174
cacuaagggagauugaugc

SEQ ID NO: 888176 - RNA, 19 nt, Artificial Sequence
  Description of Artificial Sequence: Synthetic oligonucleotide
  Sense strand starting at position 2378 of SEQ ID NO: 588769
aucaaucucccuuaguguu

SEQ ID NO: 888177 - RNA, 19 nt, Artificial Sequence
  Description of Artificial Sequence: Synthetic oligonucleotide
  Antisense strand to SEQ ID NO: 888176
aacacuaagggagauugau

SEQ ID NO: 888178 - RNA, 19 nt, Artificial Sequence
  Description of Artificial Sequence: Synthetic oligonucleotide
  Sense strand starting at position 2406 of SEQ ID NO: 588769
aauaaaugggucuagcuau

SEQ ID NO: 888179 - RNA, 19 nt, Artificial Sequence
  Description of Artificial Sequence: Synthetic oligonucleotide
  Antisense strand to SEQ ID NO: 888178
auagcuagacccauuuauu

SEQ ID NO: 888180 - RNA, 19 nt, Artificial Sequence
  Description of Artificial Sequence: Synthetic oligonucleotide
  Sense strand starting at position 2424 of SEQ ID NO: 588769
ugcuguuuagcugggacau

SEQ ID NO: 888181 - RNA, 19 nt, Artificial Sequence
  Description of Artificial Sequence: Synthetic oligonucleotide
  Antisense strand to SEQ ID NO: 888180
augucccagcuaaacagca

SEQ ID NO: 888182 - RNA, 19 nt, Artificial Sequence
  Description of Artificial Sequence: Synthetic oligonucleotide
  Sense strand starting at position 2599 of SEQ ID NO: 588769
ucacacaugugauuguacu

SEQ ID NO: 888183 - RNA, 19 nt, Artificial Sequence
  Description of Artificial Sequence: Synthetic oligonucleotide
  Antisense strand to SEQ ID NO: 888182
aguacaaucacauguguga

SEQ ID NO: 888184 - RNA, 19 nt, Artificial Sequence
  Description of Artificial Sequence: Synthetic oligonucleotide
  Sense strand starting at position 2852 of SEQ ID NO: 588769
cccagaucucauggccuua

SEQ ID NO: 888185 - RNA, 19 nt, Artificial Sequence
  Description of Artificial Sequence: Synthetic oligonucleotide
  Antisense strand to SEQ ID NO: 888184
uaaggccaugagaucuggg

SEQ ID NO: 888186 - RNA, 19 nt, Artificial Sequence
  Description of Artificial Sequence: Synthetic oligonucleotide
  Sense strand starting at position 2857 of SEQ ID NO: 588769
aucucauggccuuaucagu

SEQ ID NO: 888187 - RNA, 19 nt, Artificial Sequence
  Description of Artificial Sequence: Synthetic oligonucleotide
  Antisense strand to SEQ ID NO: 888186
acugauaaggccaugagau

SEQ ID NO: 888188 - RNA, 19 nt, Artificial Sequence
  Description of Artificial Sequence: Synthetic oligonucleotide
  Sense strand starting at position 2863 of SEQ ID NO: 588769
uggccuuaucagugccaga

SEQ ID NO: 888189 - RNA, 19 nt, Artificial Sequence
  Description of Artificial Sequence: Synthetic oligonucleotide
  Antisense strand to SEQ ID NO: 888188
ucuggcacugauaaggcca

SEQ ID NO: 888190 - RNA, 19 nt, Artificial Sequence
  Description of Artificial Sequence: Synthetic oligonucleotide
  Sense strand starting at position 2978 of SEQ ID NO: 588769
cccagccuccuguaaugaa

SEQ ID NO: 888191 - RNA, 19 nt, Artificial Sequence
  Description of Artificial Sequence: Synthetic oligonucleotide
  Antisense strand to SEQ ID NO: 888190
uucauuacaggaggcuggg

SEQ ID NO: 888192 - RNA, 19 nt, Artificial Sequence
  Description of Artificial Sequence: Synthetic oligonucleotide
  Sense strand starting at position 2990 of SEQ ID NO: 588769
uaaugaaccugccuuggua

SEQ ID NO: 888193 - RNA, 19 nt, Artificial Sequence
  Description of Artificial Sequence: Synthetic oligonucleotide
  Antisense strand to SEQ ID NO: 888192
uaccaaggcagguucauua

SEQ ID NO: 888194 - RNA, 19 nt, Artificial Sequence
  Description of Artificial Sequence: Synthetic oligonucleotide
  Sense strand starting at position 3070 of SEQ ID NO: 588769
cuggcuuguccuccgcaga

SEQ ID NO: 888195 - RNA, 19 nt, Artificial Sequence
  Description of Artificial Sequence: Synthetic oligonucleotide
  Antisense strand to SEQ ID NO: 888194
ucugcggaggacaagccag

SEQ ID NO: 888196 - RNA, 19 nt, Artificial Sequence
  Description of Artificial Sequence: Synthetic oligonucleotide
  Sense strand starting at position 3436 of SEQ ID NO: 588769
uugcauccugguggauaaa

SEQ ID NO: 888197 - RNA, 19 nt, Artificial Sequence
  Description of Artificial Sequence: Synthetic oligonucleotide
  Antisense strand to SEQ ID NO: 888196
uuuauccaccaggaugcaa

SEQ ID NO: 888198 - RNA, 19 nt, Artificial Sequence
  Description of Artificial Sequence: Synthetic oligonucleotide
  Sense strand starting at position 3437 of SEQ ID NO: 588769
ugcauccugguggauaaau

SEQ ID NO: 888199 - RNA, 19 nt, Artificial Sequence
  Description of Artificial Sequence: Synthetic oligonucleotide
  Antisense strand to SEQ ID NO: 888198
auuuauccaccaggaugca

SEQ ID NO: 888200 - RNA, 19 nt, Artificial Sequence
  Description of Artificial Sequence: Synthetic oligonucleotide
  Sense strand starting at position 3469 of SEQ ID NO: 588769
gccucugggugucuagaaa

SEQ ID NO: 888201 - RNA, 19 nt, Artificial Sequence
  Description of Artificial Sequence: Synthetic oligonucleotide
  Antisense strand to SEQ ID NO: 888200
uuucuagacacccagaggc

SEQ ID NO: 888202 - RNA, 19 nt, Artificial Sequence
  Description of Artificial Sequence: Synthetic oligonucleotide
  Sense strand starting at position 3554 of SEQ ID NO: 588769
ucaagaaucugguagaaag

SEQ ID NO: 888203 - RNA, 19 nt, Artificial Sequence
  Description of Artificial Sequence: Synthetic oligonucleotide
  Antisense strand to SEQ ID NO: 888202
cuuucuaccagauucuuga

SEQ ID NO: 888204 - RNA, 19 nt, Artificial Sequence
  Description of Artificial Sequence: Synthetic oligonucleotide
  Sense strand starting at position 34 of SEQ ID NO: 588770
aaaggaggcuuacugaguu

SEQ ID NO: 888205 - RNA, 19 nt, Artificial Sequence
  Description of Artificial Sequence: Synthetic oligonucleotide
  Antisense strand to SEQ ID NO: 888204
aacucaguaagccuccuuu

SEQ ID NO: 888206 - RNA, 19 nt, Artificial Sequence
  Description of Artificial Sequence: Synthetic oligonucleotide
  Sense strand starting at position 38 of SEQ ID NO: 588770
gaggcuuacugaguugagu

SEQ ID NO: 888207 - RNA, 19 nt, Artificial Sequence
  Description of Artificial Sequence: Synthetic oligonucleotide
  Antisense strand to SEQ ID NO: 888206
acucaacucaguaagccuc

SEQ ID NO: 888208 - RNA, 19 nt, Artificial Sequence
  Description of Artificial Sequence: Synthetic oligonucleotide
  Sense strand starting at position 143 of SEQ ID NO: 588770
cuaugugcugcuucgguua

SEQ ID NO: 888209 - RNA, 19 nt, Artificial Sequence
  Description of Artificial Sequence: Synthetic oligonucleotide
  Antisense strand to SEQ ID NO: 888208
uaaccgaagcagcacauag

SEQ ID NO: 888210 - RNA, 19 nt, Artificial Sequence
  Description of Artificial Sequence: Synthetic oligonucleotide
  Sense strand starting at position 175 of SEQ ID NO: 588770
auuugaaucugguacgauc

SEQ ID NO: 888211 - RNA, 19 nt, Artificial Sequence
  Description of Artificial Sequence: Synthetic oligonucleotide
  Antisense strand to SEQ ID NO: 888210
gaucguaccagauucaaau

SEQ ID NO: 888212 - RNA, 19 nt, Artificial Sequence
  Description of Artificial Sequence: Synthetic oligonucleotide
  Sense strand starting at position 183 of SEQ ID NO: 588770
cugguacgaucuuuagacu

SEQ ID NO: 888213 - RNA, 19 nt, Artificial Sequence
  Description of Artificial Sequence: Synthetic oligonucleotide
  Antisense strand to SEQ ID NO: 888212
agucuaaagaucguaccag

SEQ ID NO: 888214 - RNA, 19 nt, Artificial Sequence
  Description of Artificial Sequence: Synthetic oligonucleotide
  Sense strand starting at position 184 of SEQ ID NO: 588770
ugguacgaucuuuagacuu

SEQ ID NO: 888215 - RNA, 19 nt, Artificial Sequence
  Description of Artificial Sequence: Synthetic oligonucleotide
  Antisense strand to SEQ ID NO: 888214
aagucuaaagaucguacca

SEQ ID NO: 888216 - RNA, 19 nt, Artificial Sequence
  Description of Artificial Sequence: Synthetic oligonucleotide
  Sense strand starting at position 332 of SEQ ID NO: 588770
gguucccuacgugauugaa

SEQ ID NO: 888217 - RNA, 19 nt, Artificial Sequence
  Description of Artificial Sequence: Synthetic oligonucleotide
  Antisense strand to SEQ ID NO: 888216
uucaaucacguagggaacc

SEQ ID NO: 888218 - RNA, 19 nt, Artificial Sequence
  Description of Artificial Sequence: Synthetic oligonucleotide
  Sense strand starting at position 334 of SEQ ID NO: 588770
uucccuacgugauugaauu

SEQ ID NO: 888219 - RNA, 19 nt, Artificial Sequence
  Description of Artificial Sequence: Synthetic oligonucleotide
  Antisense strand to SEQ ID NO: 888218
aauucaaucacguagggaa

SEQ ID NO: 888220 - RNA, 19 nt, Artificial Sequence
  Description of Artificial Sequence: Synthetic oligonucleotide
  Sense strand starting at position 335 of SEQ ID NO: 588770
ucccuacgugauugaauua

SEQ ID NO: 888221 - RNA, 19 nt, Artificial Sequence
  Description of Artificial Sequence: Synthetic oligonucleotide
  Antisense strand to SEQ ID NO: 888220
uaauucaaucacguaggga

SEQ ID NO: 888222 - RNA, 19 nt, Artificial Sequence
  Description of Artificial Sequence: Synthetic oligonucleotide
  Sense strand starting at position 340 of SEQ ID NO: 588770
acgugauugaauuacuugu

SEQ ID NO: 888223 - RNA, 19 nt, Artificial Sequence
  Description of Artificial Sequence: Synthetic oligonucleotide
  Antisense strand to SEQ ID NO: 888222
acaaguaauucaaucacgu

SEQ ID NO: 888224 - RNA, 19 nt, Artificial Sequence
  Description of Artificial Sequence: Synthetic oligonucleotide
  Sense strand starting at position 342 of SEQ ID NO: 588770
gugauugaauuacuuguuu

SEQ ID NO: 888225 - RNA, 19 nt, Artificial Sequence
  Description of Artificial Sequence: Synthetic oligonucleotide
  Antisense strand to SEQ ID NO: 888224
aaacaaguaauucaaucac

SEQ ID NO: 888226 - RNA, 19 nt, Artificial Sequence
  Description of Artificial Sequence: Synthetic oligonucleotide
  Sense strand starting at position 431 of SEQ ID NO: 588770
ucaguucugagucagguca

SEQ ID NO: 888227 - RNA, 19 nt, Artificial Sequence
  Description of Artificial Sequence: Synthetic oligonucleotide
  Antisense strand to SEQ ID NO: 888226
ugaccugacucagaacuga

SEQ ID NO: 888228 - RNA, 19 nt, Artificial Sequence
  Description of Artificial Sequence: Synthetic oligonucleotide
  Sense strand starting at position 483 of SEQ ID NO: 588770
aggaauccauuagaaucaa

SEQ ID NO: 888229 - RNA, 19 nt, Artificial Sequence
  Description of Artificial Sequence: Synthetic oligonucleotide
  Antisense strand to SEQ ID NO: 888228
uugauucuaauggauuccu

SEQ ID NO: 888230 - RNA, 19 nt, Artificial Sequence
  Description of Artificial Sequence: Synthetic oligonucleotide
  Sense strand starting at position 597 of SEQ ID NO: 588770
acaaaucuguuugcgauga

SEQ ID NO: 888231 - RNA, 19 nt, Artificial Sequence
  Description of Artificial Sequence: Synthetic oligonucleotide
  Antisense strand to SEQ ID NO: 888230
ucaucgcaaacagauuugu

SEQ ID NO: 888232 - RNA, 19 nt, Artificial Sequence
  Description of Artificial Sequence: Synthetic oligonucleotide
  Sense strand starting at position 601 of SEQ ID NO: 588770
aucuguuugcgaugagaaa

SEQ ID NO: 888233 - RNA, 19 nt, Artificial Sequence
  Description of Artificial Sequence: Synthetic oligonucleotide
  Antisense strand to SEQ ID NO: 888232
uuucucaucgcaaacagau

SEQ ID NO: 888234 - RNA, 19 nt, Artificial Sequence
  Description of Artificial Sequence: Synthetic oligonucleotide
  Sense strand starting at position 685 of SEQ ID NO: 588770
acagaucuugcccacugaa

SEQ ID NO: 888235 - RNA, 19 nt, Artificial Sequence
  Description of Artificial Sequence: Synthetic oligonucleotide
  Antisense strand to SEQ ID NO: 888234
uucagugggcaagaucugu

SEQ ID NO: 888236 - RNA, 19 nt, Artificial Sequence
  Description of Artificial Sequence: Synthetic oligonucleotide
  Sense strand starting at position 854 of SEQ ID NO: 588770
gaguaacuucgugacuggu

SEQ ID NO: 888237 - RNA, 19 nt, Artificial Sequence
  Description of Artificial Sequence: Synthetic oligonucleotide
  Antisense strand to SEQ ID NO: 888236
accagucacgaaguuacuc

SEQ ID NO: 888238 - RNA, 19 nt, Artificial Sequence
  Description of Artificial Sequence: Synthetic oligonucleotide
  Sense strand starting at position 857 of SEQ ID NO: 588770
uaacuucgugacugguuaa

SEQ ID NO: 888239 - RNA, 19 nt, Artificial Sequence
  Description of Artificial Sequence: Synthetic oligonucleotide
  Antisense strand to SEQ ID NO: 888238
uuaaccagucacgaaguua

SEQ ID NO: 888240 - RNA, 19 nt, Artificial Sequence
  Description of Artificial Sequence: Synthetic oligonucleotide
  Sense strand starting at position 860 of SEQ ID NO: 588770
cuucgugacugguuaacaa

SEQ ID NO: 888241 - RNA, 19 nt, Artificial Sequence
  Description of Artificial Sequence: Synthetic oligonucleotide
  Antisense strand to SEQ ID NO: 888240
uuguuaaccagucacgaag

SEQ ID NO: 888242 - RNA, 19 nt, Artificial Sequence
  Description of Artificial Sequence: Synthetic oligonucleotide
  Sense strand starting at position 956 of SEQ ID NO: 588770
gugcaucugugaucaagga

SEQ ID NO: 888243 - RNA, 19 nt, Artificial Sequence
  Description of Artificial Sequence: Synthetic oligonucleotide
  Antisense strand to SEQ ID NO: 888242
uccuugaucacagaugcac

SEQ ID NO: 888244 - RNA, 19 nt, Artificial Sequence
  Description of Artificial Sequence: Synthetic oligonucleotide
  Sense strand starting at position 972 of SEQ ID NO: 588770
ggagcccaccaaugaaauu

SEQ ID NO: 888245 - RNA, 19 nt, Artificial Sequence
  Description of Artificial Sequence: Synthetic oligonucleotide
  Antisense strand to SEQ ID NO: 888244
aauuucauuggugggcucc

SEQ ID NO: 888246 - RNA, 19 nt, Artificial Sequence
  Description of Artificial Sequence: Synthetic oligonucleotide
  Sense strand starting at position 982 of SEQ ID NO: 588770
aaugaaauucuuuguagag

SEQ ID NO: 888247 - RNA, 19 nt, Artificial Sequence
  Description of Artificial Sequence: Synthetic oligonucleotide
  Antisense strand to SEQ ID NO: 888246
cucuacaaagaauuucauu

SEQ ID NO: 888248 - RNA, 19 nt, Artificial Sequence
  Description of Artificial Sequence: Synthetic oligonucleotide
  Sense strand starting at position 983 of SEQ ID NO: 588770
augaaauucuuuguagagu

SEQ ID NO: 888249 - RNA, 19 nt, Artificial Sequence
  Description of Artificial Sequence: Synthetic oligonucleotide
  Antisense strand to SEQ ID NO: 888248
acucuacaaagaauuucau

SEQ ID NO: 888250 - RNA, 19 nt, Artificial Sequence
  Description of Artificial Sequence: Synthetic oligonucleotide
  Sense strand starting at position 1092 of SEQ ID NO: 588770
ccacuauauggccagcgau

SEQ ID NO: 888251 - RNA, 19 nt, Artificial Sequence
  Description of Artificial Sequence: Synthetic oligonucleotide
  Antisense strand to SEQ ID NO: 888250
aucgcuggccauauagugg

SEQ ID NO: 888252 - RNA, 19 nt, Artificial Sequence
  Description of Artificial Sequence: Synthetic oligonucleotide
  Sense strand starting at position 1177 of SEQ ID NO: 588770
gagggauccucagagaaca

SEQ ID NO: 888253 - RNA, 19 nt, Artificial Sequence
  Description of Artificial Sequence: Synthetic oligonucleotide
  Antisense strand to SEQ ID NO: 888252
uguucucugaggaucccuc

SEQ ID NO: 888254 - RNA, 19 nt, Artificial Sequence
  Description of Artificial Sequence: Synthetic oligonucleotide
  Sense strand starting at position 1220 of SEQ ID NO: 588770
guguguggacgcuaggaaa

SEQ ID NO: 888255 - RNA, 19 nt, Artificial Sequence
  Description of Artificial Sequence: Synthetic oligonucleotide
  Antisense strand to SEQ ID NO: 888254
uuuccuagcguccacacac

SEQ ID NO: 888256 - RNA, 19 nt, Artificial Sequence
  Description of Artificial Sequence: Synthetic oligonucleotide
  Sense strand starting at position 1256 of SEQ ID NO: 588770
cuggaaggucaaugaaguu

SEQ ID NO: 888257 - RNA, 19 nt, Artificial Sequence
  Description of Artificial Sequence: Synthetic oligonucleotide
  Antisense strand to SEQ ID NO: 888256
aacuucauugaccuuccag

SEQ ID NO: 888258 - RNA, 19 nt, Artificial Sequence
  Description of Artificial Sequence: Synthetic oligonucleotide
  Sense strand starting at position 1353 of SEQ ID NO: 588770
gcgggagaaugguuucauu

SEQ ID NO: 888259 - RNA, 19 nt, Artificial Sequence
  Description of Artificial Sequence: Synthetic oligonucleotide
  Antisense strand to SEQ ID NO: 888258
aaugaaaccauucucccgc

SEQ ID NO: 888260 - RNA, 19 nt, Artificial Sequence
  Description of Artificial Sequence: Synthetic oligonucleotide
  Sense strand starting at position 1387 of SEQ ID NO: 588770
ccaacucgucaggaucuaa

SEQ ID NO: 888261 - RNA, 19 nt, Artificial Sequence
  Description of Artificial Sequence: Synthetic oligonucleotide
  Antisense strand to SEQ ID NO: 888260
uuagauccugacgaguugg

SEQ ID NO: 888262 - RNA, 19 nt, Artificial Sequence
  Description of Artificial Sequence: Synthetic oligonucleotide
  Sense strand starting at position 1506 of SEQ ID NO: 588770
cuggcucugcgguaaggaa

SEQ ID NO: 888263 - RNA, 19 nt, Artificial Sequence
  Description of Artificial Sequence: Synthetic oligonucleotide
  Antisense strand to SEQ ID NO: 888262
uuccuuaccgcagagccag

SEQ ID NO: 888264 - RNA, 19 nt, Artificial Sequence
  Description of Artificial Sequence: Synthetic oligonucleotide
  Sense strand starting at position 2494 of SEQ ID NO: 588770
cucaaagucagauguguug

SEQ ID NO: 888265 - RNA, 19 nt, Artificial Sequence
  Description of Artificial Sequence: Synthetic oligonucleotide
  Antisense strand to SEQ ID NO: 888264
caacacaucugacuuugag

SEQ ID NO: 888266 - RNA, 19 nt, Artificial Sequence
  Description of Artificial Sequence: Synthetic oligonucleotide
  Sense strand starting at position 2546 of SEQ ID NO: 588770
agcuucacgguuuggaaau

SEQ ID NO: 888267 - RNA, 19 nt, Artificial Sequence
  Description of Artificial Sequence: Synthetic oligonucleotide
  Antisense strand to SEQ ID NO: 888266
auuuccaaaccgugaagcu

SEQ ID NO: 888268 - RNA, 19 nt, Artificial Sequence
  Description of Artificial Sequence: Synthetic oligonucleotide
  Sense strand starting at position 2552 of SEQ ID NO: 588770
acgguuuggaaaugaaauc

SEQ ID NO: 888269 - RNA, 19 nt, Artificial Sequence
  Description of Artificial Sequence: Synthetic oligonucleotide
  Antisense strand to SEQ ID NO: 888268
gauuucauuuccaaaccgu

SEQ ID NO: 888270 - RNA, 19 nt, Artificial Sequence
  Description of Artificial Sequence: Synthetic oligonucleotide
  Sense strand starting at position 2654 of SEQ ID NO: 588770
cucugaacugugugaccaa

SEQ ID NO: 888271 - RNA, 19 nt, Artificial Sequence
  Description of Artificial Sequence: Synthetic oligonucleotide
  Antisense strand to SEQ ID NO: 888270
uuggucacacaguucagag

SEQ ID NO: 888272 - RNA, 19 nt, Artificial Sequence
  Description of Artificial Sequence: Synthetic oligonucleotide
  Sense strand starting at position 3504 of SEQ ID NO: 588770
gaaggaucggugcaaggau

SEQ ID NO: 888273 - RNA, 19 nt, Artificial Sequence
  Description of Artificial Sequence: Synthetic oligonucleotide
  Antisense strand to SEQ ID NO: 888272
auccuugcaccgauccuuc

SEQ ID NO: 888274 - RNA, 19 nt, Artificial Sequence
  Description of Artificial Sequence: Synthetic oligonucleotide
  Sense strand starting at position 3693 of SEQ ID NO: 588770
cagaguuugggccaaagca

SEQ ID NO: 888275 - RNA, 19 nt, Artificial Sequence
  Description of Artificial Sequence: Synthetic oligonucleotide
  Antisense strand to SEQ ID NO: 888274
ugcuuuggcccaaacucug

SEQ ID NO: 888276 - RNA, 19 nt, Artificial Sequence
  Description of Artificial Sequence: Synthetic oligonucleotide
  Sense strand starting at position 3727 of SEQ ID NO: 588770
uugcuuacggcugagacua

SEQ ID NO: 888277 - RNA, 19 nt, Artificial Sequence
  Description of Artificial Sequence: Synthetic oligonucleotide
  Antisense strand to SEQ ID NO: 888276
uagucucagccguaagcaa

SEQ ID NO: 888278 - RNA, 19 nt, Artificial Sequence
  Description of Artificial Sequence: Synthetic oligonucleotide
  Sense strand starting at position 3781 of SEQ ID NO: 588770
ggaggaugccaugaguuug

SEQ ID NO: 888279 - RNA, 19 nt, Artificial Sequence
  Description of Artificial Sequence: Synthetic oligonucleotide
  Antisense strand to SEQ ID NO: 888278
caaacucauggcauccucc

SEQ ID NO: 888280 - RNA, 19 nt, Artificial Sequence
  Description of Artificial Sequence: Synthetic oligonucleotide
  Sense strand starting at position 3791 of SEQ ID NO: 588770
augaguuugcuuuggaccu

SEQ ID NO: 888281 - RNA, 19 nt, Artificial Sequence
  Description of Artificial Sequence: Synthetic oligonucleotide
  Antisense strand to SEQ ID NO: 888280
agguccaaagcaaacucau

SEQ ID NO: 888282 - RNA, 19 nt, Artificial Sequence
  Description of Artificial Sequence: Synthetic oligonucleotide
  Sense strand starting at position 3856 of SEQ ID NO: 588770
aggguuuagaagugggagu

SEQ ID NO: 888283 - RNA, 19 nt, Artificial Sequence
  Description of Artificial Sequence: Synthetic oligonucleotide
  Antisense strand to SEQ ID NO: 888282
acucccacuucuaaacccu

SEQ ID NO: 888284 - RNA, 19 nt, Artificial Sequence
  Description of Artificial Sequence: Synthetic oligonucleotide
  Sense strand starting at position 67 of SEQ ID NO: 588771
uugacaguaugacuccaaa

SEQ ID NO: 888285 - RNA, 19 nt, Artificial Sequence
  Description of Artificial Sequence: Synthetic oligonucleotide
  Antisense strand to SEQ ID NO: 888284
uuuggagucauacugucaa

SEQ ID NO: 888286 - RNA, 19 nt, Artificial Sequence
  Description of Artificial Sequence: Synthetic oligonucleotide
  Sense strand starting at position 96 of SEQ ID NO: 588771
acgacauaccucuaggcau

SEQ ID NO: 888287 - RNA, 19 nt, Artificial Sequence
  Description of Artificial Sequence: Synthetic oligonucleotide
  Antisense strand to SEQ ID NO: 888286
augccuagagguaugucgu

SEQ ID NO: 888288 - RNA, 19 nt, Artificial Sequence
  Description of Artificial Sequence: Synthetic oligonucleotide
  Sense strand starting at position 98 of SEQ ID NO: 588771
gacauaccucuaggcauga

SEQ ID NO: 888289 - RNA, 19 nt, Artificial Sequence
  Description of Artificial Sequence: Synthetic oligonucleotide
  Antisense strand to SEQ ID NO: 888288
ucaugccuagagguauguc

SEQ ID NO: 888290 - RNA, 19 nt, Artificial Sequence
  Description of Artificial Sequence: Synthetic oligonucleotide
  Sense strand starting at position 191 of SEQ ID NO: 588771
ggauuacugcaaggucaag

SEQ ID NO: 888291 - RNA, 19 nt, Artificial Sequence
  Description of Artificial Sequence: Synthetic oligonucleotide
  Antisense strand to SEQ ID NO: 888290
cuugaccuugcaguaaucc

SEQ ID NO: 888292 - RNA, 19 nt, Artificial Sequence
  Description of Artificial Sequence: Synthetic oligonucleotide
  Sense strand starting at position 244 of SEQ ID NO: 588771
guuguuccucuacaauauu

SEQ ID NO: 888293 - RNA, 19 nt, Artificial Sequence
  Description of Artificial Sequence: Synthetic oligonucleotide
  Antisense strand to SEQ ID NO: 888292
aauauuguagaggaacaac

SEQ ID NO: 888294 - RNA, 19 nt, Artificial Sequence
  Description of Artificial Sequence: Synthetic oligonucleotide
  Sense strand starting at position 310 of SEQ ID NO: 588771
cgaaaugagcaguaaacuu

SEQ ID NO: 888295 - RNA, 19 nt, Artificial Sequence
  Description of Artificial Sequence: Synthetic oligonucleotide
  Antisense strand to SEQ ID NO: 888294
aaguuuacugcucauuucg

SEQ ID NO: 888296 - RNA, 19 nt, Artificial Sequence
  Description of Artificial Sequence: Synthetic oligonucleotide
  Sense strand starting at position 317 of SEQ ID NO: 588771
agcaguaaacuuugcaaga

SEQ ID NO: 888297 - RNA, 19 nt, Artificial Sequence
  Description of Artificial Sequence: Synthetic oligonucleotide
  Antisense strand to SEQ ID NO: 888296
ucuugcaaaguuuacugcu

SEQ ID NO: 888298 - RNA, 19 nt, Artificial Sequence
  Description of Artificial Sequence: Synthetic oligonucleotide
  Sense strand starting at position 318 of SEQ ID NO: 588771
gcaguaaacuuugcaagag

SEQ ID NO: 888299 - RNA, 19 nt, Artificial Sequence
  Description of Artificial Sequence: Synthetic oligonucleotide
  Antisense strand to SEQ ID NO: 888298
cucuugcaaaguuuacugc

SEQ ID NO: 888300 - RNA, 19 nt, Artificial Sequence
  Description of Artificial Sequence: Synthetic oligonucleotide
  Sense strand starting at position 449 of SEQ ID NO: 588771
guuuguaagcaugaggauu

SEQ ID NO: 888301 - RNA, 19 nt, Artificial Sequence
  Description of Artificial Sequence: Synthetic oligonucleotide
  Antisense strand to SEQ ID NO: 888300
aauccucaugcuuacaaac

SEQ ID NO: 888302 - RNA, 19 nt, Artificial Sequence
  Description of Artificial Sequence: Synthetic oligonucleotide
  Sense strand starting at position 462 of SEQ ID NO: 588771
aggauuugccaguguagug

SEQ ID NO: 888303 - RNA, 19 nt, Artificial Sequence
  Description of Artificial Sequence: Synthetic oligonucleotide
  Antisense strand to SEQ ID NO: 888302
cacuacacuggcaaauccu

SEQ ID NO: 888304 - RNA, 19 nt, Artificial Sequence
  Description of Artificial Sequence: Synthetic oligonucleotide
  Sense strand starting at position 472 of SEQ ID NO: 588771
aguguagugguugacuuua

SEQ ID NO: 888305 - RNA, 19 nt, Artificial Sequence
  Description of Artificial Sequence: Synthetic oligonucleotide
  Antisense strand to SEQ ID NO: 888304
uaaagucaaccacuacacu

SEQ ID NO: 888306 - RNA, 19 nt, Artificial Sequence
  Description of Artificial Sequence: Synthetic oligonucleotide
  Sense strand starting at position 489 of SEQ ID NO: 588771
uauggacuuuaggucauaa

SEQ ID NO: 888307 - RNA, 19 nt, Artificial Sequence
  Description of Artificial Sequence: Synthetic oligonucleotide
  Antisense strand to SEQ ID NO: 888306
uuaugaccuaaaguccaua

SEQ ID NO: 888308 - RNA, 19 nt, Artificial Sequence
  Description of Artificial Sequence: Synthetic oligonucleotide
  Sense strand starting at position 568 of SEQ ID NO: 588771
auuauaaauggucaugucu

SEQ ID NO: 888309 - RNA, 19 nt, Artificial Sequence
  Description of Artificial Sequence: Synthetic oligonucleotide
  Antisense strand to SEQ ID NO: 888308
agacaugaccauuuauaau

SEQ ID NO: 888310 - RNA, 19 nt, Artificial Sequence
  Description of Artificial Sequence: Synthetic oligonucleotide
  Sense strand starting at position 721 of SEQ ID NO: 588771
ggagacaacuuaucuccga

SEQ ID NO: 888311 - RNA, 19 nt, Artificial Sequence
  Description of Artificial Sequence: Synthetic oligonucleotide
  Antisense strand to SEQ ID NO: 888310
ucggagauaaguugucucc

SEQ ID NO: 888312 - RNA, 19 nt, Artificial Sequence
  Description of Artificial Sequence: Synthetic oligonucleotide
  Sense strand starting at position 2099 of SEQ ID NO: 588771
uaggguugucgcucgugga

SEQ ID NO: 888313 - RNA, 19 nt, Artificial Sequence
  Description of Artificial Sequence: Synthetic oligonucleotide
  Antisense strand to SEQ ID NO: 888312
uccacgagcgacaacccua

SEQ ID NO: 888314 - RNA, 19 nt, Artificial Sequence
  Description of Artificial Sequence: Synthetic oligonucleotide
  Sense strand starting at position 2101 of SEQ ID NO: 588771
ggguugucgcucguggaga

SEQ ID NO: 888315 - RNA, 19 nt, Artificial Sequence
  Description of Artificial Sequence: Synthetic oligonucleotide
  Antisense strand to SEQ ID NO: 888314
ucuccacgagcgacaaccc

SEQ ID NO: 888316 - RNA, 19 nt, Artificial Sequence
  Description of Artificial Sequence: Synthetic oligonucleotide
  Sense strand starting at position 2267 of SEQ ID NO: 588771
accgguccuguccaacaaa

SEQ ID NO: 888317 - RNA, 19 nt, Artificial Sequence
  Description of Artificial Sequence: Synthetic oligonucleotide
  Antisense strand to SEQ ID NO: 888316
uuuguuggacaggaccggu

SEQ ID NO: 888318 - RNA, 19 nt, Artificial Sequence
  Description of Artificial Sequence: Synthetic oligonucleotide
  Sense strand starting at position 2305 of SEQ ID NO: 588771
cauuguauccauggagaaa

SEQ ID NO: 888319 - RNA, 19 nt, Artificial Sequence
  Description of Artificial Sequence: Synthetic oligonucleotide
  Antisense strand to SEQ ID NO: 888318
uuucuccauggauacaaug

SEQ ID NO: 888320 - RNA, 19 nt, Artificial Sequence
  Description of Artificial Sequence: Synthetic oligonucleotide
  Sense strand starting at position 2416 of SEQ ID NO: 588771
ugccuuugacagggugaga

SEQ ID NO: 888321 - RNA, 19 nt, Artificial Sequence
  Description of Artificial Sequence: Synthetic oligonucleotide
  Antisense strand to SEQ ID NO: 888320
ucucacccugucaaaggca

SEQ ID NO: 888322 - RNA, 19 nt, Artificial Sequence
  Description of Artificial Sequence: Synthetic oligonucleotide
  Sense strand starting at position 2429 of SEQ ID NO: 588771
gugagagaaaugugauauu

SEQ ID NO: 888323 - RNA, 19 nt, Artificial Sequence
  Description of Artificial Sequence: Synthetic oligonucleotide
  Antisense strand to SEQ ID NO: 888322
aauaucacauuucucucac

SEQ ID NO: 888324 - RNA, 19 nt, Artificial Sequence
  Description of Artificial Sequence: Synthetic oligonucleotide
  Sense strand starting at position 2609 of SEQ ID NO: 588771
acacacauguaaguuaaau

SEQ ID NO: 888325 - RNA, 19 nt, Artificial Sequence
  Description of Artificial Sequence: Synthetic oligonucleotide
  Antisense strand to SEQ ID NO: 888324
auuuaacuuacaugugugu

SEQ ID NO: 888326 - RNA, 19 nt, Artificial Sequence
  Description of Artificial Sequence: Synthetic oligonucleotide
  Sense strand starting at position 2704 of SEQ ID NO: 588771
uuucucugaccugaaaguu

SEQ ID NO: 888327 - RNA, 19 nt, Artificial Sequence
  Description of Artificial Sequence: Synthetic oligonucleotide
  Antisense strand to SEQ ID NO: 888326
aacuuucaggucagagaaa

SEQ ID NO: 888328 - RNA, 19 nt, Artificial Sequence
  Description of Artificial Sequence: Synthetic oligonucleotide
  Sense strand starting at position 3075 of SEQ ID NO: 588771
gguagucugcgccuguaau

SEQ ID NO: 888329 - RNA, 19 nt, Artificial Sequence
  Description of Artificial Sequence: Synthetic oligonucleotide
  Antisense strand to SEQ ID NO: 888328
auuacaggcgcagacuacc

SEQ ID NO: 888330 - RNA, 19 nt, Artificial Sequence
  Description of Artificial Sequence: Synthetic oligonucleotide
  Sense strand starting at position 3285 of SEQ ID NO: 588771
ugggaucauaccugugaac

SEQ ID NO: 888331 - RNA, 19 nt, Artificial Sequence
  Description of Artificial Sequence: Synthetic oligonucleotide
  Antisense strand to SEQ ID NO: 888330
guucacagguaugauccca

SEQ ID NO: 888332 - RNA, 19 nt, Artificial Sequence
  Description of Artificial Sequence: Synthetic oligonucleotide
  Sense strand starting at position 3287 of SEQ ID NO: 588771
ggaucauaccugugaacag

SEQ ID NO: 888333 - RNA, 19 nt, Artificial Sequence
  Description of Artificial Sequence: Synthetic oligonucleotide
  Antisense strand to SEQ ID NO: 888332
cuguucacagguaugaucc

SEQ ID NO: 888334 - RNA, 19 nt, Artificial Sequence
  Description of Artificial Sequence: Synthetic oligonucleotide
  Sense strand starting at position 3414 of SEQ ID NO: 588771
cuguacugugccuaaugga

SEQ ID NO: 888335 - RNA, 19 nt, Artificial Sequence
  Description of Artificial Sequence: Synthetic oligonucleotide
  Antisense strand to SEQ ID NO: 888334
uccauuaggcacaguacag

SEQ ID NO: 888336 - RNA, 19 nt, Artificial Sequence
  Description of Artificial Sequence: Synthetic oligonucleotide
  Sense strand starting at position 3508 of SEQ ID NO: 588771
cugguucugccaugaacaa

SEQ ID NO: 888337 - RNA, 19 nt, Artificial Sequence
  Description of Artificial Sequence: Synthetic oligonucleotide
  Antisense strand to SEQ ID NO: 888336
uuguucauggcagaaccag

SEQ ID NO: 888338 - RNA, 19 nt, Artificial Sequence
  Description of Artificial Sequence: Synthetic oligonucleotide
  Sense strand starting at position 3544 of SEQ ID NO: 588771
aagugugugccaguuugua

SEQ ID NO: 888339 - RNA, 19 nt, Artificial Sequence
  Description of Artificial Sequence: Synthetic oligonucleotide
  Antisense strand to SEQ ID NO: 888338
uacaaacuggcacacacuu

SEQ ID NO: 888340 - RNA, 19 nt, Artificial Sequence
  Description of Artificial Sequence: Synthetic oligonucleotide
  Sense strand starting at position 3546 of SEQ ID NO: 588771
gugugugccaguuuguaca

SEQ ID NO: 888341 - RNA, 19 nt, Artificial Sequence
  Description of Artificial Sequence: Synthetic oligonucleotide
  Antisense strand to SEQ ID NO: 888340
uguacaaacuggcacacac

SEQ ID NO: 888342 - RNA, 19 nt, Artificial Sequence
  Description of Artificial Sequence: Synthetic oligonucleotide
  Sense strand starting at position 3619 of SEQ ID NO: 588771
gcaguugugcaugucacuu

SEQ ID NO: 888343 - RNA, 19 nt, Artificial Sequence
  Description of Artificial Sequence: Synthetic oligonucleotide
  Antisense strand to SEQ ID NO: 888342
aagugacaugcacaacugc

SEQ ID NO: 888344 - RNA, 19 nt, Artificial Sequence
  Description of Artificial Sequence: Synthetic oligonucleotide
  Sense strand starting at position 3690 of SEQ ID NO: 588771
ucaaauaggucuuugugaa

SEQ ID NO: 888345 - RNA, 19 nt, Artificial Sequence
  Description of Artificial Sequence: Synthetic oligonucleotide
  Antisense strand to SEQ ID NO: 888344
uucacaaagaccuauuuga

SEQ ID NO: 888346 - RNA, 19 nt, Artificial Sequence
  Description of Artificial Sequence: Synthetic oligonucleotide
  Sense strand starting at position 3691 of SEQ ID NO: 588771
caaauaggucuuugugaaa

SEQ ID NO: 888347 - RNA, 19 nt, Artificial Sequence
  Description of Artificial Sequence: Synthetic oligonucleotide
  Antisense strand to SEQ ID NO: 888346
uuucacaaagaccuauuug

SEQ ID NO: 888348 - RNA, 19 nt, Artificial Sequence
  Description of Artificial Sequence: Synthetic oligonucleotide
  Sense strand starting at position 3862 of SEQ ID NO: 588771
guugucacacuuuaacauu

SEQ ID NO: 888349 - RNA, 19 nt, Artificial Sequence
  Description of Artificial Sequence: Synthetic oligonucleotide
  Antisense strand to SEQ ID NO: 888348
aauguuaaagugugacaac

SEQ ID NO: 888350 - RNA, 19 nt, Artificial Sequence
  Description of Artificial Sequence: Synthetic oligonucleotide
  Sense strand starting at position 3890 of SEQ ID NO: 588771
aagaaauuugccugugcca

SEQ ID NO: 888351 - RNA, 19 nt, Artificial Sequence
  Description of Artificial Sequence: Synthetic oligonucleotide
  Antisense strand to SEQ ID NO: 888350
uggcacaggcaaauuucuu

SEQ ID NO: 888352 - RNA, 19 nt, Artificial Sequence
  Description of Artificial Sequence: Synthetic oligonucleotide
  Sense strand starting at position 3892 of SEQ ID NO: 588771
gaaauuugccugugccaag

SEQ ID NO: 888353 - RNA, 19 nt, Artificial Sequence
  Description of Artificial Sequence: Synthetic oligonucleotide
  Antisense strand to SEQ ID NO: 888352
cuuggcacaggcaaauuuc

SEQ ID NO: 888354 - RNA, 19 nt, Artificial Sequence
  Description of Artificial Sequence: Synthetic oligonucleotide
  Sense strand starting at position 3936 of SEQ ID NO: 588771
aucauuaauugcccaggua

SEQ ID NO: 888355 - RNA, 19 nt, Artificial Sequence
  Description of Artificial Sequence: Synthetic oligonucleotide
  Antisense strand to SEQ ID NO: 888354
uaccugggcaauuaaugau

SEQ ID NO: 888356 - RNA, 19 nt, Artificial Sequence
  Description of Artificial Sequence: Synthetic oligonucleotide
  Sense strand starting at position 3937 of SEQ ID NO: 588771
ucauuaauugcccagguau

SEQ ID NO: 888357 - RNA, 19 nt, Artificial Sequence
  Description of Artificial Sequence: Synthetic oligonucleotide
  Antisense strand to SEQ ID NO: 888356
auaccugggcaauuaauga

SEQ ID NO: 888358 - RNA, 19 nt, Artificial Sequence
  Description of Artificial Sequence: Synthetic oligonucleotide
  Sense strand starting at position 3939 of SEQ ID NO: 588771
auuaauugcccagguauga

SEQ ID NO: 888359 - RNA, 19 nt, Artificial Sequence
  Description of Artificial Sequence: Synthetic oligonucleotide
  Antisense strand to SEQ ID NO: 888358
ucauaccugggcaauuaau

SEQ ID NO: 888360 - RNA, 19 nt, Artificial Sequence
  Description of Artificial Sequence: Synthetic oligonucleotide
  Sense strand starting at position 3956 of SEQ ID NO: 588771
gaacuuagaccuggcuagu

SEQ ID NO: 888361 - RNA, 19 nt, Artificial Sequence
  Description of Artificial Sequence: Synthetic oligonucleotide
  Antisense strand to SEQ ID NO: 888360
acuagccaggucuaaguuc

SEQ ID NO: 888362 - RNA, 19 nt, Artificial Sequence
  Description of Artificial Sequence: Synthetic oligonucleotide
  Sense strand starting at position 3970 of SEQ ID NO: 588771
cuaguaaguuuccuuauag

SEQ ID NO: 888363 - RNA, 19 nt, Artificial Sequence
  Description of Artificial Sequence: Synthetic oligonucleotide
  Antisense strand to SEQ ID NO: 888362
cuauaaggaaacuuacuag

SEQ ID NO: 888364 - RNA, 19 nt, Artificial Sequence
  Description of Artificial Sequence: Synthetic oligonucleotide
  Sense strand starting at position 936 of SEQ ID NO: 588772
ggagguuucgcuuuguugu

SEQ ID NO: 888365 - RNA, 19 nt, Artificial Sequence
  Description of Artificial Sequence: Synthetic oligonucleotide
  Antisense strand to SEQ ID NO: 888364
acaacaaagcgaaaccucc

SEQ ID NO: 888366 - RNA, 19 nt, Artificial Sequence
  Description of Artificial Sequence: Synthetic oligonucleotide
  Sense strand starting at position 1078 of SEQ ID NO: 588772
aauacugagcucugggaua

SEQ ID NO: 888367 - RNA, 19 nt, Artificial Sequence
  Description of Artificial Sequence: Synthetic oligonucleotide
  Antisense strand to SEQ ID NO: 888366
uaucccagagcucaguauu

SEQ ID NO: 888368 - RNA, 19 nt, Artificial Sequence
  Description of Artificial Sequence: Synthetic oligonucleotide
  Sense strand starting at position 1080 of SEQ ID NO: 588772
uacugagcucugggauaaa

SEQ ID NO: 888369 - RNA, 19 nt, Artificial Sequence
  Description of Artificial Sequence: Synthetic oligonucleotide
  Antisense strand to SEQ ID NO: 888368
uuuaucccagagcucagua

SEQ ID NO: 888370 - RNA, 19 nt, Artificial Sequence
  Description of Artificial Sequence: Synthetic oligonucleotide
  Sense strand starting at position 1091 of SEQ ID NO: 588772
gggauaaaucuuggccuca

SEQ ID NO: 888371 - RNA, 19 nt, Artificial Sequence
  Description of Artificial Sequence: Synthetic oligonucleotide
  Antisense strand to SEQ ID NO: 888370
ugaggccaagauuuauccc

SEQ ID NO: 888372 - RNA, 19 nt, Artificial Sequence
  Description of Artificial Sequence: Synthetic oligonucleotide
  Sense strand starting at position 1092 of SEQ ID NO: 588772
ggauaaaucuuggccucaa

SEQ ID NO: 888373 - RNA, 19 nt, Artificial Sequence
  Description of Artificial Sequence: Synthetic oligonucleotide
  Antisense strand to SEQ ID NO: 888372
uugaggccaagauuuaucc

SEQ ID NO: 888374 - RNA, 19 nt, Artificial Sequence
  Description of Artificial Sequence: Synthetic oligonucleotide
  Sense strand starting at position 1266 of SEQ ID NO: 588772
gcuucccuucugggaaauu

SEQ ID NO: 888375 - RNA, 19 nt, Artificial Sequence
  Description of Artificial Sequence: Synthetic oligonucleotide
  Antisense strand to SEQ ID NO: 888374
aauuucccagaagggaagc

SEQ ID NO: 888376 - RNA, 19 nt, Artificial Sequence
  Description of Artificial Sequence: Synthetic oligonucleotide
  Sense strand starting at position 1267 of SEQ ID NO: 588772
cuucccuucugggaaauuu

SEQ ID NO: 888377 - RNA, 19 nt, Artificial Sequence
  Description of Artificial Sequence: Synthetic oligonucleotide
  Antisense strand to SEQ ID NO: 888376
aaauuucccagaagggaag

SEQ ID NO: 888378 - RNA, 19 nt, Artificial Sequence
  Description of Artificial Sequence: Synthetic oligonucleotide
  Sense strand starting at position 1322 of SEQ ID NO: 588772
agucccuucccuggugaaa

SEQ ID NO: 888379 - RNA, 19 nt, Artificial Sequence
  Description of Artificial Sequence: Synthetic oligonucleotide
  Antisense strand to SEQ ID NO: 888378
uuucaccagggaagggacu

SEQ ID NO: 888380 - RNA, 19 nt, Artificial Sequence
  Description of Artificial Sequence: Synthetic oligonucleotide
  Sense strand starting at position 1334 of SEQ ID NO: 588772
ggugaaaccuucccugauu

SEQ ID NO: 888381 - RNA, 19 nt, Artificial Sequence
  Description of Artificial Sequence: Synthetic oligonucleotide
  Antisense strand to SEQ ID NO: 888380
aaucagggaagguuucacc

SEQ ID NO: 888382 - RNA, 19 nt, Artificial Sequence
  Description of Artificial Sequence: Synthetic oligonucleotide
  Sense strand starting at position 1402 of SEQ ID NO: 588772
cugggcucugaagguauua

SEQ ID NO: 888383 - RNA, 19 nt, Artificial Sequence
  Description of Artificial Sequence: Synthetic oligonucleotide
  Antisense strand to SEQ ID NO: 888382
uaauaccuucagagcccag

SEQ ID NO: 888384 - RNA, 19 nt, Artificial Sequence
  Description of Artificial Sequence: Synthetic oligonucleotide
  Sense strand starting at position 1414 of SEQ ID NO: 588772
gguauuagccaucaccauu

SEQ ID NO: 888385 - RNA, 19 nt, Artificial Sequence
  Description of Artificial Sequence: Synthetic oligonucleotide
  Antisense strand to SEQ ID NO: 888384
aauggugauggcuaauacc

SEQ ID NO: 888386 - RNA, 19 nt, Artificial Sequence
  Description of Artificial Sequence: Synthetic oligonucleotide
  Sense strand starting at position 1425 of SEQ ID NO: 588772
ucaccauugcaggaaucau

SEQ ID NO: 888387 - RNA, 19 nt, Artificial Sequence
  Description of Artificial Sequence: Synthetic oligonucleotide
  Antisense strand to SEQ ID NO: 888386
augauuccugcaaugguga

SEQ ID NO: 888388 - RNA, 19 nt, Artificial Sequence
  Description of Artificial Sequence: Synthetic oligonucleotide
  Sense strand starting at position 1434 of SEQ ID NO: 588772
caggaaucauuuggaaugu

SEQ ID NO: 888389 - RNA, 19 nt, Artificial Sequence
  Description of Artificial Sequence: Synthetic oligonucleotide
  Antisense strand to SEQ ID NO: 888388
acauuccaaaugauuccug

SEQ ID NO: 888390 - RNA, 19 nt, Artificial Sequence
  Description of Artificial Sequence: Synthetic oligonucleotide
  Sense strand starting at position 1435 of SEQ ID NO: 588772
aggaaucauuuggaauguu

SEQ ID NO: 888391 - RNA, 19 nt, Artificial Sequence
  Description of Artificial Sequence: Synthetic oligonucleotide
  Antisense strand to SEQ ID NO: 888390
aacauuccaaaugauuccu

SEQ ID NO: 888392 - RNA, 19 nt, Artificial Sequence
  Description of Artificial Sequence: Synthetic oligonucleotide
  Sense strand starting at position 1459 of SEQ ID NO: 588772
auuuaaggcuucuagacua

SEQ ID NO: 888393 - RNA, 19 nt, Artificial Sequence
  Description of Artificial Sequence: Synthetic oligonucleotide
  Antisense strand to SEQ ID NO: 888392
uagucuagaagccuuaaau

SEQ ID NO: 888394 - RNA, 19 nt, Artificial Sequence
  Description of Artificial Sequence: Synthetic oligonucleotide
  Sense strand starting at position 1466 of SEQ ID NO: 588772
gcuucuagacuagauucua

SEQ ID NO: 888395 - RNA, 19 nt, Artificial Sequence
  Description of Artificial Sequence: Synthetic oligonucleotide
  Antisense strand to SEQ ID NO: 888394
uagaaucuagucuagaagc

SEQ ID NO: 888396 - RNA, 19 nt, Artificial Sequence
  Description of Artificial Sequence: Synthetic oligonucleotide
  Sense strand starting at position 1513 of SEQ ID NO: 588772
gagggcugggccugucaga

SEQ ID NO: 888397 - RNA, 19 nt, Artificial Sequence
  Description of Artificial Sequence: Synthetic oligonucleotide
  Antisense strand to SEQ ID NO: 888396
ucugacaggcccagcccuc

SEQ ID NO: 888398 - RNA, 19 nt, Artificial Sequence
  Description of Artificial Sequence: Synthetic oligonucleotide
  Sense strand starting at position 1582 of SEQ ID NO: 588772
guggcuagugaaugaagaa

SEQ ID NO: 888399 - RNA, 19 nt, Artificial Sequence
  Description of Artificial Sequence: Synthetic oligonucleotide
  Antisense strand to SEQ ID NO: 888398
uucuucauucacuagccac

SEQ ID NO: 888400 - RNA, 19 nt, Artificial Sequence
  Description of Artificial Sequence: Synthetic oligonucleotide
  Sense strand starting at position 2782 of SEQ ID NO: 588772
gggagaguugagcaugcaa

SEQ ID NO: 888401 - RNA, 19 nt, Artificial Sequence
  Description of Artificial Sequence: Synthetic oligonucleotide
  Antisense strand to SEQ ID NO: 888400
uugcaugcucaacucuccc

SEQ ID NO: 888402 - RNA, 19 nt, Artificial Sequence
  Description of Artificial Sequence: Synthetic oligonucleotide
  Sense strand starting at position 2784 of SEQ ID NO: 588772
gagaguugagcaugcaauc

SEQ ID NO: 888403 - RNA, 19 nt, Artificial Sequence
  Description of Artificial Sequence: Synthetic oligonucleotide
  Antisense strand to SEQ ID NO: 888402
gauugcaugcucaacucuc

SEQ ID NO: 888404 - RNA, 19 nt, Artificial Sequence
  Description of Artificial Sequence: Synthetic oligonucleotide
  Sense strand starting at position 2825 of SEQ ID NO: 588772
gcucaagauuuggugcuuu

SEQ ID NO: 888405 - RNA, 19 nt, Artificial Sequence
  Description of Artificial Sequence: Synthetic oligonucleotide
  Antisense strand to SEQ ID NO: 888404
aaagcaccaaaucuugagc

SEQ ID NO: 888406 - RNA, 19 nt, Artificial Sequence
  Description of Artificial Sequence: Synthetic oligonucleotide
  Sense strand starting at position 2875 of SEQ ID NO: 588772
guaauuauggcaggugcua

SEQ ID NO: 888407 - RNA, 19 nt, Artificial Sequence
  Description of Artificial Sequence: Synthetic oligonucleotide
  Antisense strand to SEQ ID NO: 888406
uagcaccugccauaauuac

SEQ ID NO: 888408 - RNA, 19 nt, Artificial Sequence
  Description of Artificial Sequence: Synthetic oligonucleotide
  Sense strand starting at position 2978 of SEQ ID NO: 588772
cugccaagagugcaauaaa

SEQ ID NO: 888409 - RNA, 19 nt, Artificial Sequence
  Description of Artificial Sequence: Synthetic oligonucleotide
  Antisense strand to SEQ ID NO: 888408
uuuauugcacucuuggcag

SEQ ID NO: 888410 - RNA, 19 nt, Artificial Sequence
  Description of Artificial Sequence: Synthetic oligonucleotide
  Sense strand starting at position 3011 of SEQ ID NO: 588772
aggagaguaucuguucuga

SEQ ID NO: 888411 - RNA, 19 nt, Artificial Sequence
  Description of Artificial Sequence: Synthetic oligonucleotide
  Antisense strand to SEQ ID NO: 888410
ucagaacagauacucuccu

SEQ ID NO: 888412 - RNA, 19 nt, Artificial Sequence
  Description of Artificial Sequence: Synthetic oligonucleotide
  Sense strand starting at position 3013 of SEQ ID NO: 588772
gagaguaucuguucugaag

SEQ ID NO: 888413 - RNA, 19 nt, Artificial Sequence
  Description of Artificial Sequence: Synthetic oligonucleotide
  Antisense strand to SEQ ID NO: 888412
cuucagaacagauacucuc

SEQ ID NO: 888414 - RNA, 19 nt, Artificial Sequence
  Description of Artificial Sequence: Synthetic oligonucleotide
  Sense strand starting at position 3051 of SEQ ID NO: 588772
aggguugucuguuuguaac

SEQ ID NO: 888415 - RNA, 19 nt, Artificial Sequence
  Description of Artificial Sequence: Synthetic oligonucleotide
  Antisense strand to SEQ ID NO: 888414
guuacaaacagacaacccu

SEQ ID NO: 888416 - RNA, 19 nt, Artificial Sequence
  Description of Artificial Sequence: Synthetic oligonucleotide
  Sense strand starting at position 3057 of SEQ ID NO: 588772
gucuguuuguaaccaugga

SEQ ID NO: 888417 - RNA, 19 nt, Artificial Sequence
  Description of Artificial Sequence: Synthetic oligonucleotide
  Antisense strand to SEQ ID NO: 888416
uccaugguuacaaacagac

SEQ ID NO: 888418 - RNA, 19 nt, Artificial Sequence
  Description of Artificial Sequence: Synthetic oligonucleotide
  Sense strand starting at position 3061 of SEQ ID NO: 588772
guuuguaaccauggagcua

SEQ ID NO: 888419 - RNA, 19 nt, Artificial Sequence
  Description of Artificial Sequence: Synthetic oligonucleotide
  Antisense strand to SEQ ID NO: 888418
uagcuccaugguuacaaac

SEQ ID NO: 888420 - RNA, 19 nt, Artificial Sequence
  Description of Artificial Sequence: Synthetic oligonucleotide
  Sense strand starting at position 3403 of SEQ ID NO: 588772
aagagagauguauguagua

SEQ ID NO: 888421 - RNA, 19 nt, Artificial Sequence
  Description of Artificial Sequence: Synthetic oligonucleotide
  Antisense strand to SEQ ID NO: 888420
uacuacauacaucucucuu

SEQ ID NO: 888422 - RNA, 19 nt, Artificial Sequence
  Description of Artificial Sequence: Synthetic oligonucleotide
  Sense strand starting at position 3405 of SEQ ID NO: 588772
gagagauguauguaguagu

SEQ ID NO: 888423 - RNA, 19 nt, Artificial Sequence
  Description of Artificial Sequence: Synthetic oligonucleotide
  Antisense strand to SEQ ID NO: 888422
acuacuacauacaucucuc

SEQ ID NO: 888424 - RNA, 19 nt, Artificial Sequence
  Description of Artificial Sequence: Synthetic oligonucleotide
  Sense strand starting at position 3431 of SEQ ID NO: 588772
gggaauacaugacauaaug

SEQ ID NO: 888425 - RNA, 19 nt, Artificial Sequence
  Description of Artificial Sequence: Synthetic oligonucleotide
  Antisense strand to SEQ ID NO: 888424
cauuaugucauguauuccc

SEQ ID NO: 888426 - RNA, 19 nt, Artificial Sequence
  Description of Artificial Sequence: Synthetic oligonucleotide
  Sense strand starting at position 3479 of SEQ ID NO: 588772
ggcacagaguucucuguca

SEQ ID NO: 888427 - RNA, 19 nt, Artificial Sequence
  Description of Artificial Sequence: Synthetic oligonucleotide
  Antisense strand to SEQ ID NO: 888426
ugacagagaacucugugcc

SEQ ID NO: 888428 - RNA, 19 nt, Artificial Sequence
  Description of Artificial Sequence: Synthetic oligonucleotide
  Sense strand starting at position 3481 of SEQ ID NO: 588772
cacagaguucucugucaag

SEQ ID NO: 888429 - RNA, 19 nt, Artificial Sequence
  Description of Artificial Sequence: Synthetic oligonucleotide
  Antisense strand to SEQ ID NO: 888428
cuugacagagaacucugug

SEQ ID NO: 888430 - RNA, 19 nt, Artificial Sequence
  Description of Artificial Sequence: Synthetic oligonucleotide
  Sense strand starting at position 3487 of SEQ ID NO: 588772
guucucugucaaggguaaa

SEQ ID NO: 888431 - RNA, 19 nt, Artificial Sequence
  Description of Artificial Sequence: Synthetic oligonucleotide
  Antisense strand to SEQ ID NO: 888430
uuuacccuugacagagaac

SEQ ID NO: 888432 - RNA, 19 nt, Artificial Sequence
  Description of Artificial Sequence: Synthetic oligonucleotide
  Sense strand starting at position 3488 of SEQ ID NO: 588772
uucucugucaaggguaaag

SEQ ID NO: 888433 - RNA, 19 nt, Artificial Sequence
  Description of Artificial Sequence: Synthetic oligonucleotide
  Antisense strand to SEQ ID NO: 888432
cuuuacccuugacagagaa

SEQ ID NO: 888434 - RNA, 19 nt, Artificial Sequence
  Description of Artificial Sequence: Synthetic oligonucleotide
  Sense strand starting at position 3499 of SEQ ID NO: 588772
ggguaaagcuauuccugac

SEQ ID NO: 888435 - RNA, 19 nt, Artificial Sequence
  Description of Artificial Sequence: Synthetic oligonucleotide
  Antisense strand to SEQ ID NO: 888434
gucaggaauagcuuuaccc

SEQ ID NO: 888436 - RNA, 19 nt, Artificial Sequence
  Description of Artificial Sequence: Synthetic oligonucleotide
  Sense strand starting at position 3524 of SEQ ID NO: 588772
ugaacaaugucucuagaca

SEQ ID NO: 888437 - RNA, 19 nt, Artificial Sequence
  Description of Artificial Sequence: Synthetic oligonucleotide
  Antisense strand to SEQ ID NO: 888436
ugucuagagacauuguuca

SEQ ID NO: 888438 - RNA, 19 nt, Artificial Sequence
  Description of Artificial Sequence: Synthetic oligonucleotide
  Sense strand starting at position 3589 of SEQ ID NO: 588772
cucugugucuuuccugaaa

SEQ ID NO: 888439 - RNA, 19 nt, Artificial Sequence
  Description of Artificial Sequence: Synthetic oligonucleotide
  Antisense strand to SEQ ID NO: 888438
uuucaggaaagacacagag

SEQ ID NO: 888440 - RNA, 19 nt, Artificial Sequence
  Description of Artificial Sequence: Synthetic oligonucleotide
  Sense strand starting at position 3720 of SEQ ID NO: 588772
ggaguauagagcuauggua

SEQ ID NO: 888441 - RNA, 19 nt, Artificial Sequence
  Description of Artificial Sequence: Synthetic oligonucleotide
  Antisense strand to SEQ ID NO: 888440
uaccauagcucuauacucc

SEQ ID NO: 888442 - RNA, 19 nt, Artificial Sequence
  Description of Artificial Sequence: Synthetic oligonucleotide
  Sense strand starting at position 3755 of SEQ ID NO: 588772
ucaaacauacuuggguuaa

SEQ ID NO: 888443 - RNA, 19 nt, Artificial Sequence
  Description of Artificial Sequence: Synthetic oligonucleotide
  Antisense strand to SEQ ID NO: 888442
uuaacccaaguauguuuga

SEQ ID NO: 888444 - RNA, 19 nt, Artificial Sequence
  Description of Artificial Sequence: Synthetic oligonucleotide
  Sense strand starting at position 32 of SEQ ID NO: 588773
uggccuauguauuuaucuu

SEQ ID NO: 888445 - RNA, 19 nt, Artificial Sequence
  Description of Artificial Sequence: Synthetic oligonucleotide
  Antisense strand to SEQ ID NO: 888444
aagauaaauacauaggcca

SEQ ID NO: 888446 - RNA, 19 nt, Artificial Sequence
  Description of Artificial Sequence: Synthetic oligonucleotide
  Sense strand starting at position 977 of SEQ ID NO: 588773
ggagguuucgcuuuguugu

SEQ ID NO: 888447 - RNA, 19 nt, Artificial Sequence
  Description of Artificial Sequence: Synthetic oligonucleotide
  Antisense strand to SEQ ID NO: 888446
acaacaaagcgaaaccucc

SEQ ID NO: 888448 - RNA, 19 nt, Artificial Sequence
  Description of Artificial Sequence: Synthetic oligonucleotide
  Sense strand starting at position 1119 of SEQ ID NO: 588773
aauacugagcucugggaua

SEQ ID NO: 888449 - RNA, 19 nt, Artificial Sequence
  Description of Artificial Sequence: Synthetic oligonucleotide
  Antisense strand to SEQ ID NO: 888448
uaucccagagcucaguauu

SEQ ID NO: 888450 - RNA, 19 nt, Artificial Sequence
  Description of Artificial Sequence: Synthetic oligonucleotide
  Sense strand starting at position 1121 of SEQ ID NO: 588773
uacugagcucugggauaaa

SEQ ID NO: 888451 - RNA, 19 nt, Artificial Sequence
  Description of Artificial Sequence: Synthetic oligonucleotide
  Antisense strand to SEQ ID NO: 888450
uuuaucccagagcucagua

SEQ ID NO: 888452 - RNA, 19 nt, Artificial Sequence
  Description of Artificial Sequence: Synthetic oligonucleotide
  Sense strand starting at position 1132 of SEQ ID NO: 588773
gggauaaaucuuggccuca

SEQ ID NO: 888453 - RNA, 19 nt, Artificial Sequence
  Description of Artificial Sequence: Synthetic oligonucleotide
  Antisense strand to SEQ ID NO: 888452
ugaggccaagauuuauccc

SEQ ID NO: 888454 - RNA, 19 nt, Artificial Sequence
  Description of Artificial Sequence: Synthetic oligonucleotide
  Sense strand starting at position 1133 of SEQ ID NO: 588773
ggauaaaucuuggccucaa

SEQ ID NO: 888455 - RNA, 19 nt, Artificial Sequence
  Description of Artificial Sequence: Synthetic oligonucleotide
  Antisense strand to SEQ ID NO: 888454
uugaggccaagauuuaucc

SEQ ID NO: 888456 - RNA, 19 nt, Artificial Sequence
  Description of Artificial Sequence: Synthetic oligonucleotide
  Sense strand starting at position 1307 of SEQ ID NO: 588773
gcuucccuucugggaaauu

SEQ ID NO: 888457 - RNA, 19 nt, Artificial Sequence
  Description of Artificial Sequence: Synthetic oligonucleotide
  Antisense strand to SEQ ID NO: 888456
aauuucccagaagggaagc

SEQ ID NO: 888458 - RNA, 19 nt, Artificial Sequence
  Description of Artificial Sequence: Synthetic oligonucleotide
  Sense strand starting at position 1308 of SEQ ID NO: 588773
cuucccuucugggaaauuu

SEQ ID NO: 888459 - RNA, 19 nt, Artificial Sequence
  Description of Artificial Sequence: Synthetic oligonucleotide
  Antisense strand to SEQ ID NO: 888458
aaauuucccagaagggaag

SEQ ID NO: 888460 - RNA, 19 nt, Artificial Sequence
  Description of Artificial Sequence: Synthetic oligonucleotide
  Sense strand starting at position 1363 of SEQ ID NO: 588773
agucccuucccuggugaaa

SEQ ID NO: 888461 - RNA, 19 nt, Artificial Sequence
  Description of Artificial Sequence: Synthetic oligonucleotide
  Antisense strand to SEQ ID NO: 888460
uuucaccagggaagggacu

SEQ ID NO: 888462 - RNA, 19 nt, Artificial Sequence
  Description of Artificial Sequence: Synthetic oligonucleotide
  Sense strand starting at position 1375 of SEQ ID NO: 588773
ggugaaaccuucccugauu

SEQ ID NO: 888463 - RNA, 19 nt, Artificial Sequence
  Description of Artificial Sequence: Synthetic oligonucleotide
  Antisense strand to SEQ ID NO: 888462
aaucagggaagguuucacc

SEQ ID NO: 888464 - RNA, 19 nt, Artificial Sequence
  Description of Artificial Sequence: Synthetic oligonucleotide
  Sense strand starting at position 1443 of SEQ ID NO: 588773
cugggcucugaagguauua

SEQ ID NO: 888465 - RNA, 19 nt, Artificial Sequence
  Description of Artificial Sequence: Synthetic oligonucleotide
  Antisense strand to SEQ ID NO: 888464
uaauaccuucagagcccag

SEQ ID NO: 888466 - RNA, 19 nt, Artificial Sequence
  Description of Artificial Sequence: Synthetic oligonucleotide
  Sense strand starting at position 1455 of SEQ ID NO: 588773
gguauuagccaucaccauu

SEQ ID NO: 888467 - RNA, 19 nt, Artificial Sequence
  Description of Artificial Sequence: Synthetic oligonucleotide
  Antisense strand to SEQ ID NO: 888466
aauggugauggcuaauacc

SEQ ID NO: 888468 - RNA, 19 nt, Artificial Sequence
  Description of Artificial Sequence: Synthetic oligonucleotide
  Sense strand starting at position 1466 of SEQ ID NO: 588773
ucaccauugcaggaaucau

SEQ ID NO: 888469 - RNA, 19 nt, Artificial Sequence
  Description of Artificial Sequence: Synthetic oligonucleotide
  Antisense strand to SEQ ID NO: 888468
augauuccugcaaugguga

SEQ ID NO: 888470 - RNA, 19 nt, Artificial Sequence
  Description of Artificial Sequence: Synthetic oligonucleotide
  Sense strand starting at position 1475 of SEQ ID NO: 588773
caggaaucauuuggaaugu

SEQ ID NO: 888471 - RNA, 19 nt, Artificial Sequence
  Description of Artificial Sequence: Synthetic oligonucleotide
  Antisense strand to SEQ ID NO: 888470
acauuccaaaugauuccug

SEQ ID NO: 888472 - RNA, 19 nt, Artificial Sequence
  Description of Artificial Sequence: Synthetic oligonucleotide
  Sense strand starting at position 1476 of SEQ ID NO: 588773
aggaaucauuuggaauguu

SEQ ID NO: 888473 - RNA, 19 nt, Artificial Sequence
  Description of Artificial Sequence: Synthetic oligonucleotide
  Antisense strand to SEQ ID NO: 888472
aacauuccaaaugauuccu

SEQ ID NO: 888474 - RNA, 19 nt, Artificial Sequence
  Description of Artificial Sequence: Synthetic oligonucleotide
  Sense strand starting at position 1500 of SEQ ID NO: 588773
auuuaaggcuucuagacua

SEQ ID NO: 888475 - RNA, 19 nt, Artificial Sequence
  Description of Artificial Sequence: Synthetic oligonucleotide
  Antisense strand to SEQ ID NO: 888474
uagucuagaagccuuaaau

SEQ ID NO: 888476 - RNA, 19 nt, Artificial Sequence
  Description of Artificial Sequence: Synthetic oligonucleotide
  Sense strand starting at position 1507 of SEQ ID NO: 588773
gcuucuagacuagauucua

SEQ ID NO: 888477 - RNA, 19 nt, Artificial Sequence
  Description of Artificial Sequence: Synthetic oligonucleotide
  Antisense strand to SEQ ID NO: 888476
uagaaucuagucuagaagc

SEQ ID NO: 888478 - RNA, 19 nt, Artificial Sequence
  Description of Artificial Sequence: Synthetic oligonucleotide
  Sense strand starting at position 1554 of SEQ ID NO: 588773
gagggcugggccugucaga

SEQ ID NO: 888479 - RNA, 19 nt, Artificial Sequence
  Description of Artificial Sequence: Synthetic oligonucleotide
  Antisense strand to SEQ ID NO: 888478
ucugacaggcccagcccuc

SEQ ID NO: 888480 - RNA, 19 nt, Artificial Sequence
  Description of Artificial Sequence: Synthetic oligonucleotide
  Sense strand starting at position 1623 of SEQ ID NO: 588773
guggcuagugaaugaagaa

SEQ ID NO: 888481 - RNA, 19 nt, Artificial Sequence
  Description of Artificial Sequence: Synthetic oligonucleotide
  Antisense strand to SEQ ID NO: 888480
uucuucauucacuagccac

SEQ ID NO: 888482 - RNA, 19 nt, Artificial Sequence
  Description of Artificial Sequence: Synthetic oligonucleotide
  Sense strand starting at position 2823 of SEQ ID NO: 588773
gggagaguugagcaugcaa

SEQ ID NO: 888483 - RNA, 19 nt, Artificial Sequence
  Description of Artificial Sequence: Synthetic oligonucleotide
  Antisense strand to SEQ ID NO: 888482
uugcaugcucaacucuccc

SEQ ID NO: 888484 - RNA, 19 nt, Artificial Sequence
  Description of Artificial Sequence: Synthetic oligonucleotide
  Sense strand starting at position 2825 of SEQ ID NO: 588773
gagaguugagcaugcaauc

SEQ ID NO: 888485 - RNA, 19 nt, Artificial Sequence
  Description of Artificial Sequence: Synthetic oligonucleotide
  Antisense strand to SEQ ID NO: 888484
gauugcaugcucaacucuc

SEQ ID NO: 888486 - RNA, 19 nt, Artificial Sequence
  Description of Artificial Sequence: Synthetic oligonucleotide
  Sense strand starting at position 2866 of SEQ ID NO: 588773
gcucaagauuuggugcuuu

SEQ ID NO: 888487 - RNA, 19 nt, Artificial Sequence
  Description of Artificial Sequence: Synthetic oligonucleotide
  Antisense strand to SEQ ID NO: 888486
aaagcaccaaaucuugagc

SEQ ID NO: 888488 - RNA, 19 nt, Artificial Sequence
  Description of Artificial Sequence: Synthetic oligonucleotide
  Sense strand starting at position 2916 of SEQ ID NO: 588773
guaauuauggcaggugcua

SEQ ID NO: 888489 - RNA, 19 nt, Artificial Sequence
  Description of Artificial Sequence: Synthetic oligonucleotide
  Antisense strand to SEQ ID NO: 888488
uagcaccugccauaauuac

SEQ ID NO: 888490 - RNA, 19 nt, Artificial Sequence
  Description of Artificial Sequence: Synthetic oligonucleotide
  Sense strand starting at position 3019 of SEQ ID NO: 588773
cugccaagagugcaauaaa

SEQ ID NO: 888491 - RNA, 19 nt, Artificial Sequence
  Description of Artificial Sequence: Synthetic oligonucleotide
  Antisense strand to SEQ ID NO: 888490
uuuauugcacucuuggcag

SEQ ID NO: 888492 - RNA, 19 nt, Artificial Sequence
  Description of Artificial Sequence: Synthetic oligonucleotide
  Sense strand starting at position 3052 of SEQ ID NO: 588773
aggagaguaucuguucuga

SEQ ID NO: 888493 - RNA, 19 nt, Artificial Sequence
  Description of Artificial Sequence: Synthetic oligonucleotide
  Antisense strand to SEQ ID NO: 888492
ucagaacagauacucuccu

SEQ ID NO: 888494 - RNA, 19 nt, Artificial Sequence
  Description of Artificial Sequence: Synthetic oligonucleotide
  Sense strand starting at position 3054 of SEQ ID NO: 588773
gagaguaucuguucugaag

SEQ ID NO: 888495 - RNA, 19 nt, Artificial Sequence
  Description of Artificial Sequence: Synthetic oligonucleotide
  Antisense strand to SEQ ID NO: 888494
cuucagaacagauacucuc

SEQ ID NO: 888496 - RNA, 19 nt, Artificial Sequence
  Description of Artificial Sequence: Synthetic oligonucleotide
  Sense strand starting at position 3098 of SEQ ID NO: 588773
gucuguuuguaaccaugga

SEQ ID NO: 888497 - RNA, 19 nt, Artificial Sequence
  Description of Artificial Sequence: Synthetic oligonucleotide
  Antisense strand to SEQ ID NO: 888496
uccaugguuacaaacagac

SEQ ID NO: 888498 - RNA, 19 nt, Artificial Sequence
  Description of Artificial Sequence: Synthetic oligonucleotide
  Sense strand starting at position 3102 of SEQ ID NO: 588773
guuuguaaccauggagcua

SEQ ID NO: 888499 - RNA, 19 nt, Artificial Sequence
  Description of Artificial Sequence: Synthetic oligonucleotide
  Antisense strand to SEQ ID NO: 888498
uagcuccaugguuacaaac

SEQ ID NO: 888500 - RNA, 19 nt, Artificial Sequence
  Description of Artificial Sequence: Synthetic oligonucleotide
  Sense strand starting at position 3444 of SEQ ID NO: 588773
aagagagauguauguagua

SEQ ID NO: 888501 - RNA, 19 nt, Artificial Sequence
  Description of Artificial Sequence: Synthetic oligonucleotide
  Antisense strand to SEQ ID NO: 888500
uacuacauacaucucucuu

SEQ ID NO: 888502 - RNA, 19 nt, Artificial Sequence
  Description of Artificial Sequence: Synthetic oligonucleotide
  Sense strand starting at position 3446 of SEQ ID NO: 588773
gagagauguauguaguagu

SEQ ID NO: 888503 - RNA, 19 nt, Artificial Sequence
  Description of Artificial Sequence: Synthetic oligonucleotide
  Antisense strand to SEQ ID NO: 888502
acuacuacauacaucucuc

SEQ ID NO: 888504 - RNA, 19 nt, Artificial Sequence
  Description of Artificial Sequence: Synthetic oligonucleotide
  Sense strand starting at position 3472 of SEQ ID NO: 588773
gggaauacaugacauaaug

SEQ ID NO: 888505 - RNA, 19 nt, Artificial Sequence
  Description of Artificial Sequence: Synthetic oligonucleotide
  Antisense strand to SEQ ID NO: 888504
cauuaugucauguauuccc

SEQ ID NO: 888506 - RNA, 19 nt, Artificial Sequence
  Description of Artificial Sequence: Synthetic oligonucleotide
  Sense strand starting at position 3520 of SEQ ID NO: 588773
ggcacagaguucucuguca

SEQ ID NO: 888507 - RNA, 19 nt, Artificial Sequence
  Description of Artificial Sequence: Synthetic oligonucleotide
  Antisense strand to SEQ ID NO: 888506
ugacagagaacucugugcc

SEQ ID NO: 888508 - RNA, 19 nt, Artificial Sequence
  Description of Artificial Sequence: Synthetic oligonucleotide
  Sense strand starting at position 3522 of SEQ ID NO: 588773
cacagaguucucugucaag

SEQ ID NO: 888509 - RNA, 19 nt, Artificial Sequence
  Description of Artificial Sequence: Synthetic oligonucleotide
  Antisense strand to SEQ ID NO: 888508
cuugacagagaacucugug

SEQ ID NO: 888510 - RNA, 19 nt, Artificial Sequence
  Description of Artificial Sequence: Synthetic oligonucleotide
  Sense strand starting at position 3528 of SEQ ID NO: 588773
guucucugucaaggguaaa

SEQ ID NO: 888511 - RNA, 19 nt, Artificial Sequence
  Description of Artificial Sequence: Synthetic oligonucleotide
  Antisense strand to SEQ ID NO: 888510
uuuacccuugacagagaac

SEQ ID NO: 888512 - RNA, 19 nt, Artificial Sequence
  Description of Artificial Sequence: Synthetic oligonucleotide
  Sense strand starting at position 3529 of SEQ ID NO: 588773
uucucugucaaggguaaag

SEQ ID NO: 888513 - RNA, 19 nt, Artificial Sequence
  Description of Artificial Sequence: Synthetic oligonucleotide
  Antisense strand to SEQ ID NO: 888512
cuuuacccuugacagagaa

SEQ ID NO: 888514 - RNA, 19 nt, Artificial Sequence
  Description of Artificial Sequence: Synthetic oligonucleotide
  Sense strand starting at position 3540 of SEQ ID NO: 588773
ggguaaagcuauuccugac

SEQ ID NO: 888515 - RNA, 19 nt, Artificial Sequence
  Description of Artificial Sequence: Synthetic oligonucleotide
  Antisense strand to SEQ ID NO: 888514
gucaggaauagcuuuaccc

SEQ ID NO: 888516 - RNA, 19 nt, Artificial Sequence
  Description of Artificial Sequence: Synthetic oligonucleotide
  Sense strand starting at position 3565 of SEQ ID NO: 588773
ugaacaaugucucuagaca

SEQ ID NO: 888517 - RNA, 19 nt, Artificial Sequence
  Description of Artificial Sequence: Synthetic oligonucleotide
  Antisense strand to SEQ ID NO: 888516
ugucuagagacauuguuca

SEQ ID NO: 888518 - RNA, 19 nt, Artificial Sequence
  Description of Artificial Sequence: Synthetic oligonucleotide
  Sense strand starting at position 3630 of SEQ ID NO: 588773
cucugugucuuuccugaaa

SEQ ID NO: 888519 - RNA, 19 nt, Artificial Sequence
  Description of Artificial Sequence: Synthetic oligonucleotide
  Antisense strand to SEQ ID NO: 888518
uuucaggaaagacacagag

SEQ ID NO: 888520 - RNA, 19 nt, Artificial Sequence
  Description of Artificial Sequence: Synthetic oligonucleotide
  Sense strand starting at position 3761 of SEQ ID NO: 588773
ggaguauagagcuauggua

SEQ ID NO: 888521 - RNA, 19 nt, Artificial Sequence
  Description of Artificial Sequence: Synthetic oligonucleotide
  Antisense strand to SEQ ID NO: 888520
uaccauagcucuauacucc

SEQ ID NO: 888522 - RNA, 19 nt, Artificial Sequence
  Description of Artificial Sequence: Synthetic oligonucleotide
  Sense strand starting at position 3796 of SEQ ID NO: 588773
ucaaacauacuuggguuaa

SEQ ID NO: 888523 - RNA, 19 nt, Artificial Sequence
  Description of Artificial Sequence: Synthetic oligonucleotide
  Antisense strand to SEQ ID NO: 888522
uuaacccaaguauguuuga

SEQ ID NO: 888524 - RNA, 19 nt, Artificial Sequence
  Description of Artificial Sequence: Synthetic oligonucleotide
  Sense strand starting at position 2 of SEQ ID NO: 588774
augggaacuggcuguguua

SEQ ID NO: 888525 - RNA, 19 nt, Artificial Sequence
  Description of Artificial Sequence: Synthetic oligonucleotide
  Antisense strand to SEQ ID NO: 888524
uaacacagccaguucccau

SEQ ID NO: 888526 - RNA, 19 nt, Artificial Sequence
  Description of Artificial Sequence: Synthetic oligonucleotide
  Sense strand starting at position 11 of SEQ ID NO: 588774
ggcuguguuacccaggcua

SEQ ID NO: 888527 - RNA, 19 nt, Artificial Sequence
  Description of Artificial Sequence: Synthetic oligonucleotide
  Antisense strand to SEQ ID NO: 888526
uagccuggguaacacagcc

SEQ ID NO: 888528 - RNA, 19 nt, Artificial Sequence
  Description of Artificial Sequence: Synthetic oligonucleotide
  Sense strand starting at position 171 of SEQ ID NO: 588774
cugaguuaauaucuugaau

SEQ ID NO: 888529 - RNA, 19 nt, Artificial Sequence
  Description of Artificial Sequence: Synthetic oligonucleotide
  Antisense strand to SEQ ID NO: 888528
auucaagauauuaacucag

SEQ ID NO: 888530 - RNA, 19 nt, Artificial Sequence
  Description of Artificial Sequence: Synthetic oligonucleotide
  Sense strand starting at position 632 of SEQ ID NO: 588774
auaaguaagcucuaguuaa

SEQ ID NO: 888531 - RNA, 19 nt, Artificial Sequence
  Description of Artificial Sequence: Synthetic oligonucleotide
  Antisense strand to SEQ ID NO: 888530
uuaacuagagcuuacuuau

SEQ ID NO: 888532 - RNA, 19 nt, Artificial Sequence
  Description of Artificial Sequence: Synthetic oligonucleotide
  Sense strand starting at position 697 of SEQ ID NO: 588774
gcaacacguccuucguuua

SEQ ID NO: 888533 - RNA, 19 nt, Artificial Sequence
  Description of Artificial Sequence: Synthetic oligonucleotide
  Antisense strand to SEQ ID NO: 888532
uaaacgaaggacguguugc

SEQ ID NO: 888534 - RNA, 19 nt, Artificial Sequence
  Description of Artificial Sequence: Synthetic oligonucleotide
  Sense strand starting at position 867 of SEQ ID NO: 588774
gcuggaaacucacuuauug

SEQ ID NO: 888535 - RNA, 19 nt, Artificial Sequence
  Description of Artificial Sequence: Synthetic oligonucleotide
  Antisense strand to SEQ ID NO: 888534
caauaagugaguuuccagc

SEQ ID NO: 888536 - RNA, 19 nt, Artificial Sequence
  Description of Artificial Sequence: Synthetic oligonucleotide
  Sense strand starting at position 900 of SEQ ID NO: 588774
caggcacacguuuguaaau

SEQ ID NO: 888537 - RNA, 19 nt, Artificial Sequence
  Description of Artificial Sequence: Synthetic oligonucleotide
  Antisense strand to SEQ ID NO: 888536
auuuacaaacgugugccug

SEQ ID NO: 888538 - RNA, 19 nt, Artificial Sequence
  Description of Artificial Sequence: Synthetic oligonucleotide
  Sense strand starting at position 901 of SEQ ID NO: 588774
aggcacacguuuguaaaua

SEQ ID NO: 888539 - RNA, 19 nt, Artificial Sequence
  Description of Artificial Sequence: Synthetic oligonucleotide
  Antisense strand to SEQ ID NO: 888538
uauuuacaaacgugugccu

SEQ ID NO: 888540 - RNA, 19 nt, Artificial Sequence
  Description of Artificial Sequence: Synthetic oligonucleotide
  Sense strand starting at position 1067 of SEQ ID NO: 588774
gcagcaugaucacuuaaca

SEQ ID NO: 888541 - RNA, 19 nt, Artificial Sequence
  Description of Artificial Sequence: Synthetic oligonucleotide
  Antisense strand to SEQ ID NO: 888540
uguuaagugaucaugcugc

SEQ ID NO: 888542 - RNA, 19 nt, Artificial Sequence
  Description of Artificial Sequence: Synthetic oligonucleotide
  Sense strand starting at position 1084 of SEQ ID NO: 588774
cacggucuccuaggacauu

SEQ ID NO: 888543 - RNA, 19 nt, Artificial Sequence
  Description of Artificial Sequence: Synthetic oligonucleotide
  Antisense strand to SEQ ID NO: 888542
aauguccuaggagaccgug

SEQ ID NO: 888544 - RNA, 19 nt, Artificial Sequence
  Description of Artificial Sequence: Synthetic oligonucleotide
  Sense strand starting at position 1230 of SEQ ID NO: 588774
ccuggaagucuugagguua

SEQ ID NO: 888545 - RNA, 19 nt, Artificial Sequence
  Description of Artificial Sequence: Synthetic oligonucleotide
  Antisense strand to SEQ ID NO: 888544
uaaccucaagacuuccagg

SEQ ID NO: 888546 - RNA, 19 nt, Artificial Sequence
  Description of Artificial Sequence: Synthetic oligonucleotide
  Sense strand starting at position 1242 of SEQ ID NO: 588774
gagguuauccuuuggcuca

SEQ ID NO: 888547 - RNA, 19 nt, Artificial Sequence
  Description of Artificial Sequence: Synthetic oligonucleotide
  Antisense strand to SEQ ID NO: 888546
ugagccaaaggauaaccuc

SEQ ID NO: 888548 - RNA, 19 nt, Artificial Sequence
  Description of Artificial Sequence: Synthetic oligonucleotide
  Sense strand starting at position 1424 of SEQ ID NO: 588774
acuagcaagucuuugaaau

SEQ ID NO: 888549 - RNA, 19 nt, Artificial Sequence
  Description of Artificial Sequence: Synthetic oligonucleotide
  Antisense strand to SEQ ID NO: 888548
auuucaaagacuugcuagu

SEQ ID NO: 888550 - RNA, 19 nt, Artificial Sequence
  Description of Artificial Sequence: Synthetic oligonucleotide
  Sense strand starting at position 1425 of SEQ ID NO: 588774
cuagcaagucuuugaaauu

SEQ ID NO: 888551 - RNA, 19 nt, Artificial Sequence
  Description of Artificial Sequence: Synthetic oligonucleotide
  Antisense strand to SEQ ID NO: 888550
aauuucaaagacuugcuag

SEQ ID NO: 888552 - RNA, 19 nt, Artificial Sequence
  Description of Artificial Sequence: Synthetic oligonucleotide
  Sense strand starting at position 1536 of SEQ ID NO: 588774
gcggcuggauucccaaaua

SEQ ID NO: 888553 - RNA, 19 nt, Artificial Sequence
  Description of Artificial Sequence: Synthetic oligonucleotide
  Antisense strand to SEQ ID NO: 888552
uauuugggaauccagccgc

SEQ ID NO: 888554 - RNA, 19 nt, Artificial Sequence
  Description of Artificial Sequence: Synthetic oligonucleotide
  Sense strand starting at position 2013 of SEQ ID NO: 588774
ccuuuacucacgugagagc

SEQ ID NO: 888555 - RNA, 19 nt, Artificial Sequence
  Description of Artificial Sequence: Synthetic oligonucleotide
  Antisense strand to SEQ ID NO: 888554
gcucucacgugaguaaagg

SEQ ID NO: 888556 - RNA, 19 nt, Artificial Sequence
  Description of Artificial Sequence: Synthetic oligonucleotide
  Sense strand starting at position 2068 of SEQ ID NO: 588774
cucauaggucugcgaccau

SEQ ID NO: 888557 - RNA, 19 nt, Artificial Sequence
  Description of Artificial Sequence: Synthetic oligonucleotide
  Antisense strand to SEQ ID NO: 888556
auggucgcagaccuaugag

SEQ ID NO: 888558 - RNA, 19 nt, Artificial Sequence
  Description of Artificial Sequence: Synthetic oligonucleotide
  Sense strand starting at position 2300 of SEQ ID NO: 588774
accuguugagccuaacaaa

SEQ ID NO: 888559 - RNA, 19 nt, Artificial Sequence
  Description of Artificial Sequence: Synthetic oligonucleotide
  Antisense strand to SEQ ID NO: 888558
uuuguuaggcucaacaggu

SEQ ID NO: 888560 - RNA, 19 nt, Artificial Sequence
  Description of Artificial Sequence: Synthetic oligonucleotide
  Sense strand starting at position 2455 of SEQ ID NO: 588774
agggauugugaugguucuu

SEQ ID NO: 888561 - RNA, 19 nt, Artificial Sequence
  Description of Artificial Sequence: Synthetic oligonucleotide
  Antisense strand to SEQ ID NO: 888560
aagaaccaucacaaucccu

SEQ ID NO: 888562 - RNA, 19 nt, Artificial Sequence
  Description of Artificial Sequence: Synthetic oligonucleotide
  Sense strand starting at position 2460 of SEQ ID NO: 588774
uugugaugguucuuuaugu

SEQ ID NO: 888563 - RNA, 19 nt, Artificial Sequence
  Description of Artificial Sequence: Synthetic oligonucleotide
  Antisense strand to SEQ ID NO: 888562
acauaaagaaccaucacaa

SEQ ID NO: 888564 - RNA, 19 nt, Artificial Sequence
  Description of Artificial Sequence: Synthetic oligonucleotide
  Sense strand starting at position 2461 of SEQ ID NO: 588774
ugugaugguucuuuaugug

SEQ ID NO: 888565 - RNA, 19 nt, Artificial Sequence
  Description of Artificial Sequence: Synthetic oligonucleotide
  Antisense strand to SEQ ID NO: 888564
cacauaaagaaccaucaca

SEQ ID NO: 888566 - RNA, 19 nt, Artificial Sequence
  Description of Artificial Sequence: Synthetic oligonucleotide
  Sense strand starting at position 2470 of SEQ ID NO: 588774
ucuuuauguggcuaucuca

SEQ ID NO: 888567 - RNA, 19 nt, Artificial Sequence
  Description of Artificial Sequence: Synthetic oligonucleotide
  Antisense strand to SEQ ID NO: 888566
ugagauagccacauaaaga

SEQ ID NO: 888568 - RNA, 19 nt, Artificial Sequence
  Description of Artificial Sequence: Synthetic oligonucleotide
  Sense strand starting at position 2473 of SEQ ID NO: 588774
uuauguggcuaucucauuu

SEQ ID NO: 888569 - RNA, 19 nt, Artificial Sequence
  Description of Artificial Sequence: Synthetic oligonucleotide
  Antisense strand to SEQ ID NO: 888568
aaaugagauagccacauaa

SEQ ID NO: 888570 - RNA, 19 nt, Artificial Sequence
  Description of Artificial Sequence: Synthetic oligonucleotide
  Sense strand starting at position 2671 of SEQ ID NO: 588774
guuacaucagauugugacu

SEQ ID NO: 888571 - RNA, 19 nt, Artificial Sequence
  Description of Artificial Sequence: Synthetic oligonucleotide
  Antisense strand to SEQ ID NO: 888570
agucacaaucugauguaac

SEQ ID NO: 888572 - RNA, 19 nt, Artificial Sequence
  Description of Artificial Sequence: Synthetic oligonucleotide
  Sense strand starting at position 2676 of SEQ ID NO: 588774
aucagauugugacucaaag

SEQ ID NO: 888573 - RNA, 19 nt, Artificial Sequence
  Description of Artificial Sequence: Synthetic oligonucleotide
  Antisense strand to SEQ ID NO: 888572
cuuugagucacaaucugau

SEQ ID NO: 888574 - RNA, 19 nt, Artificial Sequence
  Description of Artificial Sequence: Synthetic oligonucleotide
  Sense strand starting at position 2763 of SEQ ID NO: 588774
cccuguccucaaugaaugu

SEQ ID NO: 888575 - RNA, 19 nt, Artificial Sequence
  Description of Artificial Sequence: Synthetic oligonucleotide
  Antisense strand to SEQ ID NO: 888574
acauucauugaggacaggg

SEQ ID NO: 888576 - RNA, 19 nt, Artificial Sequence
  Description of Artificial Sequence: Synthetic oligonucleotide
  Sense strand starting at position 2767 of SEQ ID NO: 588774
guccucaaugaauguacaa

SEQ ID NO: 888577 - RNA, 19 nt, Artificial Sequence
  Description of Artificial Sequence: Synthetic oligonucleotide
  Antisense strand to SEQ ID NO: 888576
uuguacauucauugaggac

SEQ ID NO: 888578 - RNA, 19 nt, Artificial Sequence
  Description of Artificial Sequence: Synthetic oligonucleotide
  Sense strand starting at position 2845 of SEQ ID NO: 588774
gacccuaucuuguccagga

SEQ ID NO: 888579 - RNA, 19 nt, Artificial Sequence
  Description of Artificial Sequence: Synthetic oligonucleotide
  Antisense strand to SEQ ID NO: 888578
uccuggacaagauaggguc

SEQ ID NO: 888580 - RNA, 19 nt, Artificial Sequence
  Description of Artificial Sequence: Synthetic oligonucleotide
  Sense strand starting at position 2846 of SEQ ID NO: 588774
acccuaucuuguccaggau

SEQ ID NO: 888581 - RNA, 19 nt, Artificial Sequence
  Description of Artificial Sequence: Synthetic oligonucleotide
  Antisense strand to SEQ ID NO: 888580
auccuggacaagauagggu

SEQ ID NO: 888582 - RNA, 19 nt, Artificial Sequence
  Description of Artificial Sequence: Synthetic oligonucleotide
  Sense strand starting at position 2849 of SEQ ID NO: 588774
cuaucuuguccaggaugca

SEQ ID NO: 888583 - RNA, 19 nt, Artificial Sequence
  Description of Artificial Sequence: Synthetic oligonucleotide
  Antisense strand to SEQ ID NO: 888582
ugcauccuggacaagauag

SEQ ID NO: 888584 - RNA, 19 nt, Artificial Sequence
  Description of Artificial Sequence: Synthetic oligonucleotide
  Sense strand starting at position 3087 of SEQ ID NO: 588774
gagugagucgucuacagug

SEQ ID NO: 888585 - RNA, 19 nt, Artificial Sequence
  Description of Artificial Sequence: Synthetic oligonucleotide
  Antisense strand to SEQ ID NO: 888584
cacuguagacgacucacuc

SEQ ID NO: 888586 - RNA, 19 nt, Artificial Sequence
  Description of Artificial Sequence: Synthetic oligonucleotide
  Sense strand starting at position 3170 of SEQ ID NO: 588774
uugcaaucccucugugauu

SEQ ID NO: 888587 - RNA, 19 nt, Artificial Sequence
  Description of Artificial Sequence: Synthetic oligonucleotide
  Antisense strand to SEQ ID NO: 888586
aaucacagagggauugcaa

SEQ ID NO: 888588 - RNA, 19 nt, Artificial Sequence
  Description of Artificial Sequence: Synthetic oligonucleotide
  Sense strand starting at position 3171 of SEQ ID NO: 588774
ugcaaucccucugugauuu

SEQ ID NO: 888589 - RNA, 19 nt, Artificial Sequence
  Description of Artificial Sequence: Synthetic oligonucleotide
  Antisense strand to SEQ ID NO: 888588
aaaucacagagggauugca

SEQ ID NO: 888590 - RNA, 19 nt, Artificial Sequence
  Description of Artificial Sequence: Synthetic oligonucleotide
  Sense strand starting at position 3172 of SEQ ID NO: 588774
gcaaucccucugugauuug

SEQ ID NO: 888591 - RNA, 19 nt, Artificial Sequence
  Description of Artificial Sequence: Synthetic oligonucleotide
  Antisense strand to SEQ ID NO: 888590
caaaucacagagggauugc

SEQ ID NO: 888592 - RNA, 19 nt, Artificial Sequence
  Description of Artificial Sequence: Synthetic oligonucleotide
  Sense strand starting at position 3189 of SEQ ID NO: 588774
ugucuaauacaauagaugu

SEQ ID NO: 888593 - RNA, 19 nt, Artificial Sequence
  Description of Artificial Sequence: Synthetic oligonucleotide
  Antisense strand to SEQ ID NO: 888592
acaucuauuguauuagaca

SEQ ID NO: 888594 - RNA, 19 nt, Artificial Sequence
  Description of Artificial Sequence: Synthetic oligonucleotide
  Sense strand starting at position 3288 of SEQ ID NO: 588774
aauaaaguauuagggagaa

SEQ ID NO: 888595 - RNA, 19 nt, Artificial Sequence
  Description of Artificial Sequence: Synthetic oligonucleotide
  Antisense strand to SEQ ID NO: 888594
uucucccuaauacuuuauu

SEQ ID NO: 888596 - RNA, 19 nt, Artificial Sequence
  Description of Artificial Sequence: Synthetic oligonucleotide
  Sense strand starting at position 3875 of SEQ ID NO: 588774
acaguuggcuuucuuaacu

SEQ ID NO: 888597 - RNA, 19 nt, Artificial Sequence
  Description of Artificial Sequence: Synthetic oligonucleotide
  Antisense strand to SEQ ID NO: 888596
aguuaagaaagccaacugu

SEQ ID NO: 888598 - RNA, 19 nt, Artificial Sequence
  Description of Artificial Sequence: Synthetic oligonucleotide
  Sense strand starting at position 3880 of SEQ ID NO: 588774
uggcuuucuuaacucagua

SEQ ID NO: 888599 - RNA, 19 nt, Artificial Sequence
  Description of Artificial Sequence: Synthetic oligonucleotide
  Antisense strand to SEQ ID NO: 888598
uacugaguuaagaaagcca

SEQ ID NO: 888600 - RNA, 19 nt, Artificial Sequence
  Description of Artificial Sequence: Synthetic oligonucleotide
  Sense strand starting at position 3884 of SEQ ID NO: 588774
uuucuuaacucaguaaugu

SEQ ID NO: 888601 - RNA, 19 nt, Artificial Sequence
  Description of Artificial Sequence: Synthetic oligonucleotide
  Antisense strand to SEQ ID NO: 888600
acauuacugaguuaagaaa

SEQ ID NO: 888602 - RNA, 19 nt, Artificial Sequence
  Description of Artificial Sequence: Synthetic oligonucleotide
  Sense strand starting at position 3885 of SEQ ID NO: 588774
uucuuaacucaguaauguu

SEQ ID NO: 888603 - RNA, 19 nt, Artificial Sequence
  Description of Artificial Sequence: Synthetic oligonucleotide
  Antisense strand to SEQ ID NO: 888602
aacauuacugaguuaagaa

SEQ ID NO: 888604 - RNA, 19 nt, Artificial Sequence
  Description of Artificial Sequence: Synthetic oligonucleotide
  Sense strand starting at position 73 of SEQ ID NO: 588775
acaaguuccuuugaugcuu

SEQ ID NO: 888605 - RNA, 19 nt, Artificial Sequence
  Description of Artificial Sequence: Synthetic oligonucleotide
  Antisense strand to SEQ ID NO: 888604
aagcaucaaaggaacuugu

SEQ ID NO: 888606 - RNA, 19 nt, Artificial Sequence
  Description of Artificial Sequence: Synthetic oligonucleotide
  Sense strand starting at position 79 of SEQ ID NO: 588775
uccuuugaugcuuggguua

SEQ ID NO: 888607 - RNA, 19 nt, Artificial Sequence
  Description of Artificial Sequence: Synthetic oligonucleotide
  Antisense strand to SEQ ID NO: 888606
uaacccaagcaucaaagga

SEQ ID NO: 888608 - RNA, 19 nt, Artificial Sequence
  Description of Artificial Sequence: Synthetic oligonucleotide
  Sense strand starting at position 84 of SEQ ID NO: 588775
ugaugcuuggguuacugaa

SEQ ID NO: 888609 - RNA, 19 nt, Artificial Sequence
  Description of Artificial Sequence: Synthetic oligonucleotide
  Antisense strand to SEQ ID NO: 888608
uucaguaacccaagcauca

SEQ ID NO: 888610 - RNA, 19 nt, Artificial Sequence
  Description of Artificial Sequence: Synthetic oligonucleotide
  Sense strand starting at position 136 of SEQ ID NO: 588775
auccguuucuguuccuaaa

SEQ ID NO: 888611 - RNA, 19 nt, Artificial Sequence
  Description of Artificial Sequence: Synthetic oligonucleotide
  Antisense strand to SEQ ID NO: 888610
uuuaggaacagaaacggau

SEQ ID NO: 888612 - RNA, 19 nt, Artificial Sequence
  Description of Artificial Sequence: Synthetic oligonucleotide
  Sense strand starting at position 139 of SEQ ID NO: 588775
cguuucuguuccuaaacgu

SEQ ID NO: 888613 - RNA, 19 nt, Artificial Sequence
  Description of Artificial Sequence: Synthetic oligonucleotide
  Antisense strand to SEQ ID NO: 888612
acguuuaggaacagaaacg

SEQ ID NO: 888614 - RNA, 19 nt, Artificial Sequence
  Description of Artificial Sequence: Synthetic oligonucleotide
  Sense strand starting at position 164 of SEQ ID NO: 588775
ugcgcuuucuuucugauga

SEQ ID NO: 888615 - RNA, 19 nt, Artificial Sequence
  Description of Artificial Sequence: Synthetic oligonucleotide
  Antisense strand to SEQ ID NO: 888614
ucaucagaaagaaagcgca

SEQ ID NO: 888616 - RNA, 19 nt, Artificial Sequence
  Description of Artificial Sequence: Synthetic oligonucleotide
  Sense strand starting at position 165 of SEQ ID NO: 588775
gcgcuuucuuucugaugag

SEQ ID NO: 888617 - RNA, 19 nt, Artificial Sequence
  Description of Artificial Sequence: Synthetic oligonucleotide
  Antisense strand to SEQ ID NO: 888616
cucaucagaaagaaagcgc

SEQ ID NO: 888618 - RNA, 19 nt, Artificial Sequence
  Description of Artificial Sequence: Synthetic oligonucleotide
  Sense strand starting at position 168 of SEQ ID NO: 588775
cuuucuuucugaugagcac

SEQ ID NO: 888619 - RNA, 19 nt, Artificial Sequence
  Description of Artificial Sequence: Synthetic oligonucleotide
  Antisense strand to SEQ ID NO: 888618
gugcucaucagaaagaaag

SEQ ID NO: 888620 - RNA, 19 nt, Artificial Sequence
  Description of Artificial Sequence: Synthetic oligonucleotide
  Sense strand starting at position 222 of SEQ ID NO: 588775
ugucgucguauguucuaga

SEQ ID NO: 888621 - RNA, 19 nt, Artificial Sequence
  Description of Artificial Sequence: Synthetic oligonucleotide
  Antisense strand to SEQ ID NO: 888620
ucuagaacauacgacgaca

SEQ ID NO: 888622 - RNA, 19 nt, Artificial Sequence
  Description of Artificial Sequence: Synthetic oligonucleotide
  Sense strand starting at position 225 of SEQ ID NO: 588775
cgucguauguucuagagua

SEQ ID NO: 888623 - RNA, 19 nt, Artificial Sequence
  Description of Artificial Sequence: Synthetic oligonucleotide
  Antisense strand to SEQ ID NO: 888622
uacucuagaacauacgacg

SEQ ID NO: 888624 - RNA, 19 nt, Artificial Sequence
  Description of Artificial Sequence: Synthetic oligonucleotide
  Sense strand starting at position 227 of SEQ ID NO: 588775
ucguauguucuagaguaua

SEQ ID NO: 888625 - RNA, 19 nt, Artificial Sequence
  Description of Artificial Sequence: Synthetic oligonucleotide
  Antisense strand to SEQ ID NO: 888624
uauacucuagaacauacga

SEQ ID NO: 888626 - RNA, 19 nt, Artificial Sequence
  Description of Artificial Sequence: Synthetic oligonucleotide
  Sense strand starting at position 447 of SEQ ID NO: 588775
ccuagaugcucagacuuau

SEQ ID NO: 888627 - RNA, 19 nt, Artificial Sequence
  Description of Artificial Sequence: Synthetic oligonucleotide
  Antisense strand to SEQ ID NO: 888626
auaagucugagcaucuagg

SEQ ID NO: 888628 - RNA, 19 nt, Artificial Sequence
  Description of Artificial Sequence: Synthetic oligonucleotide
  Sense strand starting at position 485 of SEQ ID NO: 588775
cuugcuuacugcuaaaggu

SEQ ID NO: 888629 - RNA, 19 nt, Artificial Sequence
  Description of Artificial Sequence: Synthetic oligonucleotide
  Antisense strand to SEQ ID NO: 888628
accuuuagcaguaagcaag

SEQ ID NO: 888630 - RNA, 19 nt, Artificial Sequence
  Description of Artificial Sequence: Synthetic oligonucleotide
  Sense strand starting at position 495 of SEQ ID NO: 588775
gcuaaaggugucuggguga

SEQ ID NO: 888631 - RNA, 19 nt, Artificial Sequence
  Description of Artificial Sequence: Synthetic oligonucleotide
  Antisense strand to SEQ ID NO: 888630
ucacccagacaccuuuagc

SEQ ID NO: 888632 - RNA, 19 nt, Artificial Sequence
  Description of Artificial Sequence: Synthetic oligonucleotide
  Sense strand starting at position 671 of SEQ ID NO: 588775
gcacaagagucuuucugau

SEQ ID NO: 888633 - RNA, 19 nt, Artificial Sequence
  Description of Artificial Sequence: Synthetic oligonucleotide
  Antisense strand to SEQ ID NO: 888632
aucagaaagacucuugugc

SEQ ID NO: 888634 - RNA, 19 nt, Artificial Sequence
  Description of Artificial Sequence: Synthetic oligonucleotide
  Sense strand starting at position 673 of SEQ ID NO: 588775
acaagagucuuucugauca

SEQ ID NO: 888635 - RNA, 19 nt, Artificial Sequence
  Description of Artificial Sequence: Synthetic oligonucleotide
  Antisense strand to SEQ ID NO: 888634
ugaucagaaagacucuugu

SEQ ID NO: 888636 - RNA, 19 nt, Artificial Sequence
  Description of Artificial Sequence: Synthetic oligonucleotide
  Sense strand starting at position 677 of SEQ ID NO: 588775
gagucuuucugaucauuag

SEQ ID NO: 888637 - RNA, 19 nt, Artificial Sequence
  Description of Artificial Sequence: Synthetic oligonucleotide
  Antisense strand to SEQ ID NO: 888636
cuaaugaucagaaagacuc

SEQ ID NO: 888638 - RNA, 19 nt, Artificial Sequence
  Description of Artificial Sequence: Synthetic oligonucleotide
  Sense strand starting at position 683 of SEQ ID NO: 588775
uucugaucauuaguucuua

SEQ ID NO: 888639 - RNA, 19 nt, Artificial Sequence
  Description of Artificial Sequence: Synthetic oligonucleotide
  Antisense strand to SEQ ID NO: 888638
uaagaacuaaugaucagaa

SEQ ID NO: 888640 - RNA, 19 nt, Artificial Sequence
  Description of Artificial Sequence: Synthetic oligonucleotide
  Sense strand starting at position 718 of SEQ ID NO: 588775
uggaaauaucacggaggcu

SEQ ID NO: 888641 - RNA, 19 nt, Artificial Sequence
  Description of Artificial Sequence: Synthetic oligonucleotide
  Antisense strand to SEQ ID NO: 888640
agccuccgugauauuucca

SEQ ID NO: 888642 - RNA, 19 nt, Artificial Sequence
  Description of Artificial Sequence: Synthetic oligonucleotide
  Sense strand starting at position 955 of SEQ ID NO: 588775
cacucaggaguccguaaau

SEQ ID NO: 888643 - RNA, 19 nt, Artificial Sequence
  Description of Artificial Sequence: Synthetic oligonucleotide
  Antisense strand to SEQ ID NO: 888642
auuuacggacuccugagug

SEQ ID NO: 888644 - RNA, 19 nt, Artificial Sequence
  Description of Artificial Sequence: Synthetic oligonucleotide
  Sense strand starting at position 977 of SEQ ID NO: 588775
uccuccuuccuacgagaaa

SEQ ID NO: 888645 - RNA, 19 nt, Artificial Sequence
  Description of Artificial Sequence: Synthetic oligonucleotide
  Antisense strand to SEQ ID NO: 888644
uuucucguaggaaggagga

SEQ ID NO: 888646 - RNA, 19 nt, Artificial Sequence
  Description of Artificial Sequence: Synthetic oligonucleotide
  Sense strand starting at position 978 of SEQ ID NO: 588775
ccuccuuccuacgagaaau

SEQ ID NO: 888647 - RNA, 19 nt, Artificial Sequence
  Description of Artificial Sequence: Synthetic oligonucleotide
  Antisense strand to SEQ ID NO: 888646
auuucucguaggaaggagg

SEQ ID NO: 888648 - RNA, 19 nt, Artificial Sequence
  Description of Artificial Sequence: Synthetic oligonucleotide
  Sense strand starting at position 996 of SEQ ID NO: 588775
ugggaugucuccuacaguc

SEQ ID NO: 888649 - RNA, 19 nt, Artificial Sequence
  Description of Artificial Sequence: Synthetic oligonucleotide
  Antisense strand to SEQ ID NO: 888648
gacuguaggagacauccca

SEQ ID NO: 888650 - RNA, 19 nt, Artificial Sequence
  Description of Artificial Sequence: Synthetic oligonucleotide
  Sense strand starting at position 1045 of SEQ ID NO: 588775
cuagauacgucucuuacaa

SEQ ID NO: 888651 - RNA, 19 nt, Artificial Sequence
  Description of Artificial Sequence: Synthetic oligonucleotide
  Antisense strand to SEQ ID NO: 888650
uuguaagagacguaucuag

SEQ ID NO: 888652 - RNA, 19 nt, Artificial Sequence
  Description of Artificial Sequence: Synthetic oligonucleotide
  Sense strand starting at position 1047 of SEQ ID NO: 588775
agauacgucucuuacaaac

SEQ ID NO: 888653 - RNA, 19 nt, Artificial Sequence
  Description of Artificial Sequence: Synthetic oligonucleotide
  Antisense strand to SEQ ID NO: 888652
guuuguaagagacguaucu

SEQ ID NO: 888654 - RNA, 19 nt, Artificial Sequence
  Description of Artificial Sequence: Synthetic oligonucleotide
  Sense strand starting at position 1084 of SEQ ID NO: 588775
ggcgagaauguguggcgua

SEQ ID NO: 888655 - RNA, 19 nt, Artificial Sequence
  Description of Artificial Sequence: Synthetic oligonucleotide
  Antisense strand to SEQ ID NO: 888654
uacgccacacauucucgcc

SEQ ID NO: 888656 - RNA, 19 nt, Artificial Sequence
  Description of Artificial Sequence: Synthetic oligonucleotide
  Sense strand starting at position 1089 of SEQ ID NO: 588775
gaauguguggcguagcuaa

SEQ ID NO: 888657 - RNA, 19 nt, Artificial Sequence
  Description of Artificial Sequence: Synthetic oligonucleotide
  Antisense strand to SEQ ID NO: 888656
uuagcuacgccacacauuc

SEQ ID NO: 888658 - RNA, 19 nt, Artificial Sequence
  Description of Artificial Sequence: Synthetic oligonucleotide
  Sense strand starting at position 1091 of SEQ ID NO: 588775
auguguggcguagcuaaua

SEQ ID NO: 888659 - RNA, 19 nt, Artificial Sequence
  Description of Artificial Sequence: Synthetic oligonucleotide
  Antisense strand to SEQ ID NO: 888658
uauuagcuacgccacacau

SEQ ID NO: 888660 - RNA, 19 nt, Artificial Sequence
  Description of Artificial Sequence: Synthetic oligonucleotide
  Sense strand starting at position 1261 of SEQ ID NO: 588775
ccugcuuggcauuauguaa

SEQ ID NO: 888661 - RNA, 19 nt, Artificial Sequence
  Description of Artificial Sequence: Synthetic oligonucleotide
  Antisense strand to SEQ ID NO: 888660
uuacauaaugccaagcagg

SEQ ID NO: 888662 - RNA, 19 nt, Artificial Sequence
  Description of Artificial Sequence: Synthetic oligonucleotide
  Sense strand starting at position 2635 of SEQ ID NO: 588775
gccuccuccuuucggagaa

SEQ ID NO: 888663 - RNA, 19 nt, Artificial Sequence
  Description of Artificial Sequence: Synthetic oligonucleotide
  Antisense strand to SEQ ID NO: 888662
uucuccgaaaggaggaggc

SEQ ID NO: 888664 - RNA, 19 nt, Artificial Sequence
  Description of Artificial Sequence: Synthetic oligonucleotide
  Sense strand starting at position 2636 of SEQ ID NO: 588775
ccuccuccuuucggagaaa

SEQ ID NO: 888665 - RNA, 19 nt, Artificial Sequence
  Description of Artificial Sequence: Synthetic oligonucleotide
  Antisense strand to SEQ ID NO: 888664
uuucuccgaaaggaggagg

SEQ ID NO: 888666 - RNA, 19 nt, Artificial Sequence
  Description of Artificial Sequence: Synthetic oligonucleotide
  Sense strand starting at position 2637 of SEQ ID NO: 588775
cuccuccuuucggagaaau

SEQ ID NO: 888667 - RNA, 19 nt, Artificial Sequence
  Description of Artificial Sequence: Synthetic oligonucleotide
  Antisense strand to SEQ ID NO: 888666
auuucuccgaaaggaggag

SEQ ID NO: 888668 - RNA, 19 nt, Artificial Sequence
  Description of Artificial Sequence: Synthetic oligonucleotide
  Sense strand starting at position 2639 of SEQ ID NO: 588775
ccuccuuucggagaaauua

SEQ ID NO: 888669 - RNA, 19 nt, Artificial Sequence
  Description of Artificial Sequence: Synthetic oligonucleotide
  Antisense strand to SEQ ID NO: 888668
uaauuucuccgaaaggagg

SEQ ID NO: 888670 - RNA, 19 nt, Artificial Sequence
  Description of Artificial Sequence: Synthetic oligonucleotide
  Sense strand starting at position 2647 of SEQ ID NO: 588775
cggagaaauuaacaaggua

SEQ ID NO: 888671 - RNA, 19 nt, Artificial Sequence
  Description of Artificial Sequence: Synthetic oligonucleotide
  Antisense strand to SEQ ID NO: 888670
uaccuuguuaauuucuccg

SEQ ID NO: 888672 - RNA, 19 nt, Artificial Sequence
  Description of Artificial Sequence: Synthetic oligonucleotide
  Sense strand starting at position 2712 of SEQ ID NO: 588775
caauuaaaguccugcaggu

SEQ ID NO: 888673 - RNA, 19 nt, Artificial Sequence
  Description of Artificial Sequence: Synthetic oligonucleotide
  Antisense strand to SEQ ID NO: 888672
accugcaggacuuuaauug

SEQ ID NO: 888674 - RNA, 19 nt, Artificial Sequence
  Description of Artificial Sequence: Synthetic oligonucleotide
  Sense strand starting at position 2716 of SEQ ID NO: 588775
uaaaguccugcagguacaa

SEQ ID NO: 888675 - RNA, 19 nt, Artificial Sequence
  Description of Artificial Sequence: Synthetic oligonucleotide
  Antisense strand to SEQ ID NO: 888674
uuguaccugcaggacuuua

SEQ ID NO: 888676 - RNA, 19 nt, Artificial Sequence
  Description of Artificial Sequence: Synthetic oligonucleotide
  Sense strand starting at position 3504 of SEQ ID NO: 588775
ggugcugugccagaaucag

SEQ ID NO: 888677 - RNA, 19 nt, Artificial Sequence
  Description of Artificial Sequence: Synthetic oligonucleotide
  Antisense strand to SEQ ID NO: 888676
cugauucuggcacagcacc

SEQ ID NO: 888678 - RNA, 19 nt, Artificial Sequence
  Description of Artificial Sequence: Synthetic oligonucleotide
  Sense strand starting at position 3836 of SEQ ID NO: 588775
uagugauguccuggccagu

SEQ ID NO: 888679 - RNA, 19 nt, Artificial Sequence
  Description of Artificial Sequence: Synthetic oligonucleotide
  Antisense strand to SEQ ID NO: 888678
acuggccaggacaucacua

SEQ ID NO: 888680 - RNA, 19 nt, Artificial Sequence
  Description of Artificial Sequence: Synthetic oligonucleotide
  Sense strand starting at position 3946 of SEQ ID NO: 588775
gcacuuucucugugcucau

SEQ ID NO: 888681 - RNA, 19 nt, Artificial Sequence
  Description of Artificial Sequence: Synthetic oligonucleotide
  Antisense strand to SEQ ID NO: 888680
augagcacagagaaagugc

SEQ ID NO: 888682 - RNA, 19 nt, Artificial Sequence
  Description of Artificial Sequence: Synthetic oligonucleotide
  Sense strand starting at position 9 of SEQ ID NO: 588776
gaagcagugcucuaucaca

SEQ ID NO: 888683 - RNA, 19 nt, Artificial Sequence
  Description of Artificial Sequence: Synthetic oligonucleotide
  Antisense strand to SEQ ID NO: 888682
ugugauagagcacugcuuc

SEQ ID NO: 888684 - RNA, 19 nt, Artificial Sequence
  Description of Artificial Sequence: Synthetic oligonucleotide
  Sense strand starting at position 246 of SEQ ID NO: 588776
aaaggcaguggucauguaa

SEQ ID NO: 888685 - RNA, 19 nt, Artificial Sequence
  Description of Artificial Sequence: Synthetic oligonucleotide
  Antisense strand to SEQ ID NO: 888684
uuacaugaccacugccuuu

SEQ ID NO: 888686 - RNA, 19 nt, Artificial Sequence
  Description of Artificial Sequence: Synthetic oligonucleotide
  Sense strand starting at position 255 of SEQ ID NO: 588776
ggucauguaauguaucaca

SEQ ID NO: 888687 - RNA, 19 nt, Artificial Sequence
  Description of Artificial Sequence: Synthetic oligonucleotide
  Antisense strand to SEQ ID NO: 888686
ugugauacauuacaugacc

SEQ ID NO: 888688 - RNA, 19 nt, Artificial Sequence
  Description of Artificial Sequence: Synthetic oligonucleotide
  Sense strand starting at position 396 of SEQ ID NO: 588776
cucuauagccaaugagcuu

SEQ ID NO: 888689 - RNA, 19 nt, Artificial Sequence
  Description of Artificial Sequence: Synthetic oligonucleotide
  Antisense strand to SEQ ID NO: 888688
aagcucauuggcuauagag

SEQ ID NO: 888690 - RNA, 19 nt, Artificial Sequence
  Description of Artificial Sequence: Synthetic oligonucleotide
  Sense strand starting at position 403 of SEQ ID NO: 588776
gccaaugagcuuugacuaa

SEQ ID NO: 888691 - RNA, 19 nt, Artificial Sequence
  Description of Artificial Sequence: Synthetic oligonucleotide
  Antisense strand to SEQ ID NO: 888690
uuagucaaagcucauuggc

SEQ ID NO: 888692 - RNA, 19 nt, Artificial Sequence
  Description of Artificial Sequence: Synthetic oligonucleotide
  Sense strand starting at position 407 of SEQ ID NO: 588776
augagcuuugacuaaguca

SEQ ID NO: 888693 - RNA, 19 nt, Artificial Sequence
  Description of Artificial Sequence: Synthetic oligonucleotide
  Antisense strand to SEQ ID NO: 888692
ugacuuagucaaagcucau

SEQ ID NO: 888694 - RNA, 19 nt, Artificial Sequence
  Description of Artificial Sequence: Synthetic oligonucleotide
  Sense strand starting at position 410 of SEQ ID NO: 588776
agcuuugacuaagucaaua

SEQ ID NO: 888695 - RNA, 19 nt, Artificial Sequence
  Description of Artificial Sequence: Synthetic oligonucleotide
  Antisense strand to SEQ ID NO: 888694
uauugacuuagucaaagcu

SEQ ID NO: 888696 - RNA, 19 nt, Artificial Sequence
  Description of Artificial Sequence: Synthetic oligonucleotide
  Sense strand starting at position 415 of SEQ ID NO: 588776
ugacuaagucaauaaggcu

SEQ ID NO: 888697 - RNA, 19 nt, Artificial Sequence
  Description of Artificial Sequence: Synthetic oligonucleotide
  Antisense strand to SEQ ID NO: 888696
agccuuauugacuuaguca

SEQ ID NO: 888698 - RNA, 19 nt, Artificial Sequence
  Description of Artificial Sequence: Synthetic oligonucleotide
  Sense strand starting at position 484 of SEQ ID NO: 588776
gccagcaaagcucacuaaa

SEQ ID NO: 888699 - RNA, 19 nt, Artificial Sequence
  Description of Artificial Sequence: Synthetic oligonucleotide
  Antisense strand to SEQ ID NO: 888698
uuuagugagcuuugcuggc

SEQ ID NO: 888700 - RNA, 19 nt, Artificial Sequence
  Description of Artificial Sequence: Synthetic oligonucleotide
  Sense strand starting at position 591 of SEQ ID NO: 588776
ucacaagaguugcuauacu

SEQ ID NO: 888701 - RNA, 19 nt, Artificial Sequence
  Description of Artificial Sequence: Synthetic oligonucleotide
  Antisense strand to SEQ ID NO: 888700
aguauagcaacucuuguga

SEQ ID NO: 888702 - RNA, 19 nt, Artificial Sequence
  Description of Artificial Sequence: Synthetic oligonucleotide
  Sense strand starting at position 601 of SEQ ID NO: 588776
ugcuauacuggcuacguaa

SEQ ID NO: 888703 - RNA, 19 nt, Artificial Sequence
  Description of Artificial Sequence: Synthetic oligonucleotide
  Antisense strand to SEQ ID NO: 888702
uuacguagccaguauagca

SEQ ID NO: 888704 - RNA, 19 nt, Artificial Sequence
  Description of Artificial Sequence: Synthetic oligonucleotide
  Sense strand starting at position 612 of SEQ ID NO: 588776
cuacguaaguuacuuaauu

SEQ ID NO: 888705 - RNA, 19 nt, Artificial Sequence
  Description of Artificial Sequence: Synthetic oligonucleotide
  Antisense strand to SEQ ID NO: 888704
aauuaaguaacuuacguag

SEQ ID NO: 888706 - RNA, 19 nt, Artificial Sequence
  Description of Artificial Sequence: Synthetic oligonucleotide
  Sense strand starting at position 824 of SEQ ID NO: 588776
ggaauucuaaggugucgua

SEQ ID NO: 888707 - RNA, 19 nt, Artificial Sequence
  Description of Artificial Sequence: Synthetic oligonucleotide
  Antisense strand to SEQ ID NO: 888706
uacgacaccuuagaauucc

SEQ ID NO: 888708 - RNA, 19 nt, Artificial Sequence
  Description of Artificial Sequence: Synthetic oligonucleotide
  Sense strand starting at position 884 of SEQ ID NO: 588776
uugaaacaguugucaugaa

SEQ ID NO: 888709 - RNA, 19 nt, Artificial Sequence
  Description of Artificial Sequence: Synthetic oligonucleotide
  Antisense strand to SEQ ID NO: 888708
uucaugacaacuguuucaa

SEQ ID NO: 888710 - RNA, 19 nt, Artificial Sequence
  Description of Artificial Sequence: Synthetic oligonucleotide
  Sense strand starting at position 995 of SEQ ID NO: 588776
ccggacuaacaguauuagu

SEQ ID NO: 888711 - RNA, 19 nt, Artificial Sequence
  Description of Artificial Sequence: Synthetic oligonucleotide
  Antisense strand to SEQ ID NO: 888710
acuaauacuguuaguccgg

SEQ ID NO: 888712 - RNA, 19 nt, Artificial Sequence
  Description of Artificial Sequence: Synthetic oligonucleotide
  Sense strand starting at position 1056 of SEQ ID NO: 588776
cagcgaaagcuguagaaac

SEQ ID NO: 888713 - RNA, 19 nt, Artificial Sequence
  Description of Artificial Sequence: Synthetic oligonucleotide
  Antisense strand to SEQ ID NO: 888712
guuucuacagcuuucgcug

SEQ ID NO: 888714 - RNA, 19 nt, Artificial Sequence
  Description of Artificial Sequence: Synthetic oligonucleotide
  Sense strand starting at position 1107 of SEQ ID NO: 588776
cuuccagacguauaacaua

SEQ ID NO: 888715 - RNA, 19 nt, Artificial Sequence
  Description of Artificial Sequence: Synthetic oligonucleotide
  Antisense strand to SEQ ID NO: 888714
uauguuauacgucuggaag

SEQ ID NO: 888716 - RNA, 19 nt, Artificial Sequence
  Description of Artificial Sequence: Synthetic oligonucleotide
  Sense strand starting at position 1278 of SEQ ID NO: 588776
uugacagagucacugcaua

SEQ ID NO: 888717 - RNA, 19 nt, Artificial Sequence
  Description of Artificial Sequence: Synthetic oligonucleotide
  Antisense strand to SEQ ID NO: 888716
uaugcagugacucugucaa

SEQ ID NO: 888718 - RNA, 19 nt, Artificial Sequence
  Description of Artificial Sequence: Synthetic oligonucleotide
  Sense strand starting at position 1357 of SEQ ID NO: 588776
uucugaaauuaacugagua

SEQ ID NO: 888719 - RNA, 19 nt, Artificial Sequence
  Description of Artificial Sequence: Synthetic oligonucleotide
  Antisense strand to SEQ ID NO: 888718
uacucaguuaauuucagaa

SEQ ID NO: 888720 - RNA, 19 nt, Artificial Sequence
  Description of Artificial Sequence: Synthetic oligonucleotide
  Sense strand starting at position 1370 of SEQ ID NO: 588776
ugaguauuauaagccgauu

SEQ ID NO: 888721 - RNA, 19 nt, Artificial Sequence
  Description of Artificial Sequence: Synthetic oligonucleotide
  Antisense strand to SEQ ID NO: 888720
aaucggcuuauaauacuca

SEQ ID NO: 888722 - RNA, 19 nt, Artificial Sequence
  Description of Artificial Sequence: Synthetic oligonucleotide
  Sense strand starting at position 1373 of SEQ ID NO: 588776
guauuauaagccgauuaag

SEQ ID NO: 888723 - RNA, 19 nt, Artificial Sequence
  Description of Artificial Sequence: Synthetic oligonucleotide
  Antisense strand to SEQ ID NO: 888722
cuuaaucggcuuauaauac

SEQ ID NO: 888724 - RNA, 19 nt, Artificial Sequence
  Description of Artificial Sequence: Synthetic oligonucleotide
  Sense strand starting at position 1376 of SEQ ID NO: 588776
uuauaagccgauuaaguua

SEQ ID NO: 888725 - RNA, 19 nt, Artificial Sequence
  Description of Artificial Sequence: Synthetic oligonucleotide
  Antisense strand to SEQ ID NO: 888724
uaacuuaaucggcuuauaa

SEQ ID NO: 888726 - RNA, 19 nt, Artificial Sequence
  Description of Artificial Sequence: Synthetic oligonucleotide
  Sense strand starting at position 1607 of SEQ ID NO: 588776
guuucucauguauaacuga

SEQ ID NO: 888727 - RNA, 19 nt, Artificial Sequence
  Description of Artificial Sequence: Synthetic oligonucleotide
  Antisense strand to SEQ ID NO: 888726
ucaguuauacaugagaaac

SEQ ID NO: 888728 - RNA, 19 nt, Artificial Sequence
  Description of Artificial Sequence: Synthetic oligonucleotide
  Sense strand starting at position 1610 of SEQ ID NO: 588776
ucucauguauaacugagau

SEQ ID NO: 888729 - RNA, 19 nt, Artificial Sequence
  Description of Artificial Sequence: Synthetic oligonucleotide
  Antisense strand to SEQ ID NO: 888728
aucucaguuauacaugaga

SEQ ID NO: 888730 - RNA, 19 nt, Artificial Sequence
  Description of Artificial Sequence: Synthetic oligonucleotide
  Sense strand starting at position 2045 of SEQ ID NO: 588776
cagaaagcugcugguuuaa

SEQ ID NO: 888731 - RNA, 19 nt, Artificial Sequence
  Description of Artificial Sequence: Synthetic oligonucleotide
  Antisense strand to SEQ ID NO: 888730
uuaaaccagcagcuuucug

SEQ ID NO: 888732 - RNA, 19 nt, Artificial Sequence
  Description of Artificial Sequence: Synthetic oligonucleotide
  Sense strand starting at position 2047 of SEQ ID NO: 588776
gaaagcugcugguuuaaac

SEQ ID NO: 888733 - RNA, 19 nt, Artificial Sequence
  Description of Artificial Sequence: Synthetic oligonucleotide
  Antisense strand to SEQ ID NO: 888732
guuuaaaccagcagcuuuc

SEQ ID NO: 888734 - RNA, 19 nt, Artificial Sequence
  Description of Artificial Sequence: Synthetic oligonucleotide
  Sense strand starting at position 2078 of SEQ ID NO: 588776
caaucuuggcgguguauuu

SEQ ID NO: 888735 - RNA, 19 nt, Artificial Sequence
  Description of Artificial Sequence: Synthetic oligonucleotide
  Antisense strand to SEQ ID NO: 888734
aaauacaccgccaagauug

SEQ ID NO: 888736 - RNA, 19 nt, Artificial Sequence
  Description of Artificial Sequence: Synthetic oligonucleotide
  Sense strand starting at position 2085 of SEQ ID NO: 588776
ggcgguguauuuccgaaca

SEQ ID NO: 888737 - RNA, 19 nt, Artificial Sequence
  Description of Artificial Sequence: Synthetic oligonucleotide
  Antisense strand to SEQ ID NO: 888736
uguucggaaauacaccgcc

SEQ ID NO: 888738 - RNA, 19 nt, Artificial Sequence
  Description of Artificial Sequence: Synthetic oligonucleotide
  Sense strand starting at position 2132 of SEQ ID NO: 588776
uuuagauucuuggcauaaa

SEQ ID NO: 888739 - RNA, 19 nt, Artificial Sequence
  Description of Artificial Sequence: Synthetic oligonucleotide
  Antisense strand to SEQ ID NO: 888738
uuuaugccaagaaucuaaa

SEQ ID NO: 888740 - RNA, 19 nt, Artificial Sequence
  Description of Artificial Sequence: Synthetic oligonucleotide
  Sense strand starting at position 2135 of SEQ ID NO: 588776
agauucuuggcauaaaguu

SEQ ID NO: 888741 - RNA, 19 nt, Artificial Sequence
  Description of Artificial Sequence: Synthetic oligonucleotide
  Antisense strand to SEQ ID NO: 888740
aacuuuaugccaagaaucu

SEQ ID NO: 888742 - RNA, 19 nt, Artificial Sequence
  Description of Artificial Sequence: Synthetic oligonucleotide
  Sense strand starting at position 2161 of SEQ ID NO: 588776
ccucaacagugucucuuua

SEQ ID NO: 888743 - RNA, 19 nt, Artificial Sequence
  Description of Artificial Sequence: Synthetic oligonucleotide
  Antisense strand to SEQ ID NO: 888742
uaaagagacacuguugagg

SEQ ID NO: 888744 - RNA, 19 nt, Artificial Sequence
  Description of Artificial Sequence: Synthetic oligonucleotide
  Sense strand starting at position 2163 of SEQ ID NO: 588776
ucaacagugucucuuuaug

SEQ ID NO: 888745 - RNA, 19 nt, Artificial Sequence
  Description of Artificial Sequence: Synthetic oligonucleotide
  Antisense strand to SEQ ID NO: 888744
cauaaagagacacuguuga

SEQ ID NO: 888746 - RNA, 19 nt, Artificial Sequence
  Description of Artificial Sequence: Synthetic oligonucleotide
  Sense strand starting at position 2216 of SEQ ID NO: 588776
uucugaaauguuuaaggcu

SEQ ID NO: 888747 - RNA, 19 nt, Artificial Sequence
  Description of Artificial Sequence: Synthetic oligonucleotide
  Antisense strand to SEQ ID NO: 888746
agccuuaaacauuucagaa

SEQ ID NO: 888748 - RNA, 19 nt, Artificial Sequence
  Description of Artificial Sequence: Synthetic oligonucleotide
  Sense strand starting at position 2230 of SEQ ID NO: 588776
aggcuuuaacugcagaaag

SEQ ID NO: 888749 - RNA, 19 nt, Artificial Sequence
  Description of Artificial Sequence: Synthetic oligonucleotide
  Antisense strand to SEQ ID NO: 888748
cuuucugcaguuaaagccu

SEQ ID NO: 888750 - RNA, 19 nt, Artificial Sequence
  Description of Artificial Sequence: Synthetic oligonucleotide
  Sense strand starting at position 2232 of SEQ ID NO: 588776
gcuuuaacugcagaaagga

SEQ ID NO: 888751 - RNA, 19 nt, Artificial Sequence
  Description of Artificial Sequence: Synthetic oligonucleotide
  Antisense strand to SEQ ID NO: 888750
uccuuucugcaguuaaagc

SEQ ID NO: 888752 - RNA, 19 nt, Artificial Sequence
  Description of Artificial Sequence: Synthetic oligonucleotide
  Sense strand starting at position 3869 of SEQ ID NO: 588776
ggcggaguuuaagugaaag

SEQ ID NO: 888753 - RNA, 19 nt, Artificial Sequence
  Description of Artificial Sequence: Synthetic oligonucleotide
  Antisense strand to SEQ ID NO: 888752
cuuucacuuaaacuccgcc

SEQ ID NO: 888754 - RNA, 19 nt, Artificial Sequence
  Description of Artificial Sequence: Synthetic oligonucleotide
  Sense strand starting at position 3954 of SEQ ID NO: 588776
ggugucgacugauucuuua

SEQ ID NO: 888755 - RNA, 19 nt, Artificial Sequence
  Description of Artificial Sequence: Synthetic oligonucleotide
  Antisense strand to SEQ ID NO: 888754
uaaagaaucagucgacacc

SEQ ID NO: 888756 - RNA, 19 nt, Artificial Sequence
  Description of Artificial Sequence: Synthetic oligonucleotide
  Sense strand starting at position 3957 of SEQ ID NO: 588776
gucgacugauucuuuaauc

SEQ ID NO: 888757 - RNA, 19 nt, Artificial Sequence
  Description of Artificial Sequence: Synthetic oligonucleotide
  Antisense strand to SEQ ID NO: 888756
gauuaaagaaucagucgac

SEQ ID NO: 888758 - RNA, 19 nt, Artificial Sequence
  Description of Artificial Sequence: Synthetic oligonucleotide
  Sense strand starting at position 3966 of SEQ ID NO: 588776
uucuuuaaucccgacagca

SEQ ID NO: 888759 - RNA, 19 nt, Artificial Sequence
  Description of Artificial Sequence: Synthetic oligonucleotide
  Antisense strand to SEQ ID NO: 888758
ugcugucgggauuaaagaa

SEQ ID NO: 888760 - RNA, 19 nt, Artificial Sequence
  Description of Artificial Sequence: Synthetic oligonucleotide
  Sense strand starting at position 3968 of SEQ ID NO: 588776
cuuuaaucccgacagcaca

SEQ ID NO: 888761 - RNA, 19 nt, Artificial Sequence
  Description of Artificial Sequence: Synthetic oligonucleotide
  Antisense strand to SEQ ID NO: 888760
ugugcugucgggauuaaag

SEQ ID NO: 888762 - RNA, 19 nt, Artificial Sequence
  Description of Artificial Sequence: Synthetic oligonucleotide
  Sense strand starting at position 168 of SEQ ID NO: 588777
uugaaacaguugucaugaa

SEQ ID NO: 888763 - RNA, 19 nt, Artificial Sequence
  Description of Artificial Sequence: Synthetic oligonucleotide
  Antisense strand to SEQ ID NO: 888762
uucaugacaacuguuucaa

SEQ ID NO: 888764 - RNA, 19 nt, Artificial Sequence
  Description of Artificial Sequence: Synthetic oligonucleotide
  Sense strand starting at position 279 of SEQ ID NO: 588777
ccggacuaacaguauuagu

SEQ ID NO: 888765 - RNA, 19 nt, Artificial Sequence
  Description of Artificial Sequence: Synthetic oligonucleotide
  Antisense strand to SEQ ID NO: 888764
acuaauacuguuaguccgg

SEQ ID NO: 888766 - RNA, 19 nt, Artificial Sequence
  Description of Artificial Sequence: Synthetic oligonucleotide
  Sense strand starting at position 340 of SEQ ID NO: 588777
cagcgaaagcuguagaaac

SEQ ID NO: 888767 - RNA, 19 nt, Artificial Sequence
  Description of Artificial Sequence: Synthetic oligonucleotide
  Antisense strand to SEQ ID NO: 888766
guuucuacagcuuucgcug

SEQ ID NO: 888768 - RNA, 19 nt, Artificial Sequence
  Description of Artificial Sequence: Synthetic oligonucleotide
  Sense strand starting at position 391 of SEQ ID NO: 588777
cuuccagacguauaacaua

SEQ ID NO: 888769 - RNA, 19 nt, Artificial Sequence
  Description of Artificial Sequence: Synthetic oligonucleotide
  Antisense strand to SEQ ID NO: 888768
uauguuauacgucuggaag

SEQ ID NO: 888770 - RNA, 19 nt, Artificial Sequence
  Description of Artificial Sequence: Synthetic oligonucleotide
  Sense strand starting at position 562 of SEQ ID NO: 588777
uugacagagucacugcaua

SEQ ID NO: 888771 - RNA, 19 nt, Artificial Sequence
  Description of Artificial Sequence: Synthetic oligonucleotide
  Antisense strand to SEQ ID NO: 888770
uaugcagugacucugucaa

SEQ ID NO: 888772 - RNA, 19 nt, Artificial Sequence
  Description of Artificial Sequence: Synthetic oligonucleotide
  Sense strand starting at position 641 of SEQ ID NO: 588777
uucugaaauuaacugagua

SEQ ID NO: 888773 - RNA, 19 nt, Artificial Sequence
  Description of Artificial Sequence: Synthetic oligonucleotide
  Antisense strand to SEQ ID NO: 888772
uacucaguuaauuucagaa

SEQ ID NO: 888774 - RNA, 19 nt, Artificial Sequence
  Description of Artificial Sequence: Synthetic oligonucleotide
  Sense strand starting at position 654 of SEQ ID NO: 588777
ugaguauuauaagccgauu

SEQ ID NO: 888775 - RNA, 19 nt, Artificial Sequence
  Description of Artificial Sequence: Synthetic oligonucleotide
  Antisense strand to SEQ ID NO: 888774
aaucggcuuauaauacuca

SEQ ID NO: 888776 - RNA, 19 nt, Artificial Sequence
  Description of Artificial Sequence: Synthetic oligonucleotide
  Sense strand starting at position 657 of SEQ ID NO: 588777
guauuauaagccgauuaag

SEQ ID NO: 888777 - RNA, 19 nt, Artificial Sequence
  Description of Artificial Sequence: Synthetic oligonucleotide
  Antisense strand to SEQ ID NO: 888776
cuuaaucggcuuauaauac

SEQ ID NO: 888778 - RNA, 19 nt, Artificial Sequence
  Description of Artificial Sequence: Synthetic oligonucleotide
  Sense strand starting at position 660 of SEQ ID NO: 588777
uuauaagccgauuaaguua

SEQ ID NO: 888779 - RNA, 19 nt, Artificial Sequence
  Description of Artificial Sequence: Synthetic oligonucleotide
  Antisense strand to SEQ ID NO: 888778
uaacuuaaucggcuuauaa

SEQ ID NO: 888780 - RNA, 19 nt, Artificial Sequence
  Description of Artificial Sequence: Synthetic oligonucleotide
  Sense strand starting at position 891 of SEQ ID NO: 588777
guuucucauguauaacuga

SEQ ID NO: 888781 - RNA, 19 nt, Artificial Sequence
  Description of Artificial Sequence: Synthetic oligonucleotide
  Antisense strand to SEQ ID NO: 888780
ucaguuauacaugagaaac

SEQ ID NO: 888782 - RNA, 19 nt, Artificial Sequence
  Description of Artificial Sequence: Synthetic oligonucleotide
  Sense strand starting at position 894 of SEQ ID NO: 588777
ucucauguauaacugagau

SEQ ID NO: 888783 - RNA, 19 nt, Artificial Sequence
  Description of Artificial Sequence: Synthetic oligonucleotide
  Antisense strand to SEQ ID NO: 888782
aucucaguuauacaugaga

SEQ ID NO: 888784 - RNA, 19 nt, Artificial Sequence
  Description of Artificial Sequence: Synthetic oligonucleotide
  Sense strand starting at position 1331 of SEQ ID NO: 588777
gaaagcugcugguuuaaac

SEQ ID NO: 888785 - RNA, 19 nt, Artificial Sequence
  Description of Artificial Sequence: Synthetic oligonucleotide
  Antisense strand to SEQ ID NO: 888784
guuuaaaccagcagcuuuc

SEQ ID NO: 888786 - RNA, 19 nt, Artificial Sequence
  Description of Artificial Sequence: Synthetic oligonucleotide
  Sense strand starting at position 1362 of SEQ ID NO: 588777
caaucuuggcgguguauuu

SEQ ID NO: 888787 - RNA, 19 nt, Artificial Sequence
  Description of Artificial Sequence: Synthetic oligonucleotide
  Antisense strand to SEQ ID NO: 888786
aaauacaccgccaagauug

SEQ ID NO: 888788 - RNA, 19 nt, Artificial Sequence
  Description of Artificial Sequence: Synthetic oligonucleotide
  Sense strand starting at position 1369 of SEQ ID NO: 588777
ggcgguguauuuccgaaca

SEQ ID NO: 888789 - RNA, 19 nt, Artificial Sequence
  Description of Artificial Sequence: Synthetic oligonucleotide
  Antisense strand to SEQ ID NO: 888788
uguucggaaauacaccgcc

SEQ ID NO: 888790 - RNA, 19 nt, Artificial Sequence
  Description of Artificial Sequence: Synthetic oligonucleotide
  Sense strand starting at position 1416 of SEQ ID NO: 588777
uuuagauucuuggcauaaa

SEQ ID NO: 888791 - RNA, 19 nt, Artificial Sequence
  Description of Artificial Sequence: Synthetic oligonucleotide
  Antisense strand to SEQ ID NO: 888790
uuuaugccaagaaucuaaa

SEQ ID NO: 888792 - RNA, 19 nt, Artificial Sequence
  Description of Artificial Sequence: Synthetic oligonucleotide
  Sense strand starting at position 1419 of SEQ ID NO: 588777
agauucuuggcauaaaguu

SEQ ID NO: 888793 - RNA, 19 nt, Artificial Sequence
  Description of Artificial Sequence: Synthetic oligonucleotide
  Antisense strand to SEQ ID NO: 888792
aacuuuaugccaagaaucu

SEQ ID NO: 888794 - RNA, 19 nt, Artificial Sequence
  Description of Artificial Sequence: Synthetic oligonucleotide
  Sense strand starting at position 1447 of SEQ ID NO: 588777
ucaacagugucucuuuaug

SEQ ID NO: 888795 - RNA, 19 nt, Artificial Sequence
  Description of Artificial Sequence: Synthetic oligonucleotide
  Antisense strand to SEQ ID NO: 888794
cauaaagagacacuguuga

SEQ ID NO: 888796 - RNA, 19 nt, Artificial Sequence
  Description of Artificial Sequence: Synthetic oligonucleotide
  Sense strand starting at position 1500 of SEQ ID NO: 588777
uucugaaauguuuaaggcu

SEQ ID NO: 888797 - RNA, 19 nt, Artificial Sequence
  Description of Artificial Sequence: Synthetic oligonucleotide
  Antisense strand to SEQ ID NO: 888796
agccuuaaacauuucagaa

SEQ ID NO: 888798 - RNA, 19 nt, Artificial Sequence
  Description of Artificial Sequence: Synthetic oligonucleotide
  Sense strand starting at position 1514 of SEQ ID NO: 588777
aggcuuuaacugcagaaag

SEQ ID NO: 888799 - RNA, 19 nt, Artificial Sequence
  Description of Artificial Sequence: Synthetic oligonucleotide
  Antisense strand to SEQ ID NO: 888798
cuuucugcaguuaaagccu

SEQ ID NO: 888800 - RNA, 19 nt, Artificial Sequence
  Description of Artificial Sequence: Synthetic oligonucleotide
  Sense strand starting at position 1516 of SEQ ID NO: 588777
gcuuuaacugcagaaagga

SEQ ID NO: 888801 - RNA, 19 nt, Artificial Sequence
  Description of Artificial Sequence: Synthetic oligonucleotide
  Antisense strand to SEQ ID NO: 888800
uccuuucugcaguuaaagc

SEQ ID NO: 888802 - RNA, 19 nt, Artificial Sequence
  Description of Artificial Sequence: Synthetic oligonucleotide
  Sense strand starting at position 3153 of SEQ ID NO: 588777
ggcggaguuuaagugaaag

SEQ ID NO: 888803 - RNA, 19 nt, Artificial Sequence
  Description of Artificial Sequence: Synthetic oligonucleotide
  Antisense strand to SEQ ID NO: 888802
cuuucacuuaaacuccgcc

SEQ ID NO: 888804 - RNA, 19 nt, Artificial Sequence
  Description of Artificial Sequence: Synthetic oligonucleotide
  Sense strand starting at position 3241 of SEQ ID NO: 588777
gucgacugauucuuuaauc

SEQ ID NO: 888805 - RNA, 19 nt, Artificial Sequence
  Description of Artificial Sequence: Synthetic oligonucleotide
  Antisense strand to SEQ ID NO: 888804
gauuaaagaaucagucgac

SEQ ID NO: 888806 - RNA, 19 nt, Artificial Sequence
  Description of Artificial Sequence: Synthetic oligonucleotide
  Sense strand starting at position 3250 of SEQ ID NO: 588777
uucuuuaaucccgacagca

SEQ ID NO: 888807 - RNA, 19 nt, Artificial Sequence
  Description of Artificial Sequence: Synthetic oligonucleotide
  Antisense strand to SEQ ID NO: 888806
ugcugucgggauuaaagaa

SEQ ID NO: 888808 - RNA, 19 nt, Artificial Sequence
  Description of Artificial Sequence: Synthetic oligonucleotide
  Sense strand starting at position 3252 of SEQ ID NO: 588777
cuuuaaucccgacagcaca

SEQ ID NO: 888809 - RNA, 19 nt, Artificial Sequence
  Description of Artificial Sequence: Synthetic oligonucleotide
  Antisense strand to SEQ ID NO: 888808
ugugcugucgggauuaaag

SEQ ID NO: 888810 - RNA, 19 nt, Artificial Sequence
  Description of Artificial Sequence: Synthetic oligonucleotide
  Sense strand starting at position 3404 of SEQ ID NO: 588777
ccgaguuaaagucagaguu

SEQ ID NO: 888811 - RNA, 19 nt, Artificial Sequence
  Description of Artificial Sequence: Synthetic oligonucleotide
  Antisense strand to SEQ ID NO: 888810
aacucugacuuuaacucgg

SEQ ID NO: 888812 - RNA, 19 nt, Artificial Sequence
  Description of Artificial Sequence: Synthetic oligonucleotide
  Sense strand starting at position 3412 of SEQ ID NO: 588777
aagucagaguuauuagaac

SEQ ID NO: 888813 - RNA, 19 nt, Artificial Sequence
  Description of Artificial Sequence: Synthetic oligonucleotide
  Antisense strand to SEQ ID NO: 888812
guucuaauaacucugacuu

SEQ ID NO: 888814 - RNA, 19 nt, Artificial Sequence
  Description of Artificial Sequence: Synthetic oligonucleotide
  Sense strand starting at position 3419 of SEQ ID NO: 588777
aguuauuagaacggaugca

SEQ ID NO: 888815 - RNA, 19 nt, Artificial Sequence
  Description of Artificial Sequence: Synthetic oligonucleotide
  Antisense strand to SEQ ID NO: 888814
ugcauccguucuaauaacu

SEQ ID NO: 888816 - RNA, 19 nt, Artificial Sequence
  Description of Artificial Sequence: Synthetic oligonucleotide
  Sense strand starting at position 3420 of SEQ ID NO: 588777
guuauuagaacggaugcau

SEQ ID NO: 888817 - RNA, 19 nt, Artificial Sequence
  Description of Artificial Sequence: Synthetic oligonucleotide
  Antisense strand to SEQ ID NO: 888816
augcauccguucuaauaac

SEQ ID NO: 888818 - RNA, 19 nt, Artificial Sequence
  Description of Artificial Sequence: Synthetic oligonucleotide
  Sense strand starting at position 3584 of SEQ ID NO: 588777
cucuguuauccugcucugu

SEQ ID NO: 888819 - RNA, 19 nt, Artificial Sequence
  Description of Artificial Sequence: Synthetic oligonucleotide
  Antisense strand to SEQ ID NO: 888818
acagagcaggauaacagag

SEQ ID NO: 888820 - RNA, 19 nt, Artificial Sequence
  Description of Artificial Sequence: Synthetic oligonucleotide
  Sense strand starting at position 3585 of SEQ ID NO: 588777
ucuguuauccugcucuguu

SEQ ID NO: 888821 - RNA, 19 nt, Artificial Sequence
  Description of Artificial Sequence: Synthetic oligonucleotide
  Antisense strand to SEQ ID NO: 888820
aacagagcaggauaacaga

SEQ ID NO: 888822 - RNA, 19 nt, Artificial Sequence
  Description of Artificial Sequence: Synthetic oligonucleotide
  Sense strand starting at position 3615 of SEQ ID NO: 588777
cggguaucccuuuauaauu

SEQ ID NO: 888823 - RNA, 19 nt, Artificial Sequence
  Description of Artificial Sequence: Synthetic oligonucleotide
  Antisense strand to SEQ ID NO: 888822
aauuauaaagggauacccg

SEQ ID NO: 888824 - RNA, 19 nt, Artificial Sequence
  Description of Artificial Sequence: Synthetic oligonucleotide
  Sense strand starting at position 3628 of SEQ ID NO: 588777
auaauuacccuguaaugua

SEQ ID NO: 888825 - RNA, 19 nt, Artificial Sequence
  Description of Artificial Sequence: Synthetic oligonucleotide
  Antisense strand to SEQ ID NO: 888824
uacauuacaggguaauuau

SEQ ID NO: 888826 - RNA, 19 nt, Artificial Sequence
  Description of Artificial Sequence: Synthetic oligonucleotide
  Sense strand starting at position 3781 of SEQ ID NO: 588777
gggugaaugugcuucugga

SEQ ID NO: 888827 - RNA, 19 nt, Artificial Sequence
  Description of Artificial Sequence: Synthetic oligonucleotide
  Antisense strand to SEQ ID NO: 888826
uccagaagcacauucaccc

SEQ ID NO: 888828 - RNA, 19 nt, Artificial Sequence
  Description of Artificial Sequence: Synthetic oligonucleotide
  Sense strand starting at position 3798 of SEQ ID NO: 588777
gauccucagcaguagaaug

SEQ ID NO: 888829 - RNA, 19 nt, Artificial Sequence
  Description of Artificial Sequence: Synthetic oligonucleotide
  Antisense strand to SEQ ID NO: 888828
cauucuacugcugaggauc

SEQ ID NO: 888830 - RNA, 19 nt, Artificial Sequence
  Description of Artificial Sequence: Synthetic oligonucleotide
  Sense strand starting at position 3803 of SEQ ID NO: 588777
ucagcaguagaaugagaau

SEQ ID NO: 888831 - RNA, 19 nt, Artificial Sequence
  Description of Artificial Sequence: Synthetic oligonucleotide
  Antisense strand to SEQ ID NO: 888830
auucucauucuacugcuga

SEQ ID NO: 888832 - RNA, 19 nt, Artificial Sequence
  Description of Artificial Sequence: Synthetic oligonucleotide
  Sense strand starting at position 3879 of SEQ ID NO: 588777
gauaaacagucuguaagca

SEQ ID NO: 888833 - RNA, 19 nt, Artificial Sequence
  Description of Artificial Sequence: Synthetic oligonucleotide
  Antisense strand to SEQ ID NO: 888832
ugcuuacagacuguuuauc

SEQ ID NO: 888834 - RNA, 19 nt, Artificial Sequence
  Description of Artificial Sequence: Synthetic oligonucleotide
  Sense strand starting at position 3908 of SEQ ID NO: 588777
aguagaaaguccguuuaca

SEQ ID NO: 888835 - RNA, 19 nt, Artificial Sequence
  Description of Artificial Sequence: Synthetic oligonucleotide
  Antisense strand to SEQ ID NO: 888834
uguaaacggacuuucuacu

SEQ ID NO: 888836 - RNA, 19 nt, Artificial Sequence
  Description of Artificial Sequence: Synthetic oligonucleotide
  Sense strand starting at position 3945 of SEQ ID NO: 588777
agagauguugaguaaugca

SEQ ID NO: 888837 - RNA, 19 nt, Artificial Sequence
  Description of Artificial Sequence: Synthetic oligonucleotide
  Antisense strand to SEQ ID NO: 888836
ugcauuacucaacaucucu

SEQ ID NO: 888838 - RNA, 19 nt, Artificial Sequence
  Description of Artificial Sequence: Synthetic oligonucleotide
  Sense strand starting at position 3955 of SEQ ID NO: 588777
aguaaugcaccuggaauaa

SEQ ID NO: 888839 - RNA, 19 nt, Artificial Sequence
  Description of Artificial Sequence: Synthetic oligonucleotide
  Antisense strand to SEQ ID NO: 888838
uuauuccaggugcauuacu

SEQ ID NO: 888840 - RNA, 19 nt, Artificial Sequence
  Description of Artificial Sequence: Synthetic oligonucleotide
  Sense strand starting at position 3978 of SEQ ID NO: 588777
gccaguaguaaauggcaaa

SEQ ID NO: 888841 - RNA, 19 nt, Artificial Sequence
  Description of Artificial Sequence: Synthetic oligonucleotide
  Antisense strand to SEQ ID NO: 888840
uuugccauuuacuacuggc

SEQ ID NO: 888842 - RNA, 19 nt, Artificial Sequence
  Description of Artificial Sequence: Synthetic oligonucleotide
  Sense strand starting at position 74 of SEQ ID NO: 588778
guuucucauguauaacuga

SEQ ID NO: 888843 - RNA, 19 nt, Artificial Sequence
  Description of Artificial Sequence: Synthetic oligonucleotide
  Antisense strand to SEQ ID NO: 888842
ucaguuauacaugagaaac

SEQ ID NO: 888844 - RNA, 19 nt, Artificial Sequence
  Description of Artificial Sequence: Synthetic oligonucleotide
  Sense strand starting at position 77 of SEQ ID NO: 588778
ucucauguauaacugagau

SEQ ID NO: 888845 - RNA, 19 nt, Artificial Sequence
  Description of Artificial Sequence: Synthetic oligonucleotide
  Antisense strand to SEQ ID NO: 888844
aucucaguuauacaugaga

SEQ ID NO: 888846 - RNA, 19 nt, Artificial Sequence
  Description of Artificial Sequence: Synthetic oligonucleotide
  Sense strand starting at position 512 of SEQ ID NO: 588778
cagaaagcugcugguuuaa

SEQ ID NO: 888847 - RNA, 19 nt, Artificial Sequence
  Description of Artificial Sequence: Synthetic oligonucleotide
  Antisense strand to SEQ ID NO: 888846
uuaaaccagcagcuuucug

SEQ ID NO: 888848 - RNA, 19 nt, Artificial Sequence
  Description of Artificial Sequence: Synthetic oligonucleotide
  Sense strand starting at position 514 of SEQ ID NO: 588778
gaaagcugcugguuuaaac

SEQ ID NO: 888849 - RNA, 19 nt, Artificial Sequence
  Description of Artificial Sequence: Synthetic oligonucleotide
  Antisense strand to SEQ ID NO: 888848
guuuaaaccagcagcuuuc

SEQ ID NO: 888850 - RNA, 19 nt, Artificial Sequence
  Description of Artificial Sequence: Synthetic oligonucleotide
  Sense strand starting at position 545 of SEQ ID NO: 588778
caaucuuggcgguguauuu

SEQ ID NO: 888851 - RNA, 19 nt, Artificial Sequence
  Description of Artificial Sequence: Synthetic oligonucleotide
  Antisense strand to SEQ ID NO: 888850
aaauacaccgccaagauug

SEQ ID NO: 888852 - RNA, 19 nt, Artificial Sequence
  Description of Artificial Sequence: Synthetic oligonucleotide
  Sense strand starting at position 552 of SEQ ID NO: 588778
ggcgguguauuuccgaaca

SEQ ID NO: 888853 - RNA, 19 nt, Artificial Sequence
  Description of Artificial Sequence: Synthetic oligonucleotide
  Antisense strand to SEQ ID NO: 888852
uguucggaaauacaccgcc

SEQ ID NO: 888854 - RNA, 19 nt, Artificial Sequence
  Description of Artificial Sequence: Synthetic oligonucleotide
  Sense strand starting at position 599 of SEQ ID NO: 588778
uuuagauucuuggcauaaa

SEQ ID NO: 888855 - RNA, 19 nt, Artificial Sequence
  Description of Artificial Sequence: Synthetic oligonucleotide
  Antisense strand to SEQ ID NO: 888854
uuuaugccaagaaucuaaa

SEQ ID NO: 888856 - RNA, 19 nt, Artificial Sequence
  Description of Artificial Sequence: Synthetic oligonucleotide
  Sense strand starting at position 602 of SEQ ID NO: 588778
agauucuuggcauaaaguu

SEQ ID NO: 888857 - RNA, 19 nt, Artificial Sequence
  Description of Artificial Sequence: Synthetic oligonucleotide
  Antisense strand to SEQ ID NO: 888856
aacuuuaugccaagaaucu

SEQ ID NO: 888858 - RNA, 19 nt, Artificial Sequence
  Description of Artificial Sequence: Synthetic oligonucleotide
  Sense strand starting at position 630 of SEQ ID NO: 588778
ucaacagugucucuuuaug

SEQ ID NO: 888859 - RNA, 19 nt, Artificial Sequence
  Description of Artificial Sequence: Synthetic oligonucleotide
  Antisense strand to SEQ ID NO: 888858
cauaaagagacacuguuga

SEQ ID NO: 888860 - RNA, 19 nt, Artificial Sequence
  Description of Artificial Sequence: Synthetic oligonucleotide
  Sense strand starting at position 683 of SEQ ID NO: 588778
uucugaaauguuuaaggcu

SEQ ID NO: 888861 - RNA, 19 nt, Artificial Sequence
  Description of Artificial Sequence: Synthetic oligonucleotide
  Antisense strand to SEQ ID NO: 888860
agccuuaaacauuucagaa

SEQ ID NO: 888862 - RNA, 19 nt, Artificial Sequence
  Description of Artificial Sequence: Synthetic oligonucleotide
  Sense strand starting at position 697 of SEQ ID NO: 588778
aggcuuuaacugcagaaag

SEQ ID NO: 888863 - RNA, 19 nt, Artificial Sequence
  Description of Artificial Sequence: Synthetic oligonucleotide
  Antisense strand to SEQ ID NO: 888862
cuuucugcaguuaaagccu

SEQ ID NO: 888864 - RNA, 19 nt, Artificial Sequence
  Description of Artificial Sequence: Synthetic oligonucleotide
  Sense strand starting at position 699 of SEQ ID NO: 588778
gcuuuaacugcagaaagga

SEQ ID NO: 888865 - RNA, 19 nt, Artificial Sequence
  Description of Artificial Sequence: Synthetic oligonucleotide
  Antisense strand to SEQ ID NO: 888864
uccuuucugcaguuaaagc

SEQ ID NO: 888866 - RNA, 19 nt, Artificial Sequence
  Description of Artificial Sequence: Synthetic oligonucleotide
  Sense strand starting at position 2336 of SEQ ID NO: 588778
ggcggaguuuaagugaaag

SEQ ID NO: 888867 - RNA, 19 nt, Artificial Sequence
  Description of Artificial Sequence: Synthetic oligonucleotide
  Antisense strand to SEQ ID NO: 888866
cuuucacuuaaacuccgcc

SEQ ID NO: 888868 - RNA, 19 nt, Artificial Sequence
  Description of Artificial Sequence: Synthetic oligonucleotide
  Sense strand starting at position 2424 of SEQ ID NO: 588778
gucgacugauucuuuaauc

SEQ ID NO: 888869 - RNA, 19 nt, Artificial Sequence
  Description of Artificial Sequence: Synthetic oligonucleotide
  Antisense strand to SEQ ID NO: 888868
gauuaaagaaucagucgac

SEQ ID NO: 888870 - RNA, 19 nt, Artificial Sequence
  Description of Artificial Sequence: Synthetic oligonucleotide
  Sense strand starting at position 2433 of SEQ ID NO: 588778
uucuuuaaucccgacagca

SEQ ID NO: 888871 - RNA, 19 nt, Artificial Sequence
  Description of Artificial Sequence: Synthetic oligonucleotide
  Antisense strand to SEQ ID NO: 888870
ugcugucgggauuaaagaa

SEQ ID NO: 888872 - RNA, 19 nt, Artificial Sequence
  Description of Artificial Sequence: Synthetic oligonucleotide
  Sense strand starting at position 2435 of SEQ ID NO: 588778
cuuuaaucccgacagcaca

SEQ ID NO: 888873 - RNA, 19 nt, Artificial Sequence
  Description of Artificial Sequence: Synthetic oligonucleotide
  Antisense strand to SEQ ID NO: 888872
ugugcugucgggauuaaag

SEQ ID NO: 888874 - RNA, 19 nt, Artificial Sequence
  Description of Artificial Sequence: Synthetic oligonucleotide
  Sense strand starting at position 2587 of SEQ ID NO: 588778
ccgaguuaaagucagaguu

SEQ ID NO: 888875 - RNA, 19 nt, Artificial Sequence
  Description of Artificial Sequence: Synthetic oligonucleotide
  Antisense strand to SEQ ID NO: 888874
aacucugacuuuaacucgg

SEQ ID NO: 888876 - RNA, 19 nt, Artificial Sequence
  Description of Artificial Sequence: Synthetic oligonucleotide
  Sense strand starting at position 2595 of SEQ ID NO: 588778
aagucagaguuauuagaac

SEQ ID NO: 888877 - RNA, 19 nt, Artificial Sequence
  Description of Artificial Sequence: Synthetic oligonucleotide
  Antisense strand to SEQ ID NO: 888876
guucuaauaacucugacuu

SEQ ID NO: 888878 - RNA, 19 nt, Artificial Sequence
  Description of Artificial Sequence: Synthetic oligonucleotide
  Sense strand starting at position 2602 of SEQ ID NO: 588778
aguuauuagaacggaugca

SEQ ID NO: 888879 - RNA, 19 nt, Artificial Sequence
  Description of Artificial Sequence: Synthetic oligonucleotide
  Antisense strand to SEQ ID NO: 888878
ugcauccguucuaauaacu

SEQ ID NO: 888880 - RNA, 19 nt, Artificial Sequence
  Description of Artificial Sequence: Synthetic oligonucleotide
  Sense strand starting at position 2603 of SEQ ID NO: 588778
guuauuagaacggaugcau

SEQ ID NO: 888881 - RNA, 19 nt, Artificial Sequence
  Description of Artificial Sequence: Synthetic oligonucleotide
  Antisense strand to SEQ ID NO: 888880
augcauccguucuaauaac

SEQ ID NO: 888882 - RNA, 19 nt, Artificial Sequence
  Description of Artificial Sequence: Synthetic oligonucleotide
  Sense strand starting at position 2707 of SEQ ID NO: 588778
gauauugccuucuugguga

SEQ ID NO: 888883 - RNA, 19 nt, Artificial Sequence
  Description of Artificial Sequence: Synthetic oligonucleotide
  Antisense strand to SEQ ID NO: 888882
ucaccaagaaggcaauauc

SEQ ID NO: 888884 - RNA, 19 nt, Artificial Sequence
  Description of Artificial Sequence: Synthetic oligonucleotide
  Sense strand starting at position 2767 of SEQ ID NO: 588778
cucuguuauccugcucugu

SEQ ID NO: 888885 - RNA, 19 nt, Artificial Sequence
  Description of Artificial Sequence: Synthetic oligonucleotide
  Antisense strand to SEQ ID NO: 888884
acagagcaggauaacagag

SEQ ID NO: 888886 - RNA, 19 nt, Artificial Sequence
  Description of Artificial Sequence: Synthetic oligonucleotide
  Sense strand starting at position 2768 of SEQ ID NO: 588778
ucuguuauccugcucuguu

SEQ ID NO: 888887 - RNA, 19 nt, Artificial Sequence
  Description of Artificial Sequence: Synthetic oligonucleotide
  Antisense strand to SEQ ID NO: 888886
aacagagcaggauaacaga

SEQ ID NO: 888888 - RNA, 19 nt, Artificial Sequence
  Description of Artificial Sequence: Synthetic oligonucleotide
  Sense strand starting at position 2798 of SEQ ID NO: 588778
cggguaucccuuuauaauu

SEQ ID NO: 888889 - RNA, 19 nt, Artificial Sequence
  Description of Artificial Sequence: Synthetic oligonucleotide
  Antisense strand to SEQ ID NO: 888888
aauuauaaagggauacccg

SEQ ID NO: 888890 - RNA, 19 nt, Artificial Sequence
  Description of Artificial Sequence: Synthetic oligonucleotide
  Sense strand starting at position 2811 of SEQ ID NO: 588778
auaauuacccuguaaugua

SEQ ID NO: 888891 - RNA, 19 nt, Artificial Sequence
  Description of Artificial Sequence: Synthetic oligonucleotide
  Antisense strand to SEQ ID NO: 888890
uacauuacaggguaauuau

SEQ ID NO: 888892 - RNA, 19 nt, Artificial Sequence
  Description of Artificial Sequence: Synthetic oligonucleotide
  Sense strand starting at position 2964 of SEQ ID NO: 588778
gggugaaugugcuucugga

SEQ ID NO: 888893 - RNA, 19 nt, Artificial Sequence
  Description of Artificial Sequence: Synthetic oligonucleotide
  Antisense strand to SEQ ID NO: 888892
uccagaagcacauucaccc

SEQ ID NO: 888894 - RNA, 19 nt, Artificial Sequence
  Description of Artificial Sequence: Synthetic oligonucleotide
  Sense strand starting at position 2981 of SEQ ID NO: 588778
gauccucagcaguagaaug

SEQ ID NO: 888895 - RNA, 19 nt, Artificial Sequence
  Description of Artificial Sequence: Synthetic oligonucleotide
  Antisense strand to SEQ ID NO: 888894
cauucuacugcugaggauc

SEQ ID NO: 888896 - RNA, 19 nt, Artificial Sequence
  Description of Artificial Sequence: Synthetic oligonucleotide
  Sense strand starting at position 2986 of SEQ ID NO: 588778
ucagcaguagaaugagaau

SEQ ID NO: 888897 - RNA, 19 nt, Artificial Sequence
  Description of Artificial Sequence: Synthetic oligonucleotide
  Antisense strand to SEQ ID NO: 888896
auucucauucuacugcuga

SEQ ID NO: 888898 - RNA, 19 nt, Artificial Sequence
  Description of Artificial Sequence: Synthetic oligonucleotide
  Sense strand starting at position 3062 of SEQ ID NO: 588778
gauaaacagucuguaagca

SEQ ID NO: 888899 - RNA, 19 nt, Artificial Sequence
  Description of Artificial Sequence: Synthetic oligonucleotide
  Antisense strand to SEQ ID NO: 888898
ugcuuacagacuguuuauc

SEQ ID NO: 888900 - RNA, 19 nt, Artificial Sequence
  Description of Artificial Sequence: Synthetic oligonucleotide
  Sense strand starting at position 3091 of SEQ ID NO: 588778
aguagaaaguccguuuaca

SEQ ID NO: 888901 - RNA, 19 nt, Artificial Sequence
  Description of Artificial Sequence: Synthetic oligonucleotide
  Antisense strand to SEQ ID NO: 888900
uguaaacggacuuucuacu

SEQ ID NO: 888902 - RNA, 19 nt, Artificial Sequence
  Description of Artificial Sequence: Synthetic oligonucleotide
  Sense strand starting at position 3128 of SEQ ID NO: 588778
agagauguugaguaaugca

SEQ ID NO: 888903 - RNA, 19 nt, Artificial Sequence
  Description of Artificial Sequence: Synthetic oligonucleotide
  Antisense strand to SEQ ID NO: 888902
ugcauuacucaacaucucu

SEQ ID NO: 888904 - RNA, 19 nt, Artificial Sequence
  Description of Artificial Sequence: Synthetic oligonucleotide
  Sense strand starting at position 3138 of SEQ ID NO: 588778
aguaaugcaccuggaauaa

SEQ ID NO: 888905 - RNA, 19 nt, Artificial Sequence
  Description of Artificial Sequence: Synthetic oligonucleotide
  Antisense strand to SEQ ID NO: 888904
uuauuccaggugcauuacu

SEQ ID NO: 888906 - RNA, 19 nt, Artificial Sequence
  Description of Artificial Sequence: Synthetic oligonucleotide
  Sense strand starting at position 3161 of SEQ ID NO: 588778
gccaguaguaaauggcaaa

SEQ ID NO: 888907 - RNA, 19 nt, Artificial Sequence
  Description of Artificial Sequence: Synthetic oligonucleotide
  Antisense strand to SEQ ID NO: 888906
uuugccauuuacuacuggc

SEQ ID NO: 888908 - RNA, 19 nt, Artificial Sequence
  Description of Artificial Sequence: Synthetic oligonucleotide
  Sense strand starting at position 3440 of SEQ ID NO: 588778
acagauauguucucccuau

SEQ ID NO: 888909 - RNA, 19 nt, Artificial Sequence
  Description of Artificial Sequence: Synthetic oligonucleotide
  Antisense strand to SEQ ID NO: 888908
auagggagaacauaucugu

SEQ ID NO: 888910 - RNA, 19 nt, Artificial Sequence
  Description of Artificial Sequence: Synthetic oligonucleotide
  Sense strand starting at position 3444 of SEQ ID NO: 588778
auauguucucccuauguug

SEQ ID NO: 888911 - RNA, 19 nt, Artificial Sequence
  Description of Artificial Sequence: Synthetic oligonucleotide
  Antisense strand to SEQ ID NO: 888910
caacauagggagaacauau

SEQ ID NO: 888912 - RNA, 19 nt, Artificial Sequence
  Description of Artificial Sequence: Synthetic oligonucleotide
  Sense strand starting at position 3664 of SEQ ID NO: 588778
gggacagcauccucacuaa

SEQ ID NO: 888913 - RNA, 19 nt, Artificial Sequence
  Description of Artificial Sequence: Synthetic oligonucleotide
  Antisense strand to SEQ ID NO: 888912
uuagugaggaugcuguccc

SEQ ID NO: 888914 - RNA, 19 nt, Artificial Sequence
  Description of Artificial Sequence: Synthetic oligonucleotide
  Sense strand starting at position 3714 of SEQ ID NO: 588778
caaggagcuuggguuuaau

SEQ ID NO: 888915 - RNA, 19 nt, Artificial Sequence
  Description of Artificial Sequence: Synthetic oligonucleotide
  Antisense strand to SEQ ID NO: 888914
auuaaacccaagcuccuug

SEQ ID NO: 888916 - RNA, 19 nt, Artificial Sequence
  Description of Artificial Sequence: Synthetic oligonucleotide
  Sense strand starting at position 3717 of SEQ ID NO: 588778
ggagcuuggguuuaauguu

SEQ ID NO: 888917 - RNA, 19 nt, Artificial Sequence
  Description of Artificial Sequence: Synthetic oligonucleotide
  Antisense strand to SEQ ID NO: 888916
aacauuaaacccaagcucc

SEQ ID NO: 888918 - RNA, 19 nt, Artificial Sequence
  Description of Artificial Sequence: Synthetic oligonucleotide
  Sense strand starting at position 3740 of SEQ ID NO: 588778
agaaacuuuccuugaccag

SEQ ID NO: 888919 - RNA, 19 nt, Artificial Sequence
  Description of Artificial Sequence: Synthetic oligonucleotide
  Antisense strand to SEQ ID NO: 888918
cuggucaaggaaaguuucu

SEQ ID NO: 888920 - RNA, 19 nt, Artificial Sequence
  Description of Artificial Sequence: Synthetic oligonucleotide
  Sense strand starting at position 3975 of SEQ ID NO: 588778
guaacaagccucugaaacu

SEQ ID NO: 888921 - RNA, 19 nt, Artificial Sequence
  Description of Artificial Sequence: Synthetic oligonucleotide
  Antisense strand to SEQ ID NO: 888920
aguuucagaggcuuguuac

SEQ ID NO: 888922 - RNA, 19 nt, Artificial Sequence
  Description of Artificial Sequence: Synthetic oligonucleotide
  Sense strand starting at position 265 of SEQ ID NO: 588779
gggugagugcuugggcaca

SEQ ID NO: 888923 - RNA, 19 nt, Artificial Sequence
  Description of Artificial Sequence: Synthetic oligonucleotide
  Antisense strand to SEQ ID NO: 888922
ugugcccaagcacucaccc

SEQ ID NO: 888924 - RNA, 19 nt, Artificial Sequence
  Description of Artificial Sequence: Synthetic oligonucleotide
  Sense strand starting at position 537 of SEQ ID NO: 588779
guuuggguguugucaaggu

SEQ ID NO: 888925 - RNA, 19 nt, Artificial Sequence
  Description of Artificial Sequence: Synthetic oligonucleotide
  Antisense strand to SEQ ID NO: 888924
accuugacaacacccaaac

SEQ ID NO: 888926 - RNA, 19 nt, Artificial Sequence
  Description of Artificial Sequence: Synthetic oligonucleotide
  Sense strand starting at position 541 of SEQ ID NO: 588779
ggguguugucaagguagca

SEQ ID NO: 888927 - RNA, 19 nt, Artificial Sequence
  Description of Artificial Sequence: Synthetic oligonucleotide
  Antisense strand to SEQ ID NO: 888926
ugcuaccuugacaacaccc

SEQ ID NO: 888928 - RNA, 19 nt, Artificial Sequence
  Description of Artificial Sequence: Synthetic oligonucleotide
  Sense strand starting at position 759 of SEQ ID NO: 588779
aggacagucuugucccaca

SEQ ID NO: 888929 - RNA, 19 nt, Artificial Sequence
  Description of Artificial Sequence: Synthetic oligonucleotide
  Antisense strand to SEQ ID NO: 888928
ugugggacaagacuguccu

SEQ ID NO: 888930 - RNA, 19 nt, Artificial Sequence
  Description of Artificial Sequence: Synthetic oligonucleotide
  Sense strand starting at position 762 of SEQ ID NO: 588779
acagucuugucccacaaga

SEQ ID NO: 888931 - RNA, 19 nt, Artificial Sequence
  Description of Artificial Sequence: Synthetic oligonucleotide
  Antisense strand to SEQ ID NO: 888930
ucuugugggacaagacugu

SEQ ID NO: 888932 - RNA, 19 nt, Artificial Sequence
  Description of Artificial Sequence: Synthetic oligonucleotide
  Sense strand starting at position 764 of SEQ ID NO: 588779
agucuugucccacaagagu

SEQ ID NO: 888933 - RNA, 19 nt, Artificial Sequence
  Description of Artificial Sequence: Synthetic oligonucleotide
  Antisense strand to SEQ ID NO: 888932
acucuugugggacaagacu

SEQ ID NO: 888934 - RNA, 19 nt, Artificial Sequence
  Description of Artificial Sequence: Synthetic oligonucleotide
  Sense strand starting at position 775 of SEQ ID NO: 588779
acaagaguuguccagugcu

SEQ ID NO: 888935 - RNA, 19 nt, Artificial Sequence
  Description of Artificial Sequence: Synthetic oligonucleotide
  Antisense strand to SEQ ID NO: 888934
agcacuggacaacucuugu

SEQ ID NO: 888936 - RNA, 19 nt, Artificial Sequence
  Description of Artificial Sequence: Synthetic oligonucleotide
  Sense strand starting at position 840 of SEQ ID NO: 588779
cggcuucucuugcucagaa

SEQ ID NO: 888937 - RNA, 19 nt, Artificial Sequence
  Description of Artificial Sequence: Synthetic oligonucleotide
  Antisense strand to SEQ ID NO: 888936
uucugagcaagagaagccg

SEQ ID NO: 888938 - RNA, 19 nt, Artificial Sequence
  Description of Artificial Sequence: Synthetic oligonucleotide
  Sense strand starting at position 841 of SEQ ID NO: 588779
ggcuucucuugcucagaag

SEQ ID NO: 888939 - RNA, 19 nt, Artificial Sequence
  Description of Artificial Sequence: Synthetic oligonucleotide
  Antisense strand to SEQ ID NO: 888938
cuucugagcaagagaagcc

SEQ ID NO: 888940 - RNA, 19 nt, Artificial Sequence
  Description of Artificial Sequence: Synthetic oligonucleotide
  Sense strand starting at position 842 of SEQ ID NO: 588779
gcuucucuugcucagaaga

SEQ ID NO: 888941 - RNA, 19 nt, Artificial Sequence
  Description of Artificial Sequence: Synthetic oligonucleotide
  Antisense strand to SEQ ID NO: 888940
ucuucugagcaagagaagc

SEQ ID NO: 888942 - RNA, 19 nt, Artificial Sequence
  Description of Artificial Sequence: Synthetic oligonucleotide
  Sense strand starting at position 844 of SEQ ID NO: 588779
uucucuugcucagaagaac

SEQ ID NO: 888943 - RNA, 19 nt, Artificial Sequence
  Description of Artificial Sequence: Synthetic oligonucleotide
  Antisense strand to SEQ ID NO: 888942
guucuucugagcaagagaa

SEQ ID NO: 888944 - RNA, 19 nt, Artificial Sequence
  Description of Artificial Sequence: Synthetic oligonucleotide
  Sense strand starting at position 1063 of SEQ ID NO: 588779
aggugaucacagcggugaa

SEQ ID NO: 888945 - RNA, 19 nt, Artificial Sequence
  Description of Artificial Sequence: Synthetic oligonucleotide
  Antisense strand to SEQ ID NO: 888944
uucaccgcugugaucaccu

SEQ ID NO: 888946 - RNA, 19 nt, Artificial Sequence
  Description of Artificial Sequence: Synthetic oligonucleotide
  Sense strand starting at position 1125 of SEQ ID NO: 588779
gacagauccugggaaccuu

SEQ ID NO: 888947 - RNA, 19 nt, Artificial Sequence
  Description of Artificial Sequence: Synthetic oligonucleotide
  Antisense strand to SEQ ID NO: 888946
aagguucccaggaucuguc

SEQ ID NO: 888948 - RNA, 19 nt, Artificial Sequence
  Description of Artificial Sequence: Synthetic oligonucleotide
  Sense strand starting at position 1385 of SEQ ID NO: 588779
cggagaagcccaggcaaau

SEQ ID NO: 888949 - RNA, 19 nt, Artificial Sequence
  Description of Artificial Sequence: Synthetic oligonucleotide
  Antisense strand to SEQ ID NO: 888948
auuugccugggcuucuccg

SEQ ID NO: 888950 - RNA, 19 nt, Artificial Sequence
  Description of Artificial Sequence: Synthetic oligonucleotide
  Sense strand starting at position 1437 of SEQ ID NO: 588779
gaucuuagaggcugucauu

SEQ ID NO: 888951 - RNA, 19 nt, Artificial Sequence
  Description of Artificial Sequence: Synthetic oligonucleotide
  Antisense strand to SEQ ID NO: 888950
aaugacagccucuaagauc

SEQ ID NO: 888952 - RNA, 19 nt, Artificial Sequence
  Description of Artificial Sequence: Synthetic oligonucleotide
  Sense strand starting at position 1446 of SEQ ID NO: 588779
ggcugucauucccaaagca

SEQ ID NO: 888953 - RNA, 19 nt, Artificial Sequence
  Description of Artificial Sequence: Synthetic oligonucleotide
  Antisense strand to SEQ ID NO: 888952
ugcuuugggaaugacagcc

SEQ ID NO: 888954 - RNA, 19 nt, Artificial Sequence
  Description of Artificial Sequence: Synthetic oligonucleotide
  Sense strand starting at position 1488 of SEQ ID NO: 588779
agcccuuccuggccuaaga

SEQ ID NO: 888955 - RNA, 19 nt, Artificial Sequence
  Description of Artificial Sequence: Synthetic oligonucleotide
  Antisense strand to SEQ ID NO: 888954
ucuuaggccaggaagggcu

SEQ ID NO: 888956 - RNA, 19 nt, Artificial Sequence
  Description of Artificial Sequence: Synthetic oligonucleotide
  Sense strand starting at position 1735 of SEQ ID NO: 588779
gcacucaccuggcaaucua

SEQ ID NO: 888957 - RNA, 19 nt, Artificial Sequence
  Description of Artificial Sequence: Synthetic oligonucleotide
  Antisense strand to SEQ ID NO: 888956
uagauugccaggugagugc

SEQ ID NO: 888958 - RNA, 19 nt, Artificial Sequence
  Description of Artificial Sequence: Synthetic oligonucleotide
  Sense strand starting at position 2565 of SEQ ID NO: 588779
cuccuugucuucccugaca

SEQ ID NO: 888959 - RNA, 19 nt, Artificial Sequence
  Description of Artificial Sequence: Synthetic oligonucleotide
  Antisense strand to SEQ ID NO: 888958
ugucagggaagacaaggag

SEQ ID NO: 888960 - RNA, 19 nt, Artificial Sequence
  Description of Artificial Sequence: Synthetic oligonucleotide
  Sense strand starting at position 2609 of SEQ ID NO: 588779
gcagcuucagcugguguaa

SEQ ID NO: 888961 - RNA, 19 nt, Artificial Sequence
  Description of Artificial Sequence: Synthetic oligonucleotide
  Antisense strand to SEQ ID NO: 888960
uuacaccagcugaagcugc

SEQ ID NO: 888962 - RNA, 19 nt, Artificial Sequence
  Description of Artificial Sequence: Synthetic oligonucleotide
  Sense strand starting at position 2611 of SEQ ID NO: 588779
agcuucagcugguguaaga

SEQ ID NO: 888963 - RNA, 19 nt, Artificial Sequence
  Description of Artificial Sequence: Synthetic oligonucleotide
  Antisense strand to SEQ ID NO: 888962
ucuuacaccagcugaagcu

SEQ ID NO: 888964 - RNA, 19 nt, Artificial Sequence
  Description of Artificial Sequence: Synthetic oligonucleotide
  Sense strand starting at position 2695 of SEQ ID NO: 588779
caguguuauuagggcuaac

SEQ ID NO: 888965 - RNA, 19 nt, Artificial Sequence
  Description of Artificial Sequence: Synthetic oligonucleotide
  Antisense strand to SEQ ID NO: 888964
guuagcccuaauaacacug

SEQ ID NO: 888966 - RNA, 19 nt, Artificial Sequence
  Description of Artificial Sequence: Synthetic oligonucleotide
  Sense strand starting at position 2698 of SEQ ID NO: 588779
uguuauuagggcuaacuga

SEQ ID NO: 888967 - RNA, 19 nt, Artificial Sequence
  Description of Artificial Sequence: Synthetic oligonucleotide
  Antisense strand to SEQ ID NO: 888966
ucaguuagcccuaauaaca

SEQ ID NO: 888968 - RNA, 19 nt, Artificial Sequence
  Description of Artificial Sequence: Synthetic oligonucleotide
  Sense strand starting at position 2756 of SEQ ID NO: 588779
gauggagucucguuuguuu

SEQ ID NO: 888969 - RNA, 19 nt, Artificial Sequence
  Description of Artificial Sequence: Synthetic oligonucleotide
  Antisense strand to SEQ ID NO: 888968
aaacaaacgagacuccauc

SEQ ID NO: 888970 - RNA, 19 nt, Artificial Sequence
  Description of Artificial Sequence: Synthetic oligonucleotide
  Sense strand starting at position 3097 of SEQ ID NO: 588779
guggcuagaucacggcuua

SEQ ID NO: 888971 - RNA, 19 nt, Artificial Sequence
  Description of Artificial Sequence: Synthetic oligonucleotide
  Antisense strand to SEQ ID NO: 888970
uaagccgugaucuagccac

SEQ ID NO: 888972 - RNA, 19 nt, Artificial Sequence
  Description of Artificial Sequence: Synthetic oligonucleotide
  Sense strand starting at position 3098 of SEQ ID NO: 588779
uggcuagaucacggcuuau

SEQ ID NO: 888973 - RNA, 19 nt, Artificial Sequence
  Description of Artificial Sequence: Synthetic oligonucleotide
  Antisense strand to SEQ ID NO: 888972
auaagccgugaucuagcca

SEQ ID NO: 888974 - RNA, 19 nt, Artificial Sequence
  Description of Artificial Sequence: Synthetic oligonucleotide
  Sense strand starting at position 3582 of SEQ ID NO: 588779
uggaacuucugaccucgua

SEQ ID NO: 888975 - RNA, 19 nt, Artificial Sequence
  Description of Artificial Sequence: Synthetic oligonucleotide
  Antisense strand to SEQ ID NO: 888974
uacgaggucagaaguucca

SEQ ID NO: 888976 - RNA, 19 nt, Artificial Sequence
  Description of Artificial Sequence: Synthetic oligonucleotide
  Sense strand starting at position 3843 of SEQ ID NO: 588779
aggccacucagcuguaagu

SEQ ID NO: 888977 - RNA, 19 nt, Artificial Sequence
  Description of Artificial Sequence: Synthetic oligonucleotide
  Antisense strand to SEQ ID NO: 888976
acuuacagcugaguggccu

SEQ ID NO: 888978 - RNA, 19 nt, Artificial Sequence
  Description of Artificial Sequence: Synthetic oligonucleotide
  Sense strand starting at position 317 of SEQ ID NO: 588780
ggaauucccgcuuguacca

SEQ ID NO: 888979 - RNA, 19 nt, Artificial Sequence
  Description of Artificial Sequence: Synthetic oligonucleotide
  Antisense strand to SEQ ID NO: 888978
ugguacaagcgggaauucc

SEQ ID NO: 888980 - RNA, 19 nt, Artificial Sequence
  Description of Artificial Sequence: Synthetic oligonucleotide
  Sense strand starting at position 568 of SEQ ID NO: 588780
ccacucacuuguucuggaa

SEQ ID NO: 888981 - RNA, 19 nt, Artificial Sequence
  Description of Artificial Sequence: Synthetic oligonucleotide
  Antisense strand to SEQ ID NO: 888980
uuccagaacaagugagugg

SEQ ID NO: 888982 - RNA, 19 nt, Artificial Sequence
  Description of Artificial Sequence: Synthetic oligonucleotide
  Sense strand starting at position 572 of SEQ ID NO: 588780
ucacuuguucuggaaggcu

SEQ ID NO: 888983 - RNA, 19 nt, Artificial Sequence
  Description of Artificial Sequence: Synthetic oligonucleotide
  Antisense strand to SEQ ID NO: 888982
agccuuccagaacaaguga

SEQ ID NO: 888984 - RNA, 19 nt, Artificial Sequence
  Description of Artificial Sequence: Synthetic oligonucleotide
  Sense strand starting at position 634 of SEQ ID NO: 588780
gcacgagauuuccuuucuu

SEQ ID NO: 888985 - RNA, 19 nt, Artificial Sequence
  Description of Artificial Sequence: Synthetic oligonucleotide
  Antisense strand to SEQ ID NO: 888984
aagaaaggaaaucucgugc

SEQ ID NO: 888986 - RNA, 19 nt, Artificial Sequence
  Description of Artificial Sequence: Synthetic oligonucleotide
  Sense strand starting at position 720 of SEQ ID NO: 588780
gcgaccucggcucacuaua

SEQ ID NO: 888987 - RNA, 19 nt, Artificial Sequence
  Description of Artificial Sequence: Synthetic oligonucleotide
  Antisense strand to SEQ ID NO: 888986
uauagugagccgaggucgc

SEQ ID NO: 888988 - RNA, 19 nt, Artificial Sequence
  Description of Artificial Sequence: Synthetic oligonucleotide
  Sense strand starting at position 1310 of SEQ ID NO: 588780
cauuaaguagggugguaaa

SEQ ID NO: 888989 - RNA, 19 nt, Artificial Sequence
  Description of Artificial Sequence: Synthetic oligonucleotide
  Antisense strand to SEQ ID NO: 888988
uuuaccacccuacuuaaug

SEQ ID NO: 888990 - RNA, 19 nt, Artificial Sequence
  Description of Artificial Sequence: Synthetic oligonucleotide
  Sense strand starting at position 1445 of SEQ ID NO: 588780
agaauaauuuacuagagug

SEQ ID NO: 888991 - RNA, 19 nt, Artificial Sequence
  Description of Artificial Sequence: Synthetic oligonucleotide
  Antisense strand to SEQ ID NO: 888990
cacucuaguaaauuauucu

SEQ ID NO: 888992 - RNA, 19 nt, Artificial Sequence
  Description of Artificial Sequence: Synthetic oligonucleotide
  Sense strand starting at position 1457 of SEQ ID NO: 588780
uagagugacuacuggaguu

SEQ ID NO: 888993 - RNA, 19 nt, Artificial Sequence
  Description of Artificial Sequence: Synthetic oligonucleotide
  Antisense strand to SEQ ID NO: 888992
aacuccaguagucacucua

SEQ ID NO: 888994 - RNA, 19 nt, Artificial Sequence
  Description of Artificial Sequence: Synthetic oligonucleotide
  Sense strand starting at position 1459 of SEQ ID NO: 588780
gagugacuacuggaguugu

SEQ ID NO: 888995 - RNA, 19 nt, Artificial Sequence
  Description of Artificial Sequence: Synthetic oligonucleotide
  Antisense strand to SEQ ID NO: 888994
acaacuccaguagucacuc

SEQ ID NO: 888996 - RNA, 19 nt, Artificial Sequence
  Description of Artificial Sequence: Synthetic oligonucleotide
  Sense strand starting at position 1588 of SEQ ID NO: 588780
ccgucugacaaguggaaag

SEQ ID NO: 888997 - RNA, 19 nt, Artificial Sequence
  Description of Artificial Sequence: Synthetic oligonucleotide
  Antisense strand to SEQ ID NO: 888996
cuuuccacuugucagacgg

SEQ ID NO: 888998 - RNA, 19 nt, Artificial Sequence
  Description of Artificial Sequence: Synthetic oligonucleotide
  Sense strand starting at position 1628 of SEQ ID NO: 588780
ggacuugcccaagaucuca

SEQ ID NO: 888999 - RNA, 19 nt, Artificial Sequence
  Description of Artificial Sequence: Synthetic oligonucleotide
  Antisense strand to SEQ ID NO: 888998
ugagaucuugggcaagucc

SEQ ID NO: 889000 - RNA, 19 nt, Artificial Sequence
  Description of Artificial Sequence: Synthetic oligonucleotide
  Sense strand starting at position 1770 of SEQ ID NO: 588780
ccaagagucucagcuacuu

SEQ ID NO: 889001 - RNA, 19 nt, Artificial Sequence
  Description of Artificial Sequence: Synthetic oligonucleotide
  Antisense strand to SEQ ID NO: 889000
aaguagcugagacucuugg

SEQ ID NO: 889002 - RNA, 19 nt, Artificial Sequence
  Description of Artificial Sequence: Synthetic oligonucleotide
  Sense strand starting at position 2553 of SEQ ID NO: 588780
gugacucaaccuugaccuu

SEQ ID NO: 889003 - RNA, 19 nt, Artificial Sequence
  Description of Artificial Sequence: Synthetic oligonucleotide
  Antisense strand to SEQ ID NO: 889002
aaggucaagguugagucac

SEQ ID NO: 889004 - RNA, 19 nt, Artificial Sequence
  Description of Artificial Sequence: Synthetic oligonucleotide
  Sense strand starting at position 2560 of SEQ ID NO: 588780
aaccuugaccuucgaggaa

SEQ ID NO: 889005 - RNA, 19 nt, Artificial Sequence
  Description of Artificial Sequence: Synthetic oligonucleotide
  Antisense strand to SEQ ID NO: 889004
uuccucgaaggucaagguu

SEQ ID NO: 889006 - RNA, 19 nt, Artificial Sequence
  Description of Artificial Sequence: Synthetic oligonucleotide
  Sense strand starting at position 2596 of SEQ ID NO: 588780
cugugaauuggucagccca

SEQ ID NO: 889007 - RNA, 19 nt, Artificial Sequence
  Description of Artificial Sequence: Synthetic oligonucleotide
  Antisense strand to SEQ ID NO: 889006
ugggcugaccaauucacag

SEQ ID NO: 889008 - RNA, 19 nt, Artificial Sequence
  Description of Artificial Sequence: Synthetic oligonucleotide
  Sense strand starting at position 2675 of SEQ ID NO: 588780
ggccuuaguuugcuccuua

SEQ ID NO: 889009 - RNA, 19 nt, Artificial Sequence
  Description of Artificial Sequence: Synthetic oligonucleotide
  Antisense strand to SEQ ID NO: 889008
uaaggagcaaacuaaggcc

SEQ ID NO: 889010 - RNA, 19 nt, Artificial Sequence
  Description of Artificial Sequence: Synthetic oligonucleotide
  Sense strand starting at position 2676 of SEQ ID NO: 588780
gccuuaguuugcuccuuau

SEQ ID NO: 889011 - RNA, 19 nt, Artificial Sequence
  Description of Artificial Sequence: Synthetic oligonucleotide
  Antisense strand to SEQ ID NO: 889010
auaaggagcaaacuaaggc

SEQ ID NO: 889012 - RNA, 19 nt, Artificial Sequence
  Description of Artificial Sequence: Synthetic oligonucleotide
  Sense strand starting at position 2712 of SEQ ID NO: 588780
gcuggaggauuccacaaga

SEQ ID NO: 889013 - RNA, 19 nt, Artificial Sequence
  Description of Artificial Sequence: Synthetic oligonucleotide
  Antisense strand to SEQ ID NO: 889012
ucuuguggaauccuccagc

SEQ ID NO: 889014 - RNA, 19 nt, Artificial Sequence
  Description of Artificial Sequence: Synthetic oligonucleotide
  Sense strand starting at position 2764 of SEQ ID NO: 588780
gcggaugugcaaugaucau

SEQ ID NO: 889015 - RNA, 19 nt, Artificial Sequence
  Description of Artificial Sequence: Synthetic oligonucleotide
  Antisense strand to SEQ ID NO: 889014
augaucauugcacauccgc

SEQ ID NO: 889016 - RNA, 19 nt, Artificial Sequence
  Description of Artificial Sequence: Synthetic oligonucleotide
  Sense strand starting at position 2958 of SEQ ID NO: 588780
cucagaguguggcuuguaa

SEQ ID NO: 889017 - RNA, 19 nt, Artificial Sequence
  Description of Artificial Sequence: Synthetic oligonucleotide
  Antisense strand to SEQ ID NO: 889016
uuacaagccacacucugag

SEQ ID NO: 889018 - RNA, 19 nt, Artificial Sequence
  Description of Artificial Sequence: Synthetic oligonucleotide
  Sense strand starting at position 2960 of SEQ ID NO: 588780
cagaguguggcuuguaacu

SEQ ID NO: 889019 - RNA, 19 nt, Artificial Sequence
  Description of Artificial Sequence: Synthetic oligonucleotide
  Antisense strand to SEQ ID NO: 889018
aguuacaagccacacucug

SEQ ID NO: 889020 - RNA, 19 nt, Artificial Sequence
  Description of Artificial Sequence: Synthetic oligonucleotide
  Sense strand starting at position 2973 of SEQ ID NO: 588780
guaacuggauccuagcaga

SEQ ID NO: 889021 - RNA, 19 nt, Artificial Sequence
  Description of Artificial Sequence: Synthetic oligonucleotide
  Antisense strand to SEQ ID NO: 889020
ucugcuaggauccaguuac

SEQ ID NO: 889022 - RNA, 19 nt, Artificial Sequence
  Description of Artificial Sequence: Synthetic oligonucleotide
  Sense strand starting at position 2987 of SEQ ID NO: 588780
gcagauagcuuggaaaugu

SEQ ID NO: 889023 - RNA, 19 nt, Artificial Sequence
  Description of Artificial Sequence: Synthetic oligonucleotide
  Antisense strand to SEQ ID NO: 889022
acauuuccaagcuaucugc

SEQ ID NO: 889024 - RNA, 19 nt, Artificial Sequence
  Description of Artificial Sequence: Synthetic oligonucleotide
  Sense strand starting at position 2995 of SEQ ID NO: 588780
cuuggaaauguuugcugau

SEQ ID NO: 889025 - RNA, 19 nt, Artificial Sequence
  Description of Artificial Sequence: Synthetic oligonucleotide
  Antisense strand to SEQ ID NO: 889024
aucagcaaacauuuccaag

SEQ ID NO: 889026 - RNA, 19 nt, Artificial Sequence
  Description of Artificial Sequence: Synthetic oligonucleotide
  Sense strand starting at position 2996 of SEQ ID NO: 588780
uuggaaauguuugcugaug

SEQ ID NO: 889027 - RNA, 19 nt, Artificial Sequence
  Description of Artificial Sequence: Synthetic oligonucleotide
  Antisense strand to SEQ ID NO: 889026
caucagcaaacauuuccaa

SEQ ID NO: 889028 - RNA, 19 nt, Artificial Sequence
  Description of Artificial Sequence: Synthetic oligonucleotide
  Sense strand starting at position 2997 of SEQ ID NO: 588780
uggaaauguuugcugaugu

SEQ ID NO: 889029 - RNA, 19 nt, Artificial Sequence
  Description of Artificial Sequence: Synthetic oligonucleotide
  Antisense strand to SEQ ID NO: 889028
acaucagcaaacauuucca

SEQ ID NO: 889030 - RNA, 19 nt, Artificial Sequence
  Description of Artificial Sequence: Synthetic oligonucleotide
  Sense strand starting at position 2998 of SEQ ID NO: 588780
ggaaauguuugcugaugua

SEQ ID NO: 889031 - RNA, 19 nt, Artificial Sequence
  Description of Artificial Sequence: Synthetic oligonucleotide
  Antisense strand to SEQ ID NO: 889030
uacaucagcaaacauuucc

SEQ ID NO: 889032 - RNA, 19 nt, Artificial Sequence
  Description of Artificial Sequence: Synthetic oligonucleotide
  Sense strand starting at position 3001 of SEQ ID NO: 588780
aauguuugcugauguagaa

SEQ ID NO: 889033 - RNA, 19 nt, Artificial Sequence
  Description of Artificial Sequence: Synthetic oligonucleotide
  Antisense strand to SEQ ID NO: 889032
uucuacaucagcaaacauu

SEQ ID NO: 889034 - RNA, 19 nt, Artificial Sequence
  Description of Artificial Sequence: Synthetic oligonucleotide
  Sense strand starting at position 3161 of SEQ ID NO: 588780
uugguauccgagcagggau

SEQ ID NO: 889035 - RNA, 19 nt, Artificial Sequence
  Description of Artificial Sequence: Synthetic oligonucleotide
  Antisense strand to SEQ ID NO: 889034
aucccugcucggauaccaa

SEQ ID NO: 889036 - RNA, 19 nt, Artificial Sequence
  Description of Artificial Sequence: Synthetic oligonucleotide
  Sense strand starting at position 3266 of SEQ ID NO: 588780
gcugccacuccagguuuaa

SEQ ID NO: 889037 - RNA, 19 nt, Artificial Sequence
  Description of Artificial Sequence: Synthetic oligonucleotide
  Antisense strand to SEQ ID NO: 889036
uuaaaccuggaguggcagc

SEQ ID NO: 889038 - RNA, 19 nt, Artificial Sequence
  Description of Artificial Sequence: Synthetic oligonucleotide
  Sense strand starting at position 3318 of SEQ ID NO: 588780
gagggcuuucccugagccu

SEQ ID NO: 889039 - RNA, 19 nt, Artificial Sequence
  Description of Artificial Sequence: Synthetic oligonucleotide
  Antisense strand to SEQ ID NO: 889038
aggcucagggaaagcccuc

SEQ ID NO: 889040 - RNA, 19 nt, Artificial Sequence
  Description of Artificial Sequence: Synthetic oligonucleotide
  Sense strand starting at position 3396 of SEQ ID NO: 588780
ccgagaagguguuuccuac

SEQ ID NO: 889041 - RNA, 19 nt, Artificial Sequence
  Description of Artificial Sequence: Synthetic oligonucleotide
  Antisense strand to SEQ ID NO: 889040
guaggaaacaccuucucgg

SEQ ID NO: 889042 - RNA, 19 nt, Artificial Sequence
  Description of Artificial Sequence: Synthetic oligonucleotide
  Sense strand starting at position 3400 of SEQ ID NO: 588780
gaagguguuuccuacagug

SEQ ID NO: 889043 - RNA, 19 nt, Artificial Sequence
  Description of Artificial Sequence: Synthetic oligonucleotide
  Antisense strand to SEQ ID NO: 889042
cacuguaggaaacaccuuc

SEQ ID NO: 889044 - RNA, 19 nt, Artificial Sequence
  Description of Artificial Sequence: Synthetic oligonucleotide
  Sense strand starting at position 3459 of SEQ ID NO: 588780
gaaagaagcgcucaacuuu

SEQ ID NO: 889045 - RNA, 19 nt, Artificial Sequence
  Description of Artificial Sequence: Synthetic oligonucleotide
  Antisense strand to SEQ ID NO: 889044
aaaguugagcgcuucuuuc

SEQ ID NO: 889046 - RNA, 19 nt, Artificial Sequence
  Description of Artificial Sequence: Synthetic oligonucleotide
  Sense strand starting at position 3677 of SEQ ID NO: 588780
uuuacauguuggccaggau

SEQ ID NO: 889047 - RNA, 19 nt, Artificial Sequence
  Description of Artificial Sequence: Synthetic oligonucleotide
  Antisense strand to SEQ ID NO: 889046
auccuggccaacauguaaa

SEQ ID NO: 889048 - RNA, 19 nt, Artificial Sequence
  Description of Artificial Sequence: Synthetic oligonucleotide
  Sense strand starting at position 3777 of SEQ ID NO: 588780
gccagaagcgcucaacuuu

SEQ ID NO: 889049 - RNA, 19 nt, Artificial Sequence
  Description of Artificial Sequence: Synthetic oligonucleotide
  Antisense strand to SEQ ID NO: 889048
aaaguugagcgcuucuggc

SEQ ID NO: 889050 - RNA, 19 nt, Artificial Sequence
  Description of Artificial Sequence: Synthetic oligonucleotide
  Sense strand starting at position 3850 of SEQ ID NO: 588780
ugguguguuugugagcuaa

SEQ ID NO: 889051 - RNA, 19 nt, Artificial Sequence
  Description of Artificial Sequence: Synthetic oligonucleotide
  Antisense strand to SEQ ID NO: 889050
uuagcucacaaacacacca

SEQ ID NO: 889052 - RNA, 19 nt, Artificial Sequence
  Description of Artificial Sequence: Synthetic oligonucleotide
  Sense strand starting at position 3852 of SEQ ID NO: 588780
guguguuugugagcuaaug

SEQ ID NO: 889053 - RNA, 19 nt, Artificial Sequence
  Description of Artificial Sequence: Synthetic oligonucleotide
  Antisense strand to SEQ ID NO: 889052
cauuagcucacaaacacac

SEQ ID NO: 889054 - RNA, 19 nt, Artificial Sequence
  Description of Artificial Sequence: Synthetic oligonucleotide
  Sense strand starting at position 3932 of SEQ ID NO: 588780
acaagcuuucugugcuauu

SEQ ID NO: 889055 - RNA, 19 nt, Artificial Sequence
  Description of Artificial Sequence: Synthetic oligonucleotide
  Antisense strand to SEQ ID NO: 889054
aauagcacagaaagcuugu

SEQ ID NO: 889056 - RNA, 19 nt, Artificial Sequence
  Description of Artificial Sequence: Synthetic oligonucleotide
  Sense strand starting at position 3941 of SEQ ID NO: 588780
cugugcuauucuugaauag

SEQ ID NO: 889057 - RNA, 19 nt, Artificial Sequence
  Description of Artificial Sequence: Synthetic oligonucleotide
  Antisense strand to SEQ ID NO: 889056
cuauucaagaauagcacag

SEQ ID NO: 889058 - RNA, 19 nt, Artificial Sequence
  Description of Artificial Sequence: Synthetic oligonucleotide
  Sense strand starting at position 46 of SEQ ID NO: 588781
cuuucugucucuugugauc

SEQ ID NO: 889059 - RNA, 19 nt, Artificial Sequence
  Description of Artificial Sequence: Synthetic oligonucleotide
  Antisense strand to SEQ ID NO: 889058
gaucacaagagacagaaag

SEQ ID NO: 889060 - RNA, 19 nt, Artificial Sequence
  Description of Artificial Sequence: Synthetic oligonucleotide
  Sense strand starting at position 48 of SEQ ID NO: 588781
uucugucucuugugaucua

SEQ ID NO: 889061 - RNA, 19 nt, Artificial Sequence
  Description of Artificial Sequence: Synthetic oligonucleotide
  Antisense strand to SEQ ID NO: 889060
uagaucacaagagacagaa

SEQ ID NO: 889062 - RNA, 19 nt, Artificial Sequence
  Description of Artificial Sequence: Synthetic oligonucleotide
  Sense strand starting at position 49 of SEQ ID NO: 588781
ucugucucuugugaucuau

SEQ ID NO: 889063 - RNA, 19 nt, Artificial Sequence
  Description of Artificial Sequence: Synthetic oligonucleotide
  Antisense strand to SEQ ID NO: 889062
auagaucacaagagacaga

SEQ ID NO: 889064 - RNA, 19 nt, Artificial Sequence
  Description of Artificial Sequence: Synthetic oligonucleotide
  Sense strand starting at position 51 of SEQ ID NO: 588781
ugucucuugugaucuauau

SEQ ID NO: 889065 - RNA, 19 nt, Artificial Sequence
  Description of Artificial Sequence: Synthetic oligonucleotide
  Antisense strand to SEQ ID NO: 889064
auauagaucacaagagaca

SEQ ID NO: 889066 - RNA, 19 nt, Artificial Sequence
  Description of Artificial Sequence: Synthetic oligonucleotide
  Sense strand starting at position 584 of SEQ ID NO: 588781
gcugucaucccuuggaaau

SEQ ID NO: 889067 - RNA, 19 nt, Artificial Sequence
  Description of Artificial Sequence: Synthetic oligonucleotide
  Antisense strand to SEQ ID NO: 889066
auuuccaagggaugacagc

SEQ ID NO: 889068 - RNA, 19 nt, Artificial Sequence
  Description of Artificial Sequence: Synthetic oligonucleotide
  Sense strand starting at position 585 of SEQ ID NO: 588781
cugucaucccuuggaaaug

SEQ ID NO: 889069 - RNA, 19 nt, Artificial Sequence
  Description of Artificial Sequence: Synthetic oligonucleotide
  Antisense strand to SEQ ID NO: 889068
cauuuccaagggaugacag

SEQ ID NO: 889070 - RNA, 19 nt, Artificial Sequence
  Description of Artificial Sequence: Synthetic oligonucleotide
  Sense strand starting at position 659 of SEQ ID NO: 588781
gcauccaugggcugcaaau

SEQ ID NO: 889071 - RNA, 19 nt, Artificial Sequence
  Description of Artificial Sequence: Synthetic oligonucleotide
  Antisense strand to SEQ ID NO: 889070
auuugcagcccauggaugc

SEQ ID NO: 889072 - RNA, 19 nt, Artificial Sequence
  Description of Artificial Sequence: Synthetic oligonucleotide
  Sense strand starting at position 973 of SEQ ID NO: 588781
gucccauagucucagccua

SEQ ID NO: 889073 - RNA, 19 nt, Artificial Sequence
  Description of Artificial Sequence: Synthetic oligonucleotide
  Antisense strand to SEQ ID NO: 889072
uaggcugagacuaugggac

SEQ ID NO: 889074 - RNA, 19 nt, Artificial Sequence
  Description of Artificial Sequence: Synthetic oligonucleotide
  Sense strand starting at position 1135 of SEQ ID NO: 588781
cccggacuccuuggaaaug

SEQ ID NO: 889075 - RNA, 19 nt, Artificial Sequence
  Description of Artificial Sequence: Synthetic oligonucleotide
  Antisense strand to SEQ ID NO: 889074
cauuuccaaggaguccggg

SEQ ID NO: 889076 - RNA, 19 nt, Artificial Sequence
  Description of Artificial Sequence: Synthetic oligonucleotide
  Sense strand starting at position 1170 of SEQ ID NO: 588781
cuggaaaugucacagcaca

SEQ ID NO: 889077 - RNA, 19 nt, Artificial Sequence
  Description of Artificial Sequence: Synthetic oligonucleotide
  Antisense strand to SEQ ID NO: 889076
ugugcugugacauuuccag

SEQ ID NO: 889078 - RNA, 19 nt, Artificial Sequence
  Description of Artificial Sequence: Synthetic oligonucleotide
  Sense strand starting at position 1221 of SEQ ID NO: 588781
cauucuuuccuguggguuu

SEQ ID NO: 889079 - RNA, 19 nt, Artificial Sequence
  Description of Artificial Sequence: Synthetic oligonucleotide
  Antisense strand to SEQ ID NO: 889078
aaacccacaggaaagaaug

SEQ ID NO: 889080 - RNA, 19 nt, Artificial Sequence
  Description of Artificial Sequence: Synthetic oligonucleotide
  Sense strand starting at position 1252 of SEQ ID NO: 588781
uaagaucuggagugcagau

SEQ ID NO: 889081 - RNA, 19 nt, Artificial Sequence
  Description of Artificial Sequence: Synthetic oligonucleotide
  Antisense strand to SEQ ID NO: 889080
aucugcacuccagaucuua

SEQ ID NO: 889082 - RNA, 19 nt, Artificial Sequence
  Description of Artificial Sequence: Synthetic oligonucleotide
  Sense strand starting at position 1292 of SEQ ID NO: 588781
gugucuuccuagccuuagu

SEQ ID NO: 889083 - RNA, 19 nt, Artificial Sequence
  Description of Artificial Sequence: Synthetic oligonucleotide
  Antisense strand to SEQ ID NO: 889082
acuaaggcuaggaagacac

SEQ ID NO: 889084 - RNA, 19 nt, Artificial Sequence
  Description of Artificial Sequence: Synthetic oligonucleotide
  Sense strand starting at position 1352 of SEQ ID NO: 588781
gacaguaaccgucauagca

SEQ ID NO: 889085 - RNA, 19 nt, Artificial Sequence
  Description of Artificial Sequence: Synthetic oligonucleotide
  Antisense strand to SEQ ID NO: 889084
ugcuaugacgguuacuguc

SEQ ID NO: 889086 - RNA, 19 nt, Artificial Sequence
  Description of Artificial Sequence: Synthetic oligonucleotide
  Sense strand starting at position 1413 of SEQ ID NO: 588781
cacagaaguccuugguaau

SEQ ID NO: 889087 - RNA, 19 nt, Artificial Sequence
  Description of Artificial Sequence: Synthetic oligonucleotide
  Antisense strand to SEQ ID NO: 889086
auuaccaaggacuucugug

SEQ ID NO: 889088 - RNA, 19 nt, Artificial Sequence
  Description of Artificial Sequence: Synthetic oligonucleotide
  Sense strand starting at position 1414 of SEQ ID NO: 588781
acagaaguccuugguaauc

SEQ ID NO: 889089 - RNA, 19 nt, Artificial Sequence
  Description of Artificial Sequence: Synthetic oligonucleotide
  Antisense strand to SEQ ID NO: 889088
gauuaccaaggacuucugu

SEQ ID NO: 889090 - RNA, 19 nt, Artificial Sequence
  Description of Artificial Sequence: Synthetic oligonucleotide
  Sense strand starting at position 1416 of SEQ ID NO: 588781
agaaguccuugguaaucca

SEQ ID NO: 889091 - RNA, 19 nt, Artificial Sequence
  Description of Artificial Sequence: Synthetic oligonucleotide
  Antisense strand to SEQ ID NO: 889090
uggauuaccaaggacuucu

SEQ ID NO: 889092 - RNA, 19 nt, Artificial Sequence
  Description of Artificial Sequence: Synthetic oligonucleotide
  Sense strand starting at position 1419 of SEQ ID NO: 588781
aguccuugguaauccaaga

SEQ ID NO: 889093 - RNA, 19 nt, Artificial Sequence
  Description of Artificial Sequence: Synthetic oligonucleotide
  Antisense strand to SEQ ID NO: 889092
ucuuggauuaccaaggacu

SEQ ID NO: 889094 - RNA, 19 nt, Artificial Sequence
  Description of Artificial Sequence: Synthetic oligonucleotide
  Sense strand starting at position 1623 of SEQ ID NO: 588781
ccaguucuggcagggaaga

SEQ ID NO: 889095 - RNA, 19 nt, Artificial Sequence
  Description of Artificial Sequence: Synthetic oligonucleotide
  Antisense strand to SEQ ID NO: 889094
ucuucccugccagaacugg

SEQ ID NO: 889096 - RNA, 19 nt, Artificial Sequence
  Description of Artificial Sequence: Synthetic oligonucleotide
  Sense strand starting at position 1624 of SEQ ID NO: 588781
caguucuggcagggaagaa

SEQ ID NO: 889097 - RNA, 19 nt, Artificial Sequence
  Description of Artificial Sequence: Synthetic oligonucleotide
  Antisense strand to SEQ ID NO: 889096
uucuucccugccagaacug

SEQ ID NO: 889098 - RNA, 19 nt, Artificial Sequence
  Description of Artificial Sequence: Synthetic oligonucleotide
  Sense strand starting at position 1716 of SEQ ID NO: 588781
acugguugcccuggaaacu

SEQ ID NO: 889099 - RNA, 19 nt, Artificial Sequence
  Description of Artificial Sequence: Synthetic oligonucleotide
  Antisense strand to SEQ ID NO: 889098
aguuuccagggcaaccagu

SEQ ID NO: 889100 - RNA, 19 nt, Artificial Sequence
  Description of Artificial Sequence: Synthetic oligonucleotide
  Sense strand starting at position 2073 of SEQ ID NO: 588781
ggaauucccgcuuguacca

SEQ ID NO: 889101 - RNA, 19 nt, Artificial Sequence
  Description of Artificial Sequence: Synthetic oligonucleotide
  Antisense strand to SEQ ID NO: 889100
ugguacaagcgggaauucc

SEQ ID NO: 889102 - RNA, 19 nt, Artificial Sequence
  Description of Artificial Sequence: Synthetic oligonucleotide
  Sense strand starting at position 2324 of SEQ ID NO: 588781
ccacucacuuguucuggaa

SEQ ID NO: 889103 - RNA, 19 nt, Artificial Sequence
  Description of Artificial Sequence: Synthetic oligonucleotide
  Antisense strand to SEQ ID NO: 889102
uuccagaacaagugagugg

SEQ ID NO: 889104 - RNA, 19 nt, Artificial Sequence
  Description of Artificial Sequence: Synthetic oligonucleotide
  Sense strand starting at position 2328 of SEQ ID NO: 588781
ucacuuguucuggaaggcu

SEQ ID NO: 889105 - RNA, 19 nt, Artificial Sequence
  Description of Artificial Sequence: Synthetic oligonucleotide
  Antisense strand to SEQ ID NO: 889104
agccuuccagaacaaguga

SEQ ID NO: 889106 - RNA, 19 nt, Artificial Sequence
  Description of Artificial Sequence: Synthetic oligonucleotide
  Sense strand starting at position 2390 of SEQ ID NO: 588781
gcacgagauuuccuuucuu

SEQ ID NO: 889107 - RNA, 19 nt, Artificial Sequence
  Description of Artificial Sequence: Synthetic oligonucleotide
  Antisense strand to SEQ ID NO: 889106
aagaaaggaaaucucgugc

SEQ ID NO: 889108 - RNA, 19 nt, Artificial Sequence
  Description of Artificial Sequence: Synthetic oligonucleotide
  Sense strand starting at position 2476 of SEQ ID NO: 588781
gcgaccucggcucacuaua

SEQ ID NO: 889109 - RNA, 19 nt, Artificial Sequence
  Description of Artificial Sequence: Synthetic oligonucleotide
  Antisense strand to SEQ ID NO: 889108
uauagugagccgaggucgc

SEQ ID NO: 889110 - RNA, 19 nt, Artificial Sequence
  Description of Artificial Sequence: Synthetic oligonucleotide
  Sense strand starting at position 3066 of SEQ ID NO: 588781
cauuaaguagggugguaaa

SEQ ID NO: 889111 - RNA, 19 nt, Artificial Sequence
  Description of Artificial Sequence: Synthetic oligonucleotide
  Antisense strand to SEQ ID NO: 889110
uuuaccacccuacuuaaug

SEQ ID NO: 889112 - RNA, 19 nt, Artificial Sequence
  Description of Artificial Sequence: Synthetic oligonucleotide
  Sense strand starting at position 3201 of SEQ ID NO: 588781
agaauaauuuacuagagug

SEQ ID NO: 889113 - RNA, 19 nt, Artificial Sequence
  Description of Artificial Sequence: Synthetic oligonucleotide
  Antisense strand to SEQ ID NO: 889112
cacucuaguaaauuauucu

SEQ ID NO: 889114 - RNA, 19 nt, Artificial Sequence
  Description of Artificial Sequence: Synthetic oligonucleotide
  Sense strand starting at position 3213 of SEQ ID NO: 588781
uagagugacuacuggaguu

SEQ ID NO: 889115 - RNA, 19 nt, Artificial Sequence
  Description of Artificial Sequence: Synthetic oligonucleotide
  Antisense strand to SEQ ID NO: 889114
aacuccaguagucacucua

SEQ ID NO: 889116 - RNA, 19 nt, Artificial Sequence
  Description of Artificial Sequence: Synthetic oligonucleotide
  Sense strand starting at position 3215 of SEQ ID NO: 588781
gagugacuacuggaguugu

SEQ ID NO: 889117 - RNA, 19 nt, Artificial Sequence
  Description of Artificial Sequence: Synthetic oligonucleotide
  Antisense strand to SEQ ID NO: 889116
acaacuccaguagucacuc

SEQ ID NO: 889118 - RNA, 19 nt, Artificial Sequence
  Description of Artificial Sequence: Synthetic oligonucleotide
  Sense strand starting at position 3344 of SEQ ID NO: 588781
ccgucugacaaguggaaag

SEQ ID NO: 889119 - RNA, 19 nt, Artificial Sequence
  Description of Artificial Sequence: Synthetic oligonucleotide
  Antisense strand to SEQ ID NO: 889118
cuuuccacuugucagacgg

SEQ ID NO: 889120 - RNA, 19 nt, Artificial Sequence
  Description of Artificial Sequence: Synthetic oligonucleotide
  Sense strand starting at position 3384 of SEQ ID NO: 588781
ggacuugcccaagaucuca

SEQ ID NO: 889121 - RNA, 19 nt, Artificial Sequence
  Description of Artificial Sequence: Synthetic oligonucleotide
  Antisense strand to SEQ ID NO: 889120
ugagaucuugggcaagucc

SEQ ID NO: 889122 - RNA, 19 nt, Artificial Sequence
  Description of Artificial Sequence: Synthetic oligonucleotide
  Sense strand starting at position 3526 of SEQ ID NO: 588781
ccaagagucucagcuacuu

SEQ ID NO: 889123 - RNA, 19 nt, Artificial Sequence
  Description of Artificial Sequence: Synthetic oligonucleotide
  Antisense strand to SEQ ID NO: 889122
aaguagcugagacucuugg

SEQ ID NO: 889124 - RNA, 19 nt, Artificial Sequence
  Description of Artificial Sequence: Synthetic oligonucleotide
  Sense strand starting at position 75 of SEQ ID NO: 588782
cuugguaaauggucauugu

SEQ ID NO: 889125 - RNA, 19 nt, Artificial Sequence
  Description of Artificial Sequence: Synthetic oligonucleotide
  Antisense strand to SEQ ID NO: 889124
acaaugaccauuuaccaag

SEQ ID NO: 889126 - RNA, 19 nt, Artificial Sequence
  Description of Artificial Sequence: Synthetic oligonucleotide
  Sense strand starting at position 78 of SEQ ID NO: 588782
gguaaauggucauuguguu

SEQ ID NO: 889127 - RNA, 19 nt, Artificial Sequence
  Description of Artificial Sequence: Synthetic oligonucleotide
  Antisense strand to SEQ ID NO: 889126
aacacaaugaccauuuacc

SEQ ID NO: 889128 - RNA, 19 nt, Artificial Sequence
  Description of Artificial Sequence: Synthetic oligonucleotide
  Sense strand starting at position 79 of SEQ ID NO: 588782
guaaauggucauuguguuc

SEQ ID NO: 889129 - RNA, 19 nt, Artificial Sequence
  Description of Artificial Sequence: Synthetic oligonucleotide
  Antisense strand to SEQ ID NO: 889128
gaacacaaugaccauuuac

SEQ ID NO: 889130 - RNA, 19 nt, Artificial Sequence
  Description of Artificial Sequence: Synthetic oligonucleotide
  Sense strand starting at position 84 of SEQ ID NO: 588782
uggucauuguguucaguuu

SEQ ID NO: 889131 - RNA, 19 nt, Artificial Sequence
  Description of Artificial Sequence: Synthetic oligonucleotide
  Antisense strand to SEQ ID NO: 889130
aaacugaacacaaugacca

SEQ ID NO: 889132 - RNA, 19 nt, Artificial Sequence
  Description of Artificial Sequence: Synthetic oligonucleotide
  Sense strand starting at position 367 of SEQ ID NO: 588782
cgagcugcugccagaggua

SEQ ID NO: 889133 - RNA, 19 nt, Artificial Sequence
  Description of Artificial Sequence: Synthetic oligonucleotide
  Antisense strand to SEQ ID NO: 889132
uaccucuggcagcagcucg

SEQ ID NO: 889134 - RNA, 19 nt, Artificial Sequence
  Description of Artificial Sequence: Synthetic oligonucleotide
  Sense strand starting at position 645 of SEQ ID NO: 588782
cgagacucaggcuaacaau

SEQ ID NO: 889135 - RNA, 19 nt, Artificial Sequence
  Description of Artificial Sequence: Synthetic oligonucleotide
  Antisense strand to SEQ ID NO: 889134
auuguuagccugagucucg

SEQ ID NO: 889136 - RNA, 19 nt, Artificial Sequence
  Description of Artificial Sequence: Synthetic oligonucleotide
  Sense strand starting at position 655 of SEQ ID NO: 588782
gcuaacaaucgccagcaau

SEQ ID NO: 889137 - RNA, 19 nt, Artificial Sequence
  Description of Artificial Sequence: Synthetic oligonucleotide
  Antisense strand to SEQ ID NO: 889136
auugcuggcgauuguuagc

SEQ ID NO: 889138 - RNA, 19 nt, Artificial Sequence
  Description of Artificial Sequence: Synthetic oligonucleotide
  Sense strand starting at position 746 of SEQ ID NO: 588782
ucaggagguucacugugaa

SEQ ID NO: 889139 - RNA, 19 nt, Artificial Sequence
  Description of Artificial Sequence: Synthetic oligonucleotide
  Antisense strand to SEQ ID NO: 889138
uucacagugaaccuccuga

SEQ ID NO: 889140 - RNA, 19 nt, Artificial Sequence
  Description of Artificial Sequence: Synthetic oligonucleotide
  Sense strand starting at position 1052 of SEQ ID NO: 588782
uuggcacucuuuccaguua

SEQ ID NO: 889141 - RNA, 19 nt, Artificial Sequence
  Description of Artificial Sequence: Synthetic oligonucleotide
  Antisense strand to SEQ ID NO: 889140
uaacuggaaagagugccaa

SEQ ID NO: 889142 - RNA, 19 nt, Artificial Sequence
  Description of Artificial Sequence: Synthetic oligonucleotide
  Sense strand starting at position 1053 of SEQ ID NO: 588782
uggcacucuuuccaguuaa

SEQ ID NO: 889143 - RNA, 19 nt, Artificial Sequence
  Description of Artificial Sequence: Synthetic oligonucleotide
  Antisense strand to SEQ ID NO: 889142
uuaacuggaaagagugcca

SEQ ID NO: 889144 - RNA, 19 nt, Artificial Sequence
  Description of Artificial Sequence: Synthetic oligonucleotide
  Sense strand starting at position 1281 of SEQ ID NO: 588782
cucugaggauucuaggauu

SEQ ID NO: 889145 - RNA, 19 nt, Artificial Sequence
  Description of Artificial Sequence: Synthetic oligonucleotide
  Antisense strand to SEQ ID NO: 889144
aauccuagaauccucagag

SEQ ID NO: 889146 - RNA, 19 nt, Artificial Sequence
  Description of Artificial Sequence: Synthetic oligonucleotide
  Sense strand starting at position 1365 of SEQ ID NO: 588782
gugggaacugagugaaaua

SEQ ID NO: 889147 - RNA, 19 nt, Artificial Sequence
  Description of Artificial Sequence: Synthetic oligonucleotide
  Antisense strand to SEQ ID NO: 889146
uauuucacucaguucccac

SEQ ID NO: 889148 - RNA, 19 nt, Artificial Sequence
  Description of Artificial Sequence: Synthetic oligonucleotide
  Sense strand starting at position 1552 of SEQ ID NO: 588782
gcuggcugauuucugcaga

SEQ ID NO: 889149 - RNA, 19 nt, Artificial Sequence
  Description of Artificial Sequence: Synthetic oligonucleotide
  Antisense strand to SEQ ID NO: 889148
ucugcagaaaucagccagc

SEQ ID NO: 889150 - RNA, 19 nt, Artificial Sequence
  Description of Artificial Sequence: Synthetic oligonucleotide
  Sense strand starting at position 1553 of SEQ ID NO: 588782
cuggcugauuucugcagaa

SEQ ID NO: 889151 - RNA, 19 nt, Artificial Sequence
  Description of Artificial Sequence: Synthetic oligonucleotide
  Antisense strand to SEQ ID NO: 889150
uucugcagaaaucagccag

SEQ ID NO: 889152 - RNA, 19 nt, Artificial Sequence
  Description of Artificial Sequence: Synthetic oligonucleotide
  Sense strand starting at position 1742 of SEQ ID NO: 588782
ggucuagcugcgugaagcu

SEQ ID NO: 889153 - RNA, 19 nt, Artificial Sequence
  Description of Artificial Sequence: Synthetic oligonucleotide
  Antisense strand to SEQ ID NO: 889152
agcuucacgcagcuagacc

SEQ ID NO: 889154 - RNA, 19 nt, Artificial Sequence
  Description of Artificial Sequence: Synthetic oligonucleotide
  Sense strand starting at position 2313 of SEQ ID NO: 588782
uugcguagggcugaaaugu

SEQ ID NO: 889155 - RNA, 19 nt, Artificial Sequence
  Description of Artificial Sequence: Synthetic oligonucleotide
  Antisense strand to SEQ ID NO: 889154
acauuucagcccuacgcaa

SEQ ID NO: 889156 - RNA, 19 nt, Artificial Sequence
  Description of Artificial Sequence: Synthetic oligonucleotide
  Sense strand starting at position 2324 of SEQ ID NO: 588782
ugaaauguguacgugcuga

SEQ ID NO: 889157 - RNA, 19 nt, Artificial Sequence
  Description of Artificial Sequence: Synthetic oligonucleotide
  Antisense strand to SEQ ID NO: 889156
ucagcacguacacauuuca

SEQ ID NO: 889158 - RNA, 19 nt, Artificial Sequence
  Description of Artificial Sequence: Synthetic oligonucleotide
  Sense strand starting at position 2328 of SEQ ID NO: 588782
auguguacgugcugaucau

SEQ ID NO: 889159 - RNA, 19 nt, Artificial Sequence
  Description of Artificial Sequence: Synthetic oligonucleotide
  Antisense strand to SEQ ID NO: 889158
augaucagcacguacacau

SEQ ID NO: 889160 - RNA, 19 nt, Artificial Sequence
  Description of Artificial Sequence: Synthetic oligonucleotide
  Sense strand starting at position 2511 of SEQ ID NO: 588782
gacauuacguaauggacau

SEQ ID NO: 889161 - RNA, 19 nt, Artificial Sequence
  Description of Artificial Sequence: Synthetic oligonucleotide
  Antisense strand to SEQ ID NO: 889160
auguccauuacguaauguc

SEQ ID NO: 889162 - RNA, 19 nt, Artificial Sequence
  Description of Artificial Sequence: Synthetic oligonucleotide
  Sense strand starting at position 2517 of SEQ ID NO: 588782
acguaauggacaugaagca

SEQ ID NO: 889163 - RNA, 19 nt, Artificial Sequence
  Description of Artificial Sequence: Synthetic oligonucleotide
  Antisense strand to SEQ ID NO: 889162
ugcuucauguccauuacgu

SEQ ID NO: 889164 - RNA, 19 nt, Artificial Sequence
  Description of Artificial Sequence: Synthetic oligonucleotide
  Sense strand starting at position 2605 of SEQ ID NO: 588782
ugacccugucagugcaauu

SEQ ID NO: 889165 - RNA, 19 nt, Artificial Sequence
  Description of Artificial Sequence: Synthetic oligonucleotide
  Antisense strand to SEQ ID NO: 889164
aauugcacugacaggguca

SEQ ID NO: 889166 - RNA, 19 nt, Artificial Sequence
  Description of Artificial Sequence: Synthetic oligonucleotide
  Sense strand starting at position 2621 of SEQ ID NO: 588782
auuggaaauccugagugug

SEQ ID NO: 889167 - RNA, 19 nt, Artificial Sequence
  Description of Artificial Sequence: Synthetic oligonucleotide
  Antisense strand to SEQ ID NO: 889166
cacacucaggauuuccaau

SEQ ID NO: 889168 - RNA, 19 nt, Artificial Sequence
  Description of Artificial Sequence: Synthetic oligonucleotide
  Sense strand starting at position 2783 of SEQ ID NO: 588782
cugagaggcaucugacaag

SEQ ID NO: 889169 - RNA, 19 nt, Artificial Sequence
  Description of Artificial Sequence: Synthetic oligonucleotide
  Antisense strand to SEQ ID NO: 889168
cuugucagaugccucucag

SEQ ID NO: 889170 - RNA, 19 nt, Artificial Sequence
  Description of Artificial Sequence: Synthetic oligonucleotide
  Sense strand starting at position 3138 of SEQ ID NO: 588782
ccaggucugguccguacua

SEQ ID NO: 889171 - RNA, 19 nt, Artificial Sequence
  Description of Artificial Sequence: Synthetic oligonucleotide
  Antisense strand to SEQ ID NO: 889170
uaguacggaccagaccugg

SEQ ID NO: 889172 - RNA, 19 nt, Artificial Sequence
  Description of Artificial Sequence: Synthetic oligonucleotide
  Sense strand starting at position 3139 of SEQ ID NO: 588782
caggucugguccguacuau

SEQ ID NO: 889173 - RNA, 19 nt, Artificial Sequence
  Description of Artificial Sequence: Synthetic oligonucleotide
  Antisense strand to SEQ ID NO: 889172
auaguacggaccagaccug

SEQ ID NO: 889174 - RNA, 19 nt, Artificial Sequence
  Description of Artificial Sequence: Synthetic oligonucleotide
  Sense strand starting at position 3140 of SEQ ID NO: 588782
aggucugguccguacuauu

SEQ ID NO: 889175 - RNA, 19 nt, Artificial Sequence
  Description of Artificial Sequence: Synthetic oligonucleotide
  Antisense strand to SEQ ID NO: 889174
aauaguacggaccagaccu

SEQ ID NO: 889176 - RNA, 19 nt, Artificial Sequence
  Description of Artificial Sequence: Synthetic oligonucleotide
  Sense strand starting at position 3355 of SEQ ID NO: 588782
aaauuauggugguaaguug

SEQ ID NO: 889177 - RNA, 19 nt, Artificial Sequence
  Description of Artificial Sequence: Synthetic oligonucleotide
  Antisense strand to SEQ ID NO: 889176
caacuuaccaccauaauuu

SEQ ID NO: 889178 - RNA, 19 nt, Artificial Sequence
  Description of Artificial Sequence: Synthetic oligonucleotide
  Sense strand starting at position 3449 of SEQ ID NO: 588782
ucagcucuaugugauaaau

SEQ ID NO: 889179 - RNA, 19 nt, Artificial Sequence
  Description of Artificial Sequence: Synthetic oligonucleotide
  Antisense strand to SEQ ID NO: 889178
auuuaucacauagagcuga

SEQ ID NO: 889180 - RNA, 19 nt, Artificial Sequence
  Description of Artificial Sequence: Synthetic oligonucleotide
  Sense strand starting at position 3773 of SEQ ID NO: 588782
gaagcaagauggguagauu

SEQ ID NO: 889181 - RNA, 19 nt, Artificial Sequence
  Description of Artificial Sequence: Synthetic oligonucleotide
  Antisense strand to SEQ ID NO: 889180
aaucuacccaucuugcuuc

SEQ ID NO: 889182 - RNA, 19 nt, Artificial Sequence
  Description of Artificial Sequence: Synthetic oligonucleotide
  Sense strand starting at position 3810 of SEQ ID NO: 588782
ccuagaggcuguuuaggaa

SEQ ID NO: 889183 - RNA, 19 nt, Artificial Sequence
  Description of Artificial Sequence: Synthetic oligonucleotide
  Antisense strand to SEQ ID NO: 889182
uuccuaaacagccucuagg

SEQ ID NO: 889184 - RNA, 19 nt, Artificial Sequence
  Description of Artificial Sequence: Synthetic oligonucleotide
  Sense strand starting at position 3868 of SEQ ID NO: 588782
ggcguauuucgaggcagga

SEQ ID NO: 889185 - RNA, 19 nt, Artificial Sequence
  Description of Artificial Sequence: Synthetic oligonucleotide
  Antisense strand to SEQ ID NO: 889184
uccugccucgaaauacgcc

SEQ ID NO: 889186 - RNA, 19 nt, Artificial Sequence
  Description of Artificial Sequence: Synthetic oligonucleotide
  Sense strand starting at position 294 of SEQ ID NO: 588783
uguagauccugagcagaca

SEQ ID NO: 889187 - RNA, 19 nt, Artificial Sequence
  Description of Artificial Sequence: Synthetic oligonucleotide
  Antisense strand to SEQ ID NO: 889186
ugucugcucaggaucuaca

SEQ ID NO: 889188 - RNA, 19 nt, Artificial Sequence
  Description of Artificial Sequence: Synthetic oligonucleotide
  Sense strand starting at position 324 of SEQ ID NO: 588783
accguucuauacuucuaua

SEQ ID NO: 889189 - RNA, 19 nt, Artificial Sequence
  Description of Artificial Sequence: Synthetic oligonucleotide
  Antisense strand to SEQ ID NO: 889188
uauagaaguauagaacggu

SEQ ID NO: 889190 - RNA, 19 nt, Artificial Sequence
  Description of Artificial Sequence: Synthetic oligonucleotide
  Sense strand starting at position 400 of SEQ ID NO: 588783
guauaaugucaugguuagg

SEQ ID NO: 889191 - RNA, 19 nt, Artificial Sequence
  Description of Artificial Sequence: Synthetic oligonucleotide
  Antisense strand to SEQ ID NO: 889190
ccuaaccaugacauuauac

SEQ ID NO: 889192 - RNA, 19 nt, Artificial Sequence
  Description of Artificial Sequence: Synthetic oligonucleotide
  Sense strand starting at position 620 of SEQ ID NO: 588783
gguauauaguaagcaacaa

SEQ ID NO: 889193 - RNA, 19 nt, Artificial Sequence
  Description of Artificial Sequence: Synthetic oligonucleotide
  Antisense strand to SEQ ID NO: 889192
uuguugcuuacuauauacc

SEQ ID NO: 889194 - RNA, 19 nt, Artificial Sequence
  Description of Artificial Sequence: Synthetic oligonucleotide
  Sense strand starting at position 662 of SEQ ID NO: 588783
auguaucacucagucauca

SEQ ID NO: 889195 - RNA, 19 nt, Artificial Sequence
  Description of Artificial Sequence: Synthetic oligonucleotide
  Antisense strand to SEQ ID NO: 889194
ugaugacugagugauacau

SEQ ID NO: 889196 - RNA, 19 nt, Artificial Sequence
  Description of Artificial Sequence: Synthetic oligonucleotide
  Sense strand starting at position 758 of SEQ ID NO: 588783
uuaccuugugcuggauaca

SEQ ID NO: 889197 - RNA, 19 nt, Artificial Sequence
  Description of Artificial Sequence: Synthetic oligonucleotide
  Antisense strand to SEQ ID NO: 889196
uguauccagcacaagguaa

SEQ ID NO: 889198 - RNA, 19 nt, Artificial Sequence
  Description of Artificial Sequence: Synthetic oligonucleotide
  Sense strand starting at position 761 of SEQ ID NO: 588783
ccuugugcuggauacacau

SEQ ID NO: 889199 - RNA, 19 nt, Artificial Sequence
  Description of Artificial Sequence: Synthetic oligonucleotide
  Antisense strand to SEQ ID NO: 889198
auguguauccagcacaagg

SEQ ID NO: 889200 - RNA, 19 nt, Artificial Sequence
  Description of Artificial Sequence: Synthetic oligonucleotide
  Sense strand starting at position 803 of SEQ ID NO: 588783
augugugaauguguauaau

SEQ ID NO: 889201 - RNA, 19 nt, Artificial Sequence
  Description of Artificial Sequence: Synthetic oligonucleotide
  Antisense strand to SEQ ID NO: 889200
auuauacacauucacacau

SEQ ID NO: 889202 - RNA, 19 nt, Artificial Sequence
  Description of Artificial Sequence: Synthetic oligonucleotide
  Sense strand starting at position 815 of SEQ ID NO: 588783
guauaauguguauacacau

SEQ ID NO: 889203 - RNA, 19 nt, Artificial Sequence
  Description of Artificial Sequence: Synthetic oligonucleotide
  Antisense strand to SEQ ID NO: 889202
auguguauacacauuauac

SEQ ID NO: 889204 - RNA, 19 nt, Artificial Sequence
  Description of Artificial Sequence: Synthetic oligonucleotide
  Sense strand starting at position 938 of SEQ ID NO: 588783
gucugacuccucuaguuac

SEQ ID NO: 889205 - RNA, 19 nt, Artificial Sequence
  Description of Artificial Sequence: Synthetic oligonucleotide
  Antisense strand to SEQ ID NO: 889204
guaacuagaggagucagac

SEQ ID NO: 889206 - RNA, 19 nt, Artificial Sequence
  Description of Artificial Sequence: Synthetic oligonucleotide
  Sense strand starting at position 977 of SEQ ID NO: 588783
gauuucggguauuauaacu

SEQ ID NO: 889207 - RNA, 19 nt, Artificial Sequence
  Description of Artificial Sequence: Synthetic oligonucleotide
  Antisense strand to SEQ ID NO: 889206
aguuauaauacccgaaauc

SEQ ID NO: 889208 - RNA, 19 nt, Artificial Sequence
  Description of Artificial Sequence: Synthetic oligonucleotide
  Sense strand starting at position 982 of SEQ ID NO: 588783
cggguauuauaacuuucca

SEQ ID NO: 889209 - RNA, 19 nt, Artificial Sequence
  Description of Artificial Sequence: Synthetic oligonucleotide
  Antisense strand to SEQ ID NO: 889208
uggaaaguuauaauacccg

SEQ ID NO: 889210 - RNA, 19 nt, Artificial Sequence
  Description of Artificial Sequence: Synthetic oligonucleotide
  Sense strand starting at position 1001 of SEQ ID NO: 588783
gugacacaccauuguaucu

SEQ ID NO: 889211 - RNA, 19 nt, Artificial Sequence
  Description of Artificial Sequence: Synthetic oligonucleotide
  Antisense strand to SEQ ID NO: 889210
agauacaauggugugucac

SEQ ID NO: 889212 - RNA, 19 nt, Artificial Sequence
  Description of Artificial Sequence: Synthetic oligonucleotide
  Sense strand starting at position 1385 of SEQ ID NO: 588783
gcuucugugccauuaccga

SEQ ID NO: 889213 - RNA, 19 nt, Artificial Sequence
  Description of Artificial Sequence: Synthetic oligonucleotide
  Antisense strand to SEQ ID NO: 889212
ucgguaauggcacagaagc

SEQ ID NO: 889214 - RNA, 19 nt, Artificial Sequence
  Description of Artificial Sequence: Synthetic oligonucleotide
  Sense strand starting at position 1393 of SEQ ID NO: 588783
gccauuaccgagcauggaa

SEQ ID NO: 889215 - RNA, 19 nt, Artificial Sequence
  Description of Artificial Sequence: Synthetic oligonucleotide
  Antisense strand to SEQ ID NO: 889214
uuccaugcucgguaauggc

SEQ ID NO: 889216 - RNA, 19 nt, Artificial Sequence
  Description of Artificial Sequence: Synthetic oligonucleotide
  Sense strand starting at position 1484 of SEQ ID NO: 588783
cccacugagcaagguaaau

SEQ ID NO: 889217 - RNA, 19 nt, Artificial Sequence
  Description of Artificial Sequence: Synthetic oligonucleotide
  Antisense strand to SEQ ID NO: 889216
auuuaccuugcucaguggg

SEQ ID NO: 889218 - RNA, 19 nt, Artificial Sequence
  Description of Artificial Sequence: Synthetic oligonucleotide
  Sense strand starting at position 1557 of SEQ ID NO: 588783
gugacuuauuuauaaucag

SEQ ID NO: 889219 - RNA, 19 nt, Artificial Sequence
  Description of Artificial Sequence: Synthetic oligonucleotide
  Antisense strand to SEQ ID NO: 889218
cugauuauaaauaagucac

SEQ ID NO: 889220 - RNA, 19 nt, Artificial Sequence
  Description of Artificial Sequence: Synthetic oligonucleotide
  Sense strand starting at position 1758 of SEQ ID NO: 588783
agugcuaagaaugguggua

SEQ ID NO: 889221 - RNA, 19 nt, Artificial Sequence
  Description of Artificial Sequence: Synthetic oligonucleotide
  Antisense strand to SEQ ID NO: 889220
uaccaccauucuuagcacu

SEQ ID NO: 889222 - RNA, 19 nt, Artificial Sequence
  Description of Artificial Sequence: Synthetic oligonucleotide
  Sense strand starting at position 1993 of SEQ ID NO: 588783
ggagaaguccugcaaggca

SEQ ID NO: 889223 - RNA, 19 nt, Artificial Sequence
  Description of Artificial Sequence: Synthetic oligonucleotide
  Antisense strand to SEQ ID NO: 889222
ugccuugcaggacuucucc

SEQ ID NO: 889224 - RNA, 19 nt, Artificial Sequence
  Description of Artificial Sequence: Synthetic oligonucleotide
  Sense strand starting at position 2080 of SEQ ID NO: 588783
uugagcagaucaucucaga

SEQ ID NO: 889225 - RNA, 19 nt, Artificial Sequence
  Description of Artificial Sequence: Synthetic oligonucleotide
  Antisense strand to SEQ ID NO: 889224
ucugagaugaucugcucaa

SEQ ID NO: 889226 - RNA, 19 nt, Artificial Sequence
  Description of Artificial Sequence: Synthetic oligonucleotide
  Sense strand starting at position 2085 of SEQ ID NO: 588783
cagaucaucucagaggaga

SEQ ID NO: 889227 - RNA, 19 nt, Artificial Sequence
  Description of Artificial Sequence: Synthetic oligonucleotide
  Antisense strand to SEQ ID NO: 889226
ucuccucugagaugaucug

SEQ ID NO: 889228 - RNA, 19 nt, Artificial Sequence
  Description of Artificial Sequence: Synthetic oligonucleotide
  Sense strand starting at position 2140 of SEQ ID NO: 588783
cuaacuauggcccacagau

SEQ ID NO: 889229 - RNA, 19 nt, Artificial Sequence
  Description of Artificial Sequence: Synthetic oligonucleotide
  Antisense strand to SEQ ID NO: 889228
aucugugggccauaguuag

SEQ ID NO: 889230 - RNA, 19 nt, Artificial Sequence
  Description of Artificial Sequence: Synthetic oligonucleotide
  Sense strand starting at position 2162 of SEQ ID NO: 588783
guuugaugggcuuguacag

SEQ ID NO: 889231 - RNA, 19 nt, Artificial Sequence
  Description of Artificial Sequence: Synthetic oligonucleotide
  Antisense strand to SEQ ID NO: 889230
cuguacaagcccaucaaac

SEQ ID NO: 889232 - RNA, 19 nt, Artificial Sequence
  Description of Artificial Sequence: Synthetic oligonucleotide
  Sense strand starting at position 2169 of SEQ ID NO: 588783
gggcuuguacaggguauua

SEQ ID NO: 889233 - RNA, 19 nt, Artificial Sequence
  Description of Artificial Sequence: Synthetic oligonucleotide
  Antisense strand to SEQ ID NO: 889232
uaauacccuguacaagccc

SEQ ID NO: 889234 - RNA, 19 nt, Artificial Sequence
  Description of Artificial Sequence: Synthetic oligonucleotide
  Sense strand starting at position 2171 of SEQ ID NO: 588783
gcuuguacaggguauuaau

SEQ ID NO: 889235 - RNA, 19 nt, Artificial Sequence
  Description of Artificial Sequence: Synthetic oligonucleotide
  Antisense strand to SEQ ID NO: 889234
auuaauacccuguacaagc

SEQ ID NO: 889236 - RNA, 19 nt, Artificial Sequence
  Description of Artificial Sequence: Synthetic oligonucleotide
  Sense strand starting at position 2395 of SEQ ID NO: 588783
ggcacuagaguuugugauc

SEQ ID NO: 889237 - RNA, 19 nt, Artificial Sequence
  Description of Artificial Sequence: Synthetic oligonucleotide
  Antisense strand to SEQ ID NO: 889236
gaucacaaacucuagugcc

SEQ ID NO: 889238 - RNA, 19 nt, Artificial Sequence
  Description of Artificial Sequence: Synthetic oligonucleotide
  Sense strand starting at position 2396 of SEQ ID NO: 588783
gcacuagaguuugugaucu

SEQ ID NO: 889239 - RNA, 19 nt, Artificial Sequence
  Description of Artificial Sequence: Synthetic oligonucleotide
  Antisense strand to SEQ ID NO: 889238
agaucacaaacucuagugc

SEQ ID NO: 889240 - RNA, 19 nt, Artificial Sequence
  Description of Artificial Sequence: Synthetic oligonucleotide
  Sense strand starting at position 2407 of SEQ ID NO: 588783
ugugaucuuugucuuauuu

SEQ ID NO: 889241 - RNA, 19 nt, Artificial Sequence
  Description of Artificial Sequence: Synthetic oligonucleotide
  Antisense strand to SEQ ID NO: 889240
aaauaagacaaagaucaca

SEQ ID NO: 889242 - RNA, 19 nt, Artificial Sequence
  Description of Artificial Sequence: Synthetic oligonucleotide
  Sense strand starting at position 2786 of SEQ ID NO: 588783
ccauaauaaccuggguaau

SEQ ID NO: 889243 - RNA, 19 nt, Artificial Sequence
  Description of Artificial Sequence: Synthetic oligonucleotide
  Antisense strand to SEQ ID NO: 889242
auuacccagguuauuaugg

SEQ ID NO: 889244 - RNA, 19 nt, Artificial Sequence
  Description of Artificial Sequence: Synthetic oligonucleotide
  Sense strand starting at position 2830 of SEQ ID NO: 588783
ccaugcuuggcauacauua

SEQ ID NO: 889245 - RNA, 19 nt, Artificial Sequence
  Description of Artificial Sequence: Synthetic oligonucleotide
  Antisense strand to SEQ ID NO: 889244
uaauguaugccaagcaugg

SEQ ID NO: 889246 - RNA, 19 nt, Artificial Sequence
  Description of Artificial Sequence: Synthetic oligonucleotide
  Sense strand starting at position 2923 of SEQ ID NO: 588783
ggaggcagauaucucauua

SEQ ID NO: 889247 - RNA, 19 nt, Artificial Sequence
  Description of Artificial Sequence: Synthetic oligonucleotide
  Antisense strand to SEQ ID NO: 889246
uaaugagauaucugccucc

SEQ ID NO: 889248 - RNA, 19 nt, Artificial Sequence
  Description of Artificial Sequence: Synthetic oligonucleotide
  Sense strand starting at position 3013 of SEQ ID NO: 588783
uggcuaucaugccugaaca

SEQ ID NO: 889249 - RNA, 19 nt, Artificial Sequence
  Description of Artificial Sequence: Synthetic oligonucleotide
  Antisense strand to SEQ ID NO: 889248
uguucaggcaugauagcca

SEQ ID NO: 889250 - RNA, 19 nt, Artificial Sequence
  Description of Artificial Sequence: Synthetic oligonucleotide
  Sense strand starting at position 3014 of SEQ ID NO: 588783
ggcuaucaugccugaacaa

SEQ ID NO: 889251 - RNA, 19 nt, Artificial Sequence
  Description of Artificial Sequence: Synthetic oligonucleotide
  Antisense strand to SEQ ID NO: 889250
uuguucaggcaugauagcc

SEQ ID NO: 889252 - RNA, 19 nt, Artificial Sequence
  Description of Artificial Sequence: Synthetic oligonucleotide
  Sense strand starting at position 3015 of SEQ ID NO: 588783
gcuaucaugccugaacaac

SEQ ID NO: 889253 - RNA, 19 nt, Artificial Sequence
  Description of Artificial Sequence: Synthetic oligonucleotide
  Antisense strand to SEQ ID NO: 889252
guuguucaggcaugauagc

SEQ ID NO: 889254 - RNA, 19 nt, Artificial Sequence
  Description of Artificial Sequence: Synthetic oligonucleotide
  Sense strand starting at position 3140 of SEQ ID NO: 588783
gcaagugaccaggagagua

SEQ ID NO: 889255 - RNA, 19 nt, Artificial Sequence
  Description of Artificial Sequence: Synthetic oligonucleotide
  Antisense strand to SEQ ID NO: 889254
uacucuccuggucacuugc

SEQ ID NO: 889256 - RNA, 19 nt, Artificial Sequence
  Description of Artificial Sequence: Synthetic oligonucleotide
  Sense strand starting at position 3208 of SEQ ID NO: 588783
ugcaguuauccaggcaaga

SEQ ID NO: 889257 - RNA, 19 nt, Artificial Sequence
  Description of Artificial Sequence: Synthetic oligonucleotide
  Antisense strand to SEQ ID NO: 889256
ucuugccuggauaacugca

SEQ ID NO: 889258 - RNA, 19 nt, Artificial Sequence
  Description of Artificial Sequence: Synthetic oligonucleotide
  Sense strand starting at position 3469 of SEQ ID NO: 588783
aucugugaugccuauguga

SEQ ID NO: 889259 - RNA, 19 nt, Artificial Sequence
  Description of Artificial Sequence: Synthetic oligonucleotide
  Antisense strand to SEQ ID NO: 889258
ucacauaggcaucacagau

SEQ ID NO: 889260 - RNA, 19 nt, Artificial Sequence
  Description of Artificial Sequence: Synthetic oligonucleotide
  Sense strand starting at position 3471 of SEQ ID NO: 588783
cugugaugccuaugugaaa

SEQ ID NO: 889261 - RNA, 19 nt, Artificial Sequence
  Description of Artificial Sequence: Synthetic oligonucleotide
  Antisense strand to SEQ ID NO: 889260
uuucacauaggcaucacag

SEQ ID NO: 889262 - RNA, 19 nt, Artificial Sequence
  Description of Artificial Sequence: Synthetic oligonucleotide
  Sense strand starting at position 3515 of SEQ ID NO: 588783
cccaaaggucacugcgaaa

SEQ ID NO: 889263 - RNA, 19 nt, Artificial Sequence
  Description of Artificial Sequence: Synthetic oligonucleotide
  Antisense strand to SEQ ID NO: 889262
uuucgcagugaccuuuggg

SEQ ID NO: 889264 - RNA, 19 nt, Artificial Sequence
  Description of Artificial Sequence: Synthetic oligonucleotide
  Sense strand starting at position 3605 of SEQ ID NO: 588783
ugaugauauugacuccauc

SEQ ID NO: 889265 - RNA, 19 nt, Artificial Sequence
  Description of Artificial Sequence: Synthetic oligonucleotide
  Antisense strand to SEQ ID NO: 889264
gauggagucaauaucauca

SEQ ID NO: 889266 - RNA, 19 nt, Artificial Sequence
  Description of Artificial Sequence: Synthetic oligonucleotide
  Sense strand starting at position 276 of SEQ ID NO: 588784
ccucuuggaaugugguaaa

SEQ ID NO: 889267 - RNA, 19 nt, Artificial Sequence
  Description of Artificial Sequence: Synthetic oligonucleotide
  Antisense strand to SEQ ID NO: 889266
uuuaccacauuccaagagg

SEQ ID NO: 889268 - RNA, 19 nt, Artificial Sequence
  Description of Artificial Sequence: Synthetic oligonucleotide
  Sense strand starting at position 343 of SEQ ID NO: 588784
gccugagcuuuauguucca

SEQ ID NO: 889269 - RNA, 19 nt, Artificial Sequence
  Description of Artificial Sequence: Synthetic oligonucleotide
  Antisense strand to SEQ ID NO: 889268
uggaacauaaagcucaggc

SEQ ID NO: 889270 - RNA, 19 nt, Artificial Sequence
  Description of Artificial Sequence: Synthetic oligonucleotide
  Sense strand starting at position 348 of SEQ ID NO: 588784
agcuuuauguuccagcuca

SEQ ID NO: 889271 - RNA, 19 nt, Artificial Sequence
  Description of Artificial Sequence: Synthetic oligonucleotide
  Antisense strand to SEQ ID NO: 889270
ugagcuggaacauaaagcu

SEQ ID NO: 889272 - RNA, 19 nt, Artificial Sequence
  Description of Artificial Sequence: Synthetic oligonucleotide
  Sense strand starting at position 385 of SEQ ID NO: 588784
gggucuaaaggucagcaaa

SEQ ID NO: 889273 - RNA, 19 nt, Artificial Sequence
  Description of Artificial Sequence: Synthetic oligonucleotide
  Antisense strand to SEQ ID NO: 889272
uuugcugaccuuuagaccc

SEQ ID NO: 889274 - RNA, 19 nt, Artificial Sequence
  Description of Artificial Sequence: Synthetic oligonucleotide
  Sense strand starting at position 387 of SEQ ID NO: 588784
gucuaaaggucagcaaaca

SEQ ID NO: 889275 - RNA, 19 nt, Artificial Sequence
  Description of Artificial Sequence: Synthetic oligonucleotide
  Antisense strand to SEQ ID NO: 889274
uguuugcugaccuuuagac

SEQ ID NO: 889276 - RNA, 19 nt, Artificial Sequence
  Description of Artificial Sequence: Synthetic oligonucleotide
  Sense strand starting at position 555 of SEQ ID NO: 588784
ggucuagucucaccucuua

SEQ ID NO: 889277 - RNA, 19 nt, Artificial Sequence
  Description of Artificial Sequence: Synthetic oligonucleotide
  Antisense strand to SEQ ID NO: 889276
uaagaggugagacuagacc

SEQ ID NO: 889278 - RNA, 19 nt, Artificial Sequence
  Description of Artificial Sequence: Synthetic oligonucleotide
  Sense strand starting at position 625 of SEQ ID NO: 588784
ugcccaucggcacaagaaa

SEQ ID NO: 889279 - RNA, 19 nt, Artificial Sequence
  Description of Artificial Sequence: Synthetic oligonucleotide
  Antisense strand to SEQ ID NO: 889278
uuucuugugccgaugggca

SEQ ID NO: 889280 - RNA, 19 nt, Artificial Sequence
  Description of Artificial Sequence: Synthetic oligonucleotide
  Sense strand starting at position 663 of SEQ ID NO: 588784
uccagcgauuugcucagua

SEQ ID NO: 889281 - RNA, 19 nt, Artificial Sequence
  Description of Artificial Sequence: Synthetic oligonucleotide
  Antisense strand to SEQ ID NO: 889280
uacugagcaaaucgcugga

SEQ ID NO: 889282 - RNA, 19 nt, Artificial Sequence
  Description of Artificial Sequence: Synthetic oligonucleotide
  Sense strand starting at position 667 of SEQ ID NO: 588784
gcgauuugcucaguaggca

SEQ ID NO: 889283 - RNA, 19 nt, Artificial Sequence
  Description of Artificial Sequence: Synthetic oligonucleotide
  Antisense strand to SEQ ID NO: 889282
ugccuacugagcaaaucgc

SEQ ID NO: 889284 - RNA, 19 nt, Artificial Sequence
  Description of Artificial Sequence: Synthetic oligonucleotide
  Sense strand starting at position 2231 of SEQ ID NO: 588784
gaaauagccgcgcaucuua

SEQ ID NO: 889285 - RNA, 19 nt, Artificial Sequence
  Description of Artificial Sequence: Synthetic oligonucleotide
  Antisense strand to SEQ ID NO: 889284
uaagaugcgcggcuauuuc

SEQ ID NO: 889286 - RNA, 19 nt, Artificial Sequence
  Description of Artificial Sequence: Synthetic oligonucleotide
  Sense strand starting at position 2293 of SEQ ID NO: 588784
aucccuaccugggauuuau

SEQ ID NO: 889287 - RNA, 19 nt, Artificial Sequence
  Description of Artificial Sequence: Synthetic oligonucleotide
  Antisense strand to SEQ ID NO: 889286
auaaaucccagguagggau

SEQ ID NO: 889288 - RNA, 19 nt, Artificial Sequence
  Description of Artificial Sequence: Synthetic oligonucleotide
  Sense strand starting at position 2407 of SEQ ID NO: 588784
agaagaaaccucggaguuc

SEQ ID NO: 889289 - RNA, 19 nt, Artificial Sequence
  Description of Artificial Sequence: Synthetic oligonucleotide
  Antisense strand to SEQ ID NO: 889288
gaacuccgagguuucuucu

SEQ ID NO: 889290 - RNA, 19 nt, Artificial Sequence
  Description of Artificial Sequence: Synthetic oligonucleotide
  Sense strand starting at position 2616 of SEQ ID NO: 588784
uagcuagagucgcagggau

SEQ ID NO: 889291 - RNA, 19 nt, Artificial Sequence
  Description of Artificial Sequence: Synthetic oligonucleotide
  Antisense strand to SEQ ID NO: 889290
aucccugcgacucuagcua

SEQ ID NO: 889292 - RNA, 19 nt, Artificial Sequence
  Description of Artificial Sequence: Synthetic oligonucleotide
  Sense strand starting at position 2618 of SEQ ID NO: 588784
gcuagagucgcagggauaa

SEQ ID NO: 889293 - RNA, 19 nt, Artificial Sequence
  Description of Artificial Sequence: Synthetic oligonucleotide
  Antisense strand to SEQ ID NO: 889292
uuaucccugcgacucuagc

SEQ ID NO: 889294 - RNA, 19 nt, Artificial Sequence
  Description of Artificial Sequence: Synthetic oligonucleotide
  Sense strand starting at position 2620 of SEQ ID NO: 588784
uagagucgcagggauaaua

SEQ ID NO: 889295 - RNA, 19 nt, Artificial Sequence
  Description of Artificial Sequence: Synthetic oligonucleotide
  Antisense strand to SEQ ID NO: 889294
uauuaucccugcgacucua

SEQ ID NO: 889296 - RNA, 19 nt, Artificial Sequence
  Description of Artificial Sequence: Synthetic oligonucleotide
  Sense strand starting at position 2654 of SEQ ID NO: 588784
ugaagccaggucugugaau

SEQ ID NO: 889297 - RNA, 19 nt, Artificial Sequence
  Description of Artificial Sequence: Synthetic oligonucleotide
  Antisense strand to SEQ ID NO: 889296
auucacagaccuggcuuca

SEQ ID NO: 889298 - RNA, 19 nt, Artificial Sequence
  Description of Artificial Sequence: Synthetic oligonucleotide
  Sense strand starting at position 2663 of SEQ ID NO: 588784
gucugugaaucccuggaaa

SEQ ID NO: 889299 - RNA, 19 nt, Artificial Sequence
  Description of Artificial Sequence: Synthetic oligonucleotide
  Antisense strand to SEQ ID NO: 889298
uuuccagggauucacagac

SEQ ID NO: 889300 - RNA, 19 nt, Artificial Sequence
  Description of Artificial Sequence: Synthetic oligonucleotide
  Sense strand starting at position 2665 of SEQ ID NO: 588784
cugugaaucccuggaaauc

SEQ ID NO: 889301 - RNA, 19 nt, Artificial Sequence
  Description of Artificial Sequence: Synthetic oligonucleotide
  Antisense strand to SEQ ID NO: 889300
gauuuccagggauucacag

SEQ ID NO: 889302 - RNA, 19 nt, Artificial Sequence
  Description of Artificial Sequence: Synthetic oligonucleotide
  Sense strand starting at position 2737 of SEQ ID NO: 588784
cugcccuacuccgaaagau

SEQ ID NO: 889303 - RNA, 19 nt, Artificial Sequence
  Description of Artificial Sequence: Synthetic oligonucleotide
  Antisense strand to SEQ ID NO: 889302
aucuuucggaguagggcag

SEQ ID NO: 889304 - RNA, 19 nt, Artificial Sequence
  Description of Artificial Sequence: Synthetic oligonucleotide
  Sense strand starting at position 2746 of SEQ ID NO: 588784
uccgaaagauucuuggaca

SEQ ID NO: 889305 - RNA, 19 nt, Artificial Sequence
  Description of Artificial Sequence: Synthetic oligonucleotide
  Antisense strand to SEQ ID NO: 889304
uguccaagaaucuuucgga

SEQ ID NO: 889306 - RNA, 19 nt, Artificial Sequence
  Description of Artificial Sequence: Synthetic oligonucleotide
  Sense strand starting at position 2747 of SEQ ID NO: 588784
ccgaaagauucuuggacaa

SEQ ID NO: 889307 - RNA, 19 nt, Artificial Sequence
  Description of Artificial Sequence: Synthetic oligonucleotide
  Antisense strand to SEQ ID NO: 889306
uuguccaagaaucuuucgg

SEQ ID NO: 889308 - RNA, 19 nt, Artificial Sequence
  Description of Artificial Sequence: Synthetic oligonucleotide
  Sense strand starting at position 2820 of SEQ ID NO: 588784
auggaaugauugguuauua

SEQ ID NO: 889309 - RNA, 19 nt, Artificial Sequence
  Description of Artificial Sequence: Synthetic oligonucleotide
  Antisense strand to SEQ ID NO: 889308
uaauaaccaaucauuccau

SEQ ID NO: 889310 - RNA, 19 nt, Artificial Sequence
  Description of Artificial Sequence: Synthetic oligonucleotide
  Sense strand starting at position 2821 of SEQ ID NO: 588784
uggaaugauugguuauuau

SEQ ID NO: 889311 - RNA, 19 nt, Artificial Sequence
  Description of Artificial Sequence: Synthetic oligonucleotide
  Antisense strand to SEQ ID NO: 889310
auaauaaccaaucauucca

SEQ ID NO: 889312 - RNA, 19 nt, Artificial Sequence
  Description of Artificial Sequence: Synthetic oligonucleotide
  Sense strand starting at position 2830 of SEQ ID NO: 588784
ugguuauuaugcuucccaa

SEQ ID NO: 889313 - RNA, 19 nt, Artificial Sequence
  Description of Artificial Sequence: Synthetic oligonucleotide
  Antisense strand to SEQ ID NO: 889312
uugggaagcauaauaacca

SEQ ID NO: 889314 - RNA, 19 nt, Artificial Sequence
  Description of Artificial Sequence: Synthetic oligonucleotide
  Sense strand starting at position 2967 of SEQ ID NO: 588784
aacgguaaucaucgaagaa

SEQ ID NO: 889315 - RNA, 19 nt, Artificial Sequence
  Description of Artificial Sequence: Synthetic oligonucleotide
  Antisense strand to SEQ ID NO: 889314
uucuucgaugauuaccguu

SEQ ID NO: 889316 - RNA, 19 nt, Artificial Sequence
  Description of Artificial Sequence: Synthetic oligonucleotide
  Sense strand starting at position 2979 of SEQ ID NO: 588784
cgaagaaggugcuuaauua

SEQ ID NO: 889317 - RNA, 19 nt, Artificial Sequence
  Description of Artificial Sequence: Synthetic oligonucleotide
  Antisense strand to SEQ ID NO: 889316
uaauuaagcaccuucuucg

SEQ ID NO: 889318 - RNA, 19 nt, Artificial Sequence
  Description of Artificial Sequence: Synthetic oligonucleotide
  Sense strand starting at position 3237 of SEQ ID NO: 588784
ugcagugagccucaaguga

SEQ ID NO: 889319 - RNA, 19 nt, Artificial Sequence
  Description of Artificial Sequence: Synthetic oligonucleotide
  Antisense strand to SEQ ID NO: 889318
ucacuugaggcucacugca

SEQ ID NO: 889320 - RNA, 19 nt, Artificial Sequence
  Description of Artificial Sequence: Synthetic oligonucleotide
  Sense strand starting at position 3586 of SEQ ID NO: 588784
accagcaagcuguguacau

SEQ ID NO: 889321 - RNA, 19 nt, Artificial Sequence
  Description of Artificial Sequence: Synthetic oligonucleotide
  Antisense strand to SEQ ID NO: 889320
auguacacagcuugcuggu

SEQ ID NO: 889322 - RNA, 19 nt, Artificial Sequence
  Description of Artificial Sequence: Synthetic oligonucleotide
  Sense strand starting at position 3590 of SEQ ID NO: 588784
gcaagcuguguacauguga

SEQ ID NO: 889323 - RNA, 19 nt, Artificial Sequence
  Description of Artificial Sequence: Synthetic oligonucleotide
  Antisense strand to SEQ ID NO: 889322
ucacauguacacagcuugc

SEQ ID NO: 889324 - RNA, 19 nt, Artificial Sequence
  Description of Artificial Sequence: Synthetic oligonucleotide
  Sense strand starting at position 3597 of SEQ ID NO: 588784
guguacaugugagcaaguu

SEQ ID NO: 889325 - RNA, 19 nt, Artificial Sequence
  Description of Artificial Sequence: Synthetic oligonucleotide
  Antisense strand to SEQ ID NO: 889324
aacuugcucacauguacac

SEQ ID NO: 889326 - RNA, 19 nt, Artificial Sequence
  Description of Artificial Sequence: Synthetic oligonucleotide
  Sense strand starting at position 3598 of SEQ ID NO: 588784
uguacaugugagcaaguua

SEQ ID NO: 889327 - RNA, 19 nt, Artificial Sequence
  Description of Artificial Sequence: Synthetic oligonucleotide
  Antisense strand to SEQ ID NO: 889326
uaacuugcucacauguaca

SEQ ID NO: 889328 - RNA, 19 nt, Artificial Sequence
  Description of Artificial Sequence: Synthetic oligonucleotide
  Sense strand starting at position 3609 of SEQ ID NO: 588784
gcaaguuacuuagcauauc

SEQ ID NO: 889329 - RNA, 19 nt, Artificial Sequence
  Description of Artificial Sequence: Synthetic oligonucleotide
  Antisense strand to SEQ ID NO: 889328
gauaugcuaaguaacuugc

SEQ ID NO: 889330 - RNA, 19 nt, Artificial Sequence
  Description of Artificial Sequence: Synthetic oligonucleotide
  Sense strand starting at position 3612 of SEQ ID NO: 588784
aguuacuuagcauaucuau

SEQ ID NO: 889331 - RNA, 19 nt, Artificial Sequence
  Description of Artificial Sequence: Synthetic oligonucleotide
  Antisense strand to SEQ ID NO: 889330
auagauaugcuaaguaacu

SEQ ID NO: 889332 - RNA, 19 nt, Artificial Sequence
  Description of Artificial Sequence: Synthetic oligonucleotide
  Sense strand starting at position 3956 of SEQ ID NO: 588784
ucgguuucuuuauugaaag

SEQ ID NO: 889333 - RNA, 19 nt, Artificial Sequence
  Description of Artificial Sequence: Synthetic oligonucleotide
  Antisense strand to SEQ ID NO: 889332
cuuucaauaaagaaaccga

SEQ ID NO: 889334 - RNA, 19 nt, Artificial Sequence
  Description of Artificial Sequence: Synthetic oligonucleotide
  Sense strand starting at position 3957 of SEQ ID NO: 588784
cgguuucuuuauugaaaga

SEQ ID NO: 889335 - RNA, 19 nt, Artificial Sequence
  Description of Artificial Sequence: Synthetic oligonucleotide
  Antisense strand to SEQ ID NO: 889334
ucuuucaauaaagaaaccg

SEQ ID NO: 889336 - RNA, 19 nt, Artificial Sequence
  Description of Artificial Sequence: Synthetic oligonucleotide
  Sense strand starting at position 3967 of SEQ ID NO: 588784
auugaaagaugagaaugau

SEQ ID NO: 889337 - RNA, 19 nt, Artificial Sequence
  Description of Artificial Sequence: Synthetic oligonucleotide
  Antisense strand to SEQ ID NO: 889336
aucauucucaucuuucaau

SEQ ID NO: 889338 - RNA, 19 nt, Artificial Sequence
  Description of Artificial Sequence: Synthetic oligonucleotide
  Sense strand starting at position 148 of SEQ ID NO: 588785
gggucaucaucuuccauau

SEQ ID NO: 889339 - RNA, 19 nt, Artificial Sequence
  Description of Artificial Sequence: Synthetic oligonucleotide
  Antisense strand to SEQ ID NO: 889338
auauggaagaugaugaccc

SEQ ID NO: 889340 - RNA, 19 nt, Artificial Sequence
  Description of Artificial Sequence: Synthetic oligonucleotide
  Sense strand starting at position 591 of SEQ ID NO: 588785
uuccaugguacguaacaga

SEQ ID NO: 889341 - RNA, 19 nt, Artificial Sequence
  Description of Artificial Sequence: Synthetic oligonucleotide
  Antisense strand to SEQ ID NO: 889340
ucuguuacguaccauggaa

SEQ ID NO: 889342 - RNA, 19 nt, Artificial Sequence
  Description of Artificial Sequence: Synthetic oligonucleotide
  Sense strand starting at position 638 of SEQ ID NO: 588785
uuuggaaauuaggugcaaa

SEQ ID NO: 889343 - RNA, 19 nt, Artificial Sequence
  Description of Artificial Sequence: Synthetic oligonucleotide
  Antisense strand to SEQ ID NO: 889342
uuugcaccuaauuuccaaa

SEQ ID NO: 889344 - RNA, 19 nt, Artificial Sequence
  Description of Artificial Sequence: Synthetic oligonucleotide
  Sense strand starting at position 779 of SEQ ID NO: 588785
auccuucuccaauggcaga

SEQ ID NO: 889345 - RNA, 19 nt, Artificial Sequence
  Description of Artificial Sequence: Synthetic oligonucleotide
  Antisense strand to SEQ ID NO: 889344
ucugccauuggagaaggau

SEQ ID NO: 889346 - RNA, 19 nt, Artificial Sequence
  Description of Artificial Sequence: Synthetic oligonucleotide
  Sense strand starting at position 792 of SEQ ID NO: 588785
ggcagauaaggccauuaau

SEQ ID NO: 889347 - RNA, 19 nt, Artificial Sequence
  Description of Artificial Sequence: Synthetic oligonucleotide
  Antisense strand to SEQ ID NO: 889346
auuaauggccuuaucugcc

SEQ ID NO: 889348 - RNA, 19 nt, Artificial Sequence
  Description of Artificial Sequence: Synthetic oligonucleotide
  Sense strand starting at position 842 of SEQ ID NO: 588785
gaagcaucugcaugauaug

SEQ ID NO: 889349 - RNA, 19 nt, Artificial Sequence
  Description of Artificial Sequence: Synthetic oligonucleotide
  Antisense strand to SEQ ID NO: 889348
cauaucaugcagaugcuuc

SEQ ID NO: 889350 - RNA, 19 nt, Artificial Sequence
  Description of Artificial Sequence: Synthetic oligonucleotide
  Sense strand starting at position 1121 of SEQ ID NO: 588785
gcagauuacuaagccuaga

SEQ ID NO: 889351 - RNA, 19 nt, Artificial Sequence
  Description of Artificial Sequence: Synthetic oligonucleotide
  Antisense strand to SEQ ID NO: 889350
ucuaggcuuaguaaucugc

SEQ ID NO: 889352 - RNA, 19 nt, Artificial Sequence
  Description of Artificial Sequence: Synthetic oligonucleotide
  Sense strand starting at position 1132 of SEQ ID NO: 588785
agccuagagucuccacaua

SEQ ID NO: 889353 - RNA, 19 nt, Artificial Sequence
  Description of Artificial Sequence: Synthetic oligonucleotide
  Antisense strand to SEQ ID NO: 889352
uauguggagacucuaggcu

SEQ ID NO: 889354 - RNA, 19 nt, Artificial Sequence
  Description of Artificial Sequence: Synthetic oligonucleotide
  Sense strand starting at position 1163 of SEQ ID NO: 588785
acuguagaguaucuucuaa

SEQ ID NO: 889355 - RNA, 19 nt, Artificial Sequence
  Description of Artificial Sequence: Synthetic oligonucleotide
  Antisense strand to SEQ ID NO: 889354
uuagaagauacucuacagu

SEQ ID NO: 889356 - RNA, 19 nt, Artificial Sequence
  Description of Artificial Sequence: Synthetic oligonucleotide
  Sense strand starting at position 1165 of SEQ ID NO: 588785
uguagaguaucuucuaaau

SEQ ID NO: 889357 - RNA, 19 nt, Artificial Sequence
  Description of Artificial Sequence: Synthetic oligonucleotide
  Antisense strand to SEQ ID NO: 889356
auuuagaagauacucuaca

SEQ ID NO: 889358 - RNA, 19 nt, Artificial Sequence
  Description of Artificial Sequence: Synthetic oligonucleotide
  Sense strand starting at position 1227 of SEQ ID NO: 588785
ggauucuagcacugaauca

SEQ ID NO: 889359 - RNA, 19 nt, Artificial Sequence
  Description of Artificial Sequence: Synthetic oligonucleotide
  Antisense strand to SEQ ID NO: 889358
ugauucagugcuagaaucc

SEQ ID NO: 889360 - RNA, 19 nt, Artificial Sequence
  Description of Artificial Sequence: Synthetic oligonucleotide
  Sense strand starting at position 1365 of SEQ ID NO: 588785
ggauaauguccugauugcu

SEQ ID NO: 889361 - RNA, 19 nt, Artificial Sequence
  Description of Artificial Sequence: Synthetic oligonucleotide
  Antisense strand to SEQ ID NO: 889360
agcaaucaggacauuaucc

SEQ ID NO: 889362 - RNA, 19 nt, Artificial Sequence
  Description of Artificial Sequence: Synthetic oligonucleotide
  Sense strand starting at position 1384 of SEQ ID NO: 588785
ggauguucuugaucuugaa

SEQ ID NO: 889363 - RNA, 19 nt, Artificial Sequence
  Description of Artificial Sequence: Synthetic oligonucleotide
  Antisense strand to SEQ ID NO: 889362
uucaagaucaagaacaucc

SEQ ID NO: 889364 - RNA, 19 nt, Artificial Sequence
  Description of Artificial Sequence: Synthetic oligonucleotide
  Sense strand starting at position 1388 of SEQ ID NO: 588785
guucuugaucuugaauaca

SEQ ID NO: 889365 - RNA, 19 nt, Artificial Sequence
  Description of Artificial Sequence: Synthetic oligonucleotide
  Antisense strand to SEQ ID NO: 889364
uguauucaagaucaagaac

SEQ ID NO: 889366 - RNA, 19 nt, Artificial Sequence
  Description of Artificial Sequence: Synthetic oligonucleotide
  Sense strand starting at position 1399 of SEQ ID NO: 588785
ugaauacacugguccaaca

SEQ ID NO: 889367 - RNA, 19 nt, Artificial Sequence
  Description of Artificial Sequence: Synthetic oligonucleotide
  Antisense strand to SEQ ID NO: 889366
uguuggaccaguguauuca

SEQ ID NO: 889368 - RNA, 19 nt, Artificial Sequence
  Description of Artificial Sequence: Synthetic oligonucleotide
  Sense strand starting at position 1412 of SEQ ID NO: 588785
ccaacaaccguuugaugau

SEQ ID NO: 889369 - RNA, 19 nt, Artificial Sequence
  Description of Artificial Sequence: Synthetic oligonucleotide
  Antisense strand to SEQ ID NO: 889368
aucaucaaacgguuguugg

SEQ ID NO: 889370 - RNA, 19 nt, Artificial Sequence
  Description of Artificial Sequence: Synthetic oligonucleotide
  Sense strand starting at position 1421 of SEQ ID NO: 588785
guuugaugauauccaaauc

SEQ ID NO: 889371 - RNA, 19 nt, Artificial Sequence
  Description of Artificial Sequence: Synthetic oligonucleotide
  Antisense strand to SEQ ID NO: 889370
gauuuggauaucaucaaac

SEQ ID NO: 889372 - RNA, 19 nt, Artificial Sequence
  Description of Artificial Sequence: Synthetic oligonucleotide
  Sense strand starting at position 1515 of SEQ ID NO: 588785
uuuggaguagauugaauca

SEQ ID NO: 889373 - RNA, 19 nt, Artificial Sequence
  Description of Artificial Sequence: Synthetic oligonucleotide
  Antisense strand to SEQ ID NO: 889372
ugauucaaucuacuccaaa

SEQ ID NO: 889374 - RNA, 19 nt, Artificial Sequence
  Description of Artificial Sequence: Synthetic oligonucleotide
  Sense strand starting at position 1638 of SEQ ID NO: 588785
auguguuucuaacuuaaca

SEQ ID NO: 889375 - RNA, 19 nt, Artificial Sequence
  Description of Artificial Sequence: Synthetic oligonucleotide
  Antisense strand to SEQ ID NO: 889374
uguuaaguuagaaacacau

SEQ ID NO: 889376 - RNA, 19 nt, Artificial Sequence
  Description of Artificial Sequence: Synthetic oligonucleotide
  Sense strand starting at position 1697 of SEQ ID NO: 588785
caggcagauuuggauaaac

SEQ ID NO: 889377 - RNA, 19 nt, Artificial Sequence
  Description of Artificial Sequence: Synthetic oligonucleotide
  Antisense strand to SEQ ID NO: 889376
guuuauccaaaucugccug

SEQ ID NO: 889378 - RNA, 19 nt, Artificial Sequence
  Description of Artificial Sequence: Synthetic oligonucleotide
  Sense strand starting at position 1808 of SEQ ID NO: 588785
agaggaagguagucuuaca

SEQ ID NO: 889379 - RNA, 19 nt, Artificial Sequence
  Description of Artificial Sequence: Synthetic oligonucleotide
  Antisense strand to SEQ ID NO: 889378
uguaagacuaccuuccucu

SEQ ID NO: 889380 - RNA, 19 nt, Artificial Sequence
  Description of Artificial Sequence: Synthetic oligonucleotide
  Sense strand starting at position 2490 of SEQ ID NO: 588785
ucccgaaguacugggaaua

SEQ ID NO: 889381 - RNA, 19 nt, Artificial Sequence
  Description of Artificial Sequence: Synthetic oligonucleotide
  Antisense strand to SEQ ID NO: 889380
uauucccaguacuucggga

SEQ ID NO: 889382 - RNA, 19 nt, Artificial Sequence
  Description of Artificial Sequence: Synthetic oligonucleotide
  Sense strand starting at position 2521 of SEQ ID NO: 588785
acugcuucuggucagauua

SEQ ID NO: 889383 - RNA, 19 nt, Artificial Sequence
  Description of Artificial Sequence: Synthetic oligonucleotide
  Antisense strand to SEQ ID NO: 889382
uaaucugaccagaagcagu

SEQ ID NO: 889384 - RNA, 19 nt, Artificial Sequence
  Description of Artificial Sequence: Synthetic oligonucleotide
  Sense strand starting at position 2702 of SEQ ID NO: 588785
gaaauuagugguugccaga

SEQ ID NO: 889385 - RNA, 19 nt, Artificial Sequence
  Description of Artificial Sequence: Synthetic oligonucleotide
  Antisense strand to SEQ ID NO: 889384
ucuggcaaccacuaauuuc

SEQ ID NO: 889386 - RNA, 19 nt, Artificial Sequence
  Description of Artificial Sequence: Synthetic oligonucleotide
  Sense strand starting at position 2738 of SEQ ID NO: 588785
gauagagaaugacugcuau

SEQ ID NO: 889387 - RNA, 19 nt, Artificial Sequence
  Description of Artificial Sequence: Synthetic oligonucleotide
  Antisense strand to SEQ ID NO: 889386
auagcagucauucucuauc

SEQ ID NO: 889388 - RNA, 19 nt, Artificial Sequence
  Description of Artificial Sequence: Synthetic oligonucleotide
  Sense strand starting at position 2768 of SEQ ID NO: 588785
uuucuuucugagugaugaa

SEQ ID NO: 889389 - RNA, 19 nt, Artificial Sequence
  Description of Artificial Sequence: Synthetic oligonucleotide
  Antisense strand to SEQ ID NO: 889388
uucaucacucagaaagaaa

SEQ ID NO: 889390 - RNA, 19 nt, Artificial Sequence
  Description of Artificial Sequence: Synthetic oligonucleotide
  Sense strand starting at position 2838 of SEQ ID NO: 588785
accauugaguuguuaaauu

SEQ ID NO: 889391 - RNA, 19 nt, Artificial Sequence
  Description of Artificial Sequence: Synthetic oligonucleotide
  Antisense strand to SEQ ID NO: 889390
aauuuaacaacucaauggu

SEQ ID NO: 889392 - RNA, 19 nt, Artificial Sequence
  Description of Artificial Sequence: Synthetic oligonucleotide
  Sense strand starting at position 3006 of SEQ ID NO: 588785
uggccuguugguuauaaua

SEQ ID NO: 889393 - RNA, 19 nt, Artificial Sequence
  Description of Artificial Sequence: Synthetic oligonucleotide
  Antisense strand to SEQ ID NO: 889392
uauuauaaccaacaggcca

SEQ ID NO: 889394 - RNA, 19 nt, Artificial Sequence
  Description of Artificial Sequence: Synthetic oligonucleotide
  Sense strand starting at position 3042 of SEQ ID NO: 588785
cugaguaaaguaugguaga

SEQ ID NO: 889395 - RNA, 19 nt, Artificial Sequence
  Description of Artificial Sequence: Synthetic oligonucleotide
  Antisense strand to SEQ ID NO: 889394
ucuaccauacuuuacucag

SEQ ID NO: 889396 - RNA, 19 nt, Artificial Sequence
  Description of Artificial Sequence: Synthetic oligonucleotide
  Sense strand starting at position 3055 of SEQ ID NO: 588785
gguagaaagugaucugaac

SEQ ID NO: 889397 - RNA, 19 nt, Artificial Sequence
  Description of Artificial Sequence: Synthetic oligonucleotide
  Antisense strand to SEQ ID NO: 889396
guucagaucacuuucuacc

SEQ ID NO: 889398 - RNA, 19 nt, Artificial Sequence
  Description of Artificial Sequence: Synthetic oligonucleotide
  Sense strand starting at position 3101 of SEQ ID NO: 588785
uggccuugucacuaaauua

SEQ ID NO: 889399 - RNA, 19 nt, Artificial Sequence
  Description of Artificial Sequence: Synthetic oligonucleotide
  Antisense strand to SEQ ID NO: 889398
uaauuuagugacaaggcca

SEQ ID NO: 889400 - RNA, 19 nt, Artificial Sequence
  Description of Artificial Sequence: Synthetic oligonucleotide
  Sense strand starting at position 3124 of SEQ ID NO: 588785
uguauccuaggacaaguua

SEQ ID NO: 889401 - RNA, 19 nt, Artificial Sequence
  Description of Artificial Sequence: Synthetic oligonucleotide
  Antisense strand to SEQ ID NO: 889400
uaacuuguccuaggauaca

SEQ ID NO: 889402 - RNA, 19 nt, Artificial Sequence
  Description of Artificial Sequence: Synthetic oligonucleotide
  Sense strand starting at position 3185 of SEQ ID NO: 588785
ggaugcgguuaacuagaau

SEQ ID NO: 889403 - RNA, 19 nt, Artificial Sequence
  Description of Artificial Sequence: Synthetic oligonucleotide
  Antisense strand to SEQ ID NO: 889402
auucuaguuaaccgcaucc

SEQ ID NO: 889404 - RNA, 19 nt, Artificial Sequence
  Description of Artificial Sequence: Synthetic oligonucleotide
  Sense strand starting at position 3228 of SEQ ID NO: 588785
ugcugagguuauuccaaga

SEQ ID NO: 889405 - RNA, 19 nt, Artificial Sequence
  Description of Artificial Sequence: Synthetic oligonucleotide
  Antisense strand to SEQ ID NO: 889404
ucuuggaauaaccucagca

SEQ ID NO: 889406 - RNA, 19 nt, Artificial Sequence
  Description of Artificial Sequence: Synthetic oligonucleotide
  Sense strand starting at position 3474 of SEQ ID NO: 588785
ucacuauguuuggucagga

SEQ ID NO: 889407 - RNA, 19 nt, Artificial Sequence
  Description of Artificial Sequence: Synthetic oligonucleotide
  Antisense strand to SEQ ID NO: 889406
uccugaccaaacauaguga

SEQ ID NO: 889408 - RNA, 19 nt, Artificial Sequence
  Description of Artificial Sequence: Synthetic oligonucleotide
  Sense strand starting at position 3475 of SEQ ID NO: 588785
cacuauguuuggucaggau

SEQ ID NO: 889409 - RNA, 19 nt, Artificial Sequence
  Description of Artificial Sequence: Synthetic oligonucleotide
  Antisense strand to SEQ ID NO: 889408
auccugaccaaacauagug

SEQ ID NO: 889410 - RNA, 19 nt, Artificial Sequence
  Description of Artificial Sequence: Synthetic oligonucleotide
  Sense strand starting at position 3504 of SEQ ID NO: 588785
uguugaccucgugagagau

SEQ ID NO: 889411 - RNA, 19 nt, Artificial Sequence
  Description of Artificial Sequence: Synthetic oligonucleotide
  Antisense strand to SEQ ID NO: 889410
aucucucacgaggucaaca

SEQ ID NO: 889412 - RNA, 19 nt, Artificial Sequence
  Description of Artificial Sequence: Synthetic oligonucleotide
  Sense strand starting at position 3726 of SEQ ID NO: 588785
auacuaaauuuaggugaga

SEQ ID NO: 889413 - RNA, 19 nt, Artificial Sequence
  Description of Artificial Sequence: Synthetic oligonucleotide
  Antisense strand to SEQ ID NO: 889412
ucucaccuaaauuuaguau

SEQ ID NO: 889414 - RNA, 19 nt, Artificial Sequence
  Description of Artificial Sequence: Synthetic oligonucleotide
  Sense strand starting at position 3768 of SEQ ID NO: 588785
ggauuugccuaggaugaca

SEQ ID NO: 889415 - RNA, 19 nt, Artificial Sequence
  Description of Artificial Sequence: Synthetic oligonucleotide
  Antisense strand to SEQ ID NO: 889414
ugucauccuaggcaaaucc

SEQ ID NO: 889416 - RNA, 19 nt, Artificial Sequence
  Description of Artificial Sequence: Synthetic oligonucleotide
  Sense strand starting at position 3945 of SEQ ID NO: 588785
uguaaagugcugccgcaua

SEQ ID NO: 889417 - RNA, 19 nt, Artificial Sequence
  Description of Artificial Sequence: Synthetic oligonucleotide
  Antisense strand to SEQ ID NO: 889416
uaugcggcagcacuuuaca

SEQ ID NO: 889418 - RNA, 19 nt, Artificial Sequence
  Description of Artificial Sequence: Synthetic oligonucleotide
  Sense strand starting at position 16 of SEQ ID NO: 588786
ggugcucaaucccugauga

SEQ ID NO: 889419 - RNA, 19 nt, Artificial Sequence
  Description of Artificial Sequence: Synthetic oligonucleotide
  Antisense strand to SEQ ID NO: 889418
ucaucagggauugagcacc

SEQ ID NO: 889420 - RNA, 19 nt, Artificial Sequence
  Description of Artificial Sequence: Synthetic oligonucleotide
  Sense strand starting at position 17 of SEQ ID NO: 588786
gugcucaaucccugaugaa

SEQ ID NO: 889421 - RNA, 19 nt, Artificial Sequence
  Description of Artificial Sequence: Synthetic oligonucleotide
  Antisense strand to SEQ ID NO: 889420
uucaucagggauugagcac

SEQ ID NO: 889422 - RNA, 19 nt, Artificial Sequence
  Description of Artificial Sequence: Synthetic oligonucleotide
  Sense strand starting at position 18 of SEQ ID NO: 588786
ugcucaaucccugaugaau

SEQ ID NO: 889423 - RNA, 19 nt, Artificial Sequence
  Description of Artificial Sequence: Synthetic oligonucleotide
  Antisense strand to SEQ ID NO: 889422
auucaucagggauugagca

SEQ ID NO: 889424 - RNA, 19 nt, Artificial Sequence
  Description of Artificial Sequence: Synthetic oligonucleotide
  Sense strand starting at position 253 of SEQ ID NO: 588786
ggaacaagcgcucagaguu

SEQ ID NO: 889425 - RNA, 19 nt, Artificial Sequence
  Description of Artificial Sequence: Synthetic oligonucleotide
  Antisense strand to SEQ ID NO: 889424
aacucugagcgcuuguucc

SEQ ID NO: 889426 - RNA, 19 nt, Artificial Sequence
  Description of Artificial Sequence: Synthetic oligonucleotide
  Sense strand starting at position 483 of SEQ ID NO: 588786
gcucaaugucuuuauugga

SEQ ID NO: 889427 - RNA, 19 nt, Artificial Sequence
  Description of Artificial Sequence: Synthetic oligonucleotide
  Antisense strand to SEQ ID NO: 889426
uccaauaaagacauugagc

SEQ ID NO: 889428 - RNA, 19 nt, Artificial Sequence
  Description of Artificial Sequence: Synthetic oligonucleotide
  Sense strand starting at position 524 of SEQ ID NO: 588786
acaguaacugcuugcacaa

SEQ ID NO: 889429 - RNA, 19 nt, Artificial Sequence
  Description of Artificial Sequence: Synthetic oligonucleotide
  Antisense strand to SEQ ID NO: 889428
uugugcaagcaguuacugu

SEQ ID NO: 889430 - RNA, 19 nt, Artificial Sequence
  Description of Artificial Sequence: Synthetic oligonucleotide
  Sense strand starting at position 735 of SEQ ID NO: 588786
cuagaagcacuguagaguu

SEQ ID NO: 889431 - RNA, 19 nt, Artificial Sequence
  Description of Artificial Sequence: Synthetic oligonucleotide
  Antisense strand to SEQ ID NO: 889430
aacucuacagugcuucuag

SEQ ID NO: 889432 - RNA, 19 nt, Artificial Sequence
  Description of Artificial Sequence: Synthetic oligonucleotide
  Sense strand starting at position 914 of SEQ ID NO: 588786
augugaggccuaugaccuu

SEQ ID NO: 889433 - RNA, 19 nt, Artificial Sequence
  Description of Artificial Sequence: Synthetic oligonucleotide
  Antisense strand to SEQ ID NO: 889432
aaggucauaggccucacau

SEQ ID NO: 889434 - RNA, 19 nt, Artificial Sequence
  Description of Artificial Sequence: Synthetic oligonucleotide
  Sense strand starting at position 920 of SEQ ID NO: 588786
ggccuaugaccuuguguau

SEQ ID NO: 889435 - RNA, 19 nt, Artificial Sequence
  Description of Artificial Sequence: Synthetic oligonucleotide
  Antisense strand to SEQ ID NO: 889434
auacacaaggucauaggcc

SEQ ID NO: 889436 - RNA, 19 nt, Artificial Sequence
  Description of Artificial Sequence: Synthetic oligonucleotide
  Sense strand starting at position 927 of SEQ ID NO: 588786
gaccuuguguauucucuga

SEQ ID NO: 889437 - RNA, 19 nt, Artificial Sequence
  Description of Artificial Sequence: Synthetic oligonucleotide
  Antisense strand to SEQ ID NO: 889436
ucagagaauacacaagguc

SEQ ID NO: 889438 - RNA, 19 nt, Artificial Sequence
  Description of Artificial Sequence: Synthetic oligonucleotide
  Sense strand starting at position 931 of SEQ ID NO: 588786
uuguguauucucugaggau

SEQ ID NO: 889439 - RNA, 19 nt, Artificial Sequence
  Description of Artificial Sequence: Synthetic oligonucleotide
  Antisense strand to SEQ ID NO: 889438
auccucagagaauacacaa

SEQ ID NO: 889440 - RNA, 19 nt, Artificial Sequence
  Description of Artificial Sequence: Synthetic oligonucleotide
  Sense strand starting at position 993 of SEQ ID NO: 588786
ggcacugcugcaugagaaa

SEQ ID NO: 889441 - RNA, 19 nt, Artificial Sequence
  Description of Artificial Sequence: Synthetic oligonucleotide
  Antisense strand to SEQ ID NO: 889440
uuucucaugcagcagugcc

SEQ ID NO: 889442 - RNA, 19 nt, Artificial Sequence
  Description of Artificial Sequence: Synthetic oligonucleotide
  Sense strand starting at position 1083 of SEQ ID NO: 588786
ggagguaucaggcaaugca

SEQ ID NO: 889443 - RNA, 19 nt, Artificial Sequence
  Description of Artificial Sequence: Synthetic oligonucleotide
  Antisense strand to SEQ ID NO: 889442
ugcauugccugauaccucc

SEQ ID NO: 889444 - RNA, 19 nt, Artificial Sequence
  Description of Artificial Sequence: Synthetic oligonucleotide
  Sense strand starting at position 1154 of SEQ ID NO: 588786
ggguuuccuguuuacccaa

SEQ ID NO: 889445 - RNA, 19 nt, Artificial Sequence
  Description of Artificial Sequence: Synthetic oligonucleotide
  Antisense strand to SEQ ID NO: 889444
uuggguaaacaggaaaccc

SEQ ID NO: 889446 - RNA, 19 nt, Artificial Sequence
  Description of Artificial Sequence: Synthetic oligonucleotide
  Sense strand starting at position 1184 of SEQ ID NO: 588786
ugccuuaagcacugagaac

SEQ ID NO: 889447 - RNA, 19 nt, Artificial Sequence
  Description of Artificial Sequence: Synthetic oligonucleotide
  Antisense strand to SEQ ID NO: 889446
guucucagugcuuaaggca

SEQ ID NO: 889448 - RNA, 19 nt, Artificial Sequence
  Description of Artificial Sequence: Synthetic oligonucleotide
  Sense strand starting at position 1232 of SEQ ID NO: 588786
agaggagauuaugaacaua

SEQ ID NO: 889449 - RNA, 19 nt, Artificial Sequence
  Description of Artificial Sequence: Synthetic oligonucleotide
  Antisense strand to SEQ ID NO: 889448
uauguucauaaucuccucu

SEQ ID NO: 889450 - RNA, 19 nt, Artificial Sequence
  Description of Artificial Sequence: Synthetic oligonucleotide
  Sense strand starting at position 1350 of SEQ ID NO: 588786
gggccucuccucugaauca

SEQ ID NO: 889451 - RNA, 19 nt, Artificial Sequence
  Description of Artificial Sequence: Synthetic oligonucleotide
  Antisense strand to SEQ ID NO: 889450
ugauucagaggagaggccc

SEQ ID NO: 889452 - RNA, 19 nt, Artificial Sequence
  Description of Artificial Sequence: Synthetic oligonucleotide
  Sense strand starting at position 1547 of SEQ ID NO: 588786
cuaugauuccuaugaacug

SEQ ID NO: 889453 - RNA, 19 nt, Artificial Sequence
  Description of Artificial Sequence: Synthetic oligonucleotide
  Antisense strand to SEQ ID NO: 889452
caguucauaggaaucauag

SEQ ID NO: 889454 - RNA, 19 nt, Artificial Sequence
  Description of Artificial Sequence: Synthetic oligonucleotide
  Sense strand starting at position 1761 of SEQ ID NO: 588786
cugucuccaccagguauau

SEQ ID NO: 889455 - RNA, 19 nt, Artificial Sequence
  Description of Artificial Sequence: Synthetic oligonucleotide
  Antisense strand to SEQ ID NO: 889454
auauaccugguggagacag

SEQ ID NO: 889456 - RNA, 19 nt, Artificial Sequence
  Description of Artificial Sequence: Synthetic oligonucleotide
  Sense strand starting at position 1912 of SEQ ID NO: 588786
cuuagaaacugugcuaggu

SEQ ID NO: 889457 - RNA, 19 nt, Artificial Sequence
  Description of Artificial Sequence: Synthetic oligonucleotide
  Antisense strand to SEQ ID NO: 889456
accuagcacaguuucuaag

SEQ ID NO: 889458 - RNA, 19 nt, Artificial Sequence
  Description of Artificial Sequence: Synthetic oligonucleotide
  Sense strand starting at position 1916 of SEQ ID NO: 588786
gaaacugugcuagguuaga

SEQ ID NO: 889459 - RNA, 19 nt, Artificial Sequence
  Description of Artificial Sequence: Synthetic oligonucleotide
  Antisense strand to SEQ ID NO: 889458
ucuaaccuagcacaguuuc

SEQ ID NO: 889460 - RNA, 19 nt, Artificial Sequence
  Description of Artificial Sequence: Synthetic oligonucleotide
  Sense strand starting at position 2610 of SEQ ID NO: 588786
uucugugauuuccaaguuu

SEQ ID NO: 889461 - RNA, 19 nt, Artificial Sequence
  Description of Artificial Sequence: Synthetic oligonucleotide
  Antisense strand to SEQ ID NO: 889460
aaacuuggaaaucacagaa

SEQ ID NO: 889462 - RNA, 19 nt, Artificial Sequence
  Description of Artificial Sequence: Synthetic oligonucleotide
  Sense strand starting at position 2742 of SEQ ID NO: 588786
gaacucagugaauguucuu

SEQ ID NO: 889463 - RNA, 19 nt, Artificial Sequence
  Description of Artificial Sequence: Synthetic oligonucleotide
  Antisense strand to SEQ ID NO: 889462
aagaacauucacugaguuc

SEQ ID NO: 889464 - RNA, 19 nt, Artificial Sequence
  Description of Artificial Sequence: Synthetic oligonucleotide
  Sense strand starting at position 2826 of SEQ ID NO: 588786
ugagaaaugcugcacagau

SEQ ID NO: 889465 - RNA, 19 nt, Artificial Sequence
  Description of Artificial Sequence: Synthetic oligonucleotide
  Antisense strand to SEQ ID NO: 889464
aucugugcagcauuucuca

SEQ ID NO: 889466 - RNA, 19 nt, Artificial Sequence
  Description of Artificial Sequence: Synthetic oligonucleotide
  Sense strand starting at position 2850 of SEQ ID NO: 588786
caaguuauuucuggagcag

SEQ ID NO: 889467 - RNA, 19 nt, Artificial Sequence
  Description of Artificial Sequence: Synthetic oligonucleotide
  Antisense strand to SEQ ID NO: 889466
cugcuccagaaauaacuug

SEQ ID NO: 889468 - RNA, 19 nt, Artificial Sequence
  Description of Artificial Sequence: Synthetic oligonucleotide
  Sense strand starting at position 3150 of SEQ ID NO: 588786
ggugcuaagaguuagauau

SEQ ID NO: 889469 - RNA, 19 nt, Artificial Sequence
  Description of Artificial Sequence: Synthetic oligonucleotide
  Antisense strand to SEQ ID NO: 889468
auaucuaacucuuagcacc

SEQ ID NO: 889470 - RNA, 19 nt, Artificial Sequence
  Description of Artificial Sequence: Synthetic oligonucleotide
  Sense strand starting at position 3271 of SEQ ID NO: 588786
acagaaguaucccagauuc

SEQ ID NO: 889471 - RNA, 19 nt, Artificial Sequence
  Description of Artificial Sequence: Synthetic oligonucleotide
  Antisense strand to SEQ ID NO: 889470
gaaucugggauacuucugu

SEQ ID NO: 889472 - RNA, 19 nt, Artificial Sequence
  Description of Artificial Sequence: Synthetic oligonucleotide
  Sense strand starting at position 3488 of SEQ ID NO: 588786
ggugcugcaggcuaauaaa

SEQ ID NO: 889473 - RNA, 19 nt, Artificial Sequence
  Description of Artificial Sequence: Synthetic oligonucleotide
  Antisense strand to SEQ ID NO: 889472
uuuauuagccugcagcacc

SEQ ID NO: 889474 - RNA, 19 nt, Artificial Sequence
  Description of Artificial Sequence: Synthetic oligonucleotide
  Sense strand starting at position 3521 of SEQ ID NO: 588786
aggcucgacagucauugaa

SEQ ID NO: 889475 - RNA, 19 nt, Artificial Sequence
  Description of Artificial Sequence: Synthetic oligonucleotide
  Antisense strand to SEQ ID NO: 889474
uucaaugacugucgagccu

SEQ ID NO: 889476 - RNA, 19 nt, Artificial Sequence
  Description of Artificial Sequence: Synthetic oligonucleotide
  Sense strand starting at position 3523 of SEQ ID NO: 588786
gcucgacagucauugaauc

SEQ ID NO: 889477 - RNA, 19 nt, Artificial Sequence
  Description of Artificial Sequence: Synthetic oligonucleotide
  Antisense strand to SEQ ID NO: 889476
gauucaaugacugucgagc

SEQ ID NO: 889478 - RNA, 19 nt, Artificial Sequence
  Description of Artificial Sequence: Synthetic oligonucleotide
  Sense strand starting at position 3524 of SEQ ID NO: 588786
cucgacagucauugaaucu

SEQ ID NO: 889479 - RNA, 19 nt, Artificial Sequence
  Description of Artificial Sequence: Synthetic oligonucleotide
  Antisense strand to SEQ ID NO: 889478
agauucaaugacugucgag

SEQ ID NO: 889480 - RNA, 19 nt, Artificial Sequence
  Description of Artificial Sequence: Synthetic oligonucleotide
  Sense strand starting at position 3531 of SEQ ID NO: 588786
gucauugaaucuuuggaga

SEQ ID NO: 889481 - RNA, 19 nt, Artificial Sequence
  Description of Artificial Sequence: Synthetic oligonucleotide
  Antisense strand to SEQ ID NO: 889480
ucuccaaagauucaaugac

SEQ ID NO: 889482 - RNA, 19 nt, Artificial Sequence
  Description of Artificial Sequence: Synthetic oligonucleotide
  Sense strand starting at position 3547 of SEQ ID NO: 588786
agacucuauuuccaggaca

SEQ ID NO: 889483 - RNA, 19 nt, Artificial Sequence
  Description of Artificial Sequence: Synthetic oligonucleotide
  Antisense strand to SEQ ID NO: 889482
uguccuggaaauagagucu

SEQ ID NO: 889484 - RNA, 19 nt, Artificial Sequence
  Description of Artificial Sequence: Synthetic oligonucleotide
  Sense strand starting at position 3597 of SEQ ID NO: 588786
ccagauuucuaggaacaca

SEQ ID NO: 889485 - RNA, 19 nt, Artificial Sequence
  Description of Artificial Sequence: Synthetic oligonucleotide
  Antisense strand to SEQ ID NO: 889484
uguguuccuagaaaucugg

SEQ ID NO: 889486 - RNA, 19 nt, Artificial Sequence
  Description of Artificial Sequence: Synthetic oligonucleotide
  Sense strand starting at position 3624 of SEQ ID NO: 588786
cgaggucugcaucaagauu

SEQ ID NO: 889487 - RNA, 19 nt, Artificial Sequence
  Description of Artificial Sequence: Synthetic oligonucleotide
  Antisense strand to SEQ ID NO: 889486
aaucuugaugcagaccucg

SEQ ID NO: 889488 - RNA, 19 nt, Artificial Sequence
  Description of Artificial Sequence: Synthetic oligonucleotide
  Sense strand starting at position 3782 of SEQ ID NO: 588786
ggacgcuucucguuaaacu

SEQ ID NO: 889489 - RNA, 19 nt, Artificial Sequence
  Description of Artificial Sequence: Synthetic oligonucleotide
  Antisense strand to SEQ ID NO: 889488
aguuuaacgagaagcgucc

SEQ ID NO: 889490 - RNA, 19 nt, Artificial Sequence
  Description of Artificial Sequence: Synthetic oligonucleotide
  Sense strand starting at position 3783 of SEQ ID NO: 588786
gacgcuucucguuaaacuc

SEQ ID NO: 889491 - RNA, 19 nt, Artificial Sequence
  Description of Artificial Sequence: Synthetic oligonucleotide
  Antisense strand to SEQ ID NO: 889490
gaguuuaacgagaagcguc

SEQ ID NO: 889492 - RNA, 19 nt, Artificial Sequence
  Description of Artificial Sequence: Synthetic oligonucleotide
  Sense strand starting at position 3798 of SEQ ID NO: 588786
acucgaagcucguuagaaa

SEQ ID NO: 889493 - RNA, 19 nt, Artificial Sequence
  Description of Artificial Sequence: Synthetic oligonucleotide
  Antisense strand to SEQ ID NO: 889492
uuucuaacgagcuucgagu

SEQ ID NO: 889494 - RNA, 19 nt, Artificial Sequence
  Description of Artificial Sequence: Synthetic oligonucleotide
  Sense strand starting at position 3799 of SEQ ID NO: 588786
cucgaagcucguuagaaau

SEQ ID NO: 889495 - RNA, 19 nt, Artificial Sequence
  Description of Artificial Sequence: Synthetic oligonucleotide
  Antisense strand to SEQ ID NO: 889494
auuucuaacgagcuucgag

SEQ ID NO: 889496 - RNA, 19 nt, Artificial Sequence
  Description of Artificial Sequence: Synthetic oligonucleotide
  Sense strand starting at position 3805 of SEQ ID NO: 588786
gcucguuagaaaugacaca

SEQ ID NO: 889497 - RNA, 19 nt, Artificial Sequence
  Description of Artificial Sequence: Synthetic oligonucleotide
  Antisense strand to SEQ ID NO: 889496
ugugucauuucuaacgagc

SEQ ID NO: 889498 - RNA, 19 nt, Artificial Sequence
  Description of Artificial Sequence: Synthetic oligonucleotide
  Sense strand starting at position 183 of SEQ ID NO: 588787
ggaguacccuuuccaaagu

SEQ ID NO: 889499 - RNA, 19 nt, Artificial Sequence
  Description of Artificial Sequence: Synthetic oligonucleotide
  Antisense strand to SEQ ID NO: 889498
acuuuggaaaggguacucc

SEQ ID NO: 889500 - RNA, 19 nt, Artificial Sequence
  Description of Artificial Sequence: Synthetic oligonucleotide
  Sense strand starting at position 407 of SEQ ID NO: 588787
ucuugcuacugaucaaaug

SEQ ID NO: 889501 - RNA, 19 nt, Artificial Sequence
  Description of Artificial Sequence: Synthetic oligonucleotide
  Antisense strand to SEQ ID NO: 889500
cauuugaucaguagcaaga

SEQ ID NO: 889502 - RNA, 19 nt, Artificial Sequence
  Description of Artificial Sequence: Synthetic oligonucleotide
  Sense strand starting at position 451 of SEQ ID NO: 588787
gaggcaaagaccuggugaa

SEQ ID NO: 889503 - RNA, 19 nt, Artificial Sequence
  Description of Artificial Sequence: Synthetic oligonucleotide
  Antisense strand to SEQ ID NO: 889502
uucaccaggucuuugccuc

SEQ ID NO: 889504 - RNA, 19 nt, Artificial Sequence
  Description of Artificial Sequence: Synthetic oligonucleotide
  Sense strand starting at position 517 of SEQ ID NO: 588787
ugggucaauaacugugaua

SEQ ID NO: 889505 - RNA, 19 nt, Artificial Sequence
  Description of Artificial Sequence: Synthetic oligonucleotide
  Antisense strand to SEQ ID NO: 889504
uaucacaguuauugaccca

SEQ ID NO: 889506 - RNA, 19 nt, Artificial Sequence
  Description of Artificial Sequence: Synthetic oligonucleotide
  Sense strand starting at position 519 of SEQ ID NO: 588787
ggucaauaacugugauaaa

SEQ ID NO: 889507 - RNA, 19 nt, Artificial Sequence
  Description of Artificial Sequence: Synthetic oligonucleotide
  Antisense strand to SEQ ID NO: 889506
uuuaucacaguuauugacc

SEQ ID NO: 889508 - RNA, 19 nt, Artificial Sequence
  Description of Artificial Sequence: Synthetic oligonucleotide
  Sense strand starting at position 580 of SEQ ID NO: 588787
uauuaaagguccuugagcu

SEQ ID NO: 889509 - RNA, 19 nt, Artificial Sequence
  Description of Artificial Sequence: Synthetic oligonucleotide
  Antisense strand to SEQ ID NO: 889508
agcucaaggaccuuuaaua

SEQ ID NO: 889510 - RNA, 19 nt, Artificial Sequence
  Description of Artificial Sequence: Synthetic oligonucleotide
  Sense strand starting at position 588 of SEQ ID NO: 588787
guccuugagcuccaaaugu

SEQ ID NO: 889511 - RNA, 19 nt, Artificial Sequence
  Description of Artificial Sequence: Synthetic oligonucleotide
  Antisense strand to SEQ ID NO: 889510
acauuuggagcucaaggac

SEQ ID NO: 889512 - RNA, 19 nt, Artificial Sequence
  Description of Artificial Sequence: Synthetic oligonucleotide
  Sense strand starting at position 675 of SEQ ID NO: 588787
gagacagaguagguguuaa

SEQ ID NO: 889513 - RNA, 19 nt, Artificial Sequence
  Description of Artificial Sequence: Synthetic oligonucleotide
  Antisense strand to SEQ ID NO: 889512
uuaacaccuacucugucuc

SEQ ID NO: 889514 - RNA, 19 nt, Artificial Sequence
  Description of Artificial Sequence: Synthetic oligonucleotide
  Sense strand starting at position 715 of SEQ ID NO: 588787
cuggguguccaggauggau

SEQ ID NO: 889515 - RNA, 19 nt, Artificial Sequence
  Description of Artificial Sequence: Synthetic oligonucleotide
  Antisense strand to SEQ ID NO: 889514
auccauccuggacacccag

SEQ ID NO: 889516 - RNA, 19 nt, Artificial Sequence
  Description of Artificial Sequence: Synthetic oligonucleotide
  Sense strand starting at position 717 of SEQ ID NO: 588787
ggguguccaggauggauaa

SEQ ID NO: 889517 - RNA, 19 nt, Artificial Sequence
  Description of Artificial Sequence: Synthetic oligonucleotide
  Antisense strand to SEQ ID NO: 889516
uuauccauccuggacaccc

SEQ ID NO: 889518 - RNA, 19 nt, Artificial Sequence
  Description of Artificial Sequence: Synthetic oligonucleotide
  Sense strand starting at position 718 of SEQ ID NO: 588787
gguguccaggauggauaaa

SEQ ID NO: 889519 - RNA, 19 nt, Artificial Sequence
  Description of Artificial Sequence: Synthetic oligonucleotide
  Antisense strand to SEQ ID NO: 889518
uuuauccauccuggacacc

SEQ ID NO: 889520 - RNA, 19 nt, Artificial Sequence
  Description of Artificial Sequence: Synthetic oligonucleotide
  Sense strand starting at position 749 of SEQ ID NO: 588787
cagaaaguaccuugaaagu

SEQ ID NO: 889521 - RNA, 19 nt, Artificial Sequence
  Description of Artificial Sequence: Synthetic oligonucleotide
  Antisense strand to SEQ ID NO: 889520
acuuucaagguacuuucug

SEQ ID NO: 889522 - RNA, 19 nt, Artificial Sequence
  Description of Artificial Sequence: Synthetic oligonucleotide
  Sense strand starting at position 758 of SEQ ID NO: 588787
ccuugaaaguacuuuggaa

SEQ ID NO: 889523 - RNA, 19 nt, Artificial Sequence
  Description of Artificial Sequence: Synthetic oligonucleotide
  Antisense strand to SEQ ID NO: 889522
uuccaaaguacuuucaagg

SEQ ID NO: 889524 - RNA, 19 nt, Artificial Sequence
  Description of Artificial Sequence: Synthetic oligonucleotide
  Sense strand starting at position 760 of SEQ ID NO: 588787
uugaaaguacuuuggaacu

SEQ ID NO: 889525 - RNA, 19 nt, Artificial Sequence
  Description of Artificial Sequence: Synthetic oligonucleotide
  Antisense strand to SEQ ID NO: 889524
aguuccaaaguacuuucaa

SEQ ID NO: 889526 - RNA, 19 nt, Artificial Sequence
  Description of Artificial Sequence: Synthetic oligonucleotide
  Sense strand starting at position 864 of SEQ ID NO: 588787
aagcuuugaccugggauau

SEQ ID NO: 889527 - RNA, 19 nt, Artificial Sequence
  Description of Artificial Sequence: Synthetic oligonucleotide
  Antisense strand to SEQ ID NO: 889526
auaucccaggucaaagcuu

SEQ ID NO: 889528 - RNA, 19 nt, Artificial Sequence
  Description of Artificial Sequence: Synthetic oligonucleotide
  Sense strand starting at position 865 of SEQ ID NO: 588787
agcuuugaccugggauauu

SEQ ID NO: 889529 - RNA, 19 nt, Artificial Sequence
  Description of Artificial Sequence: Synthetic oligonucleotide
  Antisense strand to SEQ ID NO: 889528
aauaucccaggucaaagcu

SEQ ID NO: 889530 - RNA, 19 nt, Artificial Sequence
  Description of Artificial Sequence: Synthetic oligonucleotide
  Sense strand starting at position 971 of SEQ ID NO: 588787
cuccacauucuggguuuaa

SEQ ID NO: 889531 - RNA, 19 nt, Artificial Sequence
  Description of Artificial Sequence: Synthetic oligonucleotide
  Antisense strand to SEQ ID NO: 889530
uuaaacccagaauguggag

SEQ ID NO: 889532 - RNA, 19 nt, Artificial Sequence
  Description of Artificial Sequence: Synthetic oligonucleotide
  Sense strand starting at position 972 of SEQ ID NO: 588787
uccacauucuggguuuaag

SEQ ID NO: 889533 - RNA, 19 nt, Artificial Sequence
  Description of Artificial Sequence: Synthetic oligonucleotide
  Antisense strand to SEQ ID NO: 889532
cuuaaacccagaaugugga

SEQ ID NO: 889534 - RNA, 19 nt, Artificial Sequence
  Description of Artificial Sequence: Synthetic oligonucleotide
  Sense strand starting at position 1544 of SEQ ID NO: 588787
augaaacaucucgagcuga

SEQ ID NO: 889535 - RNA, 19 nt, Artificial Sequence
  Description of Artificial Sequence: Synthetic oligonucleotide
  Antisense strand to SEQ ID NO: 889534
ucagcucgagauguuucau

SEQ ID NO: 889536 - RNA, 19 nt, Artificial Sequence
  Description of Artificial Sequence: Synthetic oligonucleotide
  Sense strand starting at position 1741 of SEQ ID NO: 588787
ugcuucuuccuggaaagga

SEQ ID NO: 889537 - RNA, 19 nt, Artificial Sequence
  Description of Artificial Sequence: Synthetic oligonucleotide
  Antisense strand to SEQ ID NO: 889536
uccuuuccaggaagaagca

SEQ ID NO: 889538 - RNA, 19 nt, Artificial Sequence
  Description of Artificial Sequence: Synthetic oligonucleotide
  Sense strand starting at position 1880 of SEQ ID NO: 588787
cgucuuuccggagcagcaa

SEQ ID NO: 889539 - RNA, 19 nt, Artificial Sequence
  Description of Artificial Sequence: Synthetic oligonucleotide
  Antisense strand to SEQ ID NO: 889538
uugcugcuccggaaagacg

SEQ ID NO: 889540 - RNA, 19 nt, Artificial Sequence
  Description of Artificial Sequence: Synthetic oligonucleotide
  Sense strand starting at position 1925 of SEQ ID NO: 588787
gggauaucucuuggacauc

SEQ ID NO: 889541 - RNA, 19 nt, Artificial Sequence
  Description of Artificial Sequence: Synthetic oligonucleotide
  Antisense strand to SEQ ID NO: 889540
gauguccaagagauauccc

SEQ ID NO: 889542 - RNA, 19 nt, Artificial Sequence
  Description of Artificial Sequence: Synthetic oligonucleotide
  Sense strand starting at position 2059 of SEQ ID NO: 588787
gaagaaagggcuuguuauc

SEQ ID NO: 889543 - RNA, 19 nt, Artificial Sequence
  Description of Artificial Sequence: Synthetic oligonucleotide
  Antisense strand to SEQ ID NO: 889542
gauaacaagcccuuucuuc

SEQ ID NO: 889544 - RNA, 19 nt, Artificial Sequence
  Description of Artificial Sequence: Synthetic oligonucleotide
  Sense strand starting at position 2094 of SEQ ID NO: 588787
ucaggcauggucuauauua

SEQ ID NO: 889545 - RNA, 19 nt, Artificial Sequence
  Description of Artificial Sequence: Synthetic oligonucleotide
  Antisense strand to SEQ ID NO: 889544
uaauauagaccaugccuga

SEQ ID NO: 889546 - RNA, 19 nt, Artificial Sequence
  Description of Artificial Sequence: Synthetic oligonucleotide
  Sense strand starting at position 2096 of SEQ ID NO: 588787
aggcauggucuauauuaag

SEQ ID NO: 889547 - RNA, 19 nt, Artificial Sequence
  Description of Artificial Sequence: Synthetic oligonucleotide
  Antisense strand to SEQ ID NO: 889546
cuuaauauagaccaugccu

SEQ ID NO: 889548 - RNA, 19 nt, Artificial Sequence
  Description of Artificial Sequence: Synthetic oligonucleotide
  Sense strand starting at position 2167 of SEQ ID NO: 588787
cggcuugcaagaugaauuu

SEQ ID NO: 889549 - RNA, 19 nt, Artificial Sequence
  Description of Artificial Sequence: Synthetic oligonucleotide
  Antisense strand to SEQ ID NO: 889548
aaauucaucuugcaagccg

SEQ ID NO: 889550 - RNA, 19 nt, Artificial Sequence
  Description of Artificial Sequence: Synthetic oligonucleotide
  Sense strand starting at position 2406 of SEQ ID NO: 588787
cuguguuuccaagggaaac

SEQ ID NO: 889551 - RNA, 19 nt, Artificial Sequence
  Description of Artificial Sequence: Synthetic oligonucleotide
  Antisense strand to SEQ ID NO: 889550
guuucccuuggaaacacag

SEQ ID NO: 889552 - RNA, 19 nt, Artificial Sequence
  Description of Artificial Sequence: Synthetic oligonucleotide
  Sense strand starting at position 2407 of SEQ ID NO: 588787
uguguuuccaagggaaaca

SEQ ID NO: 889553 - RNA, 19 nt, Artificial Sequence
  Description of Artificial Sequence: Synthetic oligonucleotide
  Antisense strand to SEQ ID NO: 889552
uguuucccuuggaaacaca

SEQ ID NO: 889554 - RNA, 19 nt, Artificial Sequence
  Description of Artificial Sequence: Synthetic oligonucleotide
  Sense strand starting at position 2652 of SEQ ID NO: 588787
agacaaugucgagguggau

SEQ ID NO: 889555 - RNA, 19 nt, Artificial Sequence
  Description of Artificial Sequence: Synthetic oligonucleotide
  Antisense strand to SEQ ID NO: 889554
auccaccucgacauugucu

SEQ ID NO: 889556 - RNA, 19 nt, Artificial Sequence
  Description of Artificial Sequence: Synthetic oligonucleotide
  Sense strand starting at position 2735 of SEQ ID NO: 588787
agcauaauauggguaagaa

SEQ ID NO: 889557 - RNA, 19 nt, Artificial Sequence
  Description of Artificial Sequence: Synthetic oligonucleotide
  Antisense strand to SEQ ID NO: 889556
uucuuacccauauuaugcu

SEQ ID NO: 889558 - RNA, 19 nt, Artificial Sequence
  Description of Artificial Sequence: Synthetic oligonucleotide
  Sense strand starting at position 3085 of SEQ ID NO: 588787
aucuguuaacugggcauaa

SEQ ID NO: 889559 - RNA, 19 nt, Artificial Sequence
  Description of Artificial Sequence: Synthetic oligonucleotide
  Antisense strand to SEQ ID NO: 889558
uuaugcccaguuaacagau

SEQ ID NO: 889560 - RNA, 19 nt, Artificial Sequence
  Description of Artificial Sequence: Synthetic oligonucleotide
  Sense strand starting at position 3086 of SEQ ID NO: 588787
ucuguuaacugggcauaau

SEQ ID NO: 889561 - RNA, 19 nt, Artificial Sequence
  Description of Artificial Sequence: Synthetic oligonucleotide
  Antisense strand to SEQ ID NO: 889560
auuaugcccaguuaacaga

SEQ ID NO: 889562 - RNA, 19 nt, Artificial Sequence
  Description of Artificial Sequence: Synthetic oligonucleotide
  Sense strand starting at position 3087 of SEQ ID NO: 588787
cuguuaacugggcauaauu

SEQ ID NO: 889563 - RNA, 19 nt, Artificial Sequence
  Description of Artificial Sequence: Synthetic oligonucleotide
  Antisense strand to SEQ ID NO: 889562
aauuaugcccaguuaacag

SEQ ID NO: 889564 - RNA, 19 nt, Artificial Sequence
  Description of Artificial Sequence: Synthetic oligonucleotide
  Sense strand starting at position 3115 of SEQ ID NO: 588787
ccuccucagcuguaauaag

SEQ ID NO: 889565 - RNA, 19 nt, Artificial Sequence
  Description of Artificial Sequence: Synthetic oligonucleotide
  Antisense strand to SEQ ID NO: 889564
cuuauuacagcugaggagg

SEQ ID NO: 889566 - RNA, 19 nt, Artificial Sequence
  Description of Artificial Sequence: Synthetic oligonucleotide
  Sense strand starting at position 3184 of SEQ ID NO: 588787
ucaggaggucccuggugaa

SEQ ID NO: 889567 - RNA, 19 nt, Artificial Sequence
  Description of Artificial Sequence: Synthetic oligonucleotide
  Antisense strand to SEQ ID NO: 889566
uucaccagggaccuccuga

SEQ ID NO: 889568 - RNA, 19 nt, Artificial Sequence
  Description of Artificial Sequence: Synthetic oligonucleotide
  Sense strand starting at position 3188 of SEQ ID NO: 588787
gaggucccuggugaauauu

SEQ ID NO: 889569 - RNA, 19 nt, Artificial Sequence
  Description of Artificial Sequence: Synthetic oligonucleotide
  Antisense strand to SEQ ID NO: 889568
aauauucaccagggaccuc

SEQ ID NO: 889570 - RNA, 19 nt, Artificial Sequence
  Description of Artificial Sequence: Synthetic oligonucleotide
  Sense strand starting at position 3916 of SEQ ID NO: 588787
uacagaguuggaugguaca

SEQ ID NO: 889571 - RNA, 19 nt, Artificial Sequence
  Description of Artificial Sequence: Synthetic oligonucleotide
  Antisense strand to SEQ ID NO: 889570
uguaccauccaacucugua

SEQ ID NO: 889572 - RNA, 19 nt, Artificial Sequence
  Description of Artificial Sequence: Synthetic oligonucleotide
  Sense strand starting at position 3957 of SEQ ID NO: 588787
ggaguaauauuugggacaa

SEQ ID NO: 889573 - RNA, 19 nt, Artificial Sequence
  Description of Artificial Sequence: Synthetic oligonucleotide
  Antisense strand to SEQ ID NO: 889572
uugucccaaauauuacucc

SEQ ID NO: 889574 - RNA, 19 nt, Artificial Sequence
  Description of Artificial Sequence: Synthetic oligonucleotide
  Sense strand starting at position 3958 of SEQ ID NO: 588787
gaguaauauuugggacaac

SEQ ID NO: 889575 - RNA, 19 nt, Artificial Sequence
  Description of Artificial Sequence: Synthetic oligonucleotide
  Antisense strand to SEQ ID NO: 889574
guugucccaaauauuacuc

SEQ ID NO: 889576 - RNA, 19 nt, Artificial Sequence
  Description of Artificial Sequence: Synthetic oligonucleotide
  Sense strand starting at position 3959 of SEQ ID NO: 588787
aguaauauuugggacaaca

SEQ ID NO: 889577 - RNA, 19 nt, Artificial Sequence
  Description of Artificial Sequence: Synthetic oligonucleotide
  Antisense strand to SEQ ID NO: 889576
uguugucccaaauauuacu

SEQ ID NO: 889578 - RNA, 19 nt, Artificial Sequence
  Description of Artificial Sequence: Synthetic oligonucleotide
  Sense strand starting at position 4 of SEQ ID NO: 588788
aagaguauagguuguagca

SEQ ID NO: 889579 - RNA, 19 nt, Artificial Sequence
  Description of Artificial Sequence: Synthetic oligonucleotide
  Antisense strand to SEQ ID NO: 889578
ugcuacaaccuauacucuu

SEQ ID NO: 889580 - RNA, 19 nt, Artificial Sequence
  Description of Artificial Sequence: Synthetic oligonucleotide
  Sense strand starting at position 198 of SEQ ID NO: 588788
gagggcuuccaaugaacaa

SEQ ID NO: 889581 - RNA, 19 nt, Artificial Sequence
  Description of Artificial Sequence: Synthetic oligonucleotide
  Antisense strand to SEQ ID NO: 889580
uuguucauuggaagcccuc

SEQ ID NO: 889582 - RNA, 19 nt, Artificial Sequence
  Description of Artificial Sequence: Synthetic oligonucleotide
  Sense strand starting at position 225 of SEQ ID NO: 588788
acaaccuuccagggauacu

SEQ ID NO: 889583 - RNA, 19 nt, Artificial Sequence
  Description of Artificial Sequence: Synthetic oligonucleotide
  Antisense strand to SEQ ID NO: 889582
aguaucccuggaagguugu

SEQ ID NO: 889584 - RNA, 19 nt, Artificial Sequence
  Description of Artificial Sequence: Synthetic oligonucleotide
  Sense strand starting at position 378 of SEQ ID NO: 588788
agcacugaaauguguguau

SEQ ID NO: 889585 - RNA, 19 nt, Artificial Sequence
  Description of Artificial Sequence: Synthetic oligonucleotide
  Antisense strand to SEQ ID NO: 889584
auacacacauuucagugcu

SEQ ID NO: 889586 - RNA, 19 nt, Artificial Sequence
  Description of Artificial Sequence: Synthetic oligonucleotide
  Sense strand starting at position 542 of SEQ ID NO: 588788
gauaauuaaguccgugacu

SEQ ID NO: 889587 - RNA, 19 nt, Artificial Sequence
  Description of Artificial Sequence: Synthetic oligonucleotide
  Antisense strand to SEQ ID NO: 889586
agucacggacuuaauuauc

SEQ ID NO: 889588 - RNA, 19 nt, Artificial Sequence
  Description of Artificial Sequence: Synthetic oligonucleotide
  Sense strand starting at position 543 of SEQ ID NO: 588788
auaauuaaguccgugacuu

SEQ ID NO: 889589 - RNA, 19 nt, Artificial Sequence
  Description of Artificial Sequence: Synthetic oligonucleotide
  Antisense strand to SEQ ID NO: 889588
aagucacggacuuaauuau

SEQ ID NO: 889590 - RNA, 19 nt, Artificial Sequence
  Description of Artificial Sequence: Synthetic oligonucleotide
  Sense strand starting at position 544 of SEQ ID NO: 588788
uaauuaaguccgugacuug

SEQ ID NO: 889591 - RNA, 19 nt, Artificial Sequence
  Description of Artificial Sequence: Synthetic oligonucleotide
  Antisense strand to SEQ ID NO: 889590
caagucacggacuuaauua

SEQ ID NO: 889592 - RNA, 19 nt, Artificial Sequence
  Description of Artificial Sequence: Synthetic oligonucleotide
  Sense strand starting at position 545 of SEQ ID NO: 588788
aauuaaguccgugacuuga

SEQ ID NO: 889593 - RNA, 19 nt, Artificial Sequence
  Description of Artificial Sequence: Synthetic oligonucleotide
  Antisense strand to SEQ ID NO: 889592
ucaagucacggacuuaauu

SEQ ID NO: 889594 - RNA, 19 nt, Artificial Sequence
  Description of Artificial Sequence: Synthetic oligonucleotide
  Sense strand starting at position 547 of SEQ ID NO: 588788
uuaaguccgugacuugaca

SEQ ID NO: 889595 - RNA, 19 nt, Artificial Sequence
  Description of Artificial Sequence: Synthetic oligonucleotide
  Antisense strand to SEQ ID NO: 889594
ugucaagucacggacuuaa

SEQ ID NO: 889596 - RNA, 19 nt, Artificial Sequence
  Description of Artificial Sequence: Synthetic oligonucleotide
  Sense strand starting at position 551 of SEQ ID NO: 588788
guccgugacuugacacguu

SEQ ID NO: 889597 - RNA, 19 nt, Artificial Sequence
  Description of Artificial Sequence: Synthetic oligonucleotide
  Antisense strand to SEQ ID NO: 889596
aacgugucaagucacggac

SEQ ID NO: 889598 - RNA, 19 nt, Artificial Sequence
  Description of Artificial Sequence: Synthetic oligonucleotide
  Sense strand starting at position 564 of SEQ ID NO: 588788
cacguuauuucugucagag

SEQ ID NO: 889599 - RNA, 19 nt, Artificial Sequence
  Description of Artificial Sequence: Synthetic oligonucleotide
  Antisense strand to SEQ ID NO: 889598
cucugacagaaauaacgug

SEQ ID NO: 889600 - RNA, 19 nt, Artificial Sequence
  Description of Artificial Sequence: Synthetic oligonucleotide
  Sense strand starting at position 594 of SEQ ID NO: 588788
gagaauauacugugucauu

SEQ ID NO: 889601 - RNA, 19 nt, Artificial Sequence
  Description of Artificial Sequence: Synthetic oligonucleotide
  Antisense strand to SEQ ID NO: 889600
aaugacacaguauauucuc

SEQ ID NO: 889602 - RNA, 19 nt, Artificial Sequence
  Description of Artificial Sequence: Synthetic oligonucleotide
  Sense strand starting at position 699 of SEQ ID NO: 588788
cuuaacgucugucuaauuu

SEQ ID NO: 889603 - RNA, 19 nt, Artificial Sequence
  Description of Artificial Sequence: Synthetic oligonucleotide
  Antisense strand to SEQ ID NO: 889602
aaauuagacagacguuaag

SEQ ID NO: 889604 - RNA, 19 nt, Artificial Sequence
  Description of Artificial Sequence: Synthetic oligonucleotide
  Sense strand starting at position 2302 of SEQ ID NO: 588788
uaggauuccgaauggguua

SEQ ID NO: 889605 - RNA, 19 nt, Artificial Sequence
  Description of Artificial Sequence: Synthetic oligonucleotide
  Antisense strand to SEQ ID NO: 889604
uaacccauucggaauccua

SEQ ID NO: 889606 - RNA, 19 nt, Artificial Sequence
  Description of Artificial Sequence: Synthetic oligonucleotide
  Sense strand starting at position 2303 of SEQ ID NO: 588788
aggauuccgaauggguuaa

SEQ ID NO: 889607 - RNA, 19 nt, Artificial Sequence
  Description of Artificial Sequence: Synthetic oligonucleotide
  Antisense strand to SEQ ID NO: 889606
uuaacccauucggaauccu

SEQ ID NO: 889608 - RNA, 19 nt, Artificial Sequence
  Description of Artificial Sequence: Synthetic oligonucleotide
  Sense strand starting at position 2450 of SEQ ID NO: 588788
gugcgucuaacguuaaggu

SEQ ID NO: 889609 - RNA, 19 nt, Artificial Sequence
  Description of Artificial Sequence: Synthetic oligonucleotide
  Antisense strand to SEQ ID NO: 889608
accuuaacguuagacgcac

SEQ ID NO: 889610 - RNA, 19 nt, Artificial Sequence
  Description of Artificial Sequence: Synthetic oligonucleotide
  Sense strand starting at position 2569 of SEQ ID NO: 588788
ggcagacagcauuguuuaa

SEQ ID NO: 889611 - RNA, 19 nt, Artificial Sequence
  Description of Artificial Sequence: Synthetic oligonucleotide
  Antisense strand to SEQ ID NO: 889610
uuaaacaaugcugucugcc

SEQ ID NO: 889612 - RNA, 19 nt, Artificial Sequence
  Description of Artificial Sequence: Synthetic oligonucleotide
  Sense strand starting at position 2715 of SEQ ID NO: 588788
gcuuaauggauaugagauc

SEQ ID NO: 889613 - RNA, 19 nt, Artificial Sequence
  Description of Artificial Sequence: Synthetic oligonucleotide
  Antisense strand to SEQ ID NO: 889612
gaucucauauccauuaagc

SEQ ID NO: 889614 - RNA, 19 nt, Artificial Sequence
  Description of Artificial Sequence: Synthetic oligonucleotide
  Sense strand starting at position 2788 of SEQ ID NO: 588788
agacccucagucugucaua

SEQ ID NO: 889615 - RNA, 19 nt, Artificial Sequence
  Description of Artificial Sequence: Synthetic oligonucleotide
  Antisense strand to SEQ ID NO: 889614
uaugacagacugagggucu

SEQ ID NO: 889616 - RNA, 19 nt, Artificial Sequence
  Description of Artificial Sequence: Synthetic oligonucleotide
  Sense strand starting at position 2800 of SEQ ID NO: 588788
ugucauacggcuuauguaa

SEQ ID NO: 889617 - RNA, 19 nt, Artificial Sequence
  Description of Artificial Sequence: Synthetic oligonucleotide
  Antisense strand to SEQ ID NO: 889616
uuacauaagccguaugaca

SEQ ID NO: 889618 - RNA, 19 nt, Artificial Sequence
  Description of Artificial Sequence: Synthetic oligonucleotide
  Sense strand starting at position 2836 of SEQ ID NO: 588788
ucucauagccugugaagau

SEQ ID NO: 889619 - RNA, 19 nt, Artificial Sequence
  Description of Artificial Sequence: Synthetic oligonucleotide
  Antisense strand to SEQ ID NO: 889618
aucuucacaggcuaugaga

SEQ ID NO: 889620 - RNA, 19 nt, Artificial Sequence
  Description of Artificial Sequence: Synthetic oligonucleotide
  Sense strand starting at position 2840 of SEQ ID NO: 588788
auagccugugaagauauau

SEQ ID NO: 889621 - RNA, 19 nt, Artificial Sequence
  Description of Artificial Sequence: Synthetic oligonucleotide
  Antisense strand to SEQ ID NO: 889620
auauaucuucacaggcuau

SEQ ID NO: 889622 - RNA, 19 nt, Artificial Sequence
  Description of Artificial Sequence: Synthetic oligonucleotide
  Sense strand starting at position 2942 of SEQ ID NO: 588788
cuggauucucuuuaucguu

SEQ ID NO: 889623 - RNA, 19 nt, Artificial Sequence
  Description of Artificial Sequence: Synthetic oligonucleotide
  Antisense strand to SEQ ID NO: 889622
aacgauaaagagaauccag

SEQ ID NO: 889624 - RNA, 19 nt, Artificial Sequence
  Description of Artificial Sequence: Synthetic oligonucleotide
  Sense strand starting at position 2944 of SEQ ID NO: 588788
ggauucucuuuaucguuua

SEQ ID NO: 889625 - RNA, 19 nt, Artificial Sequence
  Description of Artificial Sequence: Synthetic oligonucleotide
  Antisense strand to SEQ ID NO: 889624
uaaacgauaaagagaaucc

SEQ ID NO: 889626 - RNA, 19 nt, Artificial Sequence
  Description of Artificial Sequence: Synthetic oligonucleotide
  Sense strand starting at position 2949 of SEQ ID NO: 588788
cucuuuaucguuuauuacu

SEQ ID NO: 889627 - RNA, 19 nt, Artificial Sequence
  Description of Artificial Sequence: Synthetic oligonucleotide
  Antisense strand to SEQ ID NO: 889626
aguaauaaacgauaaagag

SEQ ID NO: 889628 - RNA, 19 nt, Artificial Sequence
  Description of Artificial Sequence: Synthetic oligonucleotide
  Sense strand starting at position 3022 of SEQ ID NO: 588788
cuaggcuaguguucuuaaa

SEQ ID NO: 889629 - RNA, 19 nt, Artificial Sequence
  Description of Artificial Sequence: Synthetic oligonucleotide
  Antisense strand to SEQ ID NO: 889628
uuuaagaacacuagccuag

SEQ ID NO: 889630 - RNA, 19 nt, Artificial Sequence
  Description of Artificial Sequence: Synthetic oligonucleotide
  Sense strand starting at position 3024 of SEQ ID NO: 588788
aggcuaguguucuuaaaca

SEQ ID NO: 889631 - RNA, 19 nt, Artificial Sequence
  Description of Artificial Sequence: Synthetic oligonucleotide
  Antisense strand to SEQ ID NO: 889630
uguuuaagaacacuagccu

SEQ ID NO: 889632 - RNA, 19 nt, Artificial Sequence
  Description of Artificial Sequence: Synthetic oligonucleotide
  Sense strand starting at position 3179 of SEQ ID NO: 588788
gaggcauuccauuagaagu

SEQ ID NO: 889633 - RNA, 19 nt, Artificial Sequence
  Description of Artificial Sequence: Synthetic oligonucleotide
  Antisense strand to SEQ ID NO: 889632
acuucuaauggaaugccuc

SEQ ID NO: 889634 - RNA, 19 nt, Artificial Sequence
  Description of Artificial Sequence: Synthetic oligonucleotide
  Sense strand starting at position 3189 of SEQ ID NO: 588788
auuagaaguccuggucuua

SEQ ID NO: 889635 - RNA, 19 nt, Artificial Sequence
  Description of Artificial Sequence: Synthetic oligonucleotide
  Antisense strand to SEQ ID NO: 889634
uaagaccaggacuucuaau

SEQ ID NO: 889636 - RNA, 19 nt, Artificial Sequence
  Description of Artificial Sequence: Synthetic oligonucleotide
  Sense strand starting at position 3217 of SEQ ID NO: 588788
uugcuaagugaauauaguu

SEQ ID NO: 889637 - RNA, 19 nt, Artificial Sequence
  Description of Artificial Sequence: Synthetic oligonucleotide
  Antisense strand to SEQ ID NO: 889636
aacuauauucacuuagcaa

SEQ ID NO: 889638 - RNA, 19 nt, Artificial Sequence
  Description of Artificial Sequence: Synthetic oligonucleotide
  Sense strand starting at position 3223 of SEQ ID NO: 588788
agugaauauaguuguauac

SEQ ID NO: 889639 - RNA, 19 nt, Artificial Sequence
  Description of Artificial Sequence: Synthetic oligonucleotide
  Antisense strand to SEQ ID NO: 889638
guauacaacuauauucacu

SEQ ID NO: 889640 - RNA, 19 nt, Artificial Sequence
  Description of Artificial Sequence: Synthetic oligonucleotide
  Sense strand starting at position 3267 of SEQ ID NO: 588788
uuaucauuagugcaaugua

SEQ ID NO: 889641 - RNA, 19 nt, Artificial Sequence
  Description of Artificial Sequence: Synthetic oligonucleotide
  Antisense strand to SEQ ID NO: 889640
uacauugcacuaaugauaa

SEQ ID NO: 889642 - RNA, 19 nt, Artificial Sequence
  Description of Artificial Sequence: Synthetic oligonucleotide
  Sense strand starting at position 3279 of SEQ ID NO: 588788
caauguaaguuguuauuga

SEQ ID NO: 889643 - RNA, 19 nt, Artificial Sequence
  Description of Artificial Sequence: Synthetic oligonucleotide
  Antisense strand to SEQ ID NO: 889642
ucaauaacaacuuacauug

SEQ ID NO: 889644 - RNA, 19 nt, Artificial Sequence
  Description of Artificial Sequence: Synthetic oligonucleotide
  Sense strand starting at position 3304 of SEQ ID NO: 588788
gcuuaugugcuuuccuguu

SEQ ID NO: 889645 - RNA, 19 nt, Artificial Sequence
  Description of Artificial Sequence: Synthetic oligonucleotide
  Antisense strand to SEQ ID NO: 889644
aacaggaaagcacauaagc

SEQ ID NO: 889646 - RNA, 19 nt, Artificial Sequence
  Description of Artificial Sequence: Synthetic oligonucleotide
  Sense strand starting at position 3309 of SEQ ID NO: 588788
ugugcuuuccuguuuauuc

SEQ ID NO: 889647 - RNA, 19 nt, Artificial Sequence
  Description of Artificial Sequence: Synthetic oligonucleotide
  Antisense strand to SEQ ID NO: 889646
gaauaaacaggaaagcaca

SEQ ID NO: 889648 - RNA, 19 nt, Artificial Sequence
  Description of Artificial Sequence: Synthetic oligonucleotide
  Sense strand starting at position 3369 of SEQ ID NO: 588788
ugguaaugccuuuaaagcu

SEQ ID NO: 889649 - RNA, 19 nt, Artificial Sequence
  Description of Artificial Sequence: Synthetic oligonucleotide
  Antisense strand to SEQ ID NO: 889648
agcuuuaaaggcauuacca

SEQ ID NO: 889650 - RNA, 19 nt, Artificial Sequence
  Description of Artificial Sequence: Synthetic oligonucleotide
  Sense strand starting at position 3451 of SEQ ID NO: 588788
auggauaucuaugucuuua

SEQ ID NO: 889651 - RNA, 19 nt, Artificial Sequence
  Description of Artificial Sequence: Synthetic oligonucleotide
  Antisense strand to SEQ ID NO: 889650
uaaagacauagauauccau

SEQ ID NO: 889652 - RNA, 19 nt, Artificial Sequence
  Description of Artificial Sequence: Synthetic oligonucleotide
  Sense strand starting at position 3453 of SEQ ID NO: 588788
ggauaucuaugucuuuaaa

SEQ ID NO: 889653 - RNA, 19 nt, Artificial Sequence
  Description of Artificial Sequence: Synthetic oligonucleotide
  Antisense strand to SEQ ID NO: 889652
uuuaaagacauagauaucc

SEQ ID NO: 889654 - RNA, 19 nt, Artificial Sequence
  Description of Artificial Sequence: Synthetic oligonucleotide
  Sense strand starting at position 3581 of SEQ ID NO: 588788
gaauucuuauguucuguga

SEQ ID NO: 889655 - RNA, 19 nt, Artificial Sequence
  Description of Artificial Sequence: Synthetic oligonucleotide
  Antisense strand to SEQ ID NO: 889654
ucacagaacauaagaauuc

SEQ ID NO: 889656 - RNA, 19 nt, Artificial Sequence
  Description of Artificial Sequence: Synthetic oligonucleotide
  Sense strand starting at position 3649 of SEQ ID NO: 588788
cacgaauuggccuggcaca

SEQ ID NO: 889657 - RNA, 19 nt, Artificial Sequence
  Description of Artificial Sequence: Synthetic oligonucleotide
  Antisense strand to SEQ ID NO: 889656
ugugccaggccaauucgug

SEQ ID NO: 889658 - RNA, 19 nt, Artificial Sequence
  Description of Artificial Sequence: Synthetic oligonucleotide
  Sense strand starting at position 44 of SEQ ID NO: 588789
aguuauuucuuucugagcu

SEQ ID NO: 889659 - RNA, 19 nt, Artificial Sequence
  Description of Artificial Sequence: Synthetic oligonucleotide
  Antisense strand to SEQ ID NO: 889658
agcucagaaagaaauaacu

SEQ ID NO: 889660 - RNA, 19 nt, Artificial Sequence
  Description of Artificial Sequence: Synthetic oligonucleotide
  Sense strand starting at position 176 of SEQ ID NO: 588789
ugugucagaguucagaagu

SEQ ID NO: 889661 - RNA, 19 nt, Artificial Sequence
  Description of Artificial Sequence: Synthetic oligonucleotide
  Antisense strand to SEQ ID NO: 889660
acuucugaacucugacaca

SEQ ID NO: 889662 - RNA, 19 nt, Artificial Sequence
  Description of Artificial Sequence: Synthetic oligonucleotide
  Sense strand starting at position 306 of SEQ ID NO: 588789
cccuguaaagucuagcaca

SEQ ID NO: 889663 - RNA, 19 nt, Artificial Sequence
  Description of Artificial Sequence: Synthetic oligonucleotide
  Antisense strand to SEQ ID NO: 889662
ugugcuagacuuuacaggg

SEQ ID NO: 889664 - RNA, 19 nt, Artificial Sequence
  Description of Artificial Sequence: Synthetic oligonucleotide
  Sense strand starting at position 321 of SEQ ID NO: 588789
cacagcagucccuagguaa

SEQ ID NO: 889665 - RNA, 19 nt, Artificial Sequence
  Description of Artificial Sequence: Synthetic oligonucleotide
  Antisense strand to SEQ ID NO: 889664
uuaccuagggacugcugug

SEQ ID NO: 889666 - RNA, 19 nt, Artificial Sequence
  Description of Artificial Sequence: Synthetic oligonucleotide
  Sense strand starting at position 332 of SEQ ID NO: 588789
cuagguaauuguuuauuga

SEQ ID NO: 889667 - RNA, 19 nt, Artificial Sequence
  Description of Artificial Sequence: Synthetic oligonucleotide
  Antisense strand to SEQ ID NO: 889666
ucaauaaacaauuaccuag

SEQ ID NO: 889668 - RNA, 19 nt, Artificial Sequence
  Description of Artificial Sequence: Synthetic oligonucleotide
  Sense strand starting at position 490 of SEQ ID NO: 588789
uucuuaccuccugggagaa

SEQ ID NO: 889669 - RNA, 19 nt, Artificial Sequence
  Description of Artificial Sequence: Synthetic oligonucleotide
  Antisense strand to SEQ ID NO: 889668
uucucccaggagguaagaa

SEQ ID NO: 889670 - RNA, 19 nt, Artificial Sequence
  Description of Artificial Sequence: Synthetic oligonucleotide
  Sense strand starting at position 491 of SEQ ID NO: 588789
ucuuaccuccugggagaaa

SEQ ID NO: 889671 - RNA, 19 nt, Artificial Sequence
  Description of Artificial Sequence: Synthetic oligonucleotide
  Antisense strand to SEQ ID NO: 889670
uuucucccaggagguaaga

SEQ ID NO: 889672 - RNA, 19 nt, Artificial Sequence
  Description of Artificial Sequence: Synthetic oligonucleotide
  Sense strand starting at position 652 of SEQ ID NO: 588789
gagucagagcagugaacaa

SEQ ID NO: 889673 - RNA, 19 nt, Artificial Sequence
  Description of Artificial Sequence: Synthetic oligonucleotide
  Antisense strand to SEQ ID NO: 889672
uuguucacugcucugacuc

SEQ ID NO: 889674 - RNA, 19 nt, Artificial Sequence
  Description of Artificial Sequence: Synthetic oligonucleotide
  Sense strand starting at position 1338 of SEQ ID NO: 588789
uuccuagaauggguacaau

SEQ ID NO: 889675 - RNA, 19 nt, Artificial Sequence
  Description of Artificial Sequence: Synthetic oligonucleotide
  Antisense strand to SEQ ID NO: 889674
auuguacccauucuaggaa

SEQ ID NO: 889676 - RNA, 19 nt, Artificial Sequence
  Description of Artificial Sequence: Synthetic oligonucleotide
  Sense strand starting at position 1476 of SEQ ID NO: 588789
aaaugcuuugcguuugcaa

SEQ ID NO: 889677 - RNA, 19 nt, Artificial Sequence
  Description of Artificial Sequence: Synthetic oligonucleotide
  Antisense strand to SEQ ID NO: 889676
uugcaaacgcaaagcauuu

SEQ ID NO: 889678 - RNA, 19 nt, Artificial Sequence
  Description of Artificial Sequence: Synthetic oligonucleotide
  Sense strand starting at position 1477 of SEQ ID NO: 588789
aaugcuuugcguuugcaau

SEQ ID NO: 889679 - RNA, 19 nt, Artificial Sequence
  Description of Artificial Sequence: Synthetic oligonucleotide
  Antisense strand to SEQ ID NO: 889678
auugcaaacgcaaagcauu

SEQ ID NO: 889680 - RNA, 19 nt, Artificial Sequence
  Description of Artificial Sequence: Synthetic oligonucleotide
  Sense strand starting at position 1534 of SEQ ID NO: 588789
gguuacauuugucuuucca

SEQ ID NO: 889681 - RNA, 19 nt, Artificial Sequence
  Description of Artificial Sequence: Synthetic oligonucleotide
  Antisense strand to SEQ ID NO: 889680
uggaaagacaaauguaacc

SEQ ID NO: 889682 - RNA, 19 nt, Artificial Sequence
  Description of Artificial Sequence: Synthetic oligonucleotide
  Sense strand starting at position 1561 of SEQ ID NO: 588789
gcaauaacucuggaagcca

SEQ ID NO: 889683 - RNA, 19 nt, Artificial Sequence
  Description of Artificial Sequence: Synthetic oligonucleotide
  Antisense strand to SEQ ID NO: 889682
uggcuuccagaguuauugc

SEQ ID NO: 889684 - RNA, 19 nt, Artificial Sequence
  Description of Artificial Sequence: Synthetic oligonucleotide
  Sense strand starting at position 1671 of SEQ ID NO: 588789
cccgauuucuggcugcgaa

SEQ ID NO: 889685 - RNA, 19 nt, Artificial Sequence
  Description of Artificial Sequence: Synthetic oligonucleotide
  Antisense strand to SEQ ID NO: 889684
uucgcagccagaaaucggg

SEQ ID NO: 889686 - RNA, 19 nt, Artificial Sequence
  Description of Artificial Sequence: Synthetic oligonucleotide
  Sense strand starting at position 1674 of SEQ ID NO: 588789
gauuucuggcugcgaauuc

SEQ ID NO: 889687 - RNA, 19 nt, Artificial Sequence
  Description of Artificial Sequence: Synthetic oligonucleotide
  Antisense strand to SEQ ID NO: 889686
gaauucgcagccagaaauc

SEQ ID NO: 889688 - RNA, 19 nt, Artificial Sequence
  Description of Artificial Sequence: Synthetic oligonucleotide
  Sense strand starting at position 1702 of SEQ ID NO: 588789
aagggucauuacucggauu

SEQ ID NO: 889689 - RNA, 19 nt, Artificial Sequence
  Description of Artificial Sequence: Synthetic oligonucleotide
  Antisense strand to SEQ ID NO: 889688
aauccgaguaaugacccuu

SEQ ID NO: 889690 - RNA, 19 nt, Artificial Sequence
  Description of Artificial Sequence: Synthetic oligonucleotide
  Sense strand starting at position 2572 of SEQ ID NO: 588789
auaguauugucauuuacgu

SEQ ID NO: 889691 - RNA, 19 nt, Artificial Sequence
  Description of Artificial Sequence: Synthetic oligonucleotide
  Antisense strand to SEQ ID NO: 889690
acguaaaugacaauacuau

SEQ ID NO: 889692 - RNA, 19 nt, Artificial Sequence
  Description of Artificial Sequence: Synthetic oligonucleotide
  Sense strand starting at position 2574 of SEQ ID NO: 588789
aguauugucauuuacguuu

SEQ ID NO: 889693 - RNA, 19 nt, Artificial Sequence
  Description of Artificial Sequence: Synthetic oligonucleotide
  Antisense strand to SEQ ID NO: 889692
aaacguaaaugacaauacu

SEQ ID NO: 889694 - RNA, 19 nt, Artificial Sequence
  Description of Artificial Sequence: Synthetic oligonucleotide
  Sense strand starting at position 2602 of SEQ ID NO: 588789
gacggaaguccugagaguu

SEQ ID NO: 889695 - RNA, 19 nt, Artificial Sequence
  Description of Artificial Sequence: Synthetic oligonucleotide
  Antisense strand to SEQ ID NO: 889694
aacucucaggacuuccguc

SEQ ID NO: 889696 - RNA, 19 nt, Artificial Sequence
  Description of Artificial Sequence: Synthetic oligonucleotide
  Sense strand starting at position 2656 of SEQ ID NO: 588789
gaaccaagacucggaguuu

SEQ ID NO: 889697 - RNA, 19 nt, Artificial Sequence
  Description of Artificial Sequence: Synthetic oligonucleotide
  Antisense strand to SEQ ID NO: 889696
aaacuccgagucuugguuc

SEQ ID NO: 889698 - RNA, 19 nt, Artificial Sequence
  Description of Artificial Sequence: Synthetic oligonucleotide
  Sense strand starting at position 2732 of SEQ ID NO: 588789
uuuggaaagcuuuauaguu

SEQ ID NO: 889699 - RNA, 19 nt, Artificial Sequence
  Description of Artificial Sequence: Synthetic oligonucleotide
  Antisense strand to SEQ ID NO: 889698
aacuauaaagcuuuccaaa

SEQ ID NO: 889700 - RNA, 19 nt, Artificial Sequence
  Description of Artificial Sequence: Synthetic oligonucleotide
  Sense strand starting at position 2737 of SEQ ID NO: 588789
aaagcuuuauaguuggaaa

SEQ ID NO: 889701 - RNA, 19 nt, Artificial Sequence
  Description of Artificial Sequence: Synthetic oligonucleotide
  Antisense strand to SEQ ID NO: 889700
uuuccaacuauaaagcuuu

SEQ ID NO: 889702 - RNA, 19 nt, Artificial Sequence
  Description of Artificial Sequence: Synthetic oligonucleotide
  Sense strand starting at position 2739 of SEQ ID NO: 588789
agcuuuauaguuggaaaga

SEQ ID NO: 889703 - RNA, 19 nt, Artificial Sequence
  Description of Artificial Sequence: Synthetic oligonucleotide
  Antisense strand to SEQ ID NO: 889702
ucuuuccaacuauaaagcu

SEQ ID NO: 889704 - RNA, 19 nt, Artificial Sequence
  Description of Artificial Sequence: Synthetic oligonucleotide
  Sense strand starting at position 2831 of SEQ ID NO: 588789
ucacaagucagugguagag

SEQ ID NO: 889705 - RNA, 19 nt, Artificial Sequence
  Description of Artificial Sequence: Synthetic oligonucleotide
  Antisense strand to SEQ ID NO: 889704
cucuaccacugacuuguga

SEQ ID NO: 889706 - RNA, 19 nt, Artificial Sequence
  Description of Artificial Sequence: Synthetic oligonucleotide
  Sense strand starting at position 2868 of SEQ ID NO: 588789
gaauacgugugauuaugaa

SEQ ID NO: 889707 - RNA, 19 nt, Artificial Sequence
  Description of Artificial Sequence: Synthetic oligonucleotide
  Antisense strand to SEQ ID NO: 889706
uucauaaucacacguauuc

SEQ ID NO: 889708 - RNA, 19 nt, Artificial Sequence
  Description of Artificial Sequence: Synthetic oligonucleotide
  Sense strand starting at position 2909 of SEQ ID NO: 588789
gugauaagguaggcauacu

SEQ ID NO: 889709 - RNA, 19 nt, Artificial Sequence
  Description of Artificial Sequence: Synthetic oligonucleotide
  Antisense strand to SEQ ID NO: 889708
aguaugccuaccuuaucac

SEQ ID NO: 889710 - RNA, 19 nt, Artificial Sequence
  Description of Artificial Sequence: Synthetic oligonucleotide
  Sense strand starting at position 3188 of SEQ ID NO: 588789
ucugguuuacccuggauaa

SEQ ID NO: 889711 - RNA, 19 nt, Artificial Sequence
  Description of Artificial Sequence: Synthetic oligonucleotide
  Antisense strand to SEQ ID NO: 889710
uuauccaggguaaaccaga

SEQ ID NO: 889712 - RNA, 19 nt, Artificial Sequence
  Description of Artificial Sequence: Synthetic oligonucleotide
  Sense strand starting at position 3189 of SEQ ID NO: 588789
cugguuuacccuggauaag

SEQ ID NO: 889713 - RNA, 19 nt, Artificial Sequence
  Description of Artificial Sequence: Synthetic oligonucleotide
  Antisense strand to SEQ ID NO: 889712
cuuauccaggguaaaccag

SEQ ID NO: 889714 - RNA, 19 nt, Artificial Sequence
  Description of Artificial Sequence: Synthetic oligonucleotide
  Sense strand starting at position 3405 of SEQ ID NO: 588789
aagugcuaugaugaaguaa

SEQ ID NO: 889715 - RNA, 19 nt, Artificial Sequence
  Description of Artificial Sequence: Synthetic oligonucleotide
  Antisense strand to SEQ ID NO: 889714
uuacuucaucauagcacuu

SEQ ID NO: 889716 - RNA, 19 nt, Artificial Sequence
  Description of Artificial Sequence: Synthetic oligonucleotide
  Sense strand starting at position 3427 of SEQ ID NO: 588789
gugcuaugaaagcagacua

SEQ ID NO: 889717 - RNA, 19 nt, Artificial Sequence
  Description of Artificial Sequence: Synthetic oligonucleotide
  Antisense strand to SEQ ID NO: 889716
uagucugcuuucauagcac

SEQ ID NO: 889718 - RNA, 19 nt, Artificial Sequence
  Description of Artificial Sequence: Synthetic oligonucleotide
  Sense strand starting at position 3498 of SEQ ID NO: 588789
ugaggaagugaugguuaag

SEQ ID NO: 889719 - RNA, 19 nt, Artificial Sequence
  Description of Artificial Sequence: Synthetic oligonucleotide
  Antisense strand to SEQ ID NO: 889718
cuuaaccaucacuuccuca

SEQ ID NO: 889720 - RNA, 19 nt, Artificial Sequence
  Description of Artificial Sequence: Synthetic oligonucleotide
  Sense strand starting at position 3504 of SEQ ID NO: 588789
agugaugguuaagcugaaa

SEQ ID NO: 889721 - RNA, 19 nt, Artificial Sequence
  Description of Artificial Sequence: Synthetic oligonucleotide
  Antisense strand to SEQ ID NO: 889720
uuucagcuuaaccaucacu

SEQ ID NO: 889722 - RNA, 19 nt, Artificial Sequence
  Description of Artificial Sequence: Synthetic oligonucleotide
  Sense strand starting at position 3507 of SEQ ID NO: 588789
gaugguuaagcugaaaucu

SEQ ID NO: 889723 - RNA, 19 nt, Artificial Sequence
  Description of Artificial Sequence: Synthetic oligonucleotide
  Antisense strand to SEQ ID NO: 889722
agauuucagcuuaaccauc

SEQ ID NO: 889724 - RNA, 19 nt, Artificial Sequence
  Description of Artificial Sequence: Synthetic oligonucleotide
  Sense strand starting at position 3663 of SEQ ID NO: 588789
uggugauuaucacucuuua

SEQ ID NO: 889725 - RNA, 19 nt, Artificial Sequence
  Description of Artificial Sequence: Synthetic oligonucleotide
  Antisense strand to SEQ ID NO: 889724
uaaagagugauaaucacca

SEQ ID NO: 889726 - RNA, 19 nt, Artificial Sequence
  Description of Artificial Sequence: Synthetic oligonucleotide
  Sense strand starting at position 3691 of SEQ ID NO: 588789
accaguuaagaugguacau

SEQ ID NO: 889727 - RNA, 19 nt, Artificial Sequence
  Description of Artificial Sequence: Synthetic oligonucleotide
  Antisense strand to SEQ ID NO: 889726
auguaccaucuuaacuggu

SEQ ID NO: 889728 - RNA, 19 nt, Artificial Sequence
  Description of Artificial Sequence: Synthetic oligonucleotide
  Sense strand starting at position 3752 of SEQ ID NO: 588789
cauagaagugcuuauguua

SEQ ID NO: 889729 - RNA, 19 nt, Artificial Sequence
  Description of Artificial Sequence: Synthetic oligonucleotide
  Antisense strand to SEQ ID NO: 889728
uaacauaagcacuucuaug

SEQ ID NO: 889730 - RNA, 19 nt, Artificial Sequence
  Description of Artificial Sequence: Synthetic oligonucleotide
  Sense strand starting at position 3777 of SEQ ID NO: 588789
aguauacagcugcauugaa

SEQ ID NO: 889731 - RNA, 19 nt, Artificial Sequence
  Description of Artificial Sequence: Synthetic oligonucleotide
  Antisense strand to SEQ ID NO: 889730
uucaaugcagcuguauacu

SEQ ID NO: 889732 - RNA, 19 nt, Artificial Sequence
  Description of Artificial Sequence: Synthetic oligonucleotide
  Sense strand starting at position 3857 of SEQ ID NO: 588789
augaaccuucugugaagaa

SEQ ID NO: 889733 - RNA, 19 nt, Artificial Sequence
  Description of Artificial Sequence: Synthetic oligonucleotide
  Antisense strand to SEQ ID NO: 889732
uucuucacagaagguucau

SEQ ID NO: 889734 - RNA, 19 nt, Artificial Sequence
  Description of Artificial Sequence: Synthetic oligonucleotide
  Sense strand starting at position 3877 of SEQ ID NO: 588789
agggaaaucguuugagacc

SEQ ID NO: 889735 - RNA, 19 nt, Artificial Sequence
  Description of Artificial Sequence: Synthetic oligonucleotide
  Antisense strand to SEQ ID NO: 889734
ggucucaaacgauuucccu

SEQ ID NO: 889736 - RNA, 19 nt, Artificial Sequence
  Description of Artificial Sequence: Synthetic oligonucleotide
  Sense strand starting at position 3886 of SEQ ID NO: 588789
guuugagacccucaacuuu

SEQ ID NO: 889737 - RNA, 19 nt, Artificial Sequence
  Description of Artificial Sequence: Synthetic oligonucleotide
  Antisense strand to SEQ ID NO: 889736
aaaguugagggucucaaac

SEQ ID NO: 889738 - RNA, 19 nt, Artificial Sequence
  Description of Artificial Sequence: Synthetic oligonucleotide
  Sense strand starting at position 147 of SEQ ID NO: 588790
agaagaaugcuuugccaaa

SEQ ID NO: 889739 - RNA, 19 nt, Artificial Sequence
  Description of Artificial Sequence: Synthetic oligonucleotide
  Antisense strand to SEQ ID NO: 889738
uuuggcaaagcauucuucu

SEQ ID NO: 889740 - RNA, 19 nt, Artificial Sequence
  Description of Artificial Sequence: Synthetic oligonucleotide
  Sense strand starting at position 210 of SEQ ID NO: 588790
aaagcagaguaugauuuaa

SEQ ID NO: 889741 - RNA, 19 nt, Artificial Sequence
  Description of Artificial Sequence: Synthetic oligonucleotide
  Antisense strand to SEQ ID NO: 889740
uuaaaucauacucugcuuu

SEQ ID NO: 889742 - RNA, 19 nt, Artificial Sequence
  Description of Artificial Sequence: Synthetic oligonucleotide
  Sense strand starting at position 320 of SEQ ID NO: 588790
aaugaacacgaguguaauu

SEQ ID NO: 889743 - RNA, 19 nt, Artificial Sequence
  Description of Artificial Sequence: Synthetic oligonucleotide
  Antisense strand to SEQ ID NO: 889742
aauuacacucguguucauu

SEQ ID NO: 889744 - RNA, 19 nt, Artificial Sequence
  Description of Artificial Sequence: Synthetic oligonucleotide
  Sense strand starting at position 322 of SEQ ID NO: 588790
ugaacacgaguguaauuaa

SEQ ID NO: 889745 - RNA, 19 nt, Artificial Sequence
  Description of Artificial Sequence: Synthetic oligonucleotide
  Antisense strand to SEQ ID NO: 889744
uuaauuacacucguguuca

SEQ ID NO: 889746 - RNA, 19 nt, Artificial Sequence
  Description of Artificial Sequence: Synthetic oligonucleotide
  Sense strand starting at position 325 of SEQ ID NO: 588790
acacgaguguaauuaaauc

SEQ ID NO: 889747 - RNA, 19 nt, Artificial Sequence
  Description of Artificial Sequence: Synthetic oligonucleotide
  Antisense strand to SEQ ID NO: 889746
gauuuaauuacacucgugu

SEQ ID NO: 889748 - RNA, 19 nt, Artificial Sequence
  Description of Artificial Sequence: Synthetic oligonucleotide
  Sense strand starting at position 385 of SEQ ID NO: 588790
uucuaaacguaacuagaau

SEQ ID NO: 889749 - RNA, 19 nt, Artificial Sequence
  Description of Artificial Sequence: Synthetic oligonucleotide
  Antisense strand to SEQ ID NO: 889748
auucuaguuacguuuagaa

SEQ ID NO: 889750 - RNA, 19 nt, Artificial Sequence
  Description of Artificial Sequence: Synthetic oligonucleotide
  Sense strand starting at position 391 of SEQ ID NO: 588790
acguaacuagaauauguuu

SEQ ID NO: 889751 - RNA, 19 nt, Artificial Sequence
  Description of Artificial Sequence: Synthetic oligonucleotide
  Antisense strand to SEQ ID NO: 889750
aaacauauucuaguuacgu

SEQ ID NO: 889752 - RNA, 19 nt, Artificial Sequence
  Description of Artificial Sequence: Synthetic oligonucleotide
  Sense strand starting at position 546 of SEQ ID NO: 588790
ggaaguaaacaacguaaga

SEQ ID NO: 889753 - RNA, 19 nt, Artificial Sequence
  Description of Artificial Sequence: Synthetic oligonucleotide
  Antisense strand to SEQ ID NO: 889752
ucuuacguuguuuacuucc

SEQ ID NO: 889754 - RNA, 19 nt, Artificial Sequence
  Description of Artificial Sequence: Synthetic oligonucleotide
  Sense strand starting at position 575 of SEQ ID NO: 588790
aagcuacaacagugguaua

SEQ ID NO: 889755 - RNA, 19 nt, Artificial Sequence
  Description of Artificial Sequence: Synthetic oligonucleotide
  Antisense strand to SEQ ID NO: 889754
uauaccacuguuguagcuu

SEQ ID NO: 889756 - RNA, 19 nt, Artificial Sequence
  Description of Artificial Sequence: Synthetic oligonucleotide
  Sense strand starting at position 704 of SEQ ID NO: 588790
ggcuaacauuuguuucuuu

SEQ ID NO: 889757 - RNA, 19 nt, Artificial Sequence
  Description of Artificial Sequence: Synthetic oligonucleotide
  Antisense strand to SEQ ID NO: 889756
aaagaaacaaauguuagcc

SEQ ID NO: 889758 - RNA, 19 nt, Artificial Sequence
  Description of Artificial Sequence: Synthetic oligonucleotide
  Sense strand starting at position 734 of SEQ ID NO: 588790
acuuuauaccacuguggua

SEQ ID NO: 889759 - RNA, 19 nt, Artificial Sequence
  Description of Artificial Sequence: Synthetic oligonucleotide
  Antisense strand to SEQ ID NO: 889758
uaccacagugguauaaagu

SEQ ID NO: 889760 - RNA, 19 nt, Artificial Sequence
  Description of Artificial Sequence: Synthetic oligonucleotide
  Sense strand starting at position 736 of SEQ ID NO: 588790
uuuauaccacugugguaua

SEQ ID NO: 889761 - RNA, 19 nt, Artificial Sequence
  Description of Artificial Sequence: Synthetic oligonucleotide
  Antisense strand to SEQ ID NO: 889760
uauaccacagugguauaaa

SEQ ID NO: 889762 - RNA, 19 nt, Artificial Sequence
  Description of Artificial Sequence: Synthetic oligonucleotide
  Sense strand starting at position 764 of SEQ ID NO: 588790
gcuuucucagguuaaccaa

SEQ ID NO: 889763 - RNA, 19 nt, Artificial Sequence
  Description of Artificial Sequence: Synthetic oligonucleotide
  Antisense strand to SEQ ID NO: 889762
uugguuaaccugagaaagc

SEQ ID NO: 889764 - RNA, 19 nt, Artificial Sequence
  Description of Artificial Sequence: Synthetic oligonucleotide
  Sense strand starting at position 1003 of SEQ ID NO: 588790
cagugauuacuugagucaa

SEQ ID NO: 889765 - RNA, 19 nt, Artificial Sequence
  Description of Artificial Sequence: Synthetic oligonucleotide
  Antisense strand to SEQ ID NO: 889764
uugacucaaguaaucacug

SEQ ID NO: 889766 - RNA, 19 nt, Artificial Sequence
  Description of Artificial Sequence: Synthetic oligonucleotide
  Sense strand starting at position 1005 of SEQ ID NO: 588790
gugauuacuugagucaauu

SEQ ID NO: 889767 - RNA, 19 nt, Artificial Sequence
  Description of Artificial Sequence: Synthetic oligonucleotide
  Antisense strand to SEQ ID NO: 889766
aauugacucaaguaaucac

SEQ ID NO: 889768 - RNA, 19 nt, Artificial Sequence
  Description of Artificial Sequence: Synthetic oligonucleotide
  Sense strand starting at position 1031 of SEQ ID NO: 588790
gaaggauuuaucugccggu

SEQ ID NO: 889769 - RNA, 19 nt, Artificial Sequence
  Description of Artificial Sequence: Synthetic oligonucleotide
  Antisense strand to SEQ ID NO: 889768
accggcagauaaauccuuc

SEQ ID NO: 889770 - RNA, 19 nt, Artificial Sequence
  Description of Artificial Sequence: Synthetic oligonucleotide
  Sense strand starting at position 1035 of SEQ ID NO: 588790
gauuuaucugccgguaucu

SEQ ID NO: 889771 - RNA, 19 nt, Artificial Sequence
  Description of Artificial Sequence: Synthetic oligonucleotide
  Antisense strand to SEQ ID NO: 889770
agauaccggcagauaaauc

SEQ ID NO: 889772 - RNA, 19 nt, Artificial Sequence
  Description of Artificial Sequence: Synthetic oligonucleotide
  Sense strand starting at position 1190 of SEQ ID NO: 588790
guggaagagucuccucaag

SEQ ID NO: 889773 - RNA, 19 nt, Artificial Sequence
  Description of Artificial Sequence: Synthetic oligonucleotide
  Antisense strand to SEQ ID NO: 889772
cuugaggagacucuuccac

SEQ ID NO: 889774 - RNA, 19 nt, Artificial Sequence
  Description of Artificial Sequence: Synthetic oligonucleotide
  Sense strand starting at position 1257 of SEQ ID NO: 588790
gcagaauuuccuggcugug

SEQ ID NO: 889775 - RNA, 19 nt, Artificial Sequence
  Description of Artificial Sequence: Synthetic oligonucleotide
  Antisense strand to SEQ ID NO: 889774
cacagccaggaaauucugc

SEQ ID NO: 889776 - RNA, 19 nt, Artificial Sequence
  Description of Artificial Sequence: Synthetic oligonucleotide
  Sense strand starting at position 1259 of SEQ ID NO: 588790
agaauuuccuggcuguguu

SEQ ID NO: 889777 - RNA, 19 nt, Artificial Sequence
  Description of Artificial Sequence: Synthetic oligonucleotide
  Antisense strand to SEQ ID NO: 889776
aacacagccaggaaauucu

SEQ ID NO: 889778 - RNA, 19 nt, Artificial Sequence
  Description of Artificial Sequence: Synthetic oligonucleotide
  Sense strand starting at position 1260 of SEQ ID NO: 588790
gaauuuccuggcuguguuu

SEQ ID NO: 889779 - RNA, 19 nt, Artificial Sequence
  Description of Artificial Sequence: Synthetic oligonucleotide
  Antisense strand to SEQ ID NO: 889778
aaacacagccaggaaauuc

SEQ ID NO: 889780 - RNA, 19 nt, Artificial Sequence
  Description of Artificial Sequence: Synthetic oligonucleotide
  Sense strand starting at position 1460 of SEQ ID NO: 588790
ggagaagacuugguuucga

SEQ ID NO: 889781 - RNA, 19 nt, Artificial Sequence
  Description of Artificial Sequence: Synthetic oligonucleotide
  Antisense strand to SEQ ID NO: 889780
ucgaaaccaagucuucucc

SEQ ID NO: 889782 - RNA, 19 nt, Artificial Sequence
  Description of Artificial Sequence: Synthetic oligonucleotide
  Sense strand starting at position 2106 of SEQ ID NO: 588790
cccacuuaacgcgagauua

SEQ ID NO: 889783 - RNA, 19 nt, Artificial Sequence
  Description of Artificial Sequence: Synthetic oligonucleotide
  Antisense strand to SEQ ID NO: 889782
uaaucucgcguuaaguggg

SEQ ID NO: 889784 - RNA, 19 nt, Artificial Sequence
  Description of Artificial Sequence: Synthetic oligonucleotide
  Sense strand starting at position 2293 of SEQ ID NO: 588790
augggaaauucccugcaca

SEQ ID NO: 889785 - RNA, 19 nt, Artificial Sequence
  Description of Artificial Sequence: Synthetic oligonucleotide
  Antisense strand to SEQ ID NO: 889784
ugugcagggaauuucccau

SEQ ID NO: 889786 - RNA, 19 nt, Artificial Sequence
  Description of Artificial Sequence: Synthetic oligonucleotide
  Sense strand starting at position 2294 of SEQ ID NO: 588790
ugggaaauucccugcacau

SEQ ID NO: 889787 - RNA, 19 nt, Artificial Sequence
  Description of Artificial Sequence: Synthetic oligonucleotide
  Antisense strand to SEQ ID NO: 889786
augugcagggaauuuccca

SEQ ID NO: 889788 - RNA, 19 nt, Artificial Sequence
  Description of Artificial Sequence: Synthetic oligonucleotide
  Sense strand starting at position 2296 of SEQ ID NO: 588790
ggaaauucccugcacauuc

SEQ ID NO: 889789 - RNA, 19 nt, Artificial Sequence
  Description of Artificial Sequence: Synthetic oligonucleotide
  Antisense strand to SEQ ID NO: 889788
gaaugugcagggaauuucc

SEQ ID NO: 889790 - RNA, 19 nt, Artificial Sequence
  Description of Artificial Sequence: Synthetic oligonucleotide
  Sense strand starting at position 2345 of SEQ ID NO: 588790
ugguuugagcgagugucuu

SEQ ID NO: 889791 - RNA, 19 nt, Artificial Sequence
  Description of Artificial Sequence: Synthetic oligonucleotide
  Antisense strand to SEQ ID NO: 889790
aagacacucgcucaaacca

SEQ ID NO: 889792 - RNA, 19 nt, Artificial Sequence
  Description of Artificial Sequence: Synthetic oligonucleotide
  Sense strand starting at position 2385 of SEQ ID NO: 588790
ggaauccauugagcagaau

SEQ ID NO: 889793 - RNA, 19 nt, Artificial Sequence
  Description of Artificial Sequence: Synthetic oligonucleotide
  Antisense strand to SEQ ID NO: 889792
auucugcucaauggauucc

SEQ ID NO: 889794 - RNA, 19 nt, Artificial Sequence
  Description of Artificial Sequence: Synthetic oligonucleotide
  Sense strand starting at position 2404 of SEQ ID NO: 588790
cugauacaucugugucaca

SEQ ID NO: 889795 - RNA, 19 nt, Artificial Sequence
  Description of Artificial Sequence: Synthetic oligonucleotide
  Antisense strand to SEQ ID NO: 889794
ugugacacagauguaucag

SEQ ID NO: 889796 - RNA, 19 nt, Artificial Sequence
  Description of Artificial Sequence: Synthetic oligonucleotide
  Sense strand starting at position 2405 of SEQ ID NO: 588790
ugauacaucugugucacau

SEQ ID NO: 889797 - RNA, 19 nt, Artificial Sequence
  Description of Artificial Sequence: Synthetic oligonucleotide
  Antisense strand to SEQ ID NO: 889796
augugacacagauguauca

SEQ ID NO: 889798 - RNA, 19 nt, Artificial Sequence
  Description of Artificial Sequence: Synthetic oligonucleotide
  Sense strand starting at position 2613 of SEQ ID NO: 588790
ggaagaaagcucugagcuc

SEQ ID NO: 889799 - RNA, 19 nt, Artificial Sequence
  Description of Artificial Sequence: Synthetic oligonucleotide
  Antisense strand to SEQ ID NO: 889798
gagcucagagcuuucuucc

SEQ ID NO: 889800 - RNA, 19 nt, Artificial Sequence
  Description of Artificial Sequence: Synthetic oligonucleotide
  Sense strand starting at position 2720 of SEQ ID NO: 588790
agguaagaauuauucuuac

SEQ ID NO: 889801 - RNA, 19 nt, Artificial Sequence
  Description of Artificial Sequence: Synthetic oligonucleotide
  Antisense strand to SEQ ID NO: 889800
guaagaauaauucuuaccu

SEQ ID NO: 889802 - RNA, 19 nt, Artificial Sequence
  Description of Artificial Sequence: Synthetic oligonucleotide
  Sense strand starting at position 2881 of SEQ ID NO: 588790
uuagcaaagugauccuaga

SEQ ID NO: 889803 - RNA, 19 nt, Artificial Sequence
  Description of Artificial Sequence: Synthetic oligonucleotide
  Antisense strand to SEQ ID NO: 889802
ucuaggaucacuuugcuaa

SEQ ID NO: 889804 - RNA, 19 nt, Artificial Sequence
  Description of Artificial Sequence: Synthetic oligonucleotide
  Sense strand starting at position 2938 of SEQ ID NO: 588790
uaaagaauguaggcuagaa

SEQ ID NO: 889805 - RNA, 19 nt, Artificial Sequence
  Description of Artificial Sequence: Synthetic oligonucleotide
  Antisense strand to SEQ ID NO: 889804
uucuagccuacauucuuua

SEQ ID NO: 889806 - RNA, 19 nt, Artificial Sequence
  Description of Artificial Sequence: Synthetic oligonucleotide
  Sense strand starting at position 3301 of SEQ ID NO: 588790
ggcacuuuccaaugugaaa

SEQ ID NO: 889807 - RNA, 19 nt, Artificial Sequence
  Description of Artificial Sequence: Synthetic oligonucleotide
  Antisense strand to SEQ ID NO: 889806
uuucacauuggaaagugcc

SEQ ID NO: 889808 - RNA, 19 nt, Artificial Sequence
  Description of Artificial Sequence: Synthetic oligonucleotide
  Sense strand starting at position 3372 of SEQ ID NO: 588790
uggaaagguugcuucuaca

SEQ ID NO: 889809 - RNA, 19 nt, Artificial Sequence
  Description of Artificial Sequence: Synthetic oligonucleotide
  Antisense strand to SEQ ID NO: 889808
uguagaagcaaccuuucca

SEQ ID NO: 889810 - RNA, 19 nt, Artificial Sequence
  Description of Artificial Sequence: Synthetic oligonucleotide
  Sense strand starting at position 3420 of SEQ ID NO: 588790
uuauauuugucugaaugac

SEQ ID NO: 889811 - RNA, 19 nt, Artificial Sequence
  Description of Artificial Sequence: Synthetic oligonucleotide
  Antisense strand to SEQ ID NO: 889810
gucauucagacaaauauaa

SEQ ID NO: 889812 - RNA, 19 nt, Artificial Sequence
  Description of Artificial Sequence: Synthetic oligonucleotide
  Sense strand starting at position 3487 of SEQ ID NO: 588790
acguuucuuccacacauua

SEQ ID NO: 889813 - RNA, 19 nt, Artificial Sequence
  Description of Artificial Sequence: Synthetic oligonucleotide
  Antisense strand to SEQ ID NO: 889812
uaauguguggaagaaacgu

SEQ ID NO: 889814 - RNA, 19 nt, Artificial Sequence
  Description of Artificial Sequence: Synthetic oligonucleotide
  Sense strand starting at position 3543 of SEQ ID NO: 588790
ggccuagagaacuguuaac

SEQ ID NO: 889815 - RNA, 19 nt, Artificial Sequence
  Description of Artificial Sequence: Synthetic oligonucleotide
  Antisense strand to SEQ ID NO: 889814
guuaacaguucucuaggcc

SEQ ID NO: 889816 - RNA, 19 nt, Artificial Sequence
  Description of Artificial Sequence: Synthetic oligonucleotide
  Sense strand starting at position 3590 of SEQ ID NO: 588790
uggacagugauagguaauu

SEQ ID NO: 889817 - RNA, 19 nt, Artificial Sequence
  Description of Artificial Sequence: Synthetic oligonucleotide
  Antisense strand to SEQ ID NO: 889816
aauuaccuaucacugucca

SEQ ID NO: 889818 - RNA, 19 nt, Artificial Sequence
  Description of Artificial Sequence: Synthetic oligonucleotide
  Sense strand starting at position 1 of SEQ ID NO: 588791
agcucauaugugugagaug

SEQ ID NO: 889819 - RNA, 19 nt, Artificial Sequence
  Description of Artificial Sequence: Synthetic oligonucleotide
  Antisense strand to SEQ ID NO: 889818
caucucacacauaugagcu

SEQ ID NO: 889820 - RNA, 19 nt, Artificial Sequence
  Description of Artificial Sequence: Synthetic oligonucleotide
  Sense strand starting at position 59 of SEQ ID NO: 588791
agaagcauacuuuggaaca

SEQ ID NO: 889821 - RNA, 19 nt, Artificial Sequence
  Description of Artificial Sequence: Synthetic oligonucleotide
  Antisense strand to SEQ ID NO: 889820
uguuccaaaguaugcuucu

SEQ ID NO: 889822 - RNA, 19 nt, Artificial Sequence
  Description of Artificial Sequence: Synthetic oligonucleotide
  Sense strand starting at position 287 of SEQ ID NO: 588791
uggagagcuggcugagaau

SEQ ID NO: 889823 - RNA, 19 nt, Artificial Sequence
  Description of Artificial Sequence: Synthetic oligonucleotide
  Antisense strand to SEQ ID NO: 889822
auucucagccagcucucca

SEQ ID NO: 889824 - RNA, 19 nt, Artificial Sequence
  Description of Artificial Sequence: Synthetic oligonucleotide
  Sense strand starting at position 393 of SEQ ID NO: 588791
guggucucucccuaacuuu

SEQ ID NO: 889825 - RNA, 19 nt, Artificial Sequence
  Description of Artificial Sequence: Synthetic oligonucleotide
  Antisense strand to SEQ ID NO: 889824
aaaguuagggagagaccac

SEQ ID NO: 889826 - RNA, 19 nt, Artificial Sequence
  Description of Artificial Sequence: Synthetic oligonucleotide
  Sense strand starting at position 486 of SEQ ID NO: 588791
accacuguaccugggauau

SEQ ID NO: 889827 - RNA, 19 nt, Artificial Sequence
  Description of Artificial Sequence: Synthetic oligonucleotide
  Antisense strand to SEQ ID NO: 889826
auaucccagguacaguggu

SEQ ID NO: 889828 - RNA, 19 nt, Artificial Sequence
  Description of Artificial Sequence: Synthetic oligonucleotide
  Sense strand starting at position 496 of SEQ ID NO: 588791
cugggauauucugcuucuu

SEQ ID NO: 889829 - RNA, 19 nt, Artificial Sequence
  Description of Artificial Sequence: Synthetic oligonucleotide
  Antisense strand to SEQ ID NO: 889828
aagaagcagaauaucccag

SEQ ID NO: 889830 - RNA, 19 nt, Artificial Sequence
  Description of Artificial Sequence: Synthetic oligonucleotide
  Sense strand starting at position 498 of SEQ ID NO: 588791
gggauauucugcuucuuuc

SEQ ID NO: 889831 - RNA, 19 nt, Artificial Sequence
  Description of Artificial Sequence: Synthetic oligonucleotide
  Antisense strand to SEQ ID NO: 889830
gaaagaagcagaauauccc

SEQ ID NO: 889832 - RNA, 19 nt, Artificial Sequence
  Description of Artificial Sequence: Synthetic oligonucleotide
  Sense strand starting at position 850 of SEQ ID NO: 588791
uuuaaugagauguggguuu

SEQ ID NO: 889833 - RNA, 19 nt, Artificial Sequence
  Description of Artificial Sequence: Synthetic oligonucleotide
  Antisense strand to SEQ ID NO: 889832
aaacccacaucucauuaaa

SEQ ID NO: 889834 - RNA, 19 nt, Artificial Sequence
  Description of Artificial Sequence: Synthetic oligonucleotide
  Sense strand starting at position 852 of SEQ ID NO: 588791
uaaugagauguggguuuaa

SEQ ID NO: 889835 - RNA, 19 nt, Artificial Sequence
  Description of Artificial Sequence: Synthetic oligonucleotide
  Antisense strand to SEQ ID NO: 889834
uuaaacccacaucucauua

SEQ ID NO: 889836 - RNA, 19 nt, Artificial Sequence
  Description of Artificial Sequence: Synthetic oligonucleotide
  Sense strand starting at position 863 of SEQ ID NO: 588791
ggguuuaaaugggccuauu

SEQ ID NO: 889837 - RNA, 19 nt, Artificial Sequence
  Description of Artificial Sequence: Synthetic oligonucleotide
  Antisense strand to SEQ ID NO: 889836
aauaggcccauuuaaaccc

SEQ ID NO: 889838 - RNA, 19 nt, Artificial Sequence
  Description of Artificial Sequence: Synthetic oligonucleotide
  Sense strand starting at position 917 of SEQ ID NO: 588791
cuuggaagccugcaguuua

SEQ ID NO: 889839 - RNA, 19 nt, Artificial Sequence
  Description of Artificial Sequence: Synthetic oligonucleotide
  Antisense strand to SEQ ID NO: 889838
uaaacugcaggcuuccaag

SEQ ID NO: 889840 - RNA, 19 nt, Artificial Sequence
  Description of Artificial Sequence: Synthetic oligonucleotide
  Sense strand starting at position 928 of SEQ ID NO: 588791
gcaguuuagcgauugucac

SEQ ID NO: 889841 - RNA, 19 nt, Artificial Sequence
  Description of Artificial Sequence: Synthetic oligonucleotide
  Antisense strand to SEQ ID NO: 889840
gugacaaucgcuaaacugc

SEQ ID NO: 889842 - RNA, 19 nt, Artificial Sequence
  Description of Artificial Sequence: Synthetic oligonucleotide
  Sense strand starting at position 956 of SEQ ID NO: 588791
uucuaaagucaaggcaauu

SEQ ID NO: 889843 - RNA, 19 nt, Artificial Sequence
  Description of Artificial Sequence: Synthetic oligonucleotide
  Antisense strand to SEQ ID NO: 889842
aauugccuugacuuuagaa

SEQ ID NO: 889844 - RNA, 19 nt, Artificial Sequence
  Description of Artificial Sequence: Synthetic oligonucleotide
  Sense strand starting at position 968 of SEQ ID NO: 588791
ggcaauuaggcccaugacu

SEQ ID NO: 889845 - RNA, 19 nt, Artificial Sequence
  Description of Artificial Sequence: Synthetic oligonucleotide
  Antisense strand to SEQ ID NO: 889844
agucaugggccuaauugcc

SEQ ID NO: 889846 - RNA, 19 nt, Artificial Sequence
  Description of Artificial Sequence: Synthetic oligonucleotide
  Sense strand starting at position 974 of SEQ ID NO: 588791
uaggcccaugacuguuaaa

SEQ ID NO: 889847 - RNA, 19 nt, Artificial Sequence
  Description of Artificial Sequence: Synthetic oligonucleotide
  Antisense strand to SEQ ID NO: 889846
uuuaacagucaugggccua

SEQ ID NO: 889848 - RNA, 19 nt, Artificial Sequence
  Description of Artificial Sequence: Synthetic oligonucleotide
  Sense strand starting at position 1104 of SEQ ID NO: 588791
ccgagaaaucauggcgaca

SEQ ID NO: 889849 - RNA, 19 nt, Artificial Sequence
  Description of Artificial Sequence: Synthetic oligonucleotide
  Antisense strand to SEQ ID NO: 889848
ugucgccaugauuucucgg

SEQ ID NO: 889850 - RNA, 19 nt, Artificial Sequence
  Description of Artificial Sequence: Synthetic oligonucleotide
  Sense strand starting at position 1156 of SEQ ID NO: 588791
ugagaacugcuuugagaca

SEQ ID NO: 889851 - RNA, 19 nt, Artificial Sequence
  Description of Artificial Sequence: Synthetic oligonucleotide
  Antisense strand to SEQ ID NO: 889850
ugucucaaagcaguucuca

SEQ ID NO: 889852 - RNA, 19 nt, Artificial Sequence
  Description of Artificial Sequence: Synthetic oligonucleotide
  Sense strand starting at position 2434 of SEQ ID NO: 588791
gcuguaacccugcaaggua

SEQ ID NO: 889853 - RNA, 19 nt, Artificial Sequence
  Description of Artificial Sequence: Synthetic oligonucleotide
  Antisense strand to SEQ ID NO: 889852
uaccuugcaggguuacagc

SEQ ID NO: 889854 - RNA, 19 nt, Artificial Sequence
  Description of Artificial Sequence: Synthetic oligonucleotide
  Sense strand starting at position 2462 of SEQ ID NO: 588791
uguccuacucauggauaaa

SEQ ID NO: 889855 - RNA, 19 nt, Artificial Sequence
  Description of Artificial Sequence: Synthetic oligonucleotide
  Antisense strand to SEQ ID NO: 889854
uuuauccaugaguaggaca

SEQ ID NO: 889856 - RNA, 19 nt, Artificial Sequence
  Description of Artificial Sequence: Synthetic oligonucleotide
  Sense strand starting at position 2473 of SEQ ID NO: 588791
uggauaaaggcucgaggaa

SEQ ID NO: 889857 - RNA, 19 nt, Artificial Sequence
  Description of Artificial Sequence: Synthetic oligonucleotide
  Antisense strand to SEQ ID NO: 889856
uuccucgagccuuuaucca

SEQ ID NO: 889858 - RNA, 19 nt, Artificial Sequence
  Description of Artificial Sequence: Synthetic oligonucleotide
  Sense strand starting at position 2654 of SEQ ID NO: 588791
caagauagauaguuguaau

SEQ ID NO: 889859 - RNA, 19 nt, Artificial Sequence
  Description of Artificial Sequence: Synthetic oligonucleotide
  Antisense strand to SEQ ID NO: 889858
auuacaacuaucuaucuug

SEQ ID NO: 889860 - RNA, 19 nt, Artificial Sequence
  Description of Artificial Sequence: Synthetic oligonucleotide
  Sense strand starting at position 2746 of SEQ ID NO: 588791
cuucccaaacguuggauua

SEQ ID NO: 889861 - RNA, 19 nt, Artificial Sequence
  Description of Artificial Sequence: Synthetic oligonucleotide
  Antisense strand to SEQ ID NO: 889860
uaauccaacguuugggaag

SEQ ID NO: 889862 - RNA, 19 nt, Artificial Sequence
  Description of Artificial Sequence: Synthetic oligonucleotide
  Sense strand starting at position 2747 of SEQ ID NO: 588791
uucccaaacguuggauuau

SEQ ID NO: 889863 - RNA, 19 nt, Artificial Sequence
  Description of Artificial Sequence: Synthetic oligonucleotide
  Antisense strand to SEQ ID NO: 889862
auaauccaacguuugggaa

SEQ ID NO: 889864 - RNA, 19 nt, Artificial Sequence
  Description of Artificial Sequence: Synthetic oligonucleotide
  Sense strand starting at position 2823 of SEQ ID NO: 588791
caaguagaaguccgauauc

SEQ ID NO: 889865 - RNA, 19 nt, Artificial Sequence
  Description of Artificial Sequence: Synthetic oligonucleotide
  Antisense strand to SEQ ID NO: 889864
gauaucggacuucuacuug

SEQ ID NO: 889866 - RNA, 19 nt, Artificial Sequence
  Description of Artificial Sequence: Synthetic oligonucleotide
  Sense strand starting at position 2826 of SEQ ID NO: 588791
guagaaguccgauaucaua

SEQ ID NO: 889867 - RNA, 19 nt, Artificial Sequence
  Description of Artificial Sequence: Synthetic oligonucleotide
  Antisense strand to SEQ ID NO: 889866
uaugauaucggacuucuac

SEQ ID NO: 889868 - RNA, 19 nt, Artificial Sequence
  Description of Artificial Sequence: Synthetic oligonucleotide
  Sense strand starting at position 2887 of SEQ ID NO: 588791
ccaugagucccagaaugca

SEQ ID NO: 889869 - RNA, 19 nt, Artificial Sequence
  Description of Artificial Sequence: Synthetic oligonucleotide
  Antisense strand to SEQ ID NO: 889868
ugcauucugggacucaugg

SEQ ID NO: 889870 - RNA, 19 nt, Artificial Sequence
  Description of Artificial Sequence: Synthetic oligonucleotide
  Sense strand starting at position 2935 of SEQ ID NO: 588791
guaugauagugucugaaag

SEQ ID NO: 889871 - RNA, 19 nt, Artificial Sequence
  Description of Artificial Sequence: Synthetic oligonucleotide
  Antisense strand to SEQ ID NO: 889870
cuuucagacacuaucauac

SEQ ID NO: 889872 - RNA, 19 nt, Artificial Sequence
  Description of Artificial Sequence: Synthetic oligonucleotide
  Sense strand starting at position 2953 of SEQ ID NO: 588791
gcggugggaguuuaagauu

SEQ ID NO: 889873 - RNA, 19 nt, Artificial Sequence
  Description of Artificial Sequence: Synthetic oligonucleotide
  Antisense strand to SEQ ID NO: 889872
aaucuuaaacucccaccgc

SEQ ID NO: 889874 - RNA, 19 nt, Artificial Sequence
  Description of Artificial Sequence: Synthetic oligonucleotide
  Sense strand starting at position 2966 of SEQ ID NO: 588791
aagauuaagggauguagcu

SEQ ID NO: 889875 - RNA, 19 nt, Artificial Sequence
  Description of Artificial Sequence: Synthetic oligonucleotide
  Antisense strand to SEQ ID NO: 889874
agcuacaucccuuaaucuu

SEQ ID NO: 889876 - RNA, 19 nt, Artificial Sequence
  Description of Artificial Sequence: Synthetic oligonucleotide
  Sense strand starting at position 2992 of SEQ ID NO: 588791
uguagacaacaguguguua

SEQ ID NO: 889877 - RNA, 19 nt, Artificial Sequence
  Description of Artificial Sequence: Synthetic oligonucleotide
  Antisense strand to SEQ ID NO: 889876
uaacacacuguugucuaca

SEQ ID NO: 889878 - RNA, 19 nt, Artificial Sequence
  Description of Artificial Sequence: Synthetic oligonucleotide
  Sense strand starting at position 2994 of SEQ ID NO: 588791
uagacaacaguguguuaua

SEQ ID NO: 889879 - RNA, 19 nt, Artificial Sequence
  Description of Artificial Sequence: Synthetic oligonucleotide
  Antisense strand to SEQ ID NO: 889878
uauaacacacuguugucua

SEQ ID NO: 889880 - RNA, 19 nt, Artificial Sequence
  Description of Artificial Sequence: Synthetic oligonucleotide
  Sense strand starting at position 2995 of SEQ ID NO: 588791
agacaacaguguguuauaa

SEQ ID NO: 889881 - RNA, 19 nt, Artificial Sequence
  Description of Artificial Sequence: Synthetic oligonucleotide
  Antisense strand to SEQ ID NO: 889880
uuauaacacacuguugucu

SEQ ID NO: 889882 - RNA, 19 nt, Artificial Sequence
  Description of Artificial Sequence: Synthetic oligonucleotide
  Sense strand starting at position 3145 of SEQ ID NO: 588791
uuuguauagacauggguuu

SEQ ID NO: 889883 - RNA, 19 nt, Artificial Sequence
  Description of Artificial Sequence: Synthetic oligonucleotide
  Antisense strand to SEQ ID NO: 889882
aaacccaugucuauacaaa

SEQ ID NO: 889884 - RNA, 19 nt, Artificial Sequence
  Description of Artificial Sequence: Synthetic oligonucleotide
  Sense strand starting at position 3409 of SEQ ID NO: 588791
accguagcuguguggauuu

SEQ ID NO: 889885 - RNA, 19 nt, Artificial Sequence
  Description of Artificial Sequence: Synthetic oligonucleotide
  Antisense strand to SEQ ID NO: 889884
aaauccacacagcuacggu

SEQ ID NO: 889886 - RNA, 19 nt, Artificial Sequence
  Description of Artificial Sequence: Synthetic oligonucleotide
  Sense strand starting at position 3411 of SEQ ID NO: 588791
cguagcuguguggauuuau

SEQ ID NO: 889887 - RNA, 19 nt, Artificial Sequence
  Description of Artificial Sequence: Synthetic oligonucleotide
  Antisense strand to SEQ ID NO: 889886
auaaauccacacagcuacg

SEQ ID NO: 889888 - RNA, 19 nt, Artificial Sequence
  Description of Artificial Sequence: Synthetic oligonucleotide
  Sense strand starting at position 3420 of SEQ ID NO: 588791
guggauuuaucucugcguu

SEQ ID NO: 889889 - RNA, 19 nt, Artificial Sequence
  Description of Artificial Sequence: Synthetic oligonucleotide
  Antisense strand to SEQ ID NO: 889888
aacgcagagauaaauccac

SEQ ID NO: 889890 - RNA, 19 nt, Artificial Sequence
  Description of Artificial Sequence: Synthetic oligonucleotide
  Sense strand starting at position 3634 of SEQ ID NO: 588791
guagaugguacauguauau

SEQ ID NO: 889891 - RNA, 19 nt, Artificial Sequence
  Description of Artificial Sequence: Synthetic oligonucleotide
  Antisense strand to SEQ ID NO: 889890
auauacauguaccaucuac

SEQ ID NO: 889892 - RNA, 19 nt, Artificial Sequence
  Description of Artificial Sequence: Synthetic oligonucleotide
  Sense strand starting at position 3647 of SEQ ID NO: 588791
guauauaugagguacggga

SEQ ID NO: 889893 - RNA, 19 nt, Artificial Sequence
  Description of Artificial Sequence: Synthetic oligonucleotide
  Antisense strand to SEQ ID NO: 889892
ucccguaccucauauauac

SEQ ID NO: 889894 - RNA, 19 nt, Artificial Sequence
  Description of Artificial Sequence: Synthetic oligonucleotide
  Sense strand starting at position 3845 of SEQ ID NO: 588791
aguagaucuuauucuuucu

SEQ ID NO: 889895 - RNA, 19 nt, Artificial Sequence
  Description of Artificial Sequence: Synthetic oligonucleotide
  Antisense strand to SEQ ID NO: 889894
agaaagaauaagaucuacu

SEQ ID NO: 889896 - RNA, 19 nt, Artificial Sequence
  Description of Artificial Sequence: Synthetic oligonucleotide
  Sense strand starting at position 3978 of SEQ ID NO: 588791
uugauuguuugaucccaca

SEQ ID NO: 889897 - RNA, 19 nt, Artificial Sequence
  Description of Artificial Sequence: Synthetic oligonucleotide
  Antisense strand to SEQ ID NO: 889896
ugugggaucaaacaaucaa

SEQ ID NO: 889898 - RNA, 19 nt, Artificial Sequence
  Description of Artificial Sequence: Synthetic oligonucleotide
  Sense strand starting at position 18 of SEQ ID NO: 588792
gagagaugcugacuuacac

SEQ ID NO: 889899 - RNA, 19 nt, Artificial Sequence
  Description of Artificial Sequence: Synthetic oligonucleotide
  Antisense strand to SEQ ID NO: 889898
guguaagucagcaucucuc

SEQ ID NO: 889900 - RNA, 19 nt, Artificial Sequence
  Description of Artificial Sequence: Synthetic oligonucleotide
  Sense strand starting at position 83 of SEQ ID NO: 588792
ggaagaaccuguccacuuu

SEQ ID NO: 889901 - RNA, 19 nt, Artificial Sequence
  Description of Artificial Sequence: Synthetic oligonucleotide
  Antisense strand to SEQ ID NO: 889900
aaaguggacagguucuucc

SEQ ID NO: 889902 - RNA, 19 nt, Artificial Sequence
  Description of Artificial Sequence: Synthetic oligonucleotide
  Sense strand starting at position 225 of SEQ ID NO: 588792
ggaugcuuuccaugugaca

SEQ ID NO: 889903 - RNA, 19 nt, Artificial Sequence
  Description of Artificial Sequence: Synthetic oligonucleotide
  Antisense strand to SEQ ID NO: 889902
ugucacauggaaagcaucc

SEQ ID NO: 889904 - RNA, 19 nt, Artificial Sequence
  Description of Artificial Sequence: Synthetic oligonucleotide
  Sense strand starting at position 249 of SEQ ID NO: 588792
ucaagaaaugccuguuggu

SEQ ID NO: 889905 - RNA, 19 nt, Artificial Sequence
  Description of Artificial Sequence: Synthetic oligonucleotide
  Antisense strand to SEQ ID NO: 889904
accaacaggcauuucuuga

SEQ ID NO: 889906 - RNA, 19 nt, Artificial Sequence
  Description of Artificial Sequence: Synthetic oligonucleotide
  Sense strand starting at position 262 of SEQ ID NO: 588792
guuggugacaacggcaaua

SEQ ID NO: 889907 - RNA, 19 nt, Artificial Sequence
  Description of Artificial Sequence: Synthetic oligonucleotide
  Antisense strand to SEQ ID NO: 889906
uauugccguugucaccaac

SEQ ID NO: 889908 - RNA, 19 nt, Artificial Sequence
  Description of Artificial Sequence: Synthetic oligonucleotide
  Sense strand starting at position 356 of SEQ ID NO: 588792
cuagaacaggcaugugaaa

SEQ ID NO: 889909 - RNA, 19 nt, Artificial Sequence
  Description of Artificial Sequence: Synthetic oligonucleotide
  Antisense strand to SEQ ID NO: 889908
uuucacaugccuguucuag

SEQ ID NO: 889910 - RNA, 19 nt, Artificial Sequence
  Description of Artificial Sequence: Synthetic oligonucleotide
  Sense strand starting at position 407 of SEQ ID NO: 588792
acuuacuucccagaguuga

SEQ ID NO: 889911 - RNA, 19 nt, Artificial Sequence
  Description of Artificial Sequence: Synthetic oligonucleotide
  Antisense strand to SEQ ID NO: 889910
ucaacucugggaaguaagu

SEQ ID NO: 889912 - RNA, 19 nt, Artificial Sequence
  Description of Artificial Sequence: Synthetic oligonucleotide
  Sense strand starting at position 556 of SEQ ID NO: 588792
ggaugucauucugcuugaa

SEQ ID NO: 889913 - RNA, 19 nt, Artificial Sequence
  Description of Artificial Sequence: Synthetic oligonucleotide
  Antisense strand to SEQ ID NO: 889912
uucaagcagaaugacaucc

SEQ ID NO: 889914 - RNA, 19 nt, Artificial Sequence
  Description of Artificial Sequence: Synthetic oligonucleotide
  Sense strand starting at position 558 of SEQ ID NO: 588792
augucauucugcuugaauu

SEQ ID NO: 889915 - RNA, 19 nt, Artificial Sequence
  Description of Artificial Sequence: Synthetic oligonucleotide
  Antisense strand to SEQ ID NO: 889914
aauucaagcagaaugacau

SEQ ID NO: 889916 - RNA, 19 nt, Artificial Sequence
  Description of Artificial Sequence: Synthetic oligonucleotide
  Sense strand starting at position 568 of SEQ ID NO: 588792
gcuugaauuccaggacaga

SEQ ID NO: 889917 - RNA, 19 nt, Artificial Sequence
  Description of Artificial Sequence: Synthetic oligonucleotide
  Antisense strand to SEQ ID NO: 889916
ucuguccuggaauucaagc

SEQ ID NO: 889918 - RNA, 19 nt, Artificial Sequence
  Description of Artificial Sequence: Synthetic oligonucleotide
  Sense strand starting at position 1019 of SEQ ID NO: 588792
ugguaugcugaugggagaa

SEQ ID NO: 889919 - RNA, 19 nt, Artificial Sequence
  Description of Artificial Sequence: Synthetic oligonucleotide
  Antisense strand to SEQ ID NO: 889918
uucucccaucagcauacca

SEQ ID NO: 889920 - RNA, 19 nt, Artificial Sequence
  Description of Artificial Sequence: Synthetic oligonucleotide
  Sense strand starting at position 1245 of SEQ ID NO: 588792
agauauuaguaacucaagu

SEQ ID NO: 889921 - RNA, 19 nt, Artificial Sequence
  Description of Artificial Sequence: Synthetic oligonucleotide
  Antisense strand to SEQ ID NO: 889920
acuugaguuacuaauaucu

SEQ ID NO: 889922 - RNA, 19 nt, Artificial Sequence
  Description of Artificial Sequence: Synthetic oligonucleotide
  Sense strand starting at position 1266 of SEQ ID NO: 588792
aaagauuggugcuugagga

SEQ ID NO: 889923 - RNA, 19 nt, Artificial Sequence
  Description of Artificial Sequence: Synthetic oligonucleotide
  Antisense strand to SEQ ID NO: 889922
uccucaagcaccaaucuuu

SEQ ID NO: 889924 - RNA, 19 nt, Artificial Sequence
  Description of Artificial Sequence: Synthetic oligonucleotide
  Sense strand starting at position 1267 of SEQ ID NO: 588792
aagauuggugcuugaggaa

SEQ ID NO: 889925 - RNA, 19 nt, Artificial Sequence
  Description of Artificial Sequence: Synthetic oligonucleotide
  Antisense strand to SEQ ID NO: 889924
uuccucaagcaccaaucuu

SEQ ID NO: 889926 - RNA, 19 nt, Artificial Sequence
  Description of Artificial Sequence: Synthetic oligonucleotide
  Sense strand starting at position 1385 of SEQ ID NO: 588792
ugcaauguauggucaagag

SEQ ID NO: 889927 - RNA, 19 nt, Artificial Sequence
  Description of Artificial Sequence: Synthetic oligonucleotide
  Antisense strand to SEQ ID NO: 889926
cucuugaccauacauugca

SEQ ID NO: 889928 - RNA, 19 nt, Artificial Sequence
  Description of Artificial Sequence: Synthetic oligonucleotide
  Sense strand starting at position 1394 of SEQ ID NO: 588792
uggucaagagauggcuaua

SEQ ID NO: 889929 - RNA, 19 nt, Artificial Sequence
  Description of Artificial Sequence: Synthetic oligonucleotide
  Antisense strand to SEQ ID NO: 889928
uauagccaucucuugacca

SEQ ID NO: 889930 - RNA, 19 nt, Artificial Sequence
  Description of Artificial Sequence: Synthetic oligonucleotide
  Sense strand starting at position 1407 of SEQ ID NO: 588792
gcuauauauuuggaacuaa

SEQ ID NO: 889931 - RNA, 19 nt, Artificial Sequence
  Description of Artificial Sequence: Synthetic oligonucleotide
  Antisense strand to SEQ ID NO: 889930
uuaguuccaaauauauagc

SEQ ID NO: 889932 - RNA, 19 nt, Artificial Sequence
  Description of Artificial Sequence: Synthetic oligonucleotide
  Sense strand starting at position 1491 of SEQ ID NO: 588792
cagguagaacgagguauau

SEQ ID NO: 889933 - RNA, 19 nt, Artificial Sequence
  Description of Artificial Sequence: Synthetic oligonucleotide
  Antisense strand to SEQ ID NO: 889932
auauaccucguucuaccug

SEQ ID NO: 889934 - RNA, 19 nt, Artificial Sequence
  Description of Artificial Sequence: Synthetic oligonucleotide
  Sense strand starting at position 1503 of SEQ ID NO: 588792
gguauauaaucugcccaau

SEQ ID NO: 889935 - RNA, 19 nt, Artificial Sequence
  Description of Artificial Sequence: Synthetic oligonucleotide
  Antisense strand to SEQ ID NO: 889934
auugggcagauuauauacc

SEQ ID NO: 889936 - RNA, 19 nt, Artificial Sequence
  Description of Artificial Sequence: Synthetic oligonucleotide
  Sense strand starting at position 1580 of SEQ ID NO: 588792
gaaacaaagugcucagaga

SEQ ID NO: 889937 - RNA, 19 nt, Artificial Sequence
  Description of Artificial Sequence: Synthetic oligonucleotide
  Antisense strand to SEQ ID NO: 889936
ucucugagcacuuuguuuc

SEQ ID NO: 889938 - RNA, 19 nt, Artificial Sequence
  Description of Artificial Sequence: Synthetic oligonucleotide
  Sense strand starting at position 1886 of SEQ ID NO: 588792
aaguguuagcuccacuuga

SEQ ID NO: 889939 - RNA, 19 nt, Artificial Sequence
  Description of Artificial Sequence: Synthetic oligonucleotide
  Antisense strand to SEQ ID NO: 889938
ucaaguggagcuaacacuu

SEQ ID NO: 889940 - RNA, 19 nt, Artificial Sequence
  Description of Artificial Sequence: Synthetic oligonucleotide
  Sense strand starting at position 2344 of SEQ ID NO: 588792
uuacuuuaugcucacagua

SEQ ID NO: 889941 - RNA, 19 nt, Artificial Sequence
  Description of Artificial Sequence: Synthetic oligonucleotide
  Antisense strand to SEQ ID NO: 889940
uacugugagcauaaaguaa

SEQ ID NO: 889942 - RNA, 19 nt, Artificial Sequence
  Description of Artificial Sequence: Synthetic oligonucleotide
  Sense strand starting at position 2357 of SEQ ID NO: 588792
acaguaacccuguguugag

SEQ ID NO: 889943 - RNA, 19 nt, Artificial Sequence
  Description of Artificial Sequence: Synthetic oligonucleotide
  Antisense strand to SEQ ID NO: 889942
cucaacacaggguuacugu

SEQ ID NO: 889944 - RNA, 19 nt, Artificial Sequence
  Description of Artificial Sequence: Synthetic oligonucleotide
  Sense strand starting at position 2384 of SEQ ID NO: 588792
cuccgaguucuaggacuua

SEQ ID NO: 889945 - RNA, 19 nt, Artificial Sequence
  Description of Artificial Sequence: Synthetic oligonucleotide
  Antisense strand to SEQ ID NO: 889944
uaaguccuagaacucggag

SEQ ID NO: 889946 - RNA, 19 nt, Artificial Sequence
  Description of Artificial Sequence: Synthetic oligonucleotide
  Sense strand starting at position 2624 of SEQ ID NO: 588792
uggcauggauguccuacua

SEQ ID NO: 889947 - RNA, 19 nt, Artificial Sequence
  Description of Artificial Sequence: Synthetic oligonucleotide
  Antisense strand to SEQ ID NO: 889946
uaguaggacauccaugcca

SEQ ID NO: 889948 - RNA, 19 nt, Artificial Sequence
  Description of Artificial Sequence: Synthetic oligonucleotide
  Sense strand starting at position 2671 of SEQ ID NO: 588792
gaaucagauuaucuccguu

SEQ ID NO: 889949 - RNA, 19 nt, Artificial Sequence
  Description of Artificial Sequence: Synthetic oligonucleotide
  Antisense strand to SEQ ID NO: 889948
aacggagauaaucugauuc

SEQ ID NO: 889950 - RNA, 19 nt, Artificial Sequence
  Description of Artificial Sequence: Synthetic oligonucleotide
  Sense strand starting at position 2709 of SEQ ID NO: 588792
gcugcaucacuccagguua

SEQ ID NO: 889951 - RNA, 19 nt, Artificial Sequence
  Description of Artificial Sequence: Synthetic oligonucleotide
  Antisense strand to SEQ ID NO: 889950
uaaccuggagugaugcagc

SEQ ID NO: 889952 - RNA, 19 nt, Artificial Sequence
  Description of Artificial Sequence: Synthetic oligonucleotide
  Sense strand starting at position 2711 of SEQ ID NO: 588792
ugcaucacuccagguuaau

SEQ ID NO: 889953 - RNA, 19 nt, Artificial Sequence
  Description of Artificial Sequence: Synthetic oligonucleotide
  Antisense strand to SEQ ID NO: 889952
auuaaccuggagugaugca

SEQ ID NO: 889954 - RNA, 19 nt, Artificial Sequence
  Description of Artificial Sequence: Synthetic oligonucleotide
  Sense strand starting at position 3138 of SEQ ID NO: 588792
cccaauguuccaugucaga

SEQ ID NO: 889955 - RNA, 19 nt, Artificial Sequence
  Description of Artificial Sequence: Synthetic oligonucleotide
  Antisense strand to SEQ ID NO: 889954
ucugacauggaacauuggg

SEQ ID NO: 889956 - RNA, 19 nt, Artificial Sequence
  Description of Artificial Sequence: Synthetic oligonucleotide
  Sense strand starting at position 3200 of SEQ ID NO: 588792
gagagagcuugauucucaa

SEQ ID NO: 889957 - RNA, 19 nt, Artificial Sequence
  Description of Artificial Sequence: Synthetic oligonucleotide
  Antisense strand to SEQ ID NO: 889956
uugagaaucaagcucucuc

SEQ ID NO: 889958 - RNA, 19 nt, Artificial Sequence
  Description of Artificial Sequence: Synthetic oligonucleotide
  Sense strand starting at position 3203 of SEQ ID NO: 588792
agagcuugauucucaaagu

SEQ ID NO: 889959 - RNA, 19 nt, Artificial Sequence
  Description of Artificial Sequence: Synthetic oligonucleotide
  Antisense strand to SEQ ID NO: 889958
acuuugagaaucaagcucu

SEQ ID NO: 889960 - RNA, 19 nt, Artificial Sequence
  Description of Artificial Sequence: Synthetic oligonucleotide
  Sense strand starting at position 3220 of SEQ ID NO: 588792
guaccuuuccuacagucaa

SEQ ID NO: 889961 - RNA, 19 nt, Artificial Sequence
  Description of Artificial Sequence: Synthetic oligonucleotide
  Antisense strand to SEQ ID NO: 889960
uugacuguaggaaagguac

SEQ ID NO: 889962 - RNA, 19 nt, Artificial Sequence
  Description of Artificial Sequence: Synthetic oligonucleotide
  Sense strand starting at position 3592 of SEQ ID NO: 588792
ugagcccucccaugggaaa

SEQ ID NO: 889963 - RNA, 19 nt, Artificial Sequence
  Description of Artificial Sequence: Synthetic oligonucleotide
  Antisense strand to SEQ ID NO: 889962
uuucccaugggagggcuca

SEQ ID NO: 889964 - RNA, 19 nt, Artificial Sequence
  Description of Artificial Sequence: Synthetic oligonucleotide
  Sense strand starting at position 3593 of SEQ ID NO: 588792
gagcccucccaugggaaau

SEQ ID NO: 889965 - RNA, 19 nt, Artificial Sequence
  Description of Artificial Sequence: Synthetic oligonucleotide
  Antisense strand to SEQ ID NO: 889964
auuucccaugggagggcuc

SEQ ID NO: 889966 - RNA, 19 nt, Artificial Sequence
  Description of Artificial Sequence: Synthetic oligonucleotide
  Sense strand starting at position 3622 of SEQ ID NO: 588792
agcuuaguccaguagucaa

SEQ ID NO: 889967 - RNA, 19 nt, Artificial Sequence
  Description of Artificial Sequence: Synthetic oligonucleotide
  Antisense strand to SEQ ID NO: 889966
uugacuacuggacuaagcu

SEQ ID NO: 889968 - RNA, 19 nt, Artificial Sequence
  Description of Artificial Sequence: Synthetic oligonucleotide
  Sense strand starting at position 3747 of SEQ ID NO: 588792
ccaacauuccuuugaggug

SEQ ID NO: 889969 - RNA, 19 nt, Artificial Sequence
  Description of Artificial Sequence: Synthetic oligonucleotide
  Antisense strand to SEQ ID NO: 889968
caccucaaaggaauguugg

SEQ ID NO: 889970 - RNA, 19 nt, Artificial Sequence
  Description of Artificial Sequence: Synthetic oligonucleotide
  Sense strand starting at position 3756 of SEQ ID NO: 588792
cuuugagguguuugugaaa

SEQ ID NO: 889971 - RNA, 19 nt, Artificial Sequence
  Description of Artificial Sequence: Synthetic oligonucleotide
  Antisense strand to SEQ ID NO: 889970
uuucacaaacaccucaaag

SEQ ID NO: 889972 - RNA, 19 nt, Artificial Sequence
  Description of Artificial Sequence: Synthetic oligonucleotide
  Sense strand starting at position 3796 of SEQ ID NO: 588792
ggcugaaauguuugguuaa

SEQ ID NO: 889973 - RNA, 19 nt, Artificial Sequence
  Description of Artificial Sequence: Synthetic oligonucleotide
  Antisense strand to SEQ ID NO: 889972
uuaaccaaacauuucagcc

SEQ ID NO: 889974 - RNA, 19 nt, Artificial Sequence
  Description of Artificial Sequence: Synthetic oligonucleotide
  Sense strand starting at position 3798 of SEQ ID NO: 588792
cugaaauguuugguuaaca

SEQ ID NO: 889975 - RNA, 19 nt, Artificial Sequence
  Description of Artificial Sequence: Synthetic oligonucleotide
  Antisense strand to SEQ ID NO: 889974
uguuaaccaaacauuucag

SEQ ID NO: 889976 - RNA, 19 nt, Artificial Sequence
  Description of Artificial Sequence: Synthetic oligonucleotide
  Sense strand starting at position 3799 of SEQ ID NO: 588792
ugaaauguuugguuaacag

SEQ ID NO: 889977 - RNA, 19 nt, Artificial Sequence
  Description of Artificial Sequence: Synthetic oligonucleotide
  Antisense strand to SEQ ID NO: 889976
cuguuaaccaaacauuuca

SEQ ID NO: 889978 - RNA, 19 nt, Artificial Sequence
  Description of Artificial Sequence: Synthetic oligonucleotide
  Sense strand starting at position 182 of SEQ ID NO: 588793
ggguaccaucugcaguauu

SEQ ID NO: 889979 - RNA, 19 nt, Artificial Sequence
  Description of Artificial Sequence: Synthetic oligonucleotide
  Antisense strand to SEQ ID NO: 889978
aauacugcagaugguaccc

SEQ ID NO: 889980 - RNA, 19 nt, Artificial Sequence
  Description of Artificial Sequence: Synthetic oligonucleotide
  Sense strand starting at position 241 of SEQ ID NO: 588793
cgcuaaaugcuggacaugu

SEQ ID NO: 889981 - RNA, 19 nt, Artificial Sequence
  Description of Artificial Sequence: Synthetic oligonucleotide
  Antisense strand to SEQ ID NO: 889980
acauguccagcauuuagcg

SEQ ID NO: 889982 - RNA, 19 nt, Artificial Sequence
  Description of Artificial Sequence: Synthetic oligonucleotide
  Sense strand starting at position 243 of SEQ ID NO: 588793
cuaaaugcuggacauguau

SEQ ID NO: 889983 - RNA, 19 nt, Artificial Sequence
  Description of Artificial Sequence: Synthetic oligonucleotide
  Antisense strand to SEQ ID NO: 889982
auacauguccagcauuuag

SEQ ID NO: 889984 - RNA, 19 nt, Artificial Sequence
  Description of Artificial Sequence: Synthetic oligonucleotide
  Sense strand starting at position 252 of SEQ ID NO: 588793
ggacauguauuaccucgau

SEQ ID NO: 889985 - RNA, 19 nt, Artificial Sequence
  Description of Artificial Sequence: Synthetic oligonucleotide
  Antisense strand to SEQ ID NO: 889984
aucgagguaauacaugucc

SEQ ID NO: 889986 - RNA, 19 nt, Artificial Sequence
  Description of Artificial Sequence: Synthetic oligonucleotide
  Sense strand starting at position 256 of SEQ ID NO: 588793
auguauuaccucgauucuc

SEQ ID NO: 889987 - RNA, 19 nt, Artificial Sequence
  Description of Artificial Sequence: Synthetic oligonucleotide
  Antisense strand to SEQ ID NO: 889986
gagaaucgagguaauacau

SEQ ID NO: 889988 - RNA, 19 nt, Artificial Sequence
  Description of Artificial Sequence: Synthetic oligonucleotide
  Sense strand starting at position 397 of SEQ ID NO: 588793
cugguugugggaggagaau

SEQ ID NO: 889989 - RNA, 19 nt, Artificial Sequence
  Description of Artificial Sequence: Synthetic oligonucleotide
  Antisense strand to SEQ ID NO: 889988
auucuccucccacaaccag

SEQ ID NO: 889990 - RNA, 19 nt, Artificial Sequence
  Description of Artificial Sequence: Synthetic oligonucleotide
  Sense strand starting at position 491 of SEQ ID NO: 588793
ccaggaaaguaaucugauu

SEQ ID NO: 889991 - RNA, 19 nt, Artificial Sequence
  Description of Artificial Sequence: Synthetic oligonucleotide
  Antisense strand to SEQ ID NO: 889990
aaucagauuacuuuccugg

SEQ ID NO: 889992 - RNA, 19 nt, Artificial Sequence
  Description of Artificial Sequence: Synthetic oligonucleotide
  Sense strand starting at position 539 of SEQ ID NO: 588793
uauucuuugggauaguuua

SEQ ID NO: 889993 - RNA, 19 nt, Artificial Sequence
  Description of Artificial Sequence: Synthetic oligonucleotide
  Antisense strand to SEQ ID NO: 889992
uaaacuaucccaaagaaua

SEQ ID NO: 889994 - RNA, 19 nt, Artificial Sequence
  Description of Artificial Sequence: Synthetic oligonucleotide
  Sense strand starting at position 566 of SEQ ID NO: 588793
uuugaaaccuagcuauagu

SEQ ID NO: 889995 - RNA, 19 nt, Artificial Sequence
  Description of Artificial Sequence: Synthetic oligonucleotide
  Antisense strand to SEQ ID NO: 889994
acuauagcuagguuucaaa

SEQ ID NO: 889996 - RNA, 19 nt, Artificial Sequence
  Description of Artificial Sequence: Synthetic oligonucleotide
  Sense strand starting at position 679 of SEQ ID NO: 588793
gcucgagcaauccucguau

SEQ ID NO: 889997 - RNA, 19 nt, Artificial Sequence
  Description of Artificial Sequence: Synthetic oligonucleotide
  Antisense strand to SEQ ID NO: 889996
auacgaggauugcucgagc

SEQ ID NO: 889998 - RNA, 19 nt, Artificial Sequence
  Description of Artificial Sequence: Synthetic oligonucleotide
  Sense strand starting at position 779 of SEQ ID NO: 588793
ucacuauguuaagcaggau

SEQ ID NO: 889999 - RNA, 19 nt, Artificial Sequence
  Description of Artificial Sequence: Synthetic oligonucleotide
  Antisense strand to SEQ ID NO: 889998
auccugcuuaacauaguga

SEQ ID NO: 890000 - RNA, 19 nt, Artificial Sequence
  Description of Artificial Sequence: Synthetic oligonucleotide
  Sense strand starting at position 923 of SEQ ID NO: 588793
gccugucucccuguaagca

SEQ ID NO: 890001 - RNA, 19 nt, Artificial Sequence
  Description of Artificial Sequence: Synthetic oligonucleotide
  Antisense strand to SEQ ID NO: 890000
ugcuuacagggagacaggc

SEQ ID NO: 890002 - RNA, 19 nt, Artificial Sequence
  Description of Artificial Sequence: Synthetic oligonucleotide
  Sense strand starting at position 924 of SEQ ID NO: 588793
ccugucucccuguaagcaa

SEQ ID NO: 890003 - RNA, 19 nt, Artificial Sequence
  Description of Artificial Sequence: Synthetic oligonucleotide
  Antisense strand to SEQ ID NO: 890002
uugcuuacagggagacagg

SEQ ID NO: 890004 - RNA, 19 nt, Artificial Sequence
  Description of Artificial Sequence: Synthetic oligonucleotide
  Sense strand starting at position 1022 of SEQ ID NO: 588793
ccacucauccuaggucgau

SEQ ID NO: 890005 - RNA, 19 nt, Artificial Sequence
  Description of Artificial Sequence: Synthetic oligonucleotide
  Antisense strand to SEQ ID NO: 890004
aucgaccuaggaugagugg

SEQ ID NO: 890006 - RNA, 19 nt, Artificial Sequence
  Description of Artificial Sequence: Synthetic oligonucleotide
  Sense strand starting at position 1196 of SEQ ID NO: 588793
gcgggaagcaaucaauaag

SEQ ID NO: 890007 - RNA, 19 nt, Artificial Sequence
  Description of Artificial Sequence: Synthetic oligonucleotide
  Antisense strand to SEQ ID NO: 890006
cuuauugauugcuucccgc

SEQ ID NO: 890008 - RNA, 19 nt, Artificial Sequence
  Description of Artificial Sequence: Synthetic oligonucleotide
  Sense strand starting at position 1228 of SEQ ID NO: 588793
ccuauccauccuugguuua

SEQ ID NO: 890009 - RNA, 19 nt, Artificial Sequence
  Description of Artificial Sequence: Synthetic oligonucleotide
  Antisense strand to SEQ ID NO: 890008
uaaaccaaggauggauagg

SEQ ID NO: 890010 - RNA, 19 nt, Artificial Sequence
  Description of Artificial Sequence: Synthetic oligonucleotide
  Sense strand starting at position 1247 of SEQ ID NO: 588793
guucuuguagagcaagaau

SEQ ID NO: 890011 - RNA, 19 nt, Artificial Sequence
  Description of Artificial Sequence: Synthetic oligonucleotide
  Antisense strand to SEQ ID NO: 890010
auucuugcucuacaagaac

SEQ ID NO: 890012 - RNA, 19 nt, Artificial Sequence
  Description of Artificial Sequence: Synthetic oligonucleotide
  Sense strand starting at position 1378 of SEQ ID NO: 588793
ccaccaaggucguuaugaa

SEQ ID NO: 890013 - RNA, 19 nt, Artificial Sequence
  Description of Artificial Sequence: Synthetic oligonucleotide
  Antisense strand to SEQ ID NO: 890012
uucauaacgaccuuggugg

SEQ ID NO: 890014 - RNA, 19 nt, Artificial Sequence
  Description of Artificial Sequence: Synthetic oligonucleotide
  Sense strand starting at position 1379 of SEQ ID NO: 588793
caccaaggucguuaugaac

SEQ ID NO: 890015 - RNA, 19 nt, Artificial Sequence
  Description of Artificial Sequence: Synthetic oligonucleotide
  Antisense strand to SEQ ID NO: 890014
guucauaacgaccuuggug

SEQ ID NO: 890016 - RNA, 19 nt, Artificial Sequence
  Description of Artificial Sequence: Synthetic oligonucleotide
  Sense strand starting at position 2067 of SEQ ID NO: 588793
gccucacaguguuuccaaa

SEQ ID NO: 890017 - RNA, 19 nt, Artificial Sequence
  Description of Artificial Sequence: Synthetic oligonucleotide
  Antisense strand to SEQ ID NO: 890016
uuuggaaacacugugaggc

SEQ ID NO: 890018 - RNA, 19 nt, Artificial Sequence
  Description of Artificial Sequence: Synthetic oligonucleotide
  Sense strand starting at position 2124 of SEQ ID NO: 588793
uuuguuauggcccaacugu

SEQ ID NO: 890019 - RNA, 19 nt, Artificial Sequence
  Description of Artificial Sequence: Synthetic oligonucleotide
  Antisense strand to SEQ ID NO: 890018
acaguugggccauaacaaa

SEQ ID NO: 890020 - RNA, 19 nt, Artificial Sequence
  Description of Artificial Sequence: Synthetic oligonucleotide
  Sense strand starting at position 2173 of SEQ ID NO: 588793
cacguucucccagagugaa

SEQ ID NO: 890021 - RNA, 19 nt, Artificial Sequence
  Description of Artificial Sequence: Synthetic oligonucleotide
  Antisense strand to SEQ ID NO: 890020
uucacucugggagaacgug

SEQ ID NO: 890022 - RNA, 19 nt, Artificial Sequence
  Description of Artificial Sequence: Synthetic oligonucleotide
  Sense strand starting at position 2189 of SEQ ID NO: 588793
gaagucagaggaugucaga

SEQ ID NO: 890023 - RNA, 19 nt, Artificial Sequence
  Description of Artificial Sequence: Synthetic oligonucleotide
  Antisense strand to SEQ ID NO: 890022
ucugacauccucugacuuc

SEQ ID NO: 890024 - RNA, 19 nt, Artificial Sequence
  Description of Artificial Sequence: Synthetic oligonucleotide
  Sense strand starting at position 2198 of SEQ ID NO: 588793
ggaugucagagcugggaga

SEQ ID NO: 890025 - RNA, 19 nt, Artificial Sequence
  Description of Artificial Sequence: Synthetic oligonucleotide
  Antisense strand to SEQ ID NO: 890024
ucucccagcucugacaucc

SEQ ID NO: 890026 - RNA, 19 nt, Artificial Sequence
  Description of Artificial Sequence: Synthetic oligonucleotide
  Sense strand starting at position 2286 of SEQ ID NO: 588793
ucaagaucacacugcaagu

SEQ ID NO: 890027 - RNA, 19 nt, Artificial Sequence
  Description of Artificial Sequence: Synthetic oligonucleotide
  Antisense strand to SEQ ID NO: 890026
acuugcagugugaucuuga

SEQ ID NO: 890028 - RNA, 19 nt, Artificial Sequence
  Description of Artificial Sequence: Synthetic oligonucleotide
  Sense strand starting at position 2360 of SEQ ID NO: 588793
auguacccucaguaauacu

SEQ ID NO: 890029 - RNA, 19 nt, Artificial Sequence
  Description of Artificial Sequence: Synthetic oligonucleotide
  Antisense strand to SEQ ID NO: 890028
aguauuacugaggguacau

SEQ ID NO: 890030 - RNA, 19 nt, Artificial Sequence
  Description of Artificial Sequence: Synthetic oligonucleotide
  Sense strand starting at position 2482 of SEQ ID NO: 588793
acuagagcucuuuggcacu

SEQ ID NO: 890031 - RNA, 19 nt, Artificial Sequence
  Description of Artificial Sequence: Synthetic oligonucleotide
  Antisense strand to SEQ ID NO: 890030
agugccaaagagcucuagu

SEQ ID NO: 890032 - RNA, 19 nt, Artificial Sequence
  Description of Artificial Sequence: Synthetic oligonucleotide
  Sense strand starting at position 2851 of SEQ ID NO: 588793
gcaccuauuccugauagga

SEQ ID NO: 890033 - RNA, 19 nt, Artificial Sequence
  Description of Artificial Sequence: Synthetic oligonucleotide
  Antisense strand to SEQ ID NO: 890032
uccuaucaggaauaggugc

SEQ ID NO: 890034 - RNA, 19 nt, Artificial Sequence
  Description of Artificial Sequence: Synthetic oligonucleotide
  Sense strand starting at position 2853 of SEQ ID NO: 588793
accuauuccugauaggaaa

SEQ ID NO: 890035 - RNA, 19 nt, Artificial Sequence
  Description of Artificial Sequence: Synthetic oligonucleotide
  Antisense strand to SEQ ID NO: 890034
uuuccuaucaggaauaggu

SEQ ID NO: 890036 - RNA, 19 nt, Artificial Sequence
  Description of Artificial Sequence: Synthetic oligonucleotide
  Sense strand starting at position 2890 of SEQ ID NO: 588793
uguauaccuagauguggaa

SEQ ID NO: 890037 - RNA, 19 nt, Artificial Sequence
  Description of Artificial Sequence: Synthetic oligonucleotide
  Antisense strand to SEQ ID NO: 890036
uuccacaucuagguauaca

SEQ ID NO: 890038 - RNA, 19 nt, Artificial Sequence
  Description of Artificial Sequence: Synthetic oligonucleotide
  Sense strand starting at position 2902 of SEQ ID NO: 588793
uguggaaagccuugaauau

SEQ ID NO: 890039 - RNA, 19 nt, Artificial Sequence
  Description of Artificial Sequence: Synthetic oligonucleotide
  Antisense strand to SEQ ID NO: 890038
auauucaaggcuuuccaca

SEQ ID NO: 890040 - RNA, 19 nt, Artificial Sequence
  Description of Artificial Sequence: Synthetic oligonucleotide
  Sense strand starting at position 2914 of SEQ ID NO: 588793
ugaauauccggcugagaag

SEQ ID NO: 890041 - RNA, 19 nt, Artificial Sequence
  Description of Artificial Sequence: Synthetic oligonucleotide
  Antisense strand to SEQ ID NO: 890040
cuucucagccggauauuca

SEQ ID NO: 890042 - RNA, 19 nt, Artificial Sequence
  Description of Artificial Sequence: Synthetic oligonucleotide
  Sense strand starting at position 2915 of SEQ ID NO: 588793
gaauauccggcugagaagu

SEQ ID NO: 890043 - RNA, 19 nt, Artificial Sequence
  Description of Artificial Sequence: Synthetic oligonucleotide
  Antisense strand to SEQ ID NO: 890042
acuucucagccggauauuc

SEQ ID NO: 890044 - RNA, 19 nt, Artificial Sequence
  Description of Artificial Sequence: Synthetic oligonucleotide
  Sense strand starting at position 2933 of SEQ ID NO: 588793
uauagacuuuguccaagag

SEQ ID NO: 890045 - RNA, 19 nt, Artificial Sequence
  Description of Artificial Sequence: Synthetic oligonucleotide
  Antisense strand to SEQ ID NO: 890044
cucuuggacaaagucuaua

SEQ ID NO: 890046 - RNA, 19 nt, Artificial Sequence
  Description of Artificial Sequence: Synthetic oligonucleotide
  Sense strand starting at position 2994 of SEQ ID NO: 588793
cuacguggagaauguuuaa

SEQ ID NO: 890047 - RNA, 19 nt, Artificial Sequence
  Description of Artificial Sequence: Synthetic oligonucleotide
  Antisense strand to SEQ ID NO: 890046
uuaaacauucuccacguag

SEQ ID NO: 890048 - RNA, 19 nt, Artificial Sequence
  Description of Artificial Sequence: Synthetic oligonucleotide
  Sense strand starting at position 3512 of SEQ ID NO: 588793
cagagugaaugggaaagua

SEQ ID NO: 890049 - RNA, 19 nt, Artificial Sequence
  Description of Artificial Sequence: Synthetic oligonucleotide
  Antisense strand to SEQ ID NO: 890048
uacuuucccauucacucug

SEQ ID NO: 890050 - RNA, 19 nt, Artificial Sequence
  Description of Artificial Sequence: Synthetic oligonucleotide
  Sense strand starting at position 3728 of SEQ ID NO: 588793
uugacuaucugcucaggaa

SEQ ID NO: 890051 - RNA, 19 nt, Artificial Sequence
  Description of Artificial Sequence: Synthetic oligonucleotide
  Antisense strand to SEQ ID NO: 890050
uuccugagcagauagucaa

SEQ ID NO: 890052 - RNA, 19 nt, Artificial Sequence
  Description of Artificial Sequence: Synthetic oligonucleotide
  Sense strand starting at position 3729 of SEQ ID NO: 588793
ugacuaucugcucaggaau

SEQ ID NO: 890053 - RNA, 19 nt, Artificial Sequence
  Description of Artificial Sequence: Synthetic oligonucleotide
  Antisense strand to SEQ ID NO: 890052
auuccugagcagauaguca

SEQ ID NO: 890054 - RNA, 19 nt, Artificial Sequence
  Description of Artificial Sequence: Synthetic oligonucleotide
  Sense strand starting at position 3732 of SEQ ID NO: 588793
cuaucugcucaggaauucu

SEQ ID NO: 890055 - RNA, 19 nt, Artificial Sequence
  Description of Artificial Sequence: Synthetic oligonucleotide
  Antisense strand to SEQ ID NO: 890054
agaauuccugagcagauag

SEQ ID NO: 890056 - RNA, 19 nt, Artificial Sequence
  Description of Artificial Sequence: Synthetic oligonucleotide
  Sense strand starting at position 3740 of SEQ ID NO: 588793
ucaggaauucugcagaccu

SEQ ID NO: 890057 - RNA, 19 nt, Artificial Sequence
  Description of Artificial Sequence: Synthetic oligonucleotide
  Antisense strand to SEQ ID NO: 890056
aggucugcagaauuccuga

SEQ ID NO: 890058 - RNA, 19 nt, Artificial Sequence
  Description of Artificial Sequence: Synthetic oligonucleotide
  Sense strand starting at position 42 of SEQ ID NO: 588794
gcuucccaucaugguguaa

SEQ ID NO: 890059 - RNA, 19 nt, Artificial Sequence
  Description of Artificial Sequence: Synthetic oligonucleotide
  Antisense strand to SEQ ID NO: 890058
uuacaccaugaugggaagc

SEQ ID NO: 890060 - RNA, 19 nt, Artificial Sequence
  Description of Artificial Sequence: Synthetic oligonucleotide
  Sense strand starting at position 148 of SEQ ID NO: 588794
ccagcagagugagaacuua

SEQ ID NO: 890061 - RNA, 19 nt, Artificial Sequence
  Description of Artificial Sequence: Synthetic oligonucleotide
  Antisense strand to SEQ ID NO: 890060
uaaguucucacucugcugg

SEQ ID NO: 890062 - RNA, 19 nt, Artificial Sequence
  Description of Artificial Sequence: Synthetic oligonucleotide
  Sense strand starting at position 156 of SEQ ID NO: 588794
gugagaacuuacucguuac

SEQ ID NO: 890063 - RNA, 19 nt, Artificial Sequence
  Description of Artificial Sequence: Synthetic oligonucleotide
  Antisense strand to SEQ ID NO: 890062
guaacgaguaaguucucac

SEQ ID NO: 890064 - RNA, 19 nt, Artificial Sequence
  Description of Artificial Sequence: Synthetic oligonucleotide
  Sense strand starting at position 159 of SEQ ID NO: 588794
agaacuuacucguuacuga

SEQ ID NO: 890065 - RNA, 19 nt, Artificial Sequence
  Description of Artificial Sequence: Synthetic oligonucleotide
  Antisense strand to SEQ ID NO: 890064
ucaguaacgaguaaguucu

SEQ ID NO: 890066 - RNA, 19 nt, Artificial Sequence
  Description of Artificial Sequence: Synthetic oligonucleotide
  Sense strand starting at position 160 of SEQ ID NO: 588794
gaacuuacucguuacugag

SEQ ID NO: 890067 - RNA, 19 nt, Artificial Sequence
  Description of Artificial Sequence: Synthetic oligonucleotide
  Antisense strand to SEQ ID NO: 890066
cucaguaacgaguaaguuc

SEQ ID NO: 890068 - RNA, 19 nt, Artificial Sequence
  Description of Artificial Sequence: Synthetic oligonucleotide
  Sense strand starting at position 386 of SEQ ID NO: 588794
ggauuacacgugugggcua

SEQ ID NO: 890069 - RNA, 19 nt, Artificial Sequence
  Description of Artificial Sequence: Synthetic oligonucleotide
  Antisense strand to SEQ ID NO: 890068
uagcccacacguguaaucc

SEQ ID NO: 890070 - RNA, 19 nt, Artificial Sequence
  Description of Artificial Sequence: Synthetic oligonucleotide
  Sense strand starting at position 450 of SEQ ID NO: 588794
gagcuaugauccuaacagg

SEQ ID NO: 890071 - RNA, 19 nt, Artificial Sequence
  Description of Artificial Sequence: Synthetic oligonucleotide
  Antisense strand to SEQ ID NO: 890070
ccuguuaggaucauagcuc

SEQ ID NO: 890072 - RNA, 19 nt, Artificial Sequence
  Description of Artificial Sequence: Synthetic oligonucleotide
  Sense strand starting at position 497 of SEQ ID NO: 588794
gugguaagaauguaugagu

SEQ ID NO: 890073 - RNA, 19 nt, Artificial Sequence
  Description of Artificial Sequence: Synthetic oligonucleotide
  Antisense strand to SEQ ID NO: 890072
acucauacauucuuaccac

SEQ ID NO: 890074 - RNA, 19 nt, Artificial Sequence
  Description of Artificial Sequence: Synthetic oligonucleotide
  Sense strand starting at position 525 of SEQ ID NO: 588794
ggaagagugucuaggagag

SEQ ID NO: 890075 - RNA, 19 nt, Artificial Sequence
  Description of Artificial Sequence: Synthetic oligonucleotide
  Antisense strand to SEQ ID NO: 890074
cucuccuagacacucuucc

SEQ ID NO: 890076 - RNA, 19 nt, Artificial Sequence
  Description of Artificial Sequence: Synthetic oligonucleotide
  Sense strand starting at position 545 of SEQ ID NO: 588794
gcaggcaaccucuacagaa

SEQ ID NO: 890077 - RNA, 19 nt, Artificial Sequence
  Description of Artificial Sequence: Synthetic oligonucleotide
  Antisense strand to SEQ ID NO: 890076
uucuguagagguugccugc

SEQ ID NO: 890078 - RNA, 19 nt, Artificial Sequence
  Description of Artificial Sequence: Synthetic oligonucleotide
  Sense strand starting at position 644 of SEQ ID NO: 588794
gcaaucuuagaugaucuau

SEQ ID NO: 890079 - RNA, 19 nt, Artificial Sequence
  Description of Artificial Sequence: Synthetic oligonucleotide
  Antisense strand to SEQ ID NO: 890078
auagaucaucuaagauugc

SEQ ID NO: 890080 - RNA, 19 nt, Artificial Sequence
  Description of Artificial Sequence: Synthetic oligonucleotide
  Sense strand starting at position 686 of SEQ ID NO: 588794
ucaucuguacaauagcgau

SEQ ID NO: 890081 - RNA, 19 nt, Artificial Sequence
  Description of Artificial Sequence: Synthetic oligonucleotide
  Antisense strand to SEQ ID NO: 890080
aucgcuauuguacagauga

SEQ ID NO: 890082 - RNA, 19 nt, Artificial Sequence
  Description of Artificial Sequence: Synthetic oligonucleotide
  Sense strand starting at position 692 of SEQ ID NO: 588794
guacaauagcgaugaugga

SEQ ID NO: 890083 - RNA, 19 nt, Artificial Sequence
  Description of Artificial Sequence: Synthetic oligonucleotide
  Antisense strand to SEQ ID NO: 890082
uccaucaucgcuauuguac

SEQ ID NO: 890084 - RNA, 19 nt, Artificial Sequence
  Description of Artificial Sequence: Synthetic oligonucleotide
  Sense strand starting at position 705 of SEQ ID NO: 588794
gauggaaguguccaccuca

SEQ ID NO: 890085 - RNA, 19 nt, Artificial Sequence
  Description of Artificial Sequence: Synthetic oligonucleotide
  Antisense strand to SEQ ID NO: 890084
ugagguggacacuuccauc

SEQ ID NO: 890086 - RNA, 19 nt, Artificial Sequence
  Description of Artificial Sequence: Synthetic oligonucleotide
  Sense strand starting at position 814 of SEQ ID NO: 588794
ccguaagugucgcuagaac

SEQ ID NO: 890087 - RNA, 19 nt, Artificial Sequence
  Description of Artificial Sequence: Synthetic oligonucleotide
  Antisense strand to SEQ ID NO: 890086
guucuagcgacacuuacgg

SEQ ID NO: 890088 - RNA, 19 nt, Artificial Sequence
  Description of Artificial Sequence: Synthetic oligonucleotide
  Sense strand starting at position 906 of SEQ ID NO: 588794
caguguguucuuucguugu

SEQ ID NO: 890089 - RNA, 19 nt, Artificial Sequence
  Description of Artificial Sequence: Synthetic oligonucleotide
  Antisense strand to SEQ ID NO: 890088
acaacgaaagaacacacug

SEQ ID NO: 890090 - RNA, 19 nt, Artificial Sequence
  Description of Artificial Sequence: Synthetic oligonucleotide
  Sense strand starting at position 976 of SEQ ID NO: 588794
gcgauuucggcuuacuacu

SEQ ID NO: 890091 - RNA, 19 nt, Artificial Sequence
  Description of Artificial Sequence: Synthetic oligonucleotide
  Antisense strand to SEQ ID NO: 890090
aguaguaagccgaaaucgc

SEQ ID NO: 890092 - RNA, 19 nt, Artificial Sequence
  Description of Artificial Sequence: Synthetic oligonucleotide
  Sense strand starting at position 1287 of SEQ ID NO: 588794
gguacaaggguuuaucuuu

SEQ ID NO: 890093 - RNA, 19 nt, Artificial Sequence
  Description of Artificial Sequence: Synthetic oligonucleotide
  Antisense strand to SEQ ID NO: 890092
aaagauaaacccuuguacc

SEQ ID NO: 890094 - RNA, 19 nt, Artificial Sequence
  Description of Artificial Sequence: Synthetic oligonucleotide
  Sense strand starting at position 1376 of SEQ ID NO: 588794
aggccaccuuucuugugaa

SEQ ID NO: 890095 - RNA, 19 nt, Artificial Sequence
  Description of Artificial Sequence: Synthetic oligonucleotide
  Antisense strand to SEQ ID NO: 890094
uucacaagaaagguggccu

SEQ ID NO: 890096 - RNA, 19 nt, Artificial Sequence
  Description of Artificial Sequence: Synthetic oligonucleotide
  Sense strand starting at position 2058 of SEQ ID NO: 588794
ggucaucgaccucgaguuu

SEQ ID NO: 890097 - RNA, 19 nt, Artificial Sequence
  Description of Artificial Sequence: Synthetic oligonucleotide
  Antisense strand to SEQ ID NO: 890096
aaacucgaggucgaugacc

SEQ ID NO: 890098 - RNA, 19 nt, Artificial Sequence
  Description of Artificial Sequence: Synthetic oligonucleotide
  Sense strand starting at position 2592 of SEQ ID NO: 588794
cgguaaucagaacgcaaca

SEQ ID NO: 890099 - RNA, 19 nt, Artificial Sequence
  Description of Artificial Sequence: Synthetic oligonucleotide
  Antisense strand to SEQ ID NO: 890098
uguugcguucugauuaccg

SEQ ID NO: 890100 - RNA, 19 nt, Artificial Sequence
  Description of Artificial Sequence: Synthetic oligonucleotide
  Sense strand starting at position 2674 of SEQ ID NO: 588794
ccgguuaggucaaggauug

SEQ ID NO: 890101 - RNA, 19 nt, Artificial Sequence
  Description of Artificial Sequence: Synthetic oligonucleotide
  Antisense strand to SEQ ID NO: 890100
caauccuugaccuaaccgg

SEQ ID NO: 890102 - RNA, 19 nt, Artificial Sequence
  Description of Artificial Sequence: Synthetic oligonucleotide
  Sense strand starting at position 2675 of SEQ ID NO: 588794
cgguuaggucaaggauuga

SEQ ID NO: 890103 - RNA, 19 nt, Artificial Sequence
  Description of Artificial Sequence: Synthetic oligonucleotide
  Antisense strand to SEQ ID NO: 890102
ucaauccuugaccuaaccg

SEQ ID NO: 890104 - RNA, 19 nt, Artificial Sequence
  Description of Artificial Sequence: Synthetic oligonucleotide
  Sense strand starting at position 2679 of SEQ ID NO: 588794
uaggucaaggauugaucuu

SEQ ID NO: 890105 - RNA, 19 nt, Artificial Sequence
  Description of Artificial Sequence: Synthetic oligonucleotide
  Antisense strand to SEQ ID NO: 890104
aagaucaauccuugaccua

SEQ ID NO: 890106 - RNA, 19 nt, Artificial Sequence
  Description of Artificial Sequence: Synthetic oligonucleotide
  Sense strand starting at position 2764 of SEQ ID NO: 588794
acuucuuuauuuggaagca

SEQ ID NO: 890107 - RNA, 19 nt, Artificial Sequence
  Description of Artificial Sequence: Synthetic oligonucleotide
  Antisense strand to SEQ ID NO: 890106
ugcuuccaaauaaagaagu

SEQ ID NO: 890108 - RNA, 19 nt, Artificial Sequence
  Description of Artificial Sequence: Synthetic oligonucleotide
  Sense strand starting at position 3052 of SEQ ID NO: 588794
guagauuugaugugcgugu

SEQ ID NO: 890109 - RNA, 19 nt, Artificial Sequence
  Description of Artificial Sequence: Synthetic oligonucleotide
  Antisense strand to SEQ ID NO: 890108
acacgcacaucaaaucuac

SEQ ID NO: 890110 - RNA, 19 nt, Artificial Sequence
  Description of Artificial Sequence: Synthetic oligonucleotide
  Sense strand starting at position 3056 of SEQ ID NO: 588794
auuugaugugcguguguaa

SEQ ID NO: 890111 - RNA, 19 nt, Artificial Sequence
  Description of Artificial Sequence: Synthetic oligonucleotide
  Antisense strand to SEQ ID NO: 890110
uuacacacgcacaucaaau

SEQ ID NO: 890112 - RNA, 19 nt, Artificial Sequence
  Description of Artificial Sequence: Synthetic oligonucleotide
  Sense strand starting at position 3102 of SEQ ID NO: 588794
aagugaggcuccuaggauu

SEQ ID NO: 890113 - RNA, 19 nt, Artificial Sequence
  Description of Artificial Sequence: Synthetic oligonucleotide
  Antisense strand to SEQ ID NO: 890112
aauccuaggagccucacuu

SEQ ID NO: 890114 - RNA, 19 nt, Artificial Sequence
  Description of Artificial Sequence: Synthetic oligonucleotide
  Sense strand starting at position 3215 of SEQ ID NO: 588794
cacacuugcugaguuugaa

SEQ ID NO: 890115 - RNA, 19 nt, Artificial Sequence
  Description of Artificial Sequence: Synthetic oligonucleotide
  Antisense strand to SEQ ID NO: 890114
uucaaacucagcaagugug

SEQ ID NO: 890116 - RNA, 19 nt, Artificial Sequence
  Description of Artificial Sequence: Synthetic oligonucleotide
  Sense strand starting at position 3302 of SEQ ID NO: 588794
gggucagugcuggagaugu

SEQ ID NO: 890117 - RNA, 19 nt, Artificial Sequence
  Description of Artificial Sequence: Synthetic oligonucleotide
  Antisense strand to SEQ ID NO: 890116
acaucuccagcacugaccc

SEQ ID NO: 890118 - RNA, 19 nt, Artificial Sequence
  Description of Artificial Sequence: Synthetic oligonucleotide
  Sense strand starting at position 3304 of SEQ ID NO: 588794
gucagugcuggagauguaa

SEQ ID NO: 890119 - RNA, 19 nt, Artificial Sequence
  Description of Artificial Sequence: Synthetic oligonucleotide
  Antisense strand to SEQ ID NO: 890118
uuacaucuccagcacugac

SEQ ID NO: 890120 - RNA, 19 nt, Artificial Sequence
  Description of Artificial Sequence: Synthetic oligonucleotide
  Sense strand starting at position 3306 of SEQ ID NO: 588794
cagugcuggagauguaauu

SEQ ID NO: 890121 - RNA, 19 nt, Artificial Sequence
  Description of Artificial Sequence: Synthetic oligonucleotide
  Antisense strand to SEQ ID NO: 890120
aauuacaucuccagcacug

SEQ ID NO: 890122 - RNA, 19 nt, Artificial Sequence
  Description of Artificial Sequence: Synthetic oligonucleotide
  Sense strand starting at position 3323 of SEQ ID NO: 588794
uuuggaaaucgucagcaca

SEQ ID NO: 890123 - RNA, 19 nt, Artificial Sequence
  Description of Artificial Sequence: Synthetic oligonucleotide
  Antisense strand to SEQ ID NO: 890122
ugugcugacgauuuccaaa

SEQ ID NO: 890124 - RNA, 19 nt, Artificial Sequence
  Description of Artificial Sequence: Synthetic oligonucleotide
  Sense strand starting at position 3325 of SEQ ID NO: 588794
uggaaaucgucagcacaua

SEQ ID NO: 890125 - RNA, 19 nt, Artificial Sequence
  Description of Artificial Sequence: Synthetic oligonucleotide
  Antisense strand to SEQ ID NO: 890124
uaugugcugacgauuucca

SEQ ID NO: 890126 - RNA, 19 nt, Artificial Sequence
  Description of Artificial Sequence: Synthetic oligonucleotide
  Sense strand starting at position 3326 of SEQ ID NO: 588794
ggaaaucgucagcacauaa

SEQ ID NO: 890127 - RNA, 19 nt, Artificial Sequence
  Description of Artificial Sequence: Synthetic oligonucleotide
  Antisense strand to SEQ ID NO: 890126
uuaugugcugacgauuucc

SEQ ID NO: 890128 - RNA, 19 nt, Artificial Sequence
  Description of Artificial Sequence: Synthetic oligonucleotide
  Sense strand starting at position 3356 of SEQ ID NO: 588794
acaugaaccuggguuaguu

SEQ ID NO: 890129 - RNA, 19 nt, Artificial Sequence
  Description of Artificial Sequence: Synthetic oligonucleotide
  Antisense strand to SEQ ID NO: 890128
aacuaacccagguucaugu

SEQ ID NO: 890130 - RNA, 19 nt, Artificial Sequence
  Description of Artificial Sequence: Synthetic oligonucleotide
  Sense strand starting at position 3503 of SEQ ID NO: 588794
ggaugugaguggcaucaga

SEQ ID NO: 890131 - RNA, 19 nt, Artificial Sequence
  Description of Artificial Sequence: Synthetic oligonucleotide
  Antisense strand to SEQ ID NO: 890130
ucugaugccacucacaucc

SEQ ID NO: 890132 - RNA, 19 nt, Artificial Sequence
  Description of Artificial Sequence: Synthetic oligonucleotide
  Sense strand starting at position 3596 of SEQ ID NO: 588794
cagauauggcacugagauu

SEQ ID NO: 890133 - RNA, 19 nt, Artificial Sequence
  Description of Artificial Sequence: Synthetic oligonucleotide
  Antisense strand to SEQ ID NO: 890132
aaucucagugccauaucug

SEQ ID NO: 890134 - RNA, 19 nt, Artificial Sequence
  Description of Artificial Sequence: Synthetic oligonucleotide
  Sense strand starting at position 3605 of SEQ ID NO: 588794
cacugagauugucagcaag

SEQ ID NO: 890135 - RNA, 19 nt, Artificial Sequence
  Description of Artificial Sequence: Synthetic oligonucleotide
  Antisense strand to SEQ ID NO: 890134
cuugcugacaaucucagug

SEQ ID NO: 890136 - RNA, 19 nt, Artificial Sequence
  Description of Artificial Sequence: Synthetic oligonucleotide
  Sense strand starting at position 3607 of SEQ ID NO: 588794
cugagauugucagcaaguc

SEQ ID NO: 890137 - RNA, 19 nt, Artificial Sequence
  Description of Artificial Sequence: Synthetic oligonucleotide
  Antisense strand to SEQ ID NO: 890136
gacuugcugacaaucucag

SEQ ID NO: 890138 - RNA, 19 nt, Artificial Sequence
  Description of Artificial Sequence: Synthetic oligonucleotide
  Sense strand starting at position 72 of SEQ ID NO: 588795
ccagcagagugagaacuua

SEQ ID NO: 890139 - RNA, 19 nt, Artificial Sequence
  Description of Artificial Sequence: Synthetic oligonucleotide
  Antisense strand to SEQ ID NO: 890138
uaaguucucacucugcugg

SEQ ID NO: 890140 - RNA, 19 nt, Artificial Sequence
  Description of Artificial Sequence: Synthetic oligonucleotide
  Sense strand starting at position 80 of SEQ ID NO: 588795
gugagaacuuacucguuac

SEQ ID NO: 890141 - RNA, 19 nt, Artificial Sequence
  Description of Artificial Sequence: Synthetic oligonucleotide
  Antisense strand to SEQ ID NO: 890140
guaacgaguaaguucucac

SEQ ID NO: 890142 - RNA, 19 nt, Artificial Sequence
  Description of Artificial Sequence: Synthetic oligonucleotide
  Sense strand starting at position 83 of SEQ ID NO: 588795
agaacuuacucguuacuga

SEQ ID NO: 890143 - RNA, 19 nt, Artificial Sequence
  Description of Artificial Sequence: Synthetic oligonucleotide
  Antisense strand to SEQ ID NO: 890142
ucaguaacgaguaaguucu

SEQ ID NO: 890144 - RNA, 19 nt, Artificial Sequence
  Description of Artificial Sequence: Synthetic oligonucleotide
  Sense strand starting at position 84 of SEQ ID NO: 588795
gaacuuacucguuacugag

SEQ ID NO: 890145 - RNA, 19 nt, Artificial Sequence
  Description of Artificial Sequence: Synthetic oligonucleotide
  Antisense strand to SEQ ID NO: 890144
cucaguaacgaguaaguuc

SEQ ID NO: 890146 - RNA, 19 nt, Artificial Sequence
  Description of Artificial Sequence: Synthetic oligonucleotide
  Sense strand starting at position 310 of SEQ ID NO: 588795
ggauuacacgugugggcua

SEQ ID NO: 890147 - RNA, 19 nt, Artificial Sequence
  Description of Artificial Sequence: Synthetic oligonucleotide
  Antisense strand to SEQ ID NO: 890146
uagcccacacguguaaucc

SEQ ID NO: 890148 - RNA, 19 nt, Artificial Sequence
  Description of Artificial Sequence: Synthetic oligonucleotide
  Sense strand starting at position 374 of SEQ ID NO: 588795
gagcuaugauccuaacagg

SEQ ID NO: 890149 - RNA, 19 nt, Artificial Sequence
  Description of Artificial Sequence: Synthetic oligonucleotide
  Antisense strand to SEQ ID NO: 890148
ccuguuaggaucauagcuc

SEQ ID NO: 890150 - RNA, 19 nt, Artificial Sequence
  Description of Artificial Sequence: Synthetic oligonucleotide
  Sense strand starting at position 421 of SEQ ID NO: 588795
gugguaagaauguaugagu

SEQ ID NO: 890151 - RNA, 19 nt, Artificial Sequence
  Description of Artificial Sequence: Synthetic oligonucleotide
  Antisense strand to SEQ ID NO: 890150
acucauacauucuuaccac

SEQ ID NO: 890152 - RNA, 19 nt, Artificial Sequence
  Description of Artificial Sequence: Synthetic oligonucleotide
  Sense strand starting at position 449 of SEQ ID NO: 588795
ggaagagugucuaggagag

SEQ ID NO: 890153 - RNA, 19 nt, Artificial Sequence
  Description of Artificial Sequence: Synthetic oligonucleotide
  Antisense strand to SEQ ID NO: 890152
cucuccuagacacucuucc

SEQ ID NO: 890154 - RNA, 19 nt, Artificial Sequence
  Description of Artificial Sequence: Synthetic oligonucleotide
  Sense strand starting at position 469 of SEQ ID NO: 588795
gcaggcaaccucuacagaa

SEQ ID NO: 890155 - RNA, 19 nt, Artificial Sequence
  Description of Artificial Sequence: Synthetic oligonucleotide
  Antisense strand to SEQ ID NO: 890154
uucuguagagguugccugc

SEQ ID NO: 890156 - RNA, 19 nt, Artificial Sequence
  Description of Artificial Sequence: Synthetic oligonucleotide
  Sense strand starting at position 568 of SEQ ID NO: 588795
gcaaucuuagaugaucuau

SEQ ID NO: 890157 - RNA, 19 nt, Artificial Sequence
  Description of Artificial Sequence: Synthetic oligonucleotide
  Antisense strand to SEQ ID NO: 890156
auagaucaucuaagauugc

SEQ ID NO: 890158 - RNA, 19 nt, Artificial Sequence
  Description of Artificial Sequence: Synthetic oligonucleotide
  Sense strand starting at position 610 of SEQ ID NO: 588795
ucaucuguacaauagcgau

SEQ ID NO: 890159 - RNA, 19 nt, Artificial Sequence
  Description of Artificial Sequence: Synthetic oligonucleotide
  Antisense strand to SEQ ID NO: 890158
aucgcuauuguacagauga

SEQ ID NO: 890160 - RNA, 19 nt, Artificial Sequence
  Description of Artificial Sequence: Synthetic oligonucleotide
  Sense strand starting at position 616 of SEQ ID NO: 588795
guacaauagcgaugaugga

SEQ ID NO: 890161 - RNA, 19 nt, Artificial Sequence
  Description of Artificial Sequence: Synthetic oligonucleotide
  Antisense strand to SEQ ID NO: 890160
uccaucaucgcuauuguac

SEQ ID NO: 890162 - RNA, 19 nt, Artificial Sequence
  Description of Artificial Sequence: Synthetic oligonucleotide
  Sense strand starting at position 629 of SEQ ID NO: 588795
gauggaaguguccaccuca

SEQ ID NO: 890163 - RNA, 19 nt, Artificial Sequence
  Description of Artificial Sequence: Synthetic oligonucleotide
  Antisense strand to SEQ ID NO: 890162
ugagguggacacuuccauc

SEQ ID NO: 890164 - RNA, 19 nt, Artificial Sequence
  Description of Artificial Sequence: Synthetic oligonucleotide
  Sense strand starting at position 738 of SEQ ID NO: 588795
ccguaagugucgcuagaac

SEQ ID NO: 890165 - RNA, 19 nt, Artificial Sequence
  Description of Artificial Sequence: Synthetic oligonucleotide
  Antisense strand to SEQ ID NO: 890164
guucuagcgacacuuacgg

SEQ ID NO: 890166 - RNA, 19 nt, Artificial Sequence
  Description of Artificial Sequence: Synthetic oligonucleotide
  Sense strand starting at position 830 of SEQ ID NO: 588795
caguguguucuuucguugu

SEQ ID NO: 890167 - RNA, 19 nt, Artificial Sequence
  Description of Artificial Sequence: Synthetic oligonucleotide
  Antisense strand to SEQ ID NO: 890166
acaacgaaagaacacacug

SEQ ID NO: 890168 - RNA, 19 nt, Artificial Sequence
  Description of Artificial Sequence: Synthetic oligonucleotide
  Sense strand starting at position 900 of SEQ ID NO: 588795
gcgauuucggcuuacuacu

SEQ ID NO: 890169 - RNA, 19 nt, Artificial Sequence
  Description of Artificial Sequence: Synthetic oligonucleotide
  Antisense strand to SEQ ID NO: 890168
aguaguaagccgaaaucgc

SEQ ID NO: 890170 - RNA, 19 nt, Artificial Sequence
  Description of Artificial Sequence: Synthetic oligonucleotide
  Sense strand starting at position 1211 of SEQ ID NO: 588795
gguacaaggguuuaucuuu

SEQ ID NO: 890171 - RNA, 19 nt, Artificial Sequence
  Description of Artificial Sequence: Synthetic oligonucleotide
  Antisense strand to SEQ ID NO: 890170
aaagauaaacccuuguacc

SEQ ID NO: 890172 - RNA, 19 nt, Artificial Sequence
  Description of Artificial Sequence: Synthetic oligonucleotide
  Sense strand starting at position 1300 of SEQ ID NO: 588795
aggccaccuuucuugugaa

SEQ ID NO: 890173 - RNA, 19 nt, Artificial Sequence
  Description of Artificial Sequence: Synthetic oligonucleotide
  Antisense strand to SEQ ID NO: 890172
uucacaagaaagguggccu

SEQ ID NO: 890174 - RNA, 19 nt, Artificial Sequence
  Description of Artificial Sequence: Synthetic oligonucleotide
  Sense strand starting at position 1982 of SEQ ID NO: 588795
ggucaucgaccucgaguuu

SEQ ID NO: 890175 - RNA, 19 nt, Artificial Sequence
  Description of Artificial Sequence: Synthetic oligonucleotide
  Antisense strand to SEQ ID NO: 890174
aaacucgaggucgaugacc

SEQ ID NO: 890176 - RNA, 19 nt, Artificial Sequence
  Description of Artificial Sequence: Synthetic oligonucleotide
  Sense strand starting at position 2516 of SEQ ID NO: 588795
cgguaaucagaacgcaaca

SEQ ID NO: 890177 - RNA, 19 nt, Artificial Sequence
  Description of Artificial Sequence: Synthetic oligonucleotide
  Antisense strand to SEQ ID NO: 890176
uguugcguucugauuaccg

SEQ ID NO: 890178 - RNA, 19 nt, Artificial Sequence
  Description of Artificial Sequence: Synthetic oligonucleotide
  Sense strand starting at position 2598 of SEQ ID NO: 588795
ccgguuaggucaaggauug

SEQ ID NO: 890179 - RNA, 19 nt, Artificial Sequence
  Description of Artificial Sequence: Synthetic oligonucleotide
  Antisense strand to SEQ ID NO: 890178
caauccuugaccuaaccgg

SEQ ID NO: 890180 - RNA, 19 nt, Artificial Sequence
  Description of Artificial Sequence: Synthetic oligonucleotide
  Sense strand starting at position 2599 of SEQ ID NO: 588795
cgguuaggucaaggauuga

SEQ ID NO: 890181 - RNA, 19 nt, Artificial Sequence
  Description of Artificial Sequence: Synthetic oligonucleotide
  Antisense strand to SEQ ID NO: 890180
ucaauccuugaccuaaccg

SEQ ID NO: 890182 - RNA, 19 nt, Artificial Sequence
  Description of Artificial Sequence: Synthetic oligonucleotide
  Sense strand starting at position 2603 of SEQ ID NO: 588795
uaggucaaggauugaucuu

SEQ ID NO: 890183 - RNA, 19 nt, Artificial Sequence
  Description of Artificial Sequence: Synthetic oligonucleotide
  Antisense strand to SEQ ID NO: 890182
aagaucaauccuugaccua

SEQ ID NO: 890184 - RNA, 19 nt, Artificial Sequence
  Description of Artificial Sequence: Synthetic oligonucleotide
  Sense strand starting at position 2688 of SEQ ID NO: 588795
acuucuuuauuuggaagca

SEQ ID NO: 890185 - RNA, 19 nt, Artificial Sequence
  Description of Artificial Sequence: Synthetic oligonucleotide
  Antisense strand to SEQ ID NO: 890184
ugcuuccaaauaaagaagu

SEQ ID NO: 890186 - RNA, 19 nt, Artificial Sequence
  Description of Artificial Sequence: Synthetic oligonucleotide
  Sense strand starting at position 2976 of SEQ ID NO: 588795
guagauuugaugugcgugu

SEQ ID NO: 890187 - RNA, 19 nt, Artificial Sequence
  Description of Artificial Sequence: Synthetic oligonucleotide
  Antisense strand to SEQ ID NO: 890186
acacgcacaucaaaucuac

SEQ ID NO: 890188 - RNA, 19 nt, Artificial Sequence
  Description of Artificial Sequence: Synthetic oligonucleotide
  Sense strand starting at position 2980 of SEQ ID NO: 588795
auuugaugugcguguguaa

SEQ ID NO: 890189 - RNA, 19 nt, Artificial Sequence
  Description of Artificial Sequence: Synthetic oligonucleotide
  Antisense strand to SEQ ID NO: 890188
uuacacacgcacaucaaau

SEQ ID NO: 890190 - RNA, 19 nt, Artificial Sequence
  Description of Artificial Sequence: Synthetic oligonucleotide
  Sense strand starting at position 3026 of SEQ ID NO: 588795
aagugaggcuccuaggauu

SEQ ID NO: 890191 - RNA, 19 nt, Artificial Sequence
  Description of Artificial Sequence: Synthetic oligonucleotide
  Antisense strand to SEQ ID NO: 890190
aauccuaggagccucacuu

SEQ ID NO: 890192 - RNA, 19 nt, Artificial Sequence
  Description of Artificial Sequence: Synthetic oligonucleotide
  Sense strand starting at position 3139 of SEQ ID NO: 588795
cacacuugcugaguuugaa

SEQ ID NO: 890193 - RNA, 19 nt, Artificial Sequence
  Description of Artificial Sequence: Synthetic oligonucleotide
  Antisense strand to SEQ ID NO: 890192
uucaaacucagcaagugug

SEQ ID NO: 890194 - RNA, 19 nt, Artificial Sequence
  Description of Artificial Sequence: Synthetic oligonucleotide
  Sense strand starting at position 3226 of SEQ ID NO: 588795
gggucagugcuggagaugu

SEQ ID NO: 890195 - RNA, 19 nt, Artificial Sequence
  Description of Artificial Sequence: Synthetic oligonucleotide
  Antisense strand to SEQ ID NO: 890194
acaucuccagcacugaccc

SEQ ID NO: 890196 - RNA, 19 nt, Artificial Sequence
  Description of Artificial Sequence: Synthetic oligonucleotide
  Sense strand starting at position 3228 of SEQ ID NO: 588795
gucagugcuggagauguaa

SEQ ID NO: 890197 - RNA, 19 nt, Artificial Sequence
  Description of Artificial Sequence: Synthetic oligonucleotide
  Antisense strand to SEQ ID NO: 890196
uuacaucuccagcacugac

SEQ ID NO: 890198 - RNA, 19 nt, Artificial Sequence
  Description of Artificial Sequence: Synthetic oligonucleotide
  Sense strand starting at position 3230 of SEQ ID NO: 588795
cagugcuggagauguaauu

SEQ ID NO: 890199 - RNA, 19 nt, Artificial Sequence
  Description of Artificial Sequence: Synthetic oligonucleotide
  Antisense strand to SEQ ID NO: 890198
aauuacaucuccagcacug

SEQ ID NO: 890200 - RNA, 19 nt, Artificial Sequence
  Description of Artificial Sequence: Synthetic oligonucleotide
  Sense strand starting at position 3247 of SEQ ID NO: 588795
uuuggaaaucgucagcaca

SEQ ID NO: 890201 - RNA, 19 nt, Artificial Sequence
  Description of Artificial Sequence: Synthetic oligonucleotide
  Antisense strand to SEQ ID NO: 890200
ugugcugacgauuuccaaa

SEQ ID NO: 890202 - RNA, 19 nt, Artificial Sequence
  Description of Artificial Sequence: Synthetic oligonucleotide
  Sense strand starting at position 3249 of SEQ ID NO: 588795
uggaaaucgucagcacaua

SEQ ID NO: 890203 - RNA, 19 nt, Artificial Sequence
  Description of Artificial Sequence: Synthetic oligonucleotide
  Antisense strand to SEQ ID NO: 890202
uaugugcugacgauuucca

SEQ ID NO: 890204 - RNA, 19 nt, Artificial Sequence
  Description of Artificial Sequence: Synthetic oligonucleotide
  Sense strand starting at position 3250 of SEQ ID NO: 588795
ggaaaucgucagcacauaa

SEQ ID NO: 890205 - RNA, 19 nt, Artificial Sequence
  Description of Artificial Sequence: Synthetic oligonucleotide
  Antisense strand to SEQ ID NO: 890204
uuaugugcugacgauuucc

SEQ ID NO: 890206 - RNA, 19 nt, Artificial Sequence
  Description of Artificial Sequence: Synthetic oligonucleotide
  Sense strand starting at position 3280 of SEQ ID NO: 588795
acaugaaccuggguuaguu

SEQ ID NO: 890207 - RNA, 19 nt, Artificial Sequence
  Description of Artificial Sequence: Synthetic oligonucleotide
  Antisense strand to SEQ ID NO: 890206
aacuaacccagguucaugu

SEQ ID NO: 890208 - RNA, 19 nt, Artificial Sequence
  Description of Artificial Sequence: Synthetic oligonucleotide
  Sense strand starting at position 3427 of SEQ ID NO: 588795
ggaugugaguggcaucaga

SEQ ID NO: 890209 - RNA, 19 nt, Artificial Sequence
  Description of Artificial Sequence: Synthetic oligonucleotide
  Antisense strand to SEQ ID NO: 890208
ucugaugccacucacaucc

SEQ ID NO: 890210 - RNA, 19 nt, Artificial Sequence
  Description of Artificial Sequence: Synthetic oligonucleotide
  Sense strand starting at position 3520 of SEQ ID NO: 588795
cagauauggcacugagauu

SEQ ID NO: 890211 - RNA, 19 nt, Artificial Sequence
  Description of Artificial Sequence: Synthetic oligonucleotide
  Antisense strand to SEQ ID NO: 890210
aaucucagugccauaucug

SEQ ID NO: 890212 - RNA, 19 nt, Artificial Sequence
  Description of Artificial Sequence: Synthetic oligonucleotide
  Sense strand starting at position 3529 of SEQ ID NO: 588795
cacugagauugucagcaag

SEQ ID NO: 890213 - RNA, 19 nt, Artificial Sequence
  Description of Artificial Sequence: Synthetic oligonucleotide
  Antisense strand to SEQ ID NO: 890212
cuugcugacaaucucagug

SEQ ID NO: 890214 - RNA, 19 nt, Artificial Sequence
  Description of Artificial Sequence: Synthetic oligonucleotide
  Sense strand starting at position 3531 of SEQ ID NO: 588795
cugagauugucagcaaguc

SEQ ID NO: 890215 - RNA, 19 nt, Artificial Sequence
  Description of Artificial Sequence: Synthetic oligonucleotide
  Antisense strand to SEQ ID NO: 890214
gacuugcugacaaucucag

SEQ ID NO: 890216 - RNA, 19 nt, Artificial Sequence
  Description of Artificial Sequence: Synthetic oligonucleotide
  Sense strand starting at position 3945 of SEQ ID NO: 588795
ugguauggaucuccagaca

SEQ ID NO: 890217 - RNA, 19 nt, Artificial Sequence
  Description of Artificial Sequence: Synthetic oligonucleotide
  Antisense strand to SEQ ID NO: 890216
ugucuggagauccauacca

SEQ ID NO: 890218 - RNA, 19 nt, Artificial Sequence
  Description of Artificial Sequence: Synthetic oligonucleotide
  Sense strand starting at position 5 of SEQ ID NO: 588796
gcuggaagauuaucuacca

SEQ ID NO: 890219 - RNA, 19 nt, Artificial Sequence
  Description of Artificial Sequence: Synthetic oligonucleotide
  Antisense strand to SEQ ID NO: 890218
ugguagauaaucuuccagc

SEQ ID NO: 890220 - RNA, 19 nt, Artificial Sequence
  Description of Artificial Sequence: Synthetic oligonucleotide
  Sense strand starting at position 118 of SEQ ID NO: 588796
ucuguaauucuaggacuuu

SEQ ID NO: 890221 - RNA, 19 nt, Artificial Sequence
  Description of Artificial Sequence: Synthetic oligonucleotide
  Antisense strand to SEQ ID NO: 890220
aaaguccuagaauuacaga

SEQ ID NO: 890222 - RNA, 19 nt, Artificial Sequence
  Description of Artificial Sequence: Synthetic oligonucleotide
  Sense strand starting at position 199 of SEQ ID NO: 588796
gugagaucuuaccucuauu

SEQ ID NO: 890223 - RNA, 19 nt, Artificial Sequence
  Description of Artificial Sequence: Synthetic oligonucleotide
  Antisense strand to SEQ ID NO: 890222
aauagagguaagaucucac

SEQ ID NO: 890224 - RNA, 19 nt, Artificial Sequence
  Description of Artificial Sequence: Synthetic oligonucleotide
  Sense strand starting at position 320 of SEQ ID NO: 588796
cuaugaucgcacuaccacu

SEQ ID NO: 890225 - RNA, 19 nt, Artificial Sequence
  Description of Artificial Sequence: Synthetic oligonucleotide
  Antisense strand to SEQ ID NO: 890224
agugguagugcgaucauag

SEQ ID NO: 890226 - RNA, 19 nt, Artificial Sequence
  Description of Artificial Sequence: Synthetic oligonucleotide
  Sense strand starting at position 517 of SEQ ID NO: 588796
ucaugugaauagguuauga

SEQ ID NO: 890227 - RNA, 19 nt, Artificial Sequence
  Description of Artificial Sequence: Synthetic oligonucleotide
  Antisense strand to SEQ ID NO: 890226
ucauaaccuauucacauga

SEQ ID NO: 890228 - RNA, 19 nt, Artificial Sequence
  Description of Artificial Sequence: Synthetic oligonucleotide
  Sense strand starting at position 535 of SEQ ID NO: 588796
aauaaaguaccagguaagu

SEQ ID NO: 890229 - RNA, 19 nt, Artificial Sequence
  Description of Artificial Sequence: Synthetic oligonucleotide
  Antisense strand to SEQ ID NO: 890228
acuuaccugguacuuuauu

SEQ ID NO: 890230 - RNA, 19 nt, Artificial Sequence
  Description of Artificial Sequence: Synthetic oligonucleotide
  Sense strand starting at position 574 of SEQ ID NO: 588796
auccauacucuuugaguag

SEQ ID NO: 890231 - RNA, 19 nt, Artificial Sequence
  Description of Artificial Sequence: Synthetic oligonucleotide
  Antisense strand to SEQ ID NO: 890230
cuacucaaagaguauggau

SEQ ID NO: 890232 - RNA, 19 nt, Artificial Sequence
  Description of Artificial Sequence: Synthetic oligonucleotide
  Sense strand starting at position 577 of SEQ ID NO: 588796
cauacucuuugaguaggau

SEQ ID NO: 890233 - RNA, 19 nt, Artificial Sequence
  Description of Artificial Sequence: Synthetic oligonucleotide
  Antisense strand to SEQ ID NO: 890232
auccuacucaaagaguaug

SEQ ID NO: 890234 - RNA, 19 nt, Artificial Sequence
  Description of Artificial Sequence: Synthetic oligonucleotide
  Sense strand starting at position 652 of SEQ ID NO: 588796
gguacugaaucaccugaaa

SEQ ID NO: 890235 - RNA, 19 nt, Artificial Sequence
  Description of Artificial Sequence: Synthetic oligonucleotide
  Antisense strand to SEQ ID NO: 890234
uuucaggugauucaguacc

SEQ ID NO: 890236 - RNA, 19 nt, Artificial Sequence
  Description of Artificial Sequence: Synthetic oligonucleotide
  Sense strand starting at position 1067 of SEQ ID NO: 588796
cagucaggucucgauuauu

SEQ ID NO: 890237 - RNA, 19 nt, Artificial Sequence
  Description of Artificial Sequence: Synthetic oligonucleotide
  Antisense strand to SEQ ID NO: 890236
aauaaucgagaccugacug

SEQ ID NO: 890238 - RNA, 19 nt, Artificial Sequence
  Description of Artificial Sequence: Synthetic oligonucleotide
  Sense strand starting at position 1070 of SEQ ID NO: 588796
ucaggucucgauuauugaa

SEQ ID NO: 890239 - RNA, 19 nt, Artificial Sequence
  Description of Artificial Sequence: Synthetic oligonucleotide
  Antisense strand to SEQ ID NO: 890238
uucaauaaucgagaccuga

SEQ ID NO: 890240 - RNA, 19 nt, Artificial Sequence
  Description of Artificial Sequence: Synthetic oligonucleotide
  Sense strand starting at position 1072 of SEQ ID NO: 588796
aggucucgauuauugaaau

SEQ ID NO: 890241 - RNA, 19 nt, Artificial Sequence
  Description of Artificial Sequence: Synthetic oligonucleotide
  Antisense strand to SEQ ID NO: 890240
auuucaauaaucgagaccu

SEQ ID NO: 890242 - RNA, 19 nt, Artificial Sequence
  Description of Artificial Sequence: Synthetic oligonucleotide
  Sense strand starting at position 1218 of SEQ ID NO: 588796
gcccacguuacgucucuaa

SEQ ID NO: 890243 - RNA, 19 nt, Artificial Sequence
  Description of Artificial Sequence: Synthetic oligonucleotide
  Antisense strand to SEQ ID NO: 890242
uuagagacguaacgugggc

SEQ ID NO: 890244 - RNA, 19 nt, Artificial Sequence
  Description of Artificial Sequence: Synthetic oligonucleotide
  Sense strand starting at position 1229 of SEQ ID NO: 588796
gucucuaaugggcaagaca

SEQ ID NO: 890245 - RNA, 19 nt, Artificial Sequence
  Description of Artificial Sequence: Synthetic oligonucleotide
  Antisense strand to SEQ ID NO: 890244
ugucuugcccauuagagac

SEQ ID NO: 890246 - RNA, 19 nt, Artificial Sequence
  Description of Artificial Sequence: Synthetic oligonucleotide
  Sense strand starting at position 2185 of SEQ ID NO: 588796
agcacaauucucgaacaau

SEQ ID NO: 890247 - RNA, 19 nt, Artificial Sequence
  Description of Artificial Sequence: Synthetic oligonucleotide
  Antisense strand to SEQ ID NO: 890246
auuguucgagaauugugcu

SEQ ID NO: 890248 - RNA, 19 nt, Artificial Sequence
  Description of Artificial Sequence: Synthetic oligonucleotide
  Sense strand starting at position 2310 of SEQ ID NO: 588796
uuccguucgcucuuuaagu

SEQ ID NO: 890249 - RNA, 19 nt, Artificial Sequence
  Description of Artificial Sequence: Synthetic oligonucleotide
  Antisense strand to SEQ ID NO: 890248
acuuaaagagcgaacggaa

SEQ ID NO: 890250 - RNA, 19 nt, Artificial Sequence
  Description of Artificial Sequence: Synthetic oligonucleotide
  Sense strand starting at position 2315 of SEQ ID NO: 588796
uucgcucuuuaaguauuua

SEQ ID NO: 890251 - RNA, 19 nt, Artificial Sequence
  Description of Artificial Sequence: Synthetic oligonucleotide
  Antisense strand to SEQ ID NO: 890250
uaaauacuuaaagagcgaa

SEQ ID NO: 890252 - RNA, 19 nt, Artificial Sequence
  Description of Artificial Sequence: Synthetic oligonucleotide
  Sense strand starting at position 2424 of SEQ ID NO: 588796
gaccacguucuggaguuau

SEQ ID NO: 890253 - RNA, 19 nt, Artificial Sequence
  Description of Artificial Sequence: Synthetic oligonucleotide
  Antisense strand to SEQ ID NO: 890252
auaacuccagaacgugguc

SEQ ID NO: 890254 - RNA, 19 nt, Artificial Sequence
  Description of Artificial Sequence: Synthetic oligonucleotide
  Sense strand starting at position 2428 of SEQ ID NO: 588796
acguucuggaguuauuaau

SEQ ID NO: 890255 - RNA, 19 nt, Artificial Sequence
  Description of Artificial Sequence: Synthetic oligonucleotide
  Antisense strand to SEQ ID NO: 890254
auuaauaacuccagaacgu

SEQ ID NO: 890256 - RNA, 19 nt, Artificial Sequence
  Description of Artificial Sequence: Synthetic oligonucleotide
  Sense strand starting at position 2479 of SEQ ID NO: 588796
cugucugugacgcuguuaa

SEQ ID NO: 890257 - RNA, 19 nt, Artificial Sequence
  Description of Artificial Sequence: Synthetic oligonucleotide
  Antisense strand to SEQ ID NO: 890256
uuaacagcgucacagacag

SEQ ID NO: 890258 - RNA, 19 nt, Artificial Sequence
  Description of Artificial Sequence: Synthetic oligonucleotide
  Sense strand starting at position 2549 of SEQ ID NO: 588796
ggcugucuucuugacaauu

SEQ ID NO: 890259 - RNA, 19 nt, Artificial Sequence
  Description of Artificial Sequence: Synthetic oligonucleotide
  Antisense strand to SEQ ID NO: 890258
aauugucaagaagacagcc

SEQ ID NO: 890260 - RNA, 19 nt, Artificial Sequence
  Description of Artificial Sequence: Synthetic oligonucleotide
  Sense strand starting at position 2668 of SEQ ID NO: 588796
ggcucacucacaggauaug

SEQ ID NO: 890261 - RNA, 19 nt, Artificial Sequence
  Description of Artificial Sequence: Synthetic oligonucleotide
  Antisense strand to SEQ ID NO: 890260
cauauccugugagugagcc

SEQ ID NO: 890262 - RNA, 19 nt, Artificial Sequence
  Description of Artificial Sequence: Synthetic oligonucleotide
  Sense strand starting at position 2696 of SEQ ID NO: 588796
agguuauaagaaggugcau

SEQ ID NO: 890263 - RNA, 19 nt, Artificial Sequence
  Description of Artificial Sequence: Synthetic oligonucleotide
  Antisense strand to SEQ ID NO: 890262
augcaccuucuuauaaccu

SEQ ID NO: 890264 - RNA, 19 nt, Artificial Sequence
  Description of Artificial Sequence: Synthetic oligonucleotide
  Sense strand starting at position 2717 of SEQ ID NO: 588796
ucuuaacgucucgaagaca

SEQ ID NO: 890265 - RNA, 19 nt, Artificial Sequence
  Description of Artificial Sequence: Synthetic oligonucleotide
  Antisense strand to SEQ ID NO: 890264
ugucuucgagacguuaaga

SEQ ID NO: 890266 - RNA, 19 nt, Artificial Sequence
  Description of Artificial Sequence: Synthetic oligonucleotide
  Sense strand starting at position 2840 of SEQ ID NO: 588796
ccguguagucucuuucuac

SEQ ID NO: 890267 - RNA, 19 nt, Artificial Sequence
  Description of Artificial Sequence: Synthetic oligonucleotide
  Antisense strand to SEQ ID NO: 890266
guagaaagagacuacacgg

SEQ ID NO: 890268 - RNA, 19 nt, Artificial Sequence
  Description of Artificial Sequence: Synthetic oligonucleotide
  Sense strand starting at position 2864 of SEQ ID NO: 588796
auguaugcaucucugauaa

SEQ ID NO: 890269 - RNA, 19 nt, Artificial Sequence
  Description of Artificial Sequence: Synthetic oligonucleotide
  Antisense strand to SEQ ID NO: 890268
uuaucagagaugcauacau

SEQ ID NO: 890270 - RNA, 19 nt, Artificial Sequence
  Description of Artificial Sequence: Synthetic oligonucleotide
  Sense strand starting at position 3181 of SEQ ID NO: 588796
guuacuuaucuauacggaa

SEQ ID NO: 890271 - RNA, 19 nt, Artificial Sequence
  Description of Artificial Sequence: Synthetic oligonucleotide
  Antisense strand to SEQ ID NO: 890270
uuccguauagauaaguaac

SEQ ID NO: 890272 - RNA, 19 nt, Artificial Sequence
  Description of Artificial Sequence: Synthetic oligonucleotide
  Sense strand starting at position 3230 of SEQ ID NO: 588796
uaguaauaccgguaguaag

SEQ ID NO: 890273 - RNA, 19 nt, Artificial Sequence
  Description of Artificial Sequence: Synthetic oligonucleotide
  Antisense strand to SEQ ID NO: 890272
cuuacuaccgguauuacua

SEQ ID NO: 890274 - RNA, 19 nt, Artificial Sequence
  Description of Artificial Sequence: Synthetic oligonucleotide
  Sense strand starting at position 3273 of SEQ ID NO: 588796
gcaauuaaguuaucuggag

SEQ ID NO: 890275 - RNA, 19 nt, Artificial Sequence
  Description of Artificial Sequence: Synthetic oligonucleotide
  Antisense strand to SEQ ID NO: 890274
cuccagauaacuuaauugc

SEQ ID NO: 890276 - RNA, 19 nt, Artificial Sequence
  Description of Artificial Sequence: Synthetic oligonucleotide
  Sense strand starting at position 3274 of SEQ ID NO: 588796
caauuaaguuaucuggaga

SEQ ID NO: 890277 - RNA, 19 nt, Artificial Sequence
  Description of Artificial Sequence: Synthetic oligonucleotide
  Antisense strand to SEQ ID NO: 890276
ucuccagauaacuuaauug

SEQ ID NO: 890278 - RNA, 19 nt, Artificial Sequence
  Description of Artificial Sequence: Synthetic oligonucleotide
  Sense strand starting at position 3279 of SEQ ID NO: 588796
aaguuaucuggagaggcuu

SEQ ID NO: 890279 - RNA, 19 nt, Artificial Sequence
  Description of Artificial Sequence: Synthetic oligonucleotide
  Antisense strand to SEQ ID NO: 890278
aagccucuccagauaacuu

SEQ ID NO: 890280 - RNA, 19 nt, Artificial Sequence
  Description of Artificial Sequence: Synthetic oligonucleotide
  Sense strand starting at position 3281 of SEQ ID NO: 588796
guuaucuggagaggcuuaa

SEQ ID NO: 890281 - RNA, 19 nt, Artificial Sequence
  Description of Artificial Sequence: Synthetic oligonucleotide
  Antisense strand to SEQ ID NO: 890280
uuaagccucuccagauaac

SEQ ID NO: 890282 - RNA, 19 nt, Artificial Sequence
  Description of Artificial Sequence: Synthetic oligonucleotide
  Sense strand starting at position 3285 of SEQ ID NO: 588796
ucuggagaggcuuaagagu

SEQ ID NO: 890283 - RNA, 19 nt, Artificial Sequence
  Description of Artificial Sequence: Synthetic oligonucleotide
  Antisense strand to SEQ ID NO: 890282
acucuuaagccucuccaga

SEQ ID NO: 890284 - RNA, 19 nt, Artificial Sequence
  Description of Artificial Sequence: Synthetic oligonucleotide
  Sense strand starting at position 3324 of SEQ ID NO: 588796
aggauucucucacucuuga

SEQ ID NO: 890285 - RNA, 19 nt, Artificial Sequence
  Description of Artificial Sequence: Synthetic oligonucleotide
  Antisense strand to SEQ ID NO: 890284
ucaagagugagagaauccu

SEQ ID NO: 890286 - RNA, 19 nt, Artificial Sequence
  Description of Artificial Sequence: Synthetic oligonucleotide
  Sense strand starting at position 3381 of SEQ ID NO: 588796
uagggaggaugucucucau

SEQ ID NO: 890287 - RNA, 19 nt, Artificial Sequence
  Description of Artificial Sequence: Synthetic oligonucleotide
  Antisense strand to SEQ ID NO: 890286
augagagacauccucccua

SEQ ID NO: 890288 - RNA, 19 nt, Artificial Sequence
  Description of Artificial Sequence: Synthetic oligonucleotide
  Sense strand starting at position 3491 of SEQ ID NO: 588796
gucaauaugcaagaauggu

SEQ ID NO: 890289 - RNA, 19 nt, Artificial Sequence
  Description of Artificial Sequence: Synthetic oligonucleotide
  Antisense strand to SEQ ID NO: 890288
accauucuugcauauugac

SEQ ID NO: 890290 - RNA, 19 nt, Artificial Sequence
  Description of Artificial Sequence: Synthetic oligonucleotide
  Sense strand starting at position 3571 of SEQ ID NO: 588796
auaaaucaucccugggucu

SEQ ID NO: 890291 - RNA, 19 nt, Artificial Sequence
  Description of Artificial Sequence: Synthetic oligonucleotide
  Antisense strand to SEQ ID NO: 890290
agacccagggaugauuuau

SEQ ID NO: 890292 - RNA, 19 nt, Artificial Sequence
  Description of Artificial Sequence: Synthetic oligonucleotide
  Sense strand starting at position 3608 of SEQ ID NO: 588796
guugcaagaagguaugaga

SEQ ID NO: 890293 - RNA, 19 nt, Artificial Sequence
  Description of Artificial Sequence: Synthetic oligonucleotide
  Antisense strand to SEQ ID NO: 890292
ucucauaccuucuugcaac

SEQ ID NO: 890294 - RNA, 19 nt, Artificial Sequence
  Description of Artificial Sequence: Synthetic oligonucleotide
  Sense strand starting at position 3747 of SEQ ID NO: 588796
guuggaaagcauuaaccua

SEQ ID NO: 890295 - RNA, 19 nt, Artificial Sequence
  Description of Artificial Sequence: Synthetic oligonucleotide
  Antisense strand to SEQ ID NO: 890294
uagguuaaugcuuuccaac

SEQ ID NO: 890296 - RNA, 19 nt, Artificial Sequence
  Description of Artificial Sequence: Synthetic oligonucleotide
  Sense strand starting at position 3883 of SEQ ID NO: 588796
gagacuuccgucuauccaa

SEQ ID NO: 890297 - RNA, 19 nt, Artificial Sequence
  Description of Artificial Sequence: Synthetic oligonucleotide
  Antisense strand to SEQ ID NO: 890296
uuggauagacggaagucuc

SEQ ID NO: 890298 - RNA, 19 nt, Artificial Sequence
  Description of Artificial Sequence: Synthetic oligonucleotide
  Sense strand starting at position 41 of SEQ ID NO: 588797
caagcugcugugucaguua

SEQ ID NO: 890299 - RNA, 19 nt, Artificial Sequence
  Description of Artificial Sequence: Synthetic oligonucleotide
  Antisense strand to SEQ ID NO: 890298
uaacugacacagcagcuug

SEQ ID NO: 890300 - RNA, 19 nt, Artificial Sequence
  Description of Artificial Sequence: Synthetic oligonucleotide
  Sense strand starting at position 46 of SEQ ID NO: 588797
ugcugugucaguuaaauca

SEQ ID NO: 890301 - RNA, 19 nt, Artificial Sequence
  Description of Artificial Sequence: Synthetic oligonucleotide
  Antisense strand to SEQ ID NO: 890300
ugauuuaacugacacagca

SEQ ID NO: 890302 - RNA, 19 nt, Artificial Sequence
  Description of Artificial Sequence: Synthetic oligonucleotide
  Sense strand starting at position 259 of SEQ ID NO: 588797
cuggguuaacguuaaccaa

SEQ ID NO: 890303 - RNA, 19 nt, Artificial Sequence
  Description of Artificial Sequence: Synthetic oligonucleotide
  Antisense strand to SEQ ID NO: 890302
uugguuaacguuaacccag

SEQ ID NO: 890304 - RNA, 19 nt, Artificial Sequence
  Description of Artificial Sequence: Synthetic oligonucleotide
  Sense strand starting at position 262 of SEQ ID NO: 588797
gguuaacguuaaccaagaa

SEQ ID NO: 890305 - RNA, 19 nt, Artificial Sequence
  Description of Artificial Sequence: Synthetic oligonucleotide
  Antisense strand to SEQ ID NO: 890304
uucuugguuaacguuaacc

SEQ ID NO: 890306 - RNA, 19 nt, Artificial Sequence
  Description of Artificial Sequence: Synthetic oligonucleotide
  Sense strand starting at position 379 of SEQ ID NO: 588797
ucaagucacuguccaaaga

SEQ ID NO: 890307 - RNA, 19 nt, Artificial Sequence
  Description of Artificial Sequence: Synthetic oligonucleotide
  Antisense strand to SEQ ID NO: 890306
ucuuuggacagugacuuga

SEQ ID NO: 890308 - RNA, 19 nt, Artificial Sequence
  Description of Artificial Sequence: Synthetic oligonucleotide
  Sense strand starting at position 418 of SEQ ID NO: 588797
agaauauguuaaguacaca

SEQ ID NO: 890309 - RNA, 19 nt, Artificial Sequence
  Description of Artificial Sequence: Synthetic oligonucleotide
  Antisense strand to SEQ ID NO: 890308
uguguacuuaacauauucu

SEQ ID NO: 890310 - RNA, 19 nt, Artificial Sequence
  Description of Artificial Sequence: Synthetic oligonucleotide
  Sense strand starting at position 604 of SEQ ID NO: 588797
ugaacugaguucucacaaa

SEQ ID NO: 890311 - RNA, 19 nt, Artificial Sequence
  Description of Artificial Sequence: Synthetic oligonucleotide
  Antisense strand to SEQ ID NO: 890310
uuugugagaacucaguuca

SEQ ID NO: 890312 - RNA, 19 nt, Artificial Sequence
  Description of Artificial Sequence: Synthetic oligonucleotide
  Sense strand starting at position 757 of SEQ ID NO: 588797
aggauaaagcacugucaau

SEQ ID NO: 890313 - RNA, 19 nt, Artificial Sequence
  Description of Artificial Sequence: Synthetic oligonucleotide
  Antisense strand to SEQ ID NO: 890312
auugacagugcuuuauccu

SEQ ID NO: 890314 - RNA, 19 nt, Artificial Sequence
  Description of Artificial Sequence: Synthetic oligonucleotide
  Sense strand starting at position 1016 of SEQ ID NO: 588797
gagugcugaauggauguua

SEQ ID NO: 890315 - RNA, 19 nt, Artificial Sequence
  Description of Artificial Sequence: Synthetic oligonucleotide
  Antisense strand to SEQ ID NO: 890314
uaacauccauucagcacuc

SEQ ID NO: 890316 - RNA, 19 nt, Artificial Sequence
  Description of Artificial Sequence: Synthetic oligonucleotide
  Sense strand starting at position 1038 of SEQ ID NO: 588797
cuguuugccgcacaaagaa

SEQ ID NO: 890317 - RNA, 19 nt, Artificial Sequence
  Description of Artificial Sequence: Synthetic oligonucleotide
  Antisense strand to SEQ ID NO: 890316
uucuuugugcggcaaacag

SEQ ID NO: 890318 - RNA, 19 nt, Artificial Sequence
  Description of Artificial Sequence: Synthetic oligonucleotide
  Sense strand starting at position 1272 of SEQ ID NO: 588797
ugcacacuguugucuauuu

SEQ ID NO: 890319 - RNA, 19 nt, Artificial Sequence
  Description of Artificial Sequence: Synthetic oligonucleotide
  Antisense strand to SEQ ID NO: 890318
aaauagacaacagugugca

SEQ ID NO: 890320 - RNA, 19 nt, Artificial Sequence
  Description of Artificial Sequence: Synthetic oligonucleotide
  Sense strand starting at position 1281 of SEQ ID NO: 588797
uugucuauuucggcuuuga

SEQ ID NO: 890321 - RNA, 19 nt, Artificial Sequence
  Description of Artificial Sequence: Synthetic oligonucleotide
  Antisense strand to SEQ ID NO: 890320
ucaaagccgaaauagacaa

SEQ ID NO: 890322 - RNA, 19 nt, Artificial Sequence
  Description of Artificial Sequence: Synthetic oligonucleotide
  Sense strand starting at position 1548 of SEQ ID NO: 588797
cgcgcaggguccauuguaa

SEQ ID NO: 890323 - RNA, 19 nt, Artificial Sequence
  Description of Artificial Sequence: Synthetic oligonucleotide
  Antisense strand to SEQ ID NO: 890322
uuacaauggacccugcgcg

SEQ ID NO: 890324 - RNA, 19 nt, Artificial Sequence
  Description of Artificial Sequence: Synthetic oligonucleotide
  Sense strand starting at position 1845 of SEQ ID NO: 588797
guuguugauggguaacagu

SEQ ID NO: 890325 - RNA, 19 nt, Artificial Sequence
  Description of Artificial Sequence: Synthetic oligonucleotide
  Antisense strand to SEQ ID NO: 890324
acuguuacccaucaacaac

SEQ ID NO: 890326 - RNA, 19 nt, Artificial Sequence
  Description of Artificial Sequence: Synthetic oligonucleotide
  Sense strand starting at position 2174 of SEQ ID NO: 588797
caccaagaguccucucgga

SEQ ID NO: 890327 - RNA, 19 nt, Artificial Sequence
  Description of Artificial Sequence: Synthetic oligonucleotide
  Antisense strand to SEQ ID NO: 890326
uccgagaggacucuuggug

SEQ ID NO: 890328 - RNA, 19 nt, Artificial Sequence
  Description of Artificial Sequence: Synthetic oligonucleotide
  Sense strand starting at position 2178 of SEQ ID NO: 588797
aagaguccucucggaggga

SEQ ID NO: 890329 - RNA, 19 nt, Artificial Sequence
  Description of Artificial Sequence: Synthetic oligonucleotide
  Antisense strand to SEQ ID NO: 890328
ucccuccgagaggacucuu

SEQ ID NO: 890330 - RNA, 19 nt, Artificial Sequence
  Description of Artificial Sequence: Synthetic oligonucleotide
  Sense strand starting at position 2240 of SEQ ID NO: 588797
ggguacuaucugugaaacg

SEQ ID NO: 890331 - RNA, 19 nt, Artificial Sequence
  Description of Artificial Sequence: Synthetic oligonucleotide
  Antisense strand to SEQ ID NO: 890330
cguuucacagauaguaccc

SEQ ID NO: 890332 - RNA, 19 nt, Artificial Sequence
  Description of Artificial Sequence: Synthetic oligonucleotide
  Sense strand starting at position 2359 of SEQ ID NO: 588797
gcacuuugugaagaaacga

SEQ ID NO: 890333 - RNA, 19 nt, Artificial Sequence
  Description of Artificial Sequence: Synthetic oligonucleotide
  Antisense strand to SEQ ID NO: 890332
ucguuucuucacaaagugc

SEQ ID NO: 890334 - RNA, 19 nt, Artificial Sequence
  Description of Artificial Sequence: Synthetic oligonucleotide
  Sense strand starting at position 2376 of SEQ ID NO: 588797
gagcuauggcgagggaaga

SEQ ID NO: 890335 - RNA, 19 nt, Artificial Sequence
  Description of Artificial Sequence: Synthetic oligonucleotide
  Antisense strand to SEQ ID NO: 890334
ucuucccucgccauagcuc

SEQ ID NO: 890336 - RNA, 19 nt, Artificial Sequence
  Description of Artificial Sequence: Synthetic oligonucleotide
  Sense strand starting at position 2797 of SEQ ID NO: 588797
gcccucacuccauaacgaa

SEQ ID NO: 890337 - RNA, 19 nt, Artificial Sequence
  Description of Artificial Sequence: Synthetic oligonucleotide
  Antisense strand to SEQ ID NO: 890336
uucguuauggagugagggc

SEQ ID NO: 890338 - RNA, 19 nt, Artificial Sequence
  Description of Artificial Sequence: Synthetic oligonucleotide
  Sense strand starting at position 2823 of SEQ ID NO: 588797
ggucaucacucccuaucua

SEQ ID NO: 890339 - RNA, 19 nt, Artificial Sequence
  Description of Artificial Sequence: Synthetic oligonucleotide
  Antisense strand to SEQ ID NO: 890338
uagauagggagugaugacc

SEQ ID NO: 890340 - RNA, 19 nt, Artificial Sequence
  Description of Artificial Sequence: Synthetic oligonucleotide
  Sense strand starting at position 2850 of SEQ ID NO: 588797
gggaguaagugccuguaga

SEQ ID NO: 890341 - RNA, 19 nt, Artificial Sequence
  Description of Artificial Sequence: Synthetic oligonucleotide
  Antisense strand to SEQ ID NO: 890340
ucuacaggcacuuacuccc

SEQ ID NO: 890342 - RNA, 19 nt, Artificial Sequence
  Description of Artificial Sequence: Synthetic oligonucleotide
  Sense strand starting at position 2851 of SEQ ID NO: 588797
ggaguaagugccuguagag

SEQ ID NO: 890343 - RNA, 19 nt, Artificial Sequence
  Description of Artificial Sequence: Synthetic oligonucleotide
  Antisense strand to SEQ ID NO: 890342
cucuacaggcacuuacucc

SEQ ID NO: 890344 - RNA, 19 nt, Artificial Sequence
  Description of Artificial Sequence: Synthetic oligonucleotide
  Sense strand starting at position 2860 of SEQ ID NO: 588797
gccuguagagagcaagaaa

SEQ ID NO: 890345 - RNA, 19 nt, Artificial Sequence
  Description of Artificial Sequence: Synthetic oligonucleotide
  Antisense strand to SEQ ID NO: 890344
uuucuugcucucuacaggc

SEQ ID NO: 890346 - RNA, 19 nt, Artificial Sequence
  Description of Artificial Sequence: Synthetic oligonucleotide
  Sense strand starting at position 3130 of SEQ ID NO: 588797
gcuguauugagauagacga

SEQ ID NO: 890347 - RNA, 19 nt, Artificial Sequence
  Description of Artificial Sequence: Synthetic oligonucleotide
  Antisense strand to SEQ ID NO: 890346
ucgucuaucucaauacagc

SEQ ID NO: 890348 - RNA, 19 nt, Artificial Sequence
  Description of Artificial Sequence: Synthetic oligonucleotide
  Sense strand starting at position 3163 of SEQ ID NO: 588797
uguugaauguuguuaacac

SEQ ID NO: 890349 - RNA, 19 nt, Artificial Sequence
  Description of Artificial Sequence: Synthetic oligonucleotide
  Antisense strand to SEQ ID NO: 890348
guguuaacaacauucaaca

SEQ ID NO: 890350 - RNA, 19 nt, Artificial Sequence
  Description of Artificial Sequence: Synthetic oligonucleotide
  Sense strand starting at position 3333 of SEQ ID NO: 588797
gcugcuuaaccaggacaau

SEQ ID NO: 890351 - RNA, 19 nt, Artificial Sequence
  Description of Artificial Sequence: Synthetic oligonucleotide
  Antisense strand to SEQ ID NO: 890350
auuguccugguuaagcagc

SEQ ID NO: 890352 - RNA, 19 nt, Artificial Sequence
  Description of Artificial Sequence: Synthetic oligonucleotide
  Sense strand starting at position 3375 of SEQ ID NO: 588797
ggaagucaguucuccucuu

SEQ ID NO: 890353 - RNA, 19 nt, Artificial Sequence
  Description of Artificial Sequence: Synthetic oligonucleotide
  Antisense strand to SEQ ID NO: 890352
aagaggagaacugacuucc

SEQ ID NO: 890354 - RNA, 19 nt, Artificial Sequence
  Description of Artificial Sequence: Synthetic oligonucleotide
  Sense strand starting at position 3468 of SEQ ID NO: 588797
cucauucugugucccagaa

SEQ ID NO: 890355 - RNA, 19 nt, Artificial Sequence
  Description of Artificial Sequence: Synthetic oligonucleotide
  Antisense strand to SEQ ID NO: 890354
uucugggacacagaaugag

SEQ ID NO: 890356 - RNA, 19 nt, Artificial Sequence
  Description of Artificial Sequence: Synthetic oligonucleotide
  Sense strand starting at position 3534 of SEQ ID NO: 588797
accaguguuagguaauauu

SEQ ID NO: 890357 - RNA, 19 nt, Artificial Sequence
  Description of Artificial Sequence: Synthetic oligonucleotide
  Antisense strand to SEQ ID NO: 890356
aauauuaccuaacacuggu

SEQ ID NO: 890358 - RNA, 19 nt, Artificial Sequence
  Description of Artificial Sequence: Synthetic oligonucleotide
  Sense strand starting at position 3548 of SEQ ID NO: 588797
auauucgcauuugaggaaa

SEQ ID NO: 890359 - RNA, 19 nt, Artificial Sequence
  Description of Artificial Sequence: Synthetic oligonucleotide
  Antisense strand to SEQ ID NO: 890358
uuuccucaaaugcgaauau

SEQ ID NO: 890360 - RNA, 19 nt, Artificial Sequence
  Description of Artificial Sequence: Synthetic oligonucleotide
  Sense strand starting at position 3609 of SEQ ID NO: 588797
cugcgugccauagaauaca

SEQ ID NO: 890361 - RNA, 19 nt, Artificial Sequence
  Description of Artificial Sequence: Synthetic oligonucleotide
  Antisense strand to SEQ ID NO: 890360
uguauucuauggcacgcag

SEQ ID NO: 890362 - RNA, 19 nt, Artificial Sequence
  Description of Artificial Sequence: Synthetic oligonucleotide
  Sense strand starting at position 3699 of SEQ ID NO: 588797
ucaugaguuagagauguuc

SEQ ID NO: 890363 - RNA, 19 nt, Artificial Sequence
  Description of Artificial Sequence: Synthetic oligonucleotide
  Antisense strand to SEQ ID NO: 890362
gaacaucucuaacucauga

SEQ ID NO: 890364 - RNA, 19 nt, Artificial Sequence
  Description of Artificial Sequence: Synthetic oligonucleotide
  Sense strand starting at position 3800 of SEQ ID NO: 588797
aagggcuucuagucagaca

SEQ ID NO: 890365 - RNA, 19 nt, Artificial Sequence
  Description of Artificial Sequence: Synthetic oligonucleotide
  Antisense strand to SEQ ID NO: 890364
ugucugacuagaagcccuu

SEQ ID NO: 890366 - RNA, 19 nt, Artificial Sequence
  Description of Artificial Sequence: Synthetic oligonucleotide
  Sense strand starting at position 3801 of SEQ ID NO: 588797
agggcuucuagucagacaa

SEQ ID NO: 890367 - RNA, 19 nt, Artificial Sequence
  Description of Artificial Sequence: Synthetic oligonucleotide
  Antisense strand to SEQ ID NO: 890366
uugucugacuagaagcccu

SEQ ID NO: 890368 - RNA, 19 nt, Artificial Sequence
  Description of Artificial Sequence: Synthetic oligonucleotide
  Sense strand starting at position 3816 of SEQ ID NO: 588797
acaaaugauugugugguga

SEQ ID NO: 890369 - RNA, 19 nt, Artificial Sequence
  Description of Artificial Sequence: Synthetic oligonucleotide
  Antisense strand to SEQ ID NO: 890368
ucaccacacaaucauuugu

SEQ ID NO: 890370 - RNA, 19 nt, Artificial Sequence
  Description of Artificial Sequence: Synthetic oligonucleotide
  Sense strand starting at position 3863 of SEQ ID NO: 588797
ugggaaaugagguauacgu

SEQ ID NO: 890371 - RNA, 19 nt, Artificial Sequence
  Description of Artificial Sequence: Synthetic oligonucleotide
  Antisense strand to SEQ ID NO: 890370
acguauaccucauuuccca

SEQ ID NO: 890372 - RNA, 19 nt, Artificial Sequence
  Description of Artificial Sequence: Synthetic oligonucleotide
  Sense strand starting at position 3878 of SEQ ID NO: 588797
acguuccagcuuuaugaaa

SEQ ID NO: 890373 - RNA, 19 nt, Artificial Sequence
  Description of Artificial Sequence: Synthetic oligonucleotide
  Antisense strand to SEQ ID NO: 890372
uuucauaaagcuggaacgu

SEQ ID NO: 890374 - RNA, 19 nt, Artificial Sequence
  Description of Artificial Sequence: Synthetic oligonucleotide
  Sense strand starting at position 3897 of SEQ ID NO: 588797
acugguagucguuaugaau

SEQ ID NO: 890375 - RNA, 19 nt, Artificial Sequence
  Description of Artificial Sequence: Synthetic oligonucleotide
  Antisense strand to SEQ ID NO: 890374
auucauaacgacuaccagu

SEQ ID NO: 890376 - RNA, 19 nt, Artificial Sequence
  Description of Artificial Sequence: Synthetic oligonucleotide
  Sense strand starting at position 3961 of SEQ ID NO: 588797
guguguagggcuguauguu

SEQ ID NO: 890377 - RNA, 19 nt, Artificial Sequence
  Description of Artificial Sequence: Synthetic oligonucleotide
  Antisense strand to SEQ ID NO: 890376
aacauacagcccuacacac

SEQ ID NO: 890378 - RNA, 19 nt, Artificial Sequence
  Description of Artificial Sequence: Synthetic oligonucleotide
  Sense strand starting at position 13 of SEQ ID NO: 588798
guaaacugccaagagugua

SEQ ID NO: 890379 - RNA, 19 nt, Artificial Sequence
  Description of Artificial Sequence: Synthetic oligonucleotide
  Antisense strand to SEQ ID NO: 890378
uacacucuuggcaguuuac

SEQ ID NO: 890380 - RNA, 19 nt, Artificial Sequence
  Description of Artificial Sequence: Synthetic oligonucleotide
  Sense strand starting at position 21 of SEQ ID NO: 588798
ccaagaguguaauucuuau

SEQ ID NO: 890381 - RNA, 19 nt, Artificial Sequence
  Description of Artificial Sequence: Synthetic oligonucleotide
  Antisense strand to SEQ ID NO: 890380
auaagaauuacacucuugg

SEQ ID NO: 890382 - RNA, 19 nt, Artificial Sequence
  Description of Artificial Sequence: Synthetic oligonucleotide
  Sense strand starting at position 523 of SEQ ID NO: 588798
aaauaugaggcguauuaua

SEQ ID NO: 890383 - RNA, 19 nt, Artificial Sequence
  Description of Artificial Sequence: Synthetic oligonucleotide
  Antisense strand to SEQ ID NO: 890382
uauaauacgccucauauuu

SEQ ID NO: 890384 - RNA, 19 nt, Artificial Sequence
  Description of Artificial Sequence: Synthetic oligonucleotide
  Sense strand starting at position 542 of SEQ ID NO: 588798
auuacuguucuauaggcua

SEQ ID NO: 890385 - RNA, 19 nt, Artificial Sequence
  Description of Artificial Sequence: Synthetic oligonucleotide
  Antisense strand to SEQ ID NO: 890384
uagccuauagaacaguaau

SEQ ID NO: 890386 - RNA, 19 nt, Artificial Sequence
  Description of Artificial Sequence: Synthetic oligonucleotide
  Sense strand starting at position 600 of SEQ ID NO: 588798
ucccguucccaagauacuu

SEQ ID NO: 890387 - RNA, 19 nt, Artificial Sequence
  Description of Artificial Sequence: Synthetic oligonucleotide
  Antisense strand to SEQ ID NO: 890386
aaguaucuugggaacggga

SEQ ID NO: 890388 - RNA, 19 nt, Artificial Sequence
  Description of Artificial Sequence: Synthetic oligonucleotide
  Sense strand starting at position 716 of SEQ ID NO: 588798
auagaauuguucucuacug

SEQ ID NO: 890389 - RNA, 19 nt, Artificial Sequence
  Description of Artificial Sequence: Synthetic oligonucleotide
  Antisense strand to SEQ ID NO: 890388
caguagagaacaauucuau

SEQ ID NO: 890390 - RNA, 19 nt, Artificial Sequence
  Description of Artificial Sequence: Synthetic oligonucleotide
  Sense strand starting at position 718 of SEQ ID NO: 588798
agaauuguucucuacugcu

SEQ ID NO: 890391 - RNA, 19 nt, Artificial Sequence
  Description of Artificial Sequence: Synthetic oligonucleotide
  Antisense strand to SEQ ID NO: 890390
agcaguagagaacaauucu

SEQ ID NO: 890392 - RNA, 19 nt, Artificial Sequence
  Description of Artificial Sequence: Synthetic oligonucleotide
  Sense strand starting at position 921 of SEQ ID NO: 588798
guauaauaucaauguccau

SEQ ID NO: 890393 - RNA, 19 nt, Artificial Sequence
  Description of Artificial Sequence: Synthetic oligonucleotide
  Antisense strand to SEQ ID NO: 890392
auggacauugauauuauac

SEQ ID NO: 890394 - RNA, 19 nt, Artificial Sequence
  Description of Artificial Sequence: Synthetic oligonucleotide
  Sense strand starting at position 1012 of SEQ ID NO: 588798
caacucaaaugguuugaga

SEQ ID NO: 890395 - RNA, 19 nt, Artificial Sequence
  Description of Artificial Sequence: Synthetic oligonucleotide
  Antisense strand to SEQ ID NO: 890394
ucucaaaccauuugaguug

SEQ ID NO: 890396 - RNA, 19 nt, Artificial Sequence
  Description of Artificial Sequence: Synthetic oligonucleotide
  Sense strand starting at position 1045 of SEQ ID NO: 588798
guaauuauuuccuaggaaa

SEQ ID NO: 890397 - RNA, 19 nt, Artificial Sequence
  Description of Artificial Sequence: Synthetic oligonucleotide
  Antisense strand to SEQ ID NO: 890396
uuuccuaggaaauaauuac

SEQ ID NO: 890398 - RNA, 19 nt, Artificial Sequence
  Description of Artificial Sequence: Synthetic oligonucleotide
  Sense strand starting at position 1080 of SEQ ID NO: 588798
aguacuaagucccuuuaaa

SEQ ID NO: 890399 - RNA, 19 nt, Artificial Sequence
  Description of Artificial Sequence: Synthetic oligonucleotide
  Antisense strand to SEQ ID NO: 890398
uuuaaagggacuuaguacu

SEQ ID NO: 890400 - RNA, 19 nt, Artificial Sequence
  Description of Artificial Sequence: Synthetic oligonucleotide
  Sense strand starting at position 1116 of SEQ ID NO: 588798
agauuauuguaacucugaa

SEQ ID NO: 890401 - RNA, 19 nt, Artificial Sequence
  Description of Artificial Sequence: Synthetic oligonucleotide
  Antisense strand to SEQ ID NO: 890400
uucagaguuacaauaaucu

SEQ ID NO: 890402 - RNA, 19 nt, Artificial Sequence
  Description of Artificial Sequence: Synthetic oligonucleotide
  Sense strand starting at position 1297 of SEQ ID NO: 588798
acaaguuugaaauggaggu

SEQ ID NO: 890403 - RNA, 19 nt, Artificial Sequence
  Description of Artificial Sequence: Synthetic oligonucleotide
  Antisense strand to SEQ ID NO: 890402
accuccauuucaaacuugu

SEQ ID NO: 890404 - RNA, 19 nt, Artificial Sequence
  Description of Artificial Sequence: Synthetic oligonucleotide
  Sense strand starting at position 1301 of SEQ ID NO: 588798
guuugaaauggagguuaca

SEQ ID NO: 890405 - RNA, 19 nt, Artificial Sequence
  Description of Artificial Sequence: Synthetic oligonucleotide
  Antisense strand to SEQ ID NO: 890404
uguaaccuccauuucaaac

SEQ ID NO: 890406 - RNA, 19 nt, Artificial Sequence
  Description of Artificial Sequence: Synthetic oligonucleotide
  Sense strand starting at position 1389 of SEQ ID NO: 588798
uagaguauccuccauggcu

SEQ ID NO: 890407 - RNA, 19 nt, Artificial Sequence
  Description of Artificial Sequence: Synthetic oligonucleotide
  Antisense strand to SEQ ID NO: 890406
agccauggaggauacucua

SEQ ID NO: 890408 - RNA, 19 nt, Artificial Sequence
  Description of Artificial Sequence: Synthetic oligonucleotide
  Sense strand starting at position 1455 of SEQ ID NO: 588798
cccugugaagacugaugga

SEQ ID NO: 890409 - RNA, 19 nt, Artificial Sequence
  Description of Artificial Sequence: Synthetic oligonucleotide
  Antisense strand to SEQ ID NO: 890408
uccaucagucuucacaggg

SEQ ID NO: 890410 - RNA, 19 nt, Artificial Sequence
  Description of Artificial Sequence: Synthetic oligonucleotide
  Sense strand starting at position 1697 of SEQ ID NO: 588798
guuugaucauccucaaugg

SEQ ID NO: 890411 - RNA, 19 nt, Artificial Sequence
  Description of Artificial Sequence: Synthetic oligonucleotide
  Antisense strand to SEQ ID NO: 890410
ccauugaggaugaucaaac

SEQ ID NO: 890412 - RNA, 19 nt, Artificial Sequence
  Description of Artificial Sequence: Synthetic oligonucleotide
  Sense strand starting at position 1797 of SEQ ID NO: 588798
gcuuacaaguacucacaga

SEQ ID NO: 890413 - RNA, 19 nt, Artificial Sequence
  Description of Artificial Sequence: Synthetic oligonucleotide
  Antisense strand to SEQ ID NO: 890412
ucugugaguacuuguaagc

SEQ ID NO: 890414 - RNA, 19 nt, Artificial Sequence
  Description of Artificial Sequence: Synthetic oligonucleotide
  Sense strand starting at position 1900 of SEQ ID NO: 588798
aaggccugucuuuaaagua

SEQ ID NO: 890415 - RNA, 19 nt, Artificial Sequence
  Description of Artificial Sequence: Synthetic oligonucleotide
  Antisense strand to SEQ ID NO: 890414
uacuuuaaagacaggccuu

SEQ ID NO: 890416 - RNA, 19 nt, Artificial Sequence
  Description of Artificial Sequence: Synthetic oligonucleotide
  Sense strand starting at position 1979 of SEQ ID NO: 588798
aacuauuauugaguaguag

SEQ ID NO: 890417 - RNA, 19 nt, Artificial Sequence
  Description of Artificial Sequence: Synthetic oligonucleotide
  Antisense strand to SEQ ID NO: 890416
cuacuacucaauaauaguu

SEQ ID NO: 890418 - RNA, 19 nt, Artificial Sequence
  Description of Artificial Sequence: Synthetic oligonucleotide
  Sense strand starting at position 2005 of SEQ ID NO: 588798
gaauuaugacaucagcagu

SEQ ID NO: 890419 - RNA, 19 nt, Artificial Sequence
  Description of Artificial Sequence: Synthetic oligonucleotide
  Antisense strand to SEQ ID NO: 890418
acugcugaugucauaauuc

SEQ ID NO: 890420 - RNA, 19 nt, Artificial Sequence
  Description of Artificial Sequence: Synthetic oligonucleotide
  Sense strand starting at position 2008 of SEQ ID NO: 588798
uuaugacaucagcaguaua

SEQ ID NO: 890421 - RNA, 19 nt, Artificial Sequence
  Description of Artificial Sequence: Synthetic oligonucleotide
  Antisense strand to SEQ ID NO: 890420
uauacugcugaugucauaa

SEQ ID NO: 890422 - RNA, 19 nt, Artificial Sequence
  Description of Artificial Sequence: Synthetic oligonucleotide
  Sense strand starting at position 2011 of SEQ ID NO: 588798
ugacaucagcaguauauua

SEQ ID NO: 890423 - RNA, 19 nt, Artificial Sequence
  Description of Artificial Sequence: Synthetic oligonucleotide
  Antisense strand to SEQ ID NO: 890422
uaauauacugcugauguca

SEQ ID NO: 890424 - RNA, 19 nt, Artificial Sequence
  Description of Artificial Sequence: Synthetic oligonucleotide
  Sense strand starting at position 2140 of SEQ ID NO: 588798
uugauauaggcuuaauguu

SEQ ID NO: 890425 - RNA, 19 nt, Artificial Sequence
  Description of Artificial Sequence: Synthetic oligonucleotide
  Antisense strand to SEQ ID NO: 890424
aacauuaagccuauaucaa

SEQ ID NO: 890426 - RNA, 19 nt, Artificial Sequence
  Description of Artificial Sequence: Synthetic oligonucleotide
  Sense strand starting at position 2154 of SEQ ID NO: 588798
auguuuagucuaugaaacc

SEQ ID NO: 890427 - RNA, 19 nt, Artificial Sequence
  Description of Artificial Sequence: Synthetic oligonucleotide
  Antisense strand to SEQ ID NO: 890426
gguuucauagacuaaacau

SEQ ID NO: 890428 - RNA, 19 nt, Artificial Sequence
  Description of Artificial Sequence: Synthetic oligonucleotide
  Sense strand starting at position 2246 of SEQ ID NO: 588798
ggucacauauggguaucaa

SEQ ID NO: 890429 - RNA, 19 nt, Artificial Sequence
  Description of Artificial Sequence: Synthetic oligonucleotide
  Antisense strand to SEQ ID NO: 890428
uugauacccauaugugacc

SEQ ID NO: 890430 - RNA, 19 nt, Artificial Sequence
  Description of Artificial Sequence: Synthetic oligonucleotide
  Sense strand starting at position 2291 of SEQ ID NO: 588798
ucucauauuugugcucuca

SEQ ID NO: 890431 - RNA, 19 nt, Artificial Sequence
  Description of Artificial Sequence: Synthetic oligonucleotide
  Antisense strand to SEQ ID NO: 890430
ugagagcacaaauaugaga

SEQ ID NO: 890432 - RNA, 19 nt, Artificial Sequence
  Description of Artificial Sequence: Synthetic oligonucleotide
  Sense strand starting at position 2350 of SEQ ID NO: 588798
guuccagugcucuuucuuu

SEQ ID NO: 890433 - RNA, 19 nt, Artificial Sequence
  Description of Artificial Sequence: Synthetic oligonucleotide
  Antisense strand to SEQ ID NO: 890432
aaagaaagagcacuggaac

SEQ ID NO: 890434 - RNA, 19 nt, Artificial Sequence
  Description of Artificial Sequence: Synthetic oligonucleotide
  Sense strand starting at position 2414 of SEQ ID NO: 588798
gcagcaugaccuuaauccu

SEQ ID NO: 890435 - RNA, 19 nt, Artificial Sequence
  Description of Artificial Sequence: Synthetic oligonucleotide
  Antisense strand to SEQ ID NO: 890434
aggauuaaggucaugcugc

SEQ ID NO: 890436 - RNA, 19 nt, Artificial Sequence
  Description of Artificial Sequence: Synthetic oligonucleotide
  Sense strand starting at position 2458 of SEQ ID NO: 588798
ggaaguugguagguggaaa

SEQ ID NO: 890437 - RNA, 19 nt, Artificial Sequence
  Description of Artificial Sequence: Synthetic oligonucleotide
  Antisense strand to SEQ ID NO: 890436
uuuccaccuaccaacuucc

SEQ ID NO: 890438 - RNA, 19 nt, Artificial Sequence
  Description of Artificial Sequence: Synthetic oligonucleotide
  Sense strand starting at position 3009 of SEQ ID NO: 588798
acaugaaugcacugauauu

SEQ ID NO: 890439 - RNA, 19 nt, Artificial Sequence
  Description of Artificial Sequence: Synthetic oligonucleotide
  Antisense strand to SEQ ID NO: 890438
aauaucagugcauucaugu

SEQ ID NO: 890440 - RNA, 19 nt, Artificial Sequence
  Description of Artificial Sequence: Synthetic oligonucleotide
  Sense strand starting at position 3239 of SEQ ID NO: 588798
ccugcuaauuucuuguaga

SEQ ID NO: 890441 - RNA, 19 nt, Artificial Sequence
  Description of Artificial Sequence: Synthetic oligonucleotide
  Antisense strand to SEQ ID NO: 890440
ucuacaagaaauuagcagg

SEQ ID NO: 890442 - RNA, 19 nt, Artificial Sequence
  Description of Artificial Sequence: Synthetic oligonucleotide
  Sense strand starting at position 3393 of SEQ ID NO: 588798
ugaucuuuauuggcuaaua

SEQ ID NO: 890443 - RNA, 19 nt, Artificial Sequence
  Description of Artificial Sequence: Synthetic oligonucleotide
  Antisense strand to SEQ ID NO: 890442
uauuagccaauaaagauca

SEQ ID NO: 890444 - RNA, 19 nt, Artificial Sequence
  Description of Artificial Sequence: Synthetic oligonucleotide
  Sense strand starting at position 3414 of SEQ ID NO: 588798
guaaauguggaguagcaau

SEQ ID NO: 890445 - RNA, 19 nt, Artificial Sequence
  Description of Artificial Sequence: Synthetic oligonucleotide
  Antisense strand to SEQ ID NO: 890444
auugcuacuccacauuuac

SEQ ID NO: 890446 - RNA, 19 nt, Artificial Sequence
  Description of Artificial Sequence: Synthetic oligonucleotide
  Sense strand starting at position 3600 of SEQ ID NO: 588798
ggugacauuaagugacagu

SEQ ID NO: 890447 - RNA, 19 nt, Artificial Sequence
  Description of Artificial Sequence: Synthetic oligonucleotide
  Antisense strand to SEQ ID NO: 890446
acugucacuuaaugucacc

SEQ ID NO: 890448 - RNA, 19 nt, Artificial Sequence
  Description of Artificial Sequence: Synthetic oligonucleotide
  Sense strand starting at position 3601 of SEQ ID NO: 588798
gugacauuaagugacaguu

SEQ ID NO: 890449 - RNA, 19 nt, Artificial Sequence
  Description of Artificial Sequence: Synthetic oligonucleotide
  Antisense strand to SEQ ID NO: 890448
aacugucacuuaaugucac

SEQ ID NO: 890450 - RNA, 19 nt, Artificial Sequence
  Description of Artificial Sequence: Synthetic oligonucleotide
  Sense strand starting at position 3609 of SEQ ID NO: 588798
aagugacaguugccauaaa

SEQ ID NO: 890451 - RNA, 19 nt, Artificial Sequence
  Description of Artificial Sequence: Synthetic oligonucleotide
  Antisense strand to SEQ ID NO: 890450
uuuauggcaacugucacuu

SEQ ID NO: 890452 - RNA, 19 nt, Artificial Sequence
  Description of Artificial Sequence: Synthetic oligonucleotide
  Sense strand starting at position 3673 of SEQ ID NO: 588798
ggcacagcugaguauauau

SEQ ID NO: 890453 - RNA, 19 nt, Artificial Sequence
  Description of Artificial Sequence: Synthetic oligonucleotide
  Antisense strand to SEQ ID NO: 890452
auauauacucagcugugcc

SEQ ID NO: 890454 - RNA, 19 nt, Artificial Sequence
  Description of Artificial Sequence: Synthetic oligonucleotide
  Sense strand starting at position 3769 of SEQ ID NO: 588798
guguuugcuguguauuuag

SEQ ID NO: 890455 - RNA, 19 nt, Artificial Sequence
  Description of Artificial Sequence: Synthetic oligonucleotide
  Antisense strand to SEQ ID NO: 890454
cuaaauacacagcaaacac

SEQ ID NO: 890456 - RNA, 19 nt, Artificial Sequence
  Description of Artificial Sequence: Synthetic oligonucleotide
  Sense strand starting at position 3780 of SEQ ID NO: 588798
guauuuaggugauaacaaa

SEQ ID NO: 890457 - RNA, 19 nt, Artificial Sequence
  Description of Artificial Sequence: Synthetic oligonucleotide
  Antisense strand to SEQ ID NO: 890456
uuuguuaucaccuaaauac

SEQ ID NO: 890458 - RNA, 19 nt, Artificial Sequence
  Description of Artificial Sequence: Synthetic oligonucleotide
  Sense strand starting at position 90 of SEQ ID NO: 588799
uuaaaucaccauugugaag

SEQ ID NO: 890459 - RNA, 19 nt, Artificial Sequence
  Description of Artificial Sequence: Synthetic oligonucleotide
  Antisense strand to SEQ ID NO: 890458
cuucacaauggugauuuaa

SEQ ID NO: 890460 - RNA, 19 nt, Artificial Sequence
  Description of Artificial Sequence: Synthetic oligonucleotide
  Sense strand starting at position 161 of SEQ ID NO: 588799
uaaagugggcgcuaaacaa

SEQ ID NO: 890461 - RNA, 19 nt, Artificial Sequence
  Description of Artificial Sequence: Synthetic oligonucleotide
  Antisense strand to SEQ ID NO: 890460
uuguuuagcgcccacuuua

SEQ ID NO: 890462 - RNA, 19 nt, Artificial Sequence
  Description of Artificial Sequence: Synthetic oligonucleotide
  Sense strand starting at position 361 of SEQ ID NO: 588799
auauguaugcucuggaucu

SEQ ID NO: 890463 - RNA, 19 nt, Artificial Sequence
  Description of Artificial Sequence: Synthetic oligonucleotide
  Antisense strand to SEQ ID NO: 890462
agauccagagcauacauau

SEQ ID NO: 890464 - RNA, 19 nt, Artificial Sequence
  Description of Artificial Sequence: Synthetic oligonucleotide
  Sense strand starting at position 511 of SEQ ID NO: 588799
gggaaaguuguauaugugu

SEQ ID NO: 890465 - RNA, 19 nt, Artificial Sequence
  Description of Artificial Sequence: Synthetic oligonucleotide
  Antisense strand to SEQ ID NO: 890464
acacauauacaacuuuccc

SEQ ID NO: 890466 - RNA, 19 nt, Artificial Sequence
  Description of Artificial Sequence: Synthetic oligonucleotide
  Sense strand starting at position 526 of SEQ ID NO: 588799
guguauauggcagaguaug

SEQ ID NO: 890467 - RNA, 19 nt, Artificial Sequence
  Description of Artificial Sequence: Synthetic oligonucleotide
  Antisense strand to SEQ ID NO: 890466
cauacucugccauauacac

SEQ ID NO: 890468 - RNA, 19 nt, Artificial Sequence
  Description of Artificial Sequence: Synthetic oligonucleotide
  Sense strand starting at position 900 of SEQ ID NO: 588799
cucagaugucuuuacuuau

SEQ ID NO: 890469 - RNA, 19 nt, Artificial Sequence
  Description of Artificial Sequence: Synthetic oligonucleotide
  Antisense strand to SEQ ID NO: 890468
auaaguaaagacaucugag

SEQ ID NO: 890470 - RNA, 19 nt, Artificial Sequence
  Description of Artificial Sequence: Synthetic oligonucleotide
  Sense strand starting at position 928 of SEQ ID NO: 588799
caaugacuucuguacgauu

SEQ ID NO: 890471 - RNA, 19 nt, Artificial Sequence
  Description of Artificial Sequence: Synthetic oligonucleotide
  Antisense strand to SEQ ID NO: 890470
aaucguacagaagucauug

SEQ ID NO: 890472 - RNA, 19 nt, Artificial Sequence
  Description of Artificial Sequence: Synthetic oligonucleotide
  Sense strand starting at position 1080 of SEQ ID NO: 588799
aagagcaacguuugcuaaa

SEQ ID NO: 890473 - RNA, 19 nt, Artificial Sequence
  Description of Artificial Sequence: Synthetic oligonucleotide
  Antisense strand to SEQ ID NO: 890472
uuuagcaaacguugcucuu

SEQ ID NO: 890474 - RNA, 19 nt, Artificial Sequence
  Description of Artificial Sequence: Synthetic oligonucleotide
  Sense strand starting at position 1082 of SEQ ID NO: 588799
gagcaacguuugcuaaaga

SEQ ID NO: 890475 - RNA, 19 nt, Artificial Sequence
  Description of Artificial Sequence: Synthetic oligonucleotide
  Antisense strand to SEQ ID NO: 890474
ucuuuagcaaacguugcuc

SEQ ID NO: 890476 - RNA, 19 nt, Artificial Sequence
  Description of Artificial Sequence: Synthetic oligonucleotide
  Sense strand starting at position 1093 of SEQ ID NO: 588799
gcuaaagagucucuuuaau

SEQ ID NO: 890477 - RNA, 19 nt, Artificial Sequence
  Description of Artificial Sequence: Synthetic oligonucleotide
  Antisense strand to SEQ ID NO: 890476
auuaaagagacucuuuagc

SEQ ID NO: 890478 - RNA, 19 nt, Artificial Sequence
  Description of Artificial Sequence: Synthetic oligonucleotide
  Sense strand starting at position 1164 of SEQ ID NO: 588799
ugaucuuucucacuuaugu

SEQ ID NO: 890479 - RNA, 19 nt, Artificial Sequence
  Description of Artificial Sequence: Synthetic oligonucleotide
  Antisense strand to SEQ ID NO: 890478
acauaagugagaaagauca

SEQ ID NO: 890480 - RNA, 19 nt, Artificial Sequence
  Description of Artificial Sequence: Synthetic oligonucleotide
  Sense strand starting at position 1245 of SEQ ID NO: 588799
auuacuuugucaguaucuu

SEQ ID NO: 890481 - RNA, 19 nt, Artificial Sequence
  Description of Artificial Sequence: Synthetic oligonucleotide
  Antisense strand to SEQ ID NO: 890480
aagauacugacaaaguaau

SEQ ID NO: 890482 - RNA, 19 nt, Artificial Sequence
  Description of Artificial Sequence: Synthetic oligonucleotide
  Sense strand starting at position 1246 of SEQ ID NO: 588799
uuacuuugucaguaucuuu

SEQ ID NO: 890483 - RNA, 19 nt, Artificial Sequence
  Description of Artificial Sequence: Synthetic oligonucleotide
  Antisense strand to SEQ ID NO: 890482
aaagauacugacaaaguaa

SEQ ID NO: 890484 - RNA, 19 nt, Artificial Sequence
  Description of Artificial Sequence: Synthetic oligonucleotide
  Sense strand starting at position 1251 of SEQ ID NO: 588799
uugucaguaucuuuccaaa

SEQ ID NO: 890485 - RNA, 19 nt, Artificial Sequence
  Description of Artificial Sequence: Synthetic oligonucleotide
  Antisense strand to SEQ ID NO: 890484
uuuggaaagauacugacaa

SEQ ID NO: 890486 - RNA, 19 nt, Artificial Sequence
  Description of Artificial Sequence: Synthetic oligonucleotide
  Sense strand starting at position 1253 of SEQ ID NO: 588799
gucaguaucuuuccaaaca

SEQ ID NO: 890487 - RNA, 19 nt, Artificial Sequence
  Description of Artificial Sequence: Synthetic oligonucleotide
  Antisense strand to SEQ ID NO: 890486
uguuuggaaagauacugac

SEQ ID NO: 890488 - RNA, 19 nt, Artificial Sequence
  Description of Artificial Sequence: Synthetic oligonucleotide
  Sense strand starting at position 1276 of SEQ ID NO: 588799
aacugcccugcguaugaau

SEQ ID NO: 890489 - RNA, 19 nt, Artificial Sequence
  Description of Artificial Sequence: Synthetic oligonucleotide
  Antisense strand to SEQ ID NO: 890488
auucauacgcagggcaguu

SEQ ID NO: 890490 - RNA, 19 nt, Artificial Sequence
  Description of Artificial Sequence: Synthetic oligonucleotide
  Sense strand starting at position 1340 of SEQ ID NO: 588799
uaaauagcuugagucagau

SEQ ID NO: 890491 - RNA, 19 nt, Artificial Sequence
  Description of Artificial Sequence: Synthetic oligonucleotide
  Antisense strand to SEQ ID NO: 890490
aucugacucaagcuauuua

SEQ ID NO: 890492 - RNA, 19 nt, Artificial Sequence
  Description of Artificial Sequence: Synthetic oligonucleotide
  Sense strand starting at position 1357 of SEQ ID NO: 588799
aucuccagaccuugaagau

SEQ ID NO: 890493 - RNA, 19 nt, Artificial Sequence
  Description of Artificial Sequence: Synthetic oligonucleotide
  Antisense strand to SEQ ID NO: 890492
aucuucaaggucuggagau

SEQ ID NO: 890494 - RNA, 19 nt, Artificial Sequence
  Description of Artificial Sequence: Synthetic oligonucleotide
  Sense strand starting at position 1508 of SEQ ID NO: 588799
aguauaauauugcugacau

SEQ ID NO: 890495 - RNA, 19 nt, Artificial Sequence
  Description of Artificial Sequence: Synthetic oligonucleotide
  Antisense strand to SEQ ID NO: 890494
augucagcaauauuauacu

SEQ ID NO: 890496 - RNA, 19 nt, Artificial Sequence
  Description of Artificial Sequence: Synthetic oligonucleotide
  Sense strand starting at position 1585 of SEQ ID NO: 588799
aacuuugaguggucauauc

SEQ ID NO: 890497 - RNA, 19 nt, Artificial Sequence
  Description of Artificial Sequence: Synthetic oligonucleotide
  Antisense strand to SEQ ID NO: 890496
gauaugaccacucaaaguu

SEQ ID NO: 890498 - RNA, 19 nt, Artificial Sequence
  Description of Artificial Sequence: Synthetic oligonucleotide
  Sense strand starting at position 1610 of SEQ ID NO: 588799
aauaacuugcuuuaggagu

SEQ ID NO: 890499 - RNA, 19 nt, Artificial Sequence
  Description of Artificial Sequence: Synthetic oligonucleotide
  Antisense strand to SEQ ID NO: 890498
acuccuaaagcaaguuauu

SEQ ID NO: 890500 - RNA, 19 nt, Artificial Sequence
  Description of Artificial Sequence: Synthetic oligonucleotide
  Sense strand starting at position 1617 of SEQ ID NO: 588799
ugcuuuaggagucaagaca

SEQ ID NO: 890501 - RNA, 19 nt, Artificial Sequence
  Description of Artificial Sequence: Synthetic oligonucleotide
  Antisense strand to SEQ ID NO: 890500
ugucuugacuccuaaagca

SEQ ID NO: 890502 - RNA, 19 nt, Artificial Sequence
  Description of Artificial Sequence: Synthetic oligonucleotide
  Sense strand starting at position 1675 of SEQ ID NO: 588799
uuuguaucccuauagccua

SEQ ID NO: 890503 - RNA, 19 nt, Artificial Sequence
  Description of Artificial Sequence: Synthetic oligonucleotide
  Antisense strand to SEQ ID NO: 890502
uaggcuauagggauacaaa

SEQ ID NO: 890504 - RNA, 19 nt, Artificial Sequence
  Description of Artificial Sequence: Synthetic oligonucleotide
  Sense strand starting at position 1757 of SEQ ID NO: 588799
acugaaguaugccuaucau

SEQ ID NO: 890505 - RNA, 19 nt, Artificial Sequence
  Description of Artificial Sequence: Synthetic oligonucleotide
  Antisense strand to SEQ ID NO: 890504
augauaggcauacuucagu

SEQ ID NO: 890506 - RNA, 19 nt, Artificial Sequence
  Description of Artificial Sequence: Synthetic oligonucleotide
  Sense strand starting at position 1769 of SEQ ID NO: 588799
cuaucauagcaagacagua

SEQ ID NO: 890507 - RNA, 19 nt, Artificial Sequence
  Description of Artificial Sequence: Synthetic oligonucleotide
  Antisense strand to SEQ ID NO: 890506
uacugucuugcuaugauag

SEQ ID NO: 890508 - RNA, 19 nt, Artificial Sequence
  Description of Artificial Sequence: Synthetic oligonucleotide
  Sense strand starting at position 1774 of SEQ ID NO: 588799
auagcaagacaguaaaguu

SEQ ID NO: 890509 - RNA, 19 nt, Artificial Sequence
  Description of Artificial Sequence: Synthetic oligonucleotide
  Antisense strand to SEQ ID NO: 890508
aacuuuacugucuugcuau

SEQ ID NO: 890510 - RNA, 19 nt, Artificial Sequence
  Description of Artificial Sequence: Synthetic oligonucleotide
  Sense strand starting at position 1811 of SEQ ID NO: 588799
agguauguuggacagccaa

SEQ ID NO: 890511 - RNA, 19 nt, Artificial Sequence
  Description of Artificial Sequence: Synthetic oligonucleotide
  Antisense strand to SEQ ID NO: 890510
uuggcuguccaacauaccu

SEQ ID NO: 890512 - RNA, 19 nt, Artificial Sequence
  Description of Artificial Sequence: Synthetic oligonucleotide
  Sense strand starting at position 1989 of SEQ ID NO: 588799
gcaugauggucucugaaau

SEQ ID NO: 890513 - RNA, 19 nt, Artificial Sequence
  Description of Artificial Sequence: Synthetic oligonucleotide
  Antisense strand to SEQ ID NO: 890512
auuucagagaccaucaugc

SEQ ID NO: 890514 - RNA, 19 nt, Artificial Sequence
  Description of Artificial Sequence: Synthetic oligonucleotide
  Sense strand starting at position 1990 of SEQ ID NO: 588799
caugauggucucugaaaua

SEQ ID NO: 890515 - RNA, 19 nt, Artificial Sequence
  Description of Artificial Sequence: Synthetic oligonucleotide
  Antisense strand to SEQ ID NO: 890514
uauuucagagaccaucaug

SEQ ID NO: 890516 - RNA, 19 nt, Artificial Sequence
  Description of Artificial Sequence: Synthetic oligonucleotide
  Sense strand starting at position 2147 of SEQ ID NO: 588799
uguguauggucauucugac

SEQ ID NO: 890517 - RNA, 19 nt, Artificial Sequence
  Description of Artificial Sequence: Synthetic oligonucleotide
  Antisense strand to SEQ ID NO: 890516
gucagaaugaccauacaca

SEQ ID NO: 890518 - RNA, 19 nt, Artificial Sequence
  Description of Artificial Sequence: Synthetic oligonucleotide
  Sense strand starting at position 2153 of SEQ ID NO: 588799
uggucauucugaccacuuu

SEQ ID NO: 890519 - RNA, 19 nt, Artificial Sequence
  Description of Artificial Sequence: Synthetic oligonucleotide
  Antisense strand to SEQ ID NO: 890518
aaaguggucagaaugacca

SEQ ID NO: 890520 - RNA, 19 nt, Artificial Sequence
  Description of Artificial Sequence: Synthetic oligonucleotide
  Sense strand starting at position 2154 of SEQ ID NO: 588799
ggucauucugaccacuuua

SEQ ID NO: 890521 - RNA, 19 nt, Artificial Sequence
  Description of Artificial Sequence: Synthetic oligonucleotide
  Antisense strand to SEQ ID NO: 890520
uaaaguggucagaaugacc

SEQ ID NO: 890522 - RNA, 19 nt, Artificial Sequence
  Description of Artificial Sequence: Synthetic oligonucleotide
  Sense strand starting at position 2225 of SEQ ID NO: 588799
uccugagacuauccagguu

SEQ ID NO: 890523 - RNA, 19 nt, Artificial Sequence
  Description of Artificial Sequence: Synthetic oligonucleotide
  Antisense strand to SEQ ID NO: 890522
aaccuggauagucucagga

SEQ ID NO: 890524 - RNA, 19 nt, Artificial Sequence
  Description of Artificial Sequence: Synthetic oligonucleotide
  Sense strand starting at position 2228 of SEQ ID NO: 588799
ugagacuauccagguuaaa

SEQ ID NO: 890525 - RNA, 19 nt, Artificial Sequence
  Description of Artificial Sequence: Synthetic oligonucleotide
  Antisense strand to SEQ ID NO: 890524
uuuaaccuggauagucuca

SEQ ID NO: 890526 - RNA, 19 nt, Artificial Sequence
  Description of Artificial Sequence: Synthetic oligonucleotide
  Sense strand starting at position 2359 of SEQ ID NO: 588799
ccuggauguaagugucaug

SEQ ID NO: 890527 - RNA, 19 nt, Artificial Sequence
  Description of Artificial Sequence: Synthetic oligonucleotide
  Antisense strand to SEQ ID NO: 890526
caugacacuuacauccagg

SEQ ID NO: 890528 - RNA, 19 nt, Artificial Sequence
  Description of Artificial Sequence: Synthetic oligonucleotide
  Sense strand starting at position 3241 of SEQ ID NO: 588799
guaaaucauuucuaagguc

SEQ ID NO: 890529 - RNA, 19 nt, Artificial Sequence
  Description of Artificial Sequence: Synthetic oligonucleotide
  Antisense strand to SEQ ID NO: 890528
gaccuuagaaaugauuuac

SEQ ID NO: 890530 - RNA, 19 nt, Artificial Sequence
  Description of Artificial Sequence: Synthetic oligonucleotide
  Sense strand starting at position 3462 of SEQ ID NO: 588799
gagggagacuacuaucaug

SEQ ID NO: 890531 - RNA, 19 nt, Artificial Sequence
  Description of Artificial Sequence: Synthetic oligonucleotide
  Antisense strand to SEQ ID NO: 890530
caugauaguagucucccuc

SEQ ID NO: 890532 - RNA, 19 nt, Artificial Sequence
  Description of Artificial Sequence: Synthetic oligonucleotide
  Sense strand starting at position 3476 of SEQ ID NO: 588799
ucauguaaaugagauuugu

SEQ ID NO: 890533 - RNA, 19 nt, Artificial Sequence
  Description of Artificial Sequence: Synthetic oligonucleotide
  Antisense strand to SEQ ID NO: 890532
acaaaucucauuuacauga

SEQ ID NO: 890534 - RNA, 19 nt, Artificial Sequence
  Description of Artificial Sequence: Synthetic oligonucleotide
  Sense strand starting at position 3657 of SEQ ID NO: 588799
ccuugcuauugagcaaaga

SEQ ID NO: 890535 - RNA, 19 nt, Artificial Sequence
  Description of Artificial Sequence: Synthetic oligonucleotide
  Antisense strand to SEQ ID NO: 890534
ucuuugcucaauagcaagg

SEQ ID NO: 890536 - RNA, 19 nt, Artificial Sequence
  Description of Artificial Sequence: Synthetic oligonucleotide
  Sense strand starting at position 3714 of SEQ ID NO: 588799
gagaaacaguguuuaauug

SEQ ID NO: 890537 - RNA, 19 nt, Artificial Sequence
  Description of Artificial Sequence: Synthetic oligonucleotide
  Antisense strand to SEQ ID NO: 890536
caauuaaacacuguuucuc

SEQ ID NO: 890538 - RNA, 19 nt, Artificial Sequence
  Description of Artificial Sequence: Synthetic oligonucleotide
  Sense strand starting at position 89 of SEQ ID NO: 588800
cuaacaugagauggcuaaa

SEQ ID NO: 890539 - RNA, 19 nt, Artificial Sequence
  Description of Artificial Sequence: Synthetic oligonucleotide
  Antisense strand to SEQ ID NO: 890538
uuuagccaucucauguuag

SEQ ID NO: 890540 - RNA, 19 nt, Artificial Sequence
  Description of Artificial Sequence: Synthetic oligonucleotide
  Sense strand starting at position 217 of SEQ ID NO: 588800
uugcaagcccucuaagaca

SEQ ID NO: 890541 - RNA, 19 nt, Artificial Sequence
  Description of Artificial Sequence: Synthetic oligonucleotide
  Antisense strand to SEQ ID NO: 890540
ugucuuagagggcuugcaa

SEQ ID NO: 890542 - RNA, 19 nt, Artificial Sequence
  Description of Artificial Sequence: Synthetic oligonucleotide
  Sense strand starting at position 434 of SEQ ID NO: 588800
guaggagucugguugggaa

SEQ ID NO: 890543 - RNA, 19 nt, Artificial Sequence
  Description of Artificial Sequence: Synthetic oligonucleotide
  Antisense strand to SEQ ID NO: 890542
uucccaaccagacuccuac

SEQ ID NO: 890544 - RNA, 19 nt, Artificial Sequence
  Description of Artificial Sequence: Synthetic oligonucleotide
  Sense strand starting at position 655 of SEQ ID NO: 588800
cccauuguccaguacugaa

SEQ ID NO: 890545 - RNA, 19 nt, Artificial Sequence
  Description of Artificial Sequence: Synthetic oligonucleotide
  Antisense strand to SEQ ID NO: 890544
uucaguacuggacaauggg

SEQ ID NO: 890546 - RNA, 19 nt, Artificial Sequence
  Description of Artificial Sequence: Synthetic oligonucleotide
  Sense strand starting at position 725 of SEQ ID NO: 588800
ccugcugugaaaugggaau

SEQ ID NO: 890547 - RNA, 19 nt, Artificial Sequence
  Description of Artificial Sequence: Synthetic oligonucleotide
  Antisense strand to SEQ ID NO: 890546
auucccauuucacagcagg

SEQ ID NO: 890548 - RNA, 19 nt, Artificial Sequence
  Description of Artificial Sequence: Synthetic oligonucleotide
  Sense strand starting at position 1066 of SEQ ID NO: 588800
gagguaguuccugaccuca

SEQ ID NO: 890549 - RNA, 19 nt, Artificial Sequence
  Description of Artificial Sequence: Synthetic oligonucleotide
  Antisense strand to SEQ ID NO: 890548
ugaggucaggaacuaccuc

SEQ ID NO: 890550 - RNA, 19 nt, Artificial Sequence
  Description of Artificial Sequence: Synthetic oligonucleotide
  Sense strand starting at position 1068 of SEQ ID NO: 588800
gguaguuccugaccucaca

SEQ ID NO: 890551 - RNA, 19 nt, Artificial Sequence
  Description of Artificial Sequence: Synthetic oligonucleotide
  Antisense strand to SEQ ID NO: 890550
ugugaggucaggaacuacc

SEQ ID NO: 890552 - RNA, 19 nt, Artificial Sequence
  Description of Artificial Sequence: Synthetic oligonucleotide
  Sense strand starting at position 1139 of SEQ ID NO: 588800
cuguccuagugaucaggaa

SEQ ID NO: 890553 - RNA, 19 nt, Artificial Sequence
  Description of Artificial Sequence: Synthetic oligonucleotide
  Antisense strand to SEQ ID NO: 890552
uuccugaucacuaggacag

SEQ ID NO: 890554 - RNA, 19 nt, Artificial Sequence
  Description of Artificial Sequence: Synthetic oligonucleotide
  Sense strand starting at position 1242 of SEQ ID NO: 588800
acagcuaugucauccacau

SEQ ID NO: 890555 - RNA, 19 nt, Artificial Sequence
  Description of Artificial Sequence: Synthetic oligonucleotide
  Antisense strand to SEQ ID NO: 890554
auguggaugacauagcugu

SEQ ID NO: 890556 - RNA, 19 nt, Artificial Sequence
  Description of Artificial Sequence: Synthetic oligonucleotide
  Sense strand starting at position 1655 of SEQ ID NO: 588800
gagggagcuccuggauaua

SEQ ID NO: 890557 - RNA, 19 nt, Artificial Sequence
  Description of Artificial Sequence: Synthetic oligonucleotide
  Antisense strand to SEQ ID NO: 890556
uauauccaggagcucccuc

SEQ ID NO: 890558 - RNA, 19 nt, Artificial Sequence
  Description of Artificial Sequence: Synthetic oligonucleotide
  Sense strand starting at position 1862 of SEQ ID NO: 588800
ccgcuagucaccucgcaua

SEQ ID NO: 890559 - RNA, 19 nt, Artificial Sequence
  Description of Artificial Sequence: Synthetic oligonucleotide
  Antisense strand to SEQ ID NO: 890558
uaugcgaggugacuagcgg

SEQ ID NO: 890560 - RNA, 19 nt, Artificial Sequence
  Description of Artificial Sequence: Synthetic oligonucleotide
  Sense strand starting at position 1864 of SEQ ID NO: 588800
gcuagucaccucgcauagu

SEQ ID NO: 890561 - RNA, 19 nt, Artificial Sequence
  Description of Artificial Sequence: Synthetic oligonucleotide
  Antisense strand to SEQ ID NO: 890560
acuaugcgaggugacuagc

SEQ ID NO: 890562 - RNA, 19 nt, Artificial Sequence
  Description of Artificial Sequence: Synthetic oligonucleotide
  Sense strand starting at position 2527 of SEQ ID NO: 588800
uggcgagauacuuaguauc

SEQ ID NO: 890563 - RNA, 19 nt, Artificial Sequence
  Description of Artificial Sequence: Synthetic oligonucleotide
  Antisense strand to SEQ ID NO: 890562
gauacuaaguaucucgcca

SEQ ID NO: 890564 - RNA, 19 nt, Artificial Sequence
  Description of Artificial Sequence: Synthetic oligonucleotide
  Sense strand starting at position 2654 of SEQ ID NO: 588800
acaaguuuauugcccugaa

SEQ ID NO: 890565 - RNA, 19 nt, Artificial Sequence
  Description of Artificial Sequence: Synthetic oligonucleotide
  Antisense strand to SEQ ID NO: 890564
uucagggcaauaaacuugu

SEQ ID NO: 890566 - RNA, 19 nt, Artificial Sequence
  Description of Artificial Sequence: Synthetic oligonucleotide
  Sense strand starting at position 2655 of SEQ ID NO: 588800
caaguuuauugcccugaag

SEQ ID NO: 890567 - RNA, 19 nt, Artificial Sequence
  Description of Artificial Sequence: Synthetic oligonucleotide
  Antisense strand to SEQ ID NO: 890566
cuucagggcaauaaacuug

SEQ ID NO: 890568 - RNA, 19 nt, Artificial Sequence
  Description of Artificial Sequence: Synthetic oligonucleotide
  Sense strand starting at position 2657 of SEQ ID NO: 588800
aguuuauugcccugaagag

SEQ ID NO: 890569 - RNA, 19 nt, Artificial Sequence
  Description of Artificial Sequence: Synthetic oligonucleotide
  Antisense strand to SEQ ID NO: 890568
cucuucagggcaauaaacu

SEQ ID NO: 890570 - RNA, 19 nt, Artificial Sequence
  Description of Artificial Sequence: Synthetic oligonucleotide
  Sense strand starting at position 2658 of SEQ ID NO: 588800
guuuauugcccugaagaga

SEQ ID NO: 890571 - RNA, 19 nt, Artificial Sequence
  Description of Artificial Sequence: Synthetic oligonucleotide
  Antisense strand to SEQ ID NO: 890570
ucucuucagggcaauaaac

SEQ ID NO: 890572 - RNA, 19 nt, Artificial Sequence
  Description of Artificial Sequence: Synthetic oligonucleotide
  Sense strand starting at position 2687 of SEQ ID NO: 588800
caaggaugugcagguuaca

SEQ ID NO: 890573 - RNA, 19 nt, Artificial Sequence
  Description of Artificial Sequence: Synthetic oligonucleotide
  Antisense strand to SEQ ID NO: 890572
uguaaccugcacauccuug

SEQ ID NO: 890574 - RNA, 19 nt, Artificial Sequence
  Description of Artificial Sequence: Synthetic oligonucleotide
  Sense strand starting at position 2697 of SEQ ID NO: 588800
cagguuacagacuguaaga

SEQ ID NO: 890575 - RNA, 19 nt, Artificial Sequence
  Description of Artificial Sequence: Synthetic oligonucleotide
  Antisense strand to SEQ ID NO: 890574
ucuuacagucuguaaccug

SEQ ID NO: 890576 - RNA, 19 nt, Artificial Sequence
  Description of Artificial Sequence: Synthetic oligonucleotide
  Sense strand starting at position 2699 of SEQ ID NO: 588800
gguuacagacuguaagagu

SEQ ID NO: 890577 - RNA, 19 nt, Artificial Sequence
  Description of Artificial Sequence: Synthetic oligonucleotide
  Antisense strand to SEQ ID NO: 890576
acucuuacagucuguaacc

SEQ ID NO: 890578 - RNA, 19 nt, Artificial Sequence
  Description of Artificial Sequence: Synthetic oligonucleotide
  Sense strand starting at position 2776 of SEQ ID NO: 588800
agcugaugguuuccuauga

SEQ ID NO: 890579 - RNA, 19 nt, Artificial Sequence
  Description of Artificial Sequence: Synthetic oligonucleotide
  Antisense strand to SEQ ID NO: 890578
ucauaggaaaccaucagcu

SEQ ID NO: 890580 - RNA, 19 nt, Artificial Sequence
  Description of Artificial Sequence: Synthetic oligonucleotide
  Sense strand starting at position 2780 of SEQ ID NO: 588800
gaugguuuccuaugagggu

SEQ ID NO: 890581 - RNA, 19 nt, Artificial Sequence
  Description of Artificial Sequence: Synthetic oligonucleotide
  Antisense strand to SEQ ID NO: 890580
acccucauaggaaaccauc

SEQ ID NO: 890582 - RNA, 19 nt, Artificial Sequence
  Description of Artificial Sequence: Synthetic oligonucleotide
  Sense strand starting at position 2794 of SEQ ID NO: 588800
aggguaaagcuaugggcua

SEQ ID NO: 890583 - RNA, 19 nt, Artificial Sequence
  Description of Artificial Sequence: Synthetic oligonucleotide
  Antisense strand to SEQ ID NO: 890582
uagcccauagcuuuacccu

SEQ ID NO: 890584 - RNA, 19 nt, Artificial Sequence
  Description of Artificial Sequence: Synthetic oligonucleotide
  Sense strand starting at position 2846 of SEQ ID NO: 588800
ggcucaugaguuuacagag

SEQ ID NO: 890585 - RNA, 19 nt, Artificial Sequence
  Description of Artificial Sequence: Synthetic oligonucleotide
  Antisense strand to SEQ ID NO: 890584
cucuguaaacucaugagcc

SEQ ID NO: 890586 - RNA, 19 nt, Artificial Sequence
  Description of Artificial Sequence: Synthetic oligonucleotide
  Sense strand starting at position 3209 of SEQ ID NO: 588800
acauacugguuuccaauga

SEQ ID NO: 890587 - RNA, 19 nt, Artificial Sequence
  Description of Artificial Sequence: Synthetic oligonucleotide
  Antisense strand to SEQ ID NO: 890586
ucauuggaaaccaguaugu

SEQ ID NO: 890588 - RNA, 19 nt, Artificial Sequence
  Description of Artificial Sequence: Synthetic oligonucleotide
  Sense strand starting at position 3213 of SEQ ID NO: 588800
acugguuuccaaugacuuc

SEQ ID NO: 890589 - RNA, 19 nt, Artificial Sequence
  Description of Artificial Sequence: Synthetic oligonucleotide
  Antisense strand to SEQ ID NO: 890588
gaagucauuggaaaccagu

SEQ ID NO: 890590 - RNA, 19 nt, Artificial Sequence
  Description of Artificial Sequence: Synthetic oligonucleotide
  Sense strand starting at position 3224 of SEQ ID NO: 588800
augacuucccuuugggauu

SEQ ID NO: 890591 - RNA, 19 nt, Artificial Sequence
  Description of Artificial Sequence: Synthetic oligonucleotide
  Antisense strand to SEQ ID NO: 890590
aaucccaaagggaagucau

SEQ ID NO: 890592 - RNA, 19 nt, Artificial Sequence
  Description of Artificial Sequence: Synthetic oligonucleotide
  Sense strand starting at position 3230 of SEQ ID NO: 588800
ucccuuugggauuagcuau

SEQ ID NO: 890593 - RNA, 19 nt, Artificial Sequence
  Description of Artificial Sequence: Synthetic oligonucleotide
  Antisense strand to SEQ ID NO: 890592
auagcuaaucccaaaggga

SEQ ID NO: 890594 - RNA, 19 nt, Artificial Sequence
  Description of Artificial Sequence: Synthetic oligonucleotide
  Sense strand starting at position 3357 of SEQ ID NO: 588800
gggcauucucuguaccuca

SEQ ID NO: 890595 - RNA, 19 nt, Artificial Sequence
  Description of Artificial Sequence: Synthetic oligonucleotide
  Antisense strand to SEQ ID NO: 890594
ugagguacagagaaugccc

SEQ ID NO: 890596 - RNA, 19 nt, Artificial Sequence
  Description of Artificial Sequence: Synthetic oligonucleotide
  Sense strand starting at position 3362 of SEQ ID NO: 588800
uucucuguaccucauuaga

SEQ ID NO: 890597 - RNA, 19 nt, Artificial Sequence
  Description of Artificial Sequence: Synthetic oligonucleotide
  Antisense strand to SEQ ID NO: 890596
ucuaaugagguacagagaa

SEQ ID NO: 890598 - RNA, 19 nt, Artificial Sequence
  Description of Artificial Sequence: Synthetic oligonucleotide
  Sense strand starting at position 3364 of SEQ ID NO: 588800
cucuguaccucauuagaca

SEQ ID NO: 890599 - RNA, 19 nt, Artificial Sequence
  Description of Artificial Sequence: Synthetic oligonucleotide
  Antisense strand to SEQ ID NO: 890598
ugucuaaugagguacagag

SEQ ID NO: 890600 - RNA, 19 nt, Artificial Sequence
  Description of Artificial Sequence: Synthetic oligonucleotide
  Sense strand starting at position 3491 of SEQ ID NO: 588800
cauucuguucugggauaga

SEQ ID NO: 890601 - RNA, 19 nt, Artificial Sequence
  Description of Artificial Sequence: Synthetic oligonucleotide
  Antisense strand to SEQ ID NO: 890600
ucuaucccagaacagaaug

SEQ ID NO: 890602 - RNA, 19 nt, Artificial Sequence
  Description of Artificial Sequence: Synthetic oligonucleotide
  Sense strand starting at position 3523 of SEQ ID NO: 588800
uaagucauuuaucagagag

SEQ ID NO: 890603 - RNA, 19 nt, Artificial Sequence
  Description of Artificial Sequence: Synthetic oligonucleotide
  Antisense strand to SEQ ID NO: 890602
cucucugauaaaugacuua

SEQ ID NO: 890604 - RNA, 19 nt, Artificial Sequence
  Description of Artificial Sequence: Synthetic oligonucleotide
  Sense strand starting at position 3539 of SEQ ID NO: 588800
gaggcacugccauagaugu

SEQ ID NO: 890605 - RNA, 19 nt, Artificial Sequence
  Description of Artificial Sequence: Synthetic oligonucleotide
  Antisense strand to SEQ ID NO: 890604
acaucuauggcagugccuc

SEQ ID NO: 890606 - RNA, 19 nt, Artificial Sequence
  Description of Artificial Sequence: Synthetic oligonucleotide
  Sense strand starting at position 3704 of SEQ ID NO: 588800
aggcauaaagcuugggaaa

SEQ ID NO: 890607 - RNA, 19 nt, Artificial Sequence
  Description of Artificial Sequence: Synthetic oligonucleotide
  Antisense strand to SEQ ID NO: 890606
uuucccaagcuuuaugccu

SEQ ID NO: 890608 - RNA, 19 nt, Artificial Sequence
  Description of Artificial Sequence: Synthetic oligonucleotide
  Sense strand starting at position 3705 of SEQ ID NO: 588800
ggcauaaagcuugggaaac

SEQ ID NO: 890609 - RNA, 19 nt, Artificial Sequence
  Description of Artificial Sequence: Synthetic oligonucleotide
  Antisense strand to SEQ ID NO: 890608
guuucccaagcuuuaugcc

SEQ ID NO: 890610 - RNA, 19 nt, Artificial Sequence
  Description of Artificial Sequence: Synthetic oligonucleotide
  Sense strand starting at position 3728 of SEQ ID NO: 588800
cccuuacaguuucuagagu

SEQ ID NO: 890611 - RNA, 19 nt, Artificial Sequence
  Description of Artificial Sequence: Synthetic oligonucleotide
  Antisense strand to SEQ ID NO: 890610
acucuagaaacuguaaggg

SEQ ID NO: 890612 - RNA, 19 nt, Artificial Sequence
  Description of Artificial Sequence: Synthetic oligonucleotide
  Sense strand starting at position 3792 of SEQ ID NO: 588800
ggagaucaguuaucuaacc

SEQ ID NO: 890613 - RNA, 19 nt, Artificial Sequence
  Description of Artificial Sequence: Synthetic oligonucleotide
  Antisense strand to SEQ ID NO: 890612
gguuagauaacugaucucc

SEQ ID NO: 890614 - RNA, 19 nt, Artificial Sequence
  Description of Artificial Sequence: Synthetic oligonucleotide
  Sense strand starting at position 3878 of SEQ ID NO: 588800
gccuguagcagagaagaau

SEQ ID NO: 890615 - RNA, 19 nt, Artificial Sequence
  Description of Artificial Sequence: Synthetic oligonucleotide
  Antisense strand to SEQ ID NO: 890614
auucuucucugcuacaggc

SEQ ID NO: 890616 - RNA, 19 nt, Artificial Sequence
  Description of Artificial Sequence: Synthetic oligonucleotide
  Sense strand starting at position 3981 of SEQ ID NO: 588800
agagaaguacacugaguug

SEQ ID NO: 890617 - RNA, 19 nt, Artificial Sequence
  Description of Artificial Sequence: Synthetic oligonucleotide
  Antisense strand to SEQ ID NO: 890616
caacucaguguacuucucu

SEQ ID NO: 890618 - RNA, 19 nt, Artificial Sequence
  Description of Artificial Sequence: Synthetic oligonucleotide
  Sense strand starting at position 111 of SEQ ID NO: 588801
ggauucugacugugaccaa

SEQ ID NO: 890619 - RNA, 19 nt, Artificial Sequence
  Description of Artificial Sequence: Synthetic oligonucleotide
  Antisense strand to SEQ ID NO: 890618
uuggucacagucagaaucc

SEQ ID NO: 890620 - RNA, 19 nt, Artificial Sequence
  Description of Artificial Sequence: Synthetic oligonucleotide
  Sense strand starting at position 170 of SEQ ID NO: 588801
caggucucugcucaguaga

SEQ ID NO: 890621 - RNA, 19 nt, Artificial Sequence
  Description of Artificial Sequence: Synthetic oligonucleotide
  Antisense strand to SEQ ID NO: 890620
ucuacugagcagagaccug

SEQ ID NO: 890622 - RNA, 19 nt, Artificial Sequence
  Description of Artificial Sequence: Synthetic oligonucleotide
  Sense strand starting at position 172 of SEQ ID NO: 588801
ggucucugcucaguagaag

SEQ ID NO: 890623 - RNA, 19 nt, Artificial Sequence
  Description of Artificial Sequence: Synthetic oligonucleotide
  Antisense strand to SEQ ID NO: 890622
cuucuacugagcagagacc

SEQ ID NO: 890624 - RNA, 19 nt, Artificial Sequence
  Description of Artificial Sequence: Synthetic oligonucleotide
  Sense strand starting at position 173 of SEQ ID NO: 588801
gucucugcucaguagaaga

SEQ ID NO: 890625 - RNA, 19 nt, Artificial Sequence
  Description of Artificial Sequence: Synthetic oligonucleotide
  Antisense strand to SEQ ID NO: 890624
ucuucuacugagcagagac

SEQ ID NO: 890626 - RNA, 19 nt, Artificial Sequence
  Description of Artificial Sequence: Synthetic oligonucleotide
  Sense strand starting at position 183 of SEQ ID NO: 588801
aguagaagaaccugacagu

SEQ ID NO: 890627 - RNA, 19 nt, Artificial Sequence
  Description of Artificial Sequence: Synthetic oligonucleotide
  Antisense strand to SEQ ID NO: 890626
acugucagguucuucuacu

SEQ ID NO: 890628 - RNA, 19 nt, Artificial Sequence
  Description of Artificial Sequence: Synthetic oligonucleotide
  Sense strand starting at position 208 of SEQ ID NO: 588801
cagccagugcugcaacaaa

SEQ ID NO: 890629 - RNA, 19 nt, Artificial Sequence
  Description of Artificial Sequence: Synthetic oligonucleotide
  Antisense strand to SEQ ID NO: 890628
uuuguugcagcacuggcug

SEQ ID NO: 890630 - RNA, 19 nt, Artificial Sequence
  Description of Artificial Sequence: Synthetic oligonucleotide
  Sense strand starting at position 261 of SEQ ID NO: 588801
cacagcuaugguugaguga

SEQ ID NO: 890631 - RNA, 19 nt, Artificial Sequence
  Description of Artificial Sequence: Synthetic oligonucleotide
  Antisense strand to SEQ ID NO: 890630
ucacucaaccauagcugug

SEQ ID NO: 890632 - RNA, 19 nt, Artificial Sequence
  Description of Artificial Sequence: Synthetic oligonucleotide
  Sense strand starting at position 301 of SEQ ID NO: 588801
cugugcuauagcccguaua

SEQ ID NO: 890633 - RNA, 19 nt, Artificial Sequence
  Description of Artificial Sequence: Synthetic oligonucleotide
  Antisense strand to SEQ ID NO: 890632
uauacgggcuauagcacag

SEQ ID NO: 890634 - RNA, 19 nt, Artificial Sequence
  Description of Artificial Sequence: Synthetic oligonucleotide
  Sense strand starting at position 302 of SEQ ID NO: 588801
ugugcuauagcccguauau

SEQ ID NO: 890635 - RNA, 19 nt, Artificial Sequence
  Description of Artificial Sequence: Synthetic oligonucleotide
  Antisense strand to SEQ ID NO: 890634
auauacgggcuauagcaca

SEQ ID NO: 890636 - RNA, 19 nt, Artificial Sequence
  Description of Artificial Sequence: Synthetic oligonucleotide
  Sense strand starting at position 303 of SEQ ID NO: 588801
gugcuauagcccguauaug

SEQ ID NO: 890637 - RNA, 19 nt, Artificial Sequence
  Description of Artificial Sequence: Synthetic oligonucleotide
  Antisense strand to SEQ ID NO: 890636
cauauacgggcuauagcac

SEQ ID NO: 890638 - RNA, 19 nt, Artificial Sequence
  Description of Artificial Sequence: Synthetic oligonucleotide
  Sense strand starting at position 362 of SEQ ID NO: 588801
ggacuauugucccagguua

SEQ ID NO: 890639 - RNA, 19 nt, Artificial Sequence
  Description of Artificial Sequence: Synthetic oligonucleotide
  Antisense strand to SEQ ID NO: 890638
uaaccugggacaauagucc

SEQ ID NO: 890640 - RNA, 19 nt, Artificial Sequence
  Description of Artificial Sequence: Synthetic oligonucleotide
  Sense strand starting at position 364 of SEQ ID NO: 588801
acuauugucccagguuacu

SEQ ID NO: 890641 - RNA, 19 nt, Artificial Sequence
  Description of Artificial Sequence: Synthetic oligonucleotide
  Antisense strand to SEQ ID NO: 890640
aguaaccugggacaauagu

SEQ ID NO: 890642 - RNA, 19 nt, Artificial Sequence
  Description of Artificial Sequence: Synthetic oligonucleotide
  Sense strand starting at position 540 of SEQ ID NO: 588801
cagcuaagaugauguaauu

SEQ ID NO: 890643 - RNA, 19 nt, Artificial Sequence
  Description of Artificial Sequence: Synthetic oligonucleotide
  Antisense strand to SEQ ID NO: 890642
aauuacaucaucuuagcug

SEQ ID NO: 890644 - RNA, 19 nt, Artificial Sequence
  Description of Artificial Sequence: Synthetic oligonucleotide
  Sense strand starting at position 566 of SEQ ID NO: 588801
ccucacuccuuucgggaau

SEQ ID NO: 890645 - RNA, 19 nt, Artificial Sequence
  Description of Artificial Sequence: Synthetic oligonucleotide
  Antisense strand to SEQ ID NO: 890644
auucccgaaaggagugagg

SEQ ID NO: 890646 - RNA, 19 nt, Artificial Sequence
  Description of Artificial Sequence: Synthetic oligonucleotide
  Sense strand starting at position 567 of SEQ ID NO: 588801
cucacuccuuucgggaaua

SEQ ID NO: 890647 - RNA, 19 nt, Artificial Sequence
  Description of Artificial Sequence: Synthetic oligonucleotide
  Antisense strand to SEQ ID NO: 890646
uauucccgaaaggagugag

SEQ ID NO: 890648 - RNA, 19 nt, Artificial Sequence
  Description of Artificial Sequence: Synthetic oligonucleotide
  Sense strand starting at position 897 of SEQ ID NO: 588801
guaauauaacuguacuuug

SEQ ID NO: 890649 - RNA, 19 nt, Artificial Sequence
  Description of Artificial Sequence: Synthetic oligonucleotide
  Antisense strand to SEQ ID NO: 890648
caaaguacaguuauauuac

SEQ ID NO: 890650 - RNA, 19 nt, Artificial Sequence
  Description of Artificial Sequence: Synthetic oligonucleotide
  Sense strand starting at position 919 of SEQ ID NO: 588801
cuggcaucggagugucaaa

SEQ ID NO: 890651 - RNA, 19 nt, Artificial Sequence
  Description of Artificial Sequence: Synthetic oligonucleotide
  Antisense strand to SEQ ID NO: 890650
uuugacacuccgaugccag

SEQ ID NO: 890652 - RNA, 19 nt, Artificial Sequence
  Description of Artificial Sequence: Synthetic oligonucleotide
  Sense strand starting at position 1270 of SEQ ID NO: 588801
cgaauuaaaccuugccaua

SEQ ID NO: 890653 - RNA, 19 nt, Artificial Sequence
  Description of Artificial Sequence: Synthetic oligonucleotide
  Antisense strand to SEQ ID NO: 890652
uauggcaagguuuaauucg

SEQ ID NO: 890654 - RNA, 19 nt, Artificial Sequence
  Description of Artificial Sequence: Synthetic oligonucleotide
  Sense strand starting at position 1436 of SEQ ID NO: 588801
gcucauugcccagagccaa

SEQ ID NO: 890655 - RNA, 19 nt, Artificial Sequence
  Description of Artificial Sequence: Synthetic oligonucleotide
  Antisense strand to SEQ ID NO: 890654
uuggcucugggcaaugagc

SEQ ID NO: 890656 - RNA, 19 nt, Artificial Sequence
  Description of Artificial Sequence: Synthetic oligonucleotide
  Sense strand starting at position 2258 of SEQ ID NO: 588801
agcacaugaucuuggucua

SEQ ID NO: 890657 - RNA, 19 nt, Artificial Sequence
  Description of Artificial Sequence: Synthetic oligonucleotide
  Antisense strand to SEQ ID NO: 890656
uagaccaagaucaugugcu

SEQ ID NO: 890658 - RNA, 19 nt, Artificial Sequence
  Description of Artificial Sequence: Synthetic oligonucleotide
  Sense strand starting at position 2259 of SEQ ID NO: 588801
gcacaugaucuuggucuaa

SEQ ID NO: 890659 - RNA, 19 nt, Artificial Sequence
  Description of Artificial Sequence: Synthetic oligonucleotide
  Antisense strand to SEQ ID NO: 890658
uuagaccaagaucaugugc

SEQ ID NO: 890660 - RNA, 19 nt, Artificial Sequence
  Description of Artificial Sequence: Synthetic oligonucleotide
  Sense strand starting at position 2261 of SEQ ID NO: 588801
acaugaucuuggucuaauc

SEQ ID NO: 890661 - RNA, 19 nt, Artificial Sequence
  Description of Artificial Sequence: Synthetic oligonucleotide
  Antisense strand to SEQ ID NO: 890660
gauuagaccaagaucaugu

SEQ ID NO: 890662 - RNA, 19 nt, Artificial Sequence
  Description of Artificial Sequence: Synthetic oligonucleotide
  Sense strand starting at position 2270 of SEQ ID NO: 588801
uggucuaaucugugacugu

SEQ ID NO: 890663 - RNA, 19 nt, Artificial Sequence
  Description of Artificial Sequence: Synthetic oligonucleotide
  Antisense strand to SEQ ID NO: 890662
acagucacagauuagacca

SEQ ID NO: 890664 - RNA, 19 nt, Artificial Sequence
  Description of Artificial Sequence: Synthetic oligonucleotide
  Sense strand starting at position 2271 of SEQ ID NO: 588801
ggucuaaucugugacuguu

SEQ ID NO: 890665 - RNA, 19 nt, Artificial Sequence
  Description of Artificial Sequence: Synthetic oligonucleotide
  Antisense strand to SEQ ID NO: 890664
aacagucacagauuagacc

SEQ ID NO: 890666 - RNA, 19 nt, Artificial Sequence
  Description of Artificial Sequence: Synthetic oligonucleotide
  Sense strand starting at position 2430 of SEQ ID NO: 588801
cucauauagugcuuagcaa

SEQ ID NO: 890667 - RNA, 19 nt, Artificial Sequence
  Description of Artificial Sequence: Synthetic oligonucleotide
  Antisense strand to SEQ ID NO: 890666
uugcuaagcacuauaugag

SEQ ID NO: 890668 - RNA, 19 nt, Artificial Sequence
  Description of Artificial Sequence: Synthetic oligonucleotide
  Sense strand starting at position 2431 of SEQ ID NO: 588801
ucauauagugcuuagcaag

SEQ ID NO: 890669 - RNA, 19 nt, Artificial Sequence
  Description of Artificial Sequence: Synthetic oligonucleotide
  Antisense strand to SEQ ID NO: 890668
cuugcuaagcacuauauga

SEQ ID NO: 890670 - RNA, 19 nt, Artificial Sequence
  Description of Artificial Sequence: Synthetic oligonucleotide
  Sense strand starting at position 2434 of SEQ ID NO: 588801
uauagugcuuagcaagcaa

SEQ ID NO: 890671 - RNA, 19 nt, Artificial Sequence
  Description of Artificial Sequence: Synthetic oligonucleotide
  Antisense strand to SEQ ID NO: 890670
uugcuugcuaagcacuaua

SEQ ID NO: 890672 - RNA, 19 nt, Artificial Sequence
  Description of Artificial Sequence: Synthetic oligonucleotide
  Sense strand starting at position 2447 of SEQ ID NO: 588801
aagcaauggccuugguaag

SEQ ID NO: 890673 - RNA, 19 nt, Artificial Sequence
  Description of Artificial Sequence: Synthetic oligonucleotide
  Antisense strand to SEQ ID NO: 890672
cuuaccaaggccauugcuu

SEQ ID NO: 890674 - RNA, 19 nt, Artificial Sequence
  Description of Artificial Sequence: Synthetic oligonucleotide
  Sense strand starting at position 2695 of SEQ ID NO: 588801
cugcgauuagaugaacuca

SEQ ID NO: 890675 - RNA, 19 nt, Artificial Sequence
  Description of Artificial Sequence: Synthetic oligonucleotide
  Antisense strand to SEQ ID NO: 890674
ugaguucaucuaaucgcag

SEQ ID NO: 890676 - RNA, 19 nt, Artificial Sequence
  Description of Artificial Sequence: Synthetic oligonucleotide
  Sense strand starting at position 2735 of SEQ ID NO: 588801
gcugaucccuuggaacaga

SEQ ID NO: 890677 - RNA, 19 nt, Artificial Sequence
  Description of Artificial Sequence: Synthetic oligonucleotide
  Antisense strand to SEQ ID NO: 890676
ucuguuccaagggaucagc

SEQ ID NO: 890678 - RNA, 19 nt, Artificial Sequence
  Description of Artificial Sequence: Synthetic oligonucleotide
  Sense strand starting at position 2839 of SEQ ID NO: 588801
agcugucaaccucaggaaa

SEQ ID NO: 890679 - RNA, 19 nt, Artificial Sequence
  Description of Artificial Sequence: Synthetic oligonucleotide
  Antisense strand to SEQ ID NO: 890678
uuuccugagguugacagcu

SEQ ID NO: 890680 - RNA, 19 nt, Artificial Sequence
  Description of Artificial Sequence: Synthetic oligonucleotide
  Sense strand starting at position 2841 of SEQ ID NO: 588801
cugucaaccucaggaaagu

SEQ ID NO: 890681 - RNA, 19 nt, Artificial Sequence
  Description of Artificial Sequence: Synthetic oligonucleotide
  Antisense strand to SEQ ID NO: 890680
acuuuccugagguugacag

SEQ ID NO: 890682 - RNA, 19 nt, Artificial Sequence
  Description of Artificial Sequence: Synthetic oligonucleotide
  Sense strand starting at position 2859 of SEQ ID NO: 588801
uaccaagcugccugugaaa

SEQ ID NO: 890683 - RNA, 19 nt, Artificial Sequence
  Description of Artificial Sequence: Synthetic oligonucleotide
  Antisense strand to SEQ ID NO: 890682
uuucacaggcagcuuggua

SEQ ID NO: 890684 - RNA, 19 nt, Artificial Sequence
  Description of Artificial Sequence: Synthetic oligonucleotide
  Sense strand starting at position 2861 of SEQ ID NO: 588801
ccaagcugccugugaaaug

SEQ ID NO: 890685 - RNA, 19 nt, Artificial Sequence
  Description of Artificial Sequence: Synthetic oligonucleotide
  Antisense strand to SEQ ID NO: 890684
cauuucacaggcagcuugg

SEQ ID NO: 890686 - RNA, 19 nt, Artificial Sequence
  Description of Artificial Sequence: Synthetic oligonucleotide
  Sense strand starting at position 2958 of SEQ ID NO: 588801
agucacuaguauuacuauu

SEQ ID NO: 890687 - RNA, 19 nt, Artificial Sequence
  Description of Artificial Sequence: Synthetic oligonucleotide
  Antisense strand to SEQ ID NO: 890686
aauaguaauacuagugacu

SEQ ID NO: 890688 - RNA, 19 nt, Artificial Sequence
  Description of Artificial Sequence: Synthetic oligonucleotide
  Sense strand starting at position 3345 of SEQ ID NO: 588801
gcaccugcucugugucaga

SEQ ID NO: 890689 - RNA, 19 nt, Artificial Sequence
  Description of Artificial Sequence: Synthetic oligonucleotide
  Antisense strand to SEQ ID NO: 890688
ucugacacagagcaggugc

SEQ ID NO: 890690 - RNA, 19 nt, Artificial Sequence
  Description of Artificial Sequence: Synthetic oligonucleotide
  Sense strand starting at position 3360 of SEQ ID NO: 588801
cagagacaguccuaggcau

SEQ ID NO: 890691 - RNA, 19 nt, Artificial Sequence
  Description of Artificial Sequence: Synthetic oligonucleotide
  Antisense strand to SEQ ID NO: 890690
augccuaggacugucucug

SEQ ID NO: 890692 - RNA, 19 nt, Artificial Sequence
  Description of Artificial Sequence: Synthetic oligonucleotide
  Sense strand starting at position 3367 of SEQ ID NO: 588801
aguccuaggcauuggaaau

SEQ ID NO: 890693 - RNA, 19 nt, Artificial Sequence
  Description of Artificial Sequence: Synthetic oligonucleotide
  Antisense strand to SEQ ID NO: 890692
auuuccaaugccuaggacu

SEQ ID NO: 890694 - RNA, 19 nt, Artificial Sequence
  Description of Artificial Sequence: Synthetic oligonucleotide
  Sense strand starting at position 3368 of SEQ ID NO: 588801
guccuaggcauuggaaaua

SEQ ID NO: 890695 - RNA, 19 nt, Artificial Sequence
  Description of Artificial Sequence: Synthetic oligonucleotide
  Antisense strand to SEQ ID NO: 890694
uauuuccaaugccuaggac

SEQ ID NO: 890696 - RNA, 19 nt, Artificial Sequence
  Description of Artificial Sequence: Synthetic oligonucleotide
  Sense strand starting at position 3409 of SEQ ID NO: 588801
agcccaugcucucagguua

SEQ ID NO: 890697 - RNA, 19 nt, Artificial Sequence
  Description of Artificial Sequence: Synthetic oligonucleotide
  Antisense strand to SEQ ID NO: 890696
uaaccugagagcaugggcu

SEQ ID NO: 890698 - RNA, 19 nt, Artificial Sequence
  Description of Artificial Sequence: Synthetic oligonucleotide
  Sense strand starting at position 119 of SEQ ID NO: 588802
gggaaugaguaugcccauu

SEQ ID NO: 890699 - RNA, 19 nt, Artificial Sequence
  Description of Artificial Sequence: Synthetic oligonucleotide
  Antisense strand to SEQ ID NO: 890698
aaugggcauacucauuccc

SEQ ID NO: 890700 - RNA, 19 nt, Artificial Sequence
  Description of Artificial Sequence: Synthetic oligonucleotide
  Sense strand starting at position 148 of SEQ ID NO: 588802
ggagauaagacucgaagug

SEQ ID NO: 890701 - RNA, 19 nt, Artificial Sequence
  Description of Artificial Sequence: Synthetic oligonucleotide
  Antisense strand to SEQ ID NO: 890700
cacuucgagucuuaucucc

SEQ ID NO: 890702 - RNA, 19 nt, Artificial Sequence
  Description of Artificial Sequence: Synthetic oligonucleotide
  Sense strand starting at position 523 of SEQ ID NO: 588802
uuuacugacuaggagauaa

SEQ ID NO: 890703 - RNA, 19 nt, Artificial Sequence
  Description of Artificial Sequence: Synthetic oligonucleotide
  Antisense strand to SEQ ID NO: 890702
uuaucuccuagucaguaaa

SEQ ID NO: 890704 - RNA, 19 nt, Artificial Sequence
  Description of Artificial Sequence: Synthetic oligonucleotide
  Sense strand starting at position 553 of SEQ ID NO: 588802
ggaacagugacuugcucaa

SEQ ID NO: 890705 - RNA, 19 nt, Artificial Sequence
  Description of Artificial Sequence: Synthetic oligonucleotide
  Antisense strand to SEQ ID NO: 890704
uugagcaagucacuguucc

SEQ ID NO: 890706 - RNA, 19 nt, Artificial Sequence
  Description of Artificial Sequence: Synthetic oligonucleotide
  Sense strand starting at position 1032 of SEQ ID NO: 588802
aguccaaucuggucauuaa

SEQ ID NO: 890707 - RNA, 19 nt, Artificial Sequence
  Description of Artificial Sequence: Synthetic oligonucleotide
  Antisense strand to SEQ ID NO: 890706
uuaaugaccagauuggacu

SEQ ID NO: 890708 - RNA, 19 nt, Artificial Sequence
  Description of Artificial Sequence: Synthetic oligonucleotide
  Sense strand starting at position 1033 of SEQ ID NO: 588802
guccaaucuggucauuaaa

SEQ ID NO: 890709 - RNA, 19 nt, Artificial Sequence
  Description of Artificial Sequence: Synthetic oligonucleotide
  Antisense strand to SEQ ID NO: 890708
uuuaaugaccagauuggac

SEQ ID NO: 890710 - RNA, 19 nt, Artificial Sequence
  Description of Artificial Sequence: Synthetic oligonucleotide
  Sense strand starting at position 1062 of SEQ ID NO: 588802
gggcuucucuaugugauuu

SEQ ID NO: 890711 - RNA, 19 nt, Artificial Sequence
  Description of Artificial Sequence: Synthetic oligonucleotide
  Antisense strand to SEQ ID NO: 890710
aaaucacauagagaagccc

SEQ ID NO: 890712 - RNA, 19 nt, Artificial Sequence
  Description of Artificial Sequence: Synthetic oligonucleotide
  Sense strand starting at position 1338 of SEQ ID NO: 588802
agaggaaaguuauacauau

SEQ ID NO: 890713 - RNA, 19 nt, Artificial Sequence
  Description of Artificial Sequence: Synthetic oligonucleotide
  Antisense strand to SEQ ID NO: 890712
auauguauaacuuuccucu

SEQ ID NO: 890714 - RNA, 19 nt, Artificial Sequence
  Description of Artificial Sequence: Synthetic oligonucleotide
  Sense strand starting at position 1547 of SEQ ID NO: 588802
acagaaagcuagcuggauu

SEQ ID NO: 890715 - RNA, 19 nt, Artificial Sequence
  Description of Artificial Sequence: Synthetic oligonucleotide
  Antisense strand to SEQ ID NO: 890714
aauccagcuagcuuucugu

SEQ ID NO: 890716 - RNA, 19 nt, Artificial Sequence
  Description of Artificial Sequence: Synthetic oligonucleotide
  Sense strand starting at position 1550 of SEQ ID NO: 588802
gaaagcuagcuggauuauc

SEQ ID NO: 890717 - RNA, 19 nt, Artificial Sequence
  Description of Artificial Sequence: Synthetic oligonucleotide
  Antisense strand to SEQ ID NO: 890716
gauaauccagcuagcuuuc

SEQ ID NO: 890718 - RNA, 19 nt, Artificial Sequence
  Description of Artificial Sequence: Synthetic oligonucleotide
  Sense strand starting at position 1719 of SEQ ID NO: 588802
gcgagauccuucucagaug

SEQ ID NO: 890719 - RNA, 19 nt, Artificial Sequence
  Description of Artificial Sequence: Synthetic oligonucleotide
  Antisense strand to SEQ ID NO: 890718
caucugagaaggaucucgc

SEQ ID NO: 890720 - RNA, 19 nt, Artificial Sequence
  Description of Artificial Sequence: Synthetic oligonucleotide
  Sense strand starting at position 2036 of SEQ ID NO: 588802
cccgaaggcuuccugaaac

SEQ ID NO: 890721 - RNA, 19 nt, Artificial Sequence
  Description of Artificial Sequence: Synthetic oligonucleotide
  Antisense strand to SEQ ID NO: 890720
guuucaggaagccuucggg

SEQ ID NO: 890722 - RNA, 19 nt, Artificial Sequence
  Description of Artificial Sequence: Synthetic oligonucleotide
  Sense strand starting at position 2096 of SEQ ID NO: 588802
ccugucaacuaguuaguau

SEQ ID NO: 890723 - RNA, 19 nt, Artificial Sequence
  Description of Artificial Sequence: Synthetic oligonucleotide
  Antisense strand to SEQ ID NO: 890722
auacuaacuaguugacagg

SEQ ID NO: 890724 - RNA, 19 nt, Artificial Sequence
  Description of Artificial Sequence: Synthetic oligonucleotide
  Sense strand starting at position 2171 of SEQ ID NO: 588802
gccacuuugugauuccaau

SEQ ID NO: 890725 - RNA, 19 nt, Artificial Sequence
  Description of Artificial Sequence: Synthetic oligonucleotide
  Antisense strand to SEQ ID NO: 890724
auuggaaucacaaaguggc

SEQ ID NO: 890726 - RNA, 19 nt, Artificial Sequence
  Description of Artificial Sequence: Synthetic oligonucleotide
  Sense strand starting at position 2177 of SEQ ID NO: 588802
uugugauuccaauguucuc

SEQ ID NO: 890727 - RNA, 19 nt, Artificial Sequence
  Description of Artificial Sequence: Synthetic oligonucleotide
  Antisense strand to SEQ ID NO: 890726
gagaacauuggaaucacaa

SEQ ID NO: 890728 - RNA, 19 nt, Artificial Sequence
  Description of Artificial Sequence: Synthetic oligonucleotide
  Sense strand starting at position 2235 of SEQ ID NO: 588802
guggcugcucuauaacaac

SEQ ID NO: 890729 - RNA, 19 nt, Artificial Sequence
  Description of Artificial Sequence: Synthetic oligonucleotide
  Antisense strand to SEQ ID NO: 890728
guuguuauagagcagccac

SEQ ID NO: 890730 - RNA, 19 nt, Artificial Sequence
  Description of Artificial Sequence: Synthetic oligonucleotide
  Sense strand starting at position 2285 of SEQ ID NO: 588802
gcuagaaauccaggagacu

SEQ ID NO: 890731 - RNA, 19 nt, Artificial Sequence
  Description of Artificial Sequence: Synthetic oligonucleotide
  Antisense strand to SEQ ID NO: 890730
agucuccuggauuucuagc

SEQ ID NO: 890732 - RNA, 19 nt, Artificial Sequence
  Description of Artificial Sequence: Synthetic oligonucleotide
  Sense strand starting at position 2747 of SEQ ID NO: 588802
uuauuuguccuuuguccau

SEQ ID NO: 890733 - RNA, 19 nt, Artificial Sequence
  Description of Artificial Sequence: Synthetic oligonucleotide
  Antisense strand to SEQ ID NO: 890732
auggacaaaggacaaauaa

SEQ ID NO: 890734 - RNA, 19 nt, Artificial Sequence
  Description of Artificial Sequence: Synthetic oligonucleotide
  Sense strand starting at position 2751 of SEQ ID NO: 588802
uuguccuuuguccauggaa

SEQ ID NO: 890735 - RNA, 19 nt, Artificial Sequence
  Description of Artificial Sequence: Synthetic oligonucleotide
  Antisense strand to SEQ ID NO: 890734
uuccauggacaaaggacaa

SEQ ID NO: 890736 - RNA, 19 nt, Artificial Sequence
  Description of Artificial Sequence: Synthetic oligonucleotide
  Sense strand starting at position 2777 of SEQ ID NO: 588802
gcugucaggaucuggugau

SEQ ID NO: 890737 - RNA, 19 nt, Artificial Sequence
  Description of Artificial Sequence: Synthetic oligonucleotide
  Antisense strand to SEQ ID NO: 890736
aucaccagauccugacagc

SEQ ID NO: 890738 - RNA, 19 nt, Artificial Sequence
  Description of Artificial Sequence: Synthetic oligonucleotide
  Sense strand starting at position 2943 of SEQ ID NO: 588802
cuauuucuugccuggcagu

SEQ ID NO: 890739 - RNA, 19 nt, Artificial Sequence
  Description of Artificial Sequence: Synthetic oligonucleotide
  Antisense strand to SEQ ID NO: 890738
acugccaggcaagaaauag

SEQ ID NO: 890740 - RNA, 19 nt, Artificial Sequence
  Description of Artificial Sequence: Synthetic oligonucleotide
  Sense strand starting at position 3045 of SEQ ID NO: 588802
acacucaaguccuugauga

SEQ ID NO: 890741 - RNA, 19 nt, Artificial Sequence
  Description of Artificial Sequence: Synthetic oligonucleotide
  Antisense strand to SEQ ID NO: 890740
ucaucaaggacuugagugu

SEQ ID NO: 890742 - RNA, 19 nt, Artificial Sequence
  Description of Artificial Sequence: Synthetic oligonucleotide
  Sense strand starting at position 3062 of SEQ ID NO: 588802
gacagaggguuccuugguu

SEQ ID NO: 890743 - RNA, 19 nt, Artificial Sequence
  Description of Artificial Sequence: Synthetic oligonucleotide
  Antisense strand to SEQ ID NO: 890742
aaccaaggaacccucuguc

SEQ ID NO: 890744 - RNA, 19 nt, Artificial Sequence
  Description of Artificial Sequence: Synthetic oligonucleotide
  Sense strand starting at position 3244 of SEQ ID NO: 588802
agacaucucugagcacaua

SEQ ID NO: 890745 - RNA, 19 nt, Artificial Sequence
  Description of Artificial Sequence: Synthetic oligonucleotide
  Antisense strand to SEQ ID NO: 890744
uaugugcucagagaugucu

SEQ ID NO: 890746 - RNA, 19 nt, Artificial Sequence
  Description of Artificial Sequence: Synthetic oligonucleotide
  Sense strand starting at position 3348 of SEQ ID NO: 588802
ccaagaaaccugugauguu

SEQ ID NO: 890747 - RNA, 19 nt, Artificial Sequence
  Description of Artificial Sequence: Synthetic oligonucleotide
  Antisense strand to SEQ ID NO: 890746
aacaucacagguuucuugg

SEQ ID NO: 890748 - RNA, 19 nt, Artificial Sequence
  Description of Artificial Sequence: Synthetic oligonucleotide
  Sense strand starting at position 3355 of SEQ ID NO: 588802
accugugauguuggaggaa

SEQ ID NO: 890749 - RNA, 19 nt, Artificial Sequence
  Description of Artificial Sequence: Synthetic oligonucleotide
  Antisense strand to SEQ ID NO: 890748
uuccuccaacaucacaggu

SEQ ID NO: 890750 - RNA, 19 nt, Artificial Sequence
  Description of Artificial Sequence: Synthetic oligonucleotide
  Sense strand starting at position 3384 of SEQ ID NO: 588802
gguguugaugcccauguaa

SEQ ID NO: 890751 - RNA, 19 nt, Artificial Sequence
  Description of Artificial Sequence: Synthetic oligonucleotide
  Antisense strand to SEQ ID NO: 890750
uuacaugggcaucaacacc

SEQ ID NO: 890752 - RNA, 19 nt, Artificial Sequence
  Description of Artificial Sequence: Synthetic oligonucleotide
  Sense strand starting at position 3447 of SEQ ID NO: 588802
gugcuuggcaaguagaaag

SEQ ID NO: 890753 - RNA, 19 nt, Artificial Sequence
  Description of Artificial Sequence: Synthetic oligonucleotide
  Antisense strand to SEQ ID NO: 890752
cuuucuacuugccaagcac

SEQ ID NO: 890754 - RNA, 19 nt, Artificial Sequence
  Description of Artificial Sequence: Synthetic oligonucleotide
  Sense strand starting at position 3470 of SEQ ID NO: 588802
gaggaaaggucuuugcagu

SEQ ID NO: 890755 - RNA, 19 nt, Artificial Sequence
  Description of Artificial Sequence: Synthetic oligonucleotide
  Antisense strand to SEQ ID NO: 890754
acugcaaagaccuuuccuc

SEQ ID NO: 890756 - RNA, 19 nt, Artificial Sequence
  Description of Artificial Sequence: Synthetic oligonucleotide
  Sense strand starting at position 3471 of SEQ ID NO: 588802
aggaaaggucuuugcaguu

SEQ ID NO: 890757 - RNA, 19 nt, Artificial Sequence
  Description of Artificial Sequence: Synthetic oligonucleotide
  Antisense strand to SEQ ID NO: 890756
aacugcaaagaccuuuccu

SEQ ID NO: 890758 - RNA, 19 nt, Artificial Sequence
  Description of Artificial Sequence: Synthetic oligonucleotide
  Sense strand starting at position 3548 of SEQ ID NO: 588802
caaguuacuccuggcaagu

SEQ ID NO: 890759 - RNA, 19 nt, Artificial Sequence
  Description of Artificial Sequence: Synthetic oligonucleotide
  Antisense strand to SEQ ID NO: 890758
acuugccaggaguaacuug

SEQ ID NO: 890760 - RNA, 19 nt, Artificial Sequence
  Description of Artificial Sequence: Synthetic oligonucleotide
  Sense strand starting at position 3594 of SEQ ID NO: 588802
acacaugugccagguaaac

SEQ ID NO: 890761 - RNA, 19 nt, Artificial Sequence
  Description of Artificial Sequence: Synthetic oligonucleotide
  Antisense strand to SEQ ID NO: 890760
guuuaccuggcacaugugu

SEQ ID NO: 890762 - RNA, 19 nt, Artificial Sequence
  Description of Artificial Sequence: Synthetic oligonucleotide
  Sense strand starting at position 3661 of SEQ ID NO: 588802
gccacuaagugcucaauag

SEQ ID NO: 890763 - RNA, 19 nt, Artificial Sequence
  Description of Artificial Sequence: Synthetic oligonucleotide
  Antisense strand to SEQ ID NO: 890762
cuauugagcacuuaguggc

SEQ ID NO: 890764 - RNA, 19 nt, Artificial Sequence
  Description of Artificial Sequence: Synthetic oligonucleotide
  Sense strand starting at position 3789 of SEQ ID NO: 588802
agccuacauagguggaaau

SEQ ID NO: 890765 - RNA, 19 nt, Artificial Sequence
  Description of Artificial Sequence: Synthetic oligonucleotide
  Antisense strand to SEQ ID NO: 890764
auuuccaccuauguaggcu

SEQ ID NO: 890766 - RNA, 19 nt, Artificial Sequence
  Description of Artificial Sequence: Synthetic oligonucleotide
  Sense strand starting at position 3790 of SEQ ID NO: 588802
gccuacauagguggaaaua

SEQ ID NO: 890767 - RNA, 19 nt, Artificial Sequence
  Description of Artificial Sequence: Synthetic oligonucleotide
  Antisense strand to SEQ ID NO: 890766
uauuuccaccuauguaggc

SEQ ID NO: 890768 - RNA, 19 nt, Artificial Sequence
  Description of Artificial Sequence: Synthetic oligonucleotide
  Sense strand starting at position 3824 of SEQ ID NO: 588802
augagugaaugacuugagu

SEQ ID NO: 890769 - RNA, 19 nt, Artificial Sequence
  Description of Artificial Sequence: Synthetic oligonucleotide
  Antisense strand to SEQ ID NO: 890768
acucaagucauucacucau

SEQ ID NO: 890770 - RNA, 19 nt, Artificial Sequence
  Description of Artificial Sequence: Synthetic oligonucleotide
  Sense strand starting at position 3826 of SEQ ID NO: 588802
gagugaaugacuugaguca

SEQ ID NO: 890771 - RNA, 19 nt, Artificial Sequence
  Description of Artificial Sequence: Synthetic oligonucleotide
  Antisense strand to SEQ ID NO: 890770
ugacucaagucauucacuc

SEQ ID NO: 890772 - RNA, 19 nt, Artificial Sequence
  Description of Artificial Sequence: Synthetic oligonucleotide
  Sense strand starting at position 3838 of SEQ ID NO: 588802
ugagucagugaacgugaaa

SEQ ID NO: 890773 - RNA, 19 nt, Artificial Sequence
  Description of Artificial Sequence: Synthetic oligonucleotide
  Antisense strand to SEQ ID NO: 890772
uuucacguucacugacuca

SEQ ID NO: 890774 - RNA, 19 nt, Artificial Sequence
  Description of Artificial Sequence: Synthetic oligonucleotide
  Sense strand starting at position 3855 of SEQ ID NO: 588802
aaauguuugguagauugua

SEQ ID NO: 890775 - RNA, 19 nt, Artificial Sequence
  Description of Artificial Sequence: Synthetic oligonucleotide
  Antisense strand to SEQ ID NO: 890774
uacaaucuaccaaacauuu

SEQ ID NO: 890776 - RNA, 19 nt, Artificial Sequence
  Description of Artificial Sequence: Synthetic oligonucleotide
  Sense strand starting at position 3869 of SEQ ID NO: 588802
uuguaauacgccgauauug

SEQ ID NO: 890777 - RNA, 19 nt, Artificial Sequence
  Description of Artificial Sequence: Synthetic oligonucleotide
  Antisense strand to SEQ ID NO: 890776
caauaucggcguauuacaa

SEQ ID NO: 890778 - RNA, 19 nt, Artificial Sequence
  Description of Artificial Sequence: Synthetic oligonucleotide
  Sense strand starting at position 118 of SEQ ID NO: 588803
cagguuguuguguggauua

SEQ ID NO: 890779 - RNA, 19 nt, Artificial Sequence
  Description of Artificial Sequence: Synthetic oligonucleotide
  Antisense strand to SEQ ID NO: 890778
uaauccacacaacaaccug

SEQ ID NO: 890780 - RNA, 19 nt, Artificial Sequence
  Description of Artificial Sequence: Synthetic oligonucleotide
  Sense strand starting at position 123 of SEQ ID NO: 588803
uguuguguggauuaaacau

SEQ ID NO: 890781 - RNA, 19 nt, Artificial Sequence
  Description of Artificial Sequence: Synthetic oligonucleotide
  Antisense strand to SEQ ID NO: 890780
auguuuaauccacacaaca

SEQ ID NO: 890782 - RNA, 19 nt, Artificial Sequence
  Description of Artificial Sequence: Synthetic oligonucleotide
  Sense strand starting at position 235 of SEQ ID NO: 588803
cccugauccuagcuugcau

SEQ ID NO: 890783 - RNA, 19 nt, Artificial Sequence
  Description of Artificial Sequence: Synthetic oligonucleotide
  Antisense strand to SEQ ID NO: 890782
augcaagcuaggaucaggg

SEQ ID NO: 890784 - RNA, 19 nt, Artificial Sequence
  Description of Artificial Sequence: Synthetic oligonucleotide
  Sense strand starting at position 857 of SEQ ID NO: 588803
cacauuuggcgccgugaaa

SEQ ID NO: 890785 - RNA, 19 nt, Artificial Sequence
  Description of Artificial Sequence: Synthetic oligonucleotide
  Antisense strand to SEQ ID NO: 890784
uuucacggcgccaaaugug

SEQ ID NO: 890786 - RNA, 19 nt, Artificial Sequence
  Description of Artificial Sequence: Synthetic oligonucleotide
  Sense strand starting at position 875 of SEQ ID NO: 588803
agcccucaguacguagaaa

SEQ ID NO: 890787 - RNA, 19 nt, Artificial Sequence
  Description of Artificial Sequence: Synthetic oligonucleotide
  Antisense strand to SEQ ID NO: 890786
uuucuacguacugagggcu

SEQ ID NO: 890788 - RNA, 19 nt, Artificial Sequence
  Description of Artificial Sequence: Synthetic oligonucleotide
  Sense strand starting at position 876 of SEQ ID NO: 588803
gcccucaguacguagaaau

SEQ ID NO: 890789 - RNA, 19 nt, Artificial Sequence
  Description of Artificial Sequence: Synthetic oligonucleotide
  Antisense strand to SEQ ID NO: 890788
auuucuacguacugagggc

SEQ ID NO: 890790 - RNA, 19 nt, Artificial Sequence
  Description of Artificial Sequence: Synthetic oligonucleotide
  Sense strand starting at position 886 of SEQ ID NO: 588803
cguagaaauguuuauucuu

SEQ ID NO: 890791 - RNA, 19 nt, Artificial Sequence
  Description of Artificial Sequence: Synthetic oligonucleotide
  Antisense strand to SEQ ID NO: 890790
aagaauaaacauuucuacg

SEQ ID NO: 890792 - RNA, 19 nt, Artificial Sequence
  Description of Artificial Sequence: Synthetic oligonucleotide
  Sense strand starting at position 895 of SEQ ID NO: 588803
guuuauucuuauucuggga

SEQ ID NO: 890793 - RNA, 19 nt, Artificial Sequence
  Description of Artificial Sequence: Synthetic oligonucleotide
  Antisense strand to SEQ ID NO: 890792
ucccagaauaagaauaaac

SEQ ID NO: 890794 - RNA, 19 nt, Artificial Sequence
  Description of Artificial Sequence: Synthetic oligonucleotide
  Sense strand starting at position 897 of SEQ ID NO: 588803
uuauucuuauucugggaau

SEQ ID NO: 890795 - RNA, 19 nt, Artificial Sequence
  Description of Artificial Sequence: Synthetic oligonucleotide
  Antisense strand to SEQ ID NO: 890794
auucccagaauaagaauaa

SEQ ID NO: 890796 - RNA, 19 nt, Artificial Sequence
  Description of Artificial Sequence: Synthetic oligonucleotide
  Sense strand starting at position 899 of SEQ ID NO: 588803
auucuuauucugggaauau

SEQ ID NO: 890797 - RNA, 19 nt, Artificial Sequence
  Description of Artificial Sequence: Synthetic oligonucleotide
  Antisense strand to SEQ ID NO: 890796
auauucccagaauaagaau

SEQ ID NO: 890798 - RNA, 19 nt, Artificial Sequence
  Description of Artificial Sequence: Synthetic oligonucleotide
  Sense strand starting at position 900 of SEQ ID NO: 588803
uucuuauucugggaauaug

SEQ ID NO: 890799 - RNA, 19 nt, Artificial Sequence
  Description of Artificial Sequence: Synthetic oligonucleotide
  Antisense strand to SEQ ID NO: 890798
cauauucccagaauaagaa

SEQ ID NO: 890800 - RNA, 19 nt, Artificial Sequence
  Description of Artificial Sequence: Synthetic oligonucleotide
  Sense strand starting at position 911 of SEQ ID NO: 588803
ggaauauggaucugagcac

SEQ ID NO: 890801 - RNA, 19 nt, Artificial Sequence
  Description of Artificial Sequence: Synthetic oligonucleotide
  Antisense strand to SEQ ID NO: 890800
gugcucagauccauauucc

SEQ ID NO: 890802 - RNA, 19 nt, Artificial Sequence
  Description of Artificial Sequence: Synthetic oligonucleotide
  Sense strand starting at position 912 of SEQ ID NO: 588803
gaauauggaucugagcaca

SEQ ID NO: 890803 - RNA, 19 nt, Artificial Sequence
  Description of Artificial Sequence: Synthetic oligonucleotide
  Antisense strand to SEQ ID NO: 890802
ugugcucagauccauauuc

SEQ ID NO: 890804 - RNA, 19 nt, Artificial Sequence
  Description of Artificial Sequence: Synthetic oligonucleotide
  Sense strand starting at position 1481 of SEQ ID NO: 588803
cccagcucccucugugaaa

SEQ ID NO: 890805 - RNA, 19 nt, Artificial Sequence
  Description of Artificial Sequence: Synthetic oligonucleotide
  Antisense strand to SEQ ID NO: 890804
uuucacagagggagcuggg

SEQ ID NO: 890806 - RNA, 19 nt, Artificial Sequence
  Description of Artificial Sequence: Synthetic oligonucleotide
  Sense strand starting at position 2395 of SEQ ID NO: 588803
agaauucagcacuggguga

SEQ ID NO: 890807 - RNA, 19 nt, Artificial Sequence
  Description of Artificial Sequence: Synthetic oligonucleotide
  Antisense strand to SEQ ID NO: 890806
ucacccagugcugaauucu

SEQ ID NO: 890808 - RNA, 19 nt, Artificial Sequence
  Description of Artificial Sequence: Synthetic oligonucleotide
  Sense strand starting at position 2409 of SEQ ID NO: 588803
ggugaaacugcuggcaaga

SEQ ID NO: 890809 - RNA, 19 nt, Artificial Sequence
  Description of Artificial Sequence: Synthetic oligonucleotide
  Antisense strand to SEQ ID NO: 890808
ucuugccagcaguuucacc

SEQ ID NO: 890810 - RNA, 19 nt, Artificial Sequence
  Description of Artificial Sequence: Synthetic oligonucleotide
  Sense strand starting at position 2411 of SEQ ID NO: 588803
ugaaacugcuggcaagaaa

SEQ ID NO: 890811 - RNA, 19 nt, Artificial Sequence
  Description of Artificial Sequence: Synthetic oligonucleotide
  Antisense strand to SEQ ID NO: 890810
uuucuugccagcaguuuca

SEQ ID NO: 890812 - RNA, 19 nt, Artificial Sequence
  Description of Artificial Sequence: Synthetic oligonucleotide
  Sense strand starting at position 2546 of SEQ ID NO: 588803
gcgacauccagucaugaau

SEQ ID NO: 890813 - RNA, 19 nt, Artificial Sequence
  Description of Artificial Sequence: Synthetic oligonucleotide
  Antisense strand to SEQ ID NO: 890812
auucaugacuggaugucgc

SEQ ID NO: 890814 - RNA, 19 nt, Artificial Sequence
  Description of Artificial Sequence: Synthetic oligonucleotide
  Sense strand starting at position 2577 of SEQ ID NO: 588803
cccaacaucuuaguaguuu

SEQ ID NO: 890815 - RNA, 19 nt, Artificial Sequence
  Description of Artificial Sequence: Synthetic oligonucleotide
  Antisense strand to SEQ ID NO: 890814
aaacuacuaagauguuggg

SEQ ID NO: 890816 - RNA, 19 nt, Artificial Sequence
  Description of Artificial Sequence: Synthetic oligonucleotide
  Sense strand starting at position 2617 of SEQ ID NO: 588803
guacaaguccuauaaacuu

SEQ ID NO: 890817 - RNA, 19 nt, Artificial Sequence
  Description of Artificial Sequence: Synthetic oligonucleotide
  Antisense strand to SEQ ID NO: 890816
aaguuuauaggacuuguac

SEQ ID NO: 890818 - RNA, 19 nt, Artificial Sequence
  Description of Artificial Sequence: Synthetic oligonucleotide
  Sense strand starting at position 2662 of SEQ ID NO: 588803
uauuuaauguugugugcau

SEQ ID NO: 890819 - RNA, 19 nt, Artificial Sequence
  Description of Artificial Sequence: Synthetic oligonucleotide
  Antisense strand to SEQ ID NO: 890818
augcacacaacauuaaaua

SEQ ID NO: 890820 - RNA, 19 nt, Artificial Sequence
  Description of Artificial Sequence: Synthetic oligonucleotide
  Sense strand starting at position 2666 of SEQ ID NO: 588803
uaauguugugugcaugguu

SEQ ID NO: 890821 - RNA, 19 nt, Artificial Sequence
  Description of Artificial Sequence: Synthetic oligonucleotide
  Antisense strand to SEQ ID NO: 890820
aaccaugcacacaacauua

SEQ ID NO: 890822 - RNA, 19 nt, Artificial Sequence
  Description of Artificial Sequence: Synthetic oligonucleotide
  Sense strand starting at position 2851 of SEQ ID NO: 588803
uuugguaaguuugaagcau

SEQ ID NO: 890823 - RNA, 19 nt, Artificial Sequence
  Description of Artificial Sequence: Synthetic oligonucleotide
  Antisense strand to SEQ ID NO: 890822
augcuucaaacuuaccaaa

SEQ ID NO: 890824 - RNA, 19 nt, Artificial Sequence
  Description of Artificial Sequence: Synthetic oligonucleotide
  Sense strand starting at position 2917 of SEQ ID NO: 588803
cacccugucuaaugaagga

SEQ ID NO: 890825 - RNA, 19 nt, Artificial Sequence
  Description of Artificial Sequence: Synthetic oligonucleotide
  Antisense strand to SEQ ID NO: 890824
uccuucauuagacagggug

SEQ ID NO: 890826 - RNA, 19 nt, Artificial Sequence
  Description of Artificial Sequence: Synthetic oligonucleotide
  Sense strand starting at position 2921 of SEQ ID NO: 588803
cugucuaaugaaggagagu

SEQ ID NO: 890827 - RNA, 19 nt, Artificial Sequence
  Description of Artificial Sequence: Synthetic oligonucleotide
  Antisense strand to SEQ ID NO: 890826
acucuccuucauuagacag

SEQ ID NO: 890828 - RNA, 19 nt, Artificial Sequence
  Description of Artificial Sequence: Synthetic oligonucleotide
  Sense strand starting at position 2968 of SEQ ID NO: 588803
ggagcuagucuuggguuca

SEQ ID NO: 890829 - RNA, 19 nt, Artificial Sequence
  Description of Artificial Sequence: Synthetic oligonucleotide
  Antisense strand to SEQ ID NO: 890828
ugaacccaagacuagcucc

SEQ ID NO: 890830 - RNA, 19 nt, Artificial Sequence
  Description of Artificial Sequence: Synthetic oligonucleotide
  Sense strand starting at position 3029 of SEQ ID NO: 588803
guuuccugaucucucaagu

SEQ ID NO: 890831 - RNA, 19 nt, Artificial Sequence
  Description of Artificial Sequence: Synthetic oligonucleotide
  Antisense strand to SEQ ID NO: 890830
acuugagagaucaggaaac

SEQ ID NO: 890832 - RNA, 19 nt, Artificial Sequence
  Description of Artificial Sequence: Synthetic oligonucleotide
  Sense strand starting at position 3152 of SEQ ID NO: 588803
cucuuugcacaguaguuua

SEQ ID NO: 890833 - RNA, 19 nt, Artificial Sequence
  Description of Artificial Sequence: Synthetic oligonucleotide
  Antisense strand to SEQ ID NO: 890832
uaaacuacugugcaaagag

SEQ ID NO: 890834 - RNA, 19 nt, Artificial Sequence
  Description of Artificial Sequence: Synthetic oligonucleotide
  Sense strand starting at position 3181 of SEQ ID NO: 588803
aaauaaggguaaggucaau

SEQ ID NO: 890835 - RNA, 19 nt, Artificial Sequence
  Description of Artificial Sequence: Synthetic oligonucleotide
  Antisense strand to SEQ ID NO: 890834
auugaccuuacccuuauuu

SEQ ID NO: 890836 - RNA, 19 nt, Artificial Sequence
  Description of Artificial Sequence: Synthetic oligonucleotide
  Sense strand starting at position 3303 of SEQ ID NO: 588803
uucuuauuauuaccguaga

SEQ ID NO: 890837 - RNA, 19 nt, Artificial Sequence
  Description of Artificial Sequence: Synthetic oligonucleotide
  Antisense strand to SEQ ID NO: 890836
ucuacgguaauaauaagaa

SEQ ID NO: 890838 - RNA, 19 nt, Artificial Sequence
  Description of Artificial Sequence: Synthetic oligonucleotide
  Sense strand starting at position 3304 of SEQ ID NO: 588803
ucuuauuauuaccguagau

SEQ ID NO: 890839 - RNA, 19 nt, Artificial Sequence
  Description of Artificial Sequence: Synthetic oligonucleotide
  Antisense strand to SEQ ID NO: 890838
aucuacgguaauaauaaga

SEQ ID NO: 890840 - RNA, 19 nt, Artificial Sequence
  Description of Artificial Sequence: Synthetic oligonucleotide
  Sense strand starting at position 3306 of SEQ ID NO: 588803
uuauuauuaccguagaugu

SEQ ID NO: 890841 - RNA, 19 nt, Artificial Sequence
  Description of Artificial Sequence: Synthetic oligonucleotide
  Antisense strand to SEQ ID NO: 890840
acaucuacgguaauaauaa

SEQ ID NO: 890842 - RNA, 19 nt, Artificial Sequence
  Description of Artificial Sequence: Synthetic oligonucleotide
  Sense strand starting at position 3313 of SEQ ID NO: 588803
uaccguagauguucuaaga

SEQ ID NO: 890843 - RNA, 19 nt, Artificial Sequence
  Description of Artificial Sequence: Synthetic oligonucleotide
  Antisense strand to SEQ ID NO: 890842
ucuuagaacaucuacggua

SEQ ID NO: 890844 - RNA, 19 nt, Artificial Sequence
  Description of Artificial Sequence: Synthetic oligonucleotide
  Sense strand starting at position 3324 of SEQ ID NO: 588803
uucuaagacucuucgucua

SEQ ID NO: 890845 - RNA, 19 nt, Artificial Sequence
  Description of Artificial Sequence: Synthetic oligonucleotide
  Antisense strand to SEQ ID NO: 890844
uagacgaagagucuuagaa

SEQ ID NO: 890846 - RNA, 19 nt, Artificial Sequence
  Description of Artificial Sequence: Synthetic oligonucleotide
  Sense strand starting at position 3326 of SEQ ID NO: 588803
cuaagacucuucgucuaag

SEQ ID NO: 890847 - RNA, 19 nt, Artificial Sequence
  Description of Artificial Sequence: Synthetic oligonucleotide
  Antisense strand to SEQ ID NO: 890846
cuuagacgaagagucuuag

SEQ ID NO: 890848 - RNA, 19 nt, Artificial Sequence
  Description of Artificial Sequence: Synthetic oligonucleotide
  Sense strand starting at position 3329 of SEQ ID NO: 588803
agacucuucgucuaagcuu

SEQ ID NO: 890849 - RNA, 19 nt, Artificial Sequence
  Description of Artificial Sequence: Synthetic oligonucleotide
  Antisense strand to SEQ ID NO: 890848
aagcuuagacgaagagucu

SEQ ID NO: 890850 - RNA, 19 nt, Artificial Sequence
  Description of Artificial Sequence: Synthetic oligonucleotide
  Sense strand starting at position 3834 of SEQ ID NO: 588803
agguuaagugaagaugguu

SEQ ID NO: 890851 - RNA, 19 nt, Artificial Sequence
  Description of Artificial Sequence: Synthetic oligonucleotide
  Antisense strand to SEQ ID NO: 890850
aaccaucuucacuuaaccu

SEQ ID NO: 890852 - RNA, 19 nt, Artificial Sequence
  Description of Artificial Sequence: Synthetic oligonucleotide
  Sense strand starting at position 3900 of SEQ ID NO: 588803
ugcaauuggcuguggagua

SEQ ID NO: 890853 - RNA, 19 nt, Artificial Sequence
  Description of Artificial Sequence: Synthetic oligonucleotide
  Antisense strand to SEQ ID NO: 890852
uacuccacagccaauugca

SEQ ID NO: 890854 - RNA, 19 nt, Artificial Sequence
  Description of Artificial Sequence: Synthetic oligonucleotide
  Sense strand starting at position 3901 of SEQ ID NO: 588803
gcaauuggcuguggaguaa

SEQ ID NO: 890855 - RNA, 19 nt, Artificial Sequence
  Description of Artificial Sequence: Synthetic oligonucleotide
  Antisense strand to SEQ ID NO: 890854
uuacuccacagccaauugc

SEQ ID NO: 890856 - RNA, 19 nt, Artificial Sequence
  Description of Artificial Sequence: Synthetic oligonucleotide
  Sense strand starting at position 3974 of SEQ ID NO: 588803
gaaggcuuucuaggguagu

SEQ ID NO: 890857 - RNA, 19 nt, Artificial Sequence
  Description of Artificial Sequence: Synthetic oligonucleotide
  Antisense strand to SEQ ID NO: 890856
acuacccuagaaagccuuc

SEQ ID NO: 890858 - RNA, 19 nt, Artificial Sequence
  Description of Artificial Sequence: Synthetic oligonucleotide
  Sense strand starting at position 58 of SEQ ID NO: 588804
acggaaccucccugaagaa

SEQ ID NO: 890859 - RNA, 19 nt, Artificial Sequence
  Description of Artificial Sequence: Synthetic oligonucleotide
  Antisense strand to SEQ ID NO: 890858
uucuucagggagguuccgu

SEQ ID NO: 890860 - RNA, 19 nt, Artificial Sequence
  Description of Artificial Sequence: Synthetic oligonucleotide
  Sense strand starting at position 94 of SEQ ID NO: 588804
uuuaaacugcuuggaggaa

SEQ ID NO: 890861 - RNA, 19 nt, Artificial Sequence
  Description of Artificial Sequence: Synthetic oligonucleotide
  Antisense strand to SEQ ID NO: 890860
uuccuccaagcaguuuaaa

SEQ ID NO: 890862 - RNA, 19 nt, Artificial Sequence
  Description of Artificial Sequence: Synthetic oligonucleotide
  Sense strand starting at position 249 of SEQ ID NO: 588804
gcagcuaugucaccagaag

SEQ ID NO: 890863 - RNA, 19 nt, Artificial Sequence
  Description of Artificial Sequence: Synthetic oligonucleotide
  Antisense strand to SEQ ID NO: 890862
cuucuggugacauagcugc

SEQ ID NO: 890864 - RNA, 19 nt, Artificial Sequence
  Description of Artificial Sequence: Synthetic oligonucleotide
  Sense strand starting at position 250 of SEQ ID NO: 588804
cagcuaugucaccagaaga

SEQ ID NO: 890865 - RNA, 19 nt, Artificial Sequence
  Description of Artificial Sequence: Synthetic oligonucleotide
  Antisense strand to SEQ ID NO: 890864
ucuucuggugacauagcug

SEQ ID NO: 890866 - RNA, 19 nt, Artificial Sequence
  Description of Artificial Sequence: Synthetic oligonucleotide
  Sense strand starting at position 281 of SEQ ID NO: 588804
gaaagucaggaguguccau

SEQ ID NO: 890867 - RNA, 19 nt, Artificial Sequence
  Description of Artificial Sequence: Synthetic oligonucleotide
  Antisense strand to SEQ ID NO: 890866
auggacacuccugacuuuc

SEQ ID NO: 890868 - RNA, 19 nt, Artificial Sequence
  Description of Artificial Sequence: Synthetic oligonucleotide
  Sense strand starting at position 418 of SEQ ID NO: 588804
gccauagcugcugagaacu

SEQ ID NO: 890869 - RNA, 19 nt, Artificial Sequence
  Description of Artificial Sequence: Synthetic oligonucleotide
  Antisense strand to SEQ ID NO: 890868
aguucucagcagcuauggc

SEQ ID NO: 890870 - RNA, 19 nt, Artificial Sequence
  Description of Artificial Sequence: Synthetic oligonucleotide
  Sense strand starting at position 472 of SEQ ID NO: 588804
ugaacagaugcuugggaau

SEQ ID NO: 890871 - RNA, 19 nt, Artificial Sequence
  Description of Artificial Sequence: Synthetic oligonucleotide
  Antisense strand to SEQ ID NO: 890870
auucccaagcaucuguuca

SEQ ID NO: 890872 - RNA, 19 nt, Artificial Sequence
  Description of Artificial Sequence: Synthetic oligonucleotide
  Sense strand starting at position 561 of SEQ ID NO: 588804
aagagcucucauuguagaa

SEQ ID NO: 890873 - RNA, 19 nt, Artificial Sequence
  Description of Artificial Sequence: Synthetic oligonucleotide
  Antisense strand to SEQ ID NO: 890872
uucuacaaugagagcucuu

SEQ ID NO: 890874 - RNA, 19 nt, Artificial Sequence
  Description of Artificial Sequence: Synthetic oligonucleotide
  Sense strand starting at position 565 of SEQ ID NO: 588804
gcucucauuguagaaauca

SEQ ID NO: 890875 - RNA, 19 nt, Artificial Sequence
  Description of Artificial Sequence: Synthetic oligonucleotide
  Antisense strand to SEQ ID NO: 890874
ugauuucuacaaugagagc

SEQ ID NO: 890876 - RNA, 19 nt, Artificial Sequence
  Description of Artificial Sequence: Synthetic oligonucleotide
  Sense strand starting at position 573 of SEQ ID NO: 588804
uguagaaaucauuaauguc

SEQ ID NO: 890877 - RNA, 19 nt, Artificial Sequence
  Description of Artificial Sequence: Synthetic oligonucleotide
  Antisense strand to SEQ ID NO: 890876
gacauuaaugauuucuaca

SEQ ID NO: 890878 - RNA, 19 nt, Artificial Sequence
  Description of Artificial Sequence: Synthetic oligonucleotide
  Sense strand starting at position 585 of SEQ ID NO: 588804
uaauguccauuugauggau

SEQ ID NO: 890879 - RNA, 19 nt, Artificial Sequence
  Description of Artificial Sequence: Synthetic oligonucleotide
  Antisense strand to SEQ ID NO: 890878
auccaucaaauggacauua

SEQ ID NO: 890880 - RNA, 19 nt, Artificial Sequence
  Description of Artificial Sequence: Synthetic oligonucleotide
  Sense strand starting at position 587 of SEQ ID NO: 588804
auguccauuugauggauga

SEQ ID NO: 890881 - RNA, 19 nt, Artificial Sequence
  Description of Artificial Sequence: Synthetic oligonucleotide
  Antisense strand to SEQ ID NO: 890880
ucauccaucaaauggacau

SEQ ID NO: 890882 - RNA, 19 nt, Artificial Sequence
  Description of Artificial Sequence: Synthetic oligonucleotide
  Sense strand starting at position 628 of SEQ ID NO: 588804
ugacuuacccacuauugua

SEQ ID NO: 890883 - RNA, 19 nt, Artificial Sequence
  Description of Artificial Sequence: Synthetic oligonucleotide
  Antisense strand to SEQ ID NO: 890882
uacaauaguggguaaguca

SEQ ID NO: 890884 - RNA, 19 nt, Artificial Sequence
  Description of Artificial Sequence: Synthetic oligonucleotide
  Sense strand starting at position 1025 of SEQ ID NO: 588804
ccuucuugcccuggaaauc

SEQ ID NO: 890885 - RNA, 19 nt, Artificial Sequence
  Description of Artificial Sequence: Synthetic oligonucleotide
  Antisense strand to SEQ ID NO: 890884
gauuuccagggcaagaagg

SEQ ID NO: 890886 - RNA, 19 nt, Artificial Sequence
  Description of Artificial Sequence: Synthetic oligonucleotide
  Sense strand starting at position 1233 of SEQ ID NO: 588804
gguguccacguaugaaaug

SEQ ID NO: 890887 - RNA, 19 nt, Artificial Sequence
  Description of Artificial Sequence: Synthetic oligonucleotide
  Antisense strand to SEQ ID NO: 890886
cauuucauacguggacacc

SEQ ID NO: 890888 - RNA, 19 nt, Artificial Sequence
  Description of Artificial Sequence: Synthetic oligonucleotide
  Sense strand starting at position 1238 of SEQ ID NO: 588804
ccacguaugaaaugggaua

SEQ ID NO: 890889 - RNA, 19 nt, Artificial Sequence
  Description of Artificial Sequence: Synthetic oligonucleotide
  Antisense strand to SEQ ID NO: 890888
uaucccauuucauacgugg

SEQ ID NO: 890890 - RNA, 19 nt, Artificial Sequence
  Description of Artificial Sequence: Synthetic oligonucleotide
  Sense strand starting at position 1271 of SEQ ID NO: 588804
guaacagaucaggagcgua

SEQ ID NO: 890891 - RNA, 19 nt, Artificial Sequence
  Description of Artificial Sequence: Synthetic oligonucleotide
  Antisense strand to SEQ ID NO: 890890
uacgcuccugaucuguuac

SEQ ID NO: 890892 - RNA, 19 nt, Artificial Sequence
  Description of Artificial Sequence: Synthetic oligonucleotide
  Sense strand starting at position 1300 of SEQ ID NO: 588804
gcuggaaagcucgaaagcu

SEQ ID NO: 890893 - RNA, 19 nt, Artificial Sequence
  Description of Artificial Sequence: Synthetic oligonucleotide
  Antisense strand to SEQ ID NO: 890892
agcuuucgagcuuuccagc

SEQ ID NO: 890894 - RNA, 19 nt, Artificial Sequence
  Description of Artificial Sequence: Synthetic oligonucleotide
  Sense strand starting at position 1328 of SEQ ID NO: 588804
gauggugguguuggaguua

SEQ ID NO: 890895 - RNA, 19 nt, Artificial Sequence
  Description of Artificial Sequence: Synthetic oligonucleotide
  Antisense strand to SEQ ID NO: 890894
uaacuccaacaccaccauc

SEQ ID NO: 890896 - RNA, 19 nt, Artificial Sequence
  Description of Artificial Sequence: Synthetic oligonucleotide
  Sense strand starting at position 1407 of SEQ ID NO: 588804
acguguuucccacauacac

SEQ ID NO: 890897 - RNA, 19 nt, Artificial Sequence
  Description of Artificial Sequence: Synthetic oligonucleotide
  Antisense strand to SEQ ID NO: 890896
guguaugugggaaacacgu

SEQ ID NO: 890898 - RNA, 19 nt, Artificial Sequence
  Description of Artificial Sequence: Synthetic oligonucleotide
  Sense strand starting at position 1444 of SEQ ID NO: 588804
agagucaguguuggcaauu

SEQ ID NO: 890899 - RNA, 19 nt, Artificial Sequence
  Description of Artificial Sequence: Synthetic oligonucleotide
  Antisense strand to SEQ ID NO: 890898
aauugccaacacugacucu

SEQ ID NO: 890900 - RNA, 19 nt, Artificial Sequence
  Description of Artificial Sequence: Synthetic oligonucleotide
  Sense strand starting at position 1587 of SEQ ID NO: 588804
cagucuagacagugacuua

SEQ ID NO: 890901 - RNA, 19 nt, Artificial Sequence
  Description of Artificial Sequence: Synthetic oligonucleotide
  Antisense strand to SEQ ID NO: 890900
uaagucacugucuagacug

SEQ ID NO: 890902 - RNA, 19 nt, Artificial Sequence
  Description of Artificial Sequence: Synthetic oligonucleotide
  Sense strand starting at position 1594 of SEQ ID NO: 588804
gacagugacuuagugacuu

SEQ ID NO: 890903 - RNA, 19 nt, Artificial Sequence
  Description of Artificial Sequence: Synthetic oligonucleotide
  Antisense strand to SEQ ID NO: 890902
aagucacuaagucacuguc

SEQ ID NO: 890904 - RNA, 19 nt, Artificial Sequence
  Description of Artificial Sequence: Synthetic oligonucleotide
  Sense strand starting at position 2117 of SEQ ID NO: 588804
guucuaaaucgaggccaaa

SEQ ID NO: 890905 - RNA, 19 nt, Artificial Sequence
  Description of Artificial Sequence: Synthetic oligonucleotide
  Antisense strand to SEQ ID NO: 890904
uuuggccucgauuuagaac

SEQ ID NO: 890906 - RNA, 19 nt, Artificial Sequence
  Description of Artificial Sequence: Synthetic oligonucleotide
  Sense strand starting at position 2254 of SEQ ID NO: 588804
ugguuaugugcucagauac

SEQ ID NO: 890907 - RNA, 19 nt, Artificial Sequence
  Description of Artificial Sequence: Synthetic oligonucleotide
  Antisense strand to SEQ ID NO: 890906
guaucugagcacauaacca

SEQ ID NO: 890908 - RNA, 19 nt, Artificial Sequence
  Description of Artificial Sequence: Synthetic oligonucleotide
  Sense strand starting at position 2368 of SEQ ID NO: 588804
uggaauugagcccagugau

SEQ ID NO: 890909 - RNA, 19 nt, Artificial Sequence
  Description of Artificial Sequence: Synthetic oligonucleotide
  Antisense strand to SEQ ID NO: 890908
aucacugggcucaauucca

SEQ ID NO: 890910 - RNA, 19 nt, Artificial Sequence
  Description of Artificial Sequence: Synthetic oligonucleotide
  Sense strand starting at position 2371 of SEQ ID NO: 588804
aauugagcccagugauauc

SEQ ID NO: 890911 - RNA, 19 nt, Artificial Sequence
  Description of Artificial Sequence: Synthetic oligonucleotide
  Antisense strand to SEQ ID NO: 890910
gauaucacugggcucaauu

SEQ ID NO: 890912 - RNA, 19 nt, Artificial Sequence
  Description of Artificial Sequence: Synthetic oligonucleotide
  Sense strand starting at position 2458 of SEQ ID NO: 588804
gggagcuaucaguggucuu

SEQ ID NO: 890913 - RNA, 19 nt, Artificial Sequence
  Description of Artificial Sequence: Synthetic oligonucleotide
  Antisense strand to SEQ ID NO: 890912
aagaccacugauagcuccc

SEQ ID NO: 890914 - RNA, 19 nt, Artificial Sequence
  Description of Artificial Sequence: Synthetic oligonucleotide
  Sense strand starting at position 2459 of SEQ ID NO: 588804
ggagcuaucaguggucuua

SEQ ID NO: 890915 - RNA, 19 nt, Artificial Sequence
  Description of Artificial Sequence: Synthetic oligonucleotide
  Antisense strand to SEQ ID NO: 890914
uaagaccacugauagcucc

SEQ ID NO: 890916 - RNA, 19 nt, Artificial Sequence
  Description of Artificial Sequence: Synthetic oligonucleotide
  Sense strand starting at position 2515 of SEQ ID NO: 588804
ggaauuaccuaagaaugag

SEQ ID NO: 890917 - RNA, 19 nt, Artificial Sequence
  Description of Artificial Sequence: Synthetic oligonucleotide
  Antisense strand to SEQ ID NO: 890916
cucauucuuagguaauucc

SEQ ID NO: 890918 - RNA, 19 nt, Artificial Sequence
  Description of Artificial Sequence: Synthetic oligonucleotide
  Sense strand starting at position 2743 of SEQ ID NO: 588804
ccaggcaggucuguaugaa

SEQ ID NO: 890919 - RNA, 19 nt, Artificial Sequence
  Description of Artificial Sequence: Synthetic oligonucleotide
  Antisense strand to SEQ ID NO: 890918
uucauacagaccugccugg

SEQ ID NO: 890920 - RNA, 19 nt, Artificial Sequence
  Description of Artificial Sequence: Synthetic oligonucleotide
  Sense strand starting at position 2827 of SEQ ID NO: 588804
acgggagcuccggagcaau

SEQ ID NO: 890921 - RNA, 19 nt, Artificial Sequence
  Description of Artificial Sequence: Synthetic oligonucleotide
  Antisense strand to SEQ ID NO: 890920
auugcuccggagcucccgu

SEQ ID NO: 890922 - RNA, 19 nt, Artificial Sequence
  Description of Artificial Sequence: Synthetic oligonucleotide
  Sense strand starting at position 2830 of SEQ ID NO: 588804
ggagcuccggagcaauuau

SEQ ID NO: 890923 - RNA, 19 nt, Artificial Sequence
  Description of Artificial Sequence: Synthetic oligonucleotide
  Antisense strand to SEQ ID NO: 890922
auaauugcuccggagcucc

SEQ ID NO: 890924 - RNA, 19 nt, Artificial Sequence
  Description of Artificial Sequence: Synthetic oligonucleotide
  Sense strand starting at position 2879 of SEQ ID NO: 588804
guggcaaguguaggagaaa

SEQ ID NO: 890925 - RNA, 19 nt, Artificial Sequence
  Description of Artificial Sequence: Synthetic oligonucleotide
  Antisense strand to SEQ ID NO: 890924
uuucuccuacacuugccac

SEQ ID NO: 890926 - RNA, 19 nt, Artificial Sequence
  Description of Artificial Sequence: Synthetic oligonucleotide
  Sense strand starting at position 3140 of SEQ ID NO: 588804
gcccucaguuaaguagaaa

SEQ ID NO: 890927 - RNA, 19 nt, Artificial Sequence
  Description of Artificial Sequence: Synthetic oligonucleotide
  Antisense strand to SEQ ID NO: 890926
uuucuacuuaacugagggc

SEQ ID NO: 890928 - RNA, 19 nt, Artificial Sequence
  Description of Artificial Sequence: Synthetic oligonucleotide
  Sense strand starting at position 3199 of SEQ ID NO: 588804
ugcucugauagaggaagua

SEQ ID NO: 890929 - RNA, 19 nt, Artificial Sequence
  Description of Artificial Sequence: Synthetic oligonucleotide
  Antisense strand to SEQ ID NO: 890928
uacuuccucuaucagagca

SEQ ID NO: 890930 - RNA, 19 nt, Artificial Sequence
  Description of Artificial Sequence: Synthetic oligonucleotide
  Sense strand starting at position 3411 of SEQ ID NO: 588804
guuaauucugcccaugucu

SEQ ID NO: 890931 - RNA, 19 nt, Artificial Sequence
  Description of Artificial Sequence: Synthetic oligonucleotide
  Antisense strand to SEQ ID NO: 890930
agacaugggcagaauuaac

SEQ ID NO: 890932 - RNA, 19 nt, Artificial Sequence
  Description of Artificial Sequence: Synthetic oligonucleotide
  Sense strand starting at position 3541 of SEQ ID NO: 588804
agggauggcagcuaugaca

SEQ ID NO: 890933 - RNA, 19 nt, Artificial Sequence
  Description of Artificial Sequence: Synthetic oligonucleotide
  Antisense strand to SEQ ID NO: 890932
ugucauagcugccaucccu

SEQ ID NO: 890934 - RNA, 19 nt, Artificial Sequence
  Description of Artificial Sequence: Synthetic oligonucleotide
  Sense strand starting at position 3644 of SEQ ID NO: 588804
gaaagugacuuguccaaca

SEQ ID NO: 890935 - RNA, 19 nt, Artificial Sequence
  Description of Artificial Sequence: Synthetic oligonucleotide
  Antisense strand to SEQ ID NO: 890934
uguuggacaagucacuuuc

SEQ ID NO: 890936 - RNA, 19 nt, Artificial Sequence
  Description of Artificial Sequence: Synthetic oligonucleotide
  Sense strand starting at position 3714 of SEQ ID NO: 588804
cagcucucacuccgaugau

SEQ ID NO: 890937 - RNA, 19 nt, Artificial Sequence
  Description of Artificial Sequence: Synthetic oligonucleotide
  Antisense strand to SEQ ID NO: 890936
aucaucggagugagagcug

SEQ ID NO: 890938 - RNA, 19 nt, Artificial Sequence
  Description of Artificial Sequence: Synthetic oligonucleotide
  Sense strand starting at position 67 of SEQ ID NO: 588805
agaucuggcaggcagauua

SEQ ID NO: 890939 - RNA, 19 nt, Artificial Sequence
  Description of Artificial Sequence: Synthetic oligonucleotide
  Antisense strand to SEQ ID NO: 890938
uaaucugccugccagaucu

SEQ ID NO: 890940 - RNA, 19 nt, Artificial Sequence
  Description of Artificial Sequence: Synthetic oligonucleotide
  Sense strand starting at position 178 of SEQ ID NO: 588805
gaucucaauuguguugaaa

SEQ ID NO: 890941 - RNA, 19 nt, Artificial Sequence
  Description of Artificial Sequence: Synthetic oligonucleotide
  Antisense strand to SEQ ID NO: 890940
uuucaacacaauugagauc

SEQ ID NO: 890942 - RNA, 19 nt, Artificial Sequence
  Description of Artificial Sequence: Synthetic oligonucleotide
  Sense strand starting at position 654 of SEQ ID NO: 588805
aacaaaugauggcuaguua

SEQ ID NO: 890943 - RNA, 19 nt, Artificial Sequence
  Description of Artificial Sequence: Synthetic oligonucleotide
  Antisense strand to SEQ ID NO: 890942
uaacuagccaucauuuguu

SEQ ID NO: 890944 - RNA, 19 nt, Artificial Sequence
  Description of Artificial Sequence: Synthetic oligonucleotide
  Sense strand starting at position 805 of SEQ ID NO: 588805
aaauauguugagcaggagu

SEQ ID NO: 890945 - RNA, 19 nt, Artificial Sequence
  Description of Artificial Sequence: Synthetic oligonucleotide
  Antisense strand to SEQ ID NO: 890944
acuccugcucaacauauuu

SEQ ID NO: 890946 - RNA, 19 nt, Artificial Sequence
  Description of Artificial Sequence: Synthetic oligonucleotide
  Sense strand starting at position 807 of SEQ ID NO: 588805
auauguugagcaggaguaa

SEQ ID NO: 890947 - RNA, 19 nt, Artificial Sequence
  Description of Artificial Sequence: Synthetic oligonucleotide
  Antisense strand to SEQ ID NO: 890946
uuacuccugcucaacauau

SEQ ID NO: 890948 - RNA, 19 nt, Artificial Sequence
  Description of Artificial Sequence: Synthetic oligonucleotide
  Sense strand starting at position 875 of SEQ ID NO: 588805
ggcacucugucuuugaaag

SEQ ID NO: 890949 - RNA, 19 nt, Artificial Sequence
  Description of Artificial Sequence: Synthetic oligonucleotide
  Antisense strand to SEQ ID NO: 890948
cuuucaaagacagagugcc

SEQ ID NO: 890950 - RNA, 19 nt, Artificial Sequence
  Description of Artificial Sequence: Synthetic oligonucleotide
  Sense strand starting at position 894 of SEQ ID NO: 588805
cugggcaauguccaguaau

SEQ ID NO: 890951 - RNA, 19 nt, Artificial Sequence
  Description of Artificial Sequence: Synthetic oligonucleotide
  Antisense strand to SEQ ID NO: 890950
auuacuggacauugcccag

SEQ ID NO: 890952 - RNA, 19 nt, Artificial Sequence
  Description of Artificial Sequence: Synthetic oligonucleotide
  Sense strand starting at position 897 of SEQ ID NO: 588805
ggcaauguccaguaauguu

SEQ ID NO: 890953 - RNA, 19 nt, Artificial Sequence
  Description of Artificial Sequence: Synthetic oligonucleotide
  Antisense strand to SEQ ID NO: 890952
aacauuacuggacauugcc

SEQ ID NO: 890954 - RNA, 19 nt, Artificial Sequence
  Description of Artificial Sequence: Synthetic oligonucleotide
  Sense strand starting at position 939 of SEQ ID NO: 588805
aaggaaauuguaugcaagu

SEQ ID NO: 890955 - RNA, 19 nt, Artificial Sequence
  Description of Artificial Sequence: Synthetic oligonucleotide
  Antisense strand to SEQ ID NO: 890954
acuugcauacaauuuccuu

SEQ ID NO: 890956 - RNA, 19 nt, Artificial Sequence
  Description of Artificial Sequence: Synthetic oligonucleotide
  Sense strand starting at position 940 of SEQ ID NO: 588805
aggaaauuguaugcaaguu

SEQ ID NO: 890957 - RNA, 19 nt, Artificial Sequence
  Description of Artificial Sequence: Synthetic oligonucleotide
  Antisense strand to SEQ ID NO: 890956
aacuugcauacaauuuccu

SEQ ID NO: 890958 - RNA, 19 nt, Artificial Sequence
  Description of Artificial Sequence: Synthetic oligonucleotide
  Sense strand starting at position 941 of SEQ ID NO: 588805
ggaaauuguaugcaaguuc

SEQ ID NO: 890959 - RNA, 19 nt, Artificial Sequence
  Description of Artificial Sequence: Synthetic oligonucleotide
  Antisense strand to SEQ ID NO: 890958
gaacuugcauacaauuucc

SEQ ID NO: 890960 - RNA, 19 nt, Artificial Sequence
  Description of Artificial Sequence: Synthetic oligonucleotide
  Sense strand starting at position 977 of SEQ ID NO: 588805
acaggucaucucuggaaag

SEQ ID NO: 890961 - RNA, 19 nt, Artificial Sequence
  Description of Artificial Sequence: Synthetic oligonucleotide
  Antisense strand to SEQ ID NO: 890960
cuuuccagagaugaccugu

SEQ ID NO: 890962 - RNA, 19 nt, Artificial Sequence
  Description of Artificial Sequence: Synthetic oligonucleotide
  Sense strand starting at position 979 of SEQ ID NO: 588805
aggucaucucuggaaagcu

SEQ ID NO: 890963 - RNA, 19 nt, Artificial Sequence
  Description of Artificial Sequence: Synthetic oligonucleotide
  Antisense strand to SEQ ID NO: 890962
agcuuuccagagaugaccu

SEQ ID NO: 890964 - RNA, 19 nt, Artificial Sequence
  Description of Artificial Sequence: Synthetic oligonucleotide
  Sense strand starting at position 1028 of SEQ ID NO: 588805
cauggaagaucucuugguu

SEQ ID NO: 890965 - RNA, 19 nt, Artificial Sequence
  Description of Artificial Sequence: Synthetic oligonucleotide
  Antisense strand to SEQ ID NO: 890964
aaccaagagaucuuccaug

SEQ ID NO: 890966 - RNA, 19 nt, Artificial Sequence
  Description of Artificial Sequence: Synthetic oligonucleotide
  Sense strand starting at position 1132 of SEQ ID NO: 588805
gguuguuaccuuuacuaug

SEQ ID NO: 890967 - RNA, 19 nt, Artificial Sequence
  Description of Artificial Sequence: Synthetic oligonucleotide
  Antisense strand to SEQ ID NO: 890966
cauaguaaagguaacaacc

SEQ ID NO: 890968 - RNA, 19 nt, Artificial Sequence
  Description of Artificial Sequence: Synthetic oligonucleotide
  Sense strand starting at position 1240 of SEQ ID NO: 588805
gggagugaagccuacuguu

SEQ ID NO: 890969 - RNA, 19 nt, Artificial Sequence
  Description of Artificial Sequence: Synthetic oligonucleotide
  Antisense strand to SEQ ID NO: 890968
aacaguaggcuucacuccc

SEQ ID NO: 890970 - RNA, 19 nt, Artificial Sequence
  Description of Artificial Sequence: Synthetic oligonucleotide
  Sense strand starting at position 1299 of SEQ ID NO: 588805
cuccuaagggauuguucuu

SEQ ID NO: 890971 - RNA, 19 nt, Artificial Sequence
  Description of Artificial Sequence: Synthetic oligonucleotide
  Antisense strand to SEQ ID NO: 890970
aagaacaaucccuuaggag

SEQ ID NO: 890972 - RNA, 19 nt, Artificial Sequence
  Description of Artificial Sequence: Synthetic oligonucleotide
  Sense strand starting at position 1507 of SEQ ID NO: 588805
augagaaacuccgugguga

SEQ ID NO: 890973 - RNA, 19 nt, Artificial Sequence
  Description of Artificial Sequence: Synthetic oligonucleotide
  Antisense strand to SEQ ID NO: 890972
ucaccacggaguuucucau

SEQ ID NO: 890974 - RNA, 19 nt, Artificial Sequence
  Description of Artificial Sequence: Synthetic oligonucleotide
  Sense strand starting at position 1508 of SEQ ID NO: 588805
ugagaaacuccguggugac

SEQ ID NO: 890975 - RNA, 19 nt, Artificial Sequence
  Description of Artificial Sequence: Synthetic oligonucleotide
  Antisense strand to SEQ ID NO: 890974
gucaccacggaguuucuca

SEQ ID NO: 890976 - RNA, 19 nt, Artificial Sequence
  Description of Artificial Sequence: Synthetic oligonucleotide
  Sense strand starting at position 1509 of SEQ ID NO: 588805
gagaaacuccguggugaca

SEQ ID NO: 890977 - RNA, 19 nt, Artificial Sequence
  Description of Artificial Sequence: Synthetic oligonucleotide
  Antisense strand to SEQ ID NO: 890976
ugucaccacggaguuucuc

SEQ ID NO: 890978 - RNA, 19 nt, Artificial Sequence
  Description of Artificial Sequence: Synthetic oligonucleotide
  Sense strand starting at position 1527 of SEQ ID NO: 588805
aacccaggucucugaaaga

SEQ ID NO: 890979 - RNA, 19 nt, Artificial Sequence
  Description of Artificial Sequence: Synthetic oligonucleotide
  Antisense strand to SEQ ID NO: 890978
ucuuucagagaccuggguu

SEQ ID NO: 890980 - RNA, 19 nt, Artificial Sequence
  Description of Artificial Sequence: Synthetic oligonucleotide
  Sense strand starting at position 1544 of SEQ ID NO: 588805
gauuaaccagagcgugauu

SEQ ID NO: 890981 - RNA, 19 nt, Artificial Sequence
  Description of Artificial Sequence: Synthetic oligonucleotide
  Antisense strand to SEQ ID NO: 890980
aaucacgcucugguuaauc

SEQ ID NO: 890982 - RNA, 19 nt, Artificial Sequence
  Description of Artificial Sequence: Synthetic oligonucleotide
  Sense strand starting at position 1547 of SEQ ID NO: 588805
uaaccagagcgugauuauu

SEQ ID NO: 890983 - RNA, 19 nt, Artificial Sequence
  Description of Artificial Sequence: Synthetic oligonucleotide
  Antisense strand to SEQ ID NO: 890982
aauaaucacgcucugguua

SEQ ID NO: 890984 - RNA, 19 nt, Artificial Sequence
  Description of Artificial Sequence: Synthetic oligonucleotide
  Sense strand starting at position 1668 of SEQ ID NO: 588805
ugggcagucacaggagaaa

SEQ ID NO: 890985 - RNA, 19 nt, Artificial Sequence
  Description of Artificial Sequence: Synthetic oligonucleotide
  Antisense strand to SEQ ID NO: 890984
uuucuccugugacugccca

SEQ ID NO: 890986 - RNA, 19 nt, Artificial Sequence
  Description of Artificial Sequence: Synthetic oligonucleotide
  Sense strand starting at position 2207 of SEQ ID NO: 588805
ccgcgcucccgguuggaaa

SEQ ID NO: 890987 - RNA, 19 nt, Artificial Sequence
  Description of Artificial Sequence: Synthetic oligonucleotide
  Antisense strand to SEQ ID NO: 890986
uuuccaaccgggagcgcgg

SEQ ID NO: 890988 - RNA, 19 nt, Artificial Sequence
  Description of Artificial Sequence: Synthetic oligonucleotide
  Sense strand starting at position 2318 of SEQ ID NO: 588805
uuuauaaccugcuuugaag

SEQ ID NO: 890989 - RNA, 19 nt, Artificial Sequence
  Description of Artificial Sequence: Synthetic oligonucleotide
  Antisense strand to SEQ ID NO: 890988
cuucaaagcagguuauaaa

SEQ ID NO: 890990 - RNA, 19 nt, Artificial Sequence
  Description of Artificial Sequence: Synthetic oligonucleotide
  Sense strand starting at position 2341 of SEQ ID NO: 588805
ggccuauaaucauuagauc

SEQ ID NO: 890991 - RNA, 19 nt, Artificial Sequence
  Description of Artificial Sequence: Synthetic oligonucleotide
  Antisense strand to SEQ ID NO: 890990
gaucuaaugauuauaggcc

SEQ ID NO: 890992 - RNA, 19 nt, Artificial Sequence
  Description of Artificial Sequence: Synthetic oligonucleotide
  Sense strand starting at position 2604 of SEQ ID NO: 588805
gcccacagccucugagaaa

SEQ ID NO: 890993 - RNA, 19 nt, Artificial Sequence
  Description of Artificial Sequence: Synthetic oligonucleotide
  Antisense strand to SEQ ID NO: 890992
uuucucagaggcugugggc

SEQ ID NO: 890994 - RNA, 19 nt, Artificial Sequence
  Description of Artificial Sequence: Synthetic oligonucleotide
  Sense strand starting at position 2806 of SEQ ID NO: 588805
gcuguuagucucguguaaa

SEQ ID NO: 890995 - RNA, 19 nt, Artificial Sequence
  Description of Artificial Sequence: Synthetic oligonucleotide
  Antisense strand to SEQ ID NO: 890994
uuuacacgagacuaacagc

SEQ ID NO: 890996 - RNA, 19 nt, Artificial Sequence
  Description of Artificial Sequence: Synthetic oligonucleotide
  Sense strand starting at position 2841 of SEQ ID NO: 588805
guugguauuugucccuguu

SEQ ID NO: 890997 - RNA, 19 nt, Artificial Sequence
  Description of Artificial Sequence: Synthetic oligonucleotide
  Antisense strand to SEQ ID NO: 890996
aacagggacaaauaccaac

SEQ ID NO: 890998 - RNA, 19 nt, Artificial Sequence
  Description of Artificial Sequence: Synthetic oligonucleotide
  Sense strand starting at position 2945 of SEQ ID NO: 588805
agaagaguuauguguugag

SEQ ID NO: 890999 - RNA, 19 nt, Artificial Sequence
  Description of Artificial Sequence: Synthetic oligonucleotide
  Antisense strand to SEQ ID NO: 890998
cucaacacauaacucuucu

SEQ ID NO: 891000 - RNA, 19 nt, Artificial Sequence
  Description of Artificial Sequence: Synthetic oligonucleotide
  Sense strand starting at position 2952 of SEQ ID NO: 588805
uuauguguugaguaccaga

SEQ ID NO: 891001 - RNA, 19 nt, Artificial Sequence
  Description of Artificial Sequence: Synthetic oligonucleotide
  Antisense strand to SEQ ID NO: 891000
ucugguacucaacacauaa

SEQ ID NO: 891002 - RNA, 19 nt, Artificial Sequence
  Description of Artificial Sequence: Synthetic oligonucleotide
  Sense strand starting at position 3093 of SEQ ID NO: 588805
aggugacaugcccaagguu

SEQ ID NO: 891003 - RNA, 19 nt, Artificial Sequence
  Description of Artificial Sequence: Synthetic oligonucleotide
  Antisense strand to SEQ ID NO: 891002
aaccuugggcaugucaccu

SEQ ID NO: 891004 - RNA, 19 nt, Artificial Sequence
  Description of Artificial Sequence: Synthetic oligonucleotide
  Sense strand starting at position 3314 of SEQ ID NO: 588805
acauaaaugccguaggauu

SEQ ID NO: 891005 - RNA, 19 nt, Artificial Sequence
  Description of Artificial Sequence: Synthetic oligonucleotide
  Antisense strand to SEQ ID NO: 891004
aauccuacggcauuuaugu

SEQ ID NO: 891006 - RNA, 19 nt, Artificial Sequence
  Description of Artificial Sequence: Synthetic oligonucleotide
  Sense strand starting at position 3432 of SEQ ID NO: 588805
ggugaacacugccuuuaac

SEQ ID NO: 891007 - RNA, 19 nt, Artificial Sequence
  Description of Artificial Sequence: Synthetic oligonucleotide
  Antisense strand to SEQ ID NO: 891006
guuaaaggcaguguucacc

SEQ ID NO: 891008 - RNA, 19 nt, Artificial Sequence
  Description of Artificial Sequence: Synthetic oligonucleotide
  Sense strand starting at position 3689 of SEQ ID NO: 588805
gcaagaugggagcaugagu

SEQ ID NO: 891009 - RNA, 19 nt, Artificial Sequence
  Description of Artificial Sequence: Synthetic oligonucleotide
  Antisense strand to SEQ ID NO: 891008
acucaugcucccaucuugc

SEQ ID NO: 891010 - RNA, 19 nt, Artificial Sequence
  Description of Artificial Sequence: Synthetic oligonucleotide
  Sense strand starting at position 3696 of SEQ ID NO: 588805
gggagcaugaguuagccau

SEQ ID NO: 891011 - RNA, 19 nt, Artificial Sequence
  Description of Artificial Sequence: Synthetic oligonucleotide
  Antisense strand to SEQ ID NO: 891010
auggcuaacucaugcuccc

SEQ ID NO: 891012 - RNA, 19 nt, Artificial Sequence
  Description of Artificial Sequence: Synthetic oligonucleotide
  Sense strand starting at position 3707 of SEQ ID NO: 588805
uuagccauggccugaagau

SEQ ID NO: 891013 - RNA, 19 nt, Artificial Sequence
  Description of Artificial Sequence: Synthetic oligonucleotide
  Antisense strand to SEQ ID NO: 891012
aucuucaggccauggcuaa

SEQ ID NO: 891014 - RNA, 19 nt, Artificial Sequence
  Description of Artificial Sequence: Synthetic oligonucleotide
  Sense strand starting at position 3815 of SEQ ID NO: 588805
ggugaugugccugagauga

SEQ ID NO: 891015 - RNA, 19 nt, Artificial Sequence
  Description of Artificial Sequence: Synthetic oligonucleotide
  Antisense strand to SEQ ID NO: 891014
ucaucucaggcacaucacc

SEQ ID NO: 891016 - RNA, 19 nt, Artificial Sequence
  Description of Artificial Sequence: Synthetic oligonucleotide
  Sense strand starting at position 3982 of SEQ ID NO: 588805
gucugaaugugaccuagga

SEQ ID NO: 891017 - RNA, 19 nt, Artificial Sequence
  Description of Artificial Sequence: Synthetic oligonucleotide
  Antisense strand to SEQ ID NO: 891016
uccuaggucacauucagac

SEQ ID NO: 891018 - RNA, 19 nt, Artificial Sequence
  Description of Artificial Sequence: Synthetic oligonucleotide
  Sense strand starting at position 138 of SEQ ID NO: 588806
gcuccuucccuugaggaga

SEQ ID NO: 891019 - RNA, 19 nt, Artificial Sequence
  Description of Artificial Sequence: Synthetic oligonucleotide
  Antisense strand to SEQ ID NO: 891018
ucuccucaagggaaggagc

SEQ ID NO: 891020 - RNA, 19 nt, Artificial Sequence
  Description of Artificial Sequence: Synthetic oligonucleotide
  Sense strand starting at position 279 of SEQ ID NO: 588806
ucaggaaggucagauuuga

SEQ ID NO: 891021 - RNA, 19 nt, Artificial Sequence
  Description of Artificial Sequence: Synthetic oligonucleotide
  Antisense strand to SEQ ID NO: 891020
ucaaaucugaccuuccuga

SEQ ID NO: 891022 - RNA, 19 nt, Artificial Sequence
  Description of Artificial Sequence: Synthetic oligonucleotide
  Sense strand starting at position 328 of SEQ ID NO: 588806
ggaaaugguuucccacaug

SEQ ID NO: 891023 - RNA, 19 nt, Artificial Sequence
  Description of Artificial Sequence: Synthetic oligonucleotide
  Antisense strand to SEQ ID NO: 891022
caugugggaaaccauuucc

SEQ ID NO: 891024 - RNA, 19 nt, Artificial Sequence
  Description of Artificial Sequence: Synthetic oligonucleotide
  Sense strand starting at position 357 of SEQ ID NO: 588806
gcuguucuaggaggcagaa

SEQ ID NO: 891025 - RNA, 19 nt, Artificial Sequence
  Description of Artificial Sequence: Synthetic oligonucleotide
  Antisense strand to SEQ ID NO: 891024
uucugccuccuagaacagc

SEQ ID NO: 891026 - RNA, 19 nt, Artificial Sequence
  Description of Artificial Sequence: Synthetic oligonucleotide
  Sense strand starting at position 369 of SEQ ID NO: 588806
ggcagaaguucucuauccu

SEQ ID NO: 891027 - RNA, 19 nt, Artificial Sequence
  Description of Artificial Sequence: Synthetic oligonucleotide
  Antisense strand to SEQ ID NO: 891026
aggauagagaacuucugcc

SEQ ID NO: 891028 - RNA, 19 nt, Artificial Sequence
  Description of Artificial Sequence: Synthetic oligonucleotide
  Sense strand starting at position 370 of SEQ ID NO: 588806
gcagaaguucucuauccug

SEQ ID NO: 891029 - RNA, 19 nt, Artificial Sequence
  Description of Artificial Sequence: Synthetic oligonucleotide
  Antisense strand to SEQ ID NO: 891028
caggauagagaacuucugc

SEQ ID NO: 891030 - RNA, 19 nt, Artificial Sequence
  Description of Artificial Sequence: Synthetic oligonucleotide
  Sense strand starting at position 405 of SEQ ID NO: 588806
agaccugcugcucaaacuu

SEQ ID NO: 891031 - RNA, 19 nt, Artificial Sequence
  Description of Artificial Sequence: Synthetic oligonucleotide
  Antisense strand to SEQ ID NO: 891030
aaguuugagcagcaggucu

SEQ ID NO: 891032 - RNA, 19 nt, Artificial Sequence
  Description of Artificial Sequence: Synthetic oligonucleotide
  Sense strand starting at position 726 of SEQ ID NO: 588806
ggccgucucagggaccaaa

SEQ ID NO: 891033 - RNA, 19 nt, Artificial Sequence
  Description of Artificial Sequence: Synthetic oligonucleotide
  Antisense strand to SEQ ID NO: 891032
uuuggucccugagacggcc

SEQ ID NO: 891034 - RNA, 19 nt, Artificial Sequence
  Description of Artificial Sequence: Synthetic oligonucleotide
  Sense strand starting at position 752 of SEQ ID NO: 588806
cgcugagacuaguuccaga

SEQ ID NO: 891035 - RNA, 19 nt, Artificial Sequence
  Description of Artificial Sequence: Synthetic oligonucleotide
  Antisense strand to SEQ ID NO: 891034
ucuggaacuagucucagcg

SEQ ID NO: 891036 - RNA, 19 nt, Artificial Sequence
  Description of Artificial Sequence: Synthetic oligonucleotide
  Sense strand starting at position 918 of SEQ ID NO: 588806
uuucuuguuucucugagaa

SEQ ID NO: 891037 - RNA, 19 nt, Artificial Sequence
  Description of Artificial Sequence: Synthetic oligonucleotide
  Antisense strand to SEQ ID NO: 891036
uucucagagaaacaagaaa

SEQ ID NO: 891038 - RNA, 19 nt, Artificial Sequence
  Description of Artificial Sequence: Synthetic oligonucleotide
  Sense strand starting at position 1100 of SEQ ID NO: 588806
acaaaugguuugguugcaa

SEQ ID NO: 891039 - RNA, 19 nt, Artificial Sequence
  Description of Artificial Sequence: Synthetic oligonucleotide
  Antisense strand to SEQ ID NO: 891038
uugcaaccaaaccauuugu

SEQ ID NO: 891040 - RNA, 19 nt, Artificial Sequence
  Description of Artificial Sequence: Synthetic oligonucleotide
  Sense strand starting at position 1201 of SEQ ID NO: 588806
caguccugucaccaaggua

SEQ ID NO: 891041 - RNA, 19 nt, Artificial Sequence
  Description of Artificial Sequence: Synthetic oligonucleotide
  Antisense strand to SEQ ID NO: 891040
uaccuuggugacaggacug

SEQ ID NO: 891042 - RNA, 19 nt, Artificial Sequence
  Description of Artificial Sequence: Synthetic oligonucleotide
  Sense strand starting at position 2177 of SEQ ID NO: 588806
acagcugaaucuuugaaug

SEQ ID NO: 891043 - RNA, 19 nt, Artificial Sequence
  Description of Artificial Sequence: Synthetic oligonucleotide
  Antisense strand to SEQ ID NO: 891042
cauucaaagauucagcugu

SEQ ID NO: 891044 - RNA, 19 nt, Artificial Sequence
  Description of Artificial Sequence: Synthetic oligonucleotide
  Sense strand starting at position 2182 of SEQ ID NO: 588806
ugaaucuuugaaugcuaaa

SEQ ID NO: 891045 - RNA, 19 nt, Artificial Sequence
  Description of Artificial Sequence: Synthetic oligonucleotide
  Antisense strand to SEQ ID NO: 891044
uuuagcauucaaagauuca

SEQ ID NO: 891046 - RNA, 19 nt, Artificial Sequence
  Description of Artificial Sequence: Synthetic oligonucleotide
  Sense strand starting at position 2193 of SEQ ID NO: 588806
augcuaaacucugcagaau

SEQ ID NO: 891047 - RNA, 19 nt, Artificial Sequence
  Description of Artificial Sequence: Synthetic oligonucleotide
  Antisense strand to SEQ ID NO: 891046
auucugcagaguuuagcau

SEQ ID NO: 891048 - RNA, 19 nt, Artificial Sequence
  Description of Artificial Sequence: Synthetic oligonucleotide
  Sense strand starting at position 2194 of SEQ ID NO: 588806
ugcuaaacucugcagaauc

SEQ ID NO: 891049 - RNA, 19 nt, Artificial Sequence
  Description of Artificial Sequence: Synthetic oligonucleotide
  Antisense strand to SEQ ID NO: 891048
gauucugcagaguuuagca

SEQ ID NO: 891050 - RNA, 19 nt, Artificial Sequence
  Description of Artificial Sequence: Synthetic oligonucleotide
  Sense strand starting at position 2204 of SEQ ID NO: 588806
ugcagaauccuauguggaa

SEQ ID NO: 891051 - RNA, 19 nt, Artificial Sequence
  Description of Artificial Sequence: Synthetic oligonucleotide
  Antisense strand to SEQ ID NO: 891050
uuccacauaggauucugca

SEQ ID NO: 891052 - RNA, 19 nt, Artificial Sequence
  Description of Artificial Sequence: Synthetic oligonucleotide
  Sense strand starting at position 2205 of SEQ ID NO: 588806
gcagaauccuauguggaaa

SEQ ID NO: 891053 - RNA, 19 nt, Artificial Sequence
  Description of Artificial Sequence: Synthetic oligonucleotide
  Antisense strand to SEQ ID NO: 891052
uuuccacauaggauucugc

SEQ ID NO: 891054 - RNA, 19 nt, Artificial Sequence
  Description of Artificial Sequence: Synthetic oligonucleotide
  Sense strand starting at position 2266 of SEQ ID NO: 588806
ggcaguuuggacuguaaca

SEQ ID NO: 891055 - RNA, 19 nt, Artificial Sequence
  Description of Artificial Sequence: Synthetic oligonucleotide
  Antisense strand to SEQ ID NO: 891054
uguuacaguccaaacugcc

SEQ ID NO: 891056 - RNA, 19 nt, Artificial Sequence
  Description of Artificial Sequence: Synthetic oligonucleotide
  Sense strand starting at position 2292 of SEQ ID NO: 588806
acaguaauauuggcuauaa

SEQ ID NO: 891057 - RNA, 19 nt, Artificial Sequence
  Description of Artificial Sequence: Synthetic oligonucleotide
  Antisense strand to SEQ ID NO: 891056
uuauagccaauauuacugu

SEQ ID NO: 891058 - RNA, 19 nt, Artificial Sequence
  Description of Artificial Sequence: Synthetic oligonucleotide
  Sense strand starting at position 2294 of SEQ ID NO: 588806
aguaauauuggcuauaaug

SEQ ID NO: 891059 - RNA, 19 nt, Artificial Sequence
  Description of Artificial Sequence: Synthetic oligonucleotide
  Antisense strand to SEQ ID NO: 891058
cauuauagccaauauuacu

SEQ ID NO: 891060 - RNA, 19 nt, Artificial Sequence
  Description of Artificial Sequence: Synthetic oligonucleotide
  Sense strand starting at position 2314 of SEQ ID NO: 588806
gaguuacagcccugaauga

SEQ ID NO: 891061 - RNA, 19 nt, Artificial Sequence
  Description of Artificial Sequence: Synthetic oligonucleotide
  Antisense strand to SEQ ID NO: 891060
ucauucagggcuguaacuc

SEQ ID NO: 891062 - RNA, 19 nt, Artificial Sequence
  Description of Artificial Sequence: Synthetic oligonucleotide
  Sense strand starting at position 2560 of SEQ ID NO: 588806
acccuuucuugagcaugaa

SEQ ID NO: 891063 - RNA, 19 nt, Artificial Sequence
  Description of Artificial Sequence: Synthetic oligonucleotide
  Antisense strand to SEQ ID NO: 891062
uucaugcucaagaaagggu

SEQ ID NO: 891064 - RNA, 19 nt, Artificial Sequence
  Description of Artificial Sequence: Synthetic oligonucleotide
  Sense strand starting at position 2740 of SEQ ID NO: 588806
ucuguauagccaggacuga

SEQ ID NO: 891065 - RNA, 19 nt, Artificial Sequence
  Description of Artificial Sequence: Synthetic oligonucleotide
  Antisense strand to SEQ ID NO: 891064
ucaguccuggcuauacaga

SEQ ID NO: 891066 - RNA, 19 nt, Artificial Sequence
  Description of Artificial Sequence: Synthetic oligonucleotide
  Sense strand starting at position 2741 of SEQ ID NO: 588806
cuguauagccaggacugaa

SEQ ID NO: 891067 - RNA, 19 nt, Artificial Sequence
  Description of Artificial Sequence: Synthetic oligonucleotide
  Antisense strand to SEQ ID NO: 891066
uucaguccuggcuauacag

SEQ ID NO: 891068 - RNA, 19 nt, Artificial Sequence
  Description of Artificial Sequence: Synthetic oligonucleotide
  Sense strand starting at position 2864 of SEQ ID NO: 588806
ugucaugauguugacaaau

SEQ ID NO: 891069 - RNA, 19 nt, Artificial Sequence
  Description of Artificial Sequence: Synthetic oligonucleotide
  Antisense strand to SEQ ID NO: 891068
auuugucaacaucaugaca

SEQ ID NO: 891070 - RNA, 19 nt, Artificial Sequence
  Description of Artificial Sequence: Synthetic oligonucleotide
  Sense strand starting at position 2950 of SEQ ID NO: 588806
gcaggcauccugggaugau

SEQ ID NO: 891071 - RNA, 19 nt, Artificial Sequence
  Description of Artificial Sequence: Synthetic oligonucleotide
  Antisense strand to SEQ ID NO: 891070
aucaucccaggaugccugc

SEQ ID NO: 891072 - RNA, 19 nt, Artificial Sequence
  Description of Artificial Sequence: Synthetic oligonucleotide
  Sense strand starting at position 3060 of SEQ ID NO: 588806
ucuuucucucccuauggua

SEQ ID NO: 891073 - RNA, 19 nt, Artificial Sequence
  Description of Artificial Sequence: Synthetic oligonucleotide
  Antisense strand to SEQ ID NO: 891072
uaccauagggagagaaaga

SEQ ID NO: 891074 - RNA, 19 nt, Artificial Sequence
  Description of Artificial Sequence: Synthetic oligonucleotide
  Sense strand starting at position 3062 of SEQ ID NO: 588806
uuucucucccuaugguaga

SEQ ID NO: 891075 - RNA, 19 nt, Artificial Sequence
  Description of Artificial Sequence: Synthetic oligonucleotide
  Antisense strand to SEQ ID NO: 891074
ucuaccauagggagagaaa

SEQ ID NO: 891076 - RNA, 19 nt, Artificial Sequence
  Description of Artificial Sequence: Synthetic oligonucleotide
  Sense strand starting at position 3178 of SEQ ID NO: 588806
ugcacacugcuacaagaaa

SEQ ID NO: 891077 - RNA, 19 nt, Artificial Sequence
  Description of Artificial Sequence: Synthetic oligonucleotide
  Antisense strand to SEQ ID NO: 891076
uuucuuguagcagugugca

SEQ ID NO: 891078 - RNA, 19 nt, Artificial Sequence
  Description of Artificial Sequence: Synthetic oligonucleotide
  Sense strand starting at position 3233 of SEQ ID NO: 588806
cugaguuggucacuuacaa

SEQ ID NO: 891079 - RNA, 19 nt, Artificial Sequence
  Description of Artificial Sequence: Synthetic oligonucleotide
  Antisense strand to SEQ ID NO: 891078
uuguaagugaccaacucag

SEQ ID NO: 891080 - RNA, 19 nt, Artificial Sequence
  Description of Artificial Sequence: Synthetic oligonucleotide
  Sense strand starting at position 3398 of SEQ ID NO: 588806
gucucaagagauggccaau

SEQ ID NO: 891081 - RNA, 19 nt, Artificial Sequence
  Description of Artificial Sequence: Synthetic oligonucleotide
  Antisense strand to SEQ ID NO: 891080
auuggccaucucuugagac

SEQ ID NO: 891082 - RNA, 19 nt, Artificial Sequence
  Description of Artificial Sequence: Synthetic oligonucleotide
  Sense strand starting at position 3411 of SEQ ID NO: 588806
gccaauucugauggagcua

SEQ ID NO: 891083 - RNA, 19 nt, Artificial Sequence
  Description of Artificial Sequence: Synthetic oligonucleotide
  Antisense strand to SEQ ID NO: 891082
uagcuccaucagaauuggc

SEQ ID NO: 891084 - RNA, 19 nt, Artificial Sequence
  Description of Artificial Sequence: Synthetic oligonucleotide
  Sense strand starting at position 3452 of SEQ ID NO: 588806
ugguuucuaggauggaauu

SEQ ID NO: 891085 - RNA, 19 nt, Artificial Sequence
  Description of Artificial Sequence: Synthetic oligonucleotide
  Antisense strand to SEQ ID NO: 891084
aauuccauccuagaaacca

SEQ ID NO: 891086 - RNA, 19 nt, Artificial Sequence
  Description of Artificial Sequence: Synthetic oligonucleotide
  Sense strand starting at position 3473 of SEQ ID NO: 588806
uggugugugggauaagauu

SEQ ID NO: 891087 - RNA, 19 nt, Artificial Sequence
  Description of Artificial Sequence: Synthetic oligonucleotide
  Antisense strand to SEQ ID NO: 891086
aaucuuaucccacacacca

SEQ ID NO: 891088 - RNA, 19 nt, Artificial Sequence
  Description of Artificial Sequence: Synthetic oligonucleotide
  Sense strand starting at position 3695 of SEQ ID NO: 588806
agacauuagccauggagug

SEQ ID NO: 891089 - RNA, 19 nt, Artificial Sequence
  Description of Artificial Sequence: Synthetic oligonucleotide
  Antisense strand to SEQ ID NO: 891088
cacuccauggcuaaugucu

SEQ ID NO: 891090 - RNA, 19 nt, Artificial Sequence
  Description of Artificial Sequence: Synthetic oligonucleotide
  Sense strand starting at position 3696 of SEQ ID NO: 588806
gacauuagccauggaguga

SEQ ID NO: 891091 - RNA, 19 nt, Artificial Sequence
  Description of Artificial Sequence: Synthetic oligonucleotide
  Antisense strand to SEQ ID NO: 891090
ucacuccauggcuaauguc

SEQ ID NO: 891092 - RNA, 19 nt, Artificial Sequence
  Description of Artificial Sequence: Synthetic oligonucleotide
  Sense strand starting at position 3739 of SEQ ID NO: 588806
cuaugcugugaugggcaaa

SEQ ID NO: 891093 - RNA, 19 nt, Artificial Sequence
  Description of Artificial Sequence: Synthetic oligonucleotide
  Antisense strand to SEQ ID NO: 891092
uuugcccaucacagcauag

SEQ ID NO: 891094 - RNA, 19 nt, Artificial Sequence
  Description of Artificial Sequence: Synthetic oligonucleotide
  Sense strand starting at position 3808 of SEQ ID NO: 588806
ucaucaaugcucuggacca

SEQ ID NO: 891095 - RNA, 19 nt, Artificial Sequence
  Description of Artificial Sequence: Synthetic oligonucleotide
  Antisense strand to SEQ ID NO: 891094
ugguccagagcauugauga

SEQ ID NO: 891096 - RNA, 19 nt, Artificial Sequence
  Description of Artificial Sequence: Synthetic oligonucleotide
  Sense strand starting at position 3810 of SEQ ID NO: 588806
aucaaugcucuggaccaua

SEQ ID NO: 891097 - RNA, 19 nt, Artificial Sequence
  Description of Artificial Sequence: Synthetic oligonucleotide
  Antisense strand to SEQ ID NO: 891096
uaugguccagagcauugau

SEQ ID NO: 891098 - RNA, 19 nt, Artificial Sequence
  Description of Artificial Sequence: Synthetic oligonucleotide
  Sense strand starting at position 86 of SEQ ID NO: 588807
cccuucucucgaggaacua

SEQ ID NO: 891099 - RNA, 19 nt, Artificial Sequence
  Description of Artificial Sequence: Synthetic oligonucleotide
  Antisense strand to SEQ ID NO: 891098
uaguuccucgagagaaggg

SEQ ID NO: 891100 - RNA, 19 nt, Artificial Sequence
  Description of Artificial Sequence: Synthetic oligonucleotide
  Sense strand starting at position 147 of SEQ ID NO: 588807
uauguaaaugauggaaugu

SEQ ID NO: 891101 - RNA, 19 nt, Artificial Sequence
  Description of Artificial Sequence: Synthetic oligonucleotide
  Antisense strand to SEQ ID NO: 891100
acauuccaucauuuacaua

SEQ ID NO: 891102 - RNA, 19 nt, Artificial Sequence
  Description of Artificial Sequence: Synthetic oligonucleotide
  Sense strand starting at position 228 of SEQ ID NO: 588807
accagaggccugcaguuau

SEQ ID NO: 891103 - RNA, 19 nt, Artificial Sequence
  Description of Artificial Sequence: Synthetic oligonucleotide
  Antisense strand to SEQ ID NO: 891102
auaacugcaggccucuggu

SEQ ID NO: 891104 - RNA, 19 nt, Artificial Sequence
  Description of Artificial Sequence: Synthetic oligonucleotide
  Sense strand starting at position 348 of SEQ ID NO: 588807
agcuauauuccugggaaug

SEQ ID NO: 891105 - RNA, 19 nt, Artificial Sequence
  Description of Artificial Sequence: Synthetic oligonucleotide
  Antisense strand to SEQ ID NO: 891104
cauucccaggaauauagcu

SEQ ID NO: 891106 - RNA, 19 nt, Artificial Sequence
  Description of Artificial Sequence: Synthetic oligonucleotide
  Sense strand starting at position 349 of SEQ ID NO: 588807
gcuauauuccugggaauga

SEQ ID NO: 891107 - RNA, 19 nt, Artificial Sequence
  Description of Artificial Sequence: Synthetic oligonucleotide
  Antisense strand to SEQ ID NO: 891106
ucauucccaggaauauagc

SEQ ID NO: 891108 - RNA, 19 nt, Artificial Sequence
  Description of Artificial Sequence: Synthetic oligonucleotide
  Sense strand starting at position 360 of SEQ ID NO: 588807
gggaaugacucuccaccau

SEQ ID NO: 891109 - RNA, 19 nt, Artificial Sequence
  Description of Artificial Sequence: Synthetic oligonucleotide
  Antisense strand to SEQ ID NO: 891108
augguggagagucauuccc

SEQ ID NO: 891110 - RNA, 19 nt, Artificial Sequence
  Description of Artificial Sequence: Synthetic oligonucleotide
  Sense strand starting at position 504 of SEQ ID NO: 588807
accuuaugucaauggaaag

SEQ ID NO: 891111 - RNA, 19 nt, Artificial Sequence
  Description of Artificial Sequence: Synthetic oligonucleotide
  Antisense strand to SEQ ID NO: 891110
cuuuccauugacauaaggu

SEQ ID NO: 891112 - RNA, 19 nt, Artificial Sequence
  Description of Artificial Sequence: Synthetic oligonucleotide
  Sense strand starting at position 543 of SEQ ID NO: 588807
cccagauuccucuggacuu

SEQ ID NO: 891113 - RNA, 19 nt, Artificial Sequence
  Description of Artificial Sequence: Synthetic oligonucleotide
  Antisense strand to SEQ ID NO: 891112
aaguccagaggaaucuggg

SEQ ID NO: 891114 - RNA, 19 nt, Artificial Sequence
  Description of Artificial Sequence: Synthetic oligonucleotide
  Sense strand starting at position 601 of SEQ ID NO: 588807
uaucuaaggccagagguau

SEQ ID NO: 891115 - RNA, 19 nt, Artificial Sequence
  Description of Artificial Sequence: Synthetic oligonucleotide
  Antisense strand to SEQ ID NO: 891114
auaccucuggccuuagaua

SEQ ID NO: 891116 - RNA, 19 nt, Artificial Sequence
  Description of Artificial Sequence: Synthetic oligonucleotide
  Sense strand starting at position 614 of SEQ ID NO: 588807
agguauuacuguccuuaau

SEQ ID NO: 891117 - RNA, 19 nt, Artificial Sequence
  Description of Artificial Sequence: Synthetic oligonucleotide
  Antisense strand to SEQ ID NO: 891116
auuaaggacaguaauaccu

SEQ ID NO: 891118 - RNA, 19 nt, Artificial Sequence
  Description of Artificial Sequence: Synthetic oligonucleotide
  Sense strand starting at position 1128 of SEQ ID NO: 588807
ggccuagaauaucugaaga

SEQ ID NO: 891119 - RNA, 19 nt, Artificial Sequence
  Description of Artificial Sequence: Synthetic oligonucleotide
  Antisense strand to SEQ ID NO: 891118
ucuucagauauucuaggcc

SEQ ID NO: 891120 - RNA, 19 nt, Artificial Sequence
  Description of Artificial Sequence: Synthetic oligonucleotide
  Sense strand starting at position 1200 of SEQ ID NO: 588807
uaggaagugugcuuagaaa

SEQ ID NO: 891121 - RNA, 19 nt, Artificial Sequence
  Description of Artificial Sequence: Synthetic oligonucleotide
  Antisense strand to SEQ ID NO: 891120
uuucuaagcacacuuccua

SEQ ID NO: 891122 - RNA, 19 nt, Artificial Sequence
  Description of Artificial Sequence: Synthetic oligonucleotide
  Sense strand starting at position 1579 of SEQ ID NO: 588807
gucucuagcagggaucaca

SEQ ID NO: 891123 - RNA, 19 nt, Artificial Sequence
  Description of Artificial Sequence: Synthetic oligonucleotide
  Antisense strand to SEQ ID NO: 891122
ugugaucccugcuagagac

SEQ ID NO: 891124 - RNA, 19 nt, Artificial Sequence
  Description of Artificial Sequence: Synthetic oligonucleotide
  Sense strand starting at position 1622 of SEQ ID NO: 588807
aaggacuaguuucuuggaa

SEQ ID NO: 891125 - RNA, 19 nt, Artificial Sequence
  Description of Artificial Sequence: Synthetic oligonucleotide
  Antisense strand to SEQ ID NO: 891124
uuccaagaaacuaguccuu

SEQ ID NO: 891126 - RNA, 19 nt, Artificial Sequence
  Description of Artificial Sequence: Synthetic oligonucleotide
  Sense strand starting at position 1722 of SEQ ID NO: 588807
agcaauacuggcuauuaau

SEQ ID NO: 891127 - RNA, 19 nt, Artificial Sequence
  Description of Artificial Sequence: Synthetic oligonucleotide
  Antisense strand to SEQ ID NO: 891126
auuaauagccaguauugcu

SEQ ID NO: 891128 - RNA, 19 nt, Artificial Sequence
  Description of Artificial Sequence: Synthetic oligonucleotide
  Sense strand starting at position 2090 of SEQ ID NO: 588807
uagggaugcugcucauauu

SEQ ID NO: 891129 - RNA, 19 nt, Artificial Sequence
  Description of Artificial Sequence: Synthetic oligonucleotide
  Antisense strand to SEQ ID NO: 891128
aauaugagcagcaucccua

SEQ ID NO: 891130 - RNA, 19 nt, Artificial Sequence
  Description of Artificial Sequence: Synthetic oligonucleotide
  Sense strand starting at position 2091 of SEQ ID NO: 588807
agggaugcugcucauauua

SEQ ID NO: 891131 - RNA, 19 nt, Artificial Sequence
  Description of Artificial Sequence: Synthetic oligonucleotide
  Antisense strand to SEQ ID NO: 891130
uaauaugagcagcaucccu

SEQ ID NO: 891132 - RNA, 19 nt, Artificial Sequence
  Description of Artificial Sequence: Synthetic oligonucleotide
  Sense strand starting at position 2123 of SEQ ID NO: 588807
uuuguacagucauugaguu

SEQ ID NO: 891133 - RNA, 19 nt, Artificial Sequence
  Description of Artificial Sequence: Synthetic oligonucleotide
  Antisense strand to SEQ ID NO: 891132
aacucaaugacuguacaaa

SEQ ID NO: 891134 - RNA, 19 nt, Artificial Sequence
  Description of Artificial Sequence: Synthetic oligonucleotide
  Sense strand starting at position 2124 of SEQ ID NO: 588807
uuguacagucauugaguua

SEQ ID NO: 891135 - RNA, 19 nt, Artificial Sequence
  Description of Artificial Sequence: Synthetic oligonucleotide
  Antisense strand to SEQ ID NO: 891134
uaacucaaugacuguacaa

SEQ ID NO: 891136 - RNA, 19 nt, Artificial Sequence
  Description of Artificial Sequence: Synthetic oligonucleotide
  Sense strand starting at position 2125 of SEQ ID NO: 588807
uguacagucauugaguuaa

SEQ ID NO: 891137 - RNA, 19 nt, Artificial Sequence
  Description of Artificial Sequence: Synthetic oligonucleotide
  Antisense strand to SEQ ID NO: 891136
uuaacucaaugacuguaca

SEQ ID NO: 891138 - RNA, 19 nt, Artificial Sequence
  Description of Artificial Sequence: Synthetic oligonucleotide
  Sense strand starting at position 2225 of SEQ ID NO: 588807
ccuguauucugagccuaau

SEQ ID NO: 891139 - RNA, 19 nt, Artificial Sequence
  Description of Artificial Sequence: Synthetic oligonucleotide
  Antisense strand to SEQ ID NO: 891138
auuaggcucagaauacagg

SEQ ID NO: 891140 - RNA, 19 nt, Artificial Sequence
  Description of Artificial Sequence: Synthetic oligonucleotide
  Sense strand starting at position 2260 of SEQ ID NO: 588807
guccacaucuaucuaugua

SEQ ID NO: 891141 - RNA, 19 nt, Artificial Sequence
  Description of Artificial Sequence: Synthetic oligonucleotide
  Antisense strand to SEQ ID NO: 891140
uacauagauagauguggac

SEQ ID NO: 891142 - RNA, 19 nt, Artificial Sequence
  Description of Artificial Sequence: Synthetic oligonucleotide
  Sense strand starting at position 2272 of SEQ ID NO: 588807
cuauguaguuggccagaga

SEQ ID NO: 891143 - RNA, 19 nt, Artificial Sequence
  Description of Artificial Sequence: Synthetic oligonucleotide
  Antisense strand to SEQ ID NO: 891142
ucucuggccaacuacauag

SEQ ID NO: 891144 - RNA, 19 nt, Artificial Sequence
  Description of Artificial Sequence: Synthetic oligonucleotide
  Sense strand starting at position 2273 of SEQ ID NO: 588807
uauguaguuggccagagaa

SEQ ID NO: 891145 - RNA, 19 nt, Artificial Sequence
  Description of Artificial Sequence: Synthetic oligonucleotide
  Antisense strand to SEQ ID NO: 891144
uucucuggccaacuacaua

SEQ ID NO: 891146 - RNA, 19 nt, Artificial Sequence
  Description of Artificial Sequence: Synthetic oligonucleotide
  Sense strand starting at position 2296 of SEQ ID NO: 588807
cugaaauagugaguguaaa

SEQ ID NO: 891147 - RNA, 19 nt, Artificial Sequence
  Description of Artificial Sequence: Synthetic oligonucleotide
  Antisense strand to SEQ ID NO: 891146
uuuacacucacuauuucag

SEQ ID NO: 891148 - RNA, 19 nt, Artificial Sequence
  Description of Artificial Sequence: Synthetic oligonucleotide
  Sense strand starting at position 2326 of SEQ ID NO: 588807
acuaacaugguuuggagau

SEQ ID NO: 891149 - RNA, 19 nt, Artificial Sequence
  Description of Artificial Sequence: Synthetic oligonucleotide
  Antisense strand to SEQ ID NO: 891148
aucuccaaaccauguuagu

SEQ ID NO: 891150 - RNA, 19 nt, Artificial Sequence
  Description of Artificial Sequence: Synthetic oligonucleotide
  Sense strand starting at position 2342 of SEQ ID NO: 588807
gauuauauuucccaggguu

SEQ ID NO: 891151 - RNA, 19 nt, Artificial Sequence
  Description of Artificial Sequence: Synthetic oligonucleotide
  Antisense strand to SEQ ID NO: 891150
aacccugggaaauauaauc

SEQ ID NO: 891152 - RNA, 19 nt, Artificial Sequence
  Description of Artificial Sequence: Synthetic oligonucleotide
  Sense strand starting at position 2363 of SEQ ID NO: 588807
guuugugauugucuaaauu

SEQ ID NO: 891153 - RNA, 19 nt, Artificial Sequence
  Description of Artificial Sequence: Synthetic oligonucleotide
  Antisense strand to SEQ ID NO: 891152
aauuuagacaaucacaaac

SEQ ID NO: 891154 - RNA, 19 nt, Artificial Sequence
  Description of Artificial Sequence: Synthetic oligonucleotide
  Sense strand starting at position 2371 of SEQ ID NO: 588807
uugucuaaauuugagggau

SEQ ID NO: 891155 - RNA, 19 nt, Artificial Sequence
  Description of Artificial Sequence: Synthetic oligonucleotide
  Antisense strand to SEQ ID NO: 891154
aucccucaaauuuagacaa

SEQ ID NO: 891156 - RNA, 19 nt, Artificial Sequence
  Description of Artificial Sequence: Synthetic oligonucleotide
  Sense strand starting at position 2373 of SEQ ID NO: 588807
gucuaaauuugagggauug

SEQ ID NO: 891157 - RNA, 19 nt, Artificial Sequence
  Description of Artificial Sequence: Synthetic oligonucleotide
  Antisense strand to SEQ ID NO: 891156
caaucccucaaauuuagac

SEQ ID NO: 891158 - RNA, 19 nt, Artificial Sequence
  Description of Artificial Sequence: Synthetic oligonucleotide
  Sense strand starting at position 2383 of SEQ ID NO: 588807
gagggauugcuaugugaaa

SEQ ID NO: 891159 - RNA, 19 nt, Artificial Sequence
  Description of Artificial Sequence: Synthetic oligonucleotide
  Antisense strand to SEQ ID NO: 891158
uuucacauagcaaucccuc

SEQ ID NO: 891160 - RNA, 19 nt, Artificial Sequence
  Description of Artificial Sequence: Synthetic oligonucleotide
  Sense strand starting at position 2384 of SEQ ID NO: 588807
agggauugcuaugugaaag

SEQ ID NO: 891161 - RNA, 19 nt, Artificial Sequence
  Description of Artificial Sequence: Synthetic oligonucleotide
  Antisense strand to SEQ ID NO: 891160
cuuucacauagcaaucccu

SEQ ID NO: 891162 - RNA, 19 nt, Artificial Sequence
  Description of Artificial Sequence: Synthetic oligonucleotide
  Sense strand starting at position 2385 of SEQ ID NO: 588807
gggauugcuaugugaaagg

SEQ ID NO: 891163 - RNA, 19 nt, Artificial Sequence
  Description of Artificial Sequence: Synthetic oligonucleotide
  Antisense strand to SEQ ID NO: 891162
ccuuucacauagcaauccc

SEQ ID NO: 891164 - RNA, 19 nt, Artificial Sequence
  Description of Artificial Sequence: Synthetic oligonucleotide
  Sense strand starting at position 2514 of SEQ ID NO: 588807
guaacuguguacucaucaa

SEQ ID NO: 891165 - RNA, 19 nt, Artificial Sequence
  Description of Artificial Sequence: Synthetic oligonucleotide
  Antisense strand to SEQ ID NO: 891164
uugaugaguacacaguuac

SEQ ID NO: 891166 - RNA, 19 nt, Artificial Sequence
  Description of Artificial Sequence: Synthetic oligonucleotide
  Sense strand starting at position 2574 of SEQ ID NO: 588807
ccaauaaaguaguugaauu

SEQ ID NO: 891167 - RNA, 19 nt, Artificial Sequence
  Description of Artificial Sequence: Synthetic oligonucleotide
  Antisense strand to SEQ ID NO: 891166
aauucaacuacuuuauugg

SEQ ID NO: 891168 - RNA, 19 nt, Artificial Sequence
  Description of Artificial Sequence: Synthetic oligonucleotide
  Sense strand starting at position 2622 of SEQ ID NO: 588807
cugccuaagucuuuagaua

SEQ ID NO: 891169 - RNA, 19 nt, Artificial Sequence
  Description of Artificial Sequence: Synthetic oligonucleotide
  Antisense strand to SEQ ID NO: 891168
uaucuaaagacuuaggcag

SEQ ID NO: 891170 - RNA, 19 nt, Artificial Sequence
  Description of Artificial Sequence: Synthetic oligonucleotide
  Sense strand starting at position 2623 of SEQ ID NO: 588807
ugccuaagucuuuagauaa

SEQ ID NO: 891171 - RNA, 19 nt, Artificial Sequence
  Description of Artificial Sequence: Synthetic oligonucleotide
  Antisense strand to SEQ ID NO: 891170
uuaucuaaagacuuaggca

SEQ ID NO: 891172 - RNA, 19 nt, Artificial Sequence
  Description of Artificial Sequence: Synthetic oligonucleotide
  Sense strand starting at position 2702 of SEQ ID NO: 588807
uuggguuugcuccagugga

SEQ ID NO: 891173 - RNA, 19 nt, Artificial Sequence
  Description of Artificial Sequence: Synthetic oligonucleotide
  Antisense strand to SEQ ID NO: 891172
uccacuggagcaaacccaa

SEQ ID NO: 891174 - RNA, 19 nt, Artificial Sequence
  Description of Artificial Sequence: Synthetic oligonucleotide
  Sense strand starting at position 2724 of SEQ ID NO: 588807
gucugaggguaggcuaaua

SEQ ID NO: 891175 - RNA, 19 nt, Artificial Sequence
  Description of Artificial Sequence: Synthetic oligonucleotide
  Antisense strand to SEQ ID NO: 891174
uauuagccuacccucagac

SEQ ID NO: 891176 - RNA, 19 nt, Artificial Sequence
  Description of Artificial Sequence: Synthetic oligonucleotide
  Sense strand starting at position 3126 of SEQ ID NO: 588807
agaaauaauuaugagagga

SEQ ID NO: 891177 - RNA, 19 nt, Artificial Sequence
  Description of Artificial Sequence: Synthetic oligonucleotide
  Antisense strand to SEQ ID NO: 891176
uccucucauaauuauuucu

SEQ ID NO: 891178 - RNA, 19 nt, Artificial Sequence
  Description of Artificial Sequence: Synthetic oligonucleotide
  Sense strand starting at position 1 of SEQ ID NO: 588808
cccugauccuagcuugcau

SEQ ID NO: 891179 - RNA, 19 nt, Artificial Sequence
  Description of Artificial Sequence: Synthetic oligonucleotide
  Antisense strand to SEQ ID NO: 891178
augcaagcuaggaucaggg

SEQ ID NO: 891180 - RNA, 19 nt, Artificial Sequence
  Description of Artificial Sequence: Synthetic oligonucleotide
  Sense strand starting at position 623 of SEQ ID NO: 588808
cacauuuggcgccgugaaa

SEQ ID NO: 891181 - RNA, 19 nt, Artificial Sequence
  Description of Artificial Sequence: Synthetic oligonucleotide
  Antisense strand to SEQ ID NO: 891180
uuucacggcgccaaaugug

SEQ ID NO: 891182 - RNA, 19 nt, Artificial Sequence
  Description of Artificial Sequence: Synthetic oligonucleotide
  Sense strand starting at position 641 of SEQ ID NO: 588808
agcccucaguacguagaaa

SEQ ID NO: 891183 - RNA, 19 nt, Artificial Sequence
  Description of Artificial Sequence: Synthetic oligonucleotide
  Antisense strand to SEQ ID NO: 891182
uuucuacguacugagggcu

SEQ ID NO: 891184 - RNA, 19 nt, Artificial Sequence
  Description of Artificial Sequence: Synthetic oligonucleotide
  Sense strand starting at position 642 of SEQ ID NO: 588808
gcccucaguacguagaaau

SEQ ID NO: 891185 - RNA, 19 nt, Artificial Sequence
  Description of Artificial Sequence: Synthetic oligonucleotide
  Antisense strand to SEQ ID NO: 891184
auuucuacguacugagggc

SEQ ID NO: 891186 - RNA, 19 nt, Artificial Sequence
  Description of Artificial Sequence: Synthetic oligonucleotide
  Sense strand starting at position 652 of SEQ ID NO: 588808
cguagaaauguuuauucuu

SEQ ID NO: 891187 - RNA, 19 nt, Artificial Sequence
  Description of Artificial Sequence: Synthetic oligonucleotide
  Antisense strand to SEQ ID NO: 891186
aagaauaaacauuucuacg

SEQ ID NO: 891188 - RNA, 19 nt, Artificial Sequence
  Description of Artificial Sequence: Synthetic oligonucleotide
  Sense strand starting at position 661 of SEQ ID NO: 588808
guuuauucuuauucuggga

SEQ ID NO: 891189 - RNA, 19 nt, Artificial Sequence
  Description of Artificial Sequence: Synthetic oligonucleotide
  Antisense strand to SEQ ID NO: 891188
ucccagaauaagaauaaac

SEQ ID NO: 891190 - RNA, 19 nt, Artificial Sequence
  Description of Artificial Sequence: Synthetic oligonucleotide
  Sense strand starting at position 663 of SEQ ID NO: 588808
uuauucuuauucugggaau

SEQ ID NO: 891191 - RNA, 19 nt, Artificial Sequence
  Description of Artificial Sequence: Synthetic oligonucleotide
  Antisense strand to SEQ ID NO: 891190
auucccagaauaagaauaa

SEQ ID NO: 891192 - RNA, 19 nt, Artificial Sequence
  Description of Artificial Sequence: Synthetic oligonucleotide
  Sense strand starting at position 665 of SEQ ID NO: 588808
auucuuauucugggaauau

SEQ ID NO: 891193 - RNA, 19 nt, Artificial Sequence
  Description of Artificial Sequence: Synthetic oligonucleotide
  Antisense strand to SEQ ID NO: 891192
auauucccagaauaagaau

SEQ ID NO: 891194 - RNA, 19 nt, Artificial Sequence
  Description of Artificial Sequence: Synthetic oligonucleotide
  Sense strand starting at position 666 of SEQ ID NO: 588808
uucuuauucugggaauaug

SEQ ID NO: 891195 - RNA, 19 nt, Artificial Sequence
  Description of Artificial Sequence: Synthetic oligonucleotide
  Antisense strand to SEQ ID NO: 891194
cauauucccagaauaagaa

SEQ ID NO: 891196 - RNA, 19 nt, Artificial Sequence
  Description of Artificial Sequence: Synthetic oligonucleotide
  Sense strand starting at position 677 of SEQ ID NO: 588808
ggaauauggaucugagcac

SEQ ID NO: 891197 - RNA, 19 nt, Artificial Sequence
  Description of Artificial Sequence: Synthetic oligonucleotide
  Antisense strand to SEQ ID NO: 891196
gugcucagauccauauucc

SEQ ID NO: 891198 - RNA, 19 nt, Artificial Sequence
  Description of Artificial Sequence: Synthetic oligonucleotide
  Sense strand starting at position 678 of SEQ ID NO: 588808
gaauauggaucugagcaca

SEQ ID NO: 891199 - RNA, 19 nt, Artificial Sequence
  Description of Artificial Sequence: Synthetic oligonucleotide
  Antisense strand to SEQ ID NO: 891198
ugugcucagauccauauuc

SEQ ID NO: 891200 - RNA, 19 nt, Artificial Sequence
  Description of Artificial Sequence: Synthetic oligonucleotide
  Sense strand starting at position 1247 of SEQ ID NO: 588808
cccagcucccucugugaaa

SEQ ID NO: 891201 - RNA, 19 nt, Artificial Sequence
  Description of Artificial Sequence: Synthetic oligonucleotide
  Antisense strand to SEQ ID NO: 891200
uuucacagagggagcuggg

SEQ ID NO: 891202 - RNA, 19 nt, Artificial Sequence
  Description of Artificial Sequence: Synthetic oligonucleotide
  Sense strand starting at position 2161 of SEQ ID NO: 588808
agaauucagcacuggguga

SEQ ID NO: 891203 - RNA, 19 nt, Artificial Sequence
  Description of Artificial Sequence: Synthetic oligonucleotide
  Antisense strand to SEQ ID NO: 891202
ucacccagugcugaauucu

SEQ ID NO: 891204 - RNA, 19 nt, Artificial Sequence
  Description of Artificial Sequence: Synthetic oligonucleotide
  Sense strand starting at position 2175 of SEQ ID NO: 588808
ggugaaacugcuggcaaga

SEQ ID NO: 891205 - RNA, 19 nt, Artificial Sequence
  Description of Artificial Sequence: Synthetic oligonucleotide
  Antisense strand to SEQ ID NO: 891204
ucuugccagcaguuucacc

SEQ ID NO: 891206 - RNA, 19 nt, Artificial Sequence
  Description of Artificial Sequence: Synthetic oligonucleotide
  Sense strand starting at position 2177 of SEQ ID NO: 588808
ugaaacugcuggcaagaaa

SEQ ID NO: 891207 - RNA, 19 nt, Artificial Sequence
  Description of Artificial Sequence: Synthetic oligonucleotide
  Antisense strand to SEQ ID NO: 891206
uuucuugccagcaguuuca

SEQ ID NO: 891208 - RNA, 19 nt, Artificial Sequence
  Description of Artificial Sequence: Synthetic oligonucleotide
  Sense strand starting at position 2312 of SEQ ID NO: 588808
gcgacauccagucaugaau

SEQ ID NO: 891209 - RNA, 19 nt, Artificial Sequence
  Description of Artificial Sequence: Synthetic oligonucleotide
  Antisense strand to SEQ ID NO: 891208
auucaugacuggaugucgc

SEQ ID NO: 891210 - RNA, 19 nt, Artificial Sequence
  Description of Artificial Sequence: Synthetic oligonucleotide
  Sense strand starting at position 2343 of SEQ ID NO: 588808
cccaacaucuuaguaguuu

SEQ ID NO: 891211 - RNA, 19 nt, Artificial Sequence
  Description of Artificial Sequence: Synthetic oligonucleotide
  Antisense strand to SEQ ID NO: 891210
aaacuacuaagauguuggg

SEQ ID NO: 891212 - RNA, 19 nt, Artificial Sequence
  Description of Artificial Sequence: Synthetic oligonucleotide
  Sense strand starting at position 2383 of SEQ ID NO: 588808
guacaaguccuauaaacuu

SEQ ID NO: 891213 - RNA, 19 nt, Artificial Sequence
  Description of Artificial Sequence: Synthetic oligonucleotide
  Antisense strand to SEQ ID NO: 891212
aaguuuauaggacuuguac

SEQ ID NO: 891214 - RNA, 19 nt, Artificial Sequence
  Description of Artificial Sequence: Synthetic oligonucleotide
  Sense strand starting at position 2428 of SEQ ID NO: 588808
uauuuaauguugugugcau

SEQ ID NO: 891215 - RNA, 19 nt, Artificial Sequence
  Description of Artificial Sequence: Synthetic oligonucleotide
  Antisense strand to SEQ ID NO: 891214
augcacacaacauuaaaua

SEQ ID NO: 891216 - RNA, 19 nt, Artificial Sequence
  Description of Artificial Sequence: Synthetic oligonucleotide
  Sense strand starting at position 2432 of SEQ ID NO: 588808
uaauguugugugcaugguu

SEQ ID NO: 891217 - RNA, 19 nt, Artificial Sequence
  Description of Artificial Sequence: Synthetic oligonucleotide
  Antisense strand to SEQ ID NO: 891216
aaccaugcacacaacauua

SEQ ID NO: 891218 - RNA, 19 nt, Artificial Sequence
  Description of Artificial Sequence: Synthetic oligonucleotide
  Sense strand starting at position 2617 of SEQ ID NO: 588808
uuugguaaguuugaagcau

SEQ ID NO: 891219 - RNA, 19 nt, Artificial Sequence
  Description of Artificial Sequence: Synthetic oligonucleotide
  Antisense strand to SEQ ID NO: 891218
augcuucaaacuuaccaaa

SEQ ID NO: 891220 - RNA, 19 nt, Artificial Sequence
  Description of Artificial Sequence: Synthetic oligonucleotide
  Sense strand starting at position 2683 of SEQ ID NO: 588808
cacccugucuaaugaagga

SEQ ID NO: 891221 - RNA, 19 nt, Artificial Sequence
  Description of Artificial Sequence: Synthetic oligonucleotide
  Antisense strand to SEQ ID NO: 891220
uccuucauuagacagggug

SEQ ID NO: 891222 - RNA, 19 nt, Artificial Sequence
  Description of Artificial Sequence: Synthetic oligonucleotide
  Sense strand starting at position 2687 of SEQ ID NO: 588808
cugucuaaugaaggagagu

SEQ ID NO: 891223 - RNA, 19 nt, Artificial Sequence
  Description of Artificial Sequence: Synthetic oligonucleotide
  Antisense strand to SEQ ID NO: 891222
acucuccuucauuagacag

SEQ ID NO: 891224 - RNA, 19 nt, Artificial Sequence
  Description of Artificial Sequence: Synthetic oligonucleotide
  Sense strand starting at position 2734 of SEQ ID NO: 588808
ggagcuagucuuggguuca

SEQ ID NO: 891225 - RNA, 19 nt, Artificial Sequence
  Description of Artificial Sequence: Synthetic oligonucleotide
  Antisense strand to SEQ ID NO: 891224
ugaacccaagacuagcucc

SEQ ID NO: 891226 - RNA, 19 nt, Artificial Sequence
  Description of Artificial Sequence: Synthetic oligonucleotide
  Sense strand starting at position 2795 of SEQ ID NO: 588808
guuuccugaucucucaagu

SEQ ID NO: 891227 - RNA, 19 nt, Artificial Sequence
  Description of Artificial Sequence: Synthetic oligonucleotide
  Antisense strand to SEQ ID NO: 891226
acuugagagaucaggaaac

SEQ ID NO: 891228 - RNA, 19 nt, Artificial Sequence
  Description of Artificial Sequence: Synthetic oligonucleotide
  Sense strand starting at position 2918 of SEQ ID NO: 588808
cucuuugcacaguaguuua

SEQ ID NO: 891229 - RNA, 19 nt, Artificial Sequence
  Description of Artificial Sequence: Synthetic oligonucleotide
  Antisense strand to SEQ ID NO: 891228
uaaacuacugugcaaagag

SEQ ID NO: 891230 - RNA, 19 nt, Artificial Sequence
  Description of Artificial Sequence: Synthetic oligonucleotide
  Sense strand starting at position 2929 of SEQ ID NO: 588808
guaguuuauucacguguaa

SEQ ID NO: 891231 - RNA, 19 nt, Artificial Sequence
  Description of Artificial Sequence: Synthetic oligonucleotide
  Antisense strand to SEQ ID NO: 891230
uuacacgugaauaaacuac

SEQ ID NO: 891232 - RNA, 19 nt, Artificial Sequence
  Description of Artificial Sequence: Synthetic oligonucleotide
  Sense strand starting at position 2947 of SEQ ID NO: 588808
aaauaaggguaaggucaau

SEQ ID NO: 891233 - RNA, 19 nt, Artificial Sequence
  Description of Artificial Sequence: Synthetic oligonucleotide
  Antisense strand to SEQ ID NO: 891232
auugaccuuacccuuauuu

SEQ ID NO: 891234 - RNA, 19 nt, Artificial Sequence
  Description of Artificial Sequence: Synthetic oligonucleotide
  Sense strand starting at position 3069 of SEQ ID NO: 588808
uucuuauuauuaccguaga

SEQ ID NO: 891235 - RNA, 19 nt, Artificial Sequence
  Description of Artificial Sequence: Synthetic oligonucleotide
  Antisense strand to SEQ ID NO: 891234
ucuacgguaauaauaagaa

SEQ ID NO: 891236 - RNA, 19 nt, Artificial Sequence
  Description of Artificial Sequence: Synthetic oligonucleotide
  Sense strand starting at position 3070 of SEQ ID NO: 588808
ucuuauuauuaccguagau

SEQ ID NO: 891237 - RNA, 19 nt, Artificial Sequence
  Description of Artificial Sequence: Synthetic oligonucleotide
  Antisense strand to SEQ ID NO: 891236
aucuacgguaauaauaaga

SEQ ID NO: 891238 - RNA, 19 nt, Artificial Sequence
  Description of Artificial Sequence: Synthetic oligonucleotide
  Sense strand starting at position 3072 of SEQ ID NO: 588808
uuauuauuaccguagaugu

SEQ ID NO: 891239 - RNA, 19 nt, Artificial Sequence
  Description of Artificial Sequence: Synthetic oligonucleotide
  Antisense strand to SEQ ID NO: 891238
acaucuacgguaauaauaa

SEQ ID NO: 891240 - RNA, 19 nt, Artificial Sequence
  Description of Artificial Sequence: Synthetic oligonucleotide
  Sense strand starting at position 3079 of SEQ ID NO: 588808
uaccguagauguucuaaga

SEQ ID NO: 891241 - RNA, 19 nt, Artificial Sequence
  Description of Artificial Sequence: Synthetic oligonucleotide
  Antisense strand to SEQ ID NO: 891240
ucuuagaacaucuacggua

SEQ ID NO: 891242 - RNA, 19 nt, Artificial Sequence
  Description of Artificial Sequence: Synthetic oligonucleotide
  Sense strand starting at position 3090 of SEQ ID NO: 588808
uucuaagacucuucgucua

SEQ ID NO: 891243 - RNA, 19 nt, Artificial Sequence
  Description of Artificial Sequence: Synthetic oligonucleotide
  Antisense strand to SEQ ID NO: 891242
uagacgaagagucuuagaa

SEQ ID NO: 891244 - RNA, 19 nt, Artificial Sequence
  Description of Artificial Sequence: Synthetic oligonucleotide
  Sense strand starting at position 3092 of SEQ ID NO: 588808
cuaagacucuucgucuaag

SEQ ID NO: 891245 - RNA, 19 nt, Artificial Sequence
  Description of Artificial Sequence: Synthetic oligonucleotide
  Antisense strand to SEQ ID NO: 891244
cuuagacgaagagucuuag

SEQ ID NO: 891246 - RNA, 19 nt, Artificial Sequence
  Description of Artificial Sequence: Synthetic oligonucleotide
  Sense strand starting at position 3095 of SEQ ID NO: 588808
agacucuucgucuaagcuu

SEQ ID NO: 891247 - RNA, 19 nt, Artificial Sequence
  Description of Artificial Sequence: Synthetic oligonucleotide
  Antisense strand to SEQ ID NO: 891246
aagcuuagacgaagagucu

SEQ ID NO: 891248 - RNA, 19 nt, Artificial Sequence
  Description of Artificial Sequence: Synthetic oligonucleotide
  Sense strand starting at position 3600 of SEQ ID NO: 588808
agguuaagugaagaugguu

SEQ ID NO: 891249 - RNA, 19 nt, Artificial Sequence
  Description of Artificial Sequence: Synthetic oligonucleotide
  Antisense strand to SEQ ID NO: 891248
aaccaucuucacuuaaccu

SEQ ID NO: 891250 - RNA, 19 nt, Artificial Sequence
  Description of Artificial Sequence: Synthetic oligonucleotide
  Sense strand starting at position 3666 of SEQ ID NO: 588808
ugcaauuggcuguggagua

SEQ ID NO: 891251 - RNA, 19 nt, Artificial Sequence
  Description of Artificial Sequence: Synthetic oligonucleotide
  Antisense strand to SEQ ID NO: 891250
uacuccacagccaauugca

SEQ ID NO: 891252 - RNA, 19 nt, Artificial Sequence
  Description of Artificial Sequence: Synthetic oligonucleotide
  Sense strand starting at position 3667 of SEQ ID NO: 588808
gcaauuggcuguggaguaa

SEQ ID NO: 891253 - RNA, 19 nt, Artificial Sequence
  Description of Artificial Sequence: Synthetic oligonucleotide
  Antisense strand to SEQ ID NO: 891252
uuacuccacagccaauugc

SEQ ID NO: 891254 - RNA, 19 nt, Artificial Sequence
  Description of Artificial Sequence: Synthetic oligonucleotide
  Sense strand starting at position 3740 of SEQ ID NO: 588808
gaaggcuuucuaggguagu

SEQ ID NO: 891255 - RNA, 19 nt, Artificial Sequence
  Description of Artificial Sequence: Synthetic oligonucleotide
  Antisense strand to SEQ ID NO: 891254
acuacccuagaaagccuuc

SEQ ID NO: 891256 - RNA, 19 nt, Artificial Sequence
  Description of Artificial Sequence: Synthetic oligonucleotide
  Sense strand starting at position 26 of SEQ ID NO: 588809
ggaauaaagugguuuacag

SEQ ID NO: 891257 - RNA, 19 nt, Artificial Sequence
  Description of Artificial Sequence: Synthetic oligonucleotide
  Antisense strand to SEQ ID NO: 891256
cuguaaaccacuuuauucc

SEQ ID NO: 891258 - RNA, 19 nt, Artificial Sequence
  Description of Artificial Sequence: Synthetic oligonucleotide
  Sense strand starting at position 62 of SEQ ID NO: 588809
aggucauauuguuuacuuu

SEQ ID NO: 891259 - RNA, 19 nt, Artificial Sequence
  Description of Artificial Sequence: Synthetic oligonucleotide
  Antisense strand to SEQ ID NO: 891258
aaaguaaacaauaugaccu

SEQ ID NO: 891260 - RNA, 19 nt, Artificial Sequence
  Description of Artificial Sequence: Synthetic oligonucleotide
  Sense strand starting at position 224 of SEQ ID NO: 588809
ugcuuuaaaguugaguuau

SEQ ID NO: 891261 - RNA, 19 nt, Artificial Sequence
  Description of Artificial Sequence: Synthetic oligonucleotide
  Antisense strand to SEQ ID NO: 891260
auaacucaacuuuaaagca

SEQ ID NO: 891262 - RNA, 19 nt, Artificial Sequence
  Description of Artificial Sequence: Synthetic oligonucleotide
  Sense strand starting at position 274 of SEQ ID NO: 588809
uggcauauacauuguaaac

SEQ ID NO: 891263 - RNA, 19 nt, Artificial Sequence
  Description of Artificial Sequence: Synthetic oligonucleotide
  Antisense strand to SEQ ID NO: 891262
guuuacaauguauaugcca

SEQ ID NO: 891264 - RNA, 19 nt, Artificial Sequence
  Description of Artificial Sequence: Synthetic oligonucleotide
  Sense strand starting at position 408 of SEQ ID NO: 588809
auagucauauuguugguau

SEQ ID NO: 891265 - RNA, 19 nt, Artificial Sequence
  Description of Artificial Sequence: Synthetic oligonucleotide
  Antisense strand to SEQ ID NO: 891264
auaccaacaauaugacuau

SEQ ID NO: 891266 - RNA, 19 nt, Artificial Sequence
  Description of Artificial Sequence: Synthetic oligonucleotide
  Sense strand starting at position 448 of SEQ ID NO: 588809
uguucugauuugcauuuga

SEQ ID NO: 891267 - RNA, 19 nt, Artificial Sequence
  Description of Artificial Sequence: Synthetic oligonucleotide
  Antisense strand to SEQ ID NO: 891266
ucaaaugcaaaucagaaca

SEQ ID NO: 891268 - RNA, 19 nt, Artificial Sequence
  Description of Artificial Sequence: Synthetic oligonucleotide
  Sense strand starting at position 488 of SEQ ID NO: 588809
gauggcaaauagucugauu

SEQ ID NO: 891269 - RNA, 19 nt, Artificial Sequence
  Description of Artificial Sequence: Synthetic oligonucleotide
  Antisense strand to SEQ ID NO: 891268
aaucagacuauuugccauc

SEQ ID NO: 891270 - RNA, 19 nt, Artificial Sequence
  Description of Artificial Sequence: Synthetic oligonucleotide
  Sense strand starting at position 567 of SEQ ID NO: 588809
ccaguauuaccagggaagu

SEQ ID NO: 891271 - RNA, 19 nt, Artificial Sequence
  Description of Artificial Sequence: Synthetic oligonucleotide
  Antisense strand to SEQ ID NO: 891270
acuucccugguaauacugg

SEQ ID NO: 891272 - RNA, 19 nt, Artificial Sequence
  Description of Artificial Sequence: Synthetic oligonucleotide
  Sense strand starting at position 568 of SEQ ID NO: 588809
caguauuaccagggaagug

SEQ ID NO: 891273 - RNA, 19 nt, Artificial Sequence
  Description of Artificial Sequence: Synthetic oligonucleotide
  Antisense strand to SEQ ID NO: 891272
cacuucccugguaauacug

SEQ ID NO: 891274 - RNA, 19 nt, Artificial Sequence
  Description of Artificial Sequence: Synthetic oligonucleotide
  Sense strand starting at position 590 of SEQ ID NO: 588809
gaggacugucaagggcauu

SEQ ID NO: 891275 - RNA, 19 nt, Artificial Sequence
  Description of Artificial Sequence: Synthetic oligonucleotide
  Antisense strand to SEQ ID NO: 891274
aaugcccuugacaguccuc

SEQ ID NO: 891276 - RNA, 19 nt, Artificial Sequence
  Description of Artificial Sequence: Synthetic oligonucleotide
  Sense strand starting at position 591 of SEQ ID NO: 588809
aggacugucaagggcauua

SEQ ID NO: 891277 - RNA, 19 nt, Artificial Sequence
  Description of Artificial Sequence: Synthetic oligonucleotide
  Antisense strand to SEQ ID NO: 891276
uaaugcccuugacaguccu

SEQ ID NO: 891278 - RNA, 19 nt, Artificial Sequence
  Description of Artificial Sequence: Synthetic oligonucleotide
  Sense strand starting at position 713 of SEQ ID NO: 588809
uggucaaauuaacuuggaa

SEQ ID NO: 891279 - RNA, 19 nt, Artificial Sequence
  Description of Artificial Sequence: Synthetic oligonucleotide
  Antisense strand to SEQ ID NO: 891278
uuccaaguuaauuugacca

SEQ ID NO: 891280 - RNA, 19 nt, Artificial Sequence
  Description of Artificial Sequence: Synthetic oligonucleotide
  Sense strand starting at position 748 of SEQ ID NO: 588809
ucugacaucgauugguacu

SEQ ID NO: 891281 - RNA, 19 nt, Artificial Sequence
  Description of Artificial Sequence: Synthetic oligonucleotide
  Antisense strand to SEQ ID NO: 891280
aguaccaaucgaugucaga

SEQ ID NO: 891282 - RNA, 19 nt, Artificial Sequence
  Description of Artificial Sequence: Synthetic oligonucleotide
  Sense strand starting at position 812 of SEQ ID NO: 588809
gucguucucauagacaaag

SEQ ID NO: 891283 - RNA, 19 nt, Artificial Sequence
  Description of Artificial Sequence: Synthetic oligonucleotide
  Antisense strand to SEQ ID NO: 891282
cuuugucuaugagaacgac

SEQ ID NO: 891284 - RNA, 19 nt, Artificial Sequence
  Description of Artificial Sequence: Synthetic oligonucleotide
  Sense strand starting at position 988 of SEQ ID NO: 588809
agguguuauaacugggagu

SEQ ID NO: 891285 - RNA, 19 nt, Artificial Sequence
  Description of Artificial Sequence: Synthetic oligonucleotide
  Antisense strand to SEQ ID NO: 891284
acucccaguuauaacaccu

SEQ ID NO: 891286 - RNA, 19 nt, Artificial Sequence
  Description of Artificial Sequence: Synthetic oligonucleotide
  Sense strand starting at position 989 of SEQ ID NO: 588809
gguguuauaacugggaguu

SEQ ID NO: 891287 - RNA, 19 nt, Artificial Sequence
  Description of Artificial Sequence: Synthetic oligonucleotide
  Antisense strand to SEQ ID NO: 891286
aacucccaguuauaacacc

SEQ ID NO: 891288 - RNA, 19 nt, Artificial Sequence
  Description of Artificial Sequence: Synthetic oligonucleotide
  Sense strand starting at position 990 of SEQ ID NO: 588809
guguuauaacugggaguuc

SEQ ID NO: 891289 - RNA, 19 nt, Artificial Sequence
  Description of Artificial Sequence: Synthetic oligonucleotide
  Antisense strand to SEQ ID NO: 891288
gaacucccaguuauaacac

SEQ ID NO: 891290 - RNA, 19 nt, Artificial Sequence
  Description of Artificial Sequence: Synthetic oligonucleotide
  Sense strand starting at position 1001 of SEQ ID NO: 588809
gggaguuccgcggacagau

SEQ ID NO: 891291 - RNA, 19 nt, Artificial Sequence
  Description of Artificial Sequence: Synthetic oligonucleotide
  Antisense strand to SEQ ID NO: 891290
aucuguccgcggaacuccc

SEQ ID NO: 891292 - RNA, 19 nt, Artificial Sequence
  Description of Artificial Sequence: Synthetic oligonucleotide
  Sense strand starting at position 1047 of SEQ ID NO: 588809
cccuauuccgaagagucca

SEQ ID NO: 891293 - RNA, 19 nt, Artificial Sequence
  Description of Artificial Sequence: Synthetic oligonucleotide
  Antisense strand to SEQ ID NO: 891292
uggacucuucggaauaggg

SEQ ID NO: 891294 - RNA, 19 nt, Artificial Sequence
  Description of Artificial Sequence: Synthetic oligonucleotide
  Sense strand starting at position 1139 of SEQ ID NO: 588809
accagaccuuuagugaaga

SEQ ID NO: 891295 - RNA, 19 nt, Artificial Sequence
  Description of Artificial Sequence: Synthetic oligonucleotide
  Antisense strand to SEQ ID NO: 891294
ucuucacuaaaggucuggu

SEQ ID NO: 891296 - RNA, 19 nt, Artificial Sequence
  Description of Artificial Sequence: Synthetic oligonucleotide
  Sense strand starting at position 1192 of SEQ ID NO: 588809
uuauuacaggccuguaaag

SEQ ID NO: 891297 - RNA, 19 nt, Artificial Sequence
  Description of Artificial Sequence: Synthetic oligonucleotide
  Antisense strand to SEQ ID NO: 891296
cuuuacaggccuguaauaa

SEQ ID NO: 891298 - RNA, 19 nt, Artificial Sequence
  Description of Artificial Sequence: Synthetic oligonucleotide
  Sense strand starting at position 1253 of SEQ ID NO: 588809
aacggcgaccuuuaaagua

SEQ ID NO: 891299 - RNA, 19 nt, Artificial Sequence
  Description of Artificial Sequence: Synthetic oligonucleotide
  Antisense strand to SEQ ID NO: 891298
uacuuuaaaggucgccguu

SEQ ID NO: 891300 - RNA, 19 nt, Artificial Sequence
  Description of Artificial Sequence: Synthetic oligonucleotide
  Sense strand starting at position 1300 of SEQ ID NO: 588809
gauuucuaauuguggaaag

SEQ ID NO: 891301 - RNA, 19 nt, Artificial Sequence
  Description of Artificial Sequence: Synthetic oligonucleotide
  Antisense strand to SEQ ID NO: 891300
cuuuccacaauuagaaauc

SEQ ID NO: 891302 - RNA, 19 nt, Artificial Sequence
  Description of Artificial Sequence: Synthetic oligonucleotide
  Sense strand starting at position 1302 of SEQ ID NO: 588809
uuucuaauuguggaaaguu

SEQ ID NO: 891303 - RNA, 19 nt, Artificial Sequence
  Description of Artificial Sequence: Synthetic oligonucleotide
  Antisense strand to SEQ ID NO: 891302
aacuuuccacaauuagaaa

SEQ ID NO: 891304 - RNA, 19 nt, Artificial Sequence
  Description of Artificial Sequence: Synthetic oligonucleotide
  Sense strand starting at position 2191 of SEQ ID NO: 588809
ucuugaagcucugcauaag

SEQ ID NO: 891305 - RNA, 19 nt, Artificial Sequence
  Description of Artificial Sequence: Synthetic oligonucleotide
  Antisense strand to SEQ ID NO: 891304
cuuaugcagagcuucaaga

SEQ ID NO: 891306 - RNA, 19 nt, Artificial Sequence
  Description of Artificial Sequence: Synthetic oligonucleotide
  Sense strand starting at position 2632 of SEQ ID NO: 588809
gcguuuauuuaaucaguaa

SEQ ID NO: 891307 - RNA, 19 nt, Artificial Sequence
  Description of Artificial Sequence: Synthetic oligonucleotide
  Antisense strand to SEQ ID NO: 891306
uuacugauuaaauaaacgc

SEQ ID NO: 891308 - RNA, 19 nt, Artificial Sequence
  Description of Artificial Sequence: Synthetic oligonucleotide
  Sense strand starting at position 2777 of SEQ ID NO: 588809
uaucucuuucgugcugcaa

SEQ ID NO: 891309 - RNA, 19 nt, Artificial Sequence
  Description of Artificial Sequence: Synthetic oligonucleotide
  Antisense strand to SEQ ID NO: 891308
uugcagcacgaaagagaua

SEQ ID NO: 891310 - RNA, 19 nt, Artificial Sequence
  Description of Artificial Sequence: Synthetic oligonucleotide
  Sense strand starting at position 2867 of SEQ ID NO: 588809
cagguaucaccuuagcugu

SEQ ID NO: 891311 - RNA, 19 nt, Artificial Sequence
  Description of Artificial Sequence: Synthetic oligonucleotide
  Antisense strand to SEQ ID NO: 891310
acagcuaaggugauaccug

SEQ ID NO: 891312 - RNA, 19 nt, Artificial Sequence
  Description of Artificial Sequence: Synthetic oligonucleotide
  Sense strand starting at position 2906 of SEQ ID NO: 588809
agugguaacgucugaauag

SEQ ID NO: 891313 - RNA, 19 nt, Artificial Sequence
  Description of Artificial Sequence: Synthetic oligonucleotide
  Antisense strand to SEQ ID NO: 891312
cuauucagacguuaccacu

SEQ ID NO: 891314 - RNA, 19 nt, Artificial Sequence
  Description of Artificial Sequence: Synthetic oligonucleotide
  Sense strand starting at position 2986 of SEQ ID NO: 588809
auuugcuucucauugucua

SEQ ID NO: 891315 - RNA, 19 nt, Artificial Sequence
  Description of Artificial Sequence: Synthetic oligonucleotide
  Antisense strand to SEQ ID NO: 891314
uagacaaugagaagcaaau

SEQ ID NO: 891316 - RNA, 19 nt, Artificial Sequence
  Description of Artificial Sequence: Synthetic oligonucleotide
  Sense strand starting at position 3516 of SEQ ID NO: 588809
acugcauucccuggaaggu

SEQ ID NO: 891317 - RNA, 19 nt, Artificial Sequence
  Description of Artificial Sequence: Synthetic oligonucleotide
  Antisense strand to SEQ ID NO: 891316
accuuccagggaaugcagu

SEQ ID NO: 891318 - RNA, 19 nt, Artificial Sequence
  Description of Artificial Sequence: Synthetic oligonucleotide
  Sense strand starting at position 3652 of SEQ ID NO: 588809
ggaacauaguaagcauagu

SEQ ID NO: 891319 - RNA, 19 nt, Artificial Sequence
  Description of Artificial Sequence: Synthetic oligonucleotide
  Antisense strand to SEQ ID NO: 891318
acuaugcuuacuauguucc

SEQ ID NO: 891320 - RNA, 19 nt, Artificial Sequence
  Description of Artificial Sequence: Synthetic oligonucleotide
  Sense strand starting at position 3673 of SEQ ID NO: 588809
gcuggcaguauuugucaga

SEQ ID NO: 891321 - RNA, 19 nt, Artificial Sequence
  Description of Artificial Sequence: Synthetic oligonucleotide
  Antisense strand to SEQ ID NO: 891320
ucugacaaauacugccagc

SEQ ID NO: 891322 - RNA, 19 nt, Artificial Sequence
  Description of Artificial Sequence: Synthetic oligonucleotide
  Sense strand starting at position 3747 of SEQ ID NO: 588809
cagagagguuucuuaacuu

SEQ ID NO: 891323 - RNA, 19 nt, Artificial Sequence
  Description of Artificial Sequence: Synthetic oligonucleotide
  Antisense strand to SEQ ID NO: 891322
aaguuaagaaaccucucug

SEQ ID NO: 891324 - RNA, 19 nt, Artificial Sequence
  Description of Artificial Sequence: Synthetic oligonucleotide
  Sense strand starting at position 3751 of SEQ ID NO: 588809
gagguuucuuaacuugcca

SEQ ID NO: 891325 - RNA, 19 nt, Artificial Sequence
  Description of Artificial Sequence: Synthetic oligonucleotide
  Antisense strand to SEQ ID NO: 891324
uggcaaguuaagaaaccuc

SEQ ID NO: 891326 - RNA, 19 nt, Artificial Sequence
  Description of Artificial Sequence: Synthetic oligonucleotide
  Sense strand starting at position 3851 of SEQ ID NO: 588809
aauguucuagugcagcaau

SEQ ID NO: 891327 - RNA, 19 nt, Artificial Sequence
  Description of Artificial Sequence: Synthetic oligonucleotide
  Antisense strand to SEQ ID NO: 891326
auugcugcacuagaacauu

SEQ ID NO: 891328 - RNA, 19 nt, Artificial Sequence
  Description of Artificial Sequence: Synthetic oligonucleotide
  Sense strand starting at position 3876 of SEQ ID NO: 588809
ggcaguguuacugaauguu

SEQ ID NO: 891329 - RNA, 19 nt, Artificial Sequence
  Description of Artificial Sequence: Synthetic oligonucleotide
  Antisense strand to SEQ ID NO: 891328
aacauucaguaacacugcc

SEQ ID NO: 891330 - RNA, 19 nt, Artificial Sequence
  Description of Artificial Sequence: Synthetic oligonucleotide
  Sense strand starting at position 3909 of SEQ ID NO: 588809
cucagagagucuuuguucu

SEQ ID NO: 891331 - RNA, 19 nt, Artificial Sequence
  Description of Artificial Sequence: Synthetic oligonucleotide
  Antisense strand to SEQ ID NO: 891330
agaacaaagacucucugag

SEQ ID NO: 891332 - RNA, 19 nt, Artificial Sequence
  Description of Artificial Sequence: Synthetic oligonucleotide
  Sense strand starting at position 3911 of SEQ ID NO: 588809
cagagagucuuuguucuca

SEQ ID NO: 891333 - RNA, 19 nt, Artificial Sequence
  Description of Artificial Sequence: Synthetic oligonucleotide
  Antisense strand to SEQ ID NO: 891332
ugagaacaaagacucucug

SEQ ID NO: 891334 - RNA, 19 nt, Artificial Sequence
  Description of Artificial Sequence: Synthetic oligonucleotide
  Sense strand starting at position 3913 of SEQ ID NO: 588809
gagagucuuuguucucaug

SEQ ID NO: 891335 - RNA, 19 nt, Artificial Sequence
  Description of Artificial Sequence: Synthetic oligonucleotide
  Antisense strand to SEQ ID NO: 891334
caugagaacaaagacucuc

SEQ ID NO: 891336 - RNA, 19 nt, Artificial Sequence
  Description of Artificial Sequence: Synthetic oligonucleotide
  Sense strand starting at position 1837 of SEQ ID NO: 588810
agaauucuagcagguggaa

SEQ ID NO: 891337 - RNA, 19 nt, Artificial Sequence
  Description of Artificial Sequence: Synthetic oligonucleotide
  Antisense strand to SEQ ID NO: 891336
uuccaccugcuagaauucu

SEQ ID NO: 891338 - RNA, 19 nt, Artificial Sequence
  Description of Artificial Sequence: Synthetic oligonucleotide
  Sense strand starting at position 1994 of SEQ ID NO: 588810
cucaaccagucuuuaguau

SEQ ID NO: 891339 - RNA, 19 nt, Artificial Sequence
  Description of Artificial Sequence: Synthetic oligonucleotide
  Antisense strand to SEQ ID NO: 891338
auacuaaagacugguugag

SEQ ID NO: 891340 - RNA, 19 nt, Artificial Sequence
  Description of Artificial Sequence: Synthetic oligonucleotide
  Sense strand starting at position 2000 of SEQ ID NO: 588810
cagucuuuaguaugggcua

SEQ ID NO: 891341 - RNA, 19 nt, Artificial Sequence
  Description of Artificial Sequence: Synthetic oligonucleotide
  Antisense strand to SEQ ID NO: 891340
uagcccauacuaaagacug

SEQ ID NO: 891342 - RNA, 19 nt, Artificial Sequence
  Description of Artificial Sequence: Synthetic oligonucleotide
  Sense strand starting at position 2005 of SEQ ID NO: 588810
uuuaguaugggcuaucacu

SEQ ID NO: 891343 - RNA, 19 nt, Artificial Sequence
  Description of Artificial Sequence: Synthetic oligonucleotide
  Antisense strand to SEQ ID NO: 891342
agugauagcccauacuaaa

SEQ ID NO: 891344 - RNA, 19 nt, Artificial Sequence
  Description of Artificial Sequence: Synthetic oligonucleotide
  Sense strand starting at position 2192 of SEQ ID NO: 588810
uuguauacuuagguaaagu

SEQ ID NO: 891345 - RNA, 19 nt, Artificial Sequence
  Description of Artificial Sequence: Synthetic oligonucleotide
  Antisense strand to SEQ ID NO: 891344
acuuuaccuaaguauacaa

SEQ ID NO: 891346 - RNA, 19 nt, Artificial Sequence
  Description of Artificial Sequence: Synthetic oligonucleotide
  Sense strand starting at position 2193 of SEQ ID NO: 588810
uguauacuuagguaaaguu

SEQ ID NO: 891347 - RNA, 19 nt, Artificial Sequence
  Description of Artificial Sequence: Synthetic oligonucleotide
  Antisense strand to SEQ ID NO: 891346
aacuuuaccuaaguauaca

SEQ ID NO: 891348 - RNA, 19 nt, Artificial Sequence
  Description of Artificial Sequence: Synthetic oligonucleotide
  Sense strand starting at position 2257 of SEQ ID NO: 588810
ugagaucgccaauauucuu

SEQ ID NO: 891349 - RNA, 19 nt, Artificial Sequence
  Description of Artificial Sequence: Synthetic oligonucleotide
  Antisense strand to SEQ ID NO: 891348
aagaauauuggcgaucuca

SEQ ID NO: 891350 - RNA, 19 nt, Artificial Sequence
  Description of Artificial Sequence: Synthetic oligonucleotide
  Sense strand starting at position 2361 of SEQ ID NO: 588810
uaguauaauguugggcaua

SEQ ID NO: 891351 - RNA, 19 nt, Artificial Sequence
  Description of Artificial Sequence: Synthetic oligonucleotide
  Antisense strand to SEQ ID NO: 891350
uaugcccaacauuauacua

SEQ ID NO: 891352 - RNA, 19 nt, Artificial Sequence
  Description of Artificial Sequence: Synthetic oligonucleotide
  Sense strand starting at position 2363 of SEQ ID NO: 588810
guauaauguugggcauauc

SEQ ID NO: 891353 - RNA, 19 nt, Artificial Sequence
  Description of Artificial Sequence: Synthetic oligonucleotide
  Antisense strand to SEQ ID NO: 891352
gauaugcccaacauuauac

SEQ ID NO: 891354 - RNA, 19 nt, Artificial Sequence
  Description of Artificial Sequence: Synthetic oligonucleotide
  Sense strand starting at position 2364 of SEQ ID NO: 588810
uauaauguugggcauauca

SEQ ID NO: 891355 - RNA, 19 nt, Artificial Sequence
  Description of Artificial Sequence: Synthetic oligonucleotide
  Antisense strand to SEQ ID NO: 891354
ugauaugcccaacauuaua

SEQ ID NO: 891356 - RNA, 19 nt, Artificial Sequence
  Description of Artificial Sequence: Synthetic oligonucleotide
  Sense strand starting at position 2366 of SEQ ID NO: 588810
uaauguugggcauaucaau

SEQ ID NO: 891357 - RNA, 19 nt, Artificial Sequence
  Description of Artificial Sequence: Synthetic oligonucleotide
  Antisense strand to SEQ ID NO: 891356
auugauaugcccaacauua

SEQ ID NO: 891358 - RNA, 19 nt, Artificial Sequence
  Description of Artificial Sequence: Synthetic oligonucleotide
  Sense strand starting at position 2407 of SEQ ID NO: 588810
ugaauaaauuguugaugag

SEQ ID NO: 891359 - RNA, 19 nt, Artificial Sequence
  Description of Artificial Sequence: Synthetic oligonucleotide
  Antisense strand to SEQ ID NO: 891358
cucaucaacaauuuauuca

SEQ ID NO: 891360 - RNA, 19 nt, Artificial Sequence
  Description of Artificial Sequence: Synthetic oligonucleotide
  Sense strand starting at position 2413 of SEQ ID NO: 588810
aauuguugaugagagggaa

SEQ ID NO: 891361 - RNA, 19 nt, Artificial Sequence
  Description of Artificial Sequence: Synthetic oligonucleotide
  Antisense strand to SEQ ID NO: 891360
uucccucucaucaacaauu

SEQ ID NO: 891362 - RNA, 19 nt, Artificial Sequence
  Description of Artificial Sequence: Synthetic oligonucleotide
  Sense strand starting at position 2547 of SEQ ID NO: 588810
cuuccacuccugugggaga

SEQ ID NO: 891363 - RNA, 19 nt, Artificial Sequence
  Description of Artificial Sequence: Synthetic oligonucleotide
  Antisense strand to SEQ ID NO: 891362
ucucccacaggaguggaag

SEQ ID NO: 891364 - RNA, 19 nt, Artificial Sequence
  Description of Artificial Sequence: Synthetic oligonucleotide
  Sense strand starting at position 2558 of SEQ ID NO: 588810
gugggagaaguuugauugu

SEQ ID NO: 891365 - RNA, 19 nt, Artificial Sequence
  Description of Artificial Sequence: Synthetic oligonucleotide
  Antisense strand to SEQ ID NO: 891364
acaaucaaacuucucccac

SEQ ID NO: 891366 - RNA, 19 nt, Artificial Sequence
  Description of Artificial Sequence: Synthetic oligonucleotide
  Sense strand starting at position 2561 of SEQ ID NO: 588810
ggagaaguuugauuguaac

SEQ ID NO: 891367 - RNA, 19 nt, Artificial Sequence
  Description of Artificial Sequence: Synthetic oligonucleotide
  Antisense strand to SEQ ID NO: 891366
guuacaaucaaacuucucc

SEQ ID NO: 891368 - RNA, 19 nt, Artificial Sequence
  Description of Artificial Sequence: Synthetic oligonucleotide
  Sense strand starting at position 2564 of SEQ ID NO: 588810
gaaguuugauuguaacuag

SEQ ID NO: 891369 - RNA, 19 nt, Artificial Sequence
  Description of Artificial Sequence: Synthetic oligonucleotide
  Antisense strand to SEQ ID NO: 891368
cuaguuacaaucaaacuuc

SEQ ID NO: 891370 - RNA, 19 nt, Artificial Sequence
  Description of Artificial Sequence: Synthetic oligonucleotide
  Sense strand starting at position 2567 of SEQ ID NO: 588810
guuugauuguaacuaguug

SEQ ID NO: 891371 - RNA, 19 nt, Artificial Sequence
  Description of Artificial Sequence: Synthetic oligonucleotide
  Antisense strand to SEQ ID NO: 891370
caacuaguuacaaucaaac

SEQ ID NO: 891372 - RNA, 19 nt, Artificial Sequence
  Description of Artificial Sequence: Synthetic oligonucleotide
  Sense strand starting at position 2568 of SEQ ID NO: 588810
uuugauuguaacuaguugu

SEQ ID NO: 891373 - RNA, 19 nt, Artificial Sequence
  Description of Artificial Sequence: Synthetic oligonucleotide
  Antisense strand to SEQ ID NO: 891372
acaacuaguuacaaucaaa

SEQ ID NO: 891374 - RNA, 19 nt, Artificial Sequence
  Description of Artificial Sequence: Synthetic oligonucleotide
  Sense strand starting at position 2571 of SEQ ID NO: 588810
gauuguaacuaguugucua

SEQ ID NO: 891375 - RNA, 19 nt, Artificial Sequence
  Description of Artificial Sequence: Synthetic oligonucleotide
  Antisense strand to SEQ ID NO: 891374
uagacaacuaguuacaauc

SEQ ID NO: 891376 - RNA, 19 nt, Artificial Sequence
  Description of Artificial Sequence: Synthetic oligonucleotide
  Sense strand starting at position 2574 of SEQ ID NO: 588810
uguaacuaguugucuaaau

SEQ ID NO: 891377 - RNA, 19 nt, Artificial Sequence
  Description of Artificial Sequence: Synthetic oligonucleotide
  Antisense strand to SEQ ID NO: 891376
auuuagacaacuaguuaca

SEQ ID NO: 891378 - RNA, 19 nt, Artificial Sequence
  Description of Artificial Sequence: Synthetic oligonucleotide
  Sense strand starting at position 2575 of SEQ ID NO: 588810
guaacuaguugucuaaaua

SEQ ID NO: 891379 - RNA, 19 nt, Artificial Sequence
  Description of Artificial Sequence: Synthetic oligonucleotide
  Antisense strand to SEQ ID NO: 891378
uauuuagacaacuaguuac

SEQ ID NO: 891380 - RNA, 19 nt, Artificial Sequence
  Description of Artificial Sequence: Synthetic oligonucleotide
  Sense strand starting at position 2610 of SEQ ID NO: 588810
uagucuaugucucuggaga

SEQ ID NO: 891381 - RNA, 19 nt, Artificial Sequence
  Description of Artificial Sequence: Synthetic oligonucleotide
  Antisense strand to SEQ ID NO: 891380
ucuccagagacauagacua

SEQ ID NO: 891382 - RNA, 19 nt, Artificial Sequence
  Description of Artificial Sequence: Synthetic oligonucleotide
  Sense strand starting at position 2611 of SEQ ID NO: 588810
agucuaugucucuggagac

SEQ ID NO: 891383 - RNA, 19 nt, Artificial Sequence
  Description of Artificial Sequence: Synthetic oligonucleotide
  Antisense strand to SEQ ID NO: 891382
gucuccagagacauagacu

SEQ ID NO: 891384 - RNA, 19 nt, Artificial Sequence
  Description of Artificial Sequence: Synthetic oligonucleotide
  Sense strand starting at position 2802 of SEQ ID NO: 588810
ccugguuagaggugauucu

SEQ ID NO: 891385 - RNA, 19 nt, Artificial Sequence
  Description of Artificial Sequence: Synthetic oligonucleotide
  Antisense strand to SEQ ID NO: 891384
agaaucaccucuaaccagg

SEQ ID NO: 891386 - RNA, 19 nt, Artificial Sequence
  Description of Artificial Sequence: Synthetic oligonucleotide
  Sense strand starting at position 2803 of SEQ ID NO: 588810
cugguuagaggugauucuu

SEQ ID NO: 891387 - RNA, 19 nt, Artificial Sequence
  Description of Artificial Sequence: Synthetic oligonucleotide
  Antisense strand to SEQ ID NO: 891386
aagaaucaccucuaaccag

SEQ ID NO: 891388 - RNA, 19 nt, Artificial Sequence
  Description of Artificial Sequence: Synthetic oligonucleotide
  Sense strand starting at position 2870 of SEQ ID NO: 588810
uagauaauaugguuaguag

SEQ ID NO: 891389 - RNA, 19 nt, Artificial Sequence
  Description of Artificial Sequence: Synthetic oligonucleotide
  Antisense strand to SEQ ID NO: 891388
cuacuaaccauauuaucua

SEQ ID NO: 891390 - RNA, 19 nt, Artificial Sequence
  Description of Artificial Sequence: Synthetic oligonucleotide
  Sense strand starting at position 2890 of SEQ ID NO: 588810
cgacccuucuaccuguaaa

SEQ ID NO: 891391 - RNA, 19 nt, Artificial Sequence
  Description of Artificial Sequence: Synthetic oligonucleotide
  Antisense strand to SEQ ID NO: 891390
uuuacagguagaagggucg

SEQ ID NO: 891392 - RNA, 19 nt, Artificial Sequence
  Description of Artificial Sequence: Synthetic oligonucleotide
  Sense strand starting at position 3012 of SEQ ID NO: 588810
acguuaugguagcuuugaa

SEQ ID NO: 891393 - RNA, 19 nt, Artificial Sequence
  Description of Artificial Sequence: Synthetic oligonucleotide
  Antisense strand to SEQ ID NO: 891392
uucaaagcuaccauaacgu

SEQ ID NO: 891394 - RNA, 19 nt, Artificial Sequence
  Description of Artificial Sequence: Synthetic oligonucleotide
  Sense strand starting at position 3091 of SEQ ID NO: 588810
cuagauugcuggugauuuc

SEQ ID NO: 891395 - RNA, 19 nt, Artificial Sequence
  Description of Artificial Sequence: Synthetic oligonucleotide
  Antisense strand to SEQ ID NO: 891394
gaaaucaccagcaaucuag

SEQ ID NO: 891396 - RNA, 19 nt, Artificial Sequence
  Description of Artificial Sequence: Synthetic oligonucleotide
  Sense strand starting at position 3119 of SEQ ID NO: 588810
acuuaacauuggucaaaug

SEQ ID NO: 891397 - RNA, 19 nt, Artificial Sequence
  Description of Artificial Sequence: Synthetic oligonucleotide
  Antisense strand to SEQ ID NO: 891396
cauuugaccaauguuaagu

SEQ ID NO: 891398 - RNA, 19 nt, Artificial Sequence
  Description of Artificial Sequence: Synthetic oligonucleotide
  Sense strand starting at position 3175 of SEQ ID NO: 588810
aagcuaugagaugguuaga

SEQ ID NO: 891399 - RNA, 19 nt, Artificial Sequence
  Description of Artificial Sequence: Synthetic oligonucleotide
  Antisense strand to SEQ ID NO: 891398
ucuaaccaucucauagcuu

SEQ ID NO: 891400 - RNA, 19 nt, Artificial Sequence
  Description of Artificial Sequence: Synthetic oligonucleotide
  Sense strand starting at position 3180 of SEQ ID NO: 588810
augagaugguuagaggcaa

SEQ ID NO: 891401 - RNA, 19 nt, Artificial Sequence
  Description of Artificial Sequence: Synthetic oligonucleotide
  Antisense strand to SEQ ID NO: 891400
uugccucuaaccaucucau

SEQ ID NO: 891402 - RNA, 19 nt, Artificial Sequence
  Description of Artificial Sequence: Synthetic oligonucleotide
  Sense strand starting at position 3281 of SEQ ID NO: 588810
gguuaacaguccuuguaaa

SEQ ID NO: 891403 - RNA, 19 nt, Artificial Sequence
  Description of Artificial Sequence: Synthetic oligonucleotide
  Antisense strand to SEQ ID NO: 891402
uuuacaaggacuguuaacc

SEQ ID NO: 891404 - RNA, 19 nt, Artificial Sequence
  Description of Artificial Sequence: Synthetic oligonucleotide
  Sense strand starting at position 3634 of SEQ ID NO: 588810
caaaguguccagggauguu

SEQ ID NO: 891405 - RNA, 19 nt, Artificial Sequence
  Description of Artificial Sequence: Synthetic oligonucleotide
  Antisense strand to SEQ ID NO: 891404
aacaucccuggacacuuug

SEQ ID NO: 891406 - RNA, 19 nt, Artificial Sequence
  Description of Artificial Sequence: Synthetic oligonucleotide
  Sense strand starting at position 3746 of SEQ ID NO: 588810
uugagaguuguucagggua

SEQ ID NO: 891407 - RNA, 19 nt, Artificial Sequence
  Description of Artificial Sequence: Synthetic oligonucleotide
  Antisense strand to SEQ ID NO: 891406
uacccugaacaacucucaa

SEQ ID NO: 891408 - RNA, 19 nt, Artificial Sequence
  Description of Artificial Sequence: Synthetic oligonucleotide
  Sense strand starting at position 3749 of SEQ ID NO: 588810
agaguuguucaggguaauu

SEQ ID NO: 891409 - RNA, 19 nt, Artificial Sequence
  Description of Artificial Sequence: Synthetic oligonucleotide
  Antisense strand to SEQ ID NO: 891408
aauuacccugaacaacucu

SEQ ID NO: 891410 - RNA, 19 nt, Artificial Sequence
  Description of Artificial Sequence: Synthetic oligonucleotide
  Sense strand starting at position 3960 of SEQ ID NO: 588810
ccaugucuacuggauucuu

SEQ ID NO: 891411 - RNA, 19 nt, Artificial Sequence
  Description of Artificial Sequence: Synthetic oligonucleotide
  Antisense strand to SEQ ID NO: 891410
aagaauccaguagacaugg

SEQ ID NO: 891412 - RNA, 19 nt, Artificial Sequence
  Description of Artificial Sequence: Synthetic oligonucleotide
  Sense strand starting at position 3968 of SEQ ID NO: 588810
acuggauucuucuacagua

SEQ ID NO: 891413 - RNA, 19 nt, Artificial Sequence
  Description of Artificial Sequence: Synthetic oligonucleotide
  Antisense strand to SEQ ID NO: 891412
uacuguagaagaauccagu

SEQ ID NO: 891414 - RNA, 19 nt, Artificial Sequence
  Description of Artificial Sequence: Synthetic oligonucleotide
  Sense strand starting at position 3970 of SEQ ID NO: 588810
uggauucuucuacaguaau

SEQ ID NO: 891415 - RNA, 19 nt, Artificial Sequence
  Description of Artificial Sequence: Synthetic oligonucleotide
  Antisense strand to SEQ ID NO: 891414
auuacuguagaagaaucca

SEQ ID NO: 891416 - RNA, 19 nt, Artificial Sequence
  Description of Artificial Sequence: Synthetic oligonucleotide
  Sense strand starting at position 59 of SEQ ID NO: 588811
auacaaaugugcuuaauga

SEQ ID NO: 891417 - RNA, 19 nt, Artificial Sequence
  Description of Artificial Sequence: Synthetic oligonucleotide
  Antisense strand to SEQ ID NO: 891416
ucauuaagcacauuuguau

SEQ ID NO: 891418 - RNA, 19 nt, Artificial Sequence
  Description of Artificial Sequence: Synthetic oligonucleotide
  Sense strand starting at position 131 of SEQ ID NO: 588811
aaguguauguggcagauuu

SEQ ID NO: 891419 - RNA, 19 nt, Artificial Sequence
  Description of Artificial Sequence: Synthetic oligonucleotide
  Antisense strand to SEQ ID NO: 891418
aaaucugccacauacacuu

SEQ ID NO: 891420 - RNA, 19 nt, Artificial Sequence
  Description of Artificial Sequence: Synthetic oligonucleotide
  Sense strand starting at position 2102 of SEQ ID NO: 588811
uuuguaucccuugggcuau

SEQ ID NO: 891421 - RNA, 19 nt, Artificial Sequence
  Description of Artificial Sequence: Synthetic oligonucleotide
  Antisense strand to SEQ ID NO: 891420
auagcccaagggauacaaa

SEQ ID NO: 891422 - RNA, 19 nt, Artificial Sequence
  Description of Artificial Sequence: Synthetic oligonucleotide
  Sense strand starting at position 2253 of SEQ ID NO: 588811
acaguuguguucuucucau

SEQ ID NO: 891423 - RNA, 19 nt, Artificial Sequence
  Description of Artificial Sequence: Synthetic oligonucleotide
  Antisense strand to SEQ ID NO: 891422
augagaagaacacaacugu

SEQ ID NO: 891424 - RNA, 19 nt, Artificial Sequence
  Description of Artificial Sequence: Synthetic oligonucleotide
  Sense strand starting at position 2287 of SEQ ID NO: 588811
aauuuaguauacugaggua

SEQ ID NO: 891425 - RNA, 19 nt, Artificial Sequence
  Description of Artificial Sequence: Synthetic oligonucleotide
  Antisense strand to SEQ ID NO: 891424
uaccucaguauacuaaauu

SEQ ID NO: 891426 - RNA, 19 nt, Artificial Sequence
  Description of Artificial Sequence: Synthetic oligonucleotide
  Sense strand starting at position 2290 of SEQ ID NO: 588811
uuaguauacugagguaaag

SEQ ID NO: 891427 - RNA, 19 nt, Artificial Sequence
  Description of Artificial Sequence: Synthetic oligonucleotide
  Antisense strand to SEQ ID NO: 891426
cuuuaccucaguauacuaa

SEQ ID NO: 891428 - RNA, 19 nt, Artificial Sequence
  Description of Artificial Sequence: Synthetic oligonucleotide
  Sense strand starting at position 2442 of SEQ ID NO: 588811
ucuuguaaauuggguuaau

SEQ ID NO: 891429 - RNA, 19 nt, Artificial Sequence
  Description of Artificial Sequence: Synthetic oligonucleotide
  Antisense strand to SEQ ID NO: 891428
auuaacccaauuuacaaga

SEQ ID NO: 891430 - RNA, 19 nt, Artificial Sequence
  Description of Artificial Sequence: Synthetic oligonucleotide
  Sense strand starting at position 2443 of SEQ ID NO: 588811
cuuguaaauuggguuaauu

SEQ ID NO: 891431 - RNA, 19 nt, Artificial Sequence
  Description of Artificial Sequence: Synthetic oligonucleotide
  Antisense strand to SEQ ID NO: 891430
aauuaacccaauuuacaag

SEQ ID NO: 891432 - RNA, 19 nt, Artificial Sequence
  Description of Artificial Sequence: Synthetic oligonucleotide
  Sense strand starting at position 2451 of SEQ ID NO: 588811
uuggguuaauuaguauagu

SEQ ID NO: 891433 - RNA, 19 nt, Artificial Sequence
  Description of Artificial Sequence: Synthetic oligonucleotide
  Antisense strand to SEQ ID NO: 891432
acuauacuaauuaacccaa

SEQ ID NO: 891434 - RNA, 19 nt, Artificial Sequence
  Description of Artificial Sequence: Synthetic oligonucleotide
  Sense strand starting at position 2454 of SEQ ID NO: 588811
gguuaauuaguauaguguu

SEQ ID NO: 891435 - RNA, 19 nt, Artificial Sequence
  Description of Artificial Sequence: Synthetic oligonucleotide
  Antisense strand to SEQ ID NO: 891434
aacacuauacuaauuaacc

SEQ ID NO: 891436 - RNA, 19 nt, Artificial Sequence
  Description of Artificial Sequence: Synthetic oligonucleotide
  Sense strand starting at position 2461 of SEQ ID NO: 588811
uaguauaguguuggguaua

SEQ ID NO: 891437 - RNA, 19 nt, Artificial Sequence
  Description of Artificial Sequence: Synthetic oligonucleotide
  Antisense strand to SEQ ID NO: 891436
uauacccaacacuauacua

SEQ ID NO: 891438 - RNA, 19 nt, Artificial Sequence
  Description of Artificial Sequence: Synthetic oligonucleotide
  Sense strand starting at position 2462 of SEQ ID NO: 588811
aguauaguguuggguauau

SEQ ID NO: 891439 - RNA, 19 nt, Artificial Sequence
  Description of Artificial Sequence: Synthetic oligonucleotide
  Antisense strand to SEQ ID NO: 891438
auauacccaacacuauacu

SEQ ID NO: 891440 - RNA, 19 nt, Artificial Sequence
  Description of Artificial Sequence: Synthetic oligonucleotide
  Sense strand starting at position 2464 of SEQ ID NO: 588811
uauaguguuggguauauca

SEQ ID NO: 891441 - RNA, 19 nt, Artificial Sequence
  Description of Artificial Sequence: Synthetic oligonucleotide
  Antisense strand to SEQ ID NO: 891440
ugauauacccaacacuaua

SEQ ID NO: 891442 - RNA, 19 nt, Artificial Sequence
  Description of Artificial Sequence: Synthetic oligonucleotide
  Sense strand starting at position 2466 of SEQ ID NO: 588811
uaguguuggguauaucaau

SEQ ID NO: 891443 - RNA, 19 nt, Artificial Sequence
  Description of Artificial Sequence: Synthetic oligonucleotide
  Antisense strand to SEQ ID NO: 891442
auugauauacccaacacua

SEQ ID NO: 891444 - RNA, 19 nt, Artificial Sequence
  Description of Artificial Sequence: Synthetic oligonucleotide
  Sense strand starting at position 2521 of SEQ ID NO: 588811
aauuguugaugacagggaa

SEQ ID NO: 891445 - RNA, 19 nt, Artificial Sequence
  Description of Artificial Sequence: Synthetic oligonucleotide
  Antisense strand to SEQ ID NO: 891444
uucccugucaucaacaauu

SEQ ID NO: 891446 - RNA, 19 nt, Artificial Sequence
  Description of Artificial Sequence: Synthetic oligonucleotide
  Sense strand starting at position 2588 of SEQ ID NO: 588811
guaacaucauguuaggcuu

SEQ ID NO: 891447 - RNA, 19 nt, Artificial Sequence
  Description of Artificial Sequence: Synthetic oligonucleotide
  Antisense strand to SEQ ID NO: 891446
aagccuaacaugauguuac

SEQ ID NO: 891448 - RNA, 19 nt, Artificial Sequence
  Description of Artificial Sequence: Synthetic oligonucleotide
  Sense strand starting at position 2678 of SEQ ID NO: 588811
gauuguaacuaguuaucug

SEQ ID NO: 891449 - RNA, 19 nt, Artificial Sequence
  Description of Artificial Sequence: Synthetic oligonucleotide
  Antisense strand to SEQ ID NO: 891448
cagauaacuaguuacaauc

SEQ ID NO: 891450 - RNA, 19 nt, Artificial Sequence
  Description of Artificial Sequence: Synthetic oligonucleotide
  Sense strand starting at position 2681 of SEQ ID NO: 588811
uguaacuaguuaucugaac

SEQ ID NO: 891451 - RNA, 19 nt, Artificial Sequence
  Description of Artificial Sequence: Synthetic oligonucleotide
  Antisense strand to SEQ ID NO: 891450
guucagauaacuaguuaca

SEQ ID NO: 891452 - RNA, 19 nt, Artificial Sequence
  Description of Artificial Sequence: Synthetic oligonucleotide
  Sense strand starting at position 2682 of SEQ ID NO: 588811
guaacuaguuaucugaaca

SEQ ID NO: 891453 - RNA, 19 nt, Artificial Sequence
  Description of Artificial Sequence: Synthetic oligonucleotide
  Antisense strand to SEQ ID NO: 891452
uguucagauaacuaguuac

SEQ ID NO: 891454 - RNA, 19 nt, Artificial Sequence
  Description of Artificial Sequence: Synthetic oligonucleotide
  Sense strand starting at position 2719 of SEQ ID NO: 588811
aucuacaucucuggagacu

SEQ ID NO: 891455 - RNA, 19 nt, Artificial Sequence
  Description of Artificial Sequence: Synthetic oligonucleotide
  Antisense strand to SEQ ID NO: 891454
agucuccagagauguagau

SEQ ID NO: 891456 - RNA, 19 nt, Artificial Sequence
  Description of Artificial Sequence: Synthetic oligonucleotide
  Sense strand starting at position 2877 of SEQ ID NO: 588811
gcacaaagauauguuuguu

SEQ ID NO: 891457 - RNA, 19 nt, Artificial Sequence
  Description of Artificial Sequence: Synthetic oligonucleotide
  Antisense strand to SEQ ID NO: 891456
aacaaacauaucuuugugc

SEQ ID NO: 891458 - RNA, 19 nt, Artificial Sequence
  Description of Artificial Sequence: Synthetic oligonucleotide
  Sense strand starting at position 2880 of SEQ ID NO: 588811
caaagauauguuuguuugu

SEQ ID NO: 891459 - RNA, 19 nt, Artificial Sequence
  Description of Artificial Sequence: Synthetic oligonucleotide
  Antisense strand to SEQ ID NO: 891458
acaaacaaacauaucuuug

SEQ ID NO: 891460 - RNA, 19 nt, Artificial Sequence
  Description of Artificial Sequence: Synthetic oligonucleotide
  Sense strand starting at position 2972 of SEQ ID NO: 588811
uccacacuguucuagguaa

SEQ ID NO: 891461 - RNA, 19 nt, Artificial Sequence
  Description of Artificial Sequence: Synthetic oligonucleotide
  Antisense strand to SEQ ID NO: 891460
uuaccuagaacagugugga

SEQ ID NO: 891462 - RNA, 19 nt, Artificial Sequence
  Description of Artificial Sequence: Synthetic oligonucleotide
  Sense strand starting at position 2984 of SEQ ID NO: 588811
uagguaauaugguuaguag

SEQ ID NO: 891463 - RNA, 19 nt, Artificial Sequence
  Description of Artificial Sequence: Synthetic oligonucleotide
  Antisense strand to SEQ ID NO: 891462
cuacuaaccauauuaccua

SEQ ID NO: 891464 - RNA, 19 nt, Artificial Sequence
  Description of Artificial Sequence: Synthetic oligonucleotide
  Sense strand starting at position 2985 of SEQ ID NO: 588811
agguaauaugguuaguaga

SEQ ID NO: 891465 - RNA, 19 nt, Artificial Sequence
  Description of Artificial Sequence: Synthetic oligonucleotide
  Antisense strand to SEQ ID NO: 891464
ucuacuaaccauauuaccu

SEQ ID NO: 891466 - RNA, 19 nt, Artificial Sequence
  Description of Artificial Sequence: Synthetic oligonucleotide
  Sense strand starting at position 2987 of SEQ ID NO: 588811
guaauaugguuaguagaca

SEQ ID NO: 891467 - RNA, 19 nt, Artificial Sequence
  Description of Artificial Sequence: Synthetic oligonucleotide
  Antisense strand to SEQ ID NO: 891466
ugucuacuaaccauauuac

SEQ ID NO: 891468 - RNA, 19 nt, Artificial Sequence
  Description of Artificial Sequence: Synthetic oligonucleotide
  Sense strand starting at position 2988 of SEQ ID NO: 588811
uaauaugguuaguagacaa

SEQ ID NO: 891469 - RNA, 19 nt, Artificial Sequence
  Description of Artificial Sequence: Synthetic oligonucleotide
  Antisense strand to SEQ ID NO: 891468
uugucuacuaaccauauua

SEQ ID NO: 891470 - RNA, 19 nt, Artificial Sequence
  Description of Artificial Sequence: Synthetic oligonucleotide
  Sense strand starting at position 3126 of SEQ ID NO: 588811
acauuaggguagcuuugaa

SEQ ID NO: 891471 - RNA, 19 nt, Artificial Sequence
  Description of Artificial Sequence: Synthetic oligonucleotide
  Antisense strand to SEQ ID NO: 891470
uucaaagcuacccuaaugu

SEQ ID NO: 891472 - RNA, 19 nt, Artificial Sequence
  Description of Artificial Sequence: Synthetic oligonucleotide
  Sense strand starting at position 3130 of SEQ ID NO: 588811
uaggguagcuuugaaauaa

SEQ ID NO: 891473 - RNA, 19 nt, Artificial Sequence
  Description of Artificial Sequence: Synthetic oligonucleotide
  Antisense strand to SEQ ID NO: 891472
uuauuucaaagcuacccua

SEQ ID NO: 891474 - RNA, 19 nt, Artificial Sequence
  Description of Artificial Sequence: Synthetic oligonucleotide
  Sense strand starting at position 3206 of SEQ ID NO: 588811
uagauugcuggugauguca

SEQ ID NO: 891475 - RNA, 19 nt, Artificial Sequence
  Description of Artificial Sequence: Synthetic oligonucleotide
  Antisense strand to SEQ ID NO: 891474
ugacaucaccagcaaucua

SEQ ID NO: 891476 - RNA, 19 nt, Artificial Sequence
  Description of Artificial Sequence: Synthetic oligonucleotide
  Sense strand starting at position 3230 of SEQ ID NO: 588811
cccacuuagcauuggucaa

SEQ ID NO: 891477 - RNA, 19 nt, Artificial Sequence
  Description of Artificial Sequence: Synthetic oligonucleotide
  Antisense strand to SEQ ID NO: 891476
uugaccaaugcuaaguggg

SEQ ID NO: 891478 - RNA, 19 nt, Artificial Sequence
  Description of Artificial Sequence: Synthetic oligonucleotide
  Sense strand starting at position 3294 of SEQ ID NO: 588811
augagauggucagaugcaa

SEQ ID NO: 891479 - RNA, 19 nt, Artificial Sequence
  Description of Artificial Sequence: Synthetic oligonucleotide
  Antisense strand to SEQ ID NO: 891478
uugcaucugaccaucucau

SEQ ID NO: 891480 - RNA, 19 nt, Artificial Sequence
  Description of Artificial Sequence: Synthetic oligonucleotide
  Sense strand starting at position 3395 of SEQ ID NO: 588811
gguugacaguccuuguaaa

SEQ ID NO: 891481 - RNA, 19 nt, Artificial Sequence
  Description of Artificial Sequence: Synthetic oligonucleotide
  Antisense strand to SEQ ID NO: 891480
uuuacaaggacugucaacc

SEQ ID NO: 891482 - RNA, 19 nt, Artificial Sequence
  Description of Artificial Sequence: Synthetic oligonucleotide
  Sense strand starting at position 3428 of SEQ ID NO: 588811
aaggcuguacuccaaagua

SEQ ID NO: 891483 - RNA, 19 nt, Artificial Sequence
  Description of Artificial Sequence: Synthetic oligonucleotide
  Antisense strand to SEQ ID NO: 891482
uacuuuggaguacagccuu

SEQ ID NO: 891484 - RNA, 19 nt, Artificial Sequence
  Description of Artificial Sequence: Synthetic oligonucleotide
  Sense strand starting at position 3440 of SEQ ID NO: 588811
caaaguaauuggucguuaa

SEQ ID NO: 891485 - RNA, 19 nt, Artificial Sequence
  Description of Artificial Sequence: Synthetic oligonucleotide
  Antisense strand to SEQ ID NO: 891484
uuaacgaccaauuacuuug

SEQ ID NO: 891486 - RNA, 19 nt, Artificial Sequence
  Description of Artificial Sequence: Synthetic oligonucleotide
  Sense strand starting at position 3441 of SEQ ID NO: 588811
aaaguaauuggucguuaaa

SEQ ID NO: 891487 - RNA, 19 nt, Artificial Sequence
  Description of Artificial Sequence: Synthetic oligonucleotide
  Antisense strand to SEQ ID NO: 891486
uuuaacgaccaauuacuuu

SEQ ID NO: 891488 - RNA, 19 nt, Artificial Sequence
  Description of Artificial Sequence: Synthetic oligonucleotide
  Sense strand starting at position 3460 of SEQ ID NO: 588811
aauguaaauuuccagggau

SEQ ID NO: 891489 - RNA, 19 nt, Artificial Sequence
  Description of Artificial Sequence: Synthetic oligonucleotide
  Antisense strand to SEQ ID NO: 891488
aucccuggaaauuuacauu

SEQ ID NO: 891490 - RNA, 19 nt, Artificial Sequence
  Description of Artificial Sequence: Synthetic oligonucleotide
  Sense strand starting at position 3756 of SEQ ID NO: 588811
caaaguguccagggauauu

SEQ ID NO: 891491 - RNA, 19 nt, Artificial Sequence
  Description of Artificial Sequence: Synthetic oligonucleotide
  Antisense strand to SEQ ID NO: 891490
aauaucccuggacacuuug

SEQ ID NO: 891492 - RNA, 19 nt, Artificial Sequence
  Description of Artificial Sequence: Synthetic oligonucleotide
  Sense strand starting at position 3864 of SEQ ID NO: 588811
cagauugagaguugucaug

SEQ ID NO: 891493 - RNA, 19 nt, Artificial Sequence
  Description of Artificial Sequence: Synthetic oligonucleotide
  Antisense strand to SEQ ID NO: 891492
caugacaacucucaaucug

SEQ ID NO: 891494 - RNA, 19 nt, Artificial Sequence
  Description of Artificial Sequence: Synthetic oligonucleotide
  Sense strand starting at position 3866 of SEQ ID NO: 588811
gauugagaguugucaugca

SEQ ID NO: 891495 - RNA, 19 nt, Artificial Sequence
  Description of Artificial Sequence: Synthetic oligonucleotide
  Antisense strand to SEQ ID NO: 891494
ugcaugacaacucucaauc

SEQ ID NO: 891496 - RNA, 19 nt, Artificial Sequence
  Description of Artificial Sequence: Synthetic oligonucleotide
  Sense strand starting at position 462 of SEQ ID NO: 588812
accgcuauuugugcauauu

SEQ ID NO: 891497 - RNA, 19 nt, Artificial Sequence
  Description of Artificial Sequence: Synthetic oligonucleotide
  Antisense strand to SEQ ID NO: 891496
aauaugcacaaauagcggu

SEQ ID NO: 891498 - RNA, 19 nt, Artificial Sequence
  Description of Artificial Sequence: Synthetic oligonucleotide
  Sense strand starting at position 463 of SEQ ID NO: 588812
ccgcuauuugugcauauua

SEQ ID NO: 891499 - RNA, 19 nt, Artificial Sequence
  Description of Artificial Sequence: Synthetic oligonucleotide
  Antisense strand to SEQ ID NO: 891498
uaauaugcacaaauagcgg

SEQ ID NO: 891500 - RNA, 19 nt, Artificial Sequence
  Description of Artificial Sequence: Synthetic oligonucleotide
  Sense strand starting at position 465 of SEQ ID NO: 588812
gcuauuugugcauauuagu

SEQ ID NO: 891501 - RNA, 19 nt, Artificial Sequence
  Description of Artificial Sequence: Synthetic oligonucleotide
  Antisense strand to SEQ ID NO: 891500
acuaauaugcacaaauagc

SEQ ID NO: 891502 - RNA, 19 nt, Artificial Sequence
  Description of Artificial Sequence: Synthetic oligonucleotide
  Sense strand starting at position 476 of SEQ ID NO: 588812
auauuagugucagugacau

SEQ ID NO: 891503 - RNA, 19 nt, Artificial Sequence
  Description of Artificial Sequence: Synthetic oligonucleotide
  Antisense strand to SEQ ID NO: 891502
augucacugacacuaauau

SEQ ID NO: 891504 - RNA, 19 nt, Artificial Sequence
  Description of Artificial Sequence: Synthetic oligonucleotide
  Sense strand starting at position 478 of SEQ ID NO: 588812
auuagugucagugacaugu

SEQ ID NO: 891505 - RNA, 19 nt, Artificial Sequence
  Description of Artificial Sequence: Synthetic oligonucleotide
  Antisense strand to SEQ ID NO: 891504
acaugucacugacacuaau

SEQ ID NO: 891506 - RNA, 19 nt, Artificial Sequence
  Description of Artificial Sequence: Synthetic oligonucleotide
  Sense strand starting at position 535 of SEQ ID NO: 588812
auacuaacuggcggauuaa

SEQ ID NO: 891507 - RNA, 19 nt, Artificial Sequence
  Description of Artificial Sequence: Synthetic oligonucleotide
  Antisense strand to SEQ ID NO: 891506
uuaauccgccaguuaguau

SEQ ID NO: 891508 - RNA, 19 nt, Artificial Sequence
  Description of Artificial Sequence: Synthetic oligonucleotide
  Sense strand starting at position 536 of SEQ ID NO: 588812
uacuaacuggcggauuaaa

SEQ ID NO: 891509 - RNA, 19 nt, Artificial Sequence
  Description of Artificial Sequence: Synthetic oligonucleotide
  Antisense strand to SEQ ID NO: 891508
uuuaauccgccaguuagua

SEQ ID NO: 891510 - RNA, 19 nt, Artificial Sequence
  Description of Artificial Sequence: Synthetic oligonucleotide
  Sense strand starting at position 546 of SEQ ID NO: 588812
cggauuaaaucucuauaau

SEQ ID NO: 891511 - RNA, 19 nt, Artificial Sequence
  Description of Artificial Sequence: Synthetic oligonucleotide
  Antisense strand to SEQ ID NO: 891510
auuauagagauuuaauccg

SEQ ID NO: 891512 - RNA, 19 nt, Artificial Sequence
  Description of Artificial Sequence: Synthetic oligonucleotide
  Sense strand starting at position 636 of SEQ ID NO: 588812
agaacugaaaugcgaguua

SEQ ID NO: 891513 - RNA, 19 nt, Artificial Sequence
  Description of Artificial Sequence: Synthetic oligonucleotide
  Antisense strand to SEQ ID NO: 891512
uaacucgcauuucaguucu

SEQ ID NO: 891514 - RNA, 19 nt, Artificial Sequence
  Description of Artificial Sequence: Synthetic oligonucleotide
  Sense strand starting at position 641 of SEQ ID NO: 588812
ugaaaugcgaguuaaguuu

SEQ ID NO: 891515 - RNA, 19 nt, Artificial Sequence
  Description of Artificial Sequence: Synthetic oligonucleotide
  Antisense strand to SEQ ID NO: 891514
aaacuuaacucgcauuuca

SEQ ID NO: 891516 - RNA, 19 nt, Artificial Sequence
  Description of Artificial Sequence: Synthetic oligonucleotide
  Sense strand starting at position 752 of SEQ ID NO: 588812
cccggacauuauguucuaa

SEQ ID NO: 891517 - RNA, 19 nt, Artificial Sequence
  Description of Artificial Sequence: Synthetic oligonucleotide
  Antisense strand to SEQ ID NO: 891516
uuagaacauaauguccggg

SEQ ID NO: 891518 - RNA, 19 nt, Artificial Sequence
  Description of Artificial Sequence: Synthetic oligonucleotide
  Sense strand starting at position 754 of SEQ ID NO: 588812
cggacauuauguucuaaca

SEQ ID NO: 891519 - RNA, 19 nt, Artificial Sequence
  Description of Artificial Sequence: Synthetic oligonucleotide
  Antisense strand to SEQ ID NO: 891518
uguuagaacauaauguccg

SEQ ID NO: 891520 - RNA, 19 nt, Artificial Sequence
  Description of Artificial Sequence: Synthetic oligonucleotide
  Sense strand starting at position 773 of SEQ ID NO: 588812
gcauguguuaacguauccu

SEQ ID NO: 891521 - RNA, 19 nt, Artificial Sequence
  Description of Artificial Sequence: Synthetic oligonucleotide
  Antisense strand to SEQ ID NO: 891520
aggauacguuaacacaugc

SEQ ID NO: 891522 - RNA, 19 nt, Artificial Sequence
  Description of Artificial Sequence: Synthetic oligonucleotide
  Sense strand starting at position 784 of SEQ ID NO: 588812
cguauccucccagaaugua

SEQ ID NO: 891523 - RNA, 19 nt, Artificial Sequence
  Description of Artificial Sequence: Synthetic oligonucleotide
  Antisense strand to SEQ ID NO: 891522
uacauucugggaggauacg

SEQ ID NO: 891524 - RNA, 19 nt, Artificial Sequence
  Description of Artificial Sequence: Synthetic oligonucleotide
  Sense strand starting at position 1028 of SEQ ID NO: 588812
uuaugugcagauuaugaca

SEQ ID NO: 891525 - RNA, 19 nt, Artificial Sequence
  Description of Artificial Sequence: Synthetic oligonucleotide
  Antisense strand to SEQ ID NO: 891524
ugucauaaucugcacauaa

SEQ ID NO: 891526 - RNA, 19 nt, Artificial Sequence
  Description of Artificial Sequence: Synthetic oligonucleotide
  Sense strand starting at position 1099 of SEQ ID NO: 588812
cgaguaaggauguggaaag

SEQ ID NO: 891527 - RNA, 19 nt, Artificial Sequence
  Description of Artificial Sequence: Synthetic oligonucleotide
  Antisense strand to SEQ ID NO: 891526
cuuuccacauccuuacucg

SEQ ID NO: 891528 - RNA, 19 nt, Artificial Sequence
  Description of Artificial Sequence: Synthetic oligonucleotide
  Sense strand starting at position 1146 of SEQ ID NO: 588812
agggcugucaccgauugaa

SEQ ID NO: 891529 - RNA, 19 nt, Artificial Sequence
  Description of Artificial Sequence: Synthetic oligonucleotide
  Antisense strand to SEQ ID NO: 891528
uucaaucggugacagcccu

SEQ ID NO: 891530 - RNA, 19 nt, Artificial Sequence
  Description of Artificial Sequence: Synthetic oligonucleotide
  Sense strand starting at position 1156 of SEQ ID NO: 588812
ccgauugaaagugaccuua

SEQ ID NO: 891531 - RNA, 19 nt, Artificial Sequence
  Description of Artificial Sequence: Synthetic oligonucleotide
  Antisense strand to SEQ ID NO: 891530
uaaggucacuuucaaucgg

SEQ ID NO: 891532 - RNA, 19 nt, Artificial Sequence
  Description of Artificial Sequence: Synthetic oligonucleotide
  Sense strand starting at position 1158 of SEQ ID NO: 588812
gauugaaagugaccuuaug

SEQ ID NO: 891533 - RNA, 19 nt, Artificial Sequence
  Description of Artificial Sequence: Synthetic oligonucleotide
  Antisense strand to SEQ ID NO: 891532
cauaaggucacuuucaauc

SEQ ID NO: 891534 - RNA, 19 nt, Artificial Sequence
  Description of Artificial Sequence: Synthetic oligonucleotide
  Sense strand starting at position 1493 of SEQ ID NO: 588812
aaccgagagcccugugaaa

SEQ ID NO: 891535 - RNA, 19 nt, Artificial Sequence
  Description of Artificial Sequence: Synthetic oligonucleotide
  Antisense strand to SEQ ID NO: 891534
uuucacagggcucucgguu

SEQ ID NO: 891536 - RNA, 19 nt, Artificial Sequence
  Description of Artificial Sequence: Synthetic oligonucleotide
  Sense strand starting at position 1520 of SEQ ID NO: 588812
gcccucucggcgagaaguu

SEQ ID NO: 891537 - RNA, 19 nt, Artificial Sequence
  Description of Artificial Sequence: Synthetic oligonucleotide
  Antisense strand to SEQ ID NO: 891536
aacuucucgccgagagggc

SEQ ID NO: 891538 - RNA, 19 nt, Artificial Sequence
  Description of Artificial Sequence: Synthetic oligonucleotide
  Sense strand starting at position 1530 of SEQ ID NO: 588812
cgagaaguucuccaguacu

SEQ ID NO: 891539 - RNA, 19 nt, Artificial Sequence
  Description of Artificial Sequence: Synthetic oligonucleotide
  Antisense strand to SEQ ID NO: 891538
aguacuggagaacuucucg

SEQ ID NO: 891540 - RNA, 19 nt, Artificial Sequence
  Description of Artificial Sequence: Synthetic oligonucleotide
  Sense strand starting at position 2032 of SEQ ID NO: 588812
gaacuaggcaguuguuaga

SEQ ID NO: 891541 - RNA, 19 nt, Artificial Sequence
  Description of Artificial Sequence: Synthetic oligonucleotide
  Antisense strand to SEQ ID NO: 891540
ucuaacaacugccuaguuc

SEQ ID NO: 891542 - RNA, 19 nt, Artificial Sequence
  Description of Artificial Sequence: Synthetic oligonucleotide
  Sense strand starting at position 2046 of SEQ ID NO: 588812
uuagaucucgcgagagguu

SEQ ID NO: 891543 - RNA, 19 nt, Artificial Sequence
  Description of Artificial Sequence: Synthetic oligonucleotide
  Antisense strand to SEQ ID NO: 891542
aaccucucgcgagaucuaa

SEQ ID NO: 891544 - RNA, 19 nt, Artificial Sequence
  Description of Artificial Sequence: Synthetic oligonucleotide
  Sense strand starting at position 2214 of SEQ ID NO: 588812
ccuauagguaauuggaguu

SEQ ID NO: 891545 - RNA, 19 nt, Artificial Sequence
  Description of Artificial Sequence: Synthetic oligonucleotide
  Antisense strand to SEQ ID NO: 891544
aacuccaauuaccuauagg

SEQ ID NO: 891546 - RNA, 19 nt, Artificial Sequence
  Description of Artificial Sequence: Synthetic oligonucleotide
  Sense strand starting at position 2224 of SEQ ID NO: 588812
auuggaguuauuggagcuu

SEQ ID NO: 891547 - RNA, 19 nt, Artificial Sequence
  Description of Artificial Sequence: Synthetic oligonucleotide
  Antisense strand to SEQ ID NO: 891546
aagcuccaauaacuccaau

SEQ ID NO: 891548 - RNA, 19 nt, Artificial Sequence
  Description of Artificial Sequence: Synthetic oligonucleotide
  Sense strand starting at position 2668 of SEQ ID NO: 588812
gccgcuucuccgaguggga

SEQ ID NO: 891549 - RNA, 19 nt, Artificial Sequence
  Description of Artificial Sequence: Synthetic oligonucleotide
  Antisense strand to SEQ ID NO: 891548
ucccacucggagaagcggc

SEQ ID NO: 891550 - RNA, 19 nt, Artificial Sequence
  Description of Artificial Sequence: Synthetic oligonucleotide
  Sense strand starting at position 2718 of SEQ ID NO: 588812
ccauuucccugagcgugua

SEQ ID NO: 891551 - RNA, 19 nt, Artificial Sequence
  Description of Artificial Sequence: Synthetic oligonucleotide
  Antisense strand to SEQ ID NO: 891550
uacacgcucagggaaaugg

SEQ ID NO: 891552 - RNA, 19 nt, Artificial Sequence
  Description of Artificial Sequence: Synthetic oligonucleotide
  Sense strand starting at position 2746 of SEQ ID NO: 588812
cgcguugugguccuagaga

SEQ ID NO: 891553 - RNA, 19 nt, Artificial Sequence
  Description of Artificial Sequence: Synthetic oligonucleotide
  Antisense strand to SEQ ID NO: 891552
ucucuaggaccacaacgcg

SEQ ID NO: 891554 - RNA, 19 nt, Artificial Sequence
  Description of Artificial Sequence: Synthetic oligonucleotide
  Sense strand starting at position 3409 of SEQ ID NO: 588812
gucguuucaguugucguua

SEQ ID NO: 891555 - RNA, 19 nt, Artificial Sequence
  Description of Artificial Sequence: Synthetic oligonucleotide
  Antisense strand to SEQ ID NO: 891554
uaacgacaacugaaacgac

SEQ ID NO: 891556 - RNA, 19 nt, Artificial Sequence
  Description of Artificial Sequence: Synthetic oligonucleotide
  Sense strand starting at position 3430 of SEQ ID NO: 588812
agagcaauaagucgaccaa

SEQ ID NO: 891557 - RNA, 19 nt, Artificial Sequence
  Description of Artificial Sequence: Synthetic oligonucleotide
  Antisense strand to SEQ ID NO: 891556
uuggucgacuuauugcucu

SEQ ID NO: 891558 - RNA, 19 nt, Artificial Sequence
  Description of Artificial Sequence: Synthetic oligonucleotide
  Sense strand starting at position 3535 of SEQ ID NO: 588812
acuccuagucccgacaaga

SEQ ID NO: 891559 - RNA, 19 nt, Artificial Sequence
  Description of Artificial Sequence: Synthetic oligonucleotide
  Antisense strand to SEQ ID NO: 891558
ucuugucgggacuaggagu

SEQ ID NO: 891560 - RNA, 19 nt, Artificial Sequence
  Description of Artificial Sequence: Synthetic oligonucleotide
  Sense strand starting at position 3673 of SEQ ID NO: 588812
ccgcuagugacuguuaguu

SEQ ID NO: 891561 - RNA, 19 nt, Artificial Sequence
  Description of Artificial Sequence: Synthetic oligonucleotide
  Antisense strand to SEQ ID NO: 891560
aacuaacagucacuagcgg

SEQ ID NO: 891562 - RNA, 19 nt, Artificial Sequence
  Description of Artificial Sequence: Synthetic oligonucleotide
  Sense strand starting at position 3701 of SEQ ID NO: 588812
uccauuuguuucgcugauu

SEQ ID NO: 891563 - RNA, 19 nt, Artificial Sequence
  Description of Artificial Sequence: Synthetic oligonucleotide
  Antisense strand to SEQ ID NO: 891562
aaucagcgaaacaaaugga

SEQ ID NO: 891564 - RNA, 19 nt, Artificial Sequence
  Description of Artificial Sequence: Synthetic oligonucleotide
  Sense strand starting at position 3702 of SEQ ID NO: 588812
ccauuuguuucgcugauua

SEQ ID NO: 891565 - RNA, 19 nt, Artificial Sequence
  Description of Artificial Sequence: Synthetic oligonucleotide
  Antisense strand to SEQ ID NO: 891564
uaaucagcgaaacaaaugg

SEQ ID NO: 891566 - RNA, 19 nt, Artificial Sequence
  Description of Artificial Sequence: Synthetic oligonucleotide
  Sense strand starting at position 3813 of SEQ ID NO: 588812
uucgcaauugccguuguau

SEQ ID NO: 891567 - RNA, 19 nt, Artificial Sequence
  Description of Artificial Sequence: Synthetic oligonucleotide
  Antisense strand to SEQ ID NO: 891566
auacaacggcaauugcgaa

SEQ ID NO: 891568 - RNA, 19 nt, Artificial Sequence
  Description of Artificial Sequence: Synthetic oligonucleotide
  Sense strand starting at position 3814 of SEQ ID NO: 588812
ucgcaauugccguuguauu

SEQ ID NO: 891569 - RNA, 19 nt, Artificial Sequence
  Description of Artificial Sequence: Synthetic oligonucleotide
  Antisense strand to SEQ ID NO: 891568
aauacaacggcaauugcga

SEQ ID NO: 891570 - RNA, 19 nt, Artificial Sequence
  Description of Artificial Sequence: Synthetic oligonucleotide
  Sense strand starting at position 3865 of SEQ ID NO: 588812
ucaagcaugagucgaaaga

SEQ ID NO: 891571 - RNA, 19 nt, Artificial Sequence
  Description of Artificial Sequence: Synthetic oligonucleotide
  Antisense strand to SEQ ID NO: 891570
ucuuucgacucaugcuuga

SEQ ID NO: 891572 - RNA, 19 nt, Artificial Sequence
  Description of Artificial Sequence: Synthetic oligonucleotide
  Sense strand starting at position 3929 of SEQ ID NO: 588812
gugaauaagaugcauugua

SEQ ID NO: 891573 - RNA, 19 nt, Artificial Sequence
  Description of Artificial Sequence: Synthetic oligonucleotide
  Antisense strand to SEQ ID NO: 891572
uacaaugcaucuuauucac

SEQ ID NO: 891574 - RNA, 19 nt, Artificial Sequence
  Description of Artificial Sequence: Synthetic oligonucleotide
  Sense strand starting at position 3961 of SEQ ID NO: 588812
guaugcuuuguggaugaca

SEQ ID NO: 891575 - RNA, 19 nt, Artificial Sequence
  Description of Artificial Sequence: Synthetic oligonucleotide
  Antisense strand to SEQ ID NO: 891574
ugucauccacaaagcauac

SEQ ID NO: 891576 - RNA, 19 nt, Artificial Sequence
  Description of Artificial Sequence: Synthetic oligonucleotide
  Sense strand starting at position 21 of SEQ ID NO: 588813
guaaauggucguggaauga

SEQ ID NO: 891577 - RNA, 19 nt, Artificial Sequence
  Description of Artificial Sequence: Synthetic oligonucleotide
  Antisense strand to SEQ ID NO: 891576
ucauuccacgaccauuuac

SEQ ID NO: 891578 - RNA, 19 nt, Artificial Sequence
  Description of Artificial Sequence: Synthetic oligonucleotide
  Sense strand starting at position 25 of SEQ ID NO: 588813
auggucguggaaugaauaa

SEQ ID NO: 891579 - RNA, 19 nt, Artificial Sequence
  Description of Artificial Sequence: Synthetic oligonucleotide
  Antisense strand to SEQ ID NO: 891578
uuauucauuccacgaccau

SEQ ID NO: 891580 - RNA, 19 nt, Artificial Sequence
  Description of Artificial Sequence: Synthetic oligonucleotide
  Sense strand starting at position 214 of SEQ ID NO: 588813
agcagcuccagugagaaau

SEQ ID NO: 891581 - RNA, 19 nt, Artificial Sequence
  Description of Artificial Sequence: Synthetic oligonucleotide
  Antisense strand to SEQ ID NO: 891580
auuucucacuggagcugcu

SEQ ID NO: 891582 - RNA, 19 nt, Artificial Sequence
  Description of Artificial Sequence: Synthetic oligonucleotide
  Sense strand starting at position 250 of SEQ ID NO: 588813
cuagucagguuccuggaua

SEQ ID NO: 891583 - RNA, 19 nt, Artificial Sequence
  Description of Artificial Sequence: Synthetic oligonucleotide
  Antisense strand to SEQ ID NO: 891582
uauccaggaaccugacuag

SEQ ID NO: 891584 - RNA, 19 nt, Artificial Sequence
  Description of Artificial Sequence: Synthetic oligonucleotide
  Sense strand starting at position 441 of SEQ ID NO: 588813
ccugaacaaucccuggauu

SEQ ID NO: 891585 - RNA, 19 nt, Artificial Sequence
  Description of Artificial Sequence: Synthetic oligonucleotide
  Antisense strand to SEQ ID NO: 891584
aauccagggauuguucagg

SEQ ID NO: 891586 - RNA, 19 nt, Artificial Sequence
  Description of Artificial Sequence: Synthetic oligonucleotide
  Sense strand starting at position 443 of SEQ ID NO: 588813
ugaacaaucccuggauugu

SEQ ID NO: 891587 - RNA, 19 nt, Artificial Sequence
  Description of Artificial Sequence: Synthetic oligonucleotide
  Antisense strand to SEQ ID NO: 891586
acaauccagggauuguuca

SEQ ID NO: 891588 - RNA, 19 nt, Artificial Sequence
  Description of Artificial Sequence: Synthetic oligonucleotide
  Sense strand starting at position 544 of SEQ ID NO: 588813
guuucuugucugggaacag

SEQ ID NO: 891589 - RNA, 19 nt, Artificial Sequence
  Description of Artificial Sequence: Synthetic oligonucleotide
  Antisense strand to SEQ ID NO: 891588
cuguucccagacaagaaac

SEQ ID NO: 891590 - RNA, 19 nt, Artificial Sequence
  Description of Artificial Sequence: Synthetic oligonucleotide
  Sense strand starting at position 582 of SEQ ID NO: 588813
aggaacugcuugguccaaa

SEQ ID NO: 891591 - RNA, 19 nt, Artificial Sequence
  Description of Artificial Sequence: Synthetic oligonucleotide
  Antisense strand to SEQ ID NO: 891590
uuuggaccaagcaguuccu

SEQ ID NO: 891592 - RNA, 19 nt, Artificial Sequence
  Description of Artificial Sequence: Synthetic oligonucleotide
  Sense strand starting at position 1021 of SEQ ID NO: 588813
ccagacauuccacgcagaa

SEQ ID NO: 891593 - RNA, 19 nt, Artificial Sequence
  Description of Artificial Sequence: Synthetic oligonucleotide
  Antisense strand to SEQ ID NO: 891592
uucugcguggaaugucugg

SEQ ID NO: 891594 - RNA, 19 nt, Artificial Sequence
  Description of Artificial Sequence: Synthetic oligonucleotide
  Sense strand starting at position 1172 of SEQ ID NO: 588813
gggagacguccuggcagaa

SEQ ID NO: 891595 - RNA, 19 nt, Artificial Sequence
  Description of Artificial Sequence: Synthetic oligonucleotide
  Antisense strand to SEQ ID NO: 891594
uucugccaggacgucuccc

SEQ ID NO: 891596 - RNA, 19 nt, Artificial Sequence
  Description of Artificial Sequence: Synthetic oligonucleotide
  Sense strand starting at position 1263 of SEQ ID NO: 588813
uguugaaagguguaaucac

SEQ ID NO: 891597 - RNA, 19 nt, Artificial Sequence
  Description of Artificial Sequence: Synthetic oligonucleotide
  Antisense strand to SEQ ID NO: 891596
gugauuacaccuuucaaca

SEQ ID NO: 891598 - RNA, 19 nt, Artificial Sequence
  Description of Artificial Sequence: Synthetic oligonucleotide
  Sense strand starting at position 1343 of SEQ ID NO: 588813
ugagucaaaugcuccuaca

SEQ ID NO: 891599 - RNA, 19 nt, Artificial Sequence
  Description of Artificial Sequence: Synthetic oligonucleotide
  Antisense strand to SEQ ID NO: 891598
uguaggagcauuugacuca

SEQ ID NO: 891600 - RNA, 19 nt, Artificial Sequence
  Description of Artificial Sequence: Synthetic oligonucleotide
  Sense strand starting at position 1584 of SEQ ID NO: 588813
cccugacuagcgcagagau

SEQ ID NO: 891601 - RNA, 19 nt, Artificial Sequence
  Description of Artificial Sequence: Synthetic oligonucleotide
  Antisense strand to SEQ ID NO: 891600
aucucugcgcuagucaggg

SEQ ID NO: 891602 - RNA, 19 nt, Artificial Sequence
  Description of Artificial Sequence: Synthetic oligonucleotide
  Sense strand starting at position 2191 of SEQ ID NO: 588813
gggcauggcaacuaauuga

SEQ ID NO: 891603 - RNA, 19 nt, Artificial Sequence
  Description of Artificial Sequence: Synthetic oligonucleotide
  Antisense strand to SEQ ID NO: 891602
ucaauuaguugccaugccc

SEQ ID NO: 891604 - RNA, 19 nt, Artificial Sequence
  Description of Artificial Sequence: Synthetic oligonucleotide
  Sense strand starting at position 2258 of SEQ ID NO: 588813
uggagucccuggucuggaa

SEQ ID NO: 891605 - RNA, 19 nt, Artificial Sequence
  Description of Artificial Sequence: Synthetic oligonucleotide
  Antisense strand to SEQ ID NO: 891604
uuccagaccagggacucca

SEQ ID NO: 891606 - RNA, 19 nt, Artificial Sequence
  Description of Artificial Sequence: Synthetic oligonucleotide
  Sense strand starting at position 2287 of SEQ ID NO: 588813
gcaauuucgucuuuguaga

SEQ ID NO: 891607 - RNA, 19 nt, Artificial Sequence
  Description of Artificial Sequence: Synthetic oligonucleotide
  Antisense strand to SEQ ID NO: 891606
ucuacaaagacgaaauugc

SEQ ID NO: 891608 - RNA, 19 nt, Artificial Sequence
  Description of Artificial Sequence: Synthetic oligonucleotide
  Sense strand starting at position 2288 of SEQ ID NO: 588813
caauuucgucuuuguagau

SEQ ID NO: 891609 - RNA, 19 nt, Artificial Sequence
  Description of Artificial Sequence: Synthetic oligonucleotide
  Antisense strand to SEQ ID NO: 891608
aucuacaaagacgaaauug

SEQ ID NO: 891610 - RNA, 19 nt, Artificial Sequence
  Description of Artificial Sequence: Synthetic oligonucleotide
  Sense strand starting at position 2349 of SEQ ID NO: 588813
gcccucauuucucuucgaa

SEQ ID NO: 891611 - RNA, 19 nt, Artificial Sequence
  Description of Artificial Sequence: Synthetic oligonucleotide
  Antisense strand to SEQ ID NO: 891610
uucgaagagaaaugagggc

SEQ ID NO: 891612 - RNA, 19 nt, Artificial Sequence
  Description of Artificial Sequence: Synthetic oligonucleotide
  Sense strand starting at position 2352 of SEQ ID NO: 588813
cucauuucucuucgaaagu

SEQ ID NO: 891613 - RNA, 19 nt, Artificial Sequence
  Description of Artificial Sequence: Synthetic oligonucleotide
  Antisense strand to SEQ ID NO: 891612
acuuucgaagagaaaugag

SEQ ID NO: 891614 - RNA, 19 nt, Artificial Sequence
  Description of Artificial Sequence: Synthetic oligonucleotide
  Sense strand starting at position 2423 of SEQ ID NO: 588813
cugugaaagucaccuacuu

SEQ ID NO: 891615 - RNA, 19 nt, Artificial Sequence
  Description of Artificial Sequence: Synthetic oligonucleotide
  Antisense strand to SEQ ID NO: 891614
aaguaggugacuuucacag

SEQ ID NO: 891616 - RNA, 19 nt, Artificial Sequence
  Description of Artificial Sequence: Synthetic oligonucleotide
  Sense strand starting at position 2450 of SEQ ID NO: 588813
aagagcuccgacuaucaga

SEQ ID NO: 891617 - RNA, 19 nt, Artificial Sequence
  Description of Artificial Sequence: Synthetic oligonucleotide
  Antisense strand to SEQ ID NO: 891616
ucugauagucggagcucuu

SEQ ID NO: 891618 - RNA, 19 nt, Artificial Sequence
  Description of Artificial Sequence: Synthetic oligonucleotide
  Sense strand starting at position 2580 of SEQ ID NO: 588813
agaucuuagagcuggccau

SEQ ID NO: 891619 - RNA, 19 nt, Artificial Sequence
  Description of Artificial Sequence: Synthetic oligonucleotide
  Antisense strand to SEQ ID NO: 891618
auggccagcucuaagaucu

SEQ ID NO: 891620 - RNA, 19 nt, Artificial Sequence
  Description of Artificial Sequence: Synthetic oligonucleotide
  Sense strand starting at position 2696 of SEQ ID NO: 588813
ucucauaugggucauucga

SEQ ID NO: 891621 - RNA, 19 nt, Artificial Sequence
  Description of Artificial Sequence: Synthetic oligonucleotide
  Antisense strand to SEQ ID NO: 891620
ucgaaugacccauaugaga

SEQ ID NO: 891622 - RNA, 19 nt, Artificial Sequence
  Description of Artificial Sequence: Synthetic oligonucleotide
  Sense strand starting at position 2698 of SEQ ID NO: 588813
ucauaugggucauucgaau

SEQ ID NO: 891623 - RNA, 19 nt, Artificial Sequence
  Description of Artificial Sequence: Synthetic oligonucleotide
  Antisense strand to SEQ ID NO: 891622
auucgaaugacccauauga

SEQ ID NO: 891624 - RNA, 19 nt, Artificial Sequence
  Description of Artificial Sequence: Synthetic oligonucleotide
  Sense strand starting at position 2710 of SEQ ID NO: 588813
uucgaauaauuugaagagu

SEQ ID NO: 891625 - RNA, 19 nt, Artificial Sequence
  Description of Artificial Sequence: Synthetic oligonucleotide
  Antisense strand to SEQ ID NO: 891624
acucuucaaauuauucgaa

SEQ ID NO: 891626 - RNA, 19 nt, Artificial Sequence
  Description of Artificial Sequence: Synthetic oligonucleotide
  Sense strand starting at position 2782 of SEQ ID NO: 588813
ucacuuugcagaugagaga

SEQ ID NO: 891627 - RNA, 19 nt, Artificial Sequence
  Description of Artificial Sequence: Synthetic oligonucleotide
  Antisense strand to SEQ ID NO: 891626
ucucucaucugcaaaguga

SEQ ID NO: 891628 - RNA, 19 nt, Artificial Sequence
  Description of Artificial Sequence: Synthetic oligonucleotide
  Sense strand starting at position 2882 of SEQ ID NO: 588813
gacagaaggcugcauccau

SEQ ID NO: 891629 - RNA, 19 nt, Artificial Sequence
  Description of Artificial Sequence: Synthetic oligonucleotide
  Antisense strand to SEQ ID NO: 891628
auggaugcagccuucuguc

SEQ ID NO: 891630 - RNA, 19 nt, Artificial Sequence
  Description of Artificial Sequence: Synthetic oligonucleotide
  Sense strand starting at position 2911 of SEQ ID NO: 588813
uacucagugcguguuacua

SEQ ID NO: 891631 - RNA, 19 nt, Artificial Sequence
  Description of Artificial Sequence: Synthetic oligonucleotide
  Antisense strand to SEQ ID NO: 891630
uaguaacacgcacugagua

SEQ ID NO: 891632 - RNA, 19 nt, Artificial Sequence
  Description of Artificial Sequence: Synthetic oligonucleotide
  Sense strand starting at position 2920 of SEQ ID NO: 588813
cguguuacuagcuagauaa

SEQ ID NO: 891633 - RNA, 19 nt, Artificial Sequence
  Description of Artificial Sequence: Synthetic oligonucleotide
  Antisense strand to SEQ ID NO: 891632
uuaucuagcuaguaacacg

SEQ ID NO: 891634 - RNA, 19 nt, Artificial Sequence
  Description of Artificial Sequence: Synthetic oligonucleotide
  Sense strand starting at position 2922 of SEQ ID NO: 588813
uguuacuagcuagauaaua

SEQ ID NO: 891635 - RNA, 19 nt, Artificial Sequence
  Description of Artificial Sequence: Synthetic oligonucleotide
  Antisense strand to SEQ ID NO: 891634
uauuaucuagcuaguaaca

SEQ ID NO: 891636 - RNA, 19 nt, Artificial Sequence
  Description of Artificial Sequence: Synthetic oligonucleotide
  Sense strand starting at position 2934 of SEQ ID NO: 588813
gauaauaaguguuugcaug

SEQ ID NO: 891637 - RNA, 19 nt, Artificial Sequence
  Description of Artificial Sequence: Synthetic oligonucleotide
  Antisense strand to SEQ ID NO: 891636
caugcaaacacuuauuauc

SEQ ID NO: 891638 - RNA, 19 nt, Artificial Sequence
  Description of Artificial Sequence: Synthetic oligonucleotide
  Sense strand starting at position 2945 of SEQ ID NO: 588813
uuugcaugugaucaggaau

SEQ ID NO: 891639 - RNA, 19 nt, Artificial Sequence
  Description of Artificial Sequence: Synthetic oligonucleotide
  Antisense strand to SEQ ID NO: 891638
auuccugaucacaugcaaa

SEQ ID NO: 891640 - RNA, 19 nt, Artificial Sequence
  Description of Artificial Sequence: Synthetic oligonucleotide
  Sense strand starting at position 2948 of SEQ ID NO: 588813
gcaugugaucaggaauccu

SEQ ID NO: 891641 - RNA, 19 nt, Artificial Sequence
  Description of Artificial Sequence: Synthetic oligonucleotide
  Antisense strand to SEQ ID NO: 891640
aggauuccugaucacaugc

SEQ ID NO: 891642 - RNA, 19 nt, Artificial Sequence
  Description of Artificial Sequence: Synthetic oligonucleotide
  Sense strand starting at position 3203 of SEQ ID NO: 588813
gcgaaacuaggguaguuua

SEQ ID NO: 891643 - RNA, 19 nt, Artificial Sequence
  Description of Artificial Sequence: Synthetic oligonucleotide
  Antisense strand to SEQ ID NO: 891642
uaaacuacccuaguuucgc

SEQ ID NO: 891644 - RNA, 19 nt, Artificial Sequence
  Description of Artificial Sequence: Synthetic oligonucleotide
  Sense strand starting at position 3269 of SEQ ID NO: 588813
ggacauuauugagugcuua

SEQ ID NO: 891645 - RNA, 19 nt, Artificial Sequence
  Description of Artificial Sequence: Synthetic oligonucleotide
  Antisense strand to SEQ ID NO: 891644
uaagcacucaauaaugucc

SEQ ID NO: 891646 - RNA, 19 nt, Artificial Sequence
  Description of Artificial Sequence: Synthetic oligonucleotide
  Sense strand starting at position 3270 of SEQ ID NO: 588813
gacauuauugagugcuuac

SEQ ID NO: 891647 - RNA, 19 nt, Artificial Sequence
  Description of Artificial Sequence: Synthetic oligonucleotide
  Antisense strand to SEQ ID NO: 891646
guaagcacucaauaauguc

SEQ ID NO: 891648 - RNA, 19 nt, Artificial Sequence
  Description of Artificial Sequence: Synthetic oligonucleotide
  Sense strand starting at position 3336 of SEQ ID NO: 588813
ugucuuugaccucaugaca

SEQ ID NO: 891649 - RNA, 19 nt, Artificial Sequence
  Description of Artificial Sequence: Synthetic oligonucleotide
  Antisense strand to SEQ ID NO: 891648
ugucaugaggucaaagaca

SEQ ID NO: 891650 - RNA, 19 nt, Artificial Sequence
  Description of Artificial Sequence: Synthetic oligonucleotide
  Sense strand starting at position 3424 of SEQ ID NO: 588813
guuguuaauaaagggcaaa

SEQ ID NO: 891651 - RNA, 19 nt, Artificial Sequence
  Description of Artificial Sequence: Synthetic oligonucleotide
  Antisense strand to SEQ ID NO: 891650
uuugcccuuuauuaacaac

SEQ ID NO: 891652 - RNA, 19 nt, Artificial Sequence
  Description of Artificial Sequence: Synthetic oligonucleotide
  Sense strand starting at position 3491 of SEQ ID NO: 588813
cagagaagguuucugcaaa

SEQ ID NO: 891653 - RNA, 19 nt, Artificial Sequence
  Description of Artificial Sequence: Synthetic oligonucleotide
  Antisense strand to SEQ ID NO: 891652
uuugcagaaaccuucucug

SEQ ID NO: 891654 - RNA, 19 nt, Artificial Sequence
  Description of Artificial Sequence: Synthetic oligonucleotide
  Sense strand starting at position 3758 of SEQ ID NO: 588813
ggguaagguaccugauccu

SEQ ID NO: 891655 - RNA, 19 nt, Artificial Sequence
  Description of Artificial Sequence: Synthetic oligonucleotide
  Antisense strand to SEQ ID NO: 891654
aggaucagguaccuuaccc

SEQ ID NO: 891656 - RNA, 19 nt, Artificial Sequence
  Description of Artificial Sequence: Synthetic oligonucleotide
  Sense strand starting at position 289 of SEQ ID NO: 588814
uccucauaccguugaagag

SEQ ID NO: 891657 - RNA, 19 nt, Artificial Sequence
  Description of Artificial Sequence: Synthetic oligonucleotide
  Antisense strand to SEQ ID NO: 891656
cucuucaacgguaugagga

SEQ ID NO: 891658 - RNA, 19 nt, Artificial Sequence
  Description of Artificial Sequence: Synthetic oligonucleotide
  Sense strand starting at position 290 of SEQ ID NO: 588814
ccucauaccguugaagaga

SEQ ID NO: 891659 - RNA, 19 nt, Artificial Sequence
  Description of Artificial Sequence: Synthetic oligonucleotide
  Antisense strand to SEQ ID NO: 891658
ucucuucaacgguaugagg

SEQ ID NO: 891660 - RNA, 19 nt, Artificial Sequence
  Description of Artificial Sequence: Synthetic oligonucleotide
  Sense strand starting at position 587 of SEQ ID NO: 588814
auauuucucuuugaggaaa

SEQ ID NO: 891661 - RNA, 19 nt, Artificial Sequence
  Description of Artificial Sequence: Synthetic oligonucleotide
  Antisense strand to SEQ ID NO: 891660
uuuccucaaagagaaauau

SEQ ID NO: 891662 - RNA, 19 nt, Artificial Sequence
  Description of Artificial Sequence: Synthetic oligonucleotide
  Sense strand starting at position 949 of SEQ ID NO: 588814
aggcuaaauuuacaugacu

SEQ ID NO: 891663 - RNA, 19 nt, Artificial Sequence
  Description of Artificial Sequence: Synthetic oligonucleotide
  Antisense strand to SEQ ID NO: 891662
agucauguaaauuuagccu

SEQ ID NO: 891664 - RNA, 19 nt, Artificial Sequence
  Description of Artificial Sequence: Synthetic oligonucleotide
  Sense strand starting at position 974 of SEQ ID NO: 588814
uucuaaauaggauggugau

SEQ ID NO: 891665 - RNA, 19 nt, Artificial Sequence
  Description of Artificial Sequence: Synthetic oligonucleotide
  Antisense strand to SEQ ID NO: 891664
aucaccauccuauuuagaa

SEQ ID NO: 891666 - RNA, 19 nt, Artificial Sequence
  Description of Artificial Sequence: Synthetic oligonucleotide
  Sense strand starting at position 986 of SEQ ID NO: 588814
uggugauaagaauggugau

SEQ ID NO: 891667 - RNA, 19 nt, Artificial Sequence
  Description of Artificial Sequence: Synthetic oligonucleotide
  Antisense strand to SEQ ID NO: 891666
aucaccauucuuaucacca

SEQ ID NO: 891668 - RNA, 19 nt, Artificial Sequence
  Description of Artificial Sequence: Synthetic oligonucleotide
  Sense strand starting at position 987 of SEQ ID NO: 588814
ggugauaagaauggugaua

SEQ ID NO: 891669 - RNA, 19 nt, Artificial Sequence
  Description of Artificial Sequence: Synthetic oligonucleotide
  Antisense strand to SEQ ID NO: 891668
uaucaccauucuuaucacc

SEQ ID NO: 891670 - RNA, 19 nt, Artificial Sequence
  Description of Artificial Sequence: Synthetic oligonucleotide
  Sense strand starting at position 1092 of SEQ ID NO: 588814
caguuugauuaugccagaa

SEQ ID NO: 891671 - RNA, 19 nt, Artificial Sequence
  Description of Artificial Sequence: Synthetic oligonucleotide
  Antisense strand to SEQ ID NO: 891670
uucuggcauaaucaaacug

SEQ ID NO: 891672 - RNA, 19 nt, Artificial Sequence
  Description of Artificial Sequence: Synthetic oligonucleotide
  Sense strand starting at position 1096 of SEQ ID NO: 588814
uugauuaugccagaaguua

SEQ ID NO: 891673 - RNA, 19 nt, Artificial Sequence
  Description of Artificial Sequence: Synthetic oligonucleotide
  Antisense strand to SEQ ID NO: 891672
uaacuucuggcauaaucaa

SEQ ID NO: 891674 - RNA, 19 nt, Artificial Sequence
  Description of Artificial Sequence: Synthetic oligonucleotide
  Sense strand starting at position 1112 of SEQ ID NO: 588814
uuaauacuacaguguugaa

SEQ ID NO: 891675 - RNA, 19 nt, Artificial Sequence
  Description of Artificial Sequence: Synthetic oligonucleotide
  Antisense strand to SEQ ID NO: 891674
uucaacacuguaguauuaa

SEQ ID NO: 891676 - RNA, 19 nt, Artificial Sequence
  Description of Artificial Sequence: Synthetic oligonucleotide
  Sense strand starting at position 1154 of SEQ ID NO: 588814
cugugaaaugccuacuaaa

SEQ ID NO: 891677 - RNA, 19 nt, Artificial Sequence
  Description of Artificial Sequence: Synthetic oligonucleotide
  Antisense strand to SEQ ID NO: 891676
uuuaguaggcauuucacag

SEQ ID NO: 891678 - RNA, 19 nt, Artificial Sequence
  Description of Artificial Sequence: Synthetic oligonucleotide
  Sense strand starting at position 1165 of SEQ ID NO: 588814
cuacuaaagucauuaguac

SEQ ID NO: 891679 - RNA, 19 nt, Artificial Sequence
  Description of Artificial Sequence: Synthetic oligonucleotide
  Antisense strand to SEQ ID NO: 891678
guacuaaugacuuuaguag

SEQ ID NO: 891680 - RNA, 19 nt, Artificial Sequence
  Description of Artificial Sequence: Synthetic oligonucleotide
  Sense strand starting at position 1174 of SEQ ID NO: 588814
ucauuaguacuagacaagu

SEQ ID NO: 891681 - RNA, 19 nt, Artificial Sequence
  Description of Artificial Sequence: Synthetic oligonucleotide
  Antisense strand to SEQ ID NO: 891680
acuugucuaguacuaauga

SEQ ID NO: 891682 - RNA, 19 nt, Artificial Sequence
  Description of Artificial Sequence: Synthetic oligonucleotide
  Sense strand starting at position 1183 of SEQ ID NO: 588814
cuagacaagucaguuauca

SEQ ID NO: 891683 - RNA, 19 nt, Artificial Sequence
  Description of Artificial Sequence: Synthetic oligonucleotide
  Antisense strand to SEQ ID NO: 891682
ugauaacugacuugucuag

SEQ ID NO: 891684 - RNA, 19 nt, Artificial Sequence
  Description of Artificial Sequence: Synthetic oligonucleotide
  Sense strand starting at position 1294 of SEQ ID NO: 588814
gaaagaauuuggcacaaag

SEQ ID NO: 891685 - RNA, 19 nt, Artificial Sequence
  Description of Artificial Sequence: Synthetic oligonucleotide
  Antisense strand to SEQ ID NO: 891684
cuuugugccaaauucuuuc

SEQ ID NO: 891686 - RNA, 19 nt, Artificial Sequence
  Description of Artificial Sequence: Synthetic oligonucleotide
  Sense strand starting at position 1456 of SEQ ID NO: 588814
ggccguguugcuuugaaac

SEQ ID NO: 891687 - RNA, 19 nt, Artificial Sequence
  Description of Artificial Sequence: Synthetic oligonucleotide
  Antisense strand to SEQ ID NO: 891686
guuucaaagcaacacggcc

SEQ ID NO: 891688 - RNA, 19 nt, Artificial Sequence
  Description of Artificial Sequence: Synthetic oligonucleotide
  Sense strand starting at position 1462 of SEQ ID NO: 588814
guugcuuugaaacagugaa

SEQ ID NO: 891689 - RNA, 19 nt, Artificial Sequence
  Description of Artificial Sequence: Synthetic oligonucleotide
  Antisense strand to SEQ ID NO: 891688
uucacuguuucaaagcaac

SEQ ID NO: 891690 - RNA, 19 nt, Artificial Sequence
  Description of Artificial Sequence: Synthetic oligonucleotide
  Sense strand starting at position 1472 of SEQ ID NO: 588814
aacagugaauucgccaaga

SEQ ID NO: 891691 - RNA, 19 nt, Artificial Sequence
  Description of Artificial Sequence: Synthetic oligonucleotide
  Antisense strand to SEQ ID NO: 891690
ucuuggcgaauucacuguu

SEQ ID NO: 891692 - RNA, 19 nt, Artificial Sequence
  Description of Artificial Sequence: Synthetic oligonucleotide
  Sense strand starting at position 1614 of SEQ ID NO: 588814
gcagccaucaccgagacua

SEQ ID NO: 891693 - RNA, 19 nt, Artificial Sequence
  Description of Artificial Sequence: Synthetic oligonucleotide
  Antisense strand to SEQ ID NO: 891692
uagucucggugauggcugc

SEQ ID NO: 891694 - RNA, 19 nt, Artificial Sequence
  Description of Artificial Sequence: Synthetic oligonucleotide
  Sense strand starting at position 1880 of SEQ ID NO: 588814
accuaaguucuuugaacug

SEQ ID NO: 891695 - RNA, 19 nt, Artificial Sequence
  Description of Artificial Sequence: Synthetic oligonucleotide
  Antisense strand to SEQ ID NO: 891694
caguucaaagaacuuaggu

SEQ ID NO: 891696 - RNA, 19 nt, Artificial Sequence
  Description of Artificial Sequence: Synthetic oligonucleotide
  Sense strand starting at position 2171 of SEQ ID NO: 588814
ggcuacgaccucuaagagu

SEQ ID NO: 891697 - RNA, 19 nt, Artificial Sequence
  Description of Artificial Sequence: Synthetic oligonucleotide
  Antisense strand to SEQ ID NO: 891696
acucuuagaggucguagcc

SEQ ID NO: 891698 - RNA, 19 nt, Artificial Sequence
  Description of Artificial Sequence: Synthetic oligonucleotide
  Sense strand starting at position 2365 of SEQ ID NO: 588814
ggacaugacuagccucaga

SEQ ID NO: 891699 - RNA, 19 nt, Artificial Sequence
  Description of Artificial Sequence: Synthetic oligonucleotide
  Antisense strand to SEQ ID NO: 891698
ucugaggcuagucaugucc

SEQ ID NO: 891700 - RNA, 19 nt, Artificial Sequence
  Description of Artificial Sequence: Synthetic oligonucleotide
  Sense strand starting at position 2437 of SEQ ID NO: 588814
gagagaaucugagggauuu

SEQ ID NO: 891701 - RNA, 19 nt, Artificial Sequence
  Description of Artificial Sequence: Synthetic oligonucleotide
  Antisense strand to SEQ ID NO: 891700
aaaucccucagauucucuc

SEQ ID NO: 891702 - RNA, 19 nt, Artificial Sequence
  Description of Artificial Sequence: Synthetic oligonucleotide
  Sense strand starting at position 2455 of SEQ ID NO: 588814
ugaggaauuucagauguug

SEQ ID NO: 891703 - RNA, 19 nt, Artificial Sequence
  Description of Artificial Sequence: Synthetic oligonucleotide
  Antisense strand to SEQ ID NO: 891702
caacaucugaaauuccuca

SEQ ID NO: 891704 - RNA, 19 nt, Artificial Sequence
  Description of Artificial Sequence: Synthetic oligonucleotide
  Sense strand starting at position 2499 of SEQ ID NO: 588814
cgguauucugcccugucua

SEQ ID NO: 891705 - RNA, 19 nt, Artificial Sequence
  Description of Artificial Sequence: Synthetic oligonucleotide
  Antisense strand to SEQ ID NO: 891704
uagacagggcagaauaccg

SEQ ID NO: 891706 - RNA, 19 nt, Artificial Sequence
  Description of Artificial Sequence: Synthetic oligonucleotide
  Sense strand starting at position 2527 of SEQ ID NO: 588814
aucacuuggccuggacaaa

SEQ ID NO: 891707 - RNA, 19 nt, Artificial Sequence
  Description of Artificial Sequence: Synthetic oligonucleotide
  Antisense strand to SEQ ID NO: 891706
uuuguccaggccaagugau

SEQ ID NO: 891708 - RNA, 19 nt, Artificial Sequence
  Description of Artificial Sequence: Synthetic oligonucleotide
  Sense strand starting at position 2700 of SEQ ID NO: 588814
cucugaucucaguacuagu

SEQ ID NO: 891709 - RNA, 19 nt, Artificial Sequence
  Description of Artificial Sequence: Synthetic oligonucleotide
  Antisense strand to SEQ ID NO: 891708
acuaguacugagaucagag

SEQ ID NO: 891710 - RNA, 19 nt, Artificial Sequence
  Description of Artificial Sequence: Synthetic oligonucleotide
  Sense strand starting at position 2804 of SEQ ID NO: 588814
uaaugauaggacgguaauu

SEQ ID NO: 891711 - RNA, 19 nt, Artificial Sequence
  Description of Artificial Sequence: Synthetic oligonucleotide
  Antisense strand to SEQ ID NO: 891710
aauuaccguccuaucauua

SEQ ID NO: 891712 - RNA, 19 nt, Artificial Sequence
  Description of Artificial Sequence: Synthetic oligonucleotide
  Sense strand starting at position 2844 of SEQ ID NO: 588814
gcuguaugucucgcagaac

SEQ ID NO: 891713 - RNA, 19 nt, Artificial Sequence
  Description of Artificial Sequence: Synthetic oligonucleotide
  Antisense strand to SEQ ID NO: 891712
guucugcgagacauacagc

SEQ ID NO: 891714 - RNA, 19 nt, Artificial Sequence
  Description of Artificial Sequence: Synthetic oligonucleotide
  Sense strand starting at position 2853 of SEQ ID NO: 588814
cucgcagaacuaugauaaa

SEQ ID NO: 891715 - RNA, 19 nt, Artificial Sequence
  Description of Artificial Sequence: Synthetic oligonucleotide
  Antisense strand to SEQ ID NO: 891714
uuuaucauaguucugcgag

SEQ ID NO: 891716 - RNA, 19 nt, Artificial Sequence
  Description of Artificial Sequence: Synthetic oligonucleotide
  Sense strand starting at position 2874 of SEQ ID NO: 588814
accuaaugacgucagcuaa

SEQ ID NO: 891717 - RNA, 19 nt, Artificial Sequence
  Description of Artificial Sequence: Synthetic oligonucleotide
  Antisense strand to SEQ ID NO: 891716
uuagcugacgucauuaggu

SEQ ID NO: 891718 - RNA, 19 nt, Artificial Sequence
  Description of Artificial Sequence: Synthetic oligonucleotide
  Sense strand starting at position 2903 of SEQ ID NO: 588814
auggaagaaugaucgcuau

SEQ ID NO: 891719 - RNA, 19 nt, Artificial Sequence
  Description of Artificial Sequence: Synthetic oligonucleotide
  Antisense strand to SEQ ID NO: 891718
auagcgaucauucuuccau

SEQ ID NO: 891720 - RNA, 19 nt, Artificial Sequence
  Description of Artificial Sequence: Synthetic oligonucleotide
  Sense strand starting at position 2906 of SEQ ID NO: 588814
gaagaaugaucgcuauauc

SEQ ID NO: 891721 - RNA, 19 nt, Artificial Sequence
  Description of Artificial Sequence: Synthetic oligonucleotide
  Antisense strand to SEQ ID NO: 891720
gauauagcgaucauucuuc

SEQ ID NO: 891722 - RNA, 19 nt, Artificial Sequence
  Description of Artificial Sequence: Synthetic oligonucleotide
  Sense strand starting at position 3021 of SEQ ID NO: 588814
agggcuuaccuguaaauga

SEQ ID NO: 891723 - RNA, 19 nt, Artificial Sequence
  Description of Artificial Sequence: Synthetic oligonucleotide
  Antisense strand to SEQ ID NO: 891722
ucauuuacagguaagcccu

SEQ ID NO: 891724 - RNA, 19 nt, Artificial Sequence
  Description of Artificial Sequence: Synthetic oligonucleotide
  Sense strand starting at position 3038 of SEQ ID NO: 588814
gaaguaagauggucaacac

SEQ ID NO: 891725 - RNA, 19 nt, Artificial Sequence
  Description of Artificial Sequence: Synthetic oligonucleotide
  Antisense strand to SEQ ID NO: 891724
guguugaccaucuuacuuc

SEQ ID NO: 891726 - RNA, 19 nt, Artificial Sequence
  Description of Artificial Sequence: Synthetic oligonucleotide
  Sense strand starting at position 3086 of SEQ ID NO: 588814
aguggaacaccuugacuau

SEQ ID NO: 891727 - RNA, 19 nt, Artificial Sequence
  Description of Artificial Sequence: Synthetic oligonucleotide
  Antisense strand to SEQ ID NO: 891726
auagucaagguguuccacu

SEQ ID NO: 891728 - RNA, 19 nt, Artificial Sequence
  Description of Artificial Sequence: Synthetic oligonucleotide
  Sense strand starting at position 3494 of SEQ ID NO: 588814
uugcaacagaaggguuaua

SEQ ID NO: 891729 - RNA, 19 nt, Artificial Sequence
  Description of Artificial Sequence: Synthetic oligonucleotide
  Antisense strand to SEQ ID NO: 891728
uauaacccuucuguugcaa

SEQ ID NO: 891730 - RNA, 19 nt, Artificial Sequence
  Description of Artificial Sequence: Synthetic oligonucleotide
  Sense strand starting at position 3522 of SEQ ID NO: 588814
ggucacauugcuuagagca

SEQ ID NO: 891731 - RNA, 19 nt, Artificial Sequence
  Description of Artificial Sequence: Synthetic oligonucleotide
  Antisense strand to SEQ ID NO: 891730
ugcucuaagcaaugugacc

SEQ ID NO: 891732 - RNA, 19 nt, Artificial Sequence
  Description of Artificial Sequence: Synthetic oligonucleotide
  Sense strand starting at position 3527 of SEQ ID NO: 588814
cauugcuuagagcaaagua

SEQ ID NO: 891733 - RNA, 19 nt, Artificial Sequence
  Description of Artificial Sequence: Synthetic oligonucleotide
  Antisense strand to SEQ ID NO: 891732
uacuuugcucuaagcaaug

SEQ ID NO: 891734 - RNA, 19 nt, Artificial Sequence
  Description of Artificial Sequence: Synthetic oligonucleotide
  Sense strand starting at position 3908 of SEQ ID NO: 588814
guuauucuuguuuaccaua

SEQ ID NO: 891735 - RNA, 19 nt, Artificial Sequence
  Description of Artificial Sequence: Synthetic oligonucleotide
  Antisense strand to SEQ ID NO: 891734
uaugguaaacaagaauaac

SEQ ID NO: 891736 - RNA, 19 nt, Artificial Sequence
  Description of Artificial Sequence: Synthetic oligonucleotide
  Sense strand starting at position 128 of SEQ ID NO: 588815
cuuagucacucaggcuaga

SEQ ID NO: 891737 - RNA, 19 nt, Artificial Sequence
  Description of Artificial Sequence: Synthetic oligonucleotide
  Antisense strand to SEQ ID NO: 891736
ucuagccugagugacuaag

SEQ ID NO: 891738 - RNA, 19 nt, Artificial Sequence
  Description of Artificial Sequence: Synthetic oligonucleotide
  Sense strand starting at position 928 of SEQ ID NO: 588815
gugcaaacuuuggcaaaga

SEQ ID NO: 891739 - RNA, 19 nt, Artificial Sequence
  Description of Artificial Sequence: Synthetic oligonucleotide
  Antisense strand to SEQ ID NO: 891738
ucuuugccaaaguuugcac

SEQ ID NO: 891740 - RNA, 19 nt, Artificial Sequence
  Description of Artificial Sequence: Synthetic oligonucleotide
  Sense strand starting at position 1288 of SEQ ID NO: 588815
aggccguagucggugaaga

SEQ ID NO: 891741 - RNA, 19 nt, Artificial Sequence
  Description of Artificial Sequence: Synthetic oligonucleotide
  Antisense strand to SEQ ID NO: 891740
ucuucaccgacuacggccu

SEQ ID NO: 891742 - RNA, 19 nt, Artificial Sequence
  Description of Artificial Sequence: Synthetic oligonucleotide
  Sense strand starting at position 1289 of SEQ ID NO: 588815
ggccguagucggugaagag

SEQ ID NO: 891743 - RNA, 19 nt, Artificial Sequence
  Description of Artificial Sequence: Synthetic oligonucleotide
  Antisense strand to SEQ ID NO: 891742
cucuucaccgacuacggcc

SEQ ID NO: 891744 - RNA, 19 nt, Artificial Sequence
  Description of Artificial Sequence: Synthetic oligonucleotide
  Sense strand starting at position 1334 of SEQ ID NO: 588815
aggagaugaacuuguacuu

SEQ ID NO: 891745 - RNA, 19 nt, Artificial Sequence
  Description of Artificial Sequence: Synthetic oligonucleotide
  Antisense strand to SEQ ID NO: 891744
aaguacaaguucaucuccu

SEQ ID NO: 891746 - RNA, 19 nt, Artificial Sequence
  Description of Artificial Sequence: Synthetic oligonucleotide
  Sense strand starting at position 1356 of SEQ ID NO: 588815
gcaggacucguagagaauc

SEQ ID NO: 891747 - RNA, 19 nt, Artificial Sequence
  Description of Artificial Sequence: Synthetic oligonucleotide
  Antisense strand to SEQ ID NO: 891746
gauucucuacgaguccugc

SEQ ID NO: 891748 - RNA, 19 nt, Artificial Sequence
  Description of Artificial Sequence: Synthetic oligonucleotide
  Sense strand starting at position 1516 of SEQ ID NO: 588815
ggccgaaucacguacugau

SEQ ID NO: 891749 - RNA, 19 nt, Artificial Sequence
  Description of Artificial Sequence: Synthetic oligonucleotide
  Antisense strand to SEQ ID NO: 891748
aucaguacgugauucggcc

SEQ ID NO: 891750 - RNA, 19 nt, Artificial Sequence
  Description of Artificial Sequence: Synthetic oligonucleotide
  Sense strand starting at position 1658 of SEQ ID NO: 588815
aggccugguugacaaugau

SEQ ID NO: 891751 - RNA, 19 nt, Artificial Sequence
  Description of Artificial Sequence: Synthetic oligonucleotide
  Antisense strand to SEQ ID NO: 891750
aucauugucaaccaggccu

SEQ ID NO: 891752 - RNA, 19 nt, Artificial Sequence
  Description of Artificial Sequence: Synthetic oligonucleotide
  Sense strand starting at position 1670 of SEQ ID NO: 588815
caaugaucucugugucuga

SEQ ID NO: 891753 - RNA, 19 nt, Artificial Sequence
  Description of Artificial Sequence: Synthetic oligonucleotide
  Antisense strand to SEQ ID NO: 891752
ucagacacagagaucauug

SEQ ID NO: 891754 - RNA, 19 nt, Artificial Sequence
  Description of Artificial Sequence: Synthetic oligonucleotide
  Sense strand starting at position 2702 of SEQ ID NO: 588815
cgcagagguugucucaaag

SEQ ID NO: 891755 - RNA, 19 nt, Artificial Sequence
  Description of Artificial Sequence: Synthetic oligonucleotide
  Antisense strand to SEQ ID NO: 891754
cuuugagacaaccucugcg

SEQ ID NO: 891756 - RNA, 19 nt, Artificial Sequence
  Description of Artificial Sequence: Synthetic oligonucleotide
  Sense strand starting at position 3100 of SEQ ID NO: 588815
caguucucuccaggcugau

SEQ ID NO: 891757 - RNA, 19 nt, Artificial Sequence
  Description of Artificial Sequence: Synthetic oligonucleotide
  Antisense strand to SEQ ID NO: 891756
aucagccuggagagaacug

SEQ ID NO: 891758 - RNA, 19 nt, Artificial Sequence
  Description of Artificial Sequence: Synthetic oligonucleotide
  Sense strand starting at position 3156 of SEQ ID NO: 588815
ggaggagaauccggcuguu

SEQ ID NO: 891759 - RNA, 19 nt, Artificial Sequence
  Description of Artificial Sequence: Synthetic oligonucleotide
  Antisense strand to SEQ ID NO: 891758
aacagccggauucuccucc

SEQ ID NO: 891760 - RNA, 19 nt, Artificial Sequence
  Description of Artificial Sequence: Synthetic oligonucleotide
  Sense strand starting at position 3159 of SEQ ID NO: 588815
ggagaauccggcuguucuc

SEQ ID NO: 891761 - RNA, 19 nt, Artificial Sequence
  Description of Artificial Sequence: Synthetic oligonucleotide
  Antisense strand to SEQ ID NO: 891760
gagaacagccggauucucc

SEQ ID NO: 891762 - RNA, 19 nt, Artificial Sequence
  Description of Artificial Sequence: Synthetic oligonucleotide
  Sense strand starting at position 3340 of SEQ ID NO: 588815
ugccguagcucagauagau

SEQ ID NO: 891763 - RNA, 19 nt, Artificial Sequence
  Description of Artificial Sequence: Synthetic oligonucleotide
  Antisense strand to SEQ ID NO: 891762
aucuaucugagcuacggca

SEQ ID NO: 891764 - RNA, 19 nt, Artificial Sequence
  Description of Artificial Sequence: Synthetic oligonucleotide
  Sense strand starting at position 3350 of SEQ ID NO: 588815
cagauagaucgcugugacu

SEQ ID NO: 891765 - RNA, 19 nt, Artificial Sequence
  Description of Artificial Sequence: Synthetic oligonucleotide
  Antisense strand to SEQ ID NO: 891764
agucacagcgaucuaucug

SEQ ID NO: 891766 - RNA, 19 nt, Artificial Sequence
  Description of Artificial Sequence: Synthetic oligonucleotide
  Sense strand starting at position 3352 of SEQ ID NO: 588815
gauagaucgcugugacucu

SEQ ID NO: 891767 - RNA, 19 nt, Artificial Sequence
  Description of Artificial Sequence: Synthetic oligonucleotide
  Antisense strand to SEQ ID NO: 891766
agagucacagcgaucuauc

SEQ ID NO: 891768 - RNA, 19 nt, Artificial Sequence
  Description of Artificial Sequence: Synthetic oligonucleotide
  Sense strand starting at position 3897 of SEQ ID NO: 588815
gggcgagugucacucagaa

SEQ ID NO: 891769 - RNA, 19 nt, Artificial Sequence
  Description of Artificial Sequence: Synthetic oligonucleotide
  Antisense strand to SEQ ID NO: 891768
uucugagugacacucgccc

SEQ ID NO: 891770 - RNA, 19 nt, Artificial Sequence
  Description of Artificial Sequence: Synthetic oligonucleotide
  Sense strand starting at position 3899 of SEQ ID NO: 588815
gcgagugucacucagaaga

SEQ ID NO: 891771 - RNA, 19 nt, Artificial Sequence
  Description of Artificial Sequence: Synthetic oligonucleotide
  Antisense strand to SEQ ID NO: 891770
ucuucugagugacacucgc

SEQ ID NO: 891772 - RNA, 19 nt, Artificial Sequence
  Description of Artificial Sequence: Synthetic oligonucleotide
  Sense strand starting at position 3926 of SEQ ID NO: 588815
gagaggugugcgggugaca

SEQ ID NO: 891773 - RNA, 19 nt, Artificial Sequence
  Description of Artificial Sequence: Synthetic oligonucleotide
  Antisense strand to SEQ ID NO: 891772
ugucacccgcacaccucuc

SEQ ID NO: 891774 - RNA, 19 nt, Artificial Sequence
  Description of Artificial Sequence: Synthetic oligonucleotide
  Sense strand starting at position 2019 of SEQ ID NO: 588816
gagguaugaucaguguguc

SEQ ID NO: 891775 - RNA, 19 nt, Artificial Sequence
  Description of Artificial Sequence: Synthetic oligonucleotide
  Antisense strand to SEQ ID NO: 891774
gacacacugaucauaccuc

SEQ ID NO: 891776 - RNA, 19 nt, Artificial Sequence
  Description of Artificial Sequence: Synthetic oligonucleotide
  Sense strand starting at position 2022 of SEQ ID NO: 588816
guaugaucaguguguccac

SEQ ID NO: 891777 - RNA, 19 nt, Artificial Sequence
  Description of Artificial Sequence: Synthetic oligonucleotide
  Antisense strand to SEQ ID NO: 891776
guggacacacugaucauac

SEQ ID NO: 891778 - RNA, 19 nt, Artificial Sequence
  Description of Artificial Sequence: Synthetic oligonucleotide
  Sense strand starting at position 2182 of SEQ ID NO: 588816
caggacuggucagacaagu

SEQ ID NO: 891779 - RNA, 19 nt, Artificial Sequence
  Description of Artificial Sequence: Synthetic oligonucleotide
  Antisense strand to SEQ ID NO: 891778
acuugucugaccaguccug

SEQ ID NO: 891780 - RNA, 19 nt, Artificial Sequence
  Description of Artificial Sequence: Synthetic oligonucleotide
  Sense strand starting at position 2270 of SEQ ID NO: 588816
cacgcuaaguccuggcaca

SEQ ID NO: 891781 - RNA, 19 nt, Artificial Sequence
  Description of Artificial Sequence: Synthetic oligonucleotide
  Antisense strand to SEQ ID NO: 891780
ugugccaggacuuagcgug

SEQ ID NO: 891782 - RNA, 19 nt, Artificial Sequence
  Description of Artificial Sequence: Synthetic oligonucleotide
  Sense strand starting at position 2717 of SEQ ID NO: 588816
gugugcaggaauuagauau

SEQ ID NO: 891783 - RNA, 19 nt, Artificial Sequence
  Description of Artificial Sequence: Synthetic oligonucleotide
  Antisense strand to SEQ ID NO: 891782
auaucuaauuccugcacac

SEQ ID NO: 891784 - RNA, 19 nt, Artificial Sequence
  Description of Artificial Sequence: Synthetic oligonucleotide
  Sense strand starting at position 2728 of SEQ ID NO: 588816
uuagauauuuccugggaaa

SEQ ID NO: 891785 - RNA, 19 nt, Artificial Sequence
  Description of Artificial Sequence: Synthetic oligonucleotide
  Antisense strand to SEQ ID NO: 891784
uuucccaggaaauaucuaa

SEQ ID NO: 891786 - RNA, 19 nt, Artificial Sequence
  Description of Artificial Sequence: Synthetic oligonucleotide
  Sense strand starting at position 3168 of SEQ ID NO: 588816
guguguucucggguccaca

SEQ ID NO: 891787 - RNA, 19 nt, Artificial Sequence
  Description of Artificial Sequence: Synthetic oligonucleotide
  Antisense strand to SEQ ID NO: 891786
uguggacccgagaacacac

SEQ ID NO: 891788 - RNA, 19 nt, Artificial Sequence
  Description of Artificial Sequence: Synthetic oligonucleotide
  Sense strand starting at position 155 of SEQ ID NO: 588817
ggaagagacuguguacaug

SEQ ID NO: 891789 - RNA, 19 nt, Artificial Sequence
  Description of Artificial Sequence: Synthetic oligonucleotide
  Antisense strand to SEQ ID NO: 891788
cauguacacagucucuucc

SEQ ID NO: 891790 - RNA, 19 nt, Artificial Sequence
  Description of Artificial Sequence: Synthetic oligonucleotide
  Sense strand starting at position 254 of SEQ ID NO: 588817
ucuagauaacgucguauua

SEQ ID NO: 891791 - RNA, 19 nt, Artificial Sequence
  Description of Artificial Sequence: Synthetic oligonucleotide
  Antisense strand to SEQ ID NO: 891790
uaauacgacguuaucuaga

SEQ ID NO: 891792 - RNA, 19 nt, Artificial Sequence
  Description of Artificial Sequence: Synthetic oligonucleotide
  Sense strand starting at position 270 of SEQ ID NO: 588817
uuaauuaacguuugcugau

SEQ ID NO: 891793 - RNA, 19 nt, Artificial Sequence
  Description of Artificial Sequence: Synthetic oligonucleotide
  Antisense strand to SEQ ID NO: 891792
aucagcaaacguuaauuaa

SEQ ID NO: 891794 - RNA, 19 nt, Artificial Sequence
  Description of Artificial Sequence: Synthetic oligonucleotide
  Sense strand starting at position 356 of SEQ ID NO: 588817
cugugaguuaaguagagua

SEQ ID NO: 891795 - RNA, 19 nt, Artificial Sequence
  Description of Artificial Sequence: Synthetic oligonucleotide
  Antisense strand to SEQ ID NO: 891794
uacucuacuuaacucacag

SEQ ID NO: 891796 - RNA, 19 nt, Artificial Sequence
  Description of Artificial Sequence: Synthetic oligonucleotide
  Sense strand starting at position 358 of SEQ ID NO: 588817
gugaguuaaguagaguaaa

SEQ ID NO: 891797 - RNA, 19 nt, Artificial Sequence
  Description of Artificial Sequence: Synthetic oligonucleotide
  Antisense strand to SEQ ID NO: 891796
uuuacucuacuuaacucac

SEQ ID NO: 891798 - RNA, 19 nt, Artificial Sequence
  Description of Artificial Sequence: Synthetic oligonucleotide
  Sense strand starting at position 459 of SEQ ID NO: 588817
cuaccuuuccagcaagaug

SEQ ID NO: 891799 - RNA, 19 nt, Artificial Sequence
  Description of Artificial Sequence: Synthetic oligonucleotide
  Antisense strand to SEQ ID NO: 891798
caucuugcuggaaagguag

SEQ ID NO: 891800 - RNA, 19 nt, Artificial Sequence
  Description of Artificial Sequence: Synthetic oligonucleotide
  Sense strand starting at position 569 of SEQ ID NO: 588817
uuuccauacugagcaagua

SEQ ID NO: 891801 - RNA, 19 nt, Artificial Sequence
  Description of Artificial Sequence: Synthetic oligonucleotide
  Antisense strand to SEQ ID NO: 891800
uacuugcucaguauggaaa

SEQ ID NO: 891802 - RNA, 19 nt, Artificial Sequence
  Description of Artificial Sequence: Synthetic oligonucleotide
  Sense strand starting at position 769 of SEQ ID NO: 588817
gucaguuaugucugacuau

SEQ ID NO: 891803 - RNA, 19 nt, Artificial Sequence
  Description of Artificial Sequence: Synthetic oligonucleotide
  Antisense strand to SEQ ID NO: 891802
auagucagacauaacugac

SEQ ID NO: 891804 - RNA, 19 nt, Artificial Sequence
  Description of Artificial Sequence: Synthetic oligonucleotide
  Sense strand starting at position 905 of SEQ ID NO: 588817
gcccaacaaguauggaaau

SEQ ID NO: 891805 - RNA, 19 nt, Artificial Sequence
  Description of Artificial Sequence: Synthetic oligonucleotide
  Antisense strand to SEQ ID NO: 891804
auuuccauacuuguugggc

SEQ ID NO: 891806 - RNA, 19 nt, Artificial Sequence
  Description of Artificial Sequence: Synthetic oligonucleotide
  Sense strand starting at position 947 of SEQ ID NO: 588817
gacgaagucagagguggaa

SEQ ID NO: 891807 - RNA, 19 nt, Artificial Sequence
  Description of Artificial Sequence: Synthetic oligonucleotide
  Antisense strand to SEQ ID NO: 891806
uuccaccucugacuucguc

SEQ ID NO: 891808 - RNA, 19 nt, Artificial Sequence
  Description of Artificial Sequence: Synthetic oligonucleotide
  Sense strand starting at position 1033 of SEQ ID NO: 588817
gagucuguggcagaacuua

SEQ ID NO: 891809 - RNA, 19 nt, Artificial Sequence
  Description of Artificial Sequence: Synthetic oligonucleotide
  Antisense strand to SEQ ID NO: 891808
uaaguucugccacagacuc

SEQ ID NO: 891810 - RNA, 19 nt, Artificial Sequence
  Description of Artificial Sequence: Synthetic oligonucleotide
  Sense strand starting at position 1086 of SEQ ID NO: 588817
agaaauaagucuuacagaa

SEQ ID NO: 891811 - RNA, 19 nt, Artificial Sequence
  Description of Artificial Sequence: Synthetic oligonucleotide
  Antisense strand to SEQ ID NO: 891810
uucuguaagacuuauuucu

SEQ ID NO: 891812 - RNA, 19 nt, Artificial Sequence
  Description of Artificial Sequence: Synthetic oligonucleotide
  Sense strand starting at position 1259 of SEQ ID NO: 588817
aaaggaguaucugaaguga

SEQ ID NO: 891813 - RNA, 19 nt, Artificial Sequence
  Description of Artificial Sequence: Synthetic oligonucleotide
  Antisense strand to SEQ ID NO: 891812
ucacuucagauacuccuuu

SEQ ID NO: 891814 - RNA, 19 nt, Artificial Sequence
  Description of Artificial Sequence: Synthetic oligonucleotide
  Sense strand starting at position 1358 of SEQ ID NO: 588817
caucuauauguaugugguu

SEQ ID NO: 891815 - RNA, 19 nt, Artificial Sequence
  Description of Artificial Sequence: Synthetic oligonucleotide
  Antisense strand to SEQ ID NO: 891814
aaccacauacauauagaug

SEQ ID NO: 891816 - RNA, 19 nt, Artificial Sequence
  Description of Artificial Sequence: Synthetic oligonucleotide
  Sense strand starting at position 1414 of SEQ ID NO: 588817
gacgguguucccugaagau

SEQ ID NO: 891817 - RNA, 19 nt, Artificial Sequence
  Description of Artificial Sequence: Synthetic oligonucleotide
  Antisense strand to SEQ ID NO: 891816
aucuucagggaacaccguc

SEQ ID NO: 891818 - RNA, 19 nt, Artificial Sequence
  Description of Artificial Sequence: Synthetic oligonucleotide
  Sense strand starting at position 1423 of SEQ ID NO: 588817
cccugaagauaggaacaau

SEQ ID NO: 891819 - RNA, 19 nt, Artificial Sequence
  Description of Artificial Sequence: Synthetic oligonucleotide
  Antisense strand to SEQ ID NO: 891818
auuguuccuaucuucaggg

SEQ ID NO: 891820 - RNA, 19 nt, Artificial Sequence
  Description of Artificial Sequence: Synthetic oligonucleotide
  Sense strand starting at position 1494 of SEQ ID NO: 588817
auacaagguuuguuugcua

SEQ ID NO: 891821 - RNA, 19 nt, Artificial Sequence
  Description of Artificial Sequence: Synthetic oligonucleotide
  Antisense strand to SEQ ID NO: 891820
uagcaaacaaaccuuguau

SEQ ID NO: 891822 - RNA, 19 nt, Artificial Sequence
  Description of Artificial Sequence: Synthetic oligonucleotide
  Sense strand starting at position 1498 of SEQ ID NO: 588817
aagguuuguuugcuauuga

SEQ ID NO: 891823 - RNA, 19 nt, Artificial Sequence
  Description of Artificial Sequence: Synthetic oligonucleotide
  Antisense strand to SEQ ID NO: 891822
ucaauagcaaacaaaccuu

SEQ ID NO: 891824 - RNA, 19 nt, Artificial Sequence
  Description of Artificial Sequence: Synthetic oligonucleotide
  Sense strand starting at position 1679 of SEQ ID NO: 588817
ucauauaaugguggcaaua

SEQ ID NO: 891825 - RNA, 19 nt, Artificial Sequence
  Description of Artificial Sequence: Synthetic oligonucleotide
  Antisense strand to SEQ ID NO: 891824
uauugccaccauuauauga

SEQ ID NO: 891826 - RNA, 19 nt, Artificial Sequence
  Description of Artificial Sequence: Synthetic oligonucleotide
  Sense strand starting at position 1708 of SEQ ID NO: 588817
uguguuucuacuuacggua

SEQ ID NO: 891827 - RNA, 19 nt, Artificial Sequence
  Description of Artificial Sequence: Synthetic oligonucleotide
  Antisense strand to SEQ ID NO: 891826
uaccguaaguagaaacaca

SEQ ID NO: 891828 - RNA, 19 nt, Artificial Sequence
  Description of Artificial Sequence: Synthetic oligonucleotide
  Sense strand starting at position 1713 of SEQ ID NO: 588817
uucuacuuacgguagaauu

SEQ ID NO: 891829 - RNA, 19 nt, Artificial Sequence
  Description of Artificial Sequence: Synthetic oligonucleotide
  Antisense strand to SEQ ID NO: 891828
aauucuaccguaaguagaa

SEQ ID NO: 891830 - RNA, 19 nt, Artificial Sequence
  Description of Artificial Sequence: Synthetic oligonucleotide
  Sense strand starting at position 1724 of SEQ ID NO: 588817
guagaauuagcauacccaa

SEQ ID NO: 891831 - RNA, 19 nt, Artificial Sequence
  Description of Artificial Sequence: Synthetic oligonucleotide
  Antisense strand to SEQ ID NO: 891830
uuggguaugcuaauucuac

SEQ ID NO: 891832 - RNA, 19 nt, Artificial Sequence
  Description of Artificial Sequence: Synthetic oligonucleotide
  Sense strand starting at position 3067 of SEQ ID NO: 588817
aguaaauuguugcuacugu

SEQ ID NO: 891833 - RNA, 19 nt, Artificial Sequence
  Description of Artificial Sequence: Synthetic oligonucleotide
  Antisense strand to SEQ ID NO: 891832
acaguagcaacaauuuacu

SEQ ID NO: 891834 - RNA, 19 nt, Artificial Sequence
  Description of Artificial Sequence: Synthetic oligonucleotide
  Sense strand starting at position 3197 of SEQ ID NO: 588817
acacaaaggugucucucaa

SEQ ID NO: 891835 - RNA, 19 nt, Artificial Sequence
  Description of Artificial Sequence: Synthetic oligonucleotide
  Antisense strand to SEQ ID NO: 891834
uugagagacaccuuugugu

SEQ ID NO: 891836 - RNA, 19 nt, Artificial Sequence
  Description of Artificial Sequence: Synthetic oligonucleotide
  Sense strand starting at position 3253 of SEQ ID NO: 588817
ggcuuccuuaagugugaca

SEQ ID NO: 891837 - RNA, 19 nt, Artificial Sequence
  Description of Artificial Sequence: Synthetic oligonucleotide
  Antisense strand to SEQ ID NO: 891836
ugucacacuuaaggaagcc

SEQ ID NO: 891838 - RNA, 19 nt, Artificial Sequence
  Description of Artificial Sequence: Synthetic oligonucleotide
  Sense strand starting at position 3255 of SEQ ID NO: 588817
cuuccuuaagugugacagu

SEQ ID NO: 891839 - RNA, 19 nt, Artificial Sequence
  Description of Artificial Sequence: Synthetic oligonucleotide
  Antisense strand to SEQ ID NO: 891838
acugucacacuuaaggaag

SEQ ID NO: 891840 - RNA, 19 nt, Artificial Sequence
  Description of Artificial Sequence: Synthetic oligonucleotide
  Sense strand starting at position 3264 of SEQ ID NO: 588817
gugugacaguugcucagau

SEQ ID NO: 891841 - RNA, 19 nt, Artificial Sequence
  Description of Artificial Sequence: Synthetic oligonucleotide
  Antisense strand to SEQ ID NO: 891840
aucugagcaacugucacac

SEQ ID NO: 891842 - RNA, 19 nt, Artificial Sequence
  Description of Artificial Sequence: Synthetic oligonucleotide
  Sense strand starting at position 3266 of SEQ ID NO: 588817
gugacaguugcucagaugu

SEQ ID NO: 891843 - RNA, 19 nt, Artificial Sequence
  Description of Artificial Sequence: Synthetic oligonucleotide
  Antisense strand to SEQ ID NO: 891842
acaucugagcaacugucac

SEQ ID NO: 891844 - RNA, 19 nt, Artificial Sequence
  Description of Artificial Sequence: Synthetic oligonucleotide
  Sense strand starting at position 3324 of SEQ ID NO: 588817
cuuggcuccuguccugaua

SEQ ID NO: 891845 - RNA, 19 nt, Artificial Sequence
  Description of Artificial Sequence: Synthetic oligonucleotide
  Antisense strand to SEQ ID NO: 891844
uaucaggacaggagccaag

SEQ ID NO: 891846 - RNA, 19 nt, Artificial Sequence
  Description of Artificial Sequence: Synthetic oligonucleotide
  Sense strand starting at position 3327 of SEQ ID NO: 588817
ggcuccuguccugauaauc

SEQ ID NO: 891847 - RNA, 19 nt, Artificial Sequence
  Description of Artificial Sequence: Synthetic oligonucleotide
  Antisense strand to SEQ ID NO: 891846
gauuaucaggacaggagcc

SEQ ID NO: 891848 - RNA, 19 nt, Artificial Sequence
  Description of Artificial Sequence: Synthetic oligonucleotide
  Sense strand starting at position 3482 of SEQ ID NO: 588817
auuagauguuucccgcaag

SEQ ID NO: 891849 - RNA, 19 nt, Artificial Sequence
  Description of Artificial Sequence: Synthetic oligonucleotide
  Antisense strand to SEQ ID NO: 891848
cuugcgggaaacaucuaau

SEQ ID NO: 891850 - RNA, 19 nt, Artificial Sequence
  Description of Artificial Sequence: Synthetic oligonucleotide
  Sense strand starting at position 3485 of SEQ ID NO: 588817
agauguuucccgcaaggau

SEQ ID NO: 891851 - RNA, 19 nt, Artificial Sequence
  Description of Artificial Sequence: Synthetic oligonucleotide
  Antisense strand to SEQ ID NO: 891850
auccuugcgggaaacaucu

SEQ ID NO: 891852 - RNA, 19 nt, Artificial Sequence
  Description of Artificial Sequence: Synthetic oligonucleotide
  Sense strand starting at position 3497 of SEQ ID NO: 588817
caaggauggugaucauauu

SEQ ID NO: 891853 - RNA, 19 nt, Artificial Sequence
  Description of Artificial Sequence: Synthetic oligonucleotide
  Antisense strand to SEQ ID NO: 891852
aauaugaucaccauccuug

SEQ ID NO: 891854 - RNA, 19 nt, Artificial Sequence
  Description of Artificial Sequence: Synthetic oligonucleotide
  Sense strand starting at position 3691 of SEQ ID NO: 588817
uggacauucucuuuaugaa

SEQ ID NO: 891855 - RNA, 19 nt, Artificial Sequence
  Description of Artificial Sequence: Synthetic oligonucleotide
  Antisense strand to SEQ ID NO: 891854
uucauaaagagaaugucca

SEQ ID NO: 891856 - RNA, 19 nt, Artificial Sequence
  Description of Artificial Sequence: Synthetic oligonucleotide
  Sense strand starting at position 3734 of SEQ ID NO: 588817
guacacuugucucccauau

SEQ ID NO: 891857 - RNA, 19 nt, Artificial Sequence
  Description of Artificial Sequence: Synthetic oligonucleotide
  Antisense strand to SEQ ID NO: 891856
auaugggagacaaguguac

SEQ ID NO: 891858 - RNA, 19 nt, Artificial Sequence
  Description of Artificial Sequence: Synthetic oligonucleotide
  Sense strand starting at position 3738 of SEQ ID NO: 588817
acuugucucccauaucaga

SEQ ID NO: 891859 - RNA, 19 nt, Artificial Sequence
  Description of Artificial Sequence: Synthetic oligonucleotide
  Antisense strand to SEQ ID NO: 891858
ucugauaugggagacaagu

SEQ ID NO: 891860 - RNA, 19 nt, Artificial Sequence
  Description of Artificial Sequence: Synthetic oligonucleotide
  Sense strand starting at position 3770 of SEQ ID NO: 588817
cucuguugggacuguguaa

SEQ ID NO: 891861 - RNA, 19 nt, Artificial Sequence
  Description of Artificial Sequence: Synthetic oligonucleotide
  Antisense strand to SEQ ID NO: 891860
uuacacagucccaacagag

SEQ ID NO: 891862 - RNA, 19 nt, Artificial Sequence
  Description of Artificial Sequence: Synthetic oligonucleotide
  Sense strand starting at position 3918 of SEQ ID NO: 588817
gguauuaggucccuaugaa

SEQ ID NO: 891863 - RNA, 19 nt, Artificial Sequence
  Description of Artificial Sequence: Synthetic oligonucleotide
  Antisense strand to SEQ ID NO: 891862
uucauagggaccuaauacc

SEQ ID NO: 891864 - RNA, 19 nt, Artificial Sequence
  Description of Artificial Sequence: Synthetic oligonucleotide
  Sense strand starting at position 3919 of SEQ ID NO: 588817
guauuaggucccuaugaac

SEQ ID NO: 891865 - RNA, 19 nt, Artificial Sequence
  Description of Artificial Sequence: Synthetic oligonucleotide
  Antisense strand to SEQ ID NO: 891864
guucauagggaccuaauac

SEQ ID NO: 891866 - RNA, 19 nt, Artificial Sequence
  Description of Artificial Sequence: Synthetic oligonucleotide
  Sense strand starting at position 3960 of SEQ ID NO: 588817
cgaauuauguaacccaguu

SEQ ID NO: 891867 - RNA, 19 nt, Artificial Sequence
  Description of Artificial Sequence: Synthetic oligonucleotide
  Antisense strand to SEQ ID NO: 891866
aacuggguuacauaauucg

SEQ ID NO: 891868 - RNA, 19 nt, Artificial Sequence
  Description of Artificial Sequence: Synthetic oligonucleotide
  Sense strand starting at position 145 of SEQ ID NO: 588818
gucaguuaugucugacuau

SEQ ID NO: 891869 - RNA, 19 nt, Artificial Sequence
  Description of Artificial Sequence: Synthetic oligonucleotide
  Antisense strand to SEQ ID NO: 891868
auagucagacauaacugac

SEQ ID NO: 891870 - RNA, 19 nt, Artificial Sequence
  Description of Artificial Sequence: Synthetic oligonucleotide
  Sense strand starting at position 281 of SEQ ID NO: 588818
gcccaacaaguauggaaau

SEQ ID NO: 891871 - RNA, 19 nt, Artificial Sequence
  Description of Artificial Sequence: Synthetic oligonucleotide
  Antisense strand to SEQ ID NO: 891870
auuuccauacuuguugggc

SEQ ID NO: 891872 - RNA, 19 nt, Artificial Sequence
  Description of Artificial Sequence: Synthetic oligonucleotide
  Sense strand starting at position 323 of SEQ ID NO: 588818
gacgaagucagagguggaa

SEQ ID NO: 891873 - RNA, 19 nt, Artificial Sequence
  Description of Artificial Sequence: Synthetic oligonucleotide
  Antisense strand to SEQ ID NO: 891872
uuccaccucugacuucguc

SEQ ID NO: 891874 - RNA, 19 nt, Artificial Sequence
  Description of Artificial Sequence: Synthetic oligonucleotide
  Sense strand starting at position 409 of SEQ ID NO: 588818
gagucuguggcagaacuua

SEQ ID NO: 891875 - RNA, 19 nt, Artificial Sequence
  Description of Artificial Sequence: Synthetic oligonucleotide
  Antisense strand to SEQ ID NO: 891874
uaaguucugccacagacuc

SEQ ID NO: 891876 - RNA, 19 nt, Artificial Sequence
  Description of Artificial Sequence: Synthetic oligonucleotide
  Sense strand starting at position 462 of SEQ ID NO: 588818
agaaauaagucuuacagaa

SEQ ID NO: 891877 - RNA, 19 nt, Artificial Sequence
  Description of Artificial Sequence: Synthetic oligonucleotide
  Antisense strand to SEQ ID NO: 891876
uucuguaagacuuauuucu

SEQ ID NO: 891878 - RNA, 19 nt, Artificial Sequence
  Description of Artificial Sequence: Synthetic oligonucleotide
  Sense strand starting at position 734 of SEQ ID NO: 588818
caucuauauguaugugguu

SEQ ID NO: 891879 - RNA, 19 nt, Artificial Sequence
  Description of Artificial Sequence: Synthetic oligonucleotide
  Antisense strand to SEQ ID NO: 891878
aaccacauacauauagaug

SEQ ID NO: 891880 - RNA, 19 nt, Artificial Sequence
  Description of Artificial Sequence: Synthetic oligonucleotide
  Sense strand starting at position 790 of SEQ ID NO: 588818
gacgguguucccugaagau

SEQ ID NO: 891881 - RNA, 19 nt, Artificial Sequence
  Description of Artificial Sequence: Synthetic oligonucleotide
  Antisense strand to SEQ ID NO: 891880
aucuucagggaacaccguc

SEQ ID NO: 891882 - RNA, 19 nt, Artificial Sequence
  Description of Artificial Sequence: Synthetic oligonucleotide
  Sense strand starting at position 799 of SEQ ID NO: 588818
cccugaagauaggaacaau

SEQ ID NO: 891883 - RNA, 19 nt, Artificial Sequence
  Description of Artificial Sequence: Synthetic oligonucleotide
  Antisense strand to SEQ ID NO: 891882
auuguuccuaucuucaggg

SEQ ID NO: 891884 - RNA, 19 nt, Artificial Sequence
  Description of Artificial Sequence: Synthetic oligonucleotide
  Sense strand starting at position 870 of SEQ ID NO: 588818
auacaagguuuguuugcua

SEQ ID NO: 891885 - RNA, 19 nt, Artificial Sequence
  Description of Artificial Sequence: Synthetic oligonucleotide
  Antisense strand to SEQ ID NO: 891884
uagcaaacaaaccuuguau

SEQ ID NO: 891886 - RNA, 19 nt, Artificial Sequence
  Description of Artificial Sequence: Synthetic oligonucleotide
  Sense strand starting at position 874 of SEQ ID NO: 588818
aagguuuguuugcuauuga

SEQ ID NO: 891887 - RNA, 19 nt, Artificial Sequence
  Description of Artificial Sequence: Synthetic oligonucleotide
  Antisense strand to SEQ ID NO: 891886
ucaauagcaaacaaaccuu

SEQ ID NO: 891888 - RNA, 19 nt, Artificial Sequence
  Description of Artificial Sequence: Synthetic oligonucleotide
  Sense strand starting at position 1055 of SEQ ID NO: 588818
ucauauaaugguggcaaua

SEQ ID NO: 891889 - RNA, 19 nt, Artificial Sequence
  Description of Artificial Sequence: Synthetic oligonucleotide
  Antisense strand to SEQ ID NO: 891888
uauugccaccauuauauga

SEQ ID NO: 891890 - RNA, 19 nt, Artificial Sequence
  Description of Artificial Sequence: Synthetic oligonucleotide
  Sense strand starting at position 1084 of SEQ ID NO: 588818
uguguuucuacuuacggua

SEQ ID NO: 891891 - RNA, 19 nt, Artificial Sequence
  Description of Artificial Sequence: Synthetic oligonucleotide
  Antisense strand to SEQ ID NO: 891890
uaccguaaguagaaacaca

SEQ ID NO: 891892 - RNA, 19 nt, Artificial Sequence
  Description of Artificial Sequence: Synthetic oligonucleotide
  Sense strand starting at position 1089 of SEQ ID NO: 588818
uucuacuuacgguagaauu

SEQ ID NO: 891893 - RNA, 19 nt, Artificial Sequence
  Description of Artificial Sequence: Synthetic oligonucleotide
  Antisense strand to SEQ ID NO: 891892
aauucuaccguaaguagaa

SEQ ID NO: 891894 - RNA, 19 nt, Artificial Sequence
  Description of Artificial Sequence: Synthetic oligonucleotide
  Sense strand starting at position 1100 of SEQ ID NO: 588818
guagaauuagcauacccaa

SEQ ID NO: 891895 - RNA, 19 nt, Artificial Sequence
  Description of Artificial Sequence: Synthetic oligonucleotide
  Antisense strand to SEQ ID NO: 891894
uuggguaugcuaauucuac

SEQ ID NO: 891896 - RNA, 19 nt, Artificial Sequence
  Description of Artificial Sequence: Synthetic oligonucleotide
  Sense strand starting at position 2573 of SEQ ID NO: 588818
acacaaaggugucucucaa

SEQ ID NO: 891897 - RNA, 19 nt, Artificial Sequence
  Description of Artificial Sequence: Synthetic oligonucleotide
  Antisense strand to SEQ ID NO: 891896
uugagagacaccuuugugu

SEQ ID NO: 891898 - RNA, 19 nt, Artificial Sequence
  Description of Artificial Sequence: Synthetic oligonucleotide
  Sense strand starting at position 2629 of SEQ ID NO: 588818
ggcuuccuuaagugugaca

SEQ ID NO: 891899 - RNA, 19 nt, Artificial Sequence
  Description of Artificial Sequence: Synthetic oligonucleotide
  Antisense strand to SEQ ID NO: 891898
ugucacacuuaaggaagcc

SEQ ID NO: 891900 - RNA, 19 nt, Artificial Sequence
  Description of Artificial Sequence: Synthetic oligonucleotide
  Sense strand starting at position 2631 of SEQ ID NO: 588818
cuuccuuaagugugacagu

SEQ ID NO: 891901 - RNA, 19 nt, Artificial Sequence
  Description of Artificial Sequence: Synthetic oligonucleotide
  Antisense strand to SEQ ID NO: 891900
acugucacacuuaaggaag

SEQ ID NO: 891902 - RNA, 19 nt, Artificial Sequence
  Description of Artificial Sequence: Synthetic oligonucleotide
  Sense strand starting at position 2642 of SEQ ID NO: 588818
gugacaguugcucagaugu

SEQ ID NO: 891903 - RNA, 19 nt, Artificial Sequence
  Description of Artificial Sequence: Synthetic oligonucleotide
  Antisense strand to SEQ ID NO: 891902
acaucugagcaacugucac

SEQ ID NO: 891904 - RNA, 19 nt, Artificial Sequence
  Description of Artificial Sequence: Synthetic oligonucleotide
  Sense strand starting at position 2700 of SEQ ID NO: 588818
cuuggcuccuguccugaua

SEQ ID NO: 891905 - RNA, 19 nt, Artificial Sequence
  Description of Artificial Sequence: Synthetic oligonucleotide
  Antisense strand to SEQ ID NO: 891904
uaucaggacaggagccaag

SEQ ID NO: 891906 - RNA, 19 nt, Artificial Sequence
  Description of Artificial Sequence: Synthetic oligonucleotide
  Sense strand starting at position 2703 of SEQ ID NO: 588818
ggcuccuguccugauaauc

SEQ ID NO: 891907 - RNA, 19 nt, Artificial Sequence
  Description of Artificial Sequence: Synthetic oligonucleotide
  Antisense strand to SEQ ID NO: 891906
gauuaucaggacaggagcc

SEQ ID NO: 891908 - RNA, 19 nt, Artificial Sequence
  Description of Artificial Sequence: Synthetic oligonucleotide
  Sense strand starting at position 2858 of SEQ ID NO: 588818
auuagauguuucccgcaag

SEQ ID NO: 891909 - RNA, 19 nt, Artificial Sequence
  Description of Artificial Sequence: Synthetic oligonucleotide
  Antisense strand to SEQ ID NO: 891908
cuugcgggaaacaucuaau

SEQ ID NO: 891910 - RNA, 19 nt, Artificial Sequence
  Description of Artificial Sequence: Synthetic oligonucleotide
  Sense strand starting at position 2861 of SEQ ID NO: 588818
agauguuucccgcaaggau

SEQ ID NO: 891911 - RNA, 19 nt, Artificial Sequence
  Description of Artificial Sequence: Synthetic oligonucleotide
  Antisense strand to SEQ ID NO: 891910
auccuugcgggaaacaucu

SEQ ID NO: 891912 - RNA, 19 nt, Artificial Sequence
  Description of Artificial Sequence: Synthetic oligonucleotide
  Sense strand starting at position 2873 of SEQ ID NO: 588818
caaggauggugaucauauu

SEQ ID NO: 891913 - RNA, 19 nt, Artificial Sequence
  Description of Artificial Sequence: Synthetic oligonucleotide
  Antisense strand to SEQ ID NO: 891912
aauaugaucaccauccuug

SEQ ID NO: 891914 - RNA, 19 nt, Artificial Sequence
  Description of Artificial Sequence: Synthetic oligonucleotide
  Sense strand starting at position 3067 of SEQ ID NO: 588818
uggacauucucuuuaugaa

SEQ ID NO: 891915 - RNA, 19 nt, Artificial Sequence
  Description of Artificial Sequence: Synthetic oligonucleotide
  Antisense strand to SEQ ID NO: 891914
uucauaaagagaaugucca

SEQ ID NO: 891916 - RNA, 19 nt, Artificial Sequence
  Description of Artificial Sequence: Synthetic oligonucleotide
  Sense strand starting at position 3110 of SEQ ID NO: 588818
guacacuugucucccauau

SEQ ID NO: 891917 - RNA, 19 nt, Artificial Sequence
  Description of Artificial Sequence: Synthetic oligonucleotide
  Antisense strand to SEQ ID NO: 891916
auaugggagacaaguguac

SEQ ID NO: 891918 - RNA, 19 nt, Artificial Sequence
  Description of Artificial Sequence: Synthetic oligonucleotide
  Sense strand starting at position 3114 of SEQ ID NO: 588818
acuugucucccauaucaga

SEQ ID NO: 891919 - RNA, 19 nt, Artificial Sequence
  Description of Artificial Sequence: Synthetic oligonucleotide
  Antisense strand to SEQ ID NO: 891918
ucugauaugggagacaagu

SEQ ID NO: 891920 - RNA, 19 nt, Artificial Sequence
  Description of Artificial Sequence: Synthetic oligonucleotide
  Sense strand starting at position 3146 of SEQ ID NO: 588818
cucuguugggacuguguaa

SEQ ID NO: 891921 - RNA, 19 nt, Artificial Sequence
  Description of Artificial Sequence: Synthetic oligonucleotide
  Antisense strand to SEQ ID NO: 891920
uuacacagucccaacagag

SEQ ID NO: 891922 - RNA, 19 nt, Artificial Sequence
  Description of Artificial Sequence: Synthetic oligonucleotide
  Sense strand starting at position 3294 of SEQ ID NO: 588818
gguauuaggucccuaugaa

SEQ ID NO: 891923 - RNA, 19 nt, Artificial Sequence
  Description of Artificial Sequence: Synthetic oligonucleotide
  Antisense strand to SEQ ID NO: 891922
uucauagggaccuaauacc

SEQ ID NO: 891924 - RNA, 19 nt, Artificial Sequence
  Description of Artificial Sequence: Synthetic oligonucleotide
  Sense strand starting at position 3295 of SEQ ID NO: 588818
guauuaggucccuaugaac

SEQ ID NO: 891925 - RNA, 19 nt, Artificial Sequence
  Description of Artificial Sequence: Synthetic oligonucleotide
  Antisense strand to SEQ ID NO: 891924
guucauagggaccuaauac

SEQ ID NO: 891926 - RNA, 19 nt, Artificial Sequence
  Description of Artificial Sequence: Synthetic oligonucleotide
  Sense strand starting at position 3336 of SEQ ID NO: 588818
cgaauuauguaacccaguu

SEQ ID NO: 891927 - RNA, 19 nt, Artificial Sequence
  Description of Artificial Sequence: Synthetic oligonucleotide
  Antisense strand to SEQ ID NO: 891926
aacuggguuacauaauucg

SEQ ID NO: 891928 - RNA, 19 nt, Artificial Sequence
  Description of Artificial Sequence: Synthetic oligonucleotide
  Sense strand starting at position 3391 of SEQ ID NO: 588818
uggagaugaucacaucuaa

SEQ ID NO: 891929 - RNA, 19 nt, Artificial Sequence
  Description of Artificial Sequence: Synthetic oligonucleotide
  Antisense strand to SEQ ID NO: 891928
uuagaugugaucaucucca

SEQ ID NO: 891930 - RNA, 19 nt, Artificial Sequence
  Description of Artificial Sequence: Synthetic oligonucleotide
  Sense strand starting at position 3462 of SEQ ID NO: 588818
cuuuaaguuuauccaaugu

SEQ ID NO: 891931 - RNA, 19 nt, Artificial Sequence
  Description of Artificial Sequence: Synthetic oligonucleotide
  Antisense strand to SEQ ID NO: 891930
acauuggauaaacuuaaag

SEQ ID NO: 891932 - RNA, 19 nt, Artificial Sequence
  Description of Artificial Sequence: Synthetic oligonucleotide
  Sense strand starting at position 3697 of SEQ ID NO: 588818
aguuacauuugggagcuau

SEQ ID NO: 891933 - RNA, 19 nt, Artificial Sequence
  Description of Artificial Sequence: Synthetic oligonucleotide
  Antisense strand to SEQ ID NO: 891932
auagcucccaaauguaacu

SEQ ID NO: 891934 - RNA, 19 nt, Artificial Sequence
  Description of Artificial Sequence: Synthetic oligonucleotide
  Sense strand starting at position 3705 of SEQ ID NO: 588818
uugggagcuaucuaacugu

SEQ ID NO: 891935 - RNA, 19 nt, Artificial Sequence
  Description of Artificial Sequence: Synthetic oligonucleotide
  Antisense strand to SEQ ID NO: 891934
acaguuagauagcucccaa

SEQ ID NO: 891936 - RNA, 19 nt, Artificial Sequence
  Description of Artificial Sequence: Synthetic oligonucleotide
  Sense strand starting at position 3708 of SEQ ID NO: 588818
ggagcuaucuaacuguaag

SEQ ID NO: 891937 - RNA, 19 nt, Artificial Sequence
  Description of Artificial Sequence: Synthetic oligonucleotide
  Antisense strand to SEQ ID NO: 891936
cuuacaguuagauagcucc

SEQ ID NO: 891938 - RNA, 19 nt, Artificial Sequence
  Description of Artificial Sequence: Synthetic oligonucleotide
  Sense strand starting at position 3711 of SEQ ID NO: 588818
gcuaucuaacuguaagaga

SEQ ID NO: 891939 - RNA, 19 nt, Artificial Sequence
  Description of Artificial Sequence: Synthetic oligonucleotide
  Antisense strand to SEQ ID NO: 891938
ucucuuacaguuagauagc

SEQ ID NO: 891940 - RNA, 19 nt, Artificial Sequence
  Description of Artificial Sequence: Synthetic oligonucleotide
  Sense strand starting at position 3728 of SEQ ID NO: 588818
gaggcagauuccucaagug

SEQ ID NO: 891941 - RNA, 19 nt, Artificial Sequence
  Description of Artificial Sequence: Synthetic oligonucleotide
  Antisense strand to SEQ ID NO: 891940
cacuugaggaaucugccuc

SEQ ID NO: 891942 - RNA, 19 nt, Artificial Sequence
  Description of Artificial Sequence: Synthetic oligonucleotide
  Sense strand starting at position 3769 of SEQ ID NO: 588818
auuacaguccuccagcauu

SEQ ID NO: 891943 - RNA, 19 nt, Artificial Sequence
  Description of Artificial Sequence: Synthetic oligonucleotide
  Antisense strand to SEQ ID NO: 891942
aaugcuggaggacuguaau

SEQ ID NO: 891944 - RNA, 19 nt, Artificial Sequence
  Description of Artificial Sequence: Synthetic oligonucleotide
  Sense strand starting at position 3805 of SEQ ID NO: 588818
agcaaaucccucugagcuu

SEQ ID NO: 891945 - RNA, 19 nt, Artificial Sequence
  Description of Artificial Sequence: Synthetic oligonucleotide
  Antisense strand to SEQ ID NO: 891944
aagcucagagggauuugcu

SEQ ID NO: 891946 - RNA, 19 nt, Artificial Sequence
  Description of Artificial Sequence: Synthetic oligonucleotide
  Sense strand starting at position 3839 of SEQ ID NO: 588818
gaggcaagcuuccugaaac

SEQ ID NO: 891947 - RNA, 19 nt, Artificial Sequence
  Description of Artificial Sequence: Synthetic oligonucleotide
  Antisense strand to SEQ ID NO: 891946
guuucaggaagcuugccuc

SEQ ID NO: 891948 - RNA, 19 nt, Artificial Sequence
  Description of Artificial Sequence: Synthetic oligonucleotide
  Sense strand starting at position 6 of SEQ ID NO: 588819
gcccaacaaguauggaaau

SEQ ID NO: 891949 - RNA, 19 nt, Artificial Sequence
  Description of Artificial Sequence: Synthetic oligonucleotide
  Antisense strand to SEQ ID NO: 891948
auuuccauacuuguugggc

SEQ ID NO: 891950 - RNA, 19 nt, Artificial Sequence
  Description of Artificial Sequence: Synthetic oligonucleotide
  Sense strand starting at position 48 of SEQ ID NO: 588819
gacgaagucagagguggaa

SEQ ID NO: 891951 - RNA, 19 nt, Artificial Sequence
  Description of Artificial Sequence: Synthetic oligonucleotide
  Antisense strand to SEQ ID NO: 891950
uuccaccucugacuucguc

SEQ ID NO: 891952 - RNA, 19 nt, Artificial Sequence
  Description of Artificial Sequence: Synthetic oligonucleotide
  Sense strand starting at position 134 of SEQ ID NO: 588819
gagucuguggcagaacuua

SEQ ID NO: 891953 - RNA, 19 nt, Artificial Sequence
  Description of Artificial Sequence: Synthetic oligonucleotide
  Antisense strand to SEQ ID NO: 891952
uaaguucugccacagacuc

SEQ ID NO: 891954 - RNA, 19 nt, Artificial Sequence
  Description of Artificial Sequence: Synthetic oligonucleotide
  Sense strand starting at position 187 of SEQ ID NO: 588819
agaaauaagucuuacagaa

SEQ ID NO: 891955 - RNA, 19 nt, Artificial Sequence
  Description of Artificial Sequence: Synthetic oligonucleotide
  Antisense strand to SEQ ID NO: 891954
uucuguaagacuuauuucu

SEQ ID NO: 891956 - RNA, 19 nt, Artificial Sequence
  Description of Artificial Sequence: Synthetic oligonucleotide
  Sense strand starting at position 459 of SEQ ID NO: 588819
caucuauauguaugugguu

SEQ ID NO: 891957 - RNA, 19 nt, Artificial Sequence
  Description of Artificial Sequence: Synthetic oligonucleotide
  Antisense strand to SEQ ID NO: 891956
aaccacauacauauagaug

SEQ ID NO: 891958 - RNA, 19 nt, Artificial Sequence
  Description of Artificial Sequence: Synthetic oligonucleotide
  Sense strand starting at position 515 of SEQ ID NO: 588819
gacgguguucccugaagau

SEQ ID NO: 891959 - RNA, 19 nt, Artificial Sequence
  Description of Artificial Sequence: Synthetic oligonucleotide
  Antisense strand to SEQ ID NO: 891958
aucuucagggaacaccguc

SEQ ID NO: 891960 - RNA, 19 nt, Artificial Sequence
  Description of Artificial Sequence: Synthetic oligonucleotide
  Sense strand starting at position 524 of SEQ ID NO: 588819
cccugaagauaggaacaau

SEQ ID NO: 891961 - RNA, 19 nt, Artificial Sequence
  Description of Artificial Sequence: Synthetic oligonucleotide
  Antisense strand to SEQ ID NO: 891960
auuguuccuaucuucaggg

SEQ ID NO: 891962 - RNA, 19 nt, Artificial Sequence
  Description of Artificial Sequence: Synthetic oligonucleotide
  Sense strand starting at position 595 of SEQ ID NO: 588819
auacaagguuuguuugcua

SEQ ID NO: 891963 - RNA, 19 nt, Artificial Sequence
  Description of Artificial Sequence: Synthetic oligonucleotide
  Antisense strand to SEQ ID NO: 891962
uagcaaacaaaccuuguau

SEQ ID NO: 891964 - RNA, 19 nt, Artificial Sequence
  Description of Artificial Sequence: Synthetic oligonucleotide
  Sense strand starting at position 599 of SEQ ID NO: 588819
aagguuuguuugcuauuga

SEQ ID NO: 891965 - RNA, 19 nt, Artificial Sequence
  Description of Artificial Sequence: Synthetic oligonucleotide
  Antisense strand to SEQ ID NO: 891964
ucaauagcaaacaaaccuu

SEQ ID NO: 891966 - RNA, 19 nt, Artificial Sequence
  Description of Artificial Sequence: Synthetic oligonucleotide
  Sense strand starting at position 780 of SEQ ID NO: 588819
ucauauaaugguggcaaua

SEQ ID NO: 891967 - RNA, 19 nt, Artificial Sequence
  Description of Artificial Sequence: Synthetic oligonucleotide
  Antisense strand to SEQ ID NO: 891966
uauugccaccauuauauga

SEQ ID NO: 891968 - RNA, 19 nt, Artificial Sequence
  Description of Artificial Sequence: Synthetic oligonucleotide
  Sense strand starting at position 809 of SEQ ID NO: 588819
uguguuucuacuuacggua

SEQ ID NO: 891969 - RNA, 19 nt, Artificial Sequence
  Description of Artificial Sequence: Synthetic oligonucleotide
  Antisense strand to SEQ ID NO: 891968
uaccguaaguagaaacaca

SEQ ID NO: 891970 - RNA, 19 nt, Artificial Sequence
  Description of Artificial Sequence: Synthetic oligonucleotide
  Sense strand starting at position 814 of SEQ ID NO: 588819
uucuacuuacgguagaauu

SEQ ID NO: 891971 - RNA, 19 nt, Artificial Sequence
  Description of Artificial Sequence: Synthetic oligonucleotide
  Antisense strand to SEQ ID NO: 891970
aauucuaccguaaguagaa

SEQ ID NO: 891972 - RNA, 19 nt, Artificial Sequence
  Description of Artificial Sequence: Synthetic oligonucleotide
  Sense strand starting at position 825 of SEQ ID NO: 588819
guagaauuagcauacccaa

SEQ ID NO: 891973 - RNA, 19 nt, Artificial Sequence
  Description of Artificial Sequence: Synthetic oligonucleotide
  Antisense strand to SEQ ID NO: 891972
uuggguaugcuaauucuac

SEQ ID NO: 891974 - RNA, 19 nt, Artificial Sequence
  Description of Artificial Sequence: Synthetic oligonucleotide
  Sense strand starting at position 2298 of SEQ ID NO: 588819
acacaaaggugucucucaa

SEQ ID NO: 891975 - RNA, 19 nt, Artificial Sequence
  Description of Artificial Sequence: Synthetic oligonucleotide
  Antisense strand to SEQ ID NO: 891974
uugagagacaccuuugugu

SEQ ID NO: 891976 - RNA, 19 nt, Artificial Sequence
  Description of Artificial Sequence: Synthetic oligonucleotide
  Sense strand starting at position 2354 of SEQ ID NO: 588819
ggcuuccuuaagugugaca

SEQ ID NO: 891977 - RNA, 19 nt, Artificial Sequence
  Description of Artificial Sequence: Synthetic oligonucleotide
  Antisense strand to SEQ ID NO: 891976
ugucacacuuaaggaagcc

SEQ ID NO: 891978 - RNA, 19 nt, Artificial Sequence
  Description of Artificial Sequence: Synthetic oligonucleotide
  Sense strand starting at position 2356 of SEQ ID NO: 588819
cuuccuuaagugugacagu

SEQ ID NO: 891979 - RNA, 19 nt, Artificial Sequence
  Description of Artificial Sequence: Synthetic oligonucleotide
  Antisense strand to SEQ ID NO: 891978
acugucacacuuaaggaag

SEQ ID NO: 891980 - RNA, 19 nt, Artificial Sequence
  Description of Artificial Sequence: Synthetic oligonucleotide
  Sense strand starting at position 2365 of SEQ ID NO: 588819
gugugacaguugcucagau

SEQ ID NO: 891981 - RNA, 19 nt, Artificial Sequence
  Description of Artificial Sequence: Synthetic oligonucleotide
  Antisense strand to SEQ ID NO: 891980
aucugagcaacugucacac

SEQ ID NO: 891982 - RNA, 19 nt, Artificial Sequence
  Description of Artificial Sequence: Synthetic oligonucleotide
  Sense strand starting at position 2367 of SEQ ID NO: 588819
gugacaguugcucagaugu

SEQ ID NO: 891983 - RNA, 19 nt, Artificial Sequence
  Description of Artificial Sequence: Synthetic oligonucleotide
  Antisense strand to SEQ ID NO: 891982
acaucugagcaacugucac

SEQ ID NO: 891984 - RNA, 19 nt, Artificial Sequence
  Description of Artificial Sequence: Synthetic oligonucleotide
  Sense strand starting at position 2425 of SEQ ID NO: 588819
cuuggcuccuguccugaua

SEQ ID NO: 891985 - RNA, 19 nt, Artificial Sequence
  Description of Artificial Sequence: Synthetic oligonucleotide
  Antisense strand to SEQ ID NO: 891984
uaucaggacaggagccaag

SEQ ID NO: 891986 - RNA, 19 nt, Artificial Sequence
  Description of Artificial Sequence: Synthetic oligonucleotide
  Sense strand starting at position 2428 of SEQ ID NO: 588819
ggcuccuguccugauaauc

SEQ ID NO: 891987 - RNA, 19 nt, Artificial Sequence
  Description of Artificial Sequence: Synthetic oligonucleotide
  Antisense strand to SEQ ID NO: 891986
gauuaucaggacaggagcc

SEQ ID NO: 891988 - RNA, 19 nt, Artificial Sequence
  Description of Artificial Sequence: Synthetic oligonucleotide
  Sense strand starting at position 2583 of SEQ ID NO: 588819
auuagauguuucccgcaag

SEQ ID NO: 891989 - RNA, 19 nt, Artificial Sequence
  Description of Artificial Sequence: Synthetic oligonucleotide
  Antisense strand to SEQ ID NO: 891988
cuugcgggaaacaucuaau

SEQ ID NO: 891990 - RNA, 19 nt, Artificial Sequence
  Description of Artificial Sequence: Synthetic oligonucleotide
  Sense strand starting at position 2586 of SEQ ID NO: 588819
agauguuucccgcaaggau

SEQ ID NO: 891991 - RNA, 19 nt, Artificial Sequence
  Description of Artificial Sequence: Synthetic oligonucleotide
  Antisense strand to SEQ ID NO: 891990
auccuugcgggaaacaucu

SEQ ID NO: 891992 - RNA, 19 nt, Artificial Sequence
  Description of Artificial Sequence: Synthetic oligonucleotide
  Sense strand starting at position 2598 of SEQ ID NO: 588819
caaggauggugaucauauu

SEQ ID NO: 891993 - RNA, 19 nt, Artificial Sequence
  Description of Artificial Sequence: Synthetic oligonucleotide
  Antisense strand to SEQ ID NO: 891992
aauaugaucaccauccuug

SEQ ID NO: 891994 - RNA, 19 nt, Artificial Sequence
  Description of Artificial Sequence: Synthetic oligonucleotide
  Sense strand starting at position 2792 of SEQ ID NO: 588819
uggacauucucuuuaugaa

SEQ ID NO: 891995 - RNA, 19 nt, Artificial Sequence
  Description of Artificial Sequence: Synthetic oligonucleotide
  Antisense strand to SEQ ID NO: 891994
uucauaaagagaaugucca

SEQ ID NO: 891996 - RNA, 19 nt, Artificial Sequence
  Description of Artificial Sequence: Synthetic oligonucleotide
  Sense strand starting at position 2835 of SEQ ID NO: 588819
guacacuugucucccauau

SEQ ID NO: 891997 - RNA, 19 nt, Artificial Sequence
  Description of Artificial Sequence: Synthetic oligonucleotide
  Antisense strand to SEQ ID NO: 891996
auaugggagacaaguguac

SEQ ID NO: 891998 - RNA, 19 nt, Artificial Sequence
  Description of Artificial Sequence: Synthetic oligonucleotide
  Sense strand starting at position 2839 of SEQ ID NO: 588819
acuugucucccauaucaga

SEQ ID NO: 891999 - RNA, 19 nt, Artificial Sequence
  Description of Artificial Sequence: Synthetic oligonucleotide
  Antisense strand to SEQ ID NO: 891998
ucugauaugggagacaagu

SEQ ID NO: 892000 - RNA, 19 nt, Artificial Sequence
  Description of Artificial Sequence: Synthetic oligonucleotide
  Sense strand starting at position 2871 of SEQ ID NO: 588819
cucuguugggacuguguaa

SEQ ID NO: 892001 - RNA, 19 nt, Artificial Sequence
  Description of Artificial Sequence: Synthetic oligonucleotide
  Antisense strand to SEQ ID NO: 892000
uuacacagucccaacagag

SEQ ID NO: 892002 - RNA, 19 nt, Artificial Sequence
  Description of Artificial Sequence: Synthetic oligonucleotide
  Sense strand starting at position 3019 of SEQ ID NO: 588819
gguauuaggucccuaugaa

SEQ ID NO: 892003 - RNA, 19 nt, Artificial Sequence
  Description of Artificial Sequence: Synthetic oligonucleotide
  Antisense strand to SEQ ID NO: 892002
uucauagggaccuaauacc

SEQ ID NO: 892004 - RNA, 19 nt, Artificial Sequence
  Description of Artificial Sequence: Synthetic oligonucleotide
  Sense strand starting at position 3020 of SEQ ID NO: 588819
guauuaggucccuaugaac

SEQ ID NO: 892005 - RNA, 19 nt, Artificial Sequence
  Description of Artificial Sequence: Synthetic oligonucleotide
  Antisense strand to SEQ ID NO: 892004
guucauagggaccuaauac

SEQ ID NO: 892006 - RNA, 19 nt, Artificial Sequence
  Description of Artificial Sequence: Synthetic oligonucleotide
  Sense strand starting at position 3061 of SEQ ID NO: 588819
cgaauuauguaacccaguu

SEQ ID NO: 892007 - RNA, 19 nt, Artificial Sequence
  Description of Artificial Sequence: Synthetic oligonucleotide
  Antisense strand to SEQ ID NO: 892006
aacuggguuacauaauucg

SEQ ID NO: 892008 - RNA, 19 nt, Artificial Sequence
  Description of Artificial Sequence: Synthetic oligonucleotide
  Sense strand starting at position 3116 of SEQ ID NO: 588819
uggagaugaucacaucuaa

SEQ ID NO: 892009 - RNA, 19 nt, Artificial Sequence
  Description of Artificial Sequence: Synthetic oligonucleotide
  Antisense strand to SEQ ID NO: 892008
uuagaugugaucaucucca

SEQ ID NO: 892010 - RNA, 19 nt, Artificial Sequence
  Description of Artificial Sequence: Synthetic oligonucleotide
  Sense strand starting at position 3187 of SEQ ID NO: 588819
cuuuaaguuuauccaaugu

SEQ ID NO: 892011 - RNA, 19 nt, Artificial Sequence
  Description of Artificial Sequence: Synthetic oligonucleotide
  Antisense strand to SEQ ID NO: 892010
acauuggauaaacuuaaag

SEQ ID NO: 892012 - RNA, 19 nt, Artificial Sequence
  Description of Artificial Sequence: Synthetic oligonucleotide
  Sense strand starting at position 3422 of SEQ ID NO: 588819
aguuacauuugggagcuau

SEQ ID NO: 892013 - RNA, 19 nt, Artificial Sequence
  Description of Artificial Sequence: Synthetic oligonucleotide
  Antisense strand to SEQ ID NO: 892012
auagcucccaaauguaacu

SEQ ID NO: 892014 - RNA, 19 nt, Artificial Sequence
  Description of Artificial Sequence: Synthetic oligonucleotide
  Sense strand starting at position 3430 of SEQ ID NO: 588819
uugggagcuaucuaacugu

SEQ ID NO: 892015 - RNA, 19 nt, Artificial Sequence
  Description of Artificial Sequence: Synthetic oligonucleotide
  Antisense strand to SEQ ID NO: 892014
acaguuagauagcucccaa

SEQ ID NO: 892016 - RNA, 19 nt, Artificial Sequence
  Description of Artificial Sequence: Synthetic oligonucleotide
  Sense strand starting at position 3433 of SEQ ID NO: 588819
ggagcuaucuaacuguaag

SEQ ID NO: 892017 - RNA, 19 nt, Artificial Sequence
  Description of Artificial Sequence: Synthetic oligonucleotide
  Antisense strand to SEQ ID NO: 892016
cuuacaguuagauagcucc

SEQ ID NO: 892018 - RNA, 19 nt, Artificial Sequence
  Description of Artificial Sequence: Synthetic oligonucleotide
  Sense strand starting at position 3436 of SEQ ID NO: 588819
gcuaucuaacuguaagaga

SEQ ID NO: 892019 - RNA, 19 nt, Artificial Sequence
  Description of Artificial Sequence: Synthetic oligonucleotide
  Antisense strand to SEQ ID NO: 892018
ucucuuacaguuagauagc

SEQ ID NO: 892020 - RNA, 19 nt, Artificial Sequence
  Description of Artificial Sequence: Synthetic oligonucleotide
  Sense strand starting at position 3453 of SEQ ID NO: 588819
gaggcagauuccucaagug

SEQ ID NO: 892021 - RNA, 19 nt, Artificial Sequence
  Description of Artificial Sequence: Synthetic oligonucleotide
  Antisense strand to SEQ ID NO: 892020
cacuugaggaaucugccuc

SEQ ID NO: 892022 - RNA, 19 nt, Artificial Sequence
  Description of Artificial Sequence: Synthetic oligonucleotide
  Sense strand starting at position 3494 of SEQ ID NO: 588819
auuacaguccuccagcauu

SEQ ID NO: 892023 - RNA, 19 nt, Artificial Sequence
  Description of Artificial Sequence: Synthetic oligonucleotide
  Antisense strand to SEQ ID NO: 892022
aaugcuggaggacuguaau

SEQ ID NO: 892024 - RNA, 19 nt, Artificial Sequence
  Description of Artificial Sequence: Synthetic oligonucleotide
  Sense strand starting at position 3530 of SEQ ID NO: 588819
agcaaaucccucugagcuu

SEQ ID NO: 892025 - RNA, 19 nt, Artificial Sequence
  Description of Artificial Sequence: Synthetic oligonucleotide
  Antisense strand to SEQ ID NO: 892024
aagcucagagggauuugcu

SEQ ID NO: 892026 - RNA, 19 nt, Artificial Sequence
  Description of Artificial Sequence: Synthetic oligonucleotide
  Sense strand starting at position 3564 of SEQ ID NO: 588819
gaggcaagcuuccugaaac

SEQ ID NO: 892027 - RNA, 19 nt, Artificial Sequence
  Description of Artificial Sequence: Synthetic oligonucleotide
  Antisense strand to SEQ ID NO: 892026
guuucaggaagcuugccuc

SEQ ID NO: 892028 - RNA, 19 nt, Artificial Sequence
  Description of Artificial Sequence: Synthetic oligonucleotide
  Sense strand starting at position 101 of SEQ ID NO: 588820
caauuaaccgcagggugaa

SEQ ID NO: 892029 - RNA, 19 nt, Artificial Sequence
  Description of Artificial Sequence: Synthetic oligonucleotide
  Antisense strand to SEQ ID NO: 892028
uucacccugcgguuaauug

SEQ ID NO: 892030 - RNA, 19 nt, Artificial Sequence
  Description of Artificial Sequence: Synthetic oligonucleotide
  Sense strand starting at position 223 of SEQ ID NO: 588820
gguugcagaaaucgacaga

SEQ ID NO: 892031 - RNA, 19 nt, Artificial Sequence
  Description of Artificial Sequence: Synthetic oligonucleotide
  Antisense strand to SEQ ID NO: 892030
ucugucgauuucugcaacc

SEQ ID NO: 892032 - RNA, 19 nt, Artificial Sequence
  Description of Artificial Sequence: Synthetic oligonucleotide
  Sense strand starting at position 226 of SEQ ID NO: 588820
ugcagaaaucgacagaggu

SEQ ID NO: 892033 - RNA, 19 nt, Artificial Sequence
  Description of Artificial Sequence: Synthetic oligonucleotide
  Antisense strand to SEQ ID NO: 892032
accucugucgauuucugca

SEQ ID NO: 892034 - RNA, 19 nt, Artificial Sequence
  Description of Artificial Sequence: Synthetic oligonucleotide
  Sense strand starting at position 239 of SEQ ID NO: 588820
agaggucuugagugaugga

SEQ ID NO: 892035 - RNA, 19 nt, Artificial Sequence
  Description of Artificial Sequence: Synthetic oligonucleotide
  Antisense strand to SEQ ID NO: 892034
uccaucacucaagaccucu

SEQ ID NO: 892036 - RNA, 19 nt, Artificial Sequence
  Description of Artificial Sequence: Synthetic oligonucleotide
  Sense strand starting at position 264 of SEQ ID NO: 588820
cuuagaauguggucuacuu

SEQ ID NO: 892037 - RNA, 19 nt, Artificial Sequence
  Description of Artificial Sequence: Synthetic oligonucleotide
  Antisense strand to SEQ ID NO: 892036
aaguagaccacauucuaag

SEQ ID NO: 892038 - RNA, 19 nt, Artificial Sequence
  Description of Artificial Sequence: Synthetic oligonucleotide
  Sense strand starting at position 266 of SEQ ID NO: 588820
uagaauguggucuacuuau

SEQ ID NO: 892039 - RNA, 19 nt, Artificial Sequence
  Description of Artificial Sequence: Synthetic oligonucleotide
  Antisense strand to SEQ ID NO: 892038
auaaguagaccacauucua

SEQ ID NO: 892040 - RNA, 19 nt, Artificial Sequence
  Description of Artificial Sequence: Synthetic oligonucleotide
  Sense strand starting at position 303 of SEQ ID NO: 588820
cgguuuaugcuuuaaugca

SEQ ID NO: 892041 - RNA, 19 nt, Artificial Sequence
  Description of Artificial Sequence: Synthetic oligonucleotide
  Antisense strand to SEQ ID NO: 892040
ugcauuaaagcauaaaccg

SEQ ID NO: 892042 - RNA, 19 nt, Artificial Sequence
  Description of Artificial Sequence: Synthetic oligonucleotide
  Sense strand starting at position 313 of SEQ ID NO: 588820
uuuaaugcacagugagaua

SEQ ID NO: 892043 - RNA, 19 nt, Artificial Sequence
  Description of Artificial Sequence: Synthetic oligonucleotide
  Antisense strand to SEQ ID NO: 892042
uaucucacugugcauuaaa

SEQ ID NO: 892044 - RNA, 19 nt, Artificial Sequence
  Description of Artificial Sequence: Synthetic oligonucleotide
  Sense strand starting at position 356 of SEQ ID NO: 588820
aguaauuaggaaugucuga

SEQ ID NO: 892045 - RNA, 19 nt, Artificial Sequence
  Description of Artificial Sequence: Synthetic oligonucleotide
  Antisense strand to SEQ ID NO: 892044
ucagacauuccuaauuacu

SEQ ID NO: 892046 - RNA, 19 nt, Artificial Sequence
  Description of Artificial Sequence: Synthetic oligonucleotide
  Sense strand starting at position 587 of SEQ ID NO: 588820
cccauuuacuaguaagaag

SEQ ID NO: 892047 - RNA, 19 nt, Artificial Sequence
  Description of Artificial Sequence: Synthetic oligonucleotide
  Antisense strand to SEQ ID NO: 892046
cuucuuacuaguaaauggg

SEQ ID NO: 892048 - RNA, 19 nt, Artificial Sequence
  Description of Artificial Sequence: Synthetic oligonucleotide
  Sense strand starting at position 1221 of SEQ ID NO: 588820
aggauucugccaggcauca

SEQ ID NO: 892049 - RNA, 19 nt, Artificial Sequence
  Description of Artificial Sequence: Synthetic oligonucleotide
  Antisense strand to SEQ ID NO: 892048
ugaugccuggcagaauccu

SEQ ID NO: 892050 - RNA, 19 nt, Artificial Sequence
  Description of Artificial Sequence: Synthetic oligonucleotide
  Sense strand starting at position 1693 of SEQ ID NO: 588820
gccagauccuaccugaagu

SEQ ID NO: 892051 - RNA, 19 nt, Artificial Sequence
  Description of Artificial Sequence: Synthetic oligonucleotide
  Antisense strand to SEQ ID NO: 892050
acuucagguaggaucuggc

SEQ ID NO: 892052 - RNA, 19 nt, Artificial Sequence
  Description of Artificial Sequence: Synthetic oligonucleotide
  Sense strand starting at position 2688 of SEQ ID NO: 588820
acuauuuguucucugcaga

SEQ ID NO: 892053 - RNA, 19 nt, Artificial Sequence
  Description of Artificial Sequence: Synthetic oligonucleotide
  Antisense strand to SEQ ID NO: 892052
ucugcagagaacaaauagu

SEQ ID NO: 892054 - RNA, 19 nt, Artificial Sequence
  Description of Artificial Sequence: Synthetic oligonucleotide
  Sense strand starting at position 2689 of SEQ ID NO: 588820
cuauuuguucucugcagag

SEQ ID NO: 892055 - RNA, 19 nt, Artificial Sequence
  Description of Artificial Sequence: Synthetic oligonucleotide
  Antisense strand to SEQ ID NO: 892054
cucugcagagaacaaauag

SEQ ID NO: 892056 - RNA, 19 nt, Artificial Sequence
  Description of Artificial Sequence: Synthetic oligonucleotide
  Sense strand starting at position 2837 of SEQ ID NO: 588820
ggaauuggauucuccagca

SEQ ID NO: 892057 - RNA, 19 nt, Artificial Sequence
  Description of Artificial Sequence: Synthetic oligonucleotide
  Antisense strand to SEQ ID NO: 892056
ugcuggagaauccaauucc

SEQ ID NO: 892058 - RNA, 19 nt, Artificial Sequence
  Description of Artificial Sequence: Synthetic oligonucleotide
  Sense strand starting at position 2842 of SEQ ID NO: 588820
uggauucuccagcaucuca

SEQ ID NO: 892059 - RNA, 19 nt, Artificial Sequence
  Description of Artificial Sequence: Synthetic oligonucleotide
  Antisense strand to SEQ ID NO: 892058
ugagaugcuggagaaucca

SEQ ID NO: 892060 - RNA, 19 nt, Artificial Sequence
  Description of Artificial Sequence: Synthetic oligonucleotide
  Sense strand starting at position 2858 of SEQ ID NO: 588820
ucaguugcuuguuccauga

SEQ ID NO: 892061 - RNA, 19 nt, Artificial Sequence
  Description of Artificial Sequence: Synthetic oligonucleotide
  Antisense strand to SEQ ID NO: 892060
ucauggaacaagcaacuga

SEQ ID NO: 892062 - RNA, 19 nt, Artificial Sequence
  Description of Artificial Sequence: Synthetic oligonucleotide
  Sense strand starting at position 2862 of SEQ ID NO: 588820
uugcuuguuccaugagauu

SEQ ID NO: 892063 - RNA, 19 nt, Artificial Sequence
  Description of Artificial Sequence: Synthetic oligonucleotide
  Antisense strand to SEQ ID NO: 892062
aaucucauggaacaagcaa

SEQ ID NO: 892064 - RNA, 19 nt, Artificial Sequence
  Description of Artificial Sequence: Synthetic oligonucleotide
  Sense strand starting at position 2868 of SEQ ID NO: 588820
guuccaugagauugaucuu

SEQ ID NO: 892065 - RNA, 19 nt, Artificial Sequence
  Description of Artificial Sequence: Synthetic oligonucleotide
  Antisense strand to SEQ ID NO: 892064
aagaucaaucucauggaac

SEQ ID NO: 892066 - RNA, 19 nt, Artificial Sequence
  Description of Artificial Sequence: Synthetic oligonucleotide
  Sense strand starting at position 2927 of SEQ ID NO: 588820
aguaccaagcucuguuaau

SEQ ID NO: 892067 - RNA, 19 nt, Artificial Sequence
  Description of Artificial Sequence: Synthetic oligonucleotide
  Antisense strand to SEQ ID NO: 892066
auuaacagagcuugguacu

SEQ ID NO: 892068 - RNA, 19 nt, Artificial Sequence
  Description of Artificial Sequence: Synthetic oligonucleotide
  Sense strand starting at position 2928 of SEQ ID NO: 588820
guaccaagcucuguuaauu

SEQ ID NO: 892069 - RNA, 19 nt, Artificial Sequence
  Description of Artificial Sequence: Synthetic oligonucleotide
  Antisense strand to SEQ ID NO: 892068
aauuaacagagcuugguac

SEQ ID NO: 892070 - RNA, 19 nt, Artificial Sequence
  Description of Artificial Sequence: Synthetic oligonucleotide
  Sense strand starting at position 2938 of SEQ ID NO: 588820
cuguuaauuggagggcauu

SEQ ID NO: 892071 - RNA, 19 nt, Artificial Sequence
  Description of Artificial Sequence: Synthetic oligonucleotide
  Antisense strand to SEQ ID NO: 892070
aaugcccuccaauuaacag

SEQ ID NO: 892072 - RNA, 19 nt, Artificial Sequence
  Description of Artificial Sequence: Synthetic oligonucleotide
  Sense strand starting at position 2939 of SEQ ID NO: 588820
uguuaauuggagggcauua

SEQ ID NO: 892073 - RNA, 19 nt, Artificial Sequence
  Description of Artificial Sequence: Synthetic oligonucleotide
  Antisense strand to SEQ ID NO: 892072
uaaugcccuccaauuaaca

SEQ ID NO: 892074 - RNA, 19 nt, Artificial Sequence
  Description of Artificial Sequence: Synthetic oligonucleotide
  Sense strand starting at position 2993 of SEQ ID NO: 588820
cucagacguggccagaaau

SEQ ID NO: 892075 - RNA, 19 nt, Artificial Sequence
  Description of Artificial Sequence: Synthetic oligonucleotide
  Antisense strand to SEQ ID NO: 892074
auuucuggccacgucugag

SEQ ID NO: 892076 - RNA, 19 nt, Artificial Sequence
  Description of Artificial Sequence: Synthetic oligonucleotide
  Sense strand starting at position 3061 of SEQ ID NO: 588820
gcuuguuaccucuguuaaa

SEQ ID NO: 892077 - RNA, 19 nt, Artificial Sequence
  Description of Artificial Sequence: Synthetic oligonucleotide
  Antisense strand to SEQ ID NO: 892076
uuuaacagagguaacaagc

SEQ ID NO: 892078 - RNA, 19 nt, Artificial Sequence
  Description of Artificial Sequence: Synthetic oligonucleotide
  Sense strand starting at position 3108 of SEQ ID NO: 588820
caauuuguguagggaaaua

SEQ ID NO: 892079 - RNA, 19 nt, Artificial Sequence
  Description of Artificial Sequence: Synthetic oligonucleotide
  Antisense strand to SEQ ID NO: 892078
uauuucccuacacaaauug

SEQ ID NO: 892080 - RNA, 19 nt, Artificial Sequence
  Description of Artificial Sequence: Synthetic oligonucleotide
  Sense strand starting at position 3158 of SEQ ID NO: 588820
guaaauccaguaggagaau

SEQ ID NO: 892081 - RNA, 19 nt, Artificial Sequence
  Description of Artificial Sequence: Synthetic oligonucleotide
  Antisense strand to SEQ ID NO: 892080
auucuccuacuggauuuac

SEQ ID NO: 892082 - RNA, 19 nt, Artificial Sequence
  Description of Artificial Sequence: Synthetic oligonucleotide
  Sense strand starting at position 3763 of SEQ ID NO: 588820
gagucagaaauguggguua

SEQ ID NO: 892083 - RNA, 19 nt, Artificial Sequence
  Description of Artificial Sequence: Synthetic oligonucleotide
  Antisense strand to SEQ ID NO: 892082
uaacccacauuucugacuc

SEQ ID NO: 892084 - RNA, 19 nt, Artificial Sequence
  Description of Artificial Sequence: Synthetic oligonucleotide
  Sense strand starting at position 3765 of SEQ ID NO: 588820
gucagaaauguggguuaua

SEQ ID NO: 892085 - RNA, 19 nt, Artificial Sequence
  Description of Artificial Sequence: Synthetic oligonucleotide
  Antisense strand to SEQ ID NO: 892084
uauaacccacauuucugac

SEQ ID NO: 892086 - RNA, 19 nt, Artificial Sequence
  Description of Artificial Sequence: Synthetic oligonucleotide
  Sense strand starting at position 3766 of SEQ ID NO: 588820
ucagaaauguggguuauau

SEQ ID NO: 892087 - RNA, 19 nt, Artificial Sequence
  Description of Artificial Sequence: Synthetic oligonucleotide
  Antisense strand to SEQ ID NO: 892086
auauaacccacauuucuga

SEQ ID NO: 892088 - RNA, 19 nt, Artificial Sequence
  Description of Artificial Sequence: Synthetic oligonucleotide
  Sense strand starting at position 3777 of SEQ ID NO: 588820
gguuauauugcauaugauu

SEQ ID NO: 892089 - RNA, 19 nt, Artificial Sequence
  Description of Artificial Sequence: Synthetic oligonucleotide
  Antisense strand to SEQ ID NO: 892088
aaucauaugcaauauaacc

SEQ ID NO: 892090 - RNA, 19 nt, Artificial Sequence
  Description of Artificial Sequence: Synthetic oligonucleotide
  Sense strand starting at position 3914 of SEQ ID NO: 588820
caagcuuucucagugguua

SEQ ID NO: 892091 - RNA, 19 nt, Artificial Sequence
  Description of Artificial Sequence: Synthetic oligonucleotide
  Antisense strand to SEQ ID NO: 892090
uaaccacugagaaagcuug

SEQ ID NO: 892092 - RNA, 19 nt, Artificial Sequence
  Description of Artificial Sequence: Synthetic oligonucleotide
  Sense strand starting at position 3915 of SEQ ID NO: 588820
aagcuuucucagugguuaa

SEQ ID NO: 892093 - RNA, 19 nt, Artificial Sequence
  Description of Artificial Sequence: Synthetic oligonucleotide
  Antisense strand to SEQ ID NO: 892092
uuaaccacugagaaagcuu

SEQ ID NO: 892094 - RNA, 19 nt, Artificial Sequence
  Description of Artificial Sequence: Synthetic oligonucleotide
  Sense strand starting at position 3916 of SEQ ID NO: 588820
agcuuucucagugguuaag

SEQ ID NO: 892095 - RNA, 19 nt, Artificial Sequence
  Description of Artificial Sequence: Synthetic oligonucleotide
  Antisense strand to SEQ ID NO: 892094
cuuaaccacugagaaagcu

SEQ ID NO: 892096 - RNA, 19 nt, Artificial Sequence
  Description of Artificial Sequence: Synthetic oligonucleotide
  Sense strand starting at position 3918 of SEQ ID NO: 588820
cuuucucagugguuaagag

SEQ ID NO: 892097 - RNA, 19 nt, Artificial Sequence
  Description of Artificial Sequence: Synthetic oligonucleotide
  Antisense strand to SEQ ID NO: 892096
cucuuaaccacugagaaag

SEQ ID NO: 892098 - RNA, 19 nt, Artificial Sequence
  Description of Artificial Sequence: Synthetic oligonucleotide
  Sense strand starting at position 3919 of SEQ ID NO: 588820
uuucucagugguuaagaga

SEQ ID NO: 892099 - RNA, 19 nt, Artificial Sequence
  Description of Artificial Sequence: Synthetic oligonucleotide
  Antisense strand to SEQ ID NO: 892098
ucucuuaaccacugagaaa

SEQ ID NO: 892100 - RNA, 19 nt, Artificial Sequence
  Description of Artificial Sequence: Synthetic oligonucleotide
  Sense strand starting at position 3932 of SEQ ID NO: 588820
aagagaauauggcuuacgu

SEQ ID NO: 892101 - RNA, 19 nt, Artificial Sequence
  Description of Artificial Sequence: Synthetic oligonucleotide
  Antisense strand to SEQ ID NO: 892100
acguaagccauauucucuu

SEQ ID NO: 892102 - RNA, 19 nt, Artificial Sequence
  Description of Artificial Sequence: Synthetic oligonucleotide
  Sense strand starting at position 3956 of SEQ ID NO: 588820
gccaaauuggagcaacaua

SEQ ID NO: 892103 - RNA, 19 nt, Artificial Sequence
  Description of Artificial Sequence: Synthetic oligonucleotide
  Antisense strand to SEQ ID NO: 892102
uauguugcuccaauuuggc

SEQ ID NO: 892104 - RNA, 19 nt, Artificial Sequence
  Description of Artificial Sequence: Synthetic oligonucleotide
  Sense strand starting at position 3977 of SEQ ID NO: 588820
ccuuuccaucuguauuagu

SEQ ID NO: 892105 - RNA, 19 nt, Artificial Sequence
  Description of Artificial Sequence: Synthetic oligonucleotide
  Antisense strand to SEQ ID NO: 892104
acuaauacagauggaaagg

SEQ ID NO: 892106 - RNA, 19 nt, Artificial Sequence
  Description of Artificial Sequence: Synthetic oligonucleotide
  Sense strand starting at position 3982 of SEQ ID NO: 588820
ccaucuguauuagucauca

SEQ ID NO: 892107 - RNA, 19 nt, Artificial Sequence
  Description of Artificial Sequence: Synthetic oligonucleotide
  Antisense strand to SEQ ID NO: 892106
ugaugacuaauacagaugg

SEQ ID NO: 892108 - RNA, 19 nt, Artificial Sequence
  Description of Artificial Sequence: Synthetic oligonucleotide
  Sense strand starting at position 31 of SEQ ID NO: 588821
ggaucacuuucaguggaag

SEQ ID NO: 892109 - RNA, 19 nt, Artificial Sequence
  Description of Artificial Sequence: Synthetic oligonucleotide
  Antisense strand to SEQ ID NO: 892108
cuuccacugaaagugaucc

SEQ ID NO: 892110 - RNA, 19 nt, Artificial Sequence
  Description of Artificial Sequence: Synthetic oligonucleotide
  Sense strand starting at position 212 of SEQ ID NO: 588821
cgcuguguggccaggaaga

SEQ ID NO: 892111 - RNA, 19 nt, Artificial Sequence
  Description of Artificial Sequence: Synthetic oligonucleotide
  Antisense strand to SEQ ID NO: 892110
ucuuccuggccacacagcg

SEQ ID NO: 892112 - RNA, 19 nt, Artificial Sequence
  Description of Artificial Sequence: Synthetic oligonucleotide
  Sense strand starting at position 872 of SEQ ID NO: 588821
cgcuuagugggccucguaa

SEQ ID NO: 892113 - RNA, 19 nt, Artificial Sequence
  Description of Artificial Sequence: Synthetic oligonucleotide
  Antisense strand to SEQ ID NO: 892112
uuacgaggcccacuaagcg

SEQ ID NO: 892114 - RNA, 19 nt, Artificial Sequence
  Description of Artificial Sequence: Synthetic oligonucleotide
  Sense strand starting at position 2433 of SEQ ID NO: 588821
agcgcuauuuggguaaacu

SEQ ID NO: 892115 - RNA, 19 nt, Artificial Sequence
  Description of Artificial Sequence: Synthetic oligonucleotide
  Antisense strand to SEQ ID NO: 892114
aguuuacccaaauagcgcu

SEQ ID NO: 892116 - RNA, 19 nt, Artificial Sequence
  Description of Artificial Sequence: Synthetic oligonucleotide
  Sense strand starting at position 2434 of SEQ ID NO: 588821
gcgcuauuuggguaaacuu

SEQ ID NO: 892117 - RNA, 19 nt, Artificial Sequence
  Description of Artificial Sequence: Synthetic oligonucleotide
  Antisense strand to SEQ ID NO: 892116
aaguuuacccaaauagcgc

SEQ ID NO: 892118 - RNA, 19 nt, Artificial Sequence
  Description of Artificial Sequence: Synthetic oligonucleotide
  Sense strand starting at position 2487 of SEQ ID NO: 588821
uuggguguuggugguagaa

SEQ ID NO: 892119 - RNA, 19 nt, Artificial Sequence
  Description of Artificial Sequence: Synthetic oligonucleotide
  Antisense strand to SEQ ID NO: 892118
uucuaccaccaacacccaa

SEQ ID NO: 892120 - RNA, 19 nt, Artificial Sequence
  Description of Artificial Sequence: Synthetic oligonucleotide
  Sense strand starting at position 2544 of SEQ ID NO: 588821
aaugcagucccauggaagu

SEQ ID NO: 892121 - RNA, 19 nt, Artificial Sequence
  Description of Artificial Sequence: Synthetic oligonucleotide
  Antisense strand to SEQ ID NO: 892120
acuuccaugggacugcauu

SEQ ID NO: 892122 - RNA, 19 nt, Artificial Sequence
  Description of Artificial Sequence: Synthetic oligonucleotide
  Sense strand starting at position 2773 of SEQ ID NO: 588821
aagagaaauggcuguugcu

SEQ ID NO: 892123 - RNA, 19 nt, Artificial Sequence
  Description of Artificial Sequence: Synthetic oligonucleotide
  Antisense strand to SEQ ID NO: 892122
agcaacagccauuucucuu

SEQ ID NO: 892124 - RNA, 19 nt, Artificial Sequence
  Description of Artificial Sequence: Synthetic oligonucleotide
  Sense strand starting at position 2806 of SEQ ID NO: 588821
cagggugcucuuuagaaag

SEQ ID NO: 892125 - RNA, 19 nt, Artificial Sequence
  Description of Artificial Sequence: Synthetic oligonucleotide
  Antisense strand to SEQ ID NO: 892124
cuuucuaaagagcacccug

SEQ ID NO: 892126 - RNA, 19 nt, Artificial Sequence
  Description of Artificial Sequence: Synthetic oligonucleotide
  Sense strand starting at position 2837 of SEQ ID NO: 588821
agacauuguuaacuuuagu

SEQ ID NO: 892127 - RNA, 19 nt, Artificial Sequence
  Description of Artificial Sequence: Synthetic oligonucleotide
  Antisense strand to SEQ ID NO: 892126
acuaaaguuaacaaugucu

SEQ ID NO: 892128 - RNA, 19 nt, Artificial Sequence
  Description of Artificial Sequence: Synthetic oligonucleotide
  Sense strand starting at position 2842 of SEQ ID NO: 588821
uuguuaacuuuaguuagag

SEQ ID NO: 892129 - RNA, 19 nt, Artificial Sequence
  Description of Artificial Sequence: Synthetic oligonucleotide
  Antisense strand to SEQ ID NO: 892128
cucuaacuaaaguuaacaa

SEQ ID NO: 892130 - RNA, 19 nt, Artificial Sequence
  Description of Artificial Sequence: Synthetic oligonucleotide
  Sense strand starting at position 2848 of SEQ ID NO: 588821
acuuuaguuagaggcgauu

SEQ ID NO: 892131 - RNA, 19 nt, Artificial Sequence
  Description of Artificial Sequence: Synthetic oligonucleotide
  Antisense strand to SEQ ID NO: 892130
aaucgccucuaacuaaagu

SEQ ID NO: 892132 - RNA, 19 nt, Artificial Sequence
  Description of Artificial Sequence: Synthetic oligonucleotide
  Sense strand starting at position 2854 of SEQ ID NO: 588821
guuagaggcgauugguaac

SEQ ID NO: 892133 - RNA, 19 nt, Artificial Sequence
  Description of Artificial Sequence: Synthetic oligonucleotide
  Antisense strand to SEQ ID NO: 892132
guuaccaaucgccucuaac

SEQ ID NO: 892134 - RNA, 19 nt, Artificial Sequence
  Description of Artificial Sequence: Synthetic oligonucleotide
  Sense strand starting at position 2860 of SEQ ID NO: 588821
ggcgauugguaacugaaca

SEQ ID NO: 892135 - RNA, 19 nt, Artificial Sequence
  Description of Artificial Sequence: Synthetic oligonucleotide
  Antisense strand to SEQ ID NO: 892134
uguucaguuaccaaucgcc

SEQ ID NO: 892136 - RNA, 19 nt, Artificial Sequence
  Description of Artificial Sequence: Synthetic oligonucleotide
  Sense strand starting at position 2861 of SEQ ID NO: 588821
gcgauugguaacugaacau

SEQ ID NO: 892137 - RNA, 19 nt, Artificial Sequence
  Description of Artificial Sequence: Synthetic oligonucleotide
  Antisense strand to SEQ ID NO: 892136
auguucaguuaccaaucgc

SEQ ID NO: 892138 - RNA, 19 nt, Artificial Sequence
  Description of Artificial Sequence: Synthetic oligonucleotide
  Sense strand starting at position 2890 of SEQ ID NO: 588821
acuuguauuccuuagguga

SEQ ID NO: 892139 - RNA, 19 nt, Artificial Sequence
  Description of Artificial Sequence: Synthetic oligonucleotide
  Antisense strand to SEQ ID NO: 892138
ucaccuaaggaauacaagu

SEQ ID NO: 892140 - RNA, 19 nt, Artificial Sequence
  Description of Artificial Sequence: Synthetic oligonucleotide
  Sense strand starting at position 3010 of SEQ ID NO: 588821
gcauauagaugauuacauc

SEQ ID NO: 892141 - RNA, 19 nt, Artificial Sequence
  Description of Artificial Sequence: Synthetic oligonucleotide
  Antisense strand to SEQ ID NO: 892140
gauguaaucaucuauaugc

SEQ ID NO: 892142 - RNA, 19 nt, Artificial Sequence
  Description of Artificial Sequence: Synthetic oligonucleotide
  Sense strand starting at position 3122 of SEQ ID NO: 588821
cagucuugaggcugggaga

SEQ ID NO: 892143 - RNA, 19 nt, Artificial Sequence
  Description of Artificial Sequence: Synthetic oligonucleotide
  Antisense strand to SEQ ID NO: 892142
ucucccagccucaagacug

SEQ ID NO: 892144 - RNA, 19 nt, Artificial Sequence
  Description of Artificial Sequence: Synthetic oligonucleotide
  Sense strand starting at position 3123 of SEQ ID NO: 588821
agucuugaggcugggagau

SEQ ID NO: 892145 - RNA, 19 nt, Artificial Sequence
  Description of Artificial Sequence: Synthetic oligonucleotide
  Antisense strand to SEQ ID NO: 892144
aucucccagccucaagacu

SEQ ID NO: 892146 - RNA, 19 nt, Artificial Sequence
  Description of Artificial Sequence: Synthetic oligonucleotide
  Sense strand starting at position 3136 of SEQ ID NO: 588821
ggagaugucuacucauuag

SEQ ID NO: 892147 - RNA, 19 nt, Artificial Sequence
  Description of Artificial Sequence: Synthetic oligonucleotide
  Antisense strand to SEQ ID NO: 892146
cuaaugaguagacaucucc

SEQ ID NO: 892148 - RNA, 19 nt, Artificial Sequence
  Description of Artificial Sequence: Synthetic oligonucleotide
  Sense strand starting at position 3140 of SEQ ID NO: 588821
augucuacucauuagcaua

SEQ ID NO: 892149 - RNA, 19 nt, Artificial Sequence
  Description of Artificial Sequence: Synthetic oligonucleotide
  Antisense strand to SEQ ID NO: 892148
uaugcuaaugaguagacau

SEQ ID NO: 892150 - RNA, 19 nt, Artificial Sequence
  Description of Artificial Sequence: Synthetic oligonucleotide
  Sense strand starting at position 3255 of SEQ ID NO: 588821
aauguagaauuggcaguua

SEQ ID NO: 892151 - RNA, 19 nt, Artificial Sequence
  Description of Artificial Sequence: Synthetic oligonucleotide
  Antisense strand to SEQ ID NO: 892150
uaacugccaauucuacauu

SEQ ID NO: 892152 - RNA, 19 nt, Artificial Sequence
  Description of Artificial Sequence: Synthetic oligonucleotide
  Sense strand starting at position 3263 of SEQ ID NO: 588821
auuggcaguuauuuaguua

SEQ ID NO: 892153 - RNA, 19 nt, Artificial Sequence
  Description of Artificial Sequence: Synthetic oligonucleotide
  Antisense strand to SEQ ID NO: 892152
uaacuaaauaacugccaau

SEQ ID NO: 892154 - RNA, 19 nt, Artificial Sequence
  Description of Artificial Sequence: Synthetic oligonucleotide
  Sense strand starting at position 3279 of SEQ ID NO: 588821
uuaauuaggucgcucuaca

SEQ ID NO: 892155 - RNA, 19 nt, Artificial Sequence
  Description of Artificial Sequence: Synthetic oligonucleotide
  Antisense strand to SEQ ID NO: 892154
uguagagcgaccuaauuaa

SEQ ID NO: 892156 - RNA, 19 nt, Artificial Sequence
  Description of Artificial Sequence: Synthetic oligonucleotide
  Sense strand starting at position 3398 of SEQ ID NO: 588821
uuugcaaaccaauguguaa

SEQ ID NO: 892157 - RNA, 19 nt, Artificial Sequence
  Description of Artificial Sequence: Synthetic oligonucleotide
  Antisense strand to SEQ ID NO: 892156
uuacacauugguuugcaaa

SEQ ID NO: 892158 - RNA, 19 nt, Artificial Sequence
  Description of Artificial Sequence: Synthetic oligonucleotide
  Sense strand starting at position 3430 of SEQ ID NO: 588821
uaguauuaagagugaaagu

SEQ ID NO: 892159 - RNA, 19 nt, Artificial Sequence
  Description of Artificial Sequence: Synthetic oligonucleotide
  Antisense strand to SEQ ID NO: 892158
acuuucacucuuaauacua

SEQ ID NO: 892160 - RNA, 19 nt, Artificial Sequence
  Description of Artificial Sequence: Synthetic oligonucleotide
  Sense strand starting at position 3441 of SEQ ID NO: 588821
gugaaaguugauugaguca

SEQ ID NO: 892161 - RNA, 19 nt, Artificial Sequence
  Description of Artificial Sequence: Synthetic oligonucleotide
  Antisense strand to SEQ ID NO: 892160
ugacucaaucaacuuucac

SEQ ID NO: 892162 - RNA, 19 nt, Artificial Sequence
  Description of Artificial Sequence: Synthetic oligonucleotide
  Sense strand starting at position 3444 of SEQ ID NO: 588821
aaaguugauugagucauua

SEQ ID NO: 892163 - RNA, 19 nt, Artificial Sequence
  Description of Artificial Sequence: Synthetic oligonucleotide
  Antisense strand to SEQ ID NO: 892162
uaaugacucaaucaacuuu

SEQ ID NO: 892164 - RNA, 19 nt, Artificial Sequence
  Description of Artificial Sequence: Synthetic oligonucleotide
  Sense strand starting at position 3483 of SEQ ID NO: 588821
ggaaguuacuguuuagaau

SEQ ID NO: 892165 - RNA, 19 nt, Artificial Sequence
  Description of Artificial Sequence: Synthetic oligonucleotide
  Antisense strand to SEQ ID NO: 892164
auucuaaacaguaacuucc

SEQ ID NO: 892166 - RNA, 19 nt, Artificial Sequence
  Description of Artificial Sequence: Synthetic oligonucleotide
  Sense strand starting at position 3526 of SEQ ID NO: 588821
cuccuagauuuguaauuga

SEQ ID NO: 892167 - RNA, 19 nt, Artificial Sequence
  Description of Artificial Sequence: Synthetic oligonucleotide
  Antisense strand to SEQ ID NO: 892166
ucaauuacaaaucuaggag

SEQ ID NO: 892168 - RNA, 19 nt, Artificial Sequence
  Description of Artificial Sequence: Synthetic oligonucleotide
  Sense strand starting at position 3533 of SEQ ID NO: 588821
auuuguaauugacacagua

SEQ ID NO: 892169 - RNA, 19 nt, Artificial Sequence
  Description of Artificial Sequence: Synthetic oligonucleotide
  Antisense strand to SEQ ID NO: 892168
uacugugucaauuacaaau

SEQ ID NO: 892170 - RNA, 19 nt, Artificial Sequence
  Description of Artificial Sequence: Synthetic oligonucleotide
  Sense strand starting at position 3535 of SEQ ID NO: 588821
uuguaauugacacaguagu

SEQ ID NO: 892171 - RNA, 19 nt, Artificial Sequence
  Description of Artificial Sequence: Synthetic oligonucleotide
  Antisense strand to SEQ ID NO: 892170
acuacugugucaauuacaa

SEQ ID NO: 892172 - RNA, 19 nt, Artificial Sequence
  Description of Artificial Sequence: Synthetic oligonucleotide
  Sense strand starting at position 3628 of SEQ ID NO: 588821
auguuaaagcuguacaaag

SEQ ID NO: 892173 - RNA, 19 nt, Artificial Sequence
  Description of Artificial Sequence: Synthetic oligonucleotide
  Antisense strand to SEQ ID NO: 892172
cuuuguacagcuuuaacau

SEQ ID NO: 892174 - RNA, 19 nt, Artificial Sequence
  Description of Artificial Sequence: Synthetic oligonucleotide
  Sense strand starting at position 3630 of SEQ ID NO: 588821
guuaaagcuguacaaaguu

SEQ ID NO: 892175 - RNA, 19 nt, Artificial Sequence
  Description of Artificial Sequence: Synthetic oligonucleotide
  Antisense strand to SEQ ID NO: 892174
aacuuuguacagcuuuaac

SEQ ID NO: 892176 - RNA, 19 nt, Artificial Sequence
  Description of Artificial Sequence: Synthetic oligonucleotide
  Sense strand starting at position 3639 of SEQ ID NO: 588821
guacaaaguuaugccuaau

SEQ ID NO: 892177 - RNA, 19 nt, Artificial Sequence
  Description of Artificial Sequence: Synthetic oligonucleotide
  Antisense strand to SEQ ID NO: 892176
auuaggcauaacuuuguac

SEQ ID NO: 892178 - RNA, 19 nt, Artificial Sequence
  Description of Artificial Sequence: Synthetic oligonucleotide
  Sense strand starting at position 3645 of SEQ ID NO: 588821
aguuaugccuaauuuaguu

SEQ ID NO: 892179 - RNA, 19 nt, Artificial Sequence
  Description of Artificial Sequence: Synthetic oligonucleotide
  Antisense strand to SEQ ID NO: 892178
aacuaaauuaggcauaacu

SEQ ID NO: 892180 - RNA, 19 nt, Artificial Sequence
  Description of Artificial Sequence: Synthetic oligonucleotide
  Sense strand starting at position 3765 of SEQ ID NO: 588821
uuccaaaggcuuuguaaac

SEQ ID NO: 892181 - RNA, 19 nt, Artificial Sequence
  Description of Artificial Sequence: Synthetic oligonucleotide
  Antisense strand to SEQ ID NO: 892180
guuuacaaagccuuuggaa

SEQ ID NO: 892182 - RNA, 19 nt, Artificial Sequence
  Description of Artificial Sequence: Synthetic oligonucleotide
  Sense strand starting at position 3766 of SEQ ID NO: 588821
uccaaaggcuuuguaaaca

SEQ ID NO: 892183 - RNA, 19 nt, Artificial Sequence
  Description of Artificial Sequence: Synthetic oligonucleotide
  Antisense strand to SEQ ID NO: 892182
uguuuacaaagccuuugga

SEQ ID NO: 892184 - RNA, 19 nt, Artificial Sequence
  Description of Artificial Sequence: Synthetic oligonucleotide
  Sense strand starting at position 3774 of SEQ ID NO: 588821
cuuuguaaacauugucuaa

SEQ ID NO: 892185 - RNA, 19 nt, Artificial Sequence
  Description of Artificial Sequence: Synthetic oligonucleotide
  Antisense strand to SEQ ID NO: 892184
uuagacaauguuuacaaag

SEQ ID NO: 892186 - RNA, 19 nt, Artificial Sequence
  Description of Artificial Sequence: Synthetic oligonucleotide
  Sense strand starting at position 3828 of SEQ ID NO: 588821
uucucuuuagagugaacag

SEQ ID NO: 892187 - RNA, 19 nt, Artificial Sequence
  Description of Artificial Sequence: Synthetic oligonucleotide
  Antisense strand to SEQ ID NO: 892186
cuguucacucuaaagagaa

SEQ ID NO: 892188 - RNA, 19 nt, Artificial Sequence
  Description of Artificial Sequence: Synthetic oligonucleotide
  Sense strand starting at position 35 of SEQ ID NO: 588822
guccguacucuugacaaag

SEQ ID NO: 892189 - RNA, 19 nt, Artificial Sequence
  Description of Artificial Sequence: Synthetic oligonucleotide
  Antisense strand to SEQ ID NO: 892188
cuuugucaagaguacggac

SEQ ID NO: 892190 - RNA, 19 nt, Artificial Sequence
  Description of Artificial Sequence: Synthetic oligonucleotide
  Sense strand starting at position 85 of SEQ ID NO: 588822
caccacugguggcagaaau

SEQ ID NO: 892191 - RNA, 19 nt, Artificial Sequence
  Description of Artificial Sequence: Synthetic oligonucleotide
  Antisense strand to SEQ ID NO: 892190
auuucugccaccaguggug

SEQ ID NO: 892192 - RNA, 19 nt, Artificial Sequence
  Description of Artificial Sequence: Synthetic oligonucleotide
  Sense strand starting at position 440 of SEQ ID NO: 588822
gguucuuguccagaacugu

SEQ ID NO: 892193 - RNA, 19 nt, Artificial Sequence
  Description of Artificial Sequence: Synthetic oligonucleotide
  Antisense strand to SEQ ID NO: 892192
acaguucuggacaagaacc

SEQ ID NO: 892194 - RNA, 19 nt, Artificial Sequence
  Description of Artificial Sequence: Synthetic oligonucleotide
  Sense strand starting at position 465 of SEQ ID NO: 588822
cagacuuggccacaaugua

SEQ ID NO: 892195 - RNA, 19 nt, Artificial Sequence
  Description of Artificial Sequence: Synthetic oligonucleotide
  Antisense strand to SEQ ID NO: 892194
uacauuguggccaagucug

SEQ ID NO: 892196 - RNA, 19 nt, Artificial Sequence
  Description of Artificial Sequence: Synthetic oligonucleotide
  Sense strand starting at position 600 of SEQ ID NO: 588822
guccaucuuccuggaugga

SEQ ID NO: 892197 - RNA, 19 nt, Artificial Sequence
  Description of Artificial Sequence: Synthetic oligonucleotide
  Antisense strand to SEQ ID NO: 892196
uccauccaggaagauggac

SEQ ID NO: 892198 - RNA, 19 nt, Artificial Sequence
  Description of Artificial Sequence: Synthetic oligonucleotide
  Sense strand starting at position 643 of SEQ ID NO: 588822
guucuccuccucuaguaau

SEQ ID NO: 892199 - RNA, 19 nt, Artificial Sequence
  Description of Artificial Sequence: Synthetic oligonucleotide
  Antisense strand to SEQ ID NO: 892198
auuacuagaggaggagaac

SEQ ID NO: 892200 - RNA, 19 nt, Artificial Sequence
  Description of Artificial Sequence: Synthetic oligonucleotide
  Sense strand starting at position 677 of SEQ ID NO: 588822
gaggcuaagugucccuuaa

SEQ ID NO: 892201 - RNA, 19 nt, Artificial Sequence
  Description of Artificial Sequence: Synthetic oligonucleotide
  Antisense strand to SEQ ID NO: 892200
uuaagggacacuuagccuc

SEQ ID NO: 892202 - RNA, 19 nt, Artificial Sequence
  Description of Artificial Sequence: Synthetic oligonucleotide
  Sense strand starting at position 679 of SEQ ID NO: 588822
ggcuaagugucccuuaagu

SEQ ID NO: 892203 - RNA, 19 nt, Artificial Sequence
  Description of Artificial Sequence: Synthetic oligonucleotide
  Antisense strand to SEQ ID NO: 892202
acuuaagggacacuuagcc

SEQ ID NO: 892204 - RNA, 19 nt, Artificial Sequence
  Description of Artificial Sequence: Synthetic oligonucleotide
  Sense strand starting at position 775 of SEQ ID NO: 588822
agcacugugcaaggauuaa

SEQ ID NO: 892205 - RNA, 19 nt, Artificial Sequence
  Description of Artificial Sequence: Synthetic oligonucleotide
  Antisense strand to SEQ ID NO: 892204
uuaauccuugcacagugcu

SEQ ID NO: 892206 - RNA, 19 nt, Artificial Sequence
  Description of Artificial Sequence: Synthetic oligonucleotide
  Sense strand starting at position 978 of SEQ ID NO: 588822
acuuccugacgaggaaaua

SEQ ID NO: 892207 - RNA, 19 nt, Artificial Sequence
  Description of Artificial Sequence: Synthetic oligonucleotide
  Antisense strand to SEQ ID NO: 892206
uauuuccucgucaggaagu

SEQ ID NO: 892208 - RNA, 19 nt, Artificial Sequence
  Description of Artificial Sequence: Synthetic oligonucleotide
  Sense strand starting at position 996 of SEQ ID NO: 588822
acagauguuggcugcccaa

SEQ ID NO: 892209 - RNA, 19 nt, Artificial Sequence
  Description of Artificial Sequence: Synthetic oligonucleotide
  Antisense strand to SEQ ID NO: 892208
uugggcagccaacaucugu

SEQ ID NO: 892210 - RNA, 19 nt, Artificial Sequence
  Description of Artificial Sequence: Synthetic oligonucleotide
  Sense strand starting at position 1009 of SEQ ID NO: 588822
gcccaaugucucuaagcca

SEQ ID NO: 892211 - RNA, 19 nt, Artificial Sequence
  Description of Artificial Sequence: Synthetic oligonucleotide
  Antisense strand to SEQ ID NO: 892210
uggcuuagagacauugggc

SEQ ID NO: 892212 - RNA, 19 nt, Artificial Sequence
  Description of Artificial Sequence: Synthetic oligonucleotide
  Sense strand starting at position 1094 of SEQ ID NO: 588822
uggagcuaauuacaauuua

SEQ ID NO: 892213 - RNA, 19 nt, Artificial Sequence
  Description of Artificial Sequence: Synthetic oligonucleotide
  Antisense strand to SEQ ID NO: 892212
uaaauuguaauuagcucca

SEQ ID NO: 892214 - RNA, 19 nt, Artificial Sequence
  Description of Artificial Sequence: Synthetic oligonucleotide
  Sense strand starting at position 1137 of SEQ ID NO: 588822
acacgaccuuccuaaggua

SEQ ID NO: 892215 - RNA, 19 nt, Artificial Sequence
  Description of Artificial Sequence: Synthetic oligonucleotide
  Antisense strand to SEQ ID NO: 892214
uaccuuaggaaggucgugu

SEQ ID NO: 892216 - RNA, 19 nt, Artificial Sequence
  Description of Artificial Sequence: Synthetic oligonucleotide
  Sense strand starting at position 1243 of SEQ ID NO: 588822
cggcgcuuaaagugaaaca

SEQ ID NO: 892217 - RNA, 19 nt, Artificial Sequence
  Description of Artificial Sequence: Synthetic oligonucleotide
  Antisense strand to SEQ ID NO: 892216
uguuucacuuuaagcgccg

SEQ ID NO: 892218 - RNA, 19 nt, Artificial Sequence
  Description of Artificial Sequence: Synthetic oligonucleotide
  Sense strand starting at position 1244 of SEQ ID NO: 588822
ggcgcuuaaagugaaacaa

SEQ ID NO: 892219 - RNA, 19 nt, Artificial Sequence
  Description of Artificial Sequence: Synthetic oligonucleotide
  Antisense strand to SEQ ID NO: 892218
uuguuucacuuuaagcgcc

SEQ ID NO: 892220 - RNA, 19 nt, Artificial Sequence
  Description of Artificial Sequence: Synthetic oligonucleotide
  Sense strand starting at position 1385 of SEQ ID NO: 588822
aagaguuagugucugugca

SEQ ID NO: 892221 - RNA, 19 nt, Artificial Sequence
  Description of Artificial Sequence: Synthetic oligonucleotide
  Antisense strand to SEQ ID NO: 892220
ugcacagacacuaacucuu

SEQ ID NO: 892222 - RNA, 19 nt, Artificial Sequence
  Description of Artificial Sequence: Synthetic oligonucleotide
  Sense strand starting at position 1387 of SEQ ID NO: 588822
gaguuagugucugugcaga

SEQ ID NO: 892223 - RNA, 19 nt, Artificial Sequence
  Description of Artificial Sequence: Synthetic oligonucleotide
  Antisense strand to SEQ ID NO: 892222
ucugcacagacacuaacuc

SEQ ID NO: 892224 - RNA, 19 nt, Artificial Sequence
  Description of Artificial Sequence: Synthetic oligonucleotide
  Sense strand starting at position 1975 of SEQ ID NO: 588822
ccggaaaucgcgcggacaa

SEQ ID NO: 892225 - RNA, 19 nt, Artificial Sequence
  Description of Artificial Sequence: Synthetic oligonucleotide
  Antisense strand to SEQ ID NO: 892224
uuguccgcgcgauuuccgg

SEQ ID NO: 892226 - RNA, 19 nt, Artificial Sequence
  Description of Artificial Sequence: Synthetic oligonucleotide
  Sense strand starting at position 2015 of SEQ ID NO: 588822
gcggcuaucgcgagaacug

SEQ ID NO: 892227 - RNA, 19 nt, Artificial Sequence
  Description of Artificial Sequence: Synthetic oligonucleotide
  Antisense strand to SEQ ID NO: 892226
caguucucgcgauagccgc

SEQ ID NO: 892228 - RNA, 19 nt, Artificial Sequence
  Description of Artificial Sequence: Synthetic oligonucleotide
  Sense strand starting at position 2016 of SEQ ID NO: 588822
cggcuaucgcgagaacugu

SEQ ID NO: 892229 - RNA, 19 nt, Artificial Sequence
  Description of Artificial Sequence: Synthetic oligonucleotide
  Antisense strand to SEQ ID NO: 892228
acaguucucgcgauagccg

SEQ ID NO: 892230 - RNA, 19 nt, Artificial Sequence
  Description of Artificial Sequence: Synthetic oligonucleotide
  Sense strand starting at position 3035 of SEQ ID NO: 588822
cucugaggacuggguguau

SEQ ID NO: 892231 - RNA, 19 nt, Artificial Sequence
  Description of Artificial Sequence: Synthetic oligonucleotide
  Antisense strand to SEQ ID NO: 892230
auacacccaguccucagag

SEQ ID NO: 892232 - RNA, 19 nt, Artificial Sequence
  Description of Artificial Sequence: Synthetic oligonucleotide
  Sense strand starting at position 3115 of SEQ ID NO: 588822
gaaucaauguugcuugcau

SEQ ID NO: 892233 - RNA, 19 nt, Artificial Sequence
  Description of Artificial Sequence: Synthetic oligonucleotide
  Antisense strand to SEQ ID NO: 892232
augcaagcaacauugauuc

SEQ ID NO: 892234 - RNA, 19 nt, Artificial Sequence
  Description of Artificial Sequence: Synthetic oligonucleotide
  Sense strand starting at position 3138 of SEQ ID NO: 588822
guugcuuuguggcuaacau

SEQ ID NO: 892235 - RNA, 19 nt, Artificial Sequence
  Description of Artificial Sequence: Synthetic oligonucleotide
  Antisense strand to SEQ ID NO: 892234
auguuagccacaaagcaac

SEQ ID NO: 892236 - RNA, 19 nt, Artificial Sequence
  Description of Artificial Sequence: Synthetic oligonucleotide
  Sense strand starting at position 3139 of SEQ ID NO: 588822
uugcuuuguggcuaacauu

SEQ ID NO: 892237 - RNA, 19 nt, Artificial Sequence
  Description of Artificial Sequence: Synthetic oligonucleotide
  Antisense strand to SEQ ID NO: 892236
aauguuagccacaaagcaa

SEQ ID NO: 892238 - RNA, 19 nt, Artificial Sequence
  Description of Artificial Sequence: Synthetic oligonucleotide
  Sense strand starting at position 3142 of SEQ ID NO: 588822
cuuuguggcuaacauuuau

SEQ ID NO: 892239 - RNA, 19 nt, Artificial Sequence
  Description of Artificial Sequence: Synthetic oligonucleotide
  Antisense strand to SEQ ID NO: 892238
auaaauguuagccacaaag

SEQ ID NO: 892240 - RNA, 19 nt, Artificial Sequence
  Description of Artificial Sequence: Synthetic oligonucleotide
  Sense strand starting at position 3153 of SEQ ID NO: 588822
acauuuauugagcgcucau

SEQ ID NO: 892241 - RNA, 19 nt, Artificial Sequence
  Description of Artificial Sequence: Synthetic oligonucleotide
  Antisense strand to SEQ ID NO: 892240
augagcgcucaauaaaugu

SEQ ID NO: 892242 - RNA, 19 nt, Artificial Sequence
  Description of Artificial Sequence: Synthetic oligonucleotide
  Sense strand starting at position 3209 of SEQ ID NO: 588822
gucgcuggauccucauaga

SEQ ID NO: 892243 - RNA, 19 nt, Artificial Sequence
  Description of Artificial Sequence: Synthetic oligonucleotide
  Antisense strand to SEQ ID NO: 892242
ucuaugaggauccagcgac

SEQ ID NO: 892244 - RNA, 19 nt, Artificial Sequence
  Description of Artificial Sequence: Synthetic oligonucleotide
  Sense strand starting at position 3222 of SEQ ID NO: 588822
cauagaagccaguguuggu

SEQ ID NO: 892245 - RNA, 19 nt, Artificial Sequence
  Description of Artificial Sequence: Synthetic oligonucleotide
  Antisense strand to SEQ ID NO: 892244
accaacacuggcuucuaug

SEQ ID NO: 892246 - RNA, 19 nt, Artificial Sequence
  Description of Artificial Sequence: Synthetic oligonucleotide
  Sense strand starting at position 3295 of SEQ ID NO: 588822
caaggugaccucugcaguu

SEQ ID NO: 892247 - RNA, 19 nt, Artificial Sequence
  Description of Artificial Sequence: Synthetic oligonucleotide
  Antisense strand to SEQ ID NO: 892246
aacugcagaggucaccuug

SEQ ID NO: 892248 - RNA, 19 nt, Artificial Sequence
  Description of Artificial Sequence: Synthetic oligonucleotide
  Sense strand starting at position 3307 of SEQ ID NO: 588822
ugcaguuguggguggcaga

SEQ ID NO: 892249 - RNA, 19 nt, Artificial Sequence
  Description of Artificial Sequence: Synthetic oligonucleotide
  Antisense strand to SEQ ID NO: 892248
ucugccacccacaacugca

SEQ ID NO: 892250 - RNA, 19 nt, Artificial Sequence
  Description of Artificial Sequence: Synthetic oligonucleotide
  Sense strand starting at position 3308 of SEQ ID NO: 588822
gcaguuguggguggcagau

SEQ ID NO: 892251 - RNA, 19 nt, Artificial Sequence
  Description of Artificial Sequence: Synthetic oligonucleotide
  Antisense strand to SEQ ID NO: 892250
aucugccacccacaacugc

SEQ ID NO: 892252 - RNA, 19 nt, Artificial Sequence
  Description of Artificial Sequence: Synthetic oligonucleotide
  Sense strand starting at position 3318 of SEQ ID NO: 588822
guggcagauuucggauuca

SEQ ID NO: 892253 - RNA, 19 nt, Artificial Sequence
  Description of Artificial Sequence: Synthetic oligonucleotide
  Antisense strand to SEQ ID NO: 892252
ugaauccgaaaucugccac

SEQ ID NO: 892254 - RNA, 19 nt, Artificial Sequence
  Description of Artificial Sequence: Synthetic oligonucleotide
  Sense strand starting at position 3379 of SEQ ID NO: 588822
ugcacuucccugggugauu

SEQ ID NO: 892255 - RNA, 19 nt, Artificial Sequence
  Description of Artificial Sequence: Synthetic oligonucleotide
  Antisense strand to SEQ ID NO: 892254
aaucacccagggaagugca

SEQ ID NO: 892256 - RNA, 19 nt, Artificial Sequence
  Description of Artificial Sequence: Synthetic oligonucleotide
  Sense strand starting at position 3483 of SEQ ID NO: 588822
cugaguucaggacagugua

SEQ ID NO: 892257 - RNA, 19 nt, Artificial Sequence
  Description of Artificial Sequence: Synthetic oligonucleotide
  Antisense strand to SEQ ID NO: 892256
uacacuguccugaacucag

SEQ ID NO: 892258 - RNA, 19 nt, Artificial Sequence
  Description of Artificial Sequence: Synthetic oligonucleotide
  Sense strand starting at position 3504 of SEQ ID NO: 588822
ucgugugugccaaguuaug

SEQ ID NO: 892259 - RNA, 19 nt, Artificial Sequence
  Description of Artificial Sequence: Synthetic oligonucleotide
  Antisense strand to SEQ ID NO: 892258
cauaacuuggcacacacga

SEQ ID NO: 892260 - RNA, 19 nt, Artificial Sequence
  Description of Artificial Sequence: Synthetic oligonucleotide
  Sense strand starting at position 3510 of SEQ ID NO: 588822
gugccaaguuaugugagca

SEQ ID NO: 892261 - RNA, 19 nt, Artificial Sequence
  Description of Artificial Sequence: Synthetic oligonucleotide
  Antisense strand to SEQ ID NO: 892260
ugcucacauaacuuggcac

SEQ ID NO: 892262 - RNA, 19 nt, Artificial Sequence
  Description of Artificial Sequence: Synthetic oligonucleotide
  Sense strand starting at position 3514 of SEQ ID NO: 588822
caaguuaugugagcaccaa

SEQ ID NO: 892263 - RNA, 19 nt, Artificial Sequence
  Description of Artificial Sequence: Synthetic oligonucleotide
  Antisense strand to SEQ ID NO: 892262
uuggugcucacauaacuug

SEQ ID NO: 892264 - RNA, 19 nt, Artificial Sequence
  Description of Artificial Sequence: Synthetic oligonucleotide
  Sense strand starting at position 3539 of SEQ ID NO: 588822
gggcaaaucccauagguca

SEQ ID NO: 892265 - RNA, 19 nt, Artificial Sequence
  Description of Artificial Sequence: Synthetic oligonucleotide
  Antisense strand to SEQ ID NO: 892264
ugaccuaugggauuugccc

SEQ ID NO: 892266 - RNA, 19 nt, Artificial Sequence
  Description of Artificial Sequence: Synthetic oligonucleotide
  Sense strand starting at position 3969 of SEQ ID NO: 588822
ggguuauggugagaacaaa

SEQ ID NO: 892267 - RNA, 19 nt, Artificial Sequence
  Description of Artificial Sequence: Synthetic oligonucleotide
  Antisense strand to SEQ ID NO: 892266
uuuguucucaccauaaccc

SEQ ID NO: 892268 - RNA, 19 nt, Artificial Sequence
  Description of Artificial Sequence: Synthetic oligonucleotide
  Sense strand starting at position 33 of SEQ ID NO: 588823
gaggaaguggucugcagag

SEQ ID NO: 892269 - RNA, 19 nt, Artificial Sequence
  Description of Artificial Sequence: Synthetic oligonucleotide
  Antisense strand to SEQ ID NO: 892268
cucugcagaccacuuccuc

SEQ ID NO: 892270 - RNA, 19 nt, Artificial Sequence
  Description of Artificial Sequence: Synthetic oligonucleotide
  Sense strand starting at position 62 of SEQ ID NO: 588823
gugcaagacacugguagaa

SEQ ID NO: 892271 - RNA, 19 nt, Artificial Sequence
  Description of Artificial Sequence: Synthetic oligonucleotide
  Antisense strand to SEQ ID NO: 892270
uucuaccagugucuugcac

SEQ ID NO: 892272 - RNA, 19 nt, Artificial Sequence
  Description of Artificial Sequence: Synthetic oligonucleotide
  Sense strand starting at position 64 of SEQ ID NO: 588823
gcaagacacugguagaaga

SEQ ID NO: 892273 - RNA, 19 nt, Artificial Sequence
  Description of Artificial Sequence: Synthetic oligonucleotide
  Antisense strand to SEQ ID NO: 892272
ucuucuaccagugucuugc

SEQ ID NO: 892274 - RNA, 19 nt, Artificial Sequence
  Description of Artificial Sequence: Synthetic oligonucleotide
  Sense strand starting at position 212 of SEQ ID NO: 588823
gcagacucaccuuguagaa

SEQ ID NO: 892275 - RNA, 19 nt, Artificial Sequence
  Description of Artificial Sequence: Synthetic oligonucleotide
  Antisense strand to SEQ ID NO: 892274
uucuacaaggugagucugc

SEQ ID NO: 892276 - RNA, 19 nt, Artificial Sequence
  Description of Artificial Sequence: Synthetic oligonucleotide
  Sense strand starting at position 312 of SEQ ID NO: 588823
cagagaugucagugaagau

SEQ ID NO: 892277 - RNA, 19 nt, Artificial Sequence
  Description of Artificial Sequence: Synthetic oligonucleotide
  Antisense strand to SEQ ID NO: 892276
aucuucacugacaucucug

SEQ ID NO: 892278 - RNA, 19 nt, Artificial Sequence
  Description of Artificial Sequence: Synthetic oligonucleotide
  Sense strand starting at position 500 of SEQ ID NO: 588823
aagugcaggcuggauaaau

SEQ ID NO: 892279 - RNA, 19 nt, Artificial Sequence
  Description of Artificial Sequence: Synthetic oligonucleotide
  Antisense strand to SEQ ID NO: 892278
auuuauccagccugcacuu

SEQ ID NO: 892280 - RNA, 19 nt, Artificial Sequence
  Description of Artificial Sequence: Synthetic oligonucleotide
  Sense strand starting at position 733 of SEQ ID NO: 588823
agaaguuauuuguagucau

SEQ ID NO: 892281 - RNA, 19 nt, Artificial Sequence
  Description of Artificial Sequence: Synthetic oligonucleotide
  Antisense strand to SEQ ID NO: 892280
augacuacaaauaacuucu

SEQ ID NO: 892282 - RNA, 19 nt, Artificial Sequence
  Description of Artificial Sequence: Synthetic oligonucleotide
  Sense strand starting at position 736 of SEQ ID NO: 588823
aguuauuuguagucauguc

SEQ ID NO: 892283 - RNA, 19 nt, Artificial Sequence
  Description of Artificial Sequence: Synthetic oligonucleotide
  Antisense strand to SEQ ID NO: 892282
gacaugacuacaaauaacu

SEQ ID NO: 892284 - RNA, 19 nt, Artificial Sequence
  Description of Artificial Sequence: Synthetic oligonucleotide
  Sense strand starting at position 771 of SEQ ID NO: 588823
cuaguagacagcuggucaa

SEQ ID NO: 892285 - RNA, 19 nt, Artificial Sequence
  Description of Artificial Sequence: Synthetic oligonucleotide
  Antisense strand to SEQ ID NO: 892284
uugaccagcugucuacuag

SEQ ID NO: 892286 - RNA, 19 nt, Artificial Sequence
  Description of Artificial Sequence: Synthetic oligonucleotide
  Sense strand starting at position 774 of SEQ ID NO: 588823
guagacagcuggucaacau

SEQ ID NO: 892287 - RNA, 19 nt, Artificial Sequence
  Description of Artificial Sequence: Synthetic oligonucleotide
  Antisense strand to SEQ ID NO: 892286
auguugaccagcugucuac

SEQ ID NO: 892288 - RNA, 19 nt, Artificial Sequence
  Description of Artificial Sequence: Synthetic oligonucleotide
  Sense strand starting at position 1185 of SEQ ID NO: 588823
acucaaguguuggugggaa

SEQ ID NO: 892289 - RNA, 19 nt, Artificial Sequence
  Description of Artificial Sequence: Synthetic oligonucleotide
  Antisense strand to SEQ ID NO: 892288
uucccaccaacacuugagu

SEQ ID NO: 892290 - RNA, 19 nt, Artificial Sequence
  Description of Artificial Sequence: Synthetic oligonucleotide
  Sense strand starting at position 1236 of SEQ ID NO: 588823
gcagcauuaagaugggucu

SEQ ID NO: 892291 - RNA, 19 nt, Artificial Sequence
  Description of Artificial Sequence: Synthetic oligonucleotide
  Antisense strand to SEQ ID NO: 892290
agacccaucuuaaugcugc

SEQ ID NO: 892292 - RNA, 19 nt, Artificial Sequence
  Description of Artificial Sequence: Synthetic oligonucleotide
  Sense strand starting at position 1259 of SEQ ID NO: 588823
ggaugcauuccaggcacaa

SEQ ID NO: 892293 - RNA, 19 nt, Artificial Sequence
  Description of Artificial Sequence: Synthetic oligonucleotide
  Antisense strand to SEQ ID NO: 892292
uugugccuggaaugcaucc

SEQ ID NO: 892294 - RNA, 19 nt, Artificial Sequence
  Description of Artificial Sequence: Synthetic oligonucleotide
  Sense strand starting at position 1383 of SEQ ID NO: 588823
uuugaaauccuccgacgau

SEQ ID NO: 892295 - RNA, 19 nt, Artificial Sequence
  Description of Artificial Sequence: Synthetic oligonucleotide
  Antisense strand to SEQ ID NO: 892294
aucgucggaggauuucaaa

SEQ ID NO: 892296 - RNA, 19 nt, Artificial Sequence
  Description of Artificial Sequence: Synthetic oligonucleotide
  Sense strand starting at position 1450 of SEQ ID NO: 588823
ucacuuacaucuuagagag

SEQ ID NO: 892297 - RNA, 19 nt, Artificial Sequence
  Description of Artificial Sequence: Synthetic oligonucleotide
  Antisense strand to SEQ ID NO: 892296
cucucuaagauguaaguga

SEQ ID NO: 892298 - RNA, 19 nt, Artificial Sequence
  Description of Artificial Sequence: Synthetic oligonucleotide
  Sense strand starting at position 1557 of SEQ ID NO: 588823
uucuucuucccgcgaagau

SEQ ID NO: 892299 - RNA, 19 nt, Artificial Sequence
  Description of Artificial Sequence: Synthetic oligonucleotide
  Antisense strand to SEQ ID NO: 892298
aucuucgcgggaagaagaa

SEQ ID NO: 892300 - RNA, 19 nt, Artificial Sequence
  Description of Artificial Sequence: Synthetic oligonucleotide
  Sense strand starting at position 1558 of SEQ ID NO: 588823
ucuucuucccgcgaagauc

SEQ ID NO: 892301 - RNA, 19 nt, Artificial Sequence
  Description of Artificial Sequence: Synthetic oligonucleotide
  Antisense strand to SEQ ID NO: 892300
gaucuucgcgggaagaaga

SEQ ID NO: 892302 - RNA, 19 nt, Artificial Sequence
  Description of Artificial Sequence: Synthetic oligonucleotide
  Sense strand starting at position 1743 of SEQ ID NO: 588823
cgugccuugggcagaguaa

SEQ ID NO: 892303 - RNA, 19 nt, Artificial Sequence
  Description of Artificial Sequence: Synthetic oligonucleotide
  Antisense strand to SEQ ID NO: 892302
uuacucugcccaaggcacg

SEQ ID NO: 892304 - RNA, 19 nt, Artificial Sequence
  Description of Artificial Sequence: Synthetic oligonucleotide
  Sense strand starting at position 1861 of SEQ ID NO: 588823
gauagaauccgcgggcuca

SEQ ID NO: 892305 - RNA, 19 nt, Artificial Sequence
  Description of Artificial Sequence: Synthetic oligonucleotide
  Antisense strand to SEQ ID NO: 892304
ugagcccgcggauucuauc

SEQ ID NO: 892306 - RNA, 19 nt, Artificial Sequence
  Description of Artificial Sequence: Synthetic oligonucleotide
  Sense strand starting at position 2272 of SEQ ID NO: 588823
ggacucaaauucguccauu

SEQ ID NO: 892307 - RNA, 19 nt, Artificial Sequence
  Description of Artificial Sequence: Synthetic oligonucleotide
  Antisense strand to SEQ ID NO: 892306
aauggacgaauuugagucc

SEQ ID NO: 892308 - RNA, 19 nt, Artificial Sequence
  Description of Artificial Sequence: Synthetic oligonucleotide
  Sense strand starting at position 2425 of SEQ ID NO: 588823
ucacgucgcggaggaauuu

SEQ ID NO: 892309 - RNA, 19 nt, Artificial Sequence
  Description of Artificial Sequence: Synthetic oligonucleotide
  Antisense strand to SEQ ID NO: 892308
aaauuccuccgcgacguga

SEQ ID NO: 892310 - RNA, 19 nt, Artificial Sequence
  Description of Artificial Sequence: Synthetic oligonucleotide
  Sense strand starting at position 2467 of SEQ ID NO: 588823
gcgggcucaggcaguuaua

SEQ ID NO: 892311 - RNA, 19 nt, Artificial Sequence
  Description of Artificial Sequence: Synthetic oligonucleotide
  Antisense strand to SEQ ID NO: 892310
uauaacugccugagcccgc

SEQ ID NO: 892312 - RNA, 19 nt, Artificial Sequence
  Description of Artificial Sequence: Synthetic oligonucleotide
  Sense strand starting at position 2470 of SEQ ID NO: 588823
ggcucaggcaguuauaauc

SEQ ID NO: 892313 - RNA, 19 nt, Artificial Sequence
  Description of Artificial Sequence: Synthetic oligonucleotide
  Antisense strand to SEQ ID NO: 892312
gauuauaacugccugagcc

SEQ ID NO: 892314 - RNA, 19 nt, Artificial Sequence
  Description of Artificial Sequence: Synthetic oligonucleotide
  Sense strand starting at position 3541 of SEQ ID NO: 588823
caagguaguaguugagacu

SEQ ID NO: 892315 - RNA, 19 nt, Artificial Sequence
  Description of Artificial Sequence: Synthetic oligonucleotide
  Antisense strand to SEQ ID NO: 892314
agucucaacuacuaccuug

SEQ ID NO: 892316 - RNA, 19 nt, Artificial Sequence
  Description of Artificial Sequence: Synthetic oligonucleotide
  Sense strand starting at position 3553 of SEQ ID NO: 588823
ugagacucuugggaaaucu

SEQ ID NO: 892317 - RNA, 19 nt, Artificial Sequence
  Description of Artificial Sequence: Synthetic oligonucleotide
  Antisense strand to SEQ ID NO: 892316
agauuucccaagagucuca

SEQ ID NO: 892318 - RNA, 19 nt, Artificial Sequence
  Description of Artificial Sequence: Synthetic oligonucleotide
  Sense strand starting at position 3585 of SEQ ID NO: 588823
gagucucaguuugcucaca

SEQ ID NO: 892319 - RNA, 19 nt, Artificial Sequence
  Description of Artificial Sequence: Synthetic oligonucleotide
  Antisense strand to SEQ ID NO: 892318
ugugagcaaacugagacuc

SEQ ID NO: 892320 - RNA, 19 nt, Artificial Sequence
  Description of Artificial Sequence: Synthetic oligonucleotide
  Sense strand starting at position 3587 of SEQ ID NO: 588823
gucucaguuugcucacaug

SEQ ID NO: 892321 - RNA, 19 nt, Artificial Sequence
  Description of Artificial Sequence: Synthetic oligonucleotide
  Antisense strand to SEQ ID NO: 892320
caugugagcaaacugagac

SEQ ID NO: 892322 - RNA, 19 nt, Artificial Sequence
  Description of Artificial Sequence: Synthetic oligonucleotide
  Sense strand starting at position 3611 of SEQ ID NO: 588823
ugaggcauuuaugagaauu

SEQ ID NO: 892323 - RNA, 19 nt, Artificial Sequence
  Description of Artificial Sequence: Synthetic oligonucleotide
  Antisense strand to SEQ ID NO: 892322
aauucucauaaaugccuca

SEQ ID NO: 892324 - RNA, 19 nt, Artificial Sequence
  Description of Artificial Sequence: Synthetic oligonucleotide
  Sense strand starting at position 3613 of SEQ ID NO: 588823
aggcauuuaugagaauuag

SEQ ID NO: 892325 - RNA, 19 nt, Artificial Sequence
  Description of Artificial Sequence: Synthetic oligonucleotide
  Antisense strand to SEQ ID NO: 892324
cuaauucucauaaaugccu

SEQ ID NO: 892326 - RNA, 19 nt, Artificial Sequence
  Description of Artificial Sequence: Synthetic oligonucleotide
  Sense strand starting at position 3647 of SEQ ID NO: 588823
agcuguuaacccgaaaucu

SEQ ID NO: 892327 - RNA, 19 nt, Artificial Sequence
  Description of Artificial Sequence: Synthetic oligonucleotide
  Antisense strand to SEQ ID NO: 892326
agauuucggguuaacagcu

SEQ ID NO: 892328 - RNA, 19 nt, Artificial Sequence
  Description of Artificial Sequence: Synthetic oligonucleotide
  Sense strand starting at position 3770 of SEQ ID NO: 588823
uguuuaggcuuucugauua

SEQ ID NO: 892329 - RNA, 19 nt, Artificial Sequence
  Description of Artificial Sequence: Synthetic oligonucleotide
  Antisense strand to SEQ ID NO: 892328
uaaucagaaagccuaaaca

SEQ ID NO: 892330 - RNA, 19 nt, Artificial Sequence
  Description of Artificial Sequence: Synthetic oligonucleotide
  Sense strand starting at position 3774 of SEQ ID NO: 588823
uaggcuuucugauuaaugu

SEQ ID NO: 892331 - RNA, 19 nt, Artificial Sequence
  Description of Artificial Sequence: Synthetic oligonucleotide
  Antisense strand to SEQ ID NO: 892330
acauuaaucagaaagccua

SEQ ID NO: 892332 - RNA, 19 nt, Artificial Sequence
  Description of Artificial Sequence: Synthetic oligonucleotide
  Sense strand starting at position 3775 of SEQ ID NO: 588823
aggcuuucugauuaauguc

SEQ ID NO: 892333 - RNA, 19 nt, Artificial Sequence
  Description of Artificial Sequence: Synthetic oligonucleotide
  Antisense strand to SEQ ID NO: 892332
gacauuaaucagaaagccu

SEQ ID NO: 892334 - RNA, 19 nt, Artificial Sequence
  Description of Artificial Sequence: Synthetic oligonucleotide
  Sense strand starting at position 3781 of SEQ ID NO: 588823
ucugauuaaugucugccaa

SEQ ID NO: 892335 - RNA, 19 nt, Artificial Sequence
  Description of Artificial Sequence: Synthetic oligonucleotide
  Antisense strand to SEQ ID NO: 892334
uuggcagacauuaaucaga

SEQ ID NO: 892336 - RNA, 19 nt, Artificial Sequence
  Description of Artificial Sequence: Synthetic oligonucleotide
  Sense strand starting at position 3782 of SEQ ID NO: 588823
cugauuaaugucugccaac

SEQ ID NO: 892337 - RNA, 19 nt, Artificial Sequence
  Description of Artificial Sequence: Synthetic oligonucleotide
  Antisense strand to SEQ ID NO: 892336
guuggcagacauuaaucag

SEQ ID NO: 892338 - RNA, 19 nt, Artificial Sequence
  Description of Artificial Sequence: Synthetic oligonucleotide
  Sense strand starting at position 3806 of SEQ ID NO: 588823
ggcauuaaucagcacucca

SEQ ID NO: 892339 - RNA, 19 nt, Artificial Sequence
  Description of Artificial Sequence: Synthetic oligonucleotide
  Antisense strand to SEQ ID NO: 892338
uggagugcugauuaaugcc

SEQ ID NO: 892340 - RNA, 19 nt, Artificial Sequence
  Description of Artificial Sequence: Synthetic oligonucleotide
  Sense strand starting at position 3865 of SEQ ID NO: 588823
agaguuaugguugaagcca

SEQ ID NO: 892341 - RNA, 19 nt, Artificial Sequence
  Description of Artificial Sequence: Synthetic oligonucleotide
  Antisense strand to SEQ ID NO: 892340
uggcuucaaccauaacucu

SEQ ID NO: 892342 - RNA, 19 nt, Artificial Sequence
  Description of Artificial Sequence: Synthetic oligonucleotide
  Sense strand starting at position 3880 of SEQ ID NO: 588823
gccagauuguccucuuguu

SEQ ID NO: 892343 - RNA, 19 nt, Artificial Sequence
  Description of Artificial Sequence: Synthetic oligonucleotide
  Antisense strand to SEQ ID NO: 892342
aacaagaggacaaucuggc

SEQ ID NO: 892344 - RNA, 19 nt, Artificial Sequence
  Description of Artificial Sequence: Synthetic oligonucleotide
  Sense strand starting at position 3932 of SEQ ID NO: 588823
ucccaucuccuaugaguag

SEQ ID NO: 892345 - RNA, 19 nt, Artificial Sequence
  Description of Artificial Sequence: Synthetic oligonucleotide
  Antisense strand to SEQ ID NO: 892344
cuacucauaggagauggga

SEQ ID NO: 892346 - RNA, 19 nt, Artificial Sequence
  Description of Artificial Sequence: Synthetic oligonucleotide
  Sense strand starting at position 3947 of SEQ ID NO: 588823
guagcaaccucugugcaau

SEQ ID NO: 892347 - RNA, 19 nt, Artificial Sequence
  Description of Artificial Sequence: Synthetic oligonucleotide
  Antisense strand to SEQ ID NO: 892346
auugcacagagguugcuac

SEQ ID NO: 892348 - RNA, 19 nt, Artificial Sequence
  Description of Artificial Sequence: Synthetic oligonucleotide
  Sense strand starting at position 44 of SEQ ID NO: 588824
gcugcugacucaguguuaa

SEQ ID NO: 892349 - RNA, 19 nt, Artificial Sequence
  Description of Artificial Sequence: Synthetic oligonucleotide
  Antisense strand to SEQ ID NO: 892348
uuaacacugagucagcagc

SEQ ID NO: 892350 - RNA, 19 nt, Artificial Sequence
  Description of Artificial Sequence: Synthetic oligonucleotide
  Sense strand starting at position 320 of SEQ ID NO: 588824
caguuuaggcuuggaguca

SEQ ID NO: 892351 - RNA, 19 nt, Artificial Sequence
  Description of Artificial Sequence: Synthetic oligonucleotide
  Antisense strand to SEQ ID NO: 892350
ugacuccaagccuaaacug

SEQ ID NO: 892352 - RNA, 19 nt, Artificial Sequence
  Description of Artificial Sequence: Synthetic oligonucleotide
  Sense strand starting at position 340 of SEQ ID NO: 588824
gguucuaauccuugucacu

SEQ ID NO: 892353 - RNA, 19 nt, Artificial Sequence
  Description of Artificial Sequence: Synthetic oligonucleotide
  Antisense strand to SEQ ID NO: 892352
agugacaaggauuagaacc

SEQ ID NO: 892354 - RNA, 19 nt, Artificial Sequence
  Description of Artificial Sequence: Synthetic oligonucleotide
  Sense strand starting at position 450 of SEQ ID NO: 588824
ucauguucuggaugaaaua

SEQ ID NO: 892355 - RNA, 19 nt, Artificial Sequence
  Description of Artificial Sequence: Synthetic oligonucleotide
  Antisense strand to SEQ ID NO: 892354
uauuucauccagaacauga

SEQ ID NO: 892356 - RNA, 19 nt, Artificial Sequence
  Description of Artificial Sequence: Synthetic oligonucleotide
  Sense strand starting at position 468 of SEQ ID NO: 588824
aaggaauccuugccugaga

SEQ ID NO: 892357 - RNA, 19 nt, Artificial Sequence
  Description of Artificial Sequence: Synthetic oligonucleotide
  Antisense strand to SEQ ID NO: 892356
ucucaggcaaggauuccuu

SEQ ID NO: 892358 - RNA, 19 nt, Artificial Sequence
  Description of Artificial Sequence: Synthetic oligonucleotide
  Sense strand starting at position 469 of SEQ ID NO: 588824
aggaauccuugccugagaa

SEQ ID NO: 892359 - RNA, 19 nt, Artificial Sequence
  Description of Artificial Sequence: Synthetic oligonucleotide
  Antisense strand to SEQ ID NO: 892358
uucucaggcaaggauuccu

SEQ ID NO: 892360 - RNA, 19 nt, Artificial Sequence
  Description of Artificial Sequence: Synthetic oligonucleotide
  Sense strand starting at position 470 of SEQ ID NO: 588824
ggaauccuugccugagaaa

SEQ ID NO: 892361 - RNA, 19 nt, Artificial Sequence
  Description of Artificial Sequence: Synthetic oligonucleotide
  Antisense strand to SEQ ID NO: 892360
uuucucaggcaaggauucc

SEQ ID NO: 892362 - RNA, 19 nt, Artificial Sequence
  Description of Artificial Sequence: Synthetic oligonucleotide
  Sense strand starting at position 655 of SEQ ID NO: 588824
auguccuguccugagaagu

SEQ ID NO: 892363 - RNA, 19 nt, Artificial Sequence
  Description of Artificial Sequence: Synthetic oligonucleotide
  Antisense strand to SEQ ID NO: 892362
acuucucaggacaggacau

SEQ ID NO: 892364 - RNA, 19 nt, Artificial Sequence
  Description of Artificial Sequence: Synthetic oligonucleotide
  Sense strand starting at position 685 of SEQ ID NO: 588824
ccgagugaggcucaaauuc

SEQ ID NO: 892365 - RNA, 19 nt, Artificial Sequence
  Description of Artificial Sequence: Synthetic oligonucleotide
  Antisense strand to SEQ ID NO: 892364
gaauuugagccucacucgg

SEQ ID NO: 892366 - RNA, 19 nt, Artificial Sequence
  Description of Artificial Sequence: Synthetic oligonucleotide
  Sense strand starting at position 694 of SEQ ID NO: 588824
gcucaaauuccaugucaag

SEQ ID NO: 892367 - RNA, 19 nt, Artificial Sequence
  Description of Artificial Sequence: Synthetic oligonucleotide
  Antisense strand to SEQ ID NO: 892366
cuugacauggaauuugagc

SEQ ID NO: 892368 - RNA, 19 nt, Artificial Sequence
  Description of Artificial Sequence: Synthetic oligonucleotide
  Sense strand starting at position 943 of SEQ ID NO: 588824
ccagauggcuaagcugaau

SEQ ID NO: 892369 - RNA, 19 nt, Artificial Sequence
  Description of Artificial Sequence: Synthetic oligonucleotide
  Antisense strand to SEQ ID NO: 892368
auucagcuuagccaucugg

SEQ ID NO: 892370 - RNA, 19 nt, Artificial Sequence
  Description of Artificial Sequence: Synthetic oligonucleotide
  Sense strand starting at position 971 of SEQ ID NO: 588824
cuaccauauugagcugaau

SEQ ID NO: 892371 - RNA, 19 nt, Artificial Sequence
  Description of Artificial Sequence: Synthetic oligonucleotide
  Antisense strand to SEQ ID NO: 892370
auucagcucaauaugguag

SEQ ID NO: 892372 - RNA, 19 nt, Artificial Sequence
  Description of Artificial Sequence: Synthetic oligonucleotide
  Sense strand starting at position 1568 of SEQ ID NO: 588824
acucaugacuccucugagu

SEQ ID NO: 892373 - RNA, 19 nt, Artificial Sequence
  Description of Artificial Sequence: Synthetic oligonucleotide
  Antisense strand to SEQ ID NO: 892372
acucagaggagucaugagu

SEQ ID NO: 892374 - RNA, 19 nt, Artificial Sequence
  Description of Artificial Sequence: Synthetic oligonucleotide
  Sense strand starting at position 1625 of SEQ ID NO: 588824
cagaacucgucgcucacaa

SEQ ID NO: 892375 - RNA, 19 nt, Artificial Sequence
  Description of Artificial Sequence: Synthetic oligonucleotide
  Antisense strand to SEQ ID NO: 892374
uugugagcgacgaguucug

SEQ ID NO: 892376 - RNA, 19 nt, Artificial Sequence
  Description of Artificial Sequence: Synthetic oligonucleotide
  Sense strand starting at position 1926 of SEQ ID NO: 588824
gccggaaccuggcuauagu

SEQ ID NO: 892377 - RNA, 19 nt, Artificial Sequence
  Description of Artificial Sequence: Synthetic oligonucleotide
  Antisense strand to SEQ ID NO: 892376
acuauagccagguuccggc

SEQ ID NO: 892378 - RNA, 19 nt, Artificial Sequence
  Description of Artificial Sequence: Synthetic oligonucleotide
  Sense strand starting at position 1937 of SEQ ID NO: 588824
gcuauagugccacggaacu

SEQ ID NO: 892379 - RNA, 19 nt, Artificial Sequence
  Description of Artificial Sequence: Synthetic oligonucleotide
  Antisense strand to SEQ ID NO: 892378
aguuccguggcacuauagc

SEQ ID NO: 892380 - RNA, 19 nt, Artificial Sequence
  Description of Artificial Sequence: Synthetic oligonucleotide
  Sense strand starting at position 2000 of SEQ ID NO: 588824
aagggaauuguggguaaua

SEQ ID NO: 892381 - RNA, 19 nt, Artificial Sequence
  Description of Artificial Sequence: Synthetic oligonucleotide
  Antisense strand to SEQ ID NO: 892380
uauuacccacaauucccuu

SEQ ID NO: 892382 - RNA, 19 nt, Artificial Sequence
  Description of Artificial Sequence: Synthetic oligonucleotide
  Sense strand starting at position 2001 of SEQ ID NO: 588824
agggaauuguggguaauau

SEQ ID NO: 892383 - RNA, 19 nt, Artificial Sequence
  Description of Artificial Sequence: Synthetic oligonucleotide
  Antisense strand to SEQ ID NO: 892382
auauuacccacaauucccu

SEQ ID NO: 892384 - RNA, 19 nt, Artificial Sequence
  Description of Artificial Sequence: Synthetic oligonucleotide
  Sense strand starting at position 2029 of SEQ ID NO: 588824
cucggagaucgcgagaguu

SEQ ID NO: 892385 - RNA, 19 nt, Artificial Sequence
  Description of Artificial Sequence: Synthetic oligonucleotide
  Antisense strand to SEQ ID NO: 892384
aacucucgcgaucuccgag

SEQ ID NO: 892386 - RNA, 19 nt, Artificial Sequence
  Description of Artificial Sequence: Synthetic oligonucleotide
  Sense strand starting at position 2031 of SEQ ID NO: 588824
cggagaucgcgagaguuga

SEQ ID NO: 892387 - RNA, 19 nt, Artificial Sequence
  Description of Artificial Sequence: Synthetic oligonucleotide
  Antisense strand to SEQ ID NO: 892386
ucaacucucgcgaucuccg

SEQ ID NO: 892388 - RNA, 19 nt, Artificial Sequence
  Description of Artificial Sequence: Synthetic oligonucleotide
  Sense strand starting at position 2398 of SEQ ID NO: 588824
gcgugugacuuauuuccca

SEQ ID NO: 892389 - RNA, 19 nt, Artificial Sequence
  Description of Artificial Sequence: Synthetic oligonucleotide
  Antisense strand to SEQ ID NO: 892388
ugggaaauaagucacacgc

SEQ ID NO: 892390 - RNA, 19 nt, Artificial Sequence
  Description of Artificial Sequence: Synthetic oligonucleotide
  Sense strand starting at position 3086 of SEQ ID NO: 588824
gaaggaaagcguggaugua

SEQ ID NO: 892391 - RNA, 19 nt, Artificial Sequence
  Description of Artificial Sequence: Synthetic oligonucleotide
  Antisense strand to SEQ ID NO: 892390
uacauccacgcuuuccuuc

SEQ ID NO: 892392 - RNA, 19 nt, Artificial Sequence
  Description of Artificial Sequence: Synthetic oligonucleotide
  Sense strand starting at position 3252 of SEQ ID NO: 588824
acgugaagucuggacugga

SEQ ID NO: 892393 - RNA, 19 nt, Artificial Sequence
  Description of Artificial Sequence: Synthetic oligonucleotide
  Antisense strand to SEQ ID NO: 892392
uccaguccagacuucacgu

SEQ ID NO: 892394 - RNA, 19 nt, Artificial Sequence
  Description of Artificial Sequence: Synthetic oligonucleotide
  Sense strand starting at position 3297 of SEQ ID NO: 588824
ccaggaguuccaggaugag

SEQ ID NO: 892395 - RNA, 19 nt, Artificial Sequence
  Description of Artificial Sequence: Synthetic oligonucleotide
  Antisense strand to SEQ ID NO: 892394
cucauccuggaacuccugg

SEQ ID NO: 892396 - RNA, 19 nt, Artificial Sequence
  Description of Artificial Sequence: Synthetic oligonucleotide
  Sense strand starting at position 3309 of SEQ ID NO: 588824
ggaugagcuugcucuggca

SEQ ID NO: 892397 - RNA, 19 nt, Artificial Sequence
  Description of Artificial Sequence: Synthetic oligonucleotide
  Antisense strand to SEQ ID NO: 892396
ugccagagcaagcucaucc

SEQ ID NO: 892398 - RNA, 19 nt, Artificial Sequence
  Description of Artificial Sequence: Synthetic oligonucleotide
  Sense strand starting at position 3355 of SEQ ID NO: 588824
gcggugucugcugauggaa

SEQ ID NO: 892399 - RNA, 19 nt, Artificial Sequence
  Description of Artificial Sequence: Synthetic oligonucleotide
  Antisense strand to SEQ ID NO: 892398
uuccaucagcagacaccgc

SEQ ID NO: 892400 - RNA, 19 nt, Artificial Sequence
  Description of Artificial Sequence: Synthetic oligonucleotide
  Sense strand starting at position 3358 of SEQ ID NO: 588824
gugucugcugauggaauga

SEQ ID NO: 892401 - RNA, 19 nt, Artificial Sequence
  Description of Artificial Sequence: Synthetic oligonucleotide
  Antisense strand to SEQ ID NO: 892400
ucauuccaucagcagacac

SEQ ID NO: 892402 - RNA, 19 nt, Artificial Sequence
  Description of Artificial Sequence: Synthetic oligonucleotide
  Sense strand starting at position 3397 of SEQ ID NO: 588824
uugacuuuauuuggcagaa

SEQ ID NO: 892403 - RNA, 19 nt, Artificial Sequence
  Description of Artificial Sequence: Synthetic oligonucleotide
  Antisense strand to SEQ ID NO: 892402
uucugccaaauaaagucaa

SEQ ID NO: 892404 - RNA, 19 nt, Artificial Sequence
  Description of Artificial Sequence: Synthetic oligonucleotide
  Sense strand starting at position 3399 of SEQ ID NO: 588824
gacuuuauuuggcagaaag

SEQ ID NO: 892405 - RNA, 19 nt, Artificial Sequence
  Description of Artificial Sequence: Synthetic oligonucleotide
  Antisense strand to SEQ ID NO: 892404
cuuucugccaaauaaaguc

SEQ ID NO: 892406 - RNA, 19 nt, Artificial Sequence
  Description of Artificial Sequence: Synthetic oligonucleotide
  Sense strand starting at position 3424 of SEQ ID NO: 588824
cccagaaaucugcguguuc

SEQ ID NO: 892407 - RNA, 19 nt, Artificial Sequence
  Description of Artificial Sequence: Synthetic oligonucleotide
  Antisense strand to SEQ ID NO: 892406
gaacacgcagauuucuggg

SEQ ID NO: 892408 - RNA, 19 nt, Artificial Sequence
  Description of Artificial Sequence: Synthetic oligonucleotide
  Sense strand starting at position 3425 of SEQ ID NO: 588824
ccagaaaucugcguguucu

SEQ ID NO: 892409 - RNA, 19 nt, Artificial Sequence
  Description of Artificial Sequence: Synthetic oligonucleotide
  Antisense strand to SEQ ID NO: 892408
agaacacgcagauuucugg

SEQ ID NO: 892410 - RNA, 19 nt, Artificial Sequence
  Description of Artificial Sequence: Synthetic oligonucleotide
  Sense strand starting at position 3426 of SEQ ID NO: 588824
cagaaaucugcguguucug

SEQ ID NO: 892411 - RNA, 19 nt, Artificial Sequence
  Description of Artificial Sequence: Synthetic oligonucleotide
  Antisense strand to SEQ ID NO: 892410
cagaacacgcagauuucug

SEQ ID NO: 892412 - RNA, 19 nt, Artificial Sequence
  Description of Artificial Sequence: Synthetic oligonucleotide
  Sense strand starting at position 3433 of SEQ ID NO: 588824
cugcguguucugcuaaggu

SEQ ID NO: 892413 - RNA, 19 nt, Artificial Sequence
  Description of Artificial Sequence: Synthetic oligonucleotide
  Antisense strand to SEQ ID NO: 892412
accuuagcagaacacgcag

SEQ ID NO: 892414 - RNA, 19 nt, Artificial Sequence
  Description of Artificial Sequence: Synthetic oligonucleotide
  Sense strand starting at position 3435 of SEQ ID NO: 588824
gcguguucugcuaagguug

SEQ ID NO: 892415 - RNA, 19 nt, Artificial Sequence
  Description of Artificial Sequence: Synthetic oligonucleotide
  Antisense strand to SEQ ID NO: 892414
caaccuuagcagaacacgc

SEQ ID NO: 892416 - RNA, 19 nt, Artificial Sequence
  Description of Artificial Sequence: Synthetic oligonucleotide
  Sense strand starting at position 3760 of SEQ ID NO: 588824
aauaguguucuaggcagga

SEQ ID NO: 892417 - RNA, 19 nt, Artificial Sequence
  Description of Artificial Sequence: Synthetic oligonucleotide
  Antisense strand to SEQ ID NO: 892416
uccugccuagaacacuauu

SEQ ID NO: 892418 - RNA, 19 nt, Artificial Sequence
  Description of Artificial Sequence: Synthetic oligonucleotide
  Sense strand starting at position 3794 of SEQ ID NO: 588824
gggagcuggucaguagaua

SEQ ID NO: 892419 - RNA, 19 nt, Artificial Sequence
  Description of Artificial Sequence: Synthetic oligonucleotide
  Antisense strand to SEQ ID NO: 892418
uaucuacugaccagcuccc

SEQ ID NO: 892420 - RNA, 19 nt, Artificial Sequence
  Description of Artificial Sequence: Synthetic oligonucleotide
  Sense strand starting at position 3795 of SEQ ID NO: 588824
ggagcuggucaguagauaa

SEQ ID NO: 892421 - RNA, 19 nt, Artificial Sequence
  Description of Artificial Sequence: Synthetic oligonucleotide
  Antisense strand to SEQ ID NO: 892420
uuaucuacugaccagcucc

SEQ ID NO: 892422 - RNA, 19 nt, Artificial Sequence
  Description of Artificial Sequence: Synthetic oligonucleotide
  Sense strand starting at position 3923 of SEQ ID NO: 588824
uggugaguuuaucugugua

SEQ ID NO: 892423 - RNA, 19 nt, Artificial Sequence
  Description of Artificial Sequence: Synthetic oligonucleotide
  Antisense strand to SEQ ID NO: 892422
uacacagauaaacucacca

SEQ ID NO: 892424 - RNA, 19 nt, Artificial Sequence
  Description of Artificial Sequence: Synthetic oligonucleotide
  Sense strand starting at position 3925 of SEQ ID NO: 588824
gugaguuuaucuguguaaa

SEQ ID NO: 892425 - RNA, 19 nt, Artificial Sequence
  Description of Artificial Sequence: Synthetic oligonucleotide
  Antisense strand to SEQ ID NO: 892424
uuuacacagauaaacucac

SEQ ID NO: 892426 - RNA, 19 nt, Artificial Sequence
  Description of Artificial Sequence: Synthetic oligonucleotide
  Sense strand starting at position 3969 of SEQ ID NO: 588824
agccaaugagcaggagaaa

SEQ ID NO: 892427 - RNA, 19 nt, Artificial Sequence
  Description of Artificial Sequence: Synthetic oligonucleotide
  Antisense strand to SEQ ID NO: 892426
uuucuccugcucauuggcu

SEQ ID NO: 892428 - RNA, 19 nt, Artificial Sequence
  Description of Artificial Sequence: Synthetic oligonucleotide
  Sense strand starting at position 41 of SEQ ID NO: 588825
agcaguaacuugcuaauaa

SEQ ID NO: 892429 - RNA, 19 nt, Artificial Sequence
  Description of Artificial Sequence: Synthetic oligonucleotide
  Antisense strand to SEQ ID NO: 892428
uuauuagcaaguuacugcu

SEQ ID NO: 892430 - RNA, 19 nt, Artificial Sequence
  Description of Artificial Sequence: Synthetic oligonucleotide
  Sense strand starting at position 147 of SEQ ID NO: 588825
agaaaugucugaccuggca

SEQ ID NO: 892431 - RNA, 19 nt, Artificial Sequence
  Description of Artificial Sequence: Synthetic oligonucleotide
  Antisense strand to SEQ ID NO: 892430
ugccaggucagacauuucu

SEQ ID NO: 892432 - RNA, 19 nt, Artificial Sequence
  Description of Artificial Sequence: Synthetic oligonucleotide
  Sense strand starting at position 231 of SEQ ID NO: 588825
gacugaggcuucuuguaga

SEQ ID NO: 892433 - RNA, 19 nt, Artificial Sequence
  Description of Artificial Sequence: Synthetic oligonucleotide
  Antisense strand to SEQ ID NO: 892432
ucuacaagaagccucaguc

SEQ ID NO: 892434 - RNA, 19 nt, Artificial Sequence
  Description of Artificial Sequence: Synthetic oligonucleotide
  Sense strand starting at position 236 of SEQ ID NO: 588825
aggcuucuuguagacacua

SEQ ID NO: 892435 - RNA, 19 nt, Artificial Sequence
  Description of Artificial Sequence: Synthetic oligonucleotide
  Antisense strand to SEQ ID NO: 892434
uagugucuacaagaagccu

SEQ ID NO: 892436 - RNA, 19 nt, Artificial Sequence
  Description of Artificial Sequence: Synthetic oligonucleotide
  Sense strand starting at position 370 of SEQ ID NO: 588825
aguagaggcucaucaaaua

SEQ ID NO: 892437 - RNA, 19 nt, Artificial Sequence
  Description of Artificial Sequence: Synthetic oligonucleotide
  Antisense strand to SEQ ID NO: 892436
uauuugaugagccucuacu

SEQ ID NO: 892438 - RNA, 19 nt, Artificial Sequence
  Description of Artificial Sequence: Synthetic oligonucleotide
  Sense strand starting at position 618 of SEQ ID NO: 588825
ucacaacgcuucucagaaa

SEQ ID NO: 892439 - RNA, 19 nt, Artificial Sequence
  Description of Artificial Sequence: Synthetic oligonucleotide
  Antisense strand to SEQ ID NO: 892438
uuucugagaagcguuguga

SEQ ID NO: 892440 - RNA, 19 nt, Artificial Sequence
  Description of Artificial Sequence: Synthetic oligonucleotide
  Sense strand starting at position 1312 of SEQ ID NO: 588825
guuccagacuucccagaaa

SEQ ID NO: 892441 - RNA, 19 nt, Artificial Sequence
  Description of Artificial Sequence: Synthetic oligonucleotide
  Antisense strand to SEQ ID NO: 892440
uuucugggaagucuggaac

SEQ ID NO: 892442 - RNA, 19 nt, Artificial Sequence
  Description of Artificial Sequence: Synthetic oligonucleotide
  Sense strand starting at position 1489 of SEQ ID NO: 588825
cacugagcucuuugggaaa

SEQ ID NO: 892443 - RNA, 19 nt, Artificial Sequence
  Description of Artificial Sequence: Synthetic oligonucleotide
  Antisense strand to SEQ ID NO: 892442
uuucccaaagagcucagug

SEQ ID NO: 892444 - RNA, 19 nt, Artificial Sequence
  Description of Artificial Sequence: Synthetic oligonucleotide
  Sense strand starting at position 1832 of SEQ ID NO: 588825
agccuuggccguuuccaua

SEQ ID NO: 892445 - RNA, 19 nt, Artificial Sequence
  Description of Artificial Sequence: Synthetic oligonucleotide
  Antisense strand to SEQ ID NO: 892444
uauggaaacggccaaggcu

SEQ ID NO: 892446 - RNA, 19 nt, Artificial Sequence
  Description of Artificial Sequence: Synthetic oligonucleotide
  Sense strand starting at position 2273 of SEQ ID NO: 588825
uggcguuagcuguugagca

SEQ ID NO: 892447 - RNA, 19 nt, Artificial Sequence
  Description of Artificial Sequence: Synthetic oligonucleotide
  Antisense strand to SEQ ID NO: 892446
ugcucaacagcuaacgcca

SEQ ID NO: 892448 - RNA, 19 nt, Artificial Sequence
  Description of Artificial Sequence: Synthetic oligonucleotide
  Sense strand starting at position 2360 of SEQ ID NO: 588825
gggcgagagccuuaguuac

SEQ ID NO: 892449 - RNA, 19 nt, Artificial Sequence
  Description of Artificial Sequence: Synthetic oligonucleotide
  Antisense strand to SEQ ID NO: 892448
guaacuaaggcucucgccc

SEQ ID NO: 892450 - RNA, 19 nt, Artificial Sequence
  Description of Artificial Sequence: Synthetic oligonucleotide
  Sense strand starting at position 2595 of SEQ ID NO: 588825
ggcgcucaauauuuguuaa

SEQ ID NO: 892451 - RNA, 19 nt, Artificial Sequence
  Description of Artificial Sequence: Synthetic oligonucleotide
  Antisense strand to SEQ ID NO: 892450
uuaacaaauauugagcgcc

SEQ ID NO: 892452 - RNA, 19 nt, Artificial Sequence
  Description of Artificial Sequence: Synthetic oligonucleotide
  Sense strand starting at position 2597 of SEQ ID NO: 588825
cgcucaauauuuguuaaau

SEQ ID NO: 892453 - RNA, 19 nt, Artificial Sequence
  Description of Artificial Sequence: Synthetic oligonucleotide
  Antisense strand to SEQ ID NO: 892452
auuuaacaaauauugagcg

SEQ ID NO: 892454 - RNA, 19 nt, Artificial Sequence
  Description of Artificial Sequence: Synthetic oligonucleotide
  Sense strand starting at position 2636 of SEQ ID NO: 588825
cagagaaaucgcgguggga

SEQ ID NO: 892455 - RNA, 19 nt, Artificial Sequence
  Description of Artificial Sequence: Synthetic oligonucleotide
  Antisense strand to SEQ ID NO: 892454
ucccaccgcgauuucucug

SEQ ID NO: 892456 - RNA, 19 nt, Artificial Sequence
  Description of Artificial Sequence: Synthetic oligonucleotide
  Sense strand starting at position 2638 of SEQ ID NO: 588825
gagaaaucgcggugggaau

SEQ ID NO: 892457 - RNA, 19 nt, Artificial Sequence
  Description of Artificial Sequence: Synthetic oligonucleotide
  Antisense strand to SEQ ID NO: 892456
auucccaccgcgauuucuc

SEQ ID NO: 892458 - RNA, 19 nt, Artificial Sequence
  Description of Artificial Sequence: Synthetic oligonucleotide
  Sense strand starting at position 2664 of SEQ ID NO: 588825
agauuaaguugggagauac

SEQ ID NO: 892459 - RNA, 19 nt, Artificial Sequence
  Description of Artificial Sequence: Synthetic oligonucleotide
  Antisense strand to SEQ ID NO: 892458
guaucucccaacuuaaucu

SEQ ID NO: 892460 - RNA, 19 nt, Artificial Sequence
  Description of Artificial Sequence: Synthetic oligonucleotide
  Sense strand starting at position 2695 of SEQ ID NO: 588825
ugacgaguuggccacuguu

SEQ ID NO: 892461 - RNA, 19 nt, Artificial Sequence
  Description of Artificial Sequence: Synthetic oligonucleotide
  Antisense strand to SEQ ID NO: 892460
aacaguggccaacucguca

SEQ ID NO: 892462 - RNA, 19 nt, Artificial Sequence
  Description of Artificial Sequence: Synthetic oligonucleotide
  Sense strand starting at position 2708 of SEQ ID NO: 588825
acuguuuggacggagaagu

SEQ ID NO: 892463 - RNA, 19 nt, Artificial Sequence
  Description of Artificial Sequence: Synthetic oligonucleotide
  Antisense strand to SEQ ID NO: 892462
acuucuccguccaaacagu

SEQ ID NO: 892464 - RNA, 19 nt, Artificial Sequence
  Description of Artificial Sequence: Synthetic oligonucleotide
  Sense strand starting at position 2743 of SEQ ID NO: 588825
gggugacucccagguuuca

SEQ ID NO: 892465 - RNA, 19 nt, Artificial Sequence
  Description of Artificial Sequence: Synthetic oligonucleotide
  Antisense strand to SEQ ID NO: 892464
ugaaaccugggagucaccc

SEQ ID NO: 892466 - RNA, 19 nt, Artificial Sequence
  Description of Artificial Sequence: Synthetic oligonucleotide
  Sense strand starting at position 2755 of SEQ ID NO: 588825
gguuucagaucgguuugga

SEQ ID NO: 892467 - RNA, 19 nt, Artificial Sequence
  Description of Artificial Sequence: Synthetic oligonucleotide
  Antisense strand to SEQ ID NO: 892466
uccaaaccgaucugaaacc

SEQ ID NO: 892468 - RNA, 19 nt, Artificial Sequence
  Description of Artificial Sequence: Synthetic oligonucleotide
  Sense strand starting at position 3064 of SEQ ID NO: 588825
cucccuuggcucugaaagu

SEQ ID NO: 892469 - RNA, 19 nt, Artificial Sequence
  Description of Artificial Sequence: Synthetic oligonucleotide
  Antisense strand to SEQ ID NO: 892468
acuuucagagccaagggag

SEQ ID NO: 892470 - RNA, 19 nt, Artificial Sequence
  Description of Artificial Sequence: Synthetic oligonucleotide
  Sense strand starting at position 3075 of SEQ ID NO: 588825
cugaaagucccuggauauc

SEQ ID NO: 892471 - RNA, 19 nt, Artificial Sequence
  Description of Artificial Sequence: Synthetic oligonucleotide
  Antisense strand to SEQ ID NO: 892470
gauauccagggacuuucag

SEQ ID NO: 892472 - RNA, 19 nt, Artificial Sequence
  Description of Artificial Sequence: Synthetic oligonucleotide
  Sense strand starting at position 3126 of SEQ ID NO: 588825
cuguguccaccugauagga

SEQ ID NO: 892473 - RNA, 19 nt, Artificial Sequence
  Description of Artificial Sequence: Synthetic oligonucleotide
  Antisense strand to SEQ ID NO: 892472
uccuaucagguggacacag

SEQ ID NO: 892474 - RNA, 19 nt, Artificial Sequence
  Description of Artificial Sequence: Synthetic oligonucleotide
  Sense strand starting at position 3189 of SEQ ID NO: 588825
agggauuagcccuaucuac

SEQ ID NO: 892475 - RNA, 19 nt, Artificial Sequence
  Description of Artificial Sequence: Synthetic oligonucleotide
  Antisense strand to SEQ ID NO: 892474
guagauagggcuaaucccu

SEQ ID NO: 892476 - RNA, 19 nt, Artificial Sequence
  Description of Artificial Sequence: Synthetic oligonucleotide
  Sense strand starting at position 3226 of SEQ ID NO: 588825
ggaggucucuuauugguaa

SEQ ID NO: 892477 - RNA, 19 nt, Artificial Sequence
  Description of Artificial Sequence: Synthetic oligonucleotide
  Antisense strand to SEQ ID NO: 892476
uuaccaauaagagaccucc

SEQ ID NO: 892478 - RNA, 19 nt, Artificial Sequence
  Description of Artificial Sequence: Synthetic oligonucleotide
  Sense strand starting at position 3229 of SEQ ID NO: 588825
ggucucuuauugguaaaug

SEQ ID NO: 892479 - RNA, 19 nt, Artificial Sequence
  Description of Artificial Sequence: Synthetic oligonucleotide
  Antisense strand to SEQ ID NO: 892478
cauuuaccaauaagagacc

SEQ ID NO: 892480 - RNA, 19 nt, Artificial Sequence
  Description of Artificial Sequence: Synthetic oligonucleotide
  Sense strand starting at position 3238 of SEQ ID NO: 588825
uugguaaaugugggauaaa

SEQ ID NO: 892481 - RNA, 19 nt, Artificial Sequence
  Description of Artificial Sequence: Synthetic oligonucleotide
  Antisense strand to SEQ ID NO: 892480
uuuaucccacauuuaccaa

SEQ ID NO: 892482 - RNA, 19 nt, Artificial Sequence
  Description of Artificial Sequence: Synthetic oligonucleotide
  Sense strand starting at position 3342 of SEQ ID NO: 588825
ggaugaguuuaguucccag

SEQ ID NO: 892483 - RNA, 19 nt, Artificial Sequence
  Description of Artificial Sequence: Synthetic oligonucleotide
  Antisense strand to SEQ ID NO: 892482
cugggaacuaaacucaucc

SEQ ID NO: 892484 - RNA, 19 nt, Artificial Sequence
  Description of Artificial Sequence: Synthetic oligonucleotide
  Sense strand starting at position 3345 of SEQ ID NO: 588825
ugaguuuaguucccaguca

SEQ ID NO: 892485 - RNA, 19 nt, Artificial Sequence
  Description of Artificial Sequence: Synthetic oligonucleotide
  Antisense strand to SEQ ID NO: 892484
ugacugggaacuaaacuca

SEQ ID NO: 892486 - RNA, 19 nt, Artificial Sequence
  Description of Artificial Sequence: Synthetic oligonucleotide
  Sense strand starting at position 3433 of SEQ ID NO: 588825
uccagucaucucuaugguu

SEQ ID NO: 892487 - RNA, 19 nt, Artificial Sequence
  Description of Artificial Sequence: Synthetic oligonucleotide
  Antisense strand to SEQ ID NO: 892486
aaccauagagaugacugga

SEQ ID NO: 892488 - RNA, 19 nt, Artificial Sequence
  Description of Artificial Sequence: Synthetic oligonucleotide
  Sense strand starting at position 3445 of SEQ ID NO: 588825
uaugguuuauugucacuga

SEQ ID NO: 892489 - RNA, 19 nt, Artificial Sequence
  Description of Artificial Sequence: Synthetic oligonucleotide
  Antisense strand to SEQ ID NO: 892488
ucagugacaauaaaccaua

SEQ ID NO: 892490 - RNA, 19 nt, Artificial Sequence
  Description of Artificial Sequence: Synthetic oligonucleotide
  Sense strand starting at position 3448 of SEQ ID NO: 588825
gguuuauugucacugaaau

SEQ ID NO: 892491 - RNA, 19 nt, Artificial Sequence
  Description of Artificial Sequence: Synthetic oligonucleotide
  Antisense strand to SEQ ID NO: 892490
auuucagugacaauaaacc

SEQ ID NO: 892492 - RNA, 19 nt, Artificial Sequence
  Description of Artificial Sequence: Synthetic oligonucleotide
  Sense strand starting at position 3449 of SEQ ID NO: 588825
guuuauugucacugaaaua

SEQ ID NO: 892493 - RNA, 19 nt, Artificial Sequence
  Description of Artificial Sequence: Synthetic oligonucleotide
  Antisense strand to SEQ ID NO: 892492
uauuucagugacaauaaac

SEQ ID NO: 892494 - RNA, 19 nt, Artificial Sequence
  Description of Artificial Sequence: Synthetic oligonucleotide
  Sense strand starting at position 3530 of SEQ ID NO: 588825
aacuuuagagcccagagua

SEQ ID NO: 892495 - RNA, 19 nt, Artificial Sequence
  Description of Artificial Sequence: Synthetic oligonucleotide
  Antisense strand to SEQ ID NO: 892494
uacucugggcucuaaaguu

SEQ ID NO: 892496 - RNA, 19 nt, Artificial Sequence
  Description of Artificial Sequence: Synthetic oligonucleotide
  Sense strand starting at position 3731 of SEQ ID NO: 588825
gcacgaauugcuuggagag

SEQ ID NO: 892497 - RNA, 19 nt, Artificial Sequence
  Description of Artificial Sequence: Synthetic oligonucleotide
  Antisense strand to SEQ ID NO: 892496
cucuccaagcaauucgugc

SEQ ID NO: 892498 - RNA, 19 nt, Artificial Sequence
  Description of Artificial Sequence: Synthetic oligonucleotide
  Sense strand starting at position 3732 of SEQ ID NO: 588825
cacgaauugcuuggagaga

SEQ ID NO: 892499 - RNA, 19 nt, Artificial Sequence
  Description of Artificial Sequence: Synthetic oligonucleotide
  Antisense strand to SEQ ID NO: 892498
ucucuccaagcaauucgug

SEQ ID NO: 892500 - RNA, 19 nt, Artificial Sequence
  Description of Artificial Sequence: Synthetic oligonucleotide
  Sense strand starting at position 3746 of SEQ ID NO: 588825
agagaagcauugucugguu

SEQ ID NO: 892501 - RNA, 19 nt, Artificial Sequence
  Description of Artificial Sequence: Synthetic oligonucleotide
  Antisense strand to SEQ ID NO: 892500
aaccagacaaugcuucucu

SEQ ID NO: 892502 - RNA, 19 nt, Artificial Sequence
  Description of Artificial Sequence: Synthetic oligonucleotide
  Sense strand starting at position 3762 of SEQ ID NO: 588825
guuguaggucaaggugaga

SEQ ID NO: 892503 - RNA, 19 nt, Artificial Sequence
  Description of Artificial Sequence: Synthetic oligonucleotide
  Antisense strand to SEQ ID NO: 892502
ucucaccuugaccuacaac

SEQ ID NO: 892504 - RNA, 19 nt, Artificial Sequence
  Description of Artificial Sequence: Synthetic oligonucleotide
  Sense strand starting at position 3904 of SEQ ID NO: 588825
gguccuaguugagcagaaa

SEQ ID NO: 892505 - RNA, 19 nt, Artificial Sequence
  Description of Artificial Sequence: Synthetic oligonucleotide
  Antisense strand to SEQ ID NO: 892504
uuucugcucaacuaggacc

SEQ ID NO: 892506 - RNA, 19 nt, Artificial Sequence
  Description of Artificial Sequence: Synthetic oligonucleotide
  Sense strand starting at position 3924 of SEQ ID NO: 588825
gauacagucuuguuguauu

SEQ ID NO: 892507 - RNA, 19 nt, Artificial Sequence
  Description of Artificial Sequence: Synthetic oligonucleotide
  Antisense strand to SEQ ID NO: 892506
aauacaacaagacuguauc

SEQ ID NO: 892508 - RNA, 19 nt, Artificial Sequence
  Description of Artificial Sequence: Synthetic oligonucleotide
  Sense strand starting at position 232 of SEQ ID NO: 588826
cggcgaggcacuguaguau

SEQ ID NO: 892509 - RNA, 19 nt, Artificial Sequence
  Description of Artificial Sequence: Synthetic oligonucleotide
  Antisense strand to SEQ ID NO: 892508
auacuacagugccucgccg

SEQ ID NO: 892510 - RNA, 19 nt, Artificial Sequence
  Description of Artificial Sequence: Synthetic oligonucleotide
  Sense strand starting at position 347 of SEQ ID NO: 588826
uguugaauugaugguagag

SEQ ID NO: 892511 - RNA, 19 nt, Artificial Sequence
  Description of Artificial Sequence: Synthetic oligonucleotide
  Antisense strand to SEQ ID NO: 892510
cucuaccaucaauucaaca

SEQ ID NO: 892512 - RNA, 19 nt, Artificial Sequence
  Description of Artificial Sequence: Synthetic oligonucleotide
  Sense strand starting at position 415 of SEQ ID NO: 588826
uuggacaacuggcuuuaaa

SEQ ID NO: 892513 - RNA, 19 nt, Artificial Sequence
  Description of Artificial Sequence: Synthetic oligonucleotide
  Antisense strand to SEQ ID NO: 892512
uuuaaagccaguuguccaa

SEQ ID NO: 892514 - RNA, 19 nt, Artificial Sequence
  Description of Artificial Sequence: Synthetic oligonucleotide
  Sense strand starting at position 739 of SEQ ID NO: 588826
acaggauugugaccucugu

SEQ ID NO: 892515 - RNA, 19 nt, Artificial Sequence
  Description of Artificial Sequence: Synthetic oligonucleotide
  Antisense strand to SEQ ID NO: 892514
acagaggucacaauccugu

SEQ ID NO: 892516 - RNA, 19 nt, Artificial Sequence
  Description of Artificial Sequence: Synthetic oligonucleotide
  Sense strand starting at position 743 of SEQ ID NO: 588826
gauugugaccucugugaac

SEQ ID NO: 892517 - RNA, 19 nt, Artificial Sequence
  Description of Artificial Sequence: Synthetic oligonucleotide
  Antisense strand to SEQ ID NO: 892516
guucacagaggucacaauc

SEQ ID NO: 892518 - RNA, 19 nt, Artificial Sequence
  Description of Artificial Sequence: Synthetic oligonucleotide
  Sense strand starting at position 745 of SEQ ID NO: 588826
uugugaccucugugaacac

SEQ ID NO: 892519 - RNA, 19 nt, Artificial Sequence
  Description of Artificial Sequence: Synthetic oligonucleotide
  Antisense strand to SEQ ID NO: 892518
guguucacagaggucacaa

SEQ ID NO: 892520 - RNA, 19 nt, Artificial Sequence
  Description of Artificial Sequence: Synthetic oligonucleotide
  Sense strand starting at position 841 of SEQ ID NO: 588826
auucccaacuugucaaguu

SEQ ID NO: 892521 - RNA, 19 nt, Artificial Sequence
  Description of Artificial Sequence: Synthetic oligonucleotide
  Antisense strand to SEQ ID NO: 892520
aacuugacaaguugggaau

SEQ ID NO: 892522 - RNA, 19 nt, Artificial Sequence
  Description of Artificial Sequence: Synthetic oligonucleotide
  Sense strand starting at position 882 of SEQ ID NO: 588826
ucgcauuucuaaccgaugu

SEQ ID NO: 892523 - RNA, 19 nt, Artificial Sequence
  Description of Artificial Sequence: Synthetic oligonucleotide
  Antisense strand to SEQ ID NO: 892522
acaucgguuagaaaugcga

SEQ ID NO: 892524 - RNA, 19 nt, Artificial Sequence
  Description of Artificial Sequence: Synthetic oligonucleotide
  Sense strand starting at position 883 of SEQ ID NO: 588826
cgcauuucuaaccgauguu

SEQ ID NO: 892525 - RNA, 19 nt, Artificial Sequence
  Description of Artificial Sequence: Synthetic oligonucleotide
  Antisense strand to SEQ ID NO: 892524
aacaucgguuagaaaugcg

SEQ ID NO: 892526 - RNA, 19 nt, Artificial Sequence
  Description of Artificial Sequence: Synthetic oligonucleotide
  Sense strand starting at position 989 of SEQ ID NO: 588826
ugaggacagcuaugugaca

SEQ ID NO: 892527 - RNA, 19 nt, Artificial Sequence
  Description of Artificial Sequence: Synthetic oligonucleotide
  Antisense strand to SEQ ID NO: 892526
ugucacauagcuguccuca

SEQ ID NO: 892528 - RNA, 19 nt, Artificial Sequence
  Description of Artificial Sequence: Synthetic oligonucleotide
  Sense strand starting at position 991 of SEQ ID NO: 588826
aggacagcuaugugacaua

SEQ ID NO: 892529 - RNA, 19 nt, Artificial Sequence
  Description of Artificial Sequence: Synthetic oligonucleotide
  Antisense strand to SEQ ID NO: 892528
uaugucacauagcuguccu

SEQ ID NO: 892530 - RNA, 19 nt, Artificial Sequence
  Description of Artificial Sequence: Synthetic oligonucleotide
  Sense strand starting at position 1044 of SEQ ID NO: 588826
ugauguaaacuuuacguau

SEQ ID NO: 892531 - RNA, 19 nt, Artificial Sequence
  Description of Artificial Sequence: Synthetic oligonucleotide
  Antisense strand to SEQ ID NO: 892530
auacguaaaguuuacauca

SEQ ID NO: 892532 - RNA, 19 nt, Artificial Sequence
  Description of Artificial Sequence: Synthetic oligonucleotide
  Sense strand starting at position 1198 of SEQ ID NO: 588826
uggcguuuaccgucucuga

SEQ ID NO: 892533 - RNA, 19 nt, Artificial Sequence
  Description of Artificial Sequence: Synthetic oligonucleotide
  Antisense strand to SEQ ID NO: 892532
ucagagacgguaaacgcca

SEQ ID NO: 892534 - RNA, 19 nt, Artificial Sequence
  Description of Artificial Sequence: Synthetic oligonucleotide
  Sense strand starting at position 1200 of SEQ ID NO: 588826
gcguuuaccgucucugacu

SEQ ID NO: 892535 - RNA, 19 nt, Artificial Sequence
  Description of Artificial Sequence: Synthetic oligonucleotide
  Antisense strand to SEQ ID NO: 892534
agucagagacgguaaacgc

SEQ ID NO: 892536 - RNA, 19 nt, Artificial Sequence
  Description of Artificial Sequence: Synthetic oligonucleotide
  Sense strand starting at position 1314 of SEQ ID NO: 588826
cgaaguuugcguucaucgu

SEQ ID NO: 892537 - RNA, 19 nt, Artificial Sequence
  Description of Artificial Sequence: Synthetic oligonucleotide
  Antisense strand to SEQ ID NO: 892536
acgaugaacgcaaacuucg

SEQ ID NO: 892538 - RNA, 19 nt, Artificial Sequence
  Description of Artificial Sequence: Synthetic oligonucleotide
  Sense strand starting at position 1411 of SEQ ID NO: 588826
cgaaacuaucuauacaggu

SEQ ID NO: 892539 - RNA, 19 nt, Artificial Sequence
  Description of Artificial Sequence: Synthetic oligonucleotide
  Antisense strand to SEQ ID NO: 892538
accuguauagauaguuucg

SEQ ID NO: 892540 - RNA, 19 nt, Artificial Sequence
  Description of Artificial Sequence: Synthetic oligonucleotide
  Sense strand starting at position 1425 of SEQ ID NO: 588826
cagguaauuguagagccau

SEQ ID NO: 892541 - RNA, 19 nt, Artificial Sequence
  Description of Artificial Sequence: Synthetic oligonucleotide
  Antisense strand to SEQ ID NO: 892540
auggcucuacaauuaccug

SEQ ID NO: 892542 - RNA, 19 nt, Artificial Sequence
  Description of Artificial Sequence: Synthetic oligonucleotide
  Sense strand starting at position 1501 of SEQ ID NO: 588826
auauaagaugccgacugua

SEQ ID NO: 892543 - RNA, 19 nt, Artificial Sequence
  Description of Artificial Sequence: Synthetic oligonucleotide
  Antisense strand to SEQ ID NO: 892542
uacagucggcaucuuauau

SEQ ID NO: 892544 - RNA, 19 nt, Artificial Sequence
  Description of Artificial Sequence: Synthetic oligonucleotide
  Sense strand starting at position 1891 of SEQ ID NO: 588826
cgcguucugggacucgauu

SEQ ID NO: 892545 - RNA, 19 nt, Artificial Sequence
  Description of Artificial Sequence: Synthetic oligonucleotide
  Antisense strand to SEQ ID NO: 892544
aaucgagucccagaacgcg

SEQ ID NO: 892546 - RNA, 19 nt, Artificial Sequence
  Description of Artificial Sequence: Synthetic oligonucleotide
  Sense strand starting at position 2037 of SEQ ID NO: 588826
ucaguucucgcgagaugag

SEQ ID NO: 892547 - RNA, 19 nt, Artificial Sequence
  Description of Artificial Sequence: Synthetic oligonucleotide
  Antisense strand to SEQ ID NO: 892546
cucaucucgcgagaacuga

SEQ ID NO: 892548 - RNA, 19 nt, Artificial Sequence
  Description of Artificial Sequence: Synthetic oligonucleotide
  Sense strand starting at position 2096 of SEQ ID NO: 588826
acuuccgggcgagauuaau

SEQ ID NO: 892549 - RNA, 19 nt, Artificial Sequence
  Description of Artificial Sequence: Synthetic oligonucleotide
  Antisense strand to SEQ ID NO: 892548
auuaaucucgcccggaagu

SEQ ID NO: 892550 - RNA, 19 nt, Artificial Sequence
  Description of Artificial Sequence: Synthetic oligonucleotide
  Sense strand starting at position 2181 of SEQ ID NO: 588826
aggcaaacccgcguguaau

SEQ ID NO: 892551 - RNA, 19 nt, Artificial Sequence
  Description of Artificial Sequence: Synthetic oligonucleotide
  Antisense strand to SEQ ID NO: 892550
auuacacgcggguuugccu

SEQ ID NO: 892552 - RNA, 19 nt, Artificial Sequence
  Description of Artificial Sequence: Synthetic oligonucleotide
  Sense strand starting at position 2194 of SEQ ID NO: 588826
uguaauucugagggcuaac

SEQ ID NO: 892553 - RNA, 19 nt, Artificial Sequence
  Description of Artificial Sequence: Synthetic oligonucleotide
  Antisense strand to SEQ ID NO: 892552
guuagcccucagaauuaca

SEQ ID NO: 892554 - RNA, 19 nt, Artificial Sequence
  Description of Artificial Sequence: Synthetic oligonucleotide
  Sense strand starting at position 2633 of SEQ ID NO: 588826
guucgaguucgagaccaag

SEQ ID NO: 892555 - RNA, 19 nt, Artificial Sequence
  Description of Artificial Sequence: Synthetic oligonucleotide
  Antisense strand to SEQ ID NO: 892554
cuuggucucgaacucgaac

SEQ ID NO: 892556 - RNA, 19 nt, Artificial Sequence
  Description of Artificial Sequence: Synthetic oligonucleotide
  Sense strand starting at position 2636 of SEQ ID NO: 588826
cgaguucgagaccaaguaa

SEQ ID NO: 892557 - RNA, 19 nt, Artificial Sequence
  Description of Artificial Sequence: Synthetic oligonucleotide
  Antisense strand to SEQ ID NO: 892556
uuacuuggucucgaacucg

SEQ ID NO: 892558 - RNA, 19 nt, Artificial Sequence
  Description of Artificial Sequence: Synthetic oligonucleotide
  Sense strand starting at position 2715 of SEQ ID NO: 588826
aagguuugaguuuaggacu

SEQ ID NO: 892559 - RNA, 19 nt, Artificial Sequence
  Description of Artificial Sequence: Synthetic oligonucleotide
  Antisense strand to SEQ ID NO: 892558
aguccuaaacucaaaccuu

SEQ ID NO: 892560 - RNA, 19 nt, Artificial Sequence
  Description of Artificial Sequence: Synthetic oligonucleotide
  Sense strand starting at position 2793 of SEQ ID NO: 588826
cauggaaucuuggugaaau

SEQ ID NO: 892561 - RNA, 19 nt, Artificial Sequence
  Description of Artificial Sequence: Synthetic oligonucleotide
  Antisense strand to SEQ ID NO: 892560
auuucaccaagauuccaug

SEQ ID NO: 892562 - RNA, 19 nt, Artificial Sequence
  Description of Artificial Sequence: Synthetic oligonucleotide
  Sense strand starting at position 2828 of SEQ ID NO: 588826
ugaguacugugugucauuu

SEQ ID NO: 892563 - RNA, 19 nt, Artificial Sequence
  Description of Artificial Sequence: Synthetic oligonucleotide
  Antisense strand to SEQ ID NO: 892562
aaaugacacacaguacuca

SEQ ID NO: 892564 - RNA, 19 nt, Artificial Sequence
  Description of Artificial Sequence: Synthetic oligonucleotide
  Sense strand starting at position 3185 of SEQ ID NO: 588826
guagauauagacugcaguu

SEQ ID NO: 892565 - RNA, 19 nt, Artificial Sequence
  Description of Artificial Sequence: Synthetic oligonucleotide
  Antisense strand to SEQ ID NO: 892564
aacugcagucuauaucuac

SEQ ID NO: 892566 - RNA, 19 nt, Artificial Sequence
  Description of Artificial Sequence: Synthetic oligonucleotide
  Sense strand starting at position 3259 of SEQ ID NO: 588826
uguaaauaguucuucuaug

SEQ ID NO: 892567 - RNA, 19 nt, Artificial Sequence
  Description of Artificial Sequence: Synthetic oligonucleotide
  Antisense strand to SEQ ID NO: 892566
cauagaagaacuauuuaca

SEQ ID NO: 892568 - RNA, 19 nt, Artificial Sequence
  Description of Artificial Sequence: Synthetic oligonucleotide
  Sense strand starting at position 3369 of SEQ ID NO: 588826
cugaaacuguauuccaaag

SEQ ID NO: 892569 - RNA, 19 nt, Artificial Sequence
  Description of Artificial Sequence: Synthetic oligonucleotide
  Antisense strand to SEQ ID NO: 892568
cuuuggaauacaguuucag

SEQ ID NO: 892570 - RNA, 19 nt, Artificial Sequence
  Description of Artificial Sequence: Synthetic oligonucleotide
  Sense strand starting at position 3420 of SEQ ID NO: 588826
guaugaggaccgcacuuua

SEQ ID NO: 892571 - RNA, 19 nt, Artificial Sequence
  Description of Artificial Sequence: Synthetic oligonucleotide
  Antisense strand to SEQ ID NO: 892570
uaaagugcgguccucauac

SEQ ID NO: 892572 - RNA, 19 nt, Artificial Sequence
  Description of Artificial Sequence: Synthetic oligonucleotide
  Sense strand starting at position 3502 of SEQ ID NO: 588826
ucucgcuuuguugcucaaa

SEQ ID NO: 892573 - RNA, 19 nt, Artificial Sequence
  Description of Artificial Sequence: Synthetic oligonucleotide
  Antisense strand to SEQ ID NO: 892572
uuugagcaacaaagcgaga

SEQ ID NO: 892574 - RNA, 19 nt, Artificial Sequence
  Description of Artificial Sequence: Synthetic oligonucleotide
  Sense strand starting at position 3722 of SEQ ID NO: 588826
uauugaaguagugggagua

SEQ ID NO: 892575 - RNA, 19 nt, Artificial Sequence
  Description of Artificial Sequence: Synthetic oligonucleotide
  Antisense strand to SEQ ID NO: 892574
uacucccacuacuucaaua

SEQ ID NO: 892576 - RNA, 19 nt, Artificial Sequence
  Description of Artificial Sequence: Synthetic oligonucleotide
  Sense strand starting at position 3723 of SEQ ID NO: 588826
auugaaguagugggaguaa

SEQ ID NO: 892577 - RNA, 19 nt, Artificial Sequence
  Description of Artificial Sequence: Synthetic oligonucleotide
  Antisense strand to SEQ ID NO: 892576
uuacucccacuacuucaau

SEQ ID NO: 892578 - RNA, 19 nt, Artificial Sequence
  Description of Artificial Sequence: Synthetic oligonucleotide
  Sense strand starting at position 3737 of SEQ ID NO: 588826
aguaaauuaaugugaggca

SEQ ID NO: 892579 - RNA, 19 nt, Artificial Sequence
  Description of Artificial Sequence: Synthetic oligonucleotide
  Antisense strand to SEQ ID NO: 892578
ugccucacauuaauuuacu

SEQ ID NO: 892580 - RNA, 19 nt, Artificial Sequence
  Description of Artificial Sequence: Synthetic oligonucleotide
  Sense strand starting at position 3763 of SEQ ID NO: 588826
agucuagaacuaugggcua

SEQ ID NO: 892581 - RNA, 19 nt, Artificial Sequence
  Description of Artificial Sequence: Synthetic oligonucleotide
  Antisense strand to SEQ ID NO: 892580
uagcccauaguucuagacu

SEQ ID NO: 892582 - RNA, 19 nt, Artificial Sequence
  Description of Artificial Sequence: Synthetic oligonucleotide
  Sense strand starting at position 3766 of SEQ ID NO: 588826
cuagaacuaugggcuaguu

SEQ ID NO: 892583 - RNA, 19 nt, Artificial Sequence
  Description of Artificial Sequence: Synthetic oligonucleotide
  Antisense strand to SEQ ID NO: 892582
aacuagcccauaguucuag

SEQ ID NO: 892584 - RNA, 19 nt, Artificial Sequence
  Description of Artificial Sequence: Synthetic oligonucleotide
  Sense strand starting at position 3843 of SEQ ID NO: 588826
accaguaauccagacgcuu

SEQ ID NO: 892585 - RNA, 19 nt, Artificial Sequence
  Description of Artificial Sequence: Synthetic oligonucleotide
  Antisense strand to SEQ ID NO: 892584
aagcgucuggauuacuggu

SEQ ID NO: 892586 - RNA, 19 nt, Artificial Sequence
  Description of Artificial Sequence: Synthetic oligonucleotide
  Sense strand starting at position 3925 of SEQ ID NO: 588826
gugucacccugucucauuu

SEQ ID NO: 892587 - RNA, 19 nt, Artificial Sequence
  Description of Artificial Sequence: Synthetic oligonucleotide
  Antisense strand to SEQ ID NO: 892586
aaaugagacagggugacac

SEQ ID NO: 892588 - RNA, 19 nt, Artificial Sequence
  Description of Artificial Sequence: Synthetic oligonucleotide
  Sense strand starting at position 51 of SEQ ID NO: 588827
cacgacuggcuauaaagua

SEQ ID NO: 892589 - RNA, 19 nt, Artificial Sequence
  Description of Artificial Sequence: Synthetic oligonucleotide
  Antisense strand to SEQ ID NO: 892588
uacuuuauagccagucgug

SEQ ID NO: 892590 - RNA, 19 nt, Artificial Sequence
  Description of Artificial Sequence: Synthetic oligonucleotide
  Sense strand starting at position 67 of SEQ ID NO: 588827
guaguauucugacccacau

SEQ ID NO: 892591 - RNA, 19 nt, Artificial Sequence
  Description of Artificial Sequence: Synthetic oligonucleotide
  Antisense strand to SEQ ID NO: 892590
augugggucagaauacuac

SEQ ID NO: 892592 - RNA, 19 nt, Artificial Sequence
  Description of Artificial Sequence: Synthetic oligonucleotide
  Sense strand starting at position 116 of SEQ ID NO: 588827
uuaaguauuugcccauguu

SEQ ID NO: 892593 - RNA, 19 nt, Artificial Sequence
  Description of Artificial Sequence: Synthetic oligonucleotide
  Antisense strand to SEQ ID NO: 892592
aacaugggcaaauacuuaa

SEQ ID NO: 892594 - RNA, 19 nt, Artificial Sequence
  Description of Artificial Sequence: Synthetic oligonucleotide
  Sense strand starting at position 155 of SEQ ID NO: 588827
ggaccagaauacuaacuca

SEQ ID NO: 892595 - RNA, 19 nt, Artificial Sequence
  Description of Artificial Sequence: Synthetic oligonucleotide
  Antisense strand to SEQ ID NO: 892594
ugaguuaguauucuggucc

SEQ ID NO: 892596 - RNA, 19 nt, Artificial Sequence
  Description of Artificial Sequence: Synthetic oligonucleotide
  Sense strand starting at position 2086 of SEQ ID NO: 588827
cggcgugagcccuaagaug

SEQ ID NO: 892597 - RNA, 19 nt, Artificial Sequence
  Description of Artificial Sequence: Synthetic oligonucleotide
  Antisense strand to SEQ ID NO: 892596
caucuuagggcucacgccg

SEQ ID NO: 892598 - RNA, 19 nt, Artificial Sequence
  Description of Artificial Sequence: Synthetic oligonucleotide
  Sense strand starting at position 2405 of SEQ ID NO: 588827
gagacuuguaggcaagcga

SEQ ID NO: 892599 - RNA, 19 nt, Artificial Sequence
  Description of Artificial Sequence: Synthetic oligonucleotide
  Antisense strand to SEQ ID NO: 892598
ucgcuugccuacaagucuc

SEQ ID NO: 892600 - RNA, 19 nt, Artificial Sequence
  Description of Artificial Sequence: Synthetic oligonucleotide
  Sense strand starting at position 2556 of SEQ ID NO: 588827
uccaaagcucgaggaaaug

SEQ ID NO: 892601 - RNA, 19 nt, Artificial Sequence
  Description of Artificial Sequence: Synthetic oligonucleotide
  Antisense strand to SEQ ID NO: 892600
cauuuccucgagcuuugga

SEQ ID NO: 892602 - RNA, 19 nt, Artificial Sequence
  Description of Artificial Sequence: Synthetic oligonucleotide
  Sense strand starting at position 2567 of SEQ ID NO: 588827
aggaaaugauaauguggaa

SEQ ID NO: 892603 - RNA, 19 nt, Artificial Sequence
  Description of Artificial Sequence: Synthetic oligonucleotide
  Antisense strand to SEQ ID NO: 892602
uuccacauuaucauuuccu

SEQ ID NO: 892604 - RNA, 19 nt, Artificial Sequence
  Description of Artificial Sequence: Synthetic oligonucleotide
  Sense strand starting at position 2579 of SEQ ID NO: 588827
uguggaaucccaggcauua

SEQ ID NO: 892605 - RNA, 19 nt, Artificial Sequence
  Description of Artificial Sequence: Synthetic oligonucleotide
  Antisense strand to SEQ ID NO: 892604
uaaugccugggauuccaca

SEQ ID NO: 892606 - RNA, 19 nt, Artificial Sequence
  Description of Artificial Sequence: Synthetic oligonucleotide
  Sense strand starting at position 2609 of SEQ ID NO: 588827
acaguaacccugugaauua

SEQ ID NO: 892607 - RNA, 19 nt, Artificial Sequence
  Description of Artificial Sequence: Synthetic oligonucleotide
  Antisense strand to SEQ ID NO: 892606
uaauucacaggguuacugu

SEQ ID NO: 892608 - RNA, 19 nt, Artificial Sequence
  Description of Artificial Sequence: Synthetic oligonucleotide
  Sense strand starting at position 2738 of SEQ ID NO: 588827
gcggucuauuugccuaaca

SEQ ID NO: 892609 - RNA, 19 nt, Artificial Sequence
  Description of Artificial Sequence: Synthetic oligonucleotide
  Antisense strand to SEQ ID NO: 892608
uguuaggcaaauagaccgc

SEQ ID NO: 892610 - RNA, 19 nt, Artificial Sequence
  Description of Artificial Sequence: Synthetic oligonucleotide
  Sense strand starting at position 2739 of SEQ ID NO: 588827
cggucuauuugccuaacaa

SEQ ID NO: 892611 - RNA, 19 nt, Artificial Sequence
  Description of Artificial Sequence: Synthetic oligonucleotide
  Antisense strand to SEQ ID NO: 892610
uuguuaggcaaauagaccg

SEQ ID NO: 892612 - RNA, 19 nt, Artificial Sequence
  Description of Artificial Sequence: Synthetic oligonucleotide
  Sense strand starting at position 2788 of SEQ ID NO: 588827
auaugauucugcucuuggu

SEQ ID NO: 892613 - RNA, 19 nt, Artificial Sequence
  Description of Artificial Sequence: Synthetic oligonucleotide
  Antisense strand to SEQ ID NO: 892612
accaagagcagaaucauau

SEQ ID NO: 892614 - RNA, 19 nt, Artificial Sequence
  Description of Artificial Sequence: Synthetic oligonucleotide
  Sense strand starting at position 2804 of SEQ ID NO: 588827
ggucuucaaguagaugagu

SEQ ID NO: 892615 - RNA, 19 nt, Artificial Sequence
  Description of Artificial Sequence: Synthetic oligonucleotide
  Antisense strand to SEQ ID NO: 892614
acucaucuacuugaagacc

SEQ ID NO: 892616 - RNA, 19 nt, Artificial Sequence
  Description of Artificial Sequence: Synthetic oligonucleotide
  Sense strand starting at position 2810 of SEQ ID NO: 588827
caaguagaugagugaauca

SEQ ID NO: 892617 - RNA, 19 nt, Artificial Sequence
  Description of Artificial Sequence: Synthetic oligonucleotide
  Antisense strand to SEQ ID NO: 892616
ugauucacucaucuacuug

SEQ ID NO: 892618 - RNA, 19 nt, Artificial Sequence
  Description of Artificial Sequence: Synthetic oligonucleotide
  Sense strand starting at position 2823 of SEQ ID NO: 588827
gaaucagugucgccaguau

SEQ ID NO: 892619 - RNA, 19 nt, Artificial Sequence
  Description of Artificial Sequence: Synthetic oligonucleotide
  Antisense strand to SEQ ID NO: 892618
auacuggcgacacugauuc

SEQ ID NO: 892620 - RNA, 19 nt, Artificial Sequence
  Description of Artificial Sequence: Synthetic oligonucleotide
  Sense strand starting at position 2850 of SEQ ID NO: 588827
cagaaugaaugagagucau

SEQ ID NO: 892621 - RNA, 19 nt, Artificial Sequence
  Description of Artificial Sequence: Synthetic oligonucleotide
  Antisense strand to SEQ ID NO: 892620
augacucucauucauucug

SEQ ID NO: 892622 - RNA, 19 nt, Artificial Sequence
  Description of Artificial Sequence: Synthetic oligonucleotide
  Sense strand starting at position 2875 of SEQ ID NO: 588827
acugaagccucuguaucua

SEQ ID NO: 892623 - RNA, 19 nt, Artificial Sequence
  Description of Artificial Sequence: Synthetic oligonucleotide
  Antisense strand to SEQ ID NO: 892622
uagauacagaggcuucagu

SEQ ID NO: 892624 - RNA, 19 nt, Artificial Sequence
  Description of Artificial Sequence: Synthetic oligonucleotide
  Sense strand starting at position 3206 of SEQ ID NO: 588827
aaguguauacuguacugua

SEQ ID NO: 892625 - RNA, 19 nt, Artificial Sequence
  Description of Artificial Sequence: Synthetic oligonucleotide
  Antisense strand to SEQ ID NO: 892624
uacaguacaguauacacuu

SEQ ID NO: 892626 - RNA, 19 nt, Artificial Sequence
  Description of Artificial Sequence: Synthetic oligonucleotide
  Sense strand starting at position 3278 of SEQ ID NO: 588827
uguuaacgugugcaguaaa

SEQ ID NO: 892627 - RNA, 19 nt, Artificial Sequence
  Description of Artificial Sequence: Synthetic oligonucleotide
  Antisense strand to SEQ ID NO: 892626
uuuacugcacacguuaaca

SEQ ID NO: 892628 - RNA, 19 nt, Artificial Sequence
  Description of Artificial Sequence: Synthetic oligonucleotide
  Sense strand starting at position 3356 of SEQ ID NO: 588827
uacaauauaguauguggaa

SEQ ID NO: 892629 - RNA, 19 nt, Artificial Sequence
  Description of Artificial Sequence: Synthetic oligonucleotide
  Antisense strand to SEQ ID NO: 892628
uuccacauacuauauugua

SEQ ID NO: 892630 - RNA, 19 nt, Artificial Sequence
  Description of Artificial Sequence: Synthetic oligonucleotide
  Sense strand starting at position 3424 of SEQ ID NO: 588827
ggagccuucuuaucugauc

SEQ ID NO: 892631 - RNA, 19 nt, Artificial Sequence
  Description of Artificial Sequence: Synthetic oligonucleotide
  Antisense strand to SEQ ID NO: 892630
gaucagauaagaaggcucc

SEQ ID NO: 892632 - RNA, 19 nt, Artificial Sequence
  Description of Artificial Sequence: Synthetic oligonucleotide
  Sense strand starting at position 3476 of SEQ ID NO: 588827
cguucuuucgaguugggua

SEQ ID NO: 892633 - RNA, 19 nt, Artificial Sequence
  Description of Artificial Sequence: Synthetic oligonucleotide
  Antisense strand to SEQ ID NO: 892632
uacccaacucgaaagaacg

SEQ ID NO: 892634 - RNA, 19 nt, Artificial Sequence
  Description of Artificial Sequence: Synthetic oligonucleotide
  Sense strand starting at position 3477 of SEQ ID NO: 588827
guucuuucgaguuggguau

SEQ ID NO: 892635 - RNA, 19 nt, Artificial Sequence
  Description of Artificial Sequence: Synthetic oligonucleotide
  Antisense strand to SEQ ID NO: 892634
auacccaacucgaaagaac

SEQ ID NO: 892636 - RNA, 19 nt, Artificial Sequence
  Description of Artificial Sequence: Synthetic oligonucleotide
  Sense strand starting at position 3481 of SEQ ID NO: 588827
uuucgaguuggguauucuu

SEQ ID NO: 892637 - RNA, 19 nt, Artificial Sequence
  Description of Artificial Sequence: Synthetic oligonucleotide
  Antisense strand to SEQ ID NO: 892636
aagaauacccaacucgaaa

SEQ ID NO: 892638 - RNA, 19 nt, Artificial Sequence
  Description of Artificial Sequence: Synthetic oligonucleotide
  Sense strand starting at position 3527 of SEQ ID NO: 588827
uggcucauuugguggaaca

SEQ ID NO: 892639 - RNA, 19 nt, Artificial Sequence
  Description of Artificial Sequence: Synthetic oligonucleotide
  Antisense strand to SEQ ID NO: 892638
uguuccaccaaaugagcca

SEQ ID NO: 892640 - RNA, 19 nt, Artificial Sequence
  Description of Artificial Sequence: Synthetic oligonucleotide
  Sense strand starting at position 3539 of SEQ ID NO: 588827
uggaacacauguuccaaua

SEQ ID NO: 892641 - RNA, 19 nt, Artificial Sequence
  Description of Artificial Sequence: Synthetic oligonucleotide
  Antisense strand to SEQ ID NO: 892640
uauuggaacauguguucca

SEQ ID NO: 892642 - RNA, 19 nt, Artificial Sequence
  Description of Artificial Sequence: Synthetic oligonucleotide
  Sense strand starting at position 3635 of SEQ ID NO: 588827
acacuugauugguuggaca

SEQ ID NO: 892643 - RNA, 19 nt, Artificial Sequence
  Description of Artificial Sequence: Synthetic oligonucleotide
  Antisense strand to SEQ ID NO: 892642
uguccaaccaaucaagugu

SEQ ID NO: 892644 - RNA, 19 nt, Artificial Sequence
  Description of Artificial Sequence: Synthetic oligonucleotide
  Sense strand starting at position 3637 of SEQ ID NO: 588827
acuugauugguuggacaua

SEQ ID NO: 892645 - RNA, 19 nt, Artificial Sequence
  Description of Artificial Sequence: Synthetic oligonucleotide
  Antisense strand to SEQ ID NO: 892644
uauguccaaccaaucaagu

SEQ ID NO: 892646 - RNA, 19 nt, Artificial Sequence
  Description of Artificial Sequence: Synthetic oligonucleotide
  Sense strand starting at position 3638 of SEQ ID NO: 588827
cuugauugguuggacauaa

SEQ ID NO: 892647 - RNA, 19 nt, Artificial Sequence
  Description of Artificial Sequence: Synthetic oligonucleotide
  Antisense strand to SEQ ID NO: 892646
uuauguccaaccaaucaag

SEQ ID NO: 892648 - RNA, 19 nt, Artificial Sequence
  Description of Artificial Sequence: Synthetic oligonucleotide
  Sense strand starting at position 3781 of SEQ ID NO: 588827
uuauucuaguguucugaaa

SEQ ID NO: 892649 - RNA, 19 nt, Artificial Sequence
  Description of Artificial Sequence: Synthetic oligonucleotide
  Antisense strand to SEQ ID NO: 892648
uuucagaacacuagaauaa

SEQ ID NO: 892650 - RNA, 19 nt, Artificial Sequence
  Description of Artificial Sequence: Synthetic oligonucleotide
  Sense strand starting at position 3802 of SEQ ID NO: 588827
uaaugauaauuggcauugu

SEQ ID NO: 892651 - RNA, 19 nt, Artificial Sequence
  Description of Artificial Sequence: Synthetic oligonucleotide
  Antisense strand to SEQ ID NO: 892650
acaaugccaauuaucauua

SEQ ID NO: 892652 - RNA, 19 nt, Artificial Sequence
  Description of Artificial Sequence: Synthetic oligonucleotide
  Sense strand starting at position 3806 of SEQ ID NO: 588827
gauaauuggcauuguugag

SEQ ID NO: 892653 - RNA, 19 nt, Artificial Sequence
  Description of Artificial Sequence: Synthetic oligonucleotide
  Antisense strand to SEQ ID NO: 892652
cucaacaaugccaauuauc

SEQ ID NO: 892654 - RNA, 19 nt, Artificial Sequence
  Description of Artificial Sequence: Synthetic oligonucleotide
  Sense strand starting at position 3812 of SEQ ID NO: 588827
uggcauuguugagcccaaa

SEQ ID NO: 892655 - RNA, 19 nt, Artificial Sequence
  Description of Artificial Sequence: Synthetic oligonucleotide
  Antisense strand to SEQ ID NO: 892654
uuugggcucaacaaugcca

SEQ ID NO: 892656 - RNA, 19 nt, Artificial Sequence
  Description of Artificial Sequence: Synthetic oligonucleotide
  Sense strand starting at position 3823 of SEQ ID NO: 588827
agcccaaauuugcauugua

SEQ ID NO: 892657 - RNA, 19 nt, Artificial Sequence
  Description of Artificial Sequence: Synthetic oligonucleotide
  Antisense strand to SEQ ID NO: 892656
uacaaugcaaauuugggcu

SEQ ID NO: 892658 - RNA, 19 nt, Artificial Sequence
  Description of Artificial Sequence: Synthetic oligonucleotide
  Sense strand starting at position 3901 of SEQ ID NO: 588827
ucuugaauuguuugaugau

SEQ ID NO: 892659 - RNA, 19 nt, Artificial Sequence
  Description of Artificial Sequence: Synthetic oligonucleotide
  Antisense strand to SEQ ID NO: 892658
aucaucaaacaauucaaga

SEQ ID NO: 892660 - RNA, 19 nt, Artificial Sequence
  Description of Artificial Sequence: Synthetic oligonucleotide
  Sense strand starting at position 3937 of SEQ ID NO: 588827
ucaugugaauacuccuaag

SEQ ID NO: 892661 - RNA, 19 nt, Artificial Sequence
  Description of Artificial Sequence: Synthetic oligonucleotide
  Antisense strand to SEQ ID NO: 892660
cuuaggaguauucacauga

SEQ ID NO: 892662 - RNA, 19 nt, Artificial Sequence
  Description of Artificial Sequence: Synthetic oligonucleotide
  Sense strand starting at position 3947 of SEQ ID NO: 588827
acuccuaaggucuggauau

SEQ ID NO: 892663 - RNA, 19 nt, Artificial Sequence
  Description of Artificial Sequence: Synthetic oligonucleotide
  Antisense strand to SEQ ID NO: 892662
auauccagaccuuaggagu

SEQ ID NO: 892664 - RNA, 19 nt, Artificial Sequence
  Description of Artificial Sequence: Synthetic oligonucleotide
  Sense strand starting at position 3973 of SEQ ID NO: 588827
uacggagucuccucuaaug

SEQ ID NO: 892665 - RNA, 19 nt, Artificial Sequence
  Description of Artificial Sequence: Synthetic oligonucleotide
  Antisense strand to SEQ ID NO: 892664
cauuagaggagacuccgua

SEQ ID NO: 892666 - RNA, 19 nt, Artificial Sequence
  Description of Artificial Sequence: Synthetic oligonucleotide
  Sense strand starting at position 3975 of SEQ ID NO: 588827
cggagucuccucuaaugua

SEQ ID NO: 892667 - RNA, 19 nt, Artificial Sequence
  Description of Artificial Sequence: Synthetic oligonucleotide
  Antisense strand to SEQ ID NO: 892666
uacauuagaggagacuccg

SEQ ID NO: 892668 - RNA, 19 nt, Artificial Sequence
  Description of Artificial Sequence: Synthetic oligonucleotide
  Sense strand starting at position 63 of SEQ ID NO: 588828
ggucucaaggcucauuauu

SEQ ID NO: 892669 - RNA, 19 nt, Artificial Sequence
  Description of Artificial Sequence: Synthetic oligonucleotide
  Antisense strand to SEQ ID NO: 892668
aauaaugagccuugagacc

SEQ ID NO: 892670 - RNA, 19 nt, Artificial Sequence
  Description of Artificial Sequence: Synthetic oligonucleotide
  Sense strand starting at position 180 of SEQ ID NO: 588828
gcacuacugucuccuauua

SEQ ID NO: 892671 - RNA, 19 nt, Artificial Sequence
  Description of Artificial Sequence: Synthetic oligonucleotide
  Antisense strand to SEQ ID NO: 892670
uaauaggagacaguagugc

SEQ ID NO: 892672 - RNA, 19 nt, Artificial Sequence
  Description of Artificial Sequence: Synthetic oligonucleotide
  Sense strand starting at position 515 of SEQ ID NO: 588828
ggauuacagguguggaaau

SEQ ID NO: 892673 - RNA, 19 nt, Artificial Sequence
  Description of Artificial Sequence: Synthetic oligonucleotide
  Antisense strand to SEQ ID NO: 892672
auuuccacaccuguaaucc

SEQ ID NO: 892674 - RNA, 19 nt, Artificial Sequence
  Description of Artificial Sequence: Synthetic oligonucleotide
  Sense strand starting at position 597 of SEQ ID NO: 588828
gaaagaagguuuccucuag

SEQ ID NO: 892675 - RNA, 19 nt, Artificial Sequence
  Description of Artificial Sequence: Synthetic oligonucleotide
  Antisense strand to SEQ ID NO: 892674
cuagaggaaaccuucuuuc

SEQ ID NO: 892676 - RNA, 19 nt, Artificial Sequence
  Description of Artificial Sequence: Synthetic oligonucleotide
  Sense strand starting at position 601 of SEQ ID NO: 588828
gaagguuuccucuagcuuu

SEQ ID NO: 892677 - RNA, 19 nt, Artificial Sequence
  Description of Artificial Sequence: Synthetic oligonucleotide
  Antisense strand to SEQ ID NO: 892676
aaagcuagaggaaaccuuc

SEQ ID NO: 892678 - RNA, 19 nt, Artificial Sequence
  Description of Artificial Sequence: Synthetic oligonucleotide
  Sense strand starting at position 611 of SEQ ID NO: 588828
ucuagcuuuggucaucagu

SEQ ID NO: 892679 - RNA, 19 nt, Artificial Sequence
  Description of Artificial Sequence: Synthetic oligonucleotide
  Antisense strand to SEQ ID NO: 892678
acugaugaccaaagcuaga

SEQ ID NO: 892680 - RNA, 19 nt, Artificial Sequence
  Description of Artificial Sequence: Synthetic oligonucleotide
  Sense strand starting at position 744 of SEQ ID NO: 588828
cugauaaggugccucugua

SEQ ID NO: 892681 - RNA, 19 nt, Artificial Sequence
  Description of Artificial Sequence: Synthetic oligonucleotide
  Antisense strand to SEQ ID NO: 892680
uacagaggcaccuuaucag

SEQ ID NO: 892682 - RNA, 19 nt, Artificial Sequence
  Description of Artificial Sequence: Synthetic oligonucleotide
  Sense strand starting at position 826 of SEQ ID NO: 588828
ggguagauuugggaguguu

SEQ ID NO: 892683 - RNA, 19 nt, Artificial Sequence
  Description of Artificial Sequence: Synthetic oligonucleotide
  Antisense strand to SEQ ID NO: 892682
aacacucccaaaucuaccc

SEQ ID NO: 892684 - RNA, 19 nt, Artificial Sequence
  Description of Artificial Sequence: Synthetic oligonucleotide
  Sense strand starting at position 834 of SEQ ID NO: 588828
uugggaguguuagcuuaug

SEQ ID NO: 892685 - RNA, 19 nt, Artificial Sequence
  Description of Artificial Sequence: Synthetic oligonucleotide
  Antisense strand to SEQ ID NO: 892684
cauaagcuaacacucccaa

SEQ ID NO: 892686 - RNA, 19 nt, Artificial Sequence
  Description of Artificial Sequence: Synthetic oligonucleotide
  Sense strand starting at position 1004 of SEQ ID NO: 588828
gaagauaugguaugugugu

SEQ ID NO: 892687 - RNA, 19 nt, Artificial Sequence
  Description of Artificial Sequence: Synthetic oligonucleotide
  Antisense strand to SEQ ID NO: 892686
acacacauaccauaucuuc

SEQ ID NO: 892688 - RNA, 19 nt, Artificial Sequence
  Description of Artificial Sequence: Synthetic oligonucleotide
  Sense strand starting at position 1108 of SEQ ID NO: 588828
ucuugaaagcugcgaggau

SEQ ID NO: 892689 - RNA, 19 nt, Artificial Sequence
  Description of Artificial Sequence: Synthetic oligonucleotide
  Antisense strand to SEQ ID NO: 892688
auccucgcagcuuucaaga

SEQ ID NO: 892690 - RNA, 19 nt, Artificial Sequence
  Description of Artificial Sequence: Synthetic oligonucleotide
  Sense strand starting at position 1181 of SEQ ID NO: 588828
uuaagccuuuguuucuaga

SEQ ID NO: 892691 - RNA, 19 nt, Artificial Sequence
  Description of Artificial Sequence: Synthetic oligonucleotide
  Antisense strand to SEQ ID NO: 892690
ucuagaaacaaaggcuuaa

SEQ ID NO: 892692 - RNA, 19 nt, Artificial Sequence
  Description of Artificial Sequence: Synthetic oligonucleotide
  Sense strand starting at position 1337 of SEQ ID NO: 588828
gcccaaauguaugcaauga

SEQ ID NO: 892693 - RNA, 19 nt, Artificial Sequence
  Description of Artificial Sequence: Synthetic oligonucleotide
  Antisense strand to SEQ ID NO: 892692
ucauugcauacauuugggc

SEQ ID NO: 892694 - RNA, 19 nt, Artificial Sequence
  Description of Artificial Sequence: Synthetic oligonucleotide
  Sense strand starting at position 1341 of SEQ ID NO: 588828
aaauguaugcaaugagcuu

SEQ ID NO: 892695 - RNA, 19 nt, Artificial Sequence
  Description of Artificial Sequence: Synthetic oligonucleotide
  Antisense strand to SEQ ID NO: 892694
aagcucauugcauacauuu

SEQ ID NO: 892696 - RNA, 19 nt, Artificial Sequence
  Description of Artificial Sequence: Synthetic oligonucleotide
  Sense strand starting at position 1347 of SEQ ID NO: 588828
augcaaugagcuugucuaa

SEQ ID NO: 892697 - RNA, 19 nt, Artificial Sequence
  Description of Artificial Sequence: Synthetic oligonucleotide
  Antisense strand to SEQ ID NO: 892696
uuagacaagcucauugcau

SEQ ID NO: 892698 - RNA, 19 nt, Artificial Sequence
  Description of Artificial Sequence: Synthetic oligonucleotide
  Sense strand starting at position 1517 of SEQ ID NO: 588828
agccauaccucugucagga

SEQ ID NO: 892699 - RNA, 19 nt, Artificial Sequence
  Description of Artificial Sequence: Synthetic oligonucleotide
  Antisense strand to SEQ ID NO: 892698
uccugacagagguauggcu

SEQ ID NO: 892700 - RNA, 19 nt, Artificial Sequence
  Description of Artificial Sequence: Synthetic oligonucleotide
  Sense strand starting at position 1995 of SEQ ID NO: 588828
ggaagaugucugggcagag

SEQ ID NO: 892701 - RNA, 19 nt, Artificial Sequence
  Description of Artificial Sequence: Synthetic oligonucleotide
  Antisense strand to SEQ ID NO: 892700
cucugcccagacaucuucc

SEQ ID NO: 892702 - RNA, 19 nt, Artificial Sequence
  Description of Artificial Sequence: Synthetic oligonucleotide
  Sense strand starting at position 2093 of SEQ ID NO: 588828
gcccauugugaaugacucu

SEQ ID NO: 892703 - RNA, 19 nt, Artificial Sequence
  Description of Artificial Sequence: Synthetic oligonucleotide
  Antisense strand to SEQ ID NO: 892702
agagucauucacaaugggc

SEQ ID NO: 892704 - RNA, 19 nt, Artificial Sequence
  Description of Artificial Sequence: Synthetic oligonucleotide
  Sense strand starting at position 2242 of SEQ ID NO: 588828
gaacucaguccugguggau

SEQ ID NO: 892705 - RNA, 19 nt, Artificial Sequence
  Description of Artificial Sequence: Synthetic oligonucleotide
  Antisense strand to SEQ ID NO: 892704
auccaccaggacugaguuc

SEQ ID NO: 892706 - RNA, 19 nt, Artificial Sequence
  Description of Artificial Sequence: Synthetic oligonucleotide
  Sense strand starting at position 2603 of SEQ ID NO: 588828
cucaguucugccuggagac

SEQ ID NO: 892707 - RNA, 19 nt, Artificial Sequence
  Description of Artificial Sequence: Synthetic oligonucleotide
  Antisense strand to SEQ ID NO: 892706
gucuccaggcagaacugag

SEQ ID NO: 892708 - RNA, 19 nt, Artificial Sequence
  Description of Artificial Sequence: Synthetic oligonucleotide
  Sense strand starting at position 2668 of SEQ ID NO: 588828
gggccaauucugugggaau

SEQ ID NO: 892709 - RNA, 19 nt, Artificial Sequence
  Description of Artificial Sequence: Synthetic oligonucleotide
  Antisense strand to SEQ ID NO: 892708
auucccacagaauuggccc

SEQ ID NO: 892710 - RNA, 19 nt, Artificial Sequence
  Description of Artificial Sequence: Synthetic oligonucleotide
  Sense strand starting at position 2670 of SEQ ID NO: 588828
gccaauucugugggaauaa

SEQ ID NO: 892711 - RNA, 19 nt, Artificial Sequence
  Description of Artificial Sequence: Synthetic oligonucleotide
  Antisense strand to SEQ ID NO: 892710
uuauucccacagaauuggc

SEQ ID NO: 892712 - RNA, 19 nt, Artificial Sequence
  Description of Artificial Sequence: Synthetic oligonucleotide
  Sense strand starting at position 2716 of SEQ ID NO: 588828
gccaguuguacaggaagua

SEQ ID NO: 892713 - RNA, 19 nt, Artificial Sequence
  Description of Artificial Sequence: Synthetic oligonucleotide
  Antisense strand to SEQ ID NO: 892712
uacuuccuguacaacuggc

SEQ ID NO: 892714 - RNA, 19 nt, Artificial Sequence
  Description of Artificial Sequence: Synthetic oligonucleotide
  Sense strand starting at position 2852 of SEQ ID NO: 588828
ggugacuacuaucuggacu

SEQ ID NO: 892715 - RNA, 19 nt, Artificial Sequence
  Description of Artificial Sequence: Synthetic oligonucleotide
  Antisense strand to SEQ ID NO: 892714
aguccagauaguagucacc

SEQ ID NO: 892716 - RNA, 19 nt, Artificial Sequence
  Description of Artificial Sequence: Synthetic oligonucleotide
  Sense strand starting at position 2994 of SEQ ID NO: 588828
ucuccuauucccugugaca

SEQ ID NO: 892717 - RNA, 19 nt, Artificial Sequence
  Description of Artificial Sequence: Synthetic oligonucleotide
  Antisense strand to SEQ ID NO: 892716
ugucacagggaauaggaga

SEQ ID NO: 892718 - RNA, 19 nt, Artificial Sequence
  Description of Artificial Sequence: Synthetic oligonucleotide
  Sense strand starting at position 3039 of SEQ ID NO: 588828
agcugagucaauuguagag

SEQ ID NO: 892719 - RNA, 19 nt, Artificial Sequence
  Description of Artificial Sequence: Synthetic oligonucleotide
  Antisense strand to SEQ ID NO: 892718
cucuacaauugacucagcu

SEQ ID NO: 892720 - RNA, 19 nt, Artificial Sequence
  Description of Artificial Sequence: Synthetic oligonucleotide
  Sense strand starting at position 3194 of SEQ ID NO: 588828
accauuagcggucaucuca

SEQ ID NO: 892721 - RNA, 19 nt, Artificial Sequence
  Description of Artificial Sequence: Synthetic oligonucleotide
  Antisense strand to SEQ ID NO: 892720
ugagaugaccgcuaauggu

SEQ ID NO: 892722 - RNA, 19 nt, Artificial Sequence
  Description of Artificial Sequence: Synthetic oligonucleotide
  Sense strand starting at position 3284 of SEQ ID NO: 588828
uggauaagcaucuguaggu

SEQ ID NO: 892723 - RNA, 19 nt, Artificial Sequence
  Description of Artificial Sequence: Synthetic oligonucleotide
  Antisense strand to SEQ ID NO: 892722
accuacagaugcuuaucca

SEQ ID NO: 892724 - RNA, 19 nt, Artificial Sequence
  Description of Artificial Sequence: Synthetic oligonucleotide
  Sense strand starting at position 3285 of SEQ ID NO: 588828
ggauaagcaucuguagguu

SEQ ID NO: 892725 - RNA, 19 nt, Artificial Sequence
  Description of Artificial Sequence: Synthetic oligonucleotide
  Antisense strand to SEQ ID NO: 892724
aaccuacagaugcuuaucc

SEQ ID NO: 892726 - RNA, 19 nt, Artificial Sequence
  Description of Artificial Sequence: Synthetic oligonucleotide
  Sense strand starting at position 3345 of SEQ ID NO: 588828
gccucuuaccaugagagcu

SEQ ID NO: 892727 - RNA, 19 nt, Artificial Sequence
  Description of Artificial Sequence: Synthetic oligonucleotide
  Antisense strand to SEQ ID NO: 892726
agcucucaugguaagaggc

SEQ ID NO: 892728 - RNA, 19 nt, Artificial Sequence
  Description of Artificial Sequence: Synthetic oligonucleotide
  Sense strand starting at position 3371 of SEQ ID NO: 588828
cagggucuuugacucugaa

SEQ ID NO: 892729 - RNA, 19 nt, Artificial Sequence
  Description of Artificial Sequence: Synthetic oligonucleotide
  Antisense strand to SEQ ID NO: 892728
uucagagucaaagacccug

SEQ ID NO: 892730 - RNA, 19 nt, Artificial Sequence
  Description of Artificial Sequence: Synthetic oligonucleotide
  Sense strand starting at position 3374 of SEQ ID NO: 588828
ggucuuugacucugaaauu

SEQ ID NO: 892731 - RNA, 19 nt, Artificial Sequence
  Description of Artificial Sequence: Synthetic oligonucleotide
  Antisense strand to SEQ ID NO: 892730
aauuucagagucaaagacc

SEQ ID NO: 892732 - RNA, 19 nt, Artificial Sequence
  Description of Artificial Sequence: Synthetic oligonucleotide
  Sense strand starting at position 3375 of SEQ ID NO: 588828
gucuuugacucugaaauuu

SEQ ID NO: 892733 - RNA, 19 nt, Artificial Sequence
  Description of Artificial Sequence: Synthetic oligonucleotide
  Antisense strand to SEQ ID NO: 892732
aaauuucagagucaaagac

SEQ ID NO: 892734 - RNA, 19 nt, Artificial Sequence
  Description of Artificial Sequence: Synthetic oligonucleotide
  Sense strand starting at position 3385 of SEQ ID NO: 588828
cugaaauuucugcgaggcu

SEQ ID NO: 892735 - RNA, 19 nt, Artificial Sequence
  Description of Artificial Sequence: Synthetic oligonucleotide
  Antisense strand to SEQ ID NO: 892734
agccucgcagaaauuucag

SEQ ID NO: 892736 - RNA, 19 nt, Artificial Sequence
  Description of Artificial Sequence: Synthetic oligonucleotide
  Sense strand starting at position 3400 of SEQ ID NO: 588828
ggcuaagucaugcauugug

SEQ ID NO: 892737 - RNA, 19 nt, Artificial Sequence
  Description of Artificial Sequence: Synthetic oligonucleotide
  Antisense strand to SEQ ID NO: 892736
cacaaugcaugacuuagcc

SEQ ID NO: 892738 - RNA, 19 nt, Artificial Sequence
  Description of Artificial Sequence: Synthetic oligonucleotide
  Sense strand starting at position 3428 of SEQ ID NO: 588828
cagugcuuccaguugccua

SEQ ID NO: 892739 - RNA, 19 nt, Artificial Sequence
  Description of Artificial Sequence: Synthetic oligonucleotide
  Antisense strand to SEQ ID NO: 892738
uaggcaacuggaagcacug

SEQ ID NO: 892740 - RNA, 19 nt, Artificial Sequence
  Description of Artificial Sequence: Synthetic oligonucleotide
  Sense strand starting at position 3433 of SEQ ID NO: 588828
cuuccaguugccuauggaa

SEQ ID NO: 892741 - RNA, 19 nt, Artificial Sequence
  Description of Artificial Sequence: Synthetic oligonucleotide
  Antisense strand to SEQ ID NO: 892740
uuccauaggcaacuggaag

SEQ ID NO: 892742 - RNA, 19 nt, Artificial Sequence
  Description of Artificial Sequence: Synthetic oligonucleotide
  Sense strand starting at position 3532 of SEQ ID NO: 588828
cugccaaagaucuaggguu

SEQ ID NO: 892743 - RNA, 19 nt, Artificial Sequence
  Description of Artificial Sequence: Synthetic oligonucleotide
  Antisense strand to SEQ ID NO: 892742
aacccuagaucuuuggcag

SEQ ID NO: 892744 - RNA, 19 nt, Artificial Sequence
  Description of Artificial Sequence: Synthetic oligonucleotide
  Sense strand starting at position 3727 of SEQ ID NO: 588828
guuucucauuacccagaga

SEQ ID NO: 892745 - RNA, 19 nt, Artificial Sequence
  Description of Artificial Sequence: Synthetic oligonucleotide
  Antisense strand to SEQ ID NO: 892744
ucucuggguaaugagaaac

SEQ ID NO: 892746 - RNA, 19 nt, Artificial Sequence
  Description of Artificial Sequence: Synthetic oligonucleotide
  Sense strand starting at position 3769 of SEQ ID NO: 588828
ggcuuuagaggucauccau

SEQ ID NO: 892747 - RNA, 19 nt, Artificial Sequence
  Description of Artificial Sequence: Synthetic oligonucleotide
  Antisense strand to SEQ ID NO: 892746
auggaugaccucuaaagcc

SEQ ID NO: 892748 - RNA, 19 nt, Artificial Sequence
  Description of Artificial Sequence: Synthetic oligonucleotide
  Sense strand starting at position 500 of SEQ ID NO: 588829
gggcauaacuaacagaaua

SEQ ID NO: 892749 - RNA, 19 nt, Artificial Sequence
  Description of Artificial Sequence: Synthetic oligonucleotide
  Antisense strand to SEQ ID NO: 892748
uauucuguuaguuaugccc

SEQ ID NO: 892750 - RNA, 19 nt, Artificial Sequence
  Description of Artificial Sequence: Synthetic oligonucleotide
  Sense strand starting at position 520 of SEQ ID NO: 588829
cagguauacuguuuggauc

SEQ ID NO: 892751 - RNA, 19 nt, Artificial Sequence
  Description of Artificial Sequence: Synthetic oligonucleotide
  Antisense strand to SEQ ID NO: 892750
gauccaaacaguauaccug

SEQ ID NO: 892752 - RNA, 19 nt, Artificial Sequence
  Description of Artificial Sequence: Synthetic oligonucleotide
  Sense strand starting at position 521 of SEQ ID NO: 588829
agguauacuguuuggaucu

SEQ ID NO: 892753 - RNA, 19 nt, Artificial Sequence
  Description of Artificial Sequence: Synthetic oligonucleotide
  Antisense strand to SEQ ID NO: 892752
agauccaaacaguauaccu

SEQ ID NO: 892754 - RNA, 19 nt, Artificial Sequence
  Description of Artificial Sequence: Synthetic oligonucleotide
  Sense strand starting at position 567 of SEQ ID NO: 588829
acugcuuaauaucuaagga

SEQ ID NO: 892755 - RNA, 19 nt, Artificial Sequence
  Description of Artificial Sequence: Synthetic oligonucleotide
  Antisense strand to SEQ ID NO: 892754
uccuuagauauuaagcagu

SEQ ID NO: 892756 - RNA, 19 nt, Artificial Sequence
  Description of Artificial Sequence: Synthetic oligonucleotide
  Sense strand starting at position 765 of SEQ ID NO: 588829
acuaaaucugcucagguca

SEQ ID NO: 892757 - RNA, 19 nt, Artificial Sequence
  Description of Artificial Sequence: Synthetic oligonucleotide
  Antisense strand to SEQ ID NO: 892756
ugaccugagcagauuuagu

SEQ ID NO: 892758 - RNA, 19 nt, Artificial Sequence
  Description of Artificial Sequence: Synthetic oligonucleotide
  Sense strand starting at position 815 of SEQ ID NO: 588829
ggcccuuuguccuuuguaa

SEQ ID NO: 892759 - RNA, 19 nt, Artificial Sequence
  Description of Artificial Sequence: Synthetic oligonucleotide
  Antisense strand to SEQ ID NO: 892758
uuacaaaggacaaagggcc

SEQ ID NO: 892760 - RNA, 19 nt, Artificial Sequence
  Description of Artificial Sequence: Synthetic oligonucleotide
  Sense strand starting at position 817 of SEQ ID NO: 588829
cccuuuguccuuuguaaau

SEQ ID NO: 892761 - RNA, 19 nt, Artificial Sequence
  Description of Artificial Sequence: Synthetic oligonucleotide
  Antisense strand to SEQ ID NO: 892760
auuuacaaaggacaaaggg

SEQ ID NO: 892762 - RNA, 19 nt, Artificial Sequence
  Description of Artificial Sequence: Synthetic oligonucleotide
  Sense strand starting at position 819 of SEQ ID NO: 588829
cuuuguccuuuguaaauuc

SEQ ID NO: 892763 - RNA, 19 nt, Artificial Sequence
  Description of Artificial Sequence: Synthetic oligonucleotide
  Antisense strand to SEQ ID NO: 892762
gaauuuacaaaggacaaag

SEQ ID NO: 892764 - RNA, 19 nt, Artificial Sequence
  Description of Artificial Sequence: Synthetic oligonucleotide
  Sense strand starting at position 855 of SEQ ID NO: 588829
uaaggccuguguucuuuau

SEQ ID NO: 892765 - RNA, 19 nt, Artificial Sequence
  Description of Artificial Sequence: Synthetic oligonucleotide
  Antisense strand to SEQ ID NO: 892764
auaaagaacacaggccuua

SEQ ID NO: 892766 - RNA, 19 nt, Artificial Sequence
  Description of Artificial Sequence: Synthetic oligonucleotide
  Sense strand starting at position 857 of SEQ ID NO: 588829
aggccuguguucuuuauca

SEQ ID NO: 892767 - RNA, 19 nt, Artificial Sequence
  Description of Artificial Sequence: Synthetic oligonucleotide
  Antisense strand to SEQ ID NO: 892766
ugauaaagaacacaggccu

SEQ ID NO: 892768 - RNA, 19 nt, Artificial Sequence
  Description of Artificial Sequence: Synthetic oligonucleotide
  Sense strand starting at position 861 of SEQ ID NO: 588829
cuguguucuuuaucacgga

SEQ ID NO: 892769 - RNA, 19 nt, Artificial Sequence
  Description of Artificial Sequence: Synthetic oligonucleotide
  Antisense strand to SEQ ID NO: 892768
uccgugauaaagaacacag

SEQ ID NO: 892770 - RNA, 19 nt, Artificial Sequence
  Description of Artificial Sequence: Synthetic oligonucleotide
  Sense strand starting at position 865 of SEQ ID NO: 588829
guucuuuaucacggacacu

SEQ ID NO: 892771 - RNA, 19 nt, Artificial Sequence
  Description of Artificial Sequence: Synthetic oligonucleotide
  Antisense strand to SEQ ID NO: 892770
aguguccgugauaaagaac

SEQ ID NO: 892772 - RNA, 19 nt, Artificial Sequence
  Description of Artificial Sequence: Synthetic oligonucleotide
  Sense strand starting at position 892 of SEQ ID NO: 588829
agugguaauccuugccuga

SEQ ID NO: 892773 - RNA, 19 nt, Artificial Sequence
  Description of Artificial Sequence: Synthetic oligonucleotide
  Antisense strand to SEQ ID NO: 892772
ucaggcaaggauuaccacu

SEQ ID NO: 892774 - RNA, 19 nt, Artificial Sequence
  Description of Artificial Sequence: Synthetic oligonucleotide
  Sense strand starting at position 894 of SEQ ID NO: 588829
ugguaauccuugccugacu

SEQ ID NO: 892775 - RNA, 19 nt, Artificial Sequence
  Description of Artificial Sequence: Synthetic oligonucleotide
  Antisense strand to SEQ ID NO: 892774
agucaggcaaggauuacca

SEQ ID NO: 892776 - RNA, 19 nt, Artificial Sequence
  Description of Artificial Sequence: Synthetic oligonucleotide
  Sense strand starting at position 896 of SEQ ID NO: 588829
guaauccuugccugacuca

SEQ ID NO: 892777 - RNA, 19 nt, Artificial Sequence
  Description of Artificial Sequence: Synthetic oligonucleotide
  Antisense strand to SEQ ID NO: 892776
ugagucaggcaaggauuac

SEQ ID NO: 892778 - RNA, 19 nt, Artificial Sequence
  Description of Artificial Sequence: Synthetic oligonucleotide
  Sense strand starting at position 899 of SEQ ID NO: 588829
auccuugccugacucagau

SEQ ID NO: 892779 - RNA, 19 nt, Artificial Sequence
  Description of Artificial Sequence: Synthetic oligonucleotide
  Antisense strand to SEQ ID NO: 892778
aucugagucaggcaaggau

SEQ ID NO: 892780 - RNA, 19 nt, Artificial Sequence
  Description of Artificial Sequence: Synthetic oligonucleotide
  Sense strand starting at position 1053 of SEQ ID NO: 588829
ugaguaguguaccguccuu

SEQ ID NO: 892781 - RNA, 19 nt, Artificial Sequence
  Description of Artificial Sequence: Synthetic oligonucleotide
  Antisense strand to SEQ ID NO: 892780
aaggacgguacacuacuca

SEQ ID NO: 892782 - RNA, 19 nt, Artificial Sequence
  Description of Artificial Sequence: Synthetic oligonucleotide
  Sense strand starting at position 1158 of SEQ ID NO: 588829
gcaagugagugcaguagua

SEQ ID NO: 892783 - RNA, 19 nt, Artificial Sequence
  Description of Artificial Sequence: Synthetic oligonucleotide
  Antisense strand to SEQ ID NO: 892782
uacuacugcacucacuugc

SEQ ID NO: 892784 - RNA, 19 nt, Artificial Sequence
  Description of Artificial Sequence: Synthetic oligonucleotide
  Sense strand starting at position 2053 of SEQ ID NO: 588829
cgcagagcuuucccgcuaa

SEQ ID NO: 892785 - RNA, 19 nt, Artificial Sequence
  Description of Artificial Sequence: Synthetic oligonucleotide
  Antisense strand to SEQ ID NO: 892784
uuagcgggaaagcucugcg

SEQ ID NO: 892786 - RNA, 19 nt, Artificial Sequence
  Description of Artificial Sequence: Synthetic oligonucleotide
  Sense strand starting at position 2057 of SEQ ID NO: 588829
gagcuuucccgcuaaggga

SEQ ID NO: 892787 - RNA, 19 nt, Artificial Sequence
  Description of Artificial Sequence: Synthetic oligonucleotide
  Antisense strand to SEQ ID NO: 892786
ucccuuagcgggaaagcuc

SEQ ID NO: 892788 - RNA, 19 nt, Artificial Sequence
  Description of Artificial Sequence: Synthetic oligonucleotide
  Sense strand starting at position 2256 of SEQ ID NO: 588829
aguagaaccuaguguggaa

SEQ ID NO: 892789 - RNA, 19 nt, Artificial Sequence
  Description of Artificial Sequence: Synthetic oligonucleotide
  Antisense strand to SEQ ID NO: 892788
uuccacacuagguucuacu

SEQ ID NO: 892790 - RNA, 19 nt, Artificial Sequence
  Description of Artificial Sequence: Synthetic oligonucleotide
  Sense strand starting at position 2465 of SEQ ID NO: 588829
gugugugacuccugcuguu

SEQ ID NO: 892791 - RNA, 19 nt, Artificial Sequence
  Description of Artificial Sequence: Synthetic oligonucleotide
  Antisense strand to SEQ ID NO: 892790
aacagcaggagucacacac

SEQ ID NO: 892792 - RNA, 19 nt, Artificial Sequence
  Description of Artificial Sequence: Synthetic oligonucleotide
  Sense strand starting at position 2505 of SEQ ID NO: 588829
caggcaguccugcaaaugu

SEQ ID NO: 892793 - RNA, 19 nt, Artificial Sequence
  Description of Artificial Sequence: Synthetic oligonucleotide
  Antisense strand to SEQ ID NO: 892792
acauuugcaggacugccug

SEQ ID NO: 892794 - RNA, 19 nt, Artificial Sequence
  Description of Artificial Sequence: Synthetic oligonucleotide
  Sense strand starting at position 2526 of SEQ ID NO: 588829
ugggaaacccacuguauua

SEQ ID NO: 892795 - RNA, 19 nt, Artificial Sequence
  Description of Artificial Sequence: Synthetic oligonucleotide
  Antisense strand to SEQ ID NO: 892794
uaauacaguggguuuccca

SEQ ID NO: 892796 - RNA, 19 nt, Artificial Sequence
  Description of Artificial Sequence: Synthetic oligonucleotide
  Sense strand starting at position 2585 of SEQ ID NO: 588829
agaggucugacucacaguu

SEQ ID NO: 892797 - RNA, 19 nt, Artificial Sequence
  Description of Artificial Sequence: Synthetic oligonucleotide
  Antisense strand to SEQ ID NO: 892796
aacugugagucagaccucu

SEQ ID NO: 892798 - RNA, 19 nt, Artificial Sequence
  Description of Artificial Sequence: Synthetic oligonucleotide
  Sense strand starting at position 2951 of SEQ ID NO: 588829
gggugaugguucugaggca

SEQ ID NO: 892799 - RNA, 19 nt, Artificial Sequence
  Description of Artificial Sequence: Synthetic oligonucleotide
  Antisense strand to SEQ ID NO: 892798
ugccucagaaccaucaccc

SEQ ID NO: 892800 - RNA, 19 nt, Artificial Sequence
  Description of Artificial Sequence: Synthetic oligonucleotide
  Sense strand starting at position 3011 of SEQ ID NO: 588829
ugccaacuuccuggaacua

SEQ ID NO: 892801 - RNA, 19 nt, Artificial Sequence
  Description of Artificial Sequence: Synthetic oligonucleotide
  Antisense strand to SEQ ID NO: 892800
uaguuccaggaaguuggca

SEQ ID NO: 892802 - RNA, 19 nt, Artificial Sequence
  Description of Artificial Sequence: Synthetic oligonucleotide
  Sense strand starting at position 3012 of SEQ ID NO: 588829
gccaacuuccuggaacuaa

SEQ ID NO: 892803 - RNA, 19 nt, Artificial Sequence
  Description of Artificial Sequence: Synthetic oligonucleotide
  Antisense strand to SEQ ID NO: 892802
uuaguuccaggaaguuggc

SEQ ID NO: 892804 - RNA, 19 nt, Artificial Sequence
  Description of Artificial Sequence: Synthetic oligonucleotide
  Sense strand starting at position 3143 of SEQ ID NO: 588829
gagucuaacuuugcauaga

SEQ ID NO: 892805 - RNA, 19 nt, Artificial Sequence
  Description of Artificial Sequence: Synthetic oligonucleotide
  Antisense strand to SEQ ID NO: 892804
ucuaugcaaaguuagacuc

SEQ ID NO: 892806 - RNA, 19 nt, Artificial Sequence
  Description of Artificial Sequence: Synthetic oligonucleotide
  Sense strand starting at position 3144 of SEQ ID NO: 588829
agucuaacuuugcauagaa

SEQ ID NO: 892807 - RNA, 19 nt, Artificial Sequence
  Description of Artificial Sequence: Synthetic oligonucleotide
  Antisense strand to SEQ ID NO: 892806
uucuaugcaaaguuagacu

SEQ ID NO: 892808 - RNA, 19 nt, Artificial Sequence
  Description of Artificial Sequence: Synthetic oligonucleotide
  Sense strand starting at position 3146 of SEQ ID NO: 588829
ucuaacuuugcauagaagu

SEQ ID NO: 892809 - RNA, 19 nt, Artificial Sequence
  Description of Artificial Sequence: Synthetic oligonucleotide
  Antisense strand to SEQ ID NO: 892808
acuucuaugcaaaguuaga

SEQ ID NO: 892810 - RNA, 19 nt, Artificial Sequence
  Description of Artificial Sequence: Synthetic oligonucleotide
  Sense strand starting at position 3232 of SEQ ID NO: 588829
gugugcgaccuuuguaacu

SEQ ID NO: 892811 - RNA, 19 nt, Artificial Sequence
  Description of Artificial Sequence: Synthetic oligonucleotide
  Antisense strand to SEQ ID NO: 892810
aguuacaaaggucgcacac

SEQ ID NO: 892812 - RNA, 19 nt, Artificial Sequence
  Description of Artificial Sequence: Synthetic oligonucleotide
  Sense strand starting at position 3564 of SEQ ID NO: 588829
gugacaguuccauaauuac

SEQ ID NO: 892813 - RNA, 19 nt, Artificial Sequence
  Description of Artificial Sequence: Synthetic oligonucleotide
  Antisense strand to SEQ ID NO: 892812
guaauuauggaacugucac

SEQ ID NO: 892814 - RNA, 19 nt, Artificial Sequence
  Description of Artificial Sequence: Synthetic oligonucleotide
  Sense strand starting at position 3602 of SEQ ID NO: 588829
ggauaauucggcugggcca

SEQ ID NO: 892815 - RNA, 19 nt, Artificial Sequence
  Description of Artificial Sequence: Synthetic oligonucleotide
  Antisense strand to SEQ ID NO: 892814
uggcccagccgaauuaucc

SEQ ID NO: 892816 - RNA, 19 nt, Artificial Sequence
  Description of Artificial Sequence: Synthetic oligonucleotide
  Sense strand starting at position 3848 of SEQ ID NO: 588829
cuaggaucuugguuaggca

SEQ ID NO: 892817 - RNA, 19 nt, Artificial Sequence
  Description of Artificial Sequence: Synthetic oligonucleotide
  Antisense strand to SEQ ID NO: 892816
ugccuaaccaagauccuag

SEQ ID NO: 892818 - RNA, 19 nt, Artificial Sequence
  Description of Artificial Sequence: Synthetic oligonucleotide
  Sense strand starting at position 384 of SEQ ID NO: 588830
ugcugucucuacugcagau

SEQ ID NO: 892819 - RNA, 19 nt, Artificial Sequence
  Description of Artificial Sequence: Synthetic oligonucleotide
  Antisense strand to SEQ ID NO: 892818
aucugcaguagagacagca

SEQ ID NO: 892820 - RNA, 19 nt, Artificial Sequence
  Description of Artificial Sequence: Synthetic oligonucleotide
  Sense strand starting at position 545 of SEQ ID NO: 588830
cuggaaaggugcuucauga

SEQ ID NO: 892821 - RNA, 19 nt, Artificial Sequence
  Description of Artificial Sequence: Synthetic oligonucleotide
  Antisense strand to SEQ ID NO: 892820
ucaugaagcaccuuuccag

SEQ ID NO: 892822 - RNA, 19 nt, Artificial Sequence
  Description of Artificial Sequence: Synthetic oligonucleotide
  Sense strand starting at position 937 of SEQ ID NO: 588830
ccagguucuccaggagaac

SEQ ID NO: 892823 - RNA, 19 nt, Artificial Sequence
  Description of Artificial Sequence: Synthetic oligonucleotide
  Antisense strand to SEQ ID NO: 892822
guucuccuggagaaccugg

SEQ ID NO: 892824 - RNA, 19 nt, Artificial Sequence
  Description of Artificial Sequence: Synthetic oligonucleotide
  Sense strand starting at position 1056 of SEQ ID NO: 588830
cugggaucggcgugacuca

SEQ ID NO: 892825 - RNA, 19 nt, Artificial Sequence
  Description of Artificial Sequence: Synthetic oligonucleotide
  Antisense strand to SEQ ID NO: 892824
ugagucacgccgaucccag

SEQ ID NO: 892826 - RNA, 19 nt, Artificial Sequence
  Description of Artificial Sequence: Synthetic oligonucleotide
  Sense strand starting at position 1994 of SEQ ID NO: 588830
gcaucugugcccucggcaa

SEQ ID NO: 892827 - RNA, 19 nt, Artificial Sequence
  Description of Artificial Sequence: Synthetic oligonucleotide
  Antisense strand to SEQ ID NO: 892826
uugccgagggcacagaugc

SEQ ID NO: 892828 - RNA, 19 nt, Artificial Sequence
  Description of Artificial Sequence: Synthetic oligonucleotide
  Sense strand starting at position 2372 of SEQ ID NO: 588830
gcaggacaaucugacuuga

SEQ ID NO: 892829 - RNA, 19 nt, Artificial Sequence
  Description of Artificial Sequence: Synthetic oligonucleotide
  Antisense strand to SEQ ID NO: 892828
ucaagucagauuguccugc

SEQ ID NO: 892830 - RNA, 19 nt, Artificial Sequence
  Description of Artificial Sequence: Synthetic oligonucleotide
  Sense strand starting at position 2858 of SEQ ID NO: 588830
cugcguucuggaggcagau

SEQ ID NO: 892831 - RNA, 19 nt, Artificial Sequence
  Description of Artificial Sequence: Synthetic oligonucleotide
  Antisense strand to SEQ ID NO: 892830
aucugccuccagaacgcag

SEQ ID NO: 892832 - RNA, 19 nt, Artificial Sequence
  Description of Artificial Sequence: Synthetic oligonucleotide
  Sense strand starting at position 3203 of SEQ ID NO: 588830
agccacagucaucgugaaa

SEQ ID NO: 892833 - RNA, 19 nt, Artificial Sequence
  Description of Artificial Sequence: Synthetic oligonucleotide
  Antisense strand to SEQ ID NO: 892832
uuucacgaugacuguggcu

SEQ ID NO: 892834 - RNA, 19 nt, Artificial Sequence
  Description of Artificial Sequence: Synthetic oligonucleotide
  Sense strand starting at position 3206 of SEQ ID NO: 588830
cacagucaucgugaaaccu

SEQ ID NO: 892835 - RNA, 19 nt, Artificial Sequence
  Description of Artificial Sequence: Synthetic oligonucleotide
  Antisense strand to SEQ ID NO: 892834
agguuucacgaugacugug

SEQ ID NO: 892836 - RNA, 19 nt, Artificial Sequence
  Description of Artificial Sequence: Synthetic oligonucleotide
  Sense strand starting at position 3433 of SEQ ID NO: 588830
ccauacugguucugaugga

SEQ ID NO: 892837 - RNA, 19 nt, Artificial Sequence
  Description of Artificial Sequence: Synthetic oligonucleotide
  Antisense strand to SEQ ID NO: 892836
uccaucagaaccaguaugg

SEQ ID NO: 892838 - RNA, 19 nt, Artificial Sequence
  Description of Artificial Sequence: Synthetic oligonucleotide
  Sense strand starting at position 3562 of SEQ ID NO: 588830
gcagcuggaagucagaaua

SEQ ID NO: 892839 - RNA, 19 nt, Artificial Sequence
  Description of Artificial Sequence: Synthetic oligonucleotide
  Antisense strand to SEQ ID NO: 892838
uauucugacuuccagcugc

SEQ ID NO: 892840 - RNA, 19 nt, Artificial Sequence
  Description of Artificial Sequence: Synthetic oligonucleotide
  Sense strand starting at position 3584 of SEQ ID NO: 588830
auguuacaucucugcaaga

SEQ ID NO: 892841 - RNA, 19 nt, Artificial Sequence
  Description of Artificial Sequence: Synthetic oligonucleotide
  Antisense strand to SEQ ID NO: 892840
ucuugcagagauguaacau

SEQ ID NO: 892842 - RNA, 19 nt, Artificial Sequence
  Description of Artificial Sequence: Synthetic oligonucleotide
  Sense strand starting at position 3585 of SEQ ID NO: 588830
uguuacaucucugcaagag

SEQ ID NO: 892843 - RNA, 19 nt, Artificial Sequence
  Description of Artificial Sequence: Synthetic oligonucleotide
  Antisense strand to SEQ ID NO: 892842
cucuugcagagauguaaca

SEQ ID NO: 892844 - RNA, 19 nt, Artificial Sequence
  Description of Artificial Sequence: Synthetic oligonucleotide
  Sense strand starting at position 3586 of SEQ ID NO: 588830
guuacaucucugcaagagu

SEQ ID NO: 892845 - RNA, 19 nt, Artificial Sequence
  Description of Artificial Sequence: Synthetic oligonucleotide
  Antisense strand to SEQ ID NO: 892844
acucuugcagagauguaac

SEQ ID NO: 892846 - RNA, 19 nt, Artificial Sequence
  Description of Artificial Sequence: Synthetic oligonucleotide
  Sense strand starting at position 3589 of SEQ ID NO: 588830
acaucucugcaagaguaga

SEQ ID NO: 892847 - RNA, 19 nt, Artificial Sequence
  Description of Artificial Sequence: Synthetic oligonucleotide
  Antisense strand to SEQ ID NO: 892846
ucuacucuugcagagaugu

SEQ ID NO: 892848 - RNA, 19 nt, Artificial Sequence
  Description of Artificial Sequence: Synthetic oligonucleotide
  Sense strand starting at position 99 of SEQ ID NO: 588831
acgugagaacccuggaaug

SEQ ID NO: 892849 - RNA, 19 nt, Artificial Sequence
  Description of Artificial Sequence: Synthetic oligonucleotide
  Antisense strand to SEQ ID NO: 892848
cauuccaggguucucacgu

SEQ ID NO: 892850 - RNA, 19 nt, Artificial Sequence
  Description of Artificial Sequence: Synthetic oligonucleotide
  Sense strand starting at position 605 of SEQ ID NO: 588831
cacugugcuugcucagcaa

SEQ ID NO: 892851 - RNA, 19 nt, Artificial Sequence
  Description of Artificial Sequence: Synthetic oligonucleotide
  Antisense strand to SEQ ID NO: 892850
uugcugagcaagcacagug

SEQ ID NO: 892852 - RNA, 19 nt, Artificial Sequence
  Description of Artificial Sequence: Synthetic oligonucleotide
  Sense strand starting at position 760 of SEQ ID NO: 588831
agagcugccucucauuacu

SEQ ID NO: 892853 - RNA, 19 nt, Artificial Sequence
  Description of Artificial Sequence: Synthetic oligonucleotide
  Antisense strand to SEQ ID NO: 892852
aguaaugagaggcagcucu

SEQ ID NO: 892854 - RNA, 19 nt, Artificial Sequence
  Description of Artificial Sequence: Synthetic oligonucleotide
  Sense strand starting at position 2069 of SEQ ID NO: 588831
cuacguucucgugugacau

SEQ ID NO: 892855 - RNA, 19 nt, Artificial Sequence
  Description of Artificial Sequence: Synthetic oligonucleotide
  Antisense strand to SEQ ID NO: 892854
augucacacgagaacguag

SEQ ID NO: 892856 - RNA, 19 nt, Artificial Sequence
  Description of Artificial Sequence: Synthetic oligonucleotide
  Sense strand starting at position 2070 of SEQ ID NO: 588831
uacguucucgugugacauu

SEQ ID NO: 892857 - RNA, 19 nt, Artificial Sequence
  Description of Artificial Sequence: Synthetic oligonucleotide
  Antisense strand to SEQ ID NO: 892856
aaugucacacgagaacgua

SEQ ID NO: 892858 - RNA, 19 nt, Artificial Sequence
  Description of Artificial Sequence: Synthetic oligonucleotide
  Sense strand starting at position 2115 of SEQ ID NO: 588831
cugaguuuccucgucggca

SEQ ID NO: 892859 - RNA, 19 nt, Artificial Sequence
  Description of Artificial Sequence: Synthetic oligonucleotide
  Antisense strand to SEQ ID NO: 892858
ugccgacgaggaaacucag

SEQ ID NO: 892860 - RNA, 19 nt, Artificial Sequence
  Description of Artificial Sequence: Synthetic oligonucleotide
  Sense strand starting at position 2116 of SEQ ID NO: 588831
ugaguuuccucgucggcaa

SEQ ID NO: 892861 - RNA, 19 nt, Artificial Sequence
  Description of Artificial Sequence: Synthetic oligonucleotide
  Antisense strand to SEQ ID NO: 892860
uugccgacgaggaaacuca

SEQ ID NO: 892862 - RNA, 19 nt, Artificial Sequence
  Description of Artificial Sequence: Synthetic oligonucleotide
  Sense strand starting at position 2117 of SEQ ID NO: 588831
gaguuuccucgucggcaaa

SEQ ID NO: 892863 - RNA, 19 nt, Artificial Sequence
  Description of Artificial Sequence: Synthetic oligonucleotide
  Antisense strand to SEQ ID NO: 892862
uuugccgacgaggaaacuc

SEQ ID NO: 892864 - RNA, 19 nt, Artificial Sequence
  Description of Artificial Sequence: Synthetic oligonucleotide
  Sense strand starting at position 2478 of SEQ ID NO: 588831
cuaagagcugauuaagugu

SEQ ID NO: 892865 - RNA, 19 nt, Artificial Sequence
  Description of Artificial Sequence: Synthetic oligonucleotide
  Antisense strand to SEQ ID NO: 892864
acacuuaaucagcucuuag

SEQ ID NO: 892866 - RNA, 19 nt, Artificial Sequence
  Description of Artificial Sequence: Synthetic oligonucleotide
  Sense strand starting at position 2484 of SEQ ID NO: 588831
gcugauuaaguguaacuga

SEQ ID NO: 892867 - RNA, 19 nt, Artificial Sequence
  Description of Artificial Sequence: Synthetic oligonucleotide
  Antisense strand to SEQ ID NO: 892866
ucaguuacacuuaaucagc

SEQ ID NO: 892868 - RNA, 19 nt, Artificial Sequence
  Description of Artificial Sequence: Synthetic oligonucleotide
  Sense strand starting at position 2537 of SEQ ID NO: 588831
gcagacaacucacugucuu

SEQ ID NO: 892869 - RNA, 19 nt, Artificial Sequence
  Description of Artificial Sequence: Synthetic oligonucleotide
  Antisense strand to SEQ ID NO: 892868
aagacagugaguugucugc

SEQ ID NO: 892870 - RNA, 19 nt, Artificial Sequence
  Description of Artificial Sequence: Synthetic oligonucleotide
  Sense strand starting at position 2677 of SEQ ID NO: 588831
aagcaaagggcuuguuuga

SEQ ID NO: 892871 - RNA, 19 nt, Artificial Sequence
  Description of Artificial Sequence: Synthetic oligonucleotide
  Antisense strand to SEQ ID NO: 892870
ucaaacaagcccuuugcuu

SEQ ID NO: 892872 - RNA, 19 nt, Artificial Sequence
  Description of Artificial Sequence: Synthetic oligonucleotide
  Sense strand starting at position 3163 of SEQ ID NO: 588831
cccagaccucagugauauc

SEQ ID NO: 892873 - RNA, 19 nt, Artificial Sequence
  Description of Artificial Sequence: Synthetic oligonucleotide
  Antisense strand to SEQ ID NO: 892872
gauaucacugaggucuggg

SEQ ID NO: 892874 - RNA, 19 nt, Artificial Sequence
  Description of Artificial Sequence: Synthetic oligonucleotide
  Sense strand starting at position 3166 of SEQ ID NO: 588831
agaccucagugauaucaga

SEQ ID NO: 892875 - RNA, 19 nt, Artificial Sequence
  Description of Artificial Sequence: Synthetic oligonucleotide
  Antisense strand to SEQ ID NO: 892874
ucugauaucacugaggucu

SEQ ID NO: 892876 - RNA, 19 nt, Artificial Sequence
  Description of Artificial Sequence: Synthetic oligonucleotide
  Sense strand starting at position 3225 of SEQ ID NO: 588831
cugcacaucugagaagagu

SEQ ID NO: 892877 - RNA, 19 nt, Artificial Sequence
  Description of Artificial Sequence: Synthetic oligonucleotide
  Antisense strand to SEQ ID NO: 892876
acucuucucagaugugcag

SEQ ID NO: 892878 - RNA, 19 nt, Artificial Sequence
  Description of Artificial Sequence: Synthetic oligonucleotide
  Sense strand starting at position 3628 of SEQ ID NO: 588831
ucagauccuuggcacuuau

SEQ ID NO: 892879 - RNA, 19 nt, Artificial Sequence
  Description of Artificial Sequence: Synthetic oligonucleotide
  Antisense strand to SEQ ID NO: 892878
auaagugccaaggaucuga

SEQ ID NO: 892880 - RNA, 19 nt, Artificial Sequence
  Description of Artificial Sequence: Synthetic oligonucleotide
  Sense strand starting at position 161 of SEQ ID NO: 588832
gggaccuguucgguucuca

SEQ ID NO: 892881 - RNA, 19 nt, Artificial Sequence
  Description of Artificial Sequence: Synthetic oligonucleotide
  Antisense strand to SEQ ID NO: 892880
ugagaaccgaacagguccc

SEQ ID NO: 892882 - RNA, 19 nt, Artificial Sequence
  Description of Artificial Sequence: Synthetic oligonucleotide
  Sense strand starting at position 177 of SEQ ID NO: 588832
ucaguacucagcugaagug

SEQ ID NO: 892883 - RNA, 19 nt, Artificial Sequence
  Description of Artificial Sequence: Synthetic oligonucleotide
  Antisense strand to SEQ ID NO: 892882
cacuucagcugaguacuga

SEQ ID NO: 892884 - RNA, 19 nt, Artificial Sequence
  Description of Artificial Sequence: Synthetic oligonucleotide
  Sense strand starting at position 240 of SEQ ID NO: 588832
ugagcauucuuguuccaga

SEQ ID NO: 892885 - RNA, 19 nt, Artificial Sequence
  Description of Artificial Sequence: Synthetic oligonucleotide
  Antisense strand to SEQ ID NO: 892884
ucuggaacaagaaugcuca

SEQ ID NO: 892886 - RNA, 19 nt, Artificial Sequence
  Description of Artificial Sequence: Synthetic oligonucleotide
  Sense strand starting at position 241 of SEQ ID NO: 588832
gagcauucuuguuccagag

SEQ ID NO: 892887 - RNA, 19 nt, Artificial Sequence
  Description of Artificial Sequence: Synthetic oligonucleotide
  Antisense strand to SEQ ID NO: 892886
cucuggaacaagaaugcuc

SEQ ID NO: 892888 - RNA, 19 nt, Artificial Sequence
  Description of Artificial Sequence: Synthetic oligonucleotide
  Sense strand starting at position 243 of SEQ ID NO: 588832
gcauucuuguuccagagga

SEQ ID NO: 892889 - RNA, 19 nt, Artificial Sequence
  Description of Artificial Sequence: Synthetic oligonucleotide
  Antisense strand to SEQ ID NO: 892888
uccucuggaacaagaaugc

SEQ ID NO: 892890 - RNA, 19 nt, Artificial Sequence
  Description of Artificial Sequence: Synthetic oligonucleotide
  Sense strand starting at position 256 of SEQ ID NO: 588832
agaggaaucgucugggaga

SEQ ID NO: 892891 - RNA, 19 nt, Artificial Sequence
  Description of Artificial Sequence: Synthetic oligonucleotide
  Antisense strand to SEQ ID NO: 892890
ucucccagacgauuccucu

SEQ ID NO: 892892 - RNA, 19 nt, Artificial Sequence
  Description of Artificial Sequence: Synthetic oligonucleotide
  Sense strand starting at position 257 of SEQ ID NO: 588832
gaggaaucgucugggagag

SEQ ID NO: 892893 - RNA, 19 nt, Artificial Sequence
  Description of Artificial Sequence: Synthetic oligonucleotide
  Antisense strand to SEQ ID NO: 892892
cucucccagacgauuccuc

SEQ ID NO: 892894 - RNA, 19 nt, Artificial Sequence
  Description of Artificial Sequence: Synthetic oligonucleotide
  Sense strand starting at position 305 of SEQ ID NO: 588832
gcacaugugugagugcaaa

SEQ ID NO: 892895 - RNA, 19 nt, Artificial Sequence
  Description of Artificial Sequence: Synthetic oligonucleotide
  Antisense strand to SEQ ID NO: 892894
uuugcacucacacaugugc

SEQ ID NO: 892896 - RNA, 19 nt, Artificial Sequence
  Description of Artificial Sequence: Synthetic oligonucleotide
  Sense strand starting at position 584 of SEQ ID NO: 588832
gggaguaagcguuaggucu

SEQ ID NO: 892897 - RNA, 19 nt, Artificial Sequence
  Description of Artificial Sequence: Synthetic oligonucleotide
  Antisense strand to SEQ ID NO: 892896
agaccuaacgcuuacuccc

SEQ ID NO: 892898 - RNA, 19 nt, Artificial Sequence
  Description of Artificial Sequence: Synthetic oligonucleotide
  Sense strand starting at position 585 of SEQ ID NO: 588832
ggaguaagcguuaggucug

SEQ ID NO: 892899 - RNA, 19 nt, Artificial Sequence
  Description of Artificial Sequence: Synthetic oligonucleotide
  Antisense strand to SEQ ID NO: 892898
cagaccuaacgcuuacucc

SEQ ID NO: 892900 - RNA, 19 nt, Artificial Sequence
  Description of Artificial Sequence: Synthetic oligonucleotide
  Sense strand starting at position 586 of SEQ ID NO: 588832
gaguaagcguuaggucuga

SEQ ID NO: 892901 - RNA, 19 nt, Artificial Sequence
  Description of Artificial Sequence: Synthetic oligonucleotide
  Antisense strand to SEQ ID NO: 892900
ucagaccuaacgcuuacuc

SEQ ID NO: 892902 - RNA, 19 nt, Artificial Sequence
  Description of Artificial Sequence: Synthetic oligonucleotide
  Sense strand starting at position 590 of SEQ ID NO: 588832
aagcguuaggucugacaaa

SEQ ID NO: 892903 - RNA, 19 nt, Artificial Sequence
  Description of Artificial Sequence: Synthetic oligonucleotide
  Antisense strand to SEQ ID NO: 892902
uuugucagaccuaacgcuu

SEQ ID NO: 892904 - RNA, 19 nt, Artificial Sequence
  Description of Artificial Sequence: Synthetic oligonucleotide
  Sense strand starting at position 591 of SEQ ID NO: 588832
agcguuaggucugacaaac

SEQ ID NO: 892905 - RNA, 19 nt, Artificial Sequence
  Description of Artificial Sequence: Synthetic oligonucleotide
  Antisense strand to SEQ ID NO: 892904
guuugucagaccuaacgcu

SEQ ID NO: 892906 - RNA, 19 nt, Artificial Sequence
  Description of Artificial Sequence: Synthetic oligonucleotide
  Sense strand starting at position 853 of SEQ ID NO: 588832
auaaucagcuguuucgauu

SEQ ID NO: 892907 - RNA, 19 nt, Artificial Sequence
  Description of Artificial Sequence: Synthetic oligonucleotide
  Antisense strand to SEQ ID NO: 892906
aaucgaaacagcugauuau

SEQ ID NO: 892908 - RNA, 19 nt, Artificial Sequence
  Description of Artificial Sequence: Synthetic oligonucleotide
  Sense strand starting at position 934 of SEQ ID NO: 588832
auauccuucccggagcuaa

SEQ ID NO: 892909 - RNA, 19 nt, Artificial Sequence
  Description of Artificial Sequence: Synthetic oligonucleotide
  Antisense strand to SEQ ID NO: 892908
uuagcuccgggaaggauau

SEQ ID NO: 892910 - RNA, 19 nt, Artificial Sequence
  Description of Artificial Sequence: Synthetic oligonucleotide
  Sense strand starting at position 945 of SEQ ID NO: 588832
ggagcuaauuuauaaaguc

SEQ ID NO: 892911 - RNA, 19 nt, Artificial Sequence
  Description of Artificial Sequence: Synthetic oligonucleotide
  Antisense strand to SEQ ID NO: 892910
gacuuuauaaauuagcucc

SEQ ID NO: 892912 - RNA, 19 nt, Artificial Sequence
  Description of Artificial Sequence: Synthetic oligonucleotide
  Sense strand starting at position 1136 of SEQ ID NO: 588832
cgcuguccugcucacaaau

SEQ ID NO: 892913 - RNA, 19 nt, Artificial Sequence
  Description of Artificial Sequence: Synthetic oligonucleotide
  Antisense strand to SEQ ID NO: 892912
auuugugagcaggacagcg

SEQ ID NO: 892914 - RNA, 19 nt, Artificial Sequence
  Description of Artificial Sequence: Synthetic oligonucleotide
  Sense strand starting at position 1228 of SEQ ID NO: 588832
gucugacguucuguucaua

SEQ ID NO: 892915 - RNA, 19 nt, Artificial Sequence
  Description of Artificial Sequence: Synthetic oligonucleotide
  Antisense strand to SEQ ID NO: 892914
uaugaacagaacgucagac

SEQ ID NO: 892916 - RNA, 19 nt, Artificial Sequence
  Description of Artificial Sequence: Synthetic oligonucleotide
  Sense strand starting at position 1307 of SEQ ID NO: 588832
ucuguuuccugggcggaca

SEQ ID NO: 892917 - RNA, 19 nt, Artificial Sequence
  Description of Artificial Sequence: Synthetic oligonucleotide
  Antisense strand to SEQ ID NO: 892916
uguccgcccaggaaacaga

SEQ ID NO: 892918 - RNA, 19 nt, Artificial Sequence
  Description of Artificial Sequence: Synthetic oligonucleotide
  Sense strand starting at position 2888 of SEQ ID NO: 588832
uggguaguucucugccuga

SEQ ID NO: 892919 - RNA, 19 nt, Artificial Sequence
  Description of Artificial Sequence: Synthetic oligonucleotide
  Antisense strand to SEQ ID NO: 892918
ucaggcagagaacuaccca

SEQ ID NO: 892920 - RNA, 19 nt, Artificial Sequence
  Description of Artificial Sequence: Synthetic oligonucleotide
  Sense strand starting at position 2891 of SEQ ID NO: 588832
guaguucucugccugacuu

SEQ ID NO: 892921 - RNA, 19 nt, Artificial Sequence
  Description of Artificial Sequence: Synthetic oligonucleotide
  Antisense strand to SEQ ID NO: 892920
aagucaggcagagaacuac

SEQ ID NO: 892922 - RNA, 19 nt, Artificial Sequence
  Description of Artificial Sequence: Synthetic oligonucleotide
  Sense strand starting at position 3020 of SEQ ID NO: 588832
cggauuugggugugagcua

SEQ ID NO: 892923 - RNA, 19 nt, Artificial Sequence
  Description of Artificial Sequence: Synthetic oligonucleotide
  Antisense strand to SEQ ID NO: 892922
uagcucacacccaaauccg

SEQ ID NO: 892924 - RNA, 19 nt, Artificial Sequence
  Description of Artificial Sequence: Synthetic oligonucleotide
  Sense strand starting at position 3383 of SEQ ID NO: 588832
cuugguuccacuugggaca

SEQ ID NO: 892925 - RNA, 19 nt, Artificial Sequence
  Description of Artificial Sequence: Synthetic oligonucleotide
  Antisense strand to SEQ ID NO: 892924
ugucccaaguggaaccaag

SEQ ID NO: 892926 - RNA, 19 nt, Artificial Sequence
  Description of Artificial Sequence: Synthetic oligonucleotide
  Sense strand starting at position 3973 of SEQ ID NO: 588832
cucacugagucacugagau

SEQ ID NO: 892927 - RNA, 19 nt, Artificial Sequence
  Description of Artificial Sequence: Synthetic oligonucleotide
  Antisense strand to SEQ ID NO: 892926
aucucagugacucagugag

SEQ ID NO: 892928 - RNA, 19 nt, Artificial Sequence
  Description of Artificial Sequence: Synthetic oligonucleotide
  Sense strand starting at position 3977 of SEQ ID NO: 588832
cugagucacugagaugacu

SEQ ID NO: 892929 - RNA, 19 nt, Artificial Sequence
  Description of Artificial Sequence: Synthetic oligonucleotide
  Antisense strand to SEQ ID NO: 892928
agucaucucagugacucag

SEQ ID NO: 892930 - RNA, 19 nt, Artificial Sequence
  Description of Artificial Sequence: Synthetic oligonucleotide
  Sense strand starting at position 2767 of SEQ ID NO: 588833
caaacagaauuccgagaga

SEQ ID NO: 892931 - RNA, 19 nt, Artificial Sequence
  Description of Artificial Sequence: Synthetic oligonucleotide
  Antisense strand to SEQ ID NO: 892930
ucucucggaauucuguuug

SEQ ID NO: 892932 - RNA, 19 nt, Artificial Sequence
  Description of Artificial Sequence: Synthetic oligonucleotide
  Sense strand starting at position 2810 of SEQ ID NO: 588833
ugccaaaggccaugauuga

SEQ ID NO: 892933 - RNA, 19 nt, Artificial Sequence
  Description of Artificial Sequence: Synthetic oligonucleotide
  Antisense strand to SEQ ID NO: 892932
ucaaucauggccuuuggca

SEQ ID NO: 892934 - RNA, 19 nt, Artificial Sequence
  Description of Artificial Sequence: Synthetic oligonucleotide
  Sense strand starting at position 2817 of SEQ ID NO: 588833
ggccaugauugagcgaaca

SEQ ID NO: 892935 - RNA, 19 nt, Artificial Sequence
  Description of Artificial Sequence: Synthetic oligonucleotide
  Antisense strand to SEQ ID NO: 892934
uguucgcucaaucauggcc

SEQ ID NO: 892936 - RNA, 19 nt, Artificial Sequence
  Description of Artificial Sequence: Synthetic oligonucleotide
  Sense strand starting at position 2819 of SEQ ID NO: 588833
ccaugauugagcgaacaca

SEQ ID NO: 892937 - RNA, 19 nt, Artificial Sequence
  Description of Artificial Sequence: Synthetic oligonucleotide
  Antisense strand to SEQ ID NO: 892936
uguguucgcucaaucaugg

SEQ ID NO: 892938 - RNA, 19 nt, Artificial Sequence
  Description of Artificial Sequence: Synthetic oligonucleotide
  Sense strand starting at position 2938 of SEQ ID NO: 588833
caaggagaggccuguuauc

SEQ ID NO: 892939 - RNA, 19 nt, Artificial Sequence
  Description of Artificial Sequence: Synthetic oligonucleotide
  Antisense strand to SEQ ID NO: 892938
gauaacaggccucuccuug

SEQ ID NO: 892940 - RNA, 19 nt, Artificial Sequence
  Description of Artificial Sequence: Synthetic oligonucleotide
  Sense strand starting at position 2948 of SEQ ID NO: 588833
ccuguuauccgaccgugca

SEQ ID NO: 892941 - RNA, 19 nt, Artificial Sequence
  Description of Artificial Sequence: Synthetic oligonucleotide
  Antisense strand to SEQ ID NO: 892940
ugcacggucggauaacagg

SEQ ID NO: 892942 - RNA, 19 nt, Artificial Sequence
  Description of Artificial Sequence: Synthetic oligonucleotide
  Sense strand starting at position 2949 of SEQ ID NO: 588833
cuguuauccgaccgugcau

SEQ ID NO: 892943 - RNA, 19 nt, Artificial Sequence
  Description of Artificial Sequence: Synthetic oligonucleotide
  Antisense strand to SEQ ID NO: 892942
augcacggucggauaacag

SEQ ID NO: 892944 - RNA, 19 nt, Artificial Sequence
  Description of Artificial Sequence: Synthetic oligonucleotide
  Sense strand starting at position 2950 of SEQ ID NO: 588833
uguuauccgaccgugcauu

SEQ ID NO: 892945 - RNA, 19 nt, Artificial Sequence
  Description of Artificial Sequence: Synthetic oligonucleotide
  Antisense strand to SEQ ID NO: 892944
aaugcacggucggauaaca

SEQ ID NO: 892946 - RNA, 19 nt, Artificial Sequence
  Description of Artificial Sequence: Synthetic oligonucleotide
  Sense strand starting at position 3000 of SEQ ID NO: 588833
gcugcagagaguugaguuu

SEQ ID NO: 892947 - RNA, 19 nt, Artificial Sequence
  Description of Artificial Sequence: Synthetic oligonucleotide
  Antisense strand to SEQ ID NO: 892946
aaacucaacucucugcagc

SEQ ID NO: 892948 - RNA, 19 nt, Artificial Sequence
  Description of Artificial Sequence: Synthetic oligonucleotide
  Sense strand starting at position 3006 of SEQ ID NO: 588833
gagaguugaguuugugcaa

SEQ ID NO: 892949 - RNA, 19 nt, Artificial Sequence
  Description of Artificial Sequence: Synthetic oligonucleotide
  Antisense strand to SEQ ID NO: 892948
uugcacaaacucaacucuc

SEQ ID NO: 892950 - RNA, 19 nt, Artificial Sequence
  Description of Artificial Sequence: Synthetic oligonucleotide
  Sense strand starting at position 3007 of SEQ ID NO: 588833
agaguugaguuugugcaaa

SEQ ID NO: 892951 - RNA, 19 nt, Artificial Sequence
  Description of Artificial Sequence: Synthetic oligonucleotide
  Antisense strand to SEQ ID NO: 892950
uuugcacaaacucaacucu

SEQ ID NO: 892952 - RNA, 19 nt, Artificial Sequence
  Description of Artificial Sequence: Synthetic oligonucleotide
  Sense strand starting at position 3081 of SEQ ID NO: 588833
gcauccuucucuuggagca

SEQ ID NO: 892953 - RNA, 19 nt, Artificial Sequence
  Description of Artificial Sequence: Synthetic oligonucleotide
  Antisense strand to SEQ ID NO: 892952
ugcuccaagagaaggaugc

SEQ ID NO: 892954 - RNA, 19 nt, Artificial Sequence
  Description of Artificial Sequence: Synthetic oligonucleotide
  Sense strand starting at position 3121 of SEQ ID NO: 588833
gugcaguuugagcggugaa

SEQ ID NO: 892955 - RNA, 19 nt, Artificial Sequence
  Description of Artificial Sequence: Synthetic oligonucleotide
  Antisense strand to SEQ ID NO: 892954
uucaccgcucaaacugcac

SEQ ID NO: 892956 - RNA, 19 nt, Artificial Sequence
  Description of Artificial Sequence: Synthetic oligonucleotide
  Sense strand starting at position 3168 of SEQ ID NO: 588833
uccuguucccugcagagaa

SEQ ID NO: 892957 - RNA, 19 nt, Artificial Sequence
  Description of Artificial Sequence: Synthetic oligonucleotide
  Antisense strand to SEQ ID NO: 892956
uucucugcagggaacagga

SEQ ID NO: 892958 - RNA, 19 nt, Artificial Sequence
  Description of Artificial Sequence: Synthetic oligonucleotide
  Sense strand starting at position 3321 of SEQ ID NO: 588833
uguggagucuuccggcacu

SEQ ID NO: 892959 - RNA, 19 nt, Artificial Sequence
  Description of Artificial Sequence: Synthetic oligonucleotide
  Antisense strand to SEQ ID NO: 892958
agugccggaagacuccaca

SEQ ID NO: 892960 - RNA, 19 nt, Artificial Sequence
  Description of Artificial Sequence: Synthetic oligonucleotide
  Sense strand starting at position 3324 of SEQ ID NO: 588833
ggagucuuccggcacugua

SEQ ID NO: 892961 - RNA, 19 nt, Artificial Sequence
  Description of Artificial Sequence: Synthetic oligonucleotide
  Antisense strand to SEQ ID NO: 892960
uacagugccggaagacucc

SEQ ID NO: 892962 - RNA, 19 nt, Artificial Sequence
  Description of Artificial Sequence: Synthetic oligonucleotide
  Sense strand starting at position 3387 of SEQ ID NO: 588833
ccacuucugucccaaguuu

SEQ ID NO: 892963 - RNA, 19 nt, Artificial Sequence
  Description of Artificial Sequence: Synthetic oligonucleotide
  Antisense strand to SEQ ID NO: 892962
aaacuugggacagaagugg

SEQ ID NO: 892964 - RNA, 19 nt, Artificial Sequence
  Description of Artificial Sequence: Synthetic oligonucleotide
  Sense strand starting at position 3413 of SEQ ID NO: 588833
gccugaaugugcuucccuu

SEQ ID NO: 892965 - RNA, 19 nt, Artificial Sequence
  Description of Artificial Sequence: Synthetic oligonucleotide
  Antisense strand to SEQ ID NO: 892964
aagggaagcacauucaggc

SEQ ID NO: 892966 - RNA, 19 nt, Artificial Sequence
  Description of Artificial Sequence: Synthetic oligonucleotide
  Sense strand starting at position 3521 of SEQ ID NO: 588833
uggccacugugucuauauu

SEQ ID NO: 892967 - RNA, 19 nt, Artificial Sequence
  Description of Artificial Sequence: Synthetic oligonucleotide
  Antisense strand to SEQ ID NO: 892966
aauauagacacaguggcca

SEQ ID NO: 892968 - RNA, 19 nt, Artificial Sequence
  Description of Artificial Sequence: Synthetic oligonucleotide
  Sense strand starting at position 3522 of SEQ ID NO: 588833
ggccacugugucuauauua

SEQ ID NO: 892969 - RNA, 19 nt, Artificial Sequence
  Description of Artificial Sequence: Synthetic oligonucleotide
  Antisense strand to SEQ ID NO: 892968
uaauauagacacaguggcc

SEQ ID NO: 892970 - RNA, 19 nt, Artificial Sequence
  Description of Artificial Sequence: Synthetic oligonucleotide
  Sense strand starting at position 3527 of SEQ ID NO: 588833
cugugucuauauuaccaaa

SEQ ID NO: 892971 - RNA, 19 nt, Artificial Sequence
  Description of Artificial Sequence: Synthetic oligonucleotide
  Antisense strand to SEQ ID NO: 892970
uuugguaauauagacacag

SEQ ID NO: 892972 - RNA, 19 nt, Artificial Sequence
  Description of Artificial Sequence: Synthetic oligonucleotide
  Sense strand starting at position 3529 of SEQ ID NO: 588833
gugucuauauuaccaaagu

SEQ ID NO: 892973 - RNA, 19 nt, Artificial Sequence
  Description of Artificial Sequence: Synthetic oligonucleotide
  Antisense strand to SEQ ID NO: 892972
acuuugguaauauagacac

SEQ ID NO: 892974 - RNA, 19 nt, Artificial Sequence
  Description of Artificial Sequence: Synthetic oligonucleotide
  Sense strand starting at position 3577 of SEQ ID NO: 588833
auuaguugcuucccgugau

SEQ ID NO: 892975 - RNA, 19 nt, Artificial Sequence
  Description of Artificial Sequence: Synthetic oligonucleotide
  Antisense strand to SEQ ID NO: 892974
aucacgggaagcaacuaau

SEQ ID NO: 892976 - RNA, 19 nt, Artificial Sequence
  Description of Artificial Sequence: Synthetic oligonucleotide
  Sense strand starting at position 3580 of SEQ ID NO: 588833
aguugcuucccgugaugaa

SEQ ID NO: 892977 - RNA, 19 nt, Artificial Sequence
  Description of Artificial Sequence: Synthetic oligonucleotide
  Antisense strand to SEQ ID NO: 892976
uucaucacgggaagcaacu

SEQ ID NO: 892978 - RNA, 19 nt, Artificial Sequence
  Description of Artificial Sequence: Synthetic oligonucleotide
  Sense strand starting at position 3581 of SEQ ID NO: 588833
guugcuucccgugaugaaa

SEQ ID NO: 892979 - RNA, 19 nt, Artificial Sequence
  Description of Artificial Sequence: Synthetic oligonucleotide
  Antisense strand to SEQ ID NO: 892978
uuucaucacgggaagcaac

SEQ ID NO: 892980 - RNA, 19 nt, Artificial Sequence
  Description of Artificial Sequence: Synthetic oligonucleotide
  Sense strand starting at position 3646 of SEQ ID NO: 588833
aagucuccguuccuagaga

SEQ ID NO: 892981 - RNA, 19 nt, Artificial Sequence
  Description of Artificial Sequence: Synthetic oligonucleotide
  Antisense strand to SEQ ID NO: 892980
ucucuaggaacggagacuu

SEQ ID NO: 892982 - RNA, 19 nt, Artificial Sequence
  Description of Artificial Sequence: Synthetic oligonucleotide
  Sense strand starting at position 3647 of SEQ ID NO: 588833
agucuccguuccuagagaa

SEQ ID NO: 892983 - RNA, 19 nt, Artificial Sequence
  Description of Artificial Sequence: Synthetic oligonucleotide
  Antisense strand to SEQ ID NO: 892982
uucucuaggaacggagacu

SEQ ID NO: 892984 - RNA, 19 nt, Artificial Sequence
  Description of Artificial Sequence: Synthetic oligonucleotide
  Sense strand starting at position 3663 of SEQ ID NO: 588833
gaaagucaguuacccugau

SEQ ID NO: 892985 - RNA, 19 nt, Artificial Sequence
  Description of Artificial Sequence: Synthetic oligonucleotide
  Antisense strand to SEQ ID NO: 892984
aucaggguaacugacuuuc

SEQ ID NO: 892986 - RNA, 19 nt, Artificial Sequence
  Description of Artificial Sequence: Synthetic oligonucleotide
  Sense strand starting at position 3667 of SEQ ID NO: 588833
gucaguuacccugauauaa

SEQ ID NO: 892987 - RNA, 19 nt, Artificial Sequence
  Description of Artificial Sequence: Synthetic oligonucleotide
  Antisense strand to SEQ ID NO: 892986
uuauaucaggguaacugac

SEQ ID NO: 892988 - RNA, 19 nt, Artificial Sequence
  Description of Artificial Sequence: Synthetic oligonucleotide
  Sense strand starting at position 3754 of SEQ ID NO: 588833
ggaguaauguggcucucau

SEQ ID NO: 892989 - RNA, 19 nt, Artificial Sequence
  Description of Artificial Sequence: Synthetic oligonucleotide
  Antisense strand to SEQ ID NO: 892988
augagagccacauuacucc

SEQ ID NO: 892990 - RNA, 19 nt, Artificial Sequence
  Description of Artificial Sequence: Synthetic oligonucleotide
  Sense strand starting at position 3765 of SEQ ID NO: 588833
gcucucaugcuuuauggca

SEQ ID NO: 892991 - RNA, 19 nt, Artificial Sequence
  Description of Artificial Sequence: Synthetic oligonucleotide
  Antisense strand to SEQ ID NO: 892990
ugccauaaagcaugagagc

SEQ ID NO: 892992 - RNA, 19 nt, Artificial Sequence
  Description of Artificial Sequence: Synthetic oligonucleotide
  Sense strand starting at position 3778 of SEQ ID NO: 588833
auggcagguuucccuaaga

SEQ ID NO: 892993 - RNA, 19 nt, Artificial Sequence
  Description of Artificial Sequence: Synthetic oligonucleotide
  Antisense strand to SEQ ID NO: 892992
ucuuagggaaaccugccau

SEQ ID NO: 892994 - RNA, 19 nt, Artificial Sequence
  Description of Artificial Sequence: Synthetic oligonucleotide
  Sense strand starting at position 3846 of SEQ ID NO: 588833
ggcuccguuugccuaaaga

SEQ ID NO: 892995 - RNA, 19 nt, Artificial Sequence
  Description of Artificial Sequence: Synthetic oligonucleotide
  Antisense strand to SEQ ID NO: 892994
ucuuuaggcaaacggagcc

SEQ ID NO: 892996 - RNA, 19 nt, Artificial Sequence
  Description of Artificial Sequence: Synthetic oligonucleotide
  Sense strand starting at position 31 of SEQ ID NO: 588834
ucaaauaugucacgccauu

SEQ ID NO: 892997 - RNA, 19 nt, Artificial Sequence
  Description of Artificial Sequence: Synthetic oligonucleotide
  Antisense strand to SEQ ID NO: 892996
aauggcgugacauauuuga

SEQ ID NO: 892998 - RNA, 19 nt, Artificial Sequence
  Description of Artificial Sequence: Synthetic oligonucleotide
  Sense strand starting at position 209 of SEQ ID NO: 588834
cgugcaaucccauggcuga

SEQ ID NO: 892999 - RNA, 19 nt, Artificial Sequence
  Description of Artificial Sequence: Synthetic oligonucleotide
  Antisense strand to SEQ ID NO: 892998
ucagccaugggauugcacg

SEQ ID NO: 893000 - RNA, 19 nt, Artificial Sequence
  Description of Artificial Sequence: Synthetic oligonucleotide
  Sense strand starting at position 210 of SEQ ID NO: 588834
gugcaaucccauggcugau

SEQ ID NO: 893001 - RNA, 19 nt, Artificial Sequence
  Description of Artificial Sequence: Synthetic oligonucleotide
  Antisense strand to SEQ ID NO: 893000
aucagccaugggauugcac

SEQ ID NO: 893002 - RNA, 19 nt, Artificial Sequence
  Description of Artificial Sequence: Synthetic oligonucleotide
  Sense strand starting at position 275 of SEQ ID NO: 588834
ccagauacccucugaaggu

SEQ ID NO: 893003 - RNA, 19 nt, Artificial Sequence
  Description of Artificial Sequence: Synthetic oligonucleotide
  Antisense strand to SEQ ID NO: 893002
accuucagaggguaucugg

SEQ ID NO: 893004 - RNA, 19 nt, Artificial Sequence
  Description of Artificial Sequence: Synthetic oligonucleotide
  Sense strand starting at position 276 of SEQ ID NO: 588834
cagauacccucugaagguu

SEQ ID NO: 893005 - RNA, 19 nt, Artificial Sequence
  Description of Artificial Sequence: Synthetic oligonucleotide
  Antisense strand to SEQ ID NO: 893004
aaccuucagaggguaucug

SEQ ID NO: 893006 - RNA, 19 nt, Artificial Sequence
  Description of Artificial Sequence: Synthetic oligonucleotide
  Sense strand starting at position 385 of SEQ ID NO: 588834
agcuguagggcuggagaau

SEQ ID NO: 893007 - RNA, 19 nt, Artificial Sequence
  Description of Artificial Sequence: Synthetic oligonucleotide
  Antisense strand to SEQ ID NO: 893006
auucuccagcccuacagcu

SEQ ID NO: 893008 - RNA, 19 nt, Artificial Sequence
  Description of Artificial Sequence: Synthetic oligonucleotide
  Sense strand starting at position 386 of SEQ ID NO: 588834
gcuguagggcuggagaaua

SEQ ID NO: 893009 - RNA, 19 nt, Artificial Sequence
  Description of Artificial Sequence: Synthetic oligonucleotide
  Antisense strand to SEQ ID NO: 893008
uauucuccagcccuacagc

SEQ ID NO: 893010 - RNA, 19 nt, Artificial Sequence
  Description of Artificial Sequence: Synthetic oligonucleotide
  Sense strand starting at position 397 of SEQ ID NO: 588834
ggagaauauggcugaggug

SEQ ID NO: 893011 - RNA, 19 nt, Artificial Sequence
  Description of Artificial Sequence: Synthetic oligonucleotide
  Antisense strand to SEQ ID NO: 893010
caccucagccauauucucc

SEQ ID NO: 893012 - RNA, 19 nt, Artificial Sequence
  Description of Artificial Sequence: Synthetic oligonucleotide
  Sense strand starting at position 668 of SEQ ID NO: 588834
agaggagugugccagccau

SEQ ID NO: 893013 - RNA, 19 nt, Artificial Sequence
  Description of Artificial Sequence: Synthetic oligonucleotide
  Antisense strand to SEQ ID NO: 893012
auggcuggcacacuccucu

SEQ ID NO: 893014 - RNA, 19 nt, Artificial Sequence
  Description of Artificial Sequence: Synthetic oligonucleotide
  Sense strand starting at position 714 of SEQ ID NO: 588834
cauggcaucugccauagua

SEQ ID NO: 893015 - RNA, 19 nt, Artificial Sequence
  Description of Artificial Sequence: Synthetic oligonucleotide
  Antisense strand to SEQ ID NO: 893014
uacuauggcagaugccaug

SEQ ID NO: 893016 - RNA, 19 nt, Artificial Sequence
  Description of Artificial Sequence: Synthetic oligonucleotide
  Sense strand starting at position 716 of SEQ ID NO: 588834
uggcaucugccauaguaca

SEQ ID NO: 893017 - RNA, 19 nt, Artificial Sequence
  Description of Artificial Sequence: Synthetic oligonucleotide
  Antisense strand to SEQ ID NO: 893016
uguacuauggcagaugcca

SEQ ID NO: 893018 - RNA, 19 nt, Artificial Sequence
  Description of Artificial Sequence: Synthetic oligonucleotide
  Sense strand starting at position 889 of SEQ ID NO: 588834
gggacccuuucuuugagaa

SEQ ID NO: 893019 - RNA, 19 nt, Artificial Sequence
  Description of Artificial Sequence: Synthetic oligonucleotide
  Antisense strand to SEQ ID NO: 893018
uucucaaagaaaggguccc

SEQ ID NO: 893020 - RNA, 19 nt, Artificial Sequence
  Description of Artificial Sequence: Synthetic oligonucleotide
  Sense strand starting at position 890 of SEQ ID NO: 588834
ggacccuuucuuugagaag

SEQ ID NO: 893021 - RNA, 19 nt, Artificial Sequence
  Description of Artificial Sequence: Synthetic oligonucleotide
  Antisense strand to SEQ ID NO: 893020
cuucucaaagaaagggucc

SEQ ID NO: 893022 - RNA, 19 nt, Artificial Sequence
  Description of Artificial Sequence: Synthetic oligonucleotide
  Sense strand starting at position 893 of SEQ ID NO: 588834
cccuuucuuugagaaggaa

SEQ ID NO: 893023 - RNA, 19 nt, Artificial Sequence
  Description of Artificial Sequence: Synthetic oligonucleotide
  Antisense strand to SEQ ID NO: 893022
uuccuucucaaagaaaggg

SEQ ID NO: 893024 - RNA, 19 nt, Artificial Sequence
  Description of Artificial Sequence: Synthetic oligonucleotide
  Sense strand starting at position 969 of SEQ ID NO: 588834
cggaaaggguauuggagau

SEQ ID NO: 893025 - RNA, 19 nt, Artificial Sequence
  Description of Artificial Sequence: Synthetic oligonucleotide
  Antisense strand to SEQ ID NO: 893024
aucuccaauacccuuuccg

SEQ ID NO: 893026 - RNA, 19 nt, Artificial Sequence
  Description of Artificial Sequence: Synthetic oligonucleotide
  Sense strand starting at position 2009 of SEQ ID NO: 588834
cggcgucagcccucauuaa

SEQ ID NO: 893027 - RNA, 19 nt, Artificial Sequence
  Description of Artificial Sequence: Synthetic oligonucleotide
  Antisense strand to SEQ ID NO: 893026
uuaaugagggcugacgccg

SEQ ID NO: 893028 - RNA, 19 nt, Artificial Sequence
  Description of Artificial Sequence: Synthetic oligonucleotide
  Sense strand starting at position 2725 of SEQ ID NO: 588834
uguguuuccagcugggauc

SEQ ID NO: 893029 - RNA, 19 nt, Artificial Sequence
  Description of Artificial Sequence: Synthetic oligonucleotide
  Antisense strand to SEQ ID NO: 893028
gaucccagcuggaaacaca

SEQ ID NO: 893030 - RNA, 19 nt, Artificial Sequence
  Description of Artificial Sequence: Synthetic oligonucleotide
  Sense strand starting at position 2791 of SEQ ID NO: 588834
ggccuuagccuggguucua

SEQ ID NO: 893031 - RNA, 19 nt, Artificial Sequence
  Description of Artificial Sequence: Synthetic oligonucleotide
  Antisense strand to SEQ ID NO: 893030
uagaacccaggcuaaggcc

SEQ ID NO: 893032 - RNA, 19 nt, Artificial Sequence
  Description of Artificial Sequence: Synthetic oligonucleotide
  Sense strand starting at position 2860 of SEQ ID NO: 588834
ggagguguucagggugcaa

SEQ ID NO: 893033 - RNA, 19 nt, Artificial Sequence
  Description of Artificial Sequence: Synthetic oligonucleotide
  Antisense strand to SEQ ID NO: 893032
uugcacccugaacaccucc

SEQ ID NO: 893034 - RNA, 19 nt, Artificial Sequence
  Description of Artificial Sequence: Synthetic oligonucleotide
  Sense strand starting at position 3048 of SEQ ID NO: 588834
ggaguauccuggguccacu

SEQ ID NO: 893035 - RNA, 19 nt, Artificial Sequence
  Description of Artificial Sequence: Synthetic oligonucleotide
  Antisense strand to SEQ ID NO: 893034
aguggacccaggauacucc

SEQ ID NO: 893036 - RNA, 19 nt, Artificial Sequence
  Description of Artificial Sequence: Synthetic oligonucleotide
  Sense strand starting at position 3091 of SEQ ID NO: 588834
gugggacuccuucaucgua

SEQ ID NO: 893037 - RNA, 19 nt, Artificial Sequence
  Description of Artificial Sequence: Synthetic oligonucleotide
  Antisense strand to SEQ ID NO: 893036
uacgaugaaggagucccac

SEQ ID NO: 893038 - RNA, 19 nt, Artificial Sequence
  Description of Artificial Sequence: Synthetic oligonucleotide
  Sense strand starting at position 3155 of SEQ ID NO: 588834
aucagagcuugguccugua

SEQ ID NO: 893039 - RNA, 19 nt, Artificial Sequence
  Description of Artificial Sequence: Synthetic oligonucleotide
  Antisense strand to SEQ ID NO: 893038
uacaggaccaagcucugau

SEQ ID NO: 893040 - RNA, 19 nt, Artificial Sequence
  Description of Artificial Sequence: Synthetic oligonucleotide
  Sense strand starting at position 3190 of SEQ ID NO: 588834
aauggcuggucugcucaaa

SEQ ID NO: 893041 - RNA, 19 nt, Artificial Sequence
  Description of Artificial Sequence: Synthetic oligonucleotide
  Antisense strand to SEQ ID NO: 893040
uuugagcagaccagccauu

SEQ ID NO: 893042 - RNA, 19 nt, Artificial Sequence
  Description of Artificial Sequence: Synthetic oligonucleotide
  Sense strand starting at position 3699 of SEQ ID NO: 588834
ccugaagccuaguuagaua

SEQ ID NO: 893043 - RNA, 19 nt, Artificial Sequence
  Description of Artificial Sequence: Synthetic oligonucleotide
  Antisense strand to SEQ ID NO: 893042
uaucuaacuaggcuucagg

SEQ ID NO: 893044 - RNA, 19 nt, Artificial Sequence
  Description of Artificial Sequence: Synthetic oligonucleotide
  Sense strand starting at position 3840 of SEQ ID NO: 588834
agccguauccagugaaauc

SEQ ID NO: 893045 - RNA, 19 nt, Artificial Sequence
  Description of Artificial Sequence: Synthetic oligonucleotide
  Antisense strand to SEQ ID NO: 893044
gauuucacuggauacggcu

SEQ ID NO: 893046 - RNA, 19 nt, Artificial Sequence
  Description of Artificial Sequence: Synthetic oligonucleotide
  Sense strand starting at position 3841 of SEQ ID NO: 588834
gccguauccagugaaauca

SEQ ID NO: 893047 - RNA, 19 nt, Artificial Sequence
  Description of Artificial Sequence: Synthetic oligonucleotide
  Antisense strand to SEQ ID NO: 893046
ugauuucacuggauacggc

SEQ ID NO: 893048 - RNA, 19 nt, Artificial Sequence
  Description of Artificial Sequence: Synthetic oligonucleotide
  Sense strand starting at position 3851 of SEQ ID NO: 588834
gugaaaucauaugggaaac

SEQ ID NO: 893049 - RNA, 19 nt, Artificial Sequence
  Description of Artificial Sequence: Synthetic oligonucleotide
  Antisense strand to SEQ ID NO: 893048
guuucccauaugauuucac

SEQ ID NO: 893050 - RNA, 19 nt, Artificial Sequence
  Description of Artificial Sequence: Synthetic oligonucleotide
  Sense strand starting at position 3925 of SEQ ID NO: 588834
gggaacagcucagugguau

SEQ ID NO: 893051 - RNA, 19 nt, Artificial Sequence
  Description of Artificial Sequence: Synthetic oligonucleotide
  Antisense strand to SEQ ID NO: 893050
auaccacugagcuguuccc

SEQ ID NO: 893052 - RNA, 19 nt, Artificial Sequence
  Description of Artificial Sequence: Synthetic oligonucleotide
  Sense strand starting at position 3926 of SEQ ID NO: 588834
ggaacagcucagugguaug

SEQ ID NO: 893053 - RNA, 19 nt, Artificial Sequence
  Description of Artificial Sequence: Synthetic oligonucleotide
  Antisense strand to SEQ ID NO: 893052
cauaccacugagcuguucc

SEQ ID NO: 893054 - RNA, 19 nt, Artificial Sequence
  Description of Artificial Sequence: Synthetic oligonucleotide
  Sense strand starting at position 463 of SEQ ID NO: 588835
aagggauguggcugugauc

SEQ ID NO: 893055 - RNA, 19 nt, Artificial Sequence
  Description of Artificial Sequence: Synthetic oligonucleotide
  Antisense strand to SEQ ID NO: 893054
gaucacagccacaucccuu

SEQ ID NO: 893056 - RNA, 19 nt, Artificial Sequence
  Description of Artificial Sequence: Synthetic oligonucleotide
  Sense strand starting at position 466 of SEQ ID NO: 588835
ggauguggcugugauccaa

SEQ ID NO: 893057 - RNA, 19 nt, Artificial Sequence
  Description of Artificial Sequence: Synthetic oligonucleotide
  Antisense strand to SEQ ID NO: 893056
uuggaucacagccacaucc

SEQ ID NO: 893058 - RNA, 19 nt, Artificial Sequence
  Description of Artificial Sequence: Synthetic oligonucleotide
  Sense strand starting at position 470 of SEQ ID NO: 588835
guggcugugauccaagaug

SEQ ID NO: 893059 - RNA, 19 nt, Artificial Sequence
  Description of Artificial Sequence: Synthetic oligonucleotide
  Antisense strand to SEQ ID NO: 893058
caucuuggaucacagccac

SEQ ID NO: 893060 - RNA, 19 nt, Artificial Sequence
  Description of Artificial Sequence: Synthetic oligonucleotide
  Sense strand starting at position 475 of SEQ ID NO: 588835
ugugauccaagaugugaag

SEQ ID NO: 893061 - RNA, 19 nt, Artificial Sequence
  Description of Artificial Sequence: Synthetic oligonucleotide
  Antisense strand to SEQ ID NO: 893060
cuucacaucuuggaucaca

SEQ ID NO: 893062 - RNA, 19 nt, Artificial Sequence
  Description of Artificial Sequence: Synthetic oligonucleotide
  Sense strand starting at position 498 of SEQ ID NO: 588835
gugccaccuacgucaguau

SEQ ID NO: 893063 - RNA, 19 nt, Artificial Sequence
  Description of Artificial Sequence: Synthetic oligonucleotide
  Antisense strand to SEQ ID NO: 893062
auacugacguagguggcac

SEQ ID NO: 893064 - RNA, 19 nt, Artificial Sequence
  Description of Artificial Sequence: Synthetic oligonucleotide
  Sense strand starting at position 501 of SEQ ID NO: 588835
ccaccuacgucaguaugaa

SEQ ID NO: 893065 - RNA, 19 nt, Artificial Sequence
  Description of Artificial Sequence: Synthetic oligonucleotide
  Antisense strand to SEQ ID NO: 893064
uucauacugacguaggugg

SEQ ID NO: 893066 - RNA, 19 nt, Artificial Sequence
  Description of Artificial Sequence: Synthetic oligonucleotide
  Sense strand starting at position 502 of SEQ ID NO: 588835
caccuacgucaguaugaau

SEQ ID NO: 893067 - RNA, 19 nt, Artificial Sequence
  Description of Artificial Sequence: Synthetic oligonucleotide
  Antisense strand to SEQ ID NO: 893066
auucauacugacguaggug

SEQ ID NO: 893068 - RNA, 19 nt, Artificial Sequence
  Description of Artificial Sequence: Synthetic oligonucleotide
  Sense strand starting at position 511 of SEQ ID NO: 588835
caguaugaaugacugauau

SEQ ID NO: 893069 - RNA, 19 nt, Artificial Sequence
  Description of Artificial Sequence: Synthetic oligonucleotide
  Antisense strand to SEQ ID NO: 893068
auaucagucauucauacug

SEQ ID NO: 893070 - RNA, 19 nt, Artificial Sequence
  Description of Artificial Sequence: Synthetic oligonucleotide
  Sense strand starting at position 669 of SEQ ID NO: 588835
ugaggugaccagggucaua

SEQ ID NO: 893071 - RNA, 19 nt, Artificial Sequence
  Description of Artificial Sequence: Synthetic oligonucleotide
  Antisense strand to SEQ ID NO: 893070
uaugacccuggucaccuca

SEQ ID NO: 893072 - RNA, 19 nt, Artificial Sequence
  Description of Artificial Sequence: Synthetic oligonucleotide
  Sense strand starting at position 1057 of SEQ ID NO: 588835
ccugcaugugucuguacau

SEQ ID NO: 893073 - RNA, 19 nt, Artificial Sequence
  Description of Artificial Sequence: Synthetic oligonucleotide
  Antisense strand to SEQ ID NO: 893072
auguacagacacaugcagg

SEQ ID NO: 893074 - RNA, 19 nt, Artificial Sequence
  Description of Artificial Sequence: Synthetic oligonucleotide
  Sense strand starting at position 1058 of SEQ ID NO: 588835
cugcaugugucuguacaua

SEQ ID NO: 893075 - RNA, 19 nt, Artificial Sequence
  Description of Artificial Sequence: Synthetic oligonucleotide
  Antisense strand to SEQ ID NO: 893074
uauguacagacacaugcag

SEQ ID NO: 893076 - RNA, 19 nt, Artificial Sequence
  Description of Artificial Sequence: Synthetic oligonucleotide
  Sense strand starting at position 1349 of SEQ ID NO: 588835
ggcucuucugacugucaga

SEQ ID NO: 893077 - RNA, 19 nt, Artificial Sequence
  Description of Artificial Sequence: Synthetic oligonucleotide
  Antisense strand to SEQ ID NO: 893076
ucugacagucagaagagcc

SEQ ID NO: 893078 - RNA, 19 nt, Artificial Sequence
  Description of Artificial Sequence: Synthetic oligonucleotide
  Sense strand starting at position 1477 of SEQ ID NO: 588835
cugucucguaccugaguca

SEQ ID NO: 893079 - RNA, 19 nt, Artificial Sequence
  Description of Artificial Sequence: Synthetic oligonucleotide
  Antisense strand to SEQ ID NO: 893078
ugacucagguacgagacag

SEQ ID NO: 893080 - RNA, 19 nt, Artificial Sequence
  Description of Artificial Sequence: Synthetic oligonucleotide
  Sense strand starting at position 1490 of SEQ ID NO: 588835
gagucagcuucccaggagu

SEQ ID NO: 893081 - RNA, 19 nt, Artificial Sequence
  Description of Artificial Sequence: Synthetic oligonucleotide
  Antisense strand to SEQ ID NO: 893080
acuccugggaagcugacuc

SEQ ID NO: 893082 - RNA, 19 nt, Artificial Sequence
  Description of Artificial Sequence: Synthetic oligonucleotide
  Sense strand starting at position 1492 of SEQ ID NO: 588835
gucagcuucccaggaguga

SEQ ID NO: 893083 - RNA, 19 nt, Artificial Sequence
  Description of Artificial Sequence: Synthetic oligonucleotide
  Antisense strand to SEQ ID NO: 893082
ucacuccugggaagcugac

SEQ ID NO: 893084 - RNA, 19 nt, Artificial Sequence
  Description of Artificial Sequence: Synthetic oligonucleotide
  Sense strand starting at position 1929 of SEQ ID NO: 588835
gagugcuuggcccagcaga

SEQ ID NO: 893085 - RNA, 19 nt, Artificial Sequence
  Description of Artificial Sequence: Synthetic oligonucleotide
  Antisense strand to SEQ ID NO: 893084
ucugcugggccaagcacuc

SEQ ID NO: 893086 - RNA, 19 nt, Artificial Sequence
  Description of Artificial Sequence: Synthetic oligonucleotide
  Sense strand starting at position 2212 of SEQ ID NO: 588835
cucauuuccucgucucuga

SEQ ID NO: 893087 - RNA, 19 nt, Artificial Sequence
  Description of Artificial Sequence: Synthetic oligonucleotide
  Antisense strand to SEQ ID NO: 893086
ucagagacgaggaaaugag

SEQ ID NO: 893088 - RNA, 19 nt, Artificial Sequence
  Description of Artificial Sequence: Synthetic oligonucleotide
  Sense strand starting at position 2216 of SEQ ID NO: 588835
uuuccucgucucugaaaca

SEQ ID NO: 893089 - RNA, 19 nt, Artificial Sequence
  Description of Artificial Sequence: Synthetic oligonucleotide
  Antisense strand to SEQ ID NO: 893088
uguuucagagacgaggaaa

SEQ ID NO: 893090 - RNA, 19 nt, Artificial Sequence
  Description of Artificial Sequence: Synthetic oligonucleotide
  Sense strand starting at position 2878 of SEQ ID NO: 588835
auggcagucuguuaauauu

SEQ ID NO: 893091 - RNA, 19 nt, Artificial Sequence
  Description of Artificial Sequence: Synthetic oligonucleotide
  Antisense strand to SEQ ID NO: 893090
aauauuaacagacugccau

SEQ ID NO: 893092 - RNA, 19 nt, Artificial Sequence
  Description of Artificial Sequence: Synthetic oligonucleotide
  Sense strand starting at position 2881 of SEQ ID NO: 588835
gcagucuguuaauauugua

SEQ ID NO: 893093 - RNA, 19 nt, Artificial Sequence
  Description of Artificial Sequence: Synthetic oligonucleotide
  Antisense strand to SEQ ID NO: 893092
uacaauauuaacagacugc

SEQ ID NO: 893094 - RNA, 19 nt, Artificial Sequence
  Description of Artificial Sequence: Synthetic oligonucleotide
  Sense strand starting at position 2884 of SEQ ID NO: 588835
gucuguuaauauuguaaug

SEQ ID NO: 893095 - RNA, 19 nt, Artificial Sequence
  Description of Artificial Sequence: Synthetic oligonucleotide
  Antisense strand to SEQ ID NO: 893094
cauuacaauauuaacagac

SEQ ID NO: 893096 - RNA, 19 nt, Artificial Sequence
  Description of Artificial Sequence: Synthetic oligonucleotide
  Sense strand starting at position 2920 of SEQ ID NO: 588835
cggaagcgaucguauagua

SEQ ID NO: 893097 - RNA, 19 nt, Artificial Sequence
  Description of Artificial Sequence: Synthetic oligonucleotide
  Antisense strand to SEQ ID NO: 893096
uacuauacgaucgcuuccg

SEQ ID NO: 893098 - RNA, 19 nt, Artificial Sequence
  Description of Artificial Sequence: Synthetic oligonucleotide
  Sense strand starting at position 2933 of SEQ ID NO: 588835
auaguaaacugcuguaauu

SEQ ID NO: 893099 - RNA, 19 nt, Artificial Sequence
  Description of Artificial Sequence: Synthetic oligonucleotide
  Antisense strand to SEQ ID NO: 893098
aauuacagcaguuuacuau

SEQ ID NO: 893100 - RNA, 19 nt, Artificial Sequence
  Description of Artificial Sequence: Synthetic oligonucleotide
  Sense strand starting at position 2935 of SEQ ID NO: 588835
aguaaacugcuguaauuaa

SEQ ID NO: 893101 - RNA, 19 nt, Artificial Sequence
  Description of Artificial Sequence: Synthetic oligonucleotide
  Antisense strand to SEQ ID NO: 893100
uuaauuacagcaguuuacu

SEQ ID NO: 893102 - RNA, 19 nt, Artificial Sequence
  Description of Artificial Sequence: Synthetic oligonucleotide
  Sense strand starting at position 2956 of SEQ ID NO: 588835
ccaaucaaaucauuguguu

SEQ ID NO: 893103 - RNA, 19 nt, Artificial Sequence
  Description of Artificial Sequence: Synthetic oligonucleotide
  Antisense strand to SEQ ID NO: 893102
aacacaaugauuugauugg

SEQ ID NO: 893104 - RNA, 19 nt, Artificial Sequence
  Description of Artificial Sequence: Synthetic oligonucleotide
  Sense strand starting at position 2959 of SEQ ID NO: 588835
aucaaaucauuguguucuu

SEQ ID NO: 893105 - RNA, 19 nt, Artificial Sequence
  Description of Artificial Sequence: Synthetic oligonucleotide
  Antisense strand to SEQ ID NO: 893104
aagaacacaaugauuugau

SEQ ID NO: 893106 - RNA, 19 nt, Artificial Sequence
  Description of Artificial Sequence: Synthetic oligonucleotide
  Sense strand starting at position 2960 of SEQ ID NO: 588835
ucaaaucauuguguucuua

SEQ ID NO: 893107 - RNA, 19 nt, Artificial Sequence
  Description of Artificial Sequence: Synthetic oligonucleotide
  Antisense strand to SEQ ID NO: 893106
uaagaacacaaugauuuga

SEQ ID NO: 893108 - RNA, 19 nt, Artificial Sequence
  Description of Artificial Sequence: Synthetic oligonucleotide
  Sense strand starting at position 3013 of SEQ ID NO: 588835
gcuugucuauccucuacau

SEQ ID NO: 893109 - RNA, 19 nt, Artificial Sequence
  Description of Artificial Sequence: Synthetic oligonucleotide
  Antisense strand to SEQ ID NO: 893108
auguagaggauagacaagc

SEQ ID NO: 893110 - RNA, 19 nt, Artificial Sequence
  Description of Artificial Sequence: Synthetic oligonucleotide
  Sense strand starting at position 3681 of SEQ ID NO: 588835
gccuguuagcugucuguua

SEQ ID NO: 893111 - RNA, 19 nt, Artificial Sequence
  Description of Artificial Sequence: Synthetic oligonucleotide
  Antisense strand to SEQ ID NO: 893110
uaacagacagcuaacaggc

SEQ ID NO: 893112 - RNA, 19 nt, Artificial Sequence
  Description of Artificial Sequence: Synthetic oligonucleotide
  Sense strand starting at position 3683 of SEQ ID NO: 588835
cuguuagcugucuguuagu

SEQ ID NO: 893113 - RNA, 19 nt, Artificial Sequence
  Description of Artificial Sequence: Synthetic oligonucleotide
  Antisense strand to SEQ ID NO: 893112
acuaacagacagcuaacag

SEQ ID NO: 893114 - RNA, 19 nt, Artificial Sequence
  Description of Artificial Sequence: Synthetic oligonucleotide
  Sense strand starting at position 3685 of SEQ ID NO: 588835
guuagcugucuguuaguau

SEQ ID NO: 893115 - RNA, 19 nt, Artificial Sequence
  Description of Artificial Sequence: Synthetic oligonucleotide
  Antisense strand to SEQ ID NO: 893114
auacuaacagacagcuaac

SEQ ID NO: 893116 - RNA, 19 nt, Artificial Sequence
  Description of Artificial Sequence: Synthetic oligonucleotide
  Sense strand starting at position 3686 of SEQ ID NO: 588835
uuagcugucuguuaguauc

SEQ ID NO: 893117 - RNA, 19 nt, Artificial Sequence
  Description of Artificial Sequence: Synthetic oligonucleotide
  Antisense strand to SEQ ID NO: 893116
gauacuaacagacagcuaa

SEQ ID NO: 893118 - RNA, 19 nt, Artificial Sequence
  Description of Artificial Sequence: Synthetic oligonucleotide
  Sense strand starting at position 3689 of SEQ ID NO: 588835
gcugucuguuaguaucgua

SEQ ID NO: 893119 - RNA, 19 nt, Artificial Sequence
  Description of Artificial Sequence: Synthetic oligonucleotide
  Antisense strand to SEQ ID NO: 893118
uacgauacuaacagacagc

SEQ ID NO: 893120 - RNA, 19 nt, Artificial Sequence
  Description of Artificial Sequence: Synthetic oligonucleotide
  Sense strand starting at position 3692 of SEQ ID NO: 588835
gucuguuaguaucguagga

SEQ ID NO: 893121 - RNA, 19 nt, Artificial Sequence
  Description of Artificial Sequence: Synthetic oligonucleotide
  Antisense strand to SEQ ID NO: 893120
uccuacgauacuaacagac

SEQ ID NO: 893122 - RNA, 19 nt, Artificial Sequence
  Description of Artificial Sequence: Synthetic oligonucleotide
  Sense strand starting at position 3694 of SEQ ID NO: 588835
cuguuaguaucguaggauu

SEQ ID NO: 893123 - RNA, 19 nt, Artificial Sequence
  Description of Artificial Sequence: Synthetic oligonucleotide
  Antisense strand to SEQ ID NO: 893122
aauccuacgauacuaacag

SEQ ID NO: 893124 - RNA, 19 nt, Artificial Sequence
  Description of Artificial Sequence: Synthetic oligonucleotide
  Sense strand starting at position 3939 of SEQ ID NO: 588835
acagaagccuuguaaauuu

SEQ ID NO: 893125 - RNA, 19 nt, Artificial Sequence
  Description of Artificial Sequence: Synthetic oligonucleotide
  Antisense strand to SEQ ID NO: 893124
aaauuuacaaggcuucugu

SEQ ID NO: 893126 - RNA, 19 nt, Artificial Sequence
  Description of Artificial Sequence: Synthetic oligonucleotide
  Sense strand starting at position 3975 of SEQ ID NO: 588835
ucaguccugcucuagauca

SEQ ID NO: 893127 - RNA, 19 nt, Artificial Sequence
  Description of Artificial Sequence: Synthetic oligonucleotide
  Antisense strand to SEQ ID NO: 893126
ugaucuagagcaggacuga

SEQ ID NO: 893128 - RNA, 19 nt, Artificial Sequence
  Description of Artificial Sequence: Synthetic oligonucleotide
  Sense strand starting at position 3977 of SEQ ID NO: 588835
aguccugcucuagaucaca

SEQ ID NO: 893129 - RNA, 19 nt, Artificial Sequence
  Description of Artificial Sequence: Synthetic oligonucleotide
  Antisense strand to SEQ ID NO: 893128
ugugaucuagagcaggacu

SEQ ID NO: 893130 - RNA, 19 nt, Artificial Sequence
  Description of Artificial Sequence: Synthetic oligonucleotide
  Sense strand starting at position 331 of SEQ ID NO: 588836
gagugcuuggcccagcaga

SEQ ID NO: 893131 - RNA, 19 nt, Artificial Sequence
  Description of Artificial Sequence: Synthetic oligonucleotide
  Antisense strand to SEQ ID NO: 893130
ucugcugggccaagcacuc

SEQ ID NO: 893132 - RNA, 19 nt, Artificial Sequence
  Description of Artificial Sequence: Synthetic oligonucleotide
  Sense strand starting at position 614 of SEQ ID NO: 588836
cucauuuccucgucucuga

SEQ ID NO: 893133 - RNA, 19 nt, Artificial Sequence
  Description of Artificial Sequence: Synthetic oligonucleotide
  Antisense strand to SEQ ID NO: 893132
ucagagacgaggaaaugag

SEQ ID NO: 893134 - RNA, 19 nt, Artificial Sequence
  Description of Artificial Sequence: Synthetic oligonucleotide
  Sense strand starting at position 618 of SEQ ID NO: 588836
uuuccucgucucugaaaca

SEQ ID NO: 893135 - RNA, 19 nt, Artificial Sequence
  Description of Artificial Sequence: Synthetic oligonucleotide
  Antisense strand to SEQ ID NO: 893134
uguuucagagacgaggaaa

SEQ ID NO: 893136 - RNA, 19 nt, Artificial Sequence
  Description of Artificial Sequence: Synthetic oligonucleotide
  Sense strand starting at position 1337 of SEQ ID NO: 588836
aguaaacugcuguaauuaa

SEQ ID NO: 893137 - RNA, 19 nt, Artificial Sequence
  Description of Artificial Sequence: Synthetic oligonucleotide
  Antisense strand to SEQ ID NO: 893136
uuaauuacagcaguuuacu

SEQ ID NO: 893138 - RNA, 19 nt, Artificial Sequence
  Description of Artificial Sequence: Synthetic oligonucleotide
  Sense strand starting at position 1358 of SEQ ID NO: 588836
ccaaucaaaucauuguguu

SEQ ID NO: 893139 - RNA, 19 nt, Artificial Sequence
  Description of Artificial Sequence: Synthetic oligonucleotide
  Antisense strand to SEQ ID NO: 893138
aacacaaugauuugauugg

SEQ ID NO: 893140 - RNA, 19 nt, Artificial Sequence
  Description of Artificial Sequence: Synthetic oligonucleotide
  Sense strand starting at position 1362 of SEQ ID NO: 588836
ucaaaucauuguguucuua

SEQ ID NO: 893141 - RNA, 19 nt, Artificial Sequence
  Description of Artificial Sequence: Synthetic oligonucleotide
  Antisense strand to SEQ ID NO: 893140
uaagaacacaaugauuuga

SEQ ID NO: 893142 - RNA, 19 nt, Artificial Sequence
  Description of Artificial Sequence: Synthetic oligonucleotide
  Sense strand starting at position 1415 of SEQ ID NO: 588836
gcuugucuauccucuacau

SEQ ID NO: 893143 - RNA, 19 nt, Artificial Sequence
  Description of Artificial Sequence: Synthetic oligonucleotide
  Antisense strand to SEQ ID NO: 893142
auguagaggauagacaagc

SEQ ID NO: 893144 - RNA, 19 nt, Artificial Sequence
  Description of Artificial Sequence: Synthetic oligonucleotide
  Sense strand starting at position 2083 of SEQ ID NO: 588836
gccuguuagcugucuguua

SEQ ID NO: 893145 - RNA, 19 nt, Artificial Sequence
  Description of Artificial Sequence: Synthetic oligonucleotide
  Antisense strand to SEQ ID NO: 893144
uaacagacagcuaacaggc

SEQ ID NO: 893146 - RNA, 19 nt, Artificial Sequence
  Description of Artificial Sequence: Synthetic oligonucleotide
  Sense strand starting at position 2085 of SEQ ID NO: 588836
cuguuagcugucuguuagu

SEQ ID NO: 893147 - RNA, 19 nt, Artificial Sequence
  Description of Artificial Sequence: Synthetic oligonucleotide
  Antisense strand to SEQ ID NO: 893146
acuaacagacagcuaacag

SEQ ID NO: 893148 - RNA, 19 nt, Artificial Sequence
  Description of Artificial Sequence: Synthetic oligonucleotide
  Sense strand starting at position 2087 of SEQ ID NO: 588836
guuagcugucuguuaguau

SEQ ID NO: 893149 - RNA, 19 nt, Artificial Sequence
  Description of Artificial Sequence: Synthetic oligonucleotide
  Antisense strand to SEQ ID NO: 893148
auacuaacagacagcuaac

SEQ ID NO: 893150 - RNA, 19 nt, Artificial Sequence
  Description of Artificial Sequence: Synthetic oligonucleotide
  Sense strand starting at position 2341 of SEQ ID NO: 588836
acagaagccuuguaaauuu

SEQ ID NO: 893151 - RNA, 19 nt, Artificial Sequence
  Description of Artificial Sequence: Synthetic oligonucleotide
  Antisense strand to SEQ ID NO: 893150
aaauuuacaaggcuucugu

SEQ ID NO: 893152 - RNA, 19 nt, Artificial Sequence
  Description of Artificial Sequence: Synthetic oligonucleotide
  Sense strand starting at position 2377 of SEQ ID NO: 588836
ucaguccugcucuagauca

SEQ ID NO: 893153 - RNA, 19 nt, Artificial Sequence
  Description of Artificial Sequence: Synthetic oligonucleotide
  Antisense strand to SEQ ID NO: 893152
ugaucuagagcaggacuga

SEQ ID NO: 893154 - RNA, 19 nt, Artificial Sequence
  Description of Artificial Sequence: Synthetic oligonucleotide
  Sense strand starting at position 2379 of SEQ ID NO: 588836
aguccugcucuagaucaca

SEQ ID NO: 893155 - RNA, 19 nt, Artificial Sequence
  Description of Artificial Sequence: Synthetic oligonucleotide
  Antisense strand to SEQ ID NO: 893154
ugugaucuagagcaggacu

SEQ ID NO: 893156 - RNA, 19 nt, Artificial Sequence
  Description of Artificial Sequence: Synthetic oligonucleotide
  Sense strand starting at position 2450 of SEQ ID NO: 588836
acuugaucacggugcauga

SEQ ID NO: 893157 - RNA, 19 nt, Artificial Sequence
  Description of Artificial Sequence: Synthetic oligonucleotide
  Antisense strand to SEQ ID NO: 893156
ucaugcaccgugaucaagu

SEQ ID NO: 893158 - RNA, 19 nt, Artificial Sequence
  Description of Artificial Sequence: Synthetic oligonucleotide
  Sense strand starting at position 2793 of SEQ ID NO: 588836
cccagcugguuugcuaaua

SEQ ID NO: 893159 - RNA, 19 nt, Artificial Sequence
  Description of Artificial Sequence: Synthetic oligonucleotide
  Antisense strand to SEQ ID NO: 893158
uauuagcaaaccagcuggg

SEQ ID NO: 893160 - RNA, 19 nt, Artificial Sequence
  Description of Artificial Sequence: Synthetic oligonucleotide
  Sense strand starting at position 2794 of SEQ ID NO: 588836
ccagcugguuugcuaauau

SEQ ID NO: 893161 - RNA, 19 nt, Artificial Sequence
  Description of Artificial Sequence: Synthetic oligonucleotide
  Antisense strand to SEQ ID NO: 893160
auauuagcaaaccagcugg

SEQ ID NO: 893162 - RNA, 19 nt, Artificial Sequence
  Description of Artificial Sequence: Synthetic oligonucleotide
  Sense strand starting at position 2817 of SEQ ID NO: 588836
agaggauuguugcaucuau

SEQ ID NO: 893163 - RNA, 19 nt, Artificial Sequence
  Description of Artificial Sequence: Synthetic oligonucleotide
  Antisense strand to SEQ ID NO: 893162
auagaugcaacaauccucu

SEQ ID NO: 893164 - RNA, 19 nt, Artificial Sequence
  Description of Artificial Sequence: Synthetic oligonucleotide
  Sense strand starting at position 2844 of SEQ ID NO: 588836
aggauaucggucuauaauu

SEQ ID NO: 893165 - RNA, 19 nt, Artificial Sequence
  Description of Artificial Sequence: Synthetic oligonucleotide
  Antisense strand to SEQ ID NO: 893164
aauuauagaccgauauccu

SEQ ID NO: 893166 - RNA, 19 nt, Artificial Sequence
  Description of Artificial Sequence: Synthetic oligonucleotide
  Sense strand starting at position 2870 of SEQ ID NO: 588836
uuguaauguuaucuggcuu

SEQ ID NO: 893167 - RNA, 19 nt, Artificial Sequence
  Description of Artificial Sequence: Synthetic oligonucleotide
  Antisense strand to SEQ ID NO: 893166
aagccagauaacauuacaa

SEQ ID NO: 893168 - RNA, 19 nt, Artificial Sequence
  Description of Artificial Sequence: Synthetic oligonucleotide
  Sense strand starting at position 2874 of SEQ ID NO: 588836
aauguuaucuggcuuuggu

SEQ ID NO: 893169 - RNA, 19 nt, Artificial Sequence
  Description of Artificial Sequence: Synthetic oligonucleotide
  Antisense strand to SEQ ID NO: 893168
accaaagccagauaacauu

SEQ ID NO: 893170 - RNA, 19 nt, Artificial Sequence
  Description of Artificial Sequence: Synthetic oligonucleotide
  Sense strand starting at position 2897 of SEQ ID NO: 588836
ggguaaugcuggucucgua

SEQ ID NO: 893171 - RNA, 19 nt, Artificial Sequence
  Description of Artificial Sequence: Synthetic oligonucleotide
  Antisense strand to SEQ ID NO: 893170
uacgagaccagcauuaccc

SEQ ID NO: 893172 - RNA, 19 nt, Artificial Sequence
  Description of Artificial Sequence: Synthetic oligonucleotide
  Sense strand starting at position 2919 of SEQ ID NO: 588836
ugaguaugacucuauguuu

SEQ ID NO: 893173 - RNA, 19 nt, Artificial Sequence
  Description of Artificial Sequence: Synthetic oligonucleotide
  Antisense strand to SEQ ID NO: 893172
aaacauagagucauacuca

SEQ ID NO: 893174 - RNA, 19 nt, Artificial Sequence
  Description of Artificial Sequence: Synthetic oligonucleotide
  Sense strand starting at position 2922 of SEQ ID NO: 588836
guaugacucuauguuuagu

SEQ ID NO: 893175 - RNA, 19 nt, Artificial Sequence
  Description of Artificial Sequence: Synthetic oligonucleotide
  Antisense strand to SEQ ID NO: 893174
acuaaacauagagucauac

SEQ ID NO: 893176 - RNA, 19 nt, Artificial Sequence
  Description of Artificial Sequence: Synthetic oligonucleotide
  Sense strand starting at position 2935 of SEQ ID NO: 588836
uuuagugcacucugaagaa

SEQ ID NO: 893177 - RNA, 19 nt, Artificial Sequence
  Description of Artificial Sequence: Synthetic oligonucleotide
  Antisense strand to SEQ ID NO: 893176
uucuucagagugcacuaaa

SEQ ID NO: 893178 - RNA, 19 nt, Artificial Sequence
  Description of Artificial Sequence: Synthetic oligonucleotide
  Sense strand starting at position 3082 of SEQ ID NO: 588836
cccucauggccuggacaua

SEQ ID NO: 893179 - RNA, 19 nt, Artificial Sequence
  Description of Artificial Sequence: Synthetic oligonucleotide
  Antisense strand to SEQ ID NO: 893178
uauguccaggccaugaggg

SEQ ID NO: 893180 - RNA, 19 nt, Artificial Sequence
  Description of Artificial Sequence: Synthetic oligonucleotide
  Sense strand starting at position 3234 of SEQ ID NO: 588836
gcagaaguccagggaggaa

SEQ ID NO: 893181 - RNA, 19 nt, Artificial Sequence
  Description of Artificial Sequence: Synthetic oligonucleotide
  Antisense strand to SEQ ID NO: 893180
uuccucccuggacuucugc

SEQ ID NO: 893182 - RNA, 19 nt, Artificial Sequence
  Description of Artificial Sequence: Synthetic oligonucleotide
  Sense strand starting at position 3296 of SEQ ID NO: 588836
cgugcagcccugugaaaga

SEQ ID NO: 893183 - RNA, 19 nt, Artificial Sequence
  Description of Artificial Sequence: Synthetic oligonucleotide
  Antisense strand to SEQ ID NO: 893182
ucuuucacagggcugcacg

SEQ ID NO: 893184 - RNA, 19 nt, Artificial Sequence
  Description of Artificial Sequence: Synthetic oligonucleotide
  Sense strand starting at position 3437 of SEQ ID NO: 588836
ucacacgugucaucucaaa

SEQ ID NO: 893185 - RNA, 19 nt, Artificial Sequence
  Description of Artificial Sequence: Synthetic oligonucleotide
  Antisense strand to SEQ ID NO: 893184
uuugagaugacacguguga

SEQ ID NO: 893186 - RNA, 19 nt, Artificial Sequence
  Description of Artificial Sequence: Synthetic oligonucleotide
  Sense strand starting at position 3520 of SEQ ID NO: 588836
gugccagacccaggugauu

SEQ ID NO: 893187 - RNA, 19 nt, Artificial Sequence
  Description of Artificial Sequence: Synthetic oligonucleotide
  Antisense strand to SEQ ID NO: 893186
aaucaccugggucuggcac

SEQ ID NO: 893188 - RNA, 19 nt, Artificial Sequence
  Description of Artificial Sequence: Synthetic oligonucleotide
  Sense strand starting at position 3673 of SEQ ID NO: 588836
ucuauccucugucaaagua

SEQ ID NO: 893189 - RNA, 19 nt, Artificial Sequence
  Description of Artificial Sequence: Synthetic oligonucleotide
  Antisense strand to SEQ ID NO: 893188
uacuuugacagaggauaga

SEQ ID NO: 893190 - RNA, 19 nt, Artificial Sequence
  Description of Artificial Sequence: Synthetic oligonucleotide
  Sense strand starting at position 3782 of SEQ ID NO: 588836
gaaauugcuccaggccuga

SEQ ID NO: 893191 - RNA, 19 nt, Artificial Sequence
  Description of Artificial Sequence: Synthetic oligonucleotide
  Antisense strand to SEQ ID NO: 893190
ucaggccuggagcaauuuc

SEQ ID NO: 893192 - RNA, 19 nt, Artificial Sequence
  Description of Artificial Sequence: Synthetic oligonucleotide
  Sense strand starting at position 3814 of SEQ ID NO: 588836
caggcauucccaggaauga

SEQ ID NO: 893193 - RNA, 19 nt, Artificial Sequence
  Description of Artificial Sequence: Synthetic oligonucleotide
  Antisense strand to SEQ ID NO: 893192
ucauuccugggaaugccug

SEQ ID NO: 893194 - RNA, 19 nt, Artificial Sequence
  Description of Artificial Sequence: Synthetic oligonucleotide
  Sense strand starting at position 3823 of SEQ ID NO: 588836
ccaggaaugagcugcugaa

SEQ ID NO: 893195 - RNA, 19 nt, Artificial Sequence
  Description of Artificial Sequence: Synthetic oligonucleotide
  Antisense strand to SEQ ID NO: 893194
uucagcagcucauuccugg

SEQ ID NO: 893196 - RNA, 19 nt, Artificial Sequence
  Description of Artificial Sequence: Synthetic oligonucleotide
  Sense strand starting at position 3827 of SEQ ID NO: 588836
gaaugagcugcugaaguga

SEQ ID NO: 893197 - RNA, 19 nt, Artificial Sequence
  Description of Artificial Sequence: Synthetic oligonucleotide
  Antisense strand to SEQ ID NO: 893196
ucacuucagcagcucauuc

SEQ ID NO: 893198 - RNA, 19 nt, Artificial Sequence
  Description of Artificial Sequence: Synthetic oligonucleotide
  Sense strand starting at position 3946 of SEQ ID NO: 588836
ccuaacacuguuugugagu

SEQ ID NO: 893199 - RNA, 19 nt, Artificial Sequence
  Description of Artificial Sequence: Synthetic oligonucleotide
  Antisense strand to SEQ ID NO: 893198
acucacaaacaguguuagg

SEQ ID NO: 893200 - RNA, 19 nt, Artificial Sequence
  Description of Artificial Sequence: Synthetic oligonucleotide
  Sense strand starting at position 3949 of SEQ ID NO: 588836
aacacuguuugugagugaa

SEQ ID NO: 893201 - RNA, 19 nt, Artificial Sequence
  Description of Artificial Sequence: Synthetic oligonucleotide
  Antisense strand to SEQ ID NO: 893200
uucacucacaaacaguguu

SEQ ID NO: 893202 - RNA, 19 nt, Artificial Sequence
  Description of Artificial Sequence: Synthetic oligonucleotide
  Sense strand starting at position 3951 of SEQ ID NO: 588836
cacuguuugugagugaaag

SEQ ID NO: 893203 - RNA, 19 nt, Artificial Sequence
  Description of Artificial Sequence: Synthetic oligonucleotide
  Antisense strand to SEQ ID NO: 893202
cuuucacucacaaacagug

SEQ ID NO: 893204 - RNA, 19 nt, Artificial Sequence
  Description of Artificial Sequence: Synthetic oligonucleotide
  Sense strand starting at position 3952 of SEQ ID NO: 588836
acuguuugugagugaaaga

SEQ ID NO: 893205 - RNA, 19 nt, Artificial Sequence
  Description of Artificial Sequence: Synthetic oligonucleotide
  Antisense strand to SEQ ID NO: 893204
ucuuucacucacaaacagu

SEQ ID NO: 893206 - RNA, 19 nt, Artificial Sequence
  Description of Artificial Sequence: Synthetic oligonucleotide
  Sense strand starting at position 3953 of SEQ ID NO: 588836
cuguuugugagugaaagaa

SEQ ID NO: 893207 - RNA, 19 nt, Artificial Sequence
  Description of Artificial Sequence: Synthetic oligonucleotide
  Antisense strand to SEQ ID NO: 893206
uucuuucacucacaaacag

SEQ ID NO: 893208 - RNA, 19 nt, Artificial Sequence
  Description of Artificial Sequence: Synthetic oligonucleotide
  Sense strand starting at position 3980 of SEQ ID NO: 588836
gauggaauccgcgguggaa

SEQ ID NO: 893209 - RNA, 19 nt, Artificial Sequence
  Description of Artificial Sequence: Synthetic oligonucleotide
  Antisense strand to SEQ ID NO: 893208
uuccaccgcggauuccauc

SEQ ID NO: 893210 - RNA, 19 nt, Artificial Sequence
  Description of Artificial Sequence: Synthetic oligonucleotide
  Sense strand starting at position 59 of SEQ ID NO: 588837
cacaguguccaacgacaaa

SEQ ID NO: 893211 - RNA, 19 nt, Artificial Sequence
  Description of Artificial Sequence: Synthetic oligonucleotide
  Antisense strand to SEQ ID NO: 893210
uuugucguuggacacugug

SEQ ID NO: 893212 - RNA, 19 nt, Artificial Sequence
  Description of Artificial Sequence: Synthetic oligonucleotide
  Sense strand starting at position 110 of SEQ ID NO: 588837
gcauauuuauuagcagcau

SEQ ID NO: 893213 - RNA, 19 nt, Artificial Sequence
  Description of Artificial Sequence: Synthetic oligonucleotide
  Antisense strand to SEQ ID NO: 893212
augcugcuaauaaauaugc

SEQ ID NO: 893214 - RNA, 19 nt, Artificial Sequence
  Description of Artificial Sequence: Synthetic oligonucleotide
  Sense strand starting at position 124 of SEQ ID NO: 588837
agcauuaugguauaacagu

SEQ ID NO: 893215 - RNA, 19 nt, Artificial Sequence
  Description of Artificial Sequence: Synthetic oligonucleotide
  Antisense strand to SEQ ID NO: 893214
acuguuauaccauaaugcu

SEQ ID NO: 893216 - RNA, 19 nt, Artificial Sequence
  Description of Artificial Sequence: Synthetic oligonucleotide
  Sense strand starting at position 160 of SEQ ID NO: 588837
gagucagacugucuggauu

SEQ ID NO: 893217 - RNA, 19 nt, Artificial Sequence
  Description of Artificial Sequence: Synthetic oligonucleotide
  Antisense strand to SEQ ID NO: 893216
aauccagacagucugacuc

SEQ ID NO: 893218 - RNA, 19 nt, Artificial Sequence
  Description of Artificial Sequence: Synthetic oligonucleotide
  Sense strand starting at position 219 of SEQ ID NO: 588837
guaaauauuuggccucucu

SEQ ID NO: 893219 - RNA, 19 nt, Artificial Sequence
  Description of Artificial Sequence: Synthetic oligonucleotide
  Antisense strand to SEQ ID NO: 893218
agagaggccaaauauuuac

SEQ ID NO: 893220 - RNA, 19 nt, Artificial Sequence
  Description of Artificial Sequence: Synthetic oligonucleotide
  Sense strand starting at position 318 of SEQ ID NO: 588837
cauagagcauucguacaca

SEQ ID NO: 893221 - RNA, 19 nt, Artificial Sequence
  Description of Artificial Sequence: Synthetic oligonucleotide
  Antisense strand to SEQ ID NO: 893220
uguguacgaaugcucuaug

SEQ ID NO: 893222 - RNA, 19 nt, Artificial Sequence
  Description of Artificial Sequence: Synthetic oligonucleotide
  Sense strand starting at position 321 of SEQ ID NO: 588837
agagcauucguacacagua

SEQ ID NO: 893223 - RNA, 19 nt, Artificial Sequence
  Description of Artificial Sequence: Synthetic oligonucleotide
  Antisense strand to SEQ ID NO: 893222
uacuguguacgaaugcucu

SEQ ID NO: 893224 - RNA, 19 nt, Artificial Sequence
  Description of Artificial Sequence: Synthetic oligonucleotide
  Sense strand starting at position 773 of SEQ ID NO: 588837
augaaauuauggcuaaggu

SEQ ID NO: 893225 - RNA, 19 nt, Artificial Sequence
  Description of Artificial Sequence: Synthetic oligonucleotide
  Antisense strand to SEQ ID NO: 893224
accuuagccauaauuucau

SEQ ID NO: 893226 - RNA, 19 nt, Artificial Sequence
  Description of Artificial Sequence: Synthetic oligonucleotide
  Sense strand starting at position 774 of SEQ ID NO: 588837
ugaaauuauggcuaagguu

SEQ ID NO: 893227 - RNA, 19 nt, Artificial Sequence
  Description of Artificial Sequence: Synthetic oligonucleotide
  Antisense strand to SEQ ID NO: 893226
aaccuuagccauaauuuca

SEQ ID NO: 893228 - RNA, 19 nt, Artificial Sequence
  Description of Artificial Sequence: Synthetic oligonucleotide
  Sense strand starting at position 1291 of SEQ ID NO: 588837
cuagcauuccugggacuca

SEQ ID NO: 893229 - RNA, 19 nt, Artificial Sequence
  Description of Artificial Sequence: Synthetic oligonucleotide
  Antisense strand to SEQ ID NO: 893228
ugagucccaggaaugcuag

SEQ ID NO: 893230 - RNA, 19 nt, Artificial Sequence
  Description of Artificial Sequence: Synthetic oligonucleotide
  Sense strand starting at position 2065 of SEQ ID NO: 588837
ggaaaucugucagucgauu

SEQ ID NO: 893231 - RNA, 19 nt, Artificial Sequence
  Description of Artificial Sequence: Synthetic oligonucleotide
  Antisense strand to SEQ ID NO: 893230
aaucgacugacagauuucc

SEQ ID NO: 893232 - RNA, 19 nt, Artificial Sequence
  Description of Artificial Sequence: Synthetic oligonucleotide
  Sense strand starting at position 2117 of SEQ ID NO: 588837
cccagagguuugguugaga

SEQ ID NO: 893233 - RNA, 19 nt, Artificial Sequence
  Description of Artificial Sequence: Synthetic oligonucleotide
  Antisense strand to SEQ ID NO: 893232
ucucaaccaaaccucuggg

SEQ ID NO: 893234 - RNA, 19 nt, Artificial Sequence
  Description of Artificial Sequence: Synthetic oligonucleotide
  Sense strand starting at position 2348 of SEQ ID NO: 588837
uuucuucuagcaggugaga

SEQ ID NO: 893235 - RNA, 19 nt, Artificial Sequence
  Description of Artificial Sequence: Synthetic oligonucleotide
  Antisense strand to SEQ ID NO: 893234
ucucaccugcuagaagaaa

SEQ ID NO: 893236 - RNA, 19 nt, Artificial Sequence
  Description of Artificial Sequence: Synthetic oligonucleotide
  Sense strand starting at position 2350 of SEQ ID NO: 588837
ucuucuagcaggugagaca

SEQ ID NO: 893237 - RNA, 19 nt, Artificial Sequence
  Description of Artificial Sequence: Synthetic oligonucleotide
  Antisense strand to SEQ ID NO: 893236
ugucucaccugcuagaaga

SEQ ID NO: 893238 - RNA, 19 nt, Artificial Sequence
  Description of Artificial Sequence: Synthetic oligonucleotide
  Sense strand starting at position 2428 of SEQ ID NO: 588837
cuacaucuugcugaaauug

SEQ ID NO: 893239 - RNA, 19 nt, Artificial Sequence
  Description of Artificial Sequence: Synthetic oligonucleotide
  Antisense strand to SEQ ID NO: 893238
caauuucagcaagauguag

SEQ ID NO: 893240 - RNA, 19 nt, Artificial Sequence
  Description of Artificial Sequence: Synthetic oligonucleotide
  Sense strand starting at position 2509 of SEQ ID NO: 588837
aauaaagcaugguuuggau

SEQ ID NO: 893241 - RNA, 19 nt, Artificial Sequence
  Description of Artificial Sequence: Synthetic oligonucleotide
  Antisense strand to SEQ ID NO: 893240
auccaaaccaugcuuuauu

SEQ ID NO: 893242 - RNA, 19 nt, Artificial Sequence
  Description of Artificial Sequence: Synthetic oligonucleotide
  Sense strand starting at position 2527 of SEQ ID NO: 588837
ugcucaauccucugcagaa

SEQ ID NO: 893243 - RNA, 19 nt, Artificial Sequence
  Description of Artificial Sequence: Synthetic oligonucleotide
  Antisense strand to SEQ ID NO: 893242
uucugcagaggauugagca

SEQ ID NO: 893244 - RNA, 19 nt, Artificial Sequence
  Description of Artificial Sequence: Synthetic oligonucleotide
  Sense strand starting at position 2528 of SEQ ID NO: 588837
gcucaauccucugcagaaa

SEQ ID NO: 893245 - RNA, 19 nt, Artificial Sequence
  Description of Artificial Sequence: Synthetic oligonucleotide
  Antisense strand to SEQ ID NO: 893244
uuucugcagaggauugagc

SEQ ID NO: 893246 - RNA, 19 nt, Artificial Sequence
  Description of Artificial Sequence: Synthetic oligonucleotide
  Sense strand starting at position 2646 of SEQ ID NO: 588837
aaagcaacguguuccauuu

SEQ ID NO: 893247 - RNA, 19 nt, Artificial Sequence
  Description of Artificial Sequence: Synthetic oligonucleotide
  Antisense strand to SEQ ID NO: 893246
aaauggaacacguugcuuu

SEQ ID NO: 893248 - RNA, 19 nt, Artificial Sequence
  Description of Artificial Sequence: Synthetic oligonucleotide
  Sense strand starting at position 2663 of SEQ ID NO: 588837
uuugaaaggccuggacaaa

SEQ ID NO: 893249 - RNA, 19 nt, Artificial Sequence
  Description of Artificial Sequence: Synthetic oligonucleotide
  Antisense strand to SEQ ID NO: 893248
uuuguccaggccuuucaaa

SEQ ID NO: 893250 - RNA, 19 nt, Artificial Sequence
  Description of Artificial Sequence: Synthetic oligonucleotide
  Sense strand starting at position 2703 of SEQ ID NO: 588837
gaccauccugauuguguga

SEQ ID NO: 893251 - RNA, 19 nt, Artificial Sequence
  Description of Artificial Sequence: Synthetic oligonucleotide
  Antisense strand to SEQ ID NO: 893250
ucacacaaucaggaugguc

SEQ ID NO: 893252 - RNA, 19 nt, Artificial Sequence
  Description of Artificial Sequence: Synthetic oligonucleotide
  Sense strand starting at position 2858 of SEQ ID NO: 588837
gacucagcucauuaacgua

SEQ ID NO: 893253 - RNA, 19 nt, Artificial Sequence
  Description of Artificial Sequence: Synthetic oligonucleotide
  Antisense strand to SEQ ID NO: 893252
uacguuaaugagcugaguc

SEQ ID NO: 893254 - RNA, 19 nt, Artificial Sequence
  Description of Artificial Sequence: Synthetic oligonucleotide
  Sense strand starting at position 2914 of SEQ ID NO: 588837
cucuacuccugugugaacu

SEQ ID NO: 893255 - RNA, 19 nt, Artificial Sequence
  Description of Artificial Sequence: Synthetic oligonucleotide
  Antisense strand to SEQ ID NO: 893254
aguucacacaggaguagag

SEQ ID NO: 893256 - RNA, 19 nt, Artificial Sequence
  Description of Artificial Sequence: Synthetic oligonucleotide
  Sense strand starting at position 2925 of SEQ ID NO: 588837
ugugaacuuguuugguaua

SEQ ID NO: 893257 - RNA, 19 nt, Artificial Sequence
  Description of Artificial Sequence: Synthetic oligonucleotide
  Antisense strand to SEQ ID NO: 893256
uauaccaaacaaguucaca

SEQ ID NO: 893258 - RNA, 19 nt, Artificial Sequence
  Description of Artificial Sequence: Synthetic oligonucleotide
  Sense strand starting at position 2927 of SEQ ID NO: 588837
ugaacuuguuugguauauu

SEQ ID NO: 893259 - RNA, 19 nt, Artificial Sequence
  Description of Artificial Sequence: Synthetic oligonucleotide
  Antisense strand to SEQ ID NO: 893258
aauauaccaaacaaguuca

SEQ ID NO: 893260 - RNA, 19 nt, Artificial Sequence
  Description of Artificial Sequence: Synthetic oligonucleotide
  Sense strand starting at position 2935 of SEQ ID NO: 588837
uuugguauauucucagcau

SEQ ID NO: 893261 - RNA, 19 nt, Artificial Sequence
  Description of Artificial Sequence: Synthetic oligonucleotide
  Antisense strand to SEQ ID NO: 893260
augcugagaauauaccaaa

SEQ ID NO: 893262 - RNA, 19 nt, Artificial Sequence
  Description of Artificial Sequence: Synthetic oligonucleotide
  Sense strand starting at position 2938 of SEQ ID NO: 588837
gguauauucucagcaucug

SEQ ID NO: 893263 - RNA, 19 nt, Artificial Sequence
  Description of Artificial Sequence: Synthetic oligonucleotide
  Antisense strand to SEQ ID NO: 893262
cagaugcugagaauauacc

SEQ ID NO: 893264 - RNA, 19 nt, Artificial Sequence
  Description of Artificial Sequence: Synthetic oligonucleotide
  Sense strand starting at position 2939 of SEQ ID NO: 588837
guauauucucagcaucugu

SEQ ID NO: 893265 - RNA, 19 nt, Artificial Sequence
  Description of Artificial Sequence: Synthetic oligonucleotide
  Antisense strand to SEQ ID NO: 893264
acagaugcugagaauauac

SEQ ID NO: 893266 - RNA, 19 nt, Artificial Sequence
  Description of Artificial Sequence: Synthetic oligonucleotide
  Sense strand starting at position 3217 of SEQ ID NO: 588837
ugaaguaauacugacggua

SEQ ID NO: 893267 - RNA, 19 nt, Artificial Sequence
  Description of Artificial Sequence: Synthetic oligonucleotide
  Antisense strand to SEQ ID NO: 893266
uaccgucaguauuacuuca

SEQ ID NO: 893268 - RNA, 19 nt, Artificial Sequence
  Description of Artificial Sequence: Synthetic oligonucleotide
  Sense strand starting at position 3220 of SEQ ID NO: 588837
aguaauacugacgguaaau

SEQ ID NO: 893269 - RNA, 19 nt, Artificial Sequence
  Description of Artificial Sequence: Synthetic oligonucleotide
  Antisense strand to SEQ ID NO: 893268
auuuaccgucaguauuacu

SEQ ID NO: 893270 - RNA, 19 nt, Artificial Sequence
  Description of Artificial Sequence: Synthetic oligonucleotide
  Sense strand starting at position 3399 of SEQ ID NO: 588837
gagaauaauuugugucaga

SEQ ID NO: 893271 - RNA, 19 nt, Artificial Sequence
  Description of Artificial Sequence: Synthetic oligonucleotide
  Antisense strand to SEQ ID NO: 893270
ucugacacaaauuauucuc

SEQ ID NO: 893272 - RNA, 19 nt, Artificial Sequence
  Description of Artificial Sequence: Synthetic oligonucleotide
  Sense strand starting at position 3402 of SEQ ID NO: 588837
aauaauuugugucagacga

SEQ ID NO: 893273 - RNA, 19 nt, Artificial Sequence
  Description of Artificial Sequence: Synthetic oligonucleotide
  Antisense strand to SEQ ID NO: 893272
ucgucugacacaaauuauu

SEQ ID NO: 893274 - RNA, 19 nt, Artificial Sequence
  Description of Artificial Sequence: Synthetic oligonucleotide
  Sense strand starting at position 3404 of SEQ ID NO: 588837
uaauuugugucagacgaag

SEQ ID NO: 893275 - RNA, 19 nt, Artificial Sequence
  Description of Artificial Sequence: Synthetic oligonucleotide
  Antisense strand to SEQ ID NO: 893274
cuucgucugacacaaauua

SEQ ID NO: 893276 - RNA, 19 nt, Artificial Sequence
  Description of Artificial Sequence: Synthetic oligonucleotide
  Sense strand starting at position 3608 of SEQ ID NO: 588837
ucacauuguguccaaguga

SEQ ID NO: 893277 - RNA, 19 nt, Artificial Sequence
  Description of Artificial Sequence: Synthetic oligonucleotide
  Antisense strand to SEQ ID NO: 893276
ucacuuggacacaauguga

SEQ ID NO: 893278 - RNA, 19 nt, Artificial Sequence
  Description of Artificial Sequence: Synthetic oligonucleotide
  Sense strand starting at position 3619 of SEQ ID NO: 588837
ccaagugaucucugcuuau

SEQ ID NO: 893279 - RNA, 19 nt, Artificial Sequence
  Description of Artificial Sequence: Synthetic oligonucleotide
  Antisense strand to SEQ ID NO: 893278
auaagcagagaucacuugg

SEQ ID NO: 893280 - RNA, 19 nt, Artificial Sequence
  Description of Artificial Sequence: Synthetic oligonucleotide
  Sense strand starting at position 3735 of SEQ ID NO: 588837
uuuccuuguccagaugugu

SEQ ID NO: 893281 - RNA, 19 nt, Artificial Sequence
  Description of Artificial Sequence: Synthetic oligonucleotide
  Antisense strand to SEQ ID NO: 893280
acacaucuggacaaggaaa

SEQ ID NO: 893282 - RNA, 19 nt, Artificial Sequence
  Description of Artificial Sequence: Synthetic oligonucleotide
  Sense strand starting at position 3784 of SEQ ID NO: 588837
auuauacauugccuuggau

SEQ ID NO: 893283 - RNA, 19 nt, Artificial Sequence
  Description of Artificial Sequence: Synthetic oligonucleotide
  Antisense strand to SEQ ID NO: 893282
auccaaggcaauguauaau

SEQ ID NO: 893284 - RNA, 19 nt, Artificial Sequence
  Description of Artificial Sequence: Synthetic oligonucleotide
  Sense strand starting at position 3787 of SEQ ID NO: 588837
auacauugccuuggauuau

SEQ ID NO: 893285 - RNA, 19 nt, Artificial Sequence
  Description of Artificial Sequence: Synthetic oligonucleotide
  Antisense strand to SEQ ID NO: 893284
auaauccaaggcaauguau

SEQ ID NO: 893286 - RNA, 19 nt, Artificial Sequence
  Description of Artificial Sequence: Synthetic oligonucleotide
  Sense strand starting at position 3839 of SEQ ID NO: 588837
cuaugaguaugagcccuua

SEQ ID NO: 893287 - RNA, 19 nt, Artificial Sequence
  Description of Artificial Sequence: Synthetic oligonucleotide
  Antisense strand to SEQ ID NO: 893286
uaagggcucauacucauag

SEQ ID NO: 893288 - RNA, 19 nt, Artificial Sequence
  Description of Artificial Sequence: Synthetic oligonucleotide
  Sense strand starting at position 3914 of SEQ ID NO: 588837
ugagauuaacccugccuga

SEQ ID NO: 893289 - RNA, 19 nt, Artificial Sequence
  Description of Artificial Sequence: Synthetic oligonucleotide
  Antisense strand to SEQ ID NO: 893288
ucaggcaggguuaaucuca

SEQ ID NO: 893290 - RNA, 19 nt, Artificial Sequence
  Description of Artificial Sequence: Synthetic oligonucleotide
  Sense strand starting at position 48 of SEQ ID NO: 588838
cgacuuuccuaccuaggua

SEQ ID NO: 893291 - RNA, 19 nt, Artificial Sequence
  Description of Artificial Sequence: Synthetic oligonucleotide
  Antisense strand to SEQ ID NO: 893290
uaccuagguaggaaagucg

SEQ ID NO: 893292 - RNA, 19 nt, Artificial Sequence
  Description of Artificial Sequence: Synthetic oligonucleotide
  Sense strand starting at position 233 of SEQ ID NO: 588838
gcugcuacucuaggaucaa

SEQ ID NO: 893293 - RNA, 19 nt, Artificial Sequence
  Description of Artificial Sequence: Synthetic oligonucleotide
  Antisense strand to SEQ ID NO: 893292
uugauccuagaguagcagc

SEQ ID NO: 893294 - RNA, 19 nt, Artificial Sequence
  Description of Artificial Sequence: Synthetic oligonucleotide
  Sense strand starting at position 497 of SEQ ID NO: 588838
gcaggaagucuuuaugacc

SEQ ID NO: 893295 - RNA, 19 nt, Artificial Sequence
  Description of Artificial Sequence: Synthetic oligonucleotide
  Antisense strand to SEQ ID NO: 893294
ggucauaaagacuuccugc

SEQ ID NO: 893296 - RNA, 19 nt, Artificial Sequence
  Description of Artificial Sequence: Synthetic oligonucleotide
  Sense strand starting at position 562 of SEQ ID NO: 588838
guucucacagucuagagaa

SEQ ID NO: 893297 - RNA, 19 nt, Artificial Sequence
  Description of Artificial Sequence: Synthetic oligonucleotide
  Antisense strand to SEQ ID NO: 893296
uucucuagacugugagaac

SEQ ID NO: 893298 - RNA, 19 nt, Artificial Sequence
  Description of Artificial Sequence: Synthetic oligonucleotide
  Sense strand starting at position 915 of SEQ ID NO: 588838
acuugugacccuggagaug

SEQ ID NO: 893299 - RNA, 19 nt, Artificial Sequence
  Description of Artificial Sequence: Synthetic oligonucleotide
  Antisense strand to SEQ ID NO: 893298
caucuccagggucacaagu

SEQ ID NO: 893300 - RNA, 19 nt, Artificial Sequence
  Description of Artificial Sequence: Synthetic oligonucleotide
  Sense strand starting at position 1046 of SEQ ID NO: 588838
uccucagauccuggcauaa

SEQ ID NO: 893301 - RNA, 19 nt, Artificial Sequence
  Description of Artificial Sequence: Synthetic oligonucleotide
  Antisense strand to SEQ ID NO: 893300
uuaugccaggaucugagga

SEQ ID NO: 893302 - RNA, 19 nt, Artificial Sequence
  Description of Artificial Sequence: Synthetic oligonucleotide
  Sense strand starting at position 1172 of SEQ ID NO: 588838
gcuccagcucgguuuccaa

SEQ ID NO: 893303 - RNA, 19 nt, Artificial Sequence
  Description of Artificial Sequence: Synthetic oligonucleotide
  Antisense strand to SEQ ID NO: 893302
uuggaaaccgagcuggagc

SEQ ID NO: 893304 - RNA, 19 nt, Artificial Sequence
  Description of Artificial Sequence: Synthetic oligonucleotide
  Sense strand starting at position 1386 of SEQ ID NO: 588838
ugcacauugaugggucaau

SEQ ID NO: 893305 - RNA, 19 nt, Artificial Sequence
  Description of Artificial Sequence: Synthetic oligonucleotide
  Antisense strand to SEQ ID NO: 893304
auugacccaucaaugugca

SEQ ID NO: 893306 - RNA, 19 nt, Artificial Sequence
  Description of Artificial Sequence: Synthetic oligonucleotide
  Sense strand starting at position 1387 of SEQ ID NO: 588838
gcacauugaugggucaaug

SEQ ID NO: 893307 - RNA, 19 nt, Artificial Sequence
  Description of Artificial Sequence: Synthetic oligonucleotide
  Antisense strand to SEQ ID NO: 893306
cauugacccaucaaugugc

SEQ ID NO: 893308 - RNA, 19 nt, Artificial Sequence
  Description of Artificial Sequence: Synthetic oligonucleotide
  Sense strand starting at position 2207 of SEQ ID NO: 588838
ucgguuucuacaggugaca

SEQ ID NO: 893309 - RNA, 19 nt, Artificial Sequence
  Description of Artificial Sequence: Synthetic oligonucleotide
  Antisense strand to SEQ ID NO: 893308
ugucaccuguagaaaccga

SEQ ID NO: 893310 - RNA, 19 nt, Artificial Sequence
  Description of Artificial Sequence: Synthetic oligonucleotide
  Sense strand starting at position 2209 of SEQ ID NO: 588838
gguuucuacaggugacaug

SEQ ID NO: 893311 - RNA, 19 nt, Artificial Sequence
  Description of Artificial Sequence: Synthetic oligonucleotide
  Antisense strand to SEQ ID NO: 893310
caugucaccuguagaaacc

SEQ ID NO: 893312 - RNA, 19 nt, Artificial Sequence
  Description of Artificial Sequence: Synthetic oligonucleotide
  Sense strand starting at position 2523 of SEQ ID NO: 588838
gcggucuguccguugaucu

SEQ ID NO: 893313 - RNA, 19 nt, Artificial Sequence
  Description of Artificial Sequence: Synthetic oligonucleotide
  Antisense strand to SEQ ID NO: 893312
agaucaacggacagaccgc

SEQ ID NO: 893314 - RNA, 19 nt, Artificial Sequence
  Description of Artificial Sequence: Synthetic oligonucleotide
  Sense strand starting at position 2538 of SEQ ID NO: 588838
aucucugacguuuaagaac

SEQ ID NO: 893315 - RNA, 19 nt, Artificial Sequence
  Description of Artificial Sequence: Synthetic oligonucleotide
  Antisense strand to SEQ ID NO: 893314
guucuuaaacgucagagau

SEQ ID NO: 893316 - RNA, 19 nt, Artificial Sequence
  Description of Artificial Sequence: Synthetic oligonucleotide
  Sense strand starting at position 2738 of SEQ ID NO: 588838
cgcguaaaugcuuuggagu

SEQ ID NO: 893317 - RNA, 19 nt, Artificial Sequence
  Description of Artificial Sequence: Synthetic oligonucleotide
  Antisense strand to SEQ ID NO: 893316
acuccaaagcauuuacgcg

SEQ ID NO: 893318 - RNA, 19 nt, Artificial Sequence
  Description of Artificial Sequence: Synthetic oligonucleotide
  Sense strand starting at position 2806 of SEQ ID NO: 588838
gagggauaguccuccauca

SEQ ID NO: 893319 - RNA, 19 nt, Artificial Sequence
  Description of Artificial Sequence: Synthetic oligonucleotide
  Antisense strand to SEQ ID NO: 893318
ugauggaggacuaucccuc

SEQ ID NO: 893320 - RNA, 19 nt, Artificial Sequence
  Description of Artificial Sequence: Synthetic oligonucleotide
  Sense strand starting at position 2816 of SEQ ID NO: 588838
ccuccaucagggugacauu

SEQ ID NO: 893321 - RNA, 19 nt, Artificial Sequence
  Description of Artificial Sequence: Synthetic oligonucleotide
  Antisense strand to SEQ ID NO: 893320
aaugucacccugauggagg

SEQ ID NO: 893322 - RNA, 19 nt, Artificial Sequence
  Description of Artificial Sequence: Synthetic oligonucleotide
  Sense strand starting at position 2819 of SEQ ID NO: 588838
ccaucagggugacauuuaa

SEQ ID NO: 893323 - RNA, 19 nt, Artificial Sequence
  Description of Artificial Sequence: Synthetic oligonucleotide
  Antisense strand to SEQ ID NO: 893322
uuaaaugucacccugaugg

SEQ ID NO: 893324 - RNA, 19 nt, Artificial Sequence
  Description of Artificial Sequence: Synthetic oligonucleotide
  Sense strand starting at position 2826 of SEQ ID NO: 588838
ggugacauuuaagggaaga

SEQ ID NO: 893325 - RNA, 19 nt, Artificial Sequence
  Description of Artificial Sequence: Synthetic oligonucleotide
  Antisense strand to SEQ ID NO: 893324
ucuucccuuaaaugucacc

SEQ ID NO: 893326 - RNA, 19 nt, Artificial Sequence
  Description of Artificial Sequence: Synthetic oligonucleotide
  Sense strand starting at position 2915 of SEQ ID NO: 588838
ugaugagucaaauguguuc

SEQ ID NO: 893327 - RNA, 19 nt, Artificial Sequence
  Description of Artificial Sequence: Synthetic oligonucleotide
  Antisense strand to SEQ ID NO: 893326
gaacacauuugacucauca

SEQ ID NO: 893328 - RNA, 19 nt, Artificial Sequence
  Description of Artificial Sequence: Synthetic oligonucleotide
  Sense strand starting at position 2917 of SEQ ID NO: 588838
augagucaaauguguucca

SEQ ID NO: 893329 - RNA, 19 nt, Artificial Sequence
  Description of Artificial Sequence: Synthetic oligonucleotide
  Antisense strand to SEQ ID NO: 893328
uggaacacauuugacucau

SEQ ID NO: 893330 - RNA, 19 nt, Artificial Sequence
  Description of Artificial Sequence: Synthetic oligonucleotide
  Sense strand starting at position 2920 of SEQ ID NO: 588838
agucaaauguguuccagga

SEQ ID NO: 893331 - RNA, 19 nt, Artificial Sequence
  Description of Artificial Sequence: Synthetic oligonucleotide
  Antisense strand to SEQ ID NO: 893330
uccuggaacacauuugacu

SEQ ID NO: 893332 - RNA, 19 nt, Artificial Sequence
  Description of Artificial Sequence: Synthetic oligonucleotide
  Sense strand starting at position 2924 of SEQ ID NO: 588838
aaauguguuccaggaauug

SEQ ID NO: 893333 - RNA, 19 nt, Artificial Sequence
  Description of Artificial Sequence: Synthetic oligonucleotide
  Antisense strand to SEQ ID NO: 893332
caauuccuggaacacauuu

SEQ ID NO: 893334 - RNA, 19 nt, Artificial Sequence
  Description of Artificial Sequence: Synthetic oligonucleotide
  Sense strand starting at position 2989 of SEQ ID NO: 588838
agaugaguuuggagaggga

SEQ ID NO: 893335 - RNA, 19 nt, Artificial Sequence
  Description of Artificial Sequence: Synthetic oligonucleotide
  Antisense strand to SEQ ID NO: 893334
ucccucuccaaacucaucu

SEQ ID NO: 893336 - RNA, 19 nt, Artificial Sequence
  Description of Artificial Sequence: Synthetic oligonucleotide
  Sense strand starting at position 3106 of SEQ ID NO: 588838
agugcuuuauguguacaaa

SEQ ID NO: 893337 - RNA, 19 nt, Artificial Sequence
  Description of Artificial Sequence: Synthetic oligonucleotide
  Antisense strand to SEQ ID NO: 893336
uuuguacacauaaagcacu

SEQ ID NO: 893338 - RNA, 19 nt, Artificial Sequence
  Description of Artificial Sequence: Synthetic oligonucleotide
  Sense strand starting at position 3107 of SEQ ID NO: 588838
gugcuuuauguguacaaac

SEQ ID NO: 893339 - RNA, 19 nt, Artificial Sequence
  Description of Artificial Sequence: Synthetic oligonucleotide
  Antisense strand to SEQ ID NO: 893338
guuuguacacauaaagcac

SEQ ID NO: 893340 - RNA, 19 nt, Artificial Sequence
  Description of Artificial Sequence: Synthetic oligonucleotide
  Sense strand starting at position 3109 of SEQ ID NO: 588838
gcuuuauguguacaaacug

SEQ ID NO: 893341 - RNA, 19 nt, Artificial Sequence
  Description of Artificial Sequence: Synthetic oligonucleotide
  Antisense strand to SEQ ID NO: 893340
caguuuguacacauaaagc

SEQ ID NO: 893342 - RNA, 19 nt, Artificial Sequence
  Description of Artificial Sequence: Synthetic oligonucleotide
  Sense strand starting at position 3125 of SEQ ID NO: 588838
cugcacuuagagugaguua

SEQ ID NO: 893343 - RNA, 19 nt, Artificial Sequence
  Description of Artificial Sequence: Synthetic oligonucleotide
  Antisense strand to SEQ ID NO: 893342
uaacucacucuaagugcag

SEQ ID NO: 893344 - RNA, 19 nt, Artificial Sequence
  Description of Artificial Sequence: Synthetic oligonucleotide
  Sense strand starting at position 3130 of SEQ ID NO: 588838
cuuagagugaguuacuguu

SEQ ID NO: 893345 - RNA, 19 nt, Artificial Sequence
  Description of Artificial Sequence: Synthetic oligonucleotide
  Antisense strand to SEQ ID NO: 893344
aacaguaacucacucuaag

SEQ ID NO: 893346 - RNA, 19 nt, Artificial Sequence
  Description of Artificial Sequence: Synthetic oligonucleotide
  Sense strand starting at position 3132 of SEQ ID NO: 588838
uagagugaguuacuguuaa

SEQ ID NO: 893347 - RNA, 19 nt, Artificial Sequence
  Description of Artificial Sequence: Synthetic oligonucleotide
  Antisense strand to SEQ ID NO: 893346
uuaacaguaacucacucua

SEQ ID NO: 893348 - RNA, 19 nt, Artificial Sequence
  Description of Artificial Sequence: Synthetic oligonucleotide
  Sense strand starting at position 3241 of SEQ ID NO: 588838
ucugcuuugucuuccaaag

SEQ ID NO: 893349 - RNA, 19 nt, Artificial Sequence
  Description of Artificial Sequence: Synthetic oligonucleotide
  Antisense strand to SEQ ID NO: 893348
cuuuggaagacaaagcaga

SEQ ID NO: 893350 - RNA, 19 nt, Artificial Sequence
  Description of Artificial Sequence: Synthetic oligonucleotide
  Sense strand starting at position 3250 of SEQ ID NO: 588838
ucuuccaaagucuguagaa

SEQ ID NO: 893351 - RNA, 19 nt, Artificial Sequence
  Description of Artificial Sequence: Synthetic oligonucleotide
  Antisense strand to SEQ ID NO: 893350
uucuacagacuuuggaaga

SEQ ID NO: 893352 - RNA, 19 nt, Artificial Sequence
  Description of Artificial Sequence: Synthetic oligonucleotide
  Sense strand starting at position 3251 of SEQ ID NO: 588838
cuuccaaagucuguagaaa

SEQ ID NO: 893353 - RNA, 19 nt, Artificial Sequence
  Description of Artificial Sequence: Synthetic oligonucleotide
  Antisense strand to SEQ ID NO: 893352
uuucuacagacuuuggaag

SEQ ID NO: 893354 - RNA, 19 nt, Artificial Sequence
  Description of Artificial Sequence: Synthetic oligonucleotide
  Sense strand starting at position 3252 of SEQ ID NO: 588838
uuccaaagucuguagaaau

SEQ ID NO: 893355 - RNA, 19 nt, Artificial Sequence
  Description of Artificial Sequence: Synthetic oligonucleotide
  Antisense strand to SEQ ID NO: 893354
auuucuacagacuuuggaa

SEQ ID NO: 893356 - RNA, 19 nt, Artificial Sequence
  Description of Artificial Sequence: Synthetic oligonucleotide
  Sense strand starting at position 3343 of SEQ ID NO: 588838
acagguuuguugucucaag

SEQ ID NO: 893357 - RNA, 19 nt, Artificial Sequence
  Description of Artificial Sequence: Synthetic oligonucleotide
  Antisense strand to SEQ ID NO: 893356
cuugagacaacaaaccugu

SEQ ID NO: 893358 - RNA, 19 nt, Artificial Sequence
  Description of Artificial Sequence: Synthetic oligonucleotide
  Sense strand starting at position 3654 of SEQ ID NO: 588838
aguugacuguuaguuguaa

SEQ ID NO: 893359 - RNA, 19 nt, Artificial Sequence
  Description of Artificial Sequence: Synthetic oligonucleotide
  Antisense strand to SEQ ID NO: 893358
uuacaacuaacagucaacu

SEQ ID NO: 893360 - RNA, 19 nt, Artificial Sequence
  Description of Artificial Sequence: Synthetic oligonucleotide
  Sense strand starting at position 3656 of SEQ ID NO: 588838
uugacuguuaguuguaauu

SEQ ID NO: 893361 - RNA, 19 nt, Artificial Sequence
  Description of Artificial Sequence: Synthetic oligonucleotide
  Antisense strand to SEQ ID NO: 893360
aauuacaacuaacagucaa

SEQ ID NO: 893362 - RNA, 19 nt, Artificial Sequence
  Description of Artificial Sequence: Synthetic oligonucleotide
  Sense strand starting at position 3662 of SEQ ID NO: 588838
guuaguuguaauuagcaug

SEQ ID NO: 893363 - RNA, 19 nt, Artificial Sequence
  Description of Artificial Sequence: Synthetic oligonucleotide
  Antisense strand to SEQ ID NO: 893362
caugcuaauuacaacuaac

SEQ ID NO: 893364 - RNA, 19 nt, Artificial Sequence
  Description of Artificial Sequence: Synthetic oligonucleotide
  Sense strand starting at position 3667 of SEQ ID NO: 588838
uuguaauuagcaugccaau

SEQ ID NO: 893365 - RNA, 19 nt, Artificial Sequence
  Description of Artificial Sequence: Synthetic oligonucleotide
  Antisense strand to SEQ ID NO: 893364
auuggcaugcuaauuacaa

SEQ ID NO: 893366 - RNA, 19 nt, Artificial Sequence
  Description of Artificial Sequence: Synthetic oligonucleotide
  Sense strand starting at position 3686 of SEQ ID NO: 588838
uaugaauuguacccugagu

SEQ ID NO: 893367 - RNA, 19 nt, Artificial Sequence
  Description of Artificial Sequence: Synthetic oligonucleotide
  Antisense strand to SEQ ID NO: 893366
acucaggguacaauucaua

SEQ ID NO: 893368 - RNA, 19 nt, Artificial Sequence
  Description of Artificial Sequence: Synthetic oligonucleotide
  Sense strand starting at position 3691 of SEQ ID NO: 588838
auuguacccugaguggaaa

SEQ ID NO: 893369 - RNA, 19 nt, Artificial Sequence
  Description of Artificial Sequence: Synthetic oligonucleotide
  Antisense strand to SEQ ID NO: 893368
uuuccacucaggguacaau

SEQ ID NO: 893370 - RNA, 19 nt, Artificial Sequence
  Description of Artificial Sequence: Synthetic oligonucleotide
  Sense strand starting at position 67 of SEQ ID NO: 588839
acaguuagauguugaagag

SEQ ID NO: 893371 - RNA, 19 nt, Artificial Sequence
  Description of Artificial Sequence: Synthetic oligonucleotide
  Antisense strand to SEQ ID NO: 893370
cucuucaacaucuaacugu

SEQ ID NO: 893372 - RNA, 19 nt, Artificial Sequence
  Description of Artificial Sequence: Synthetic oligonucleotide
  Sense strand starting at position 109 of SEQ ID NO: 588839
gcagccuaacacugaugaa

SEQ ID NO: 893373 - RNA, 19 nt, Artificial Sequence
  Description of Artificial Sequence: Synthetic oligonucleotide
  Antisense strand to SEQ ID NO: 893372
uucaucaguguuaggcugc

SEQ ID NO: 893374 - RNA, 19 nt, Artificial Sequence
  Description of Artificial Sequence: Synthetic oligonucleotide
  Sense strand starting at position 130 of SEQ ID NO: 588839
ugacgaagacccugguauu

SEQ ID NO: 893375 - RNA, 19 nt, Artificial Sequence
  Description of Artificial Sequence: Synthetic oligonucleotide
  Antisense strand to SEQ ID NO: 893374
aauaccagggucuucguca

SEQ ID NO: 893376 - RNA, 19 nt, Artificial Sequence
  Description of Artificial Sequence: Synthetic oligonucleotide
  Sense strand starting at position 152 of SEQ ID NO: 588839
gaaagaugcuuacagaaga

SEQ ID NO: 893377 - RNA, 19 nt, Artificial Sequence
  Description of Artificial Sequence: Synthetic oligonucleotide
  Antisense strand to SEQ ID NO: 893376
ucuucuguaagcaucuuuc

SEQ ID NO: 893378 - RNA, 19 nt, Artificial Sequence
  Description of Artificial Sequence: Synthetic oligonucleotide
  Sense strand starting at position 252 of SEQ ID NO: 588839
ugcccacugccucaaagaa

SEQ ID NO: 893379 - RNA, 19 nt, Artificial Sequence
  Description of Artificial Sequence: Synthetic oligonucleotide
  Antisense strand to SEQ ID NO: 893378
uucuuugaggcagugggca

SEQ ID NO: 893380 - RNA, 19 nt, Artificial Sequence
  Description of Artificial Sequence: Synthetic oligonucleotide
  Sense strand starting at position 298 of SEQ ID NO: 588839
uguaguaaccacuauuaac

SEQ ID NO: 893381 - RNA, 19 nt, Artificial Sequence
  Description of Artificial Sequence: Synthetic oligonucleotide
  Antisense strand to SEQ ID NO: 893380
guuaauagugguuacuaca

SEQ ID NO: 893382 - RNA, 19 nt, Artificial Sequence
  Description of Artificial Sequence: Synthetic oligonucleotide
  Sense strand starting at position 355 of SEQ ID NO: 588839
uugccucuugucuacaaga

SEQ ID NO: 893383 - RNA, 19 nt, Artificial Sequence
  Description of Artificial Sequence: Synthetic oligonucleotide
  Antisense strand to SEQ ID NO: 893382
ucuuguagacaagaggcaa

SEQ ID NO: 893384 - RNA, 19 nt, Artificial Sequence
  Description of Artificial Sequence: Synthetic oligonucleotide
  Sense strand starting at position 357 of SEQ ID NO: 588839
gccucuugucuacaagaua

SEQ ID NO: 893385 - RNA, 19 nt, Artificial Sequence
  Description of Artificial Sequence: Synthetic oligonucleotide
  Antisense strand to SEQ ID NO: 893384
uaucuuguagacaagaggc

SEQ ID NO: 893386 - RNA, 19 nt, Artificial Sequence
  Description of Artificial Sequence: Synthetic oligonucleotide
  Sense strand starting at position 423 of SEQ ID NO: 588839
gcugcauugugcugaaacu

SEQ ID NO: 893387 - RNA, 19 nt, Artificial Sequence
  Description of Artificial Sequence: Synthetic oligonucleotide
  Antisense strand to SEQ ID NO: 893386
aguuucagcacaaugcagc

SEQ ID NO: 893388 - RNA, 19 nt, Artificial Sequence
  Description of Artificial Sequence: Synthetic oligonucleotide
  Sense strand starting at position 424 of SEQ ID NO: 588839
cugcauugugcugaaacuu

SEQ ID NO: 893389 - RNA, 19 nt, Artificial Sequence
  Description of Artificial Sequence: Synthetic oligonucleotide
  Antisense strand to SEQ ID NO: 893388
aaguuucagcacaaugcag

SEQ ID NO: 893390 - RNA, 19 nt, Artificial Sequence
  Description of Artificial Sequence: Synthetic oligonucleotide
  Sense strand starting at position 447 of SEQ ID NO: 588839
aaguaucacuucuaggaag

SEQ ID NO: 893391 - RNA, 19 nt, Artificial Sequence
  Description of Artificial Sequence: Synthetic oligonucleotide
  Antisense strand to SEQ ID NO: 893390
cuuccuagaagugauacuu

SEQ ID NO: 893392 - RNA, 19 nt, Artificial Sequence
  Description of Artificial Sequence: Synthetic oligonucleotide
  Sense strand starting at position 449 of SEQ ID NO: 588839
guaucacuucuaggaagaa

SEQ ID NO: 893393 - RNA, 19 nt, Artificial Sequence
  Description of Artificial Sequence: Synthetic oligonucleotide
  Antisense strand to SEQ ID NO: 893392
uucuuccuagaagugauac

SEQ ID NO: 893394 - RNA, 19 nt, Artificial Sequence
  Description of Artificial Sequence: Synthetic oligonucleotide
  Sense strand starting at position 461 of SEQ ID NO: 588839
ggaagaaccgucugcgguu

SEQ ID NO: 893395 - RNA, 19 nt, Artificial Sequence
  Description of Artificial Sequence: Synthetic oligonucleotide
  Antisense strand to SEQ ID NO: 893394
aaccgcagacgguucuucc

SEQ ID NO: 893396 - RNA, 19 nt, Artificial Sequence
  Description of Artificial Sequence: Synthetic oligonucleotide
  Sense strand starting at position 511 of SEQ ID NO: 588839
ggaaauaccucuuugguua

SEQ ID NO: 893397 - RNA, 19 nt, Artificial Sequence
  Description of Artificial Sequence: Synthetic oligonucleotide
  Antisense strand to SEQ ID NO: 893396
uaaccaaagagguauuucc

SEQ ID NO: 893398 - RNA, 19 nt, Artificial Sequence
  Description of Artificial Sequence: Synthetic oligonucleotide
  Sense strand starting at position 525 of SEQ ID NO: 588839
gguuaacaucggcaucaca

SEQ ID NO: 893399 - RNA, 19 nt, Artificial Sequence
  Description of Artificial Sequence: Synthetic oligonucleotide
  Antisense strand to SEQ ID NO: 893398
ugugaugccgauguuaacc

SEQ ID NO: 893400 - RNA, 19 nt, Artificial Sequence
  Description of Artificial Sequence: Synthetic oligonucleotide
  Sense strand starting at position 598 of SEQ ID NO: 588839
aaguguucuuaagcggcaa

SEQ ID NO: 893401 - RNA, 19 nt, Artificial Sequence
  Description of Artificial Sequence: Synthetic oligonucleotide
  Antisense strand to SEQ ID NO: 893400
uugccgcuuaagaacacuu

SEQ ID NO: 893402 - RNA, 19 nt, Artificial Sequence
  Description of Artificial Sequence: Synthetic oligonucleotide
  Sense strand starting at position 599 of SEQ ID NO: 588839
aguguucuuaagcggcaaa

SEQ ID NO: 893403 - RNA, 19 nt, Artificial Sequence
  Description of Artificial Sequence: Synthetic oligonucleotide
  Antisense strand to SEQ ID NO: 893402
uuugccgcuuaagaacacu

SEQ ID NO: 893404 - RNA, 19 nt, Artificial Sequence
  Description of Artificial Sequence: Synthetic oligonucleotide
  Sense strand starting at position 626 of SEQ ID NO: 588839
uuaaauggcucugauguuu

SEQ ID NO: 893405 - RNA, 19 nt, Artificial Sequence
  Description of Artificial Sequence: Synthetic oligonucleotide
  Antisense strand to SEQ ID NO: 893404
aaacaucagagccauuuaa

SEQ ID NO: 893406 - RNA, 19 nt, Artificial Sequence
  Description of Artificial Sequence: Synthetic oligonucleotide
  Sense strand starting at position 631 of SEQ ID NO: 588839
uggcucugauguuucugaa

SEQ ID NO: 893407 - RNA, 19 nt, Artificial Sequence
  Description of Artificial Sequence: Synthetic oligonucleotide
  Antisense strand to SEQ ID NO: 893406
uucagaaacaucagagcca

SEQ ID NO: 893408 - RNA, 19 nt, Artificial Sequence
  Description of Artificial Sequence: Synthetic oligonucleotide
  Sense strand starting at position 638 of SEQ ID NO: 588839
gauguuucugaaggcucua

SEQ ID NO: 893409 - RNA, 19 nt, Artificial Sequence
  Description of Artificial Sequence: Synthetic oligonucleotide
  Antisense strand to SEQ ID NO: 893408
uagagccuucagaaacauc

SEQ ID NO: 893410 - RNA, 19 nt, Artificial Sequence
  Description of Artificial Sequence: Synthetic oligonucleotide
  Sense strand starting at position 643 of SEQ ID NO: 588839
uucugaaggcucuacugua

SEQ ID NO: 893411 - RNA, 19 nt, Artificial Sequence
  Description of Artificial Sequence: Synthetic oligonucleotide
  Antisense strand to SEQ ID NO: 893410
uacaguagagccuucagaa

SEQ ID NO: 893412 - RNA, 19 nt, Artificial Sequence
  Description of Artificial Sequence: Synthetic oligonucleotide
  Sense strand starting at position 736 of SEQ ID NO: 588839
ucgcccaaucaagaaauua

SEQ ID NO: 893413 - RNA, 19 nt, Artificial Sequence
  Description of Artificial Sequence: Synthetic oligonucleotide
  Antisense strand to SEQ ID NO: 893412
uaauuucuugauugggcga

SEQ ID NO: 893414 - RNA, 19 nt, Artificial Sequence
  Description of Artificial Sequence: Synthetic oligonucleotide
  Sense strand starting at position 1311 of SEQ ID NO: 588839
cgacguguccggcuuacga

SEQ ID NO: 893415 - RNA, 19 nt, Artificial Sequence
  Description of Artificial Sequence: Synthetic oligonucleotide
  Antisense strand to SEQ ID NO: 893414
ucguaagccggacacgucg

SEQ ID NO: 893416 - RNA, 19 nt, Artificial Sequence
  Description of Artificial Sequence: Synthetic oligonucleotide
  Sense strand starting at position 1543 of SEQ ID NO: 588839
cacgccuuauccuguaguu

SEQ ID NO: 893417 - RNA, 19 nt, Artificial Sequence
  Description of Artificial Sequence: Synthetic oligonucleotide
  Antisense strand to SEQ ID NO: 893416
aacuacaggauaaggcgug

SEQ ID NO: 893418 - RNA, 19 nt, Artificial Sequence
  Description of Artificial Sequence: Synthetic oligonucleotide
  Sense strand starting at position 436 of SEQ ID NO: 588840
gaggccagcugaucuugaa

SEQ ID NO: 893419 - RNA, 19 nt, Artificial Sequence
  Description of Artificial Sequence: Synthetic oligonucleotide
  Antisense strand to SEQ ID NO: 893418
uucaagaucagcuggccuc

SEQ ID NO: 893420 - RNA, 19 nt, Artificial Sequence
  Description of Artificial Sequence: Synthetic oligonucleotide
  Sense strand starting at position 533 of SEQ ID NO: 588840
uacaguucuggcuacagaa

SEQ ID NO: 893421 - RNA, 19 nt, Artificial Sequence
  Description of Artificial Sequence: Synthetic oligonucleotide
  Antisense strand to SEQ ID NO: 893420
uucuguagccagaacugua

SEQ ID NO: 893422 - RNA, 19 nt, Artificial Sequence
  Description of Artificial Sequence: Synthetic oligonucleotide
  Sense strand starting at position 771 of SEQ ID NO: 588840
acaguuagauguugaagag

SEQ ID NO: 893423 - RNA, 19 nt, Artificial Sequence
  Description of Artificial Sequence: Synthetic oligonucleotide
  Antisense strand to SEQ ID NO: 893422
cucuucaacaucuaacugu

SEQ ID NO: 893424 - RNA, 19 nt, Artificial Sequence
  Description of Artificial Sequence: Synthetic oligonucleotide
  Sense strand starting at position 813 of SEQ ID NO: 588840
gcagccuaacacugaugaa

SEQ ID NO: 893425 - RNA, 19 nt, Artificial Sequence
  Description of Artificial Sequence: Synthetic oligonucleotide
  Antisense strand to SEQ ID NO: 893424
uucaucaguguuaggcugc

SEQ ID NO: 893426 - RNA, 19 nt, Artificial Sequence
  Description of Artificial Sequence: Synthetic oligonucleotide
  Sense strand starting at position 834 of SEQ ID NO: 588840
ugacgaagacccugguauu

SEQ ID NO: 893427 - RNA, 19 nt, Artificial Sequence
  Description of Artificial Sequence: Synthetic oligonucleotide
  Antisense strand to SEQ ID NO: 893426
aauaccagggucuucguca

SEQ ID NO: 893428 - RNA, 19 nt, Artificial Sequence
  Description of Artificial Sequence: Synthetic oligonucleotide
  Sense strand starting at position 856 of SEQ ID NO: 588840
gaaagaugcuuacagaaga

SEQ ID NO: 893429 - RNA, 19 nt, Artificial Sequence
  Description of Artificial Sequence: Synthetic oligonucleotide
  Antisense strand to SEQ ID NO: 893428
ucuucuguaagcaucuuuc

SEQ ID NO: 893430 - RNA, 19 nt, Artificial Sequence
  Description of Artificial Sequence: Synthetic oligonucleotide
  Sense strand starting at position 956 of SEQ ID NO: 588840
ugcccacugccucaaagaa

SEQ ID NO: 893431 - RNA, 19 nt, Artificial Sequence
  Description of Artificial Sequence: Synthetic oligonucleotide
  Antisense strand to SEQ ID NO: 893430
uucuuugaggcagugggca

SEQ ID NO: 893432 - RNA, 19 nt, Artificial Sequence
  Description of Artificial Sequence: Synthetic oligonucleotide
  Sense strand starting at position 1002 of SEQ ID NO: 588840
uguaguaaccacuauuaac

SEQ ID NO: 893433 - RNA, 19 nt, Artificial Sequence
  Description of Artificial Sequence: Synthetic oligonucleotide
  Antisense strand to SEQ ID NO: 893432
guuaauagugguuacuaca

SEQ ID NO: 893434 - RNA, 19 nt, Artificial Sequence
  Description of Artificial Sequence: Synthetic oligonucleotide
  Sense strand starting at position 1059 of SEQ ID NO: 588840
uugccucuugucuacaaga

SEQ ID NO: 893435 - RNA, 19 nt, Artificial Sequence
  Description of Artificial Sequence: Synthetic oligonucleotide
  Antisense strand to SEQ ID NO: 893434
ucuuguagacaagaggcaa

SEQ ID NO: 893436 - RNA, 19 nt, Artificial Sequence
  Description of Artificial Sequence: Synthetic oligonucleotide
  Sense strand starting at position 1061 of SEQ ID NO: 588840
gccucuugucuacaagaua

SEQ ID NO: 893437 - RNA, 19 nt, Artificial Sequence
  Description of Artificial Sequence: Synthetic oligonucleotide
  Antisense strand to SEQ ID NO: 893436
uaucuuguagacaagaggc

SEQ ID NO: 893438 - RNA, 19 nt, Artificial Sequence
  Description of Artificial Sequence: Synthetic oligonucleotide
  Sense strand starting at position 1127 of SEQ ID NO: 588840
gcugcauugugcugaaacu

SEQ ID NO: 893439 - RNA, 19 nt, Artificial Sequence
  Description of Artificial Sequence: Synthetic oligonucleotide
  Antisense strand to SEQ ID NO: 893438
aguuucagcacaaugcagc

SEQ ID NO: 893440 - RNA, 19 nt, Artificial Sequence
  Description of Artificial Sequence: Synthetic oligonucleotide
  Sense strand starting at position 1128 of SEQ ID NO: 588840
cugcauugugcugaaacuu

SEQ ID NO: 893441 - RNA, 19 nt, Artificial Sequence
  Description of Artificial Sequence: Synthetic oligonucleotide
  Antisense strand to SEQ ID NO: 893440
aaguuucagcacaaugcag

SEQ ID NO: 893442 - RNA, 19 nt, Artificial Sequence
  Description of Artificial Sequence: Synthetic oligonucleotide
  Sense strand starting at position 1151 of SEQ ID NO: 588840
aaguaucacuucuaggaag

SEQ ID NO: 893443 - RNA, 19 nt, Artificial Sequence
  Description of Artificial Sequence: Synthetic oligonucleotide
  Antisense strand to SEQ ID NO: 893442
cuuccuagaagugauacuu

SEQ ID NO: 893444 - RNA, 19 nt, Artificial Sequence
  Description of Artificial Sequence: Synthetic oligonucleotide
  Sense strand starting at position 1153 of SEQ ID NO: 588840
guaucacuucuaggaagaa

SEQ ID NO: 893445 - RNA, 19 nt, Artificial Sequence
  Description of Artificial Sequence: Synthetic oligonucleotide
  Antisense strand to SEQ ID NO: 893444
uucuuccuagaagugauac

SEQ ID NO: 893446 - RNA, 19 nt, Artificial Sequence
  Description of Artificial Sequence: Synthetic oligonucleotide
  Sense strand starting at position 1165 of SEQ ID NO: 588840
ggaagaaccgucugcgguu

SEQ ID NO: 893447 - RNA, 19 nt, Artificial Sequence
  Description of Artificial Sequence: Synthetic oligonucleotide
  Antisense strand to SEQ ID NO: 893446
aaccgcagacgguucuucc

SEQ ID NO: 893448 - RNA, 19 nt, Artificial Sequence
  Description of Artificial Sequence: Synthetic oligonucleotide
  Sense strand starting at position 1215 of SEQ ID NO: 588840
ggaaauaccucuuugguua

SEQ ID NO: 893449 - RNA, 19 nt, Artificial Sequence
  Description of Artificial Sequence: Synthetic oligonucleotide
  Antisense strand to SEQ ID NO: 893448
uaaccaaagagguauuucc

SEQ ID NO: 893450 - RNA, 19 nt, Artificial Sequence
  Description of Artificial Sequence: Synthetic oligonucleotide
  Sense strand starting at position 1229 of SEQ ID NO: 588840
gguuaacaucggcaucaca

SEQ ID NO: 893451 - RNA, 19 nt, Artificial Sequence
  Description of Artificial Sequence: Synthetic oligonucleotide
  Antisense strand to SEQ ID NO: 893450
ugugaugccgauguuaacc

SEQ ID NO: 893452 - RNA, 19 nt, Artificial Sequence
  Description of Artificial Sequence: Synthetic oligonucleotide
  Sense strand starting at position 1302 of SEQ ID NO: 588840
aaguguucuuaagcggcaa

SEQ ID NO: 893453 - RNA, 19 nt, Artificial Sequence
  Description of Artificial Sequence: Synthetic oligonucleotide
  Antisense strand to SEQ ID NO: 893452
uugccgcuuaagaacacuu

SEQ ID NO: 893454 - RNA, 19 nt, Artificial Sequence
  Description of Artificial Sequence: Synthetic oligonucleotide
  Sense strand starting at position 1303 of SEQ ID NO: 588840
aguguucuuaagcggcaaa

SEQ ID NO: 893455 - RNA, 19 nt, Artificial Sequence
  Description of Artificial Sequence: Synthetic oligonucleotide
  Antisense strand to SEQ ID NO: 893454
uuugccgcuuaagaacacu

SEQ ID NO: 893456 - RNA, 19 nt, Artificial Sequence
  Description of Artificial Sequence: Synthetic oligonucleotide
  Sense strand starting at position 1330 of SEQ ID NO: 588840
uuaaauggcucugauguuu

SEQ ID NO: 893457 - RNA, 19 nt, Artificial Sequence
  Description of Artificial Sequence: Synthetic oligonucleotide
  Antisense strand to SEQ ID NO: 893456
aaacaucagagccauuuaa

SEQ ID NO: 893458 - RNA, 19 nt, Artificial Sequence
  Description of Artificial Sequence: Synthetic oligonucleotide
  Sense strand starting at position 1335 of SEQ ID NO: 588840
uggcucugauguuucugaa

SEQ ID NO: 893459 - RNA, 19 nt, Artificial Sequence
  Description of Artificial Sequence: Synthetic oligonucleotide
  Antisense strand to SEQ ID NO: 893458
uucagaaacaucagagcca

SEQ ID NO: 893460 - RNA, 19 nt, Artificial Sequence
  Description of Artificial Sequence: Synthetic oligonucleotide
  Sense strand starting at position 1342 of SEQ ID NO: 588840
gauguuucugaaggcucua

SEQ ID NO: 893461 - RNA, 19 nt, Artificial Sequence
  Description of Artificial Sequence: Synthetic oligonucleotide
  Antisense strand to SEQ ID NO: 893460
uagagccuucagaaacauc

SEQ ID NO: 893462 - RNA, 19 nt, Artificial Sequence
  Description of Artificial Sequence: Synthetic oligonucleotide
  Sense strand starting at position 1347 of SEQ ID NO: 588840
uucugaaggcucuacugua

SEQ ID NO: 893463 - RNA, 19 nt, Artificial Sequence
  Description of Artificial Sequence: Synthetic oligonucleotide
  Antisense strand to SEQ ID NO: 893462
uacaguagagccuucagaa

SEQ ID NO: 893464 - RNA, 19 nt, Artificial Sequence
  Description of Artificial Sequence: Synthetic oligonucleotide
  Sense strand starting at position 1440 of SEQ ID NO: 588840
ucgcccaaucaagaaauua

SEQ ID NO: 893465 - RNA, 19 nt, Artificial Sequence
  Description of Artificial Sequence: Synthetic oligonucleotide
  Antisense strand to SEQ ID NO: 893464
uaauuucuugauugggcga

SEQ ID NO: 893466 - RNA, 19 nt, Artificial Sequence
  Description of Artificial Sequence: Synthetic oligonucleotide
  Sense strand starting at position 2015 of SEQ ID NO: 588840
cgacguguccggcuuacga

SEQ ID NO: 893467 - RNA, 19 nt, Artificial Sequence
  Description of Artificial Sequence: Synthetic oligonucleotide
  Antisense strand to SEQ ID NO: 893466
ucguaagccggacacgucg

SEQ ID NO: 893468 - RNA, 19 nt, Artificial Sequence
  Description of Artificial Sequence: Synthetic oligonucleotide
  Sense strand starting at position 2247 of SEQ ID NO: 588840
cacgccuuauccuguaguu

SEQ ID NO: 893469 - RNA, 19 nt, Artificial Sequence
  Description of Artificial Sequence: Synthetic oligonucleotide
  Antisense strand to SEQ ID NO: 893468
aacuacaggauaaggcgug

SEQ ID NO: 893470 - RNA, 19 nt, Artificial Sequence
  Description of Artificial Sequence: Synthetic oligonucleotide
  Sense strand starting at position 53 of SEQ ID NO: 588841
auuagaaugucuuuguucu

SEQ ID NO: 893471 - RNA, 19 nt, Artificial Sequence
  Description of Artificial Sequence: Synthetic oligonucleotide
  Antisense strand to SEQ ID NO: 893470
agaacaaagacauucuaau

SEQ ID NO: 893472 - RNA, 19 nt, Artificial Sequence
  Description of Artificial Sequence: Synthetic oligonucleotide
  Sense strand starting at position 55 of SEQ ID NO: 588841
uagaaugucuuuguucuga

SEQ ID NO: 893473 - RNA, 19 nt, Artificial Sequence
  Description of Artificial Sequence: Synthetic oligonucleotide
  Antisense strand to SEQ ID NO: 893472
ucagaacaaagacauucua

SEQ ID NO: 893474 - RNA, 19 nt, Artificial Sequence
  Description of Artificial Sequence: Synthetic oligonucleotide
  Sense strand starting at position 57 of SEQ ID NO: 588841
gaaugucuuuguucugaug

SEQ ID NO: 893475 - RNA, 19 nt, Artificial Sequence
  Description of Artificial Sequence: Synthetic oligonucleotide
  Antisense strand to SEQ ID NO: 893474
caucagaacaaagacauuc

SEQ ID NO: 893476 - RNA, 19 nt, Artificial Sequence
  Description of Artificial Sequence: Synthetic oligonucleotide
  Sense strand starting at position 292 of SEQ ID NO: 588841
gguggguaccugggauaga

SEQ ID NO: 893477 - RNA, 19 nt, Artificial Sequence
  Description of Artificial Sequence: Synthetic oligonucleotide
  Antisense strand to SEQ ID NO: 893476
ucuaucccagguacccacc

SEQ ID NO: 893478 - RNA, 19 nt, Artificial Sequence
  Description of Artificial Sequence: Synthetic oligonucleotide
  Sense strand starting at position 359 of SEQ ID NO: 588841
uggaaacaucacuggucuu

SEQ ID NO: 893479 - RNA, 19 nt, Artificial Sequence
  Description of Artificial Sequence: Synthetic oligonucleotide
  Antisense strand to SEQ ID NO: 893478
aagaccagugauguuucca

SEQ ID NO: 893480 - RNA, 19 nt, Artificial Sequence
  Description of Artificial Sequence: Synthetic oligonucleotide
  Sense strand starting at position 431 of SEQ ID NO: 588841
gcugcuuacagacagagaa

SEQ ID NO: 893481 - RNA, 19 nt, Artificial Sequence
  Description of Artificial Sequence: Synthetic oligonucleotide
  Antisense strand to SEQ ID NO: 893480
uucucugucuguaagcagc

SEQ ID NO: 893482 - RNA, 19 nt, Artificial Sequence
  Description of Artificial Sequence: Synthetic oligonucleotide
  Sense strand starting at position 516 of SEQ ID NO: 588841
gggagaaaguuugugaauu

SEQ ID NO: 893483 - RNA, 19 nt, Artificial Sequence
  Description of Artificial Sequence: Synthetic oligonucleotide
  Antisense strand to SEQ ID NO: 893482
aauucacaaacuuucuccc

SEQ ID NO: 893484 - RNA, 19 nt, Artificial Sequence
  Description of Artificial Sequence: Synthetic oligonucleotide
  Sense strand starting at position 542 of SEQ ID NO: 588841
caguaauggguucacgagu

SEQ ID NO: 893485 - RNA, 19 nt, Artificial Sequence
  Description of Artificial Sequence: Synthetic oligonucleotide
  Antisense strand to SEQ ID NO: 893484
acucgugaacccauuacug

SEQ ID NO: 893486 - RNA, 19 nt, Artificial Sequence
  Description of Artificial Sequence: Synthetic oligonucleotide
  Sense strand starting at position 553 of SEQ ID NO: 588841
ucacgagugcuggaucaua

SEQ ID NO: 893487 - RNA, 19 nt, Artificial Sequence
  Description of Artificial Sequence: Synthetic oligonucleotide
  Antisense strand to SEQ ID NO: 893486
uaugauccagcacucguga

SEQ ID NO: 893488 - RNA, 19 nt, Artificial Sequence
  Description of Artificial Sequence: Synthetic oligonucleotide
  Sense strand starting at position 919 of SEQ ID NO: 588841
cacuaagagcuuugguauc

SEQ ID NO: 893489 - RNA, 19 nt, Artificial Sequence
  Description of Artificial Sequence: Synthetic oligonucleotide
  Antisense strand to SEQ ID NO: 893488
gauaccaaagcucuuagug

SEQ ID NO: 893490 - RNA, 19 nt, Artificial Sequence
  Description of Artificial Sequence: Synthetic oligonucleotide
  Sense strand starting at position 1126 of SEQ ID NO: 588841
gaguuuaaagucuggcaua

SEQ ID NO: 893491 - RNA, 19 nt, Artificial Sequence
  Description of Artificial Sequence: Synthetic oligonucleotide
  Antisense strand to SEQ ID NO: 893490
uaugccagacuuuaaacuc

SEQ ID NO: 893492 - RNA, 19 nt, Artificial Sequence
  Description of Artificial Sequence: Synthetic oligonucleotide
  Sense strand starting at position 1131 of SEQ ID NO: 588841
uaaagucuggcauaugacu

SEQ ID NO: 893493 - RNA, 19 nt, Artificial Sequence
  Description of Artificial Sequence: Synthetic oligonucleotide
  Antisense strand to SEQ ID NO: 893492
agucauaugccagacuuua

SEQ ID NO: 893494 - RNA, 19 nt, Artificial Sequence
  Description of Artificial Sequence: Synthetic oligonucleotide
  Sense strand starting at position 1136 of SEQ ID NO: 588841
ucuggcauaugacuagaga

SEQ ID NO: 893495 - RNA, 19 nt, Artificial Sequence
  Description of Artificial Sequence: Synthetic oligonucleotide
  Antisense strand to SEQ ID NO: 893494
ucucuagucauaugccaga

SEQ ID NO: 893496 - RNA, 19 nt, Artificial Sequence
  Description of Artificial Sequence: Synthetic oligonucleotide
  Sense strand starting at position 1195 of SEQ ID NO: 588841
ucuggcucugaguaaauga

SEQ ID NO: 893497 - RNA, 19 nt, Artificial Sequence
  Description of Artificial Sequence: Synthetic oligonucleotide
  Antisense strand to SEQ ID NO: 893496
ucauuuacucagagccaga

SEQ ID NO: 893498 - RNA, 19 nt, Artificial Sequence
  Description of Artificial Sequence: Synthetic oligonucleotide
  Sense strand starting at position 1200 of SEQ ID NO: 588841
cucugaguaaaugagugua

SEQ ID NO: 893499 - RNA, 19 nt, Artificial Sequence
  Description of Artificial Sequence: Synthetic oligonucleotide
  Antisense strand to SEQ ID NO: 893498
uacacucauuuacucagag

SEQ ID NO: 893500 - RNA, 19 nt, Artificial Sequence
  Description of Artificial Sequence: Synthetic oligonucleotide
  Sense strand starting at position 1202 of SEQ ID NO: 588841
cugaguaaaugaguguaca

SEQ ID NO: 893501 - RNA, 19 nt, Artificial Sequence
  Description of Artificial Sequence: Synthetic oligonucleotide
  Antisense strand to SEQ ID NO: 893500
uguacacucauuuacucag

SEQ ID NO: 893502 - RNA, 19 nt, Artificial Sequence
  Description of Artificial Sequence: Synthetic oligonucleotide
  Sense strand starting at position 1203 of SEQ ID NO: 588841
ugaguaaaugaguguacaa

SEQ ID NO: 893503 - RNA, 19 nt, Artificial Sequence
  Description of Artificial Sequence: Synthetic oligonucleotide
  Antisense strand to SEQ ID NO: 893502
uuguacacucauuuacuca

SEQ ID NO: 893504 - RNA, 19 nt, Artificial Sequence
  Description of Artificial Sequence: Synthetic oligonucleotide
  Sense strand starting at position 1296 of SEQ ID NO: 588841
ggacgaguuaucuguagga

SEQ ID NO: 893505 - RNA, 19 nt, Artificial Sequence
  Description of Artificial Sequence: Synthetic oligonucleotide
  Antisense strand to SEQ ID NO: 893504
uccuacagauaacucgucc

SEQ ID NO: 893506 - RNA, 19 nt, Artificial Sequence
  Description of Artificial Sequence: Synthetic oligonucleotide
  Sense strand starting at position 1298 of SEQ ID NO: 588841
acgaguuaucuguaggaca

SEQ ID NO: 893507 - RNA, 19 nt, Artificial Sequence
  Description of Artificial Sequence: Synthetic oligonucleotide
  Antisense strand to SEQ ID NO: 893506
uguccuacagauaacucgu

SEQ ID NO: 893508 - RNA, 19 nt, Artificial Sequence
  Description of Artificial Sequence: Synthetic oligonucleotide
  Sense strand starting at position 1300 of SEQ ID NO: 588841
gaguuaucuguaggacaga

SEQ ID NO: 893509 - RNA, 19 nt, Artificial Sequence
  Description of Artificial Sequence: Synthetic oligonucleotide
  Antisense strand to SEQ ID NO: 893508
ucuguccuacagauaacuc

SEQ ID NO: 893510 - RNA, 19 nt, Artificial Sequence
  Description of Artificial Sequence: Synthetic oligonucleotide
  Sense strand starting at position 1333 of SEQ ID NO: 588841
gccagauggaaaugugagu

SEQ ID NO: 893511 - RNA, 19 nt, Artificial Sequence
  Description of Artificial Sequence: Synthetic oligonucleotide
  Antisense strand to SEQ ID NO: 893510
acucacauuuccaucuggc

SEQ ID NO: 893512 - RNA, 19 nt, Artificial Sequence
  Description of Artificial Sequence: Synthetic oligonucleotide
  Sense strand starting at position 1338 of SEQ ID NO: 588841
auggaaaugugagugcaaa

SEQ ID NO: 893513 - RNA, 19 nt, Artificial Sequence
  Description of Artificial Sequence: Synthetic oligonucleotide
  Antisense strand to SEQ ID NO: 893512
uuugcacucacauuuccau

SEQ ID NO: 893514 - RNA, 19 nt, Artificial Sequence
  Description of Artificial Sequence: Synthetic oligonucleotide
  Sense strand starting at position 1339 of SEQ ID NO: 588841
uggaaaugugagugcaaac

SEQ ID NO: 893515 - RNA, 19 nt, Artificial Sequence
  Description of Artificial Sequence: Synthetic oligonucleotide
  Antisense strand to SEQ ID NO: 893514
guuugcacucacauuucca

SEQ ID NO: 893516 - RNA, 19 nt, Artificial Sequence
  Description of Artificial Sequence: Synthetic oligonucleotide
  Sense strand starting at position 1401 of SEQ ID NO: 588841
aguuaucucugacucuauu

SEQ ID NO: 893517 - RNA, 19 nt, Artificial Sequence
  Description of Artificial Sequence: Synthetic oligonucleotide
  Antisense strand to SEQ ID NO: 893516
aauagagucagagauaacu

SEQ ID NO: 893518 - RNA, 19 nt, Artificial Sequence
  Description of Artificial Sequence: Synthetic oligonucleotide
  Sense strand starting at position 1445 of SEQ ID NO: 588841
agaguagugcccuaaacug

SEQ ID NO: 893519 - RNA, 19 nt, Artificial Sequence
  Description of Artificial Sequence: Synthetic oligonucleotide
  Antisense strand to SEQ ID NO: 893518
caguuuagggcacuacucu

SEQ ID NO: 893520 - RNA, 19 nt, Artificial Sequence
  Description of Artificial Sequence: Synthetic oligonucleotide
  Sense strand starting at position 2076 of SEQ ID NO: 588841
acgauaugccuguagacag

SEQ ID NO: 893521 - RNA, 19 nt, Artificial Sequence
  Description of Artificial Sequence: Synthetic oligonucleotide
  Antisense strand to SEQ ID NO: 893520
cugucuacaggcauaucgu

SEQ ID NO: 893522 - RNA, 19 nt, Artificial Sequence
  Description of Artificial Sequence: Synthetic oligonucleotide
  Sense strand starting at position 2253 of SEQ ID NO: 588841
acagauuugcgcugaugug

SEQ ID NO: 893523 - RNA, 19 nt, Artificial Sequence
  Description of Artificial Sequence: Synthetic oligonucleotide
  Antisense strand to SEQ ID NO: 893522
cacaucagcgcaaaucugu

SEQ ID NO: 893524 - RNA, 19 nt, Artificial Sequence
  Description of Artificial Sequence: Synthetic oligonucleotide
  Sense strand starting at position 2263 of SEQ ID NO: 588841
gcugauguggccuaacuga

SEQ ID NO: 893525 - RNA, 19 nt, Artificial Sequence
  Description of Artificial Sequence: Synthetic oligonucleotide
  Antisense strand to SEQ ID NO: 893524
ucaguuaggccacaucagc

SEQ ID NO: 893526 - RNA, 19 nt, Artificial Sequence
  Description of Artificial Sequence: Synthetic oligonucleotide
  Sense strand starting at position 2828 of SEQ ID NO: 588841
ccugucugcgguucgcaaa

SEQ ID NO: 893527 - RNA, 19 nt, Artificial Sequence
  Description of Artificial Sequence: Synthetic oligonucleotide
  Antisense strand to SEQ ID NO: 893526
uuugcgaaccgcagacagg

SEQ ID NO: 893528 - RNA, 19 nt, Artificial Sequence
  Description of Artificial Sequence: Synthetic oligonucleotide
  Sense strand starting at position 3014 of SEQ ID NO: 588841
gggugauuccgagguagau

SEQ ID NO: 893529 - RNA, 19 nt, Artificial Sequence
  Description of Artificial Sequence: Synthetic oligonucleotide
  Antisense strand to SEQ ID NO: 893528
aucuaccucggaaucaccc

SEQ ID NO: 893530 - RNA, 19 nt, Artificial Sequence
  Description of Artificial Sequence: Synthetic oligonucleotide
  Sense strand starting at position 3016 of SEQ ID NO: 588841
gugauuccgagguagauag

SEQ ID NO: 893531 - RNA, 19 nt, Artificial Sequence
  Description of Artificial Sequence: Synthetic oligonucleotide
  Antisense strand to SEQ ID NO: 893530
cuaucuaccucggaaucac

SEQ ID NO: 893532 - RNA, 19 nt, Artificial Sequence
  Description of Artificial Sequence: Synthetic oligonucleotide
  Sense strand starting at position 3046 of SEQ ID NO: 588841
cugagaaacgcugguauua
